United States Patent Application Publication US 2009/0123928 A1 - sequence listing, part 2

SEQ ID NO: 32527 - DNA, 38 bp, Artificial Sequence
  primer
gtaaaacgacggccagtctttggagctcatccttggac

SEQ ID NO: 32528 - DNA, 37 bp, Artificial Sequence
  primer
gtaaaacgacggccagtgacagcacagtcccttcagc

SEQ ID NO: 32529 - DNA, 18 bp, Artificial Sequence
  primer
cactgcagaggtcctggc

SEQ ID NO: 32530 - DNA, 38 bp, Artificial Sequence
  primer
gtaaaacgacggccagtatcaaggaactagacggcagc

SEQ ID NO: 32531 - DNA, 21 bp, Artificial Sequence
  primer
gacaagtatggcatcgtggtg

SEQ ID NO: 32532 - DNA, 21 bp, Artificial Sequence
  primer
cagagggtttacaggcaggag

SEQ ID NO: 32533 - DNA, 21 bp, Artificial Sequence
  primer
actcgtggaaaccggttaatg

SEQ ID NO: 32534 - DNA, 21 bp, Artificial Sequence
  primer
cccaggaaggaagagatgaag

SEQ ID NO: 32535 - DNA, 21 bp, Artificial Sequence
  primer
aggttagtcccaccctcttcg

SEQ ID NO: 32536 - DNA, 24 bp, Artificial Sequence
  primer
tgccagtaaaccctgttatctttc

SEQ ID NO: 32537 - DNA, 38 bp, Artificial Sequence
  primer
gtaaaacgacggccagttgctggcttaatgctctcaac

SEQ ID NO: 32538 - DNA, 38 bp, Artificial Sequence
  primer
gtaaaacgacggccagttagcaaacgtcaccttggatg

SEQ ID NO: 32539 - DNA, 21 bp, Artificial Sequence
  primer
cagtgtgggcagcatagagac

SEQ ID NO: 32540 - DNA, 38 bp, Artificial Sequence
  primer
gtaaaacgacggccagtgtcgttcgtgtctgttgaacg

SEQ ID NO: 32541 - DNA, 24 bp, Artificial Sequence
  primer
gaaagtttccctatctttctccaa

SEQ ID NO: 32542 - DNA, 43 bp, Artificial Sequence
  primer
gtaaaacgacggccagttgaagaacaattacactatcactgct

SEQ ID NO: 32543 - DNA, 27 bp, Artificial Sequence
  primer
gacagtcacagctttaattctcatcta

SEQ ID NO: 32544 - DNA, 43 bp, Artificial Sequence
  primer
gtaaaacgacggccagttgttccacttcctaacaaagaagtaa

SEQ ID NO: 32545 - DNA, 21 bp, Artificial Sequence
  primer
ggaaggaggtgaatctctggg

SEQ ID NO: 32546 - DNA, 38 bp, Artificial Sequence
  primer
gtaaaacgacggccagttcagctttaagacctgctggg

SEQ ID NO: 32547 - DNA, 38 bp, Artificial Sequence
  primer
gtaaaacgacggccagtaaattggaggctcactccttg

SEQ ID NO: 32548 - DNA, 38 bp, Artificial Sequence
  primer
gtaaaacgacggccagtactgcctggtggtaagcattc

SEQ ID NO: 32549 - DNA, 38 bp, Artificial Sequence
  primer
gtaaaacgacggccagttatgtgtcaagcgtcctctgg

SEQ ID NO: 32550 - DNA, 21 bp, Artificial Sequence
  primer
gctacaagagtcagggccaac

SEQ ID NO: 32551 - DNA, 36 bp, Artificial Sequence
  primer
gtaaaacgacggccagtctgagaaggtgccactccc

SEQ ID NO: 32552 - DNA, 37 bp, Artificial Sequence
  primer
gtaaaacgacggccagtgagggttgggtagctgtgtg

SEQ ID NO: 32553 - DNA, 38 bp, Artificial Sequence
  primer
gtaaaacgacggccagtctcctcccaatctccctgaag

SEQ ID NO: 32554 - DNA, 38 bp, Artificial Sequence
  primer
gtaaaacgacggccagttctcacatgttgtctgggagg

SEQ ID NO: 32555 - DNA, 38 bp, Artificial Sequence
  primer
gtaaaacgacggccagtgtcctaatttgcacagcctgg

SEQ ID NO: 32556 - DNA, 21 bp, Artificial Sequence
  primer
ccctcagtggaaagaatcagg

SEQ ID NO: 32557 - DNA, 20 bp, Artificial Sequence
  primer
gagacagaagcactggctgc

SEQ ID NO: 32558 - DNA, 38 bp, Artificial Sequence
  primer
gtaaaacgacggccagtcggagtgggttggatgtattt

SEQ ID NO: 32559 - DNA, 38 bp, Artificial Sequence
  primer
gtaaaacgacggccagttcctcagaagcacttgctcac

SEQ ID NO: 32560 - DNA, 21 bp, Artificial Sequence
  primer
tcttcgacatcatcaaccctg

SEQ ID NO: 32561 - DNA, 38 bp, Artificial Sequence
  primer
gtaaaacgacggccagtgtctctccctagagctttgcc

SEQ ID NO: 32562 - DNA, 39 bp, Artificial Sequence
  primer
gtaaaacgacggccagtgaacgtagggtagtcttcaggg

SEQ ID NO: 32563 - DNA, 21 bp, Artificial Sequence
  primer
gggattgggagagggataact

SEQ ID NO: 32564 - DNA, 22 bp, Artificial Sequence
  primer
tgagccaagattgtgttactgc

SEQ ID NO: 32565 - DNA, 38 bp, Artificial Sequence
  primer
gtaaaacgacggccagttccagaatttattggaagccg

SEQ ID NO: 32566 - DNA, 37 bp, Artificial Sequence
  primer
gtaaaacgacggccagttccacaccaggaaggaaatg

SEQ ID NO: 32567 - DNA, 38 bp, Artificial Sequence
  primer
gtaaaacgacggccagtcactctcggcaccatttactg

SEQ ID NO: 32568 - DNA, 40 bp, Artificial Sequence
  primer
gtaaaacgacggccagtcaattcttggaagaggagaactg

SEQ ID NO: 32569 - DNA, 46 bp, Artificial Sequence
  primer
gtaaaacgacggccagtgagagaaatttagatagacctgtgactgt

SEQ ID NO: 32570 - DNA, 24 bp, Artificial Sequence
  primer
tgaaataatggctttgctatgttt

SEQ ID NO: 32571 - DNA, 37 bp, Artificial Sequence
  primer
gtaaaacgacggccagtggacactcagaatggcatcg

SEQ ID NO: 32572 - DNA, 41 bp, Artificial Sequence
  primer
gtaaaacgacggccagtaatttcctccaatcttatcctgag

SEQ ID NO: 32573 - DNA, 39 bp, Artificial Sequence
  primer
gtaaaacgacggccagtcctgatggaaacaacatttctg

SEQ ID NO: 32574 - DNA, 42 bp, Artificial Sequence
  primer
gtaaaacgacggccagttgctaaggacaaataaataacaccc

SEQ ID NO: 32575 - DNA, 40 bp, Artificial Sequence
  primer
gtaaaacgacggccagtttgacctagaaaccctaatggaa

SEQ ID NO: 32576 - DNA, 43 bp, Artificial Sequence
  primer
gtaaaacgacggccagtttgtgcaaacctttgttagtaacttt

SEQ ID NO: 32577 - DNA, 40 bp, Artificial Sequence
  primer
gtaaaacgacggccagtttgaatgcttatggttatccagg

SEQ ID NO: 32578 - DNA, 44 bp, Artificial Sequence
  primer
gtaaaacgacggccagttttcttcttagaatgggaaatactcag

SEQ ID NO: 32579 - DNA, 24 bp, Artificial Sequence
  primer
tctgtatgacccaatatcaacctc

SEQ ID NO: 32580 - DNA, 40 bp, Artificial Sequence
  primer
gtaaaacgacggccagtccattcttgattgtttaggatgc

SEQ ID NO: 32581 - DNA, 25 bp, Artificial Sequence
  primer
ggacaactttaccagtgtgtattgg

SEQ ID NO: 32582 - DNA, 41 bp, Artificial Sequence
  primer
gtaaaacgacggccagtgcaatgtgatcaggaataacttgg

SEQ ID NO: 32583 - DNA, 26 bp, Artificial Sequence
  primer
gaaagtctatgagaatacaagccaaa

SEQ ID NO: 32584 - DNA, 22 bp, Artificial Sequence
  primer
ggtggaggaatatatctttgcg

SEQ ID NO: 32585 - DNA, 22 bp, Artificial Sequence
  primer
tcagttggtgacagtccgatag

SEQ ID NO: 32586 - DNA, 22 bp, Artificial Sequence
  primer
atctcaattgctacggctacca

SEQ ID NO: 32587 - DNA, 22 bp, Artificial Sequence
  primer
tccaggactcatttctttcacc

SEQ ID NO: 32588 - DNA, 45 bp, Artificial Sequence
  primer
gtaaaacgacggccagtcctgaaccatcatataacattctacttg

SEQ ID NO: 32589 - DNA, 22 bp, Artificial Sequence
  primer
gaagacaatgcaggagagttca

SEQ ID NO: 32590 - DNA, 38 bp, Artificial Sequence
  primer
gtaaaacgacggccagtaccagagtgagccacttcacc

SEQ ID NO: 32591 - DNA, 27 bp, Artificial Sequence
  primer
ttcgtcttgaaacatatttgtaactgt

SEQ ID NO: 32592 - DNA, 23 bp, Artificial Sequence
  primer
aaagtgctgtgtttgtatttgcc

SEQ ID NO: 32593 - DNA, 23 bp, Artificial Sequence
  primer
catagtcggtttggacagtgttt

SEQ ID NO: 32594 - DNA, 38 bp, Artificial Sequence
  primer
gtaaaacgacggccagtttcacacaaccctccatgaac

SEQ ID NO: 32595 - DNA, 44 bp, Artificial Sequence
  primer
gtaaaacgacggccagtaattagtacactggaaagcatttaagc

SEQ ID NO: 32596 - DNA, 38 bp, Artificial Sequence
  primer
gtaaaacgacggccagtacggtagcatgacccaaattc

SEQ ID NO: 32597 - DNA, 21 bp, Artificial Sequence
  primer
cagtttcccaatttgcctgag

SEQ ID NO: 32598 - DNA, 39 bp, Artificial Sequence
  primer
gtaaaacgacggccagtggaaacgaatgcagtcaataca

SEQ ID NO: 32599 - DNA, 28 bp, Artificial Sequence
  primer
aaacaggacagttactattactttgcac

SEQ ID NO: 32600 - DNA, 21 bp, Artificial Sequence
  primer
cctgtcattcaaagatgggat

SEQ ID NO: 32601 - DNA, 24 bp, Artificial Sequence
  primer
tcctgaaacactaccctattgagc

SEQ ID NO: 32602 - DNA, 44 bp, Artificial Sequence
  primer
gtaaaacgacggccagtttaattatttgaatttccagacacctt

SEQ ID NO: 32603 - DNA, 46 bp, Artificial Sequence
  primer
gtaaaacgacggccagtttcttaaatgcaatttcactattctatga

SEQ ID NO: 32604 - DNA, 22 bp, Artificial Sequence
  primer
ggacactggagagcatttaagc

SEQ ID NO: 32605 - DNA, 38 bp, Artificial Sequence
  primer
gtaaaacgacggccagttaccagcttgagccacttcac

SEQ ID NO: 32606 - DNA, 21 bp, Artificial Sequence
  primer
aaagtgccttgtttgcatttg

SEQ ID NO: 32607 - DNA, 28 bp, Artificial Sequence
  primer
cctcaaccatcatataacattctacttg

SEQ ID NO: 32608 - DNA, 24 bp, Artificial Sequence
  primer
ccactaactggaattattgaagca

SEQ ID NO: 32609 - DNA, 26 bp, Artificial Sequence
  primer
caggatcaggaaactagttatggttg

SEQ ID NO: 32610 - DNA, 42 bp, Artificial Sequence
  primer
gtaaaacgacggccagttttggatgtttatgcgatcttattt

SEQ ID NO: 32611 - DNA, 38 bp, Artificial Sequence
  primer
gtaaaacgacggccagtttccctgtgttcaacatttcc

SEQ ID NO: 32612 - DNA, 21 bp, Artificial Sequence
  primer
gatctctgctgtgatgttggg

SEQ ID NO: 32613 - DNA, 21 bp, Artificial Sequence
  primer
agctcactaatcaaccagggc

SEQ ID NO: 32614 - DNA, 39 bp, Artificial Sequence
  primer
gtaaaacgacggccagtacaagcaatgaaaccttgtgag

SEQ ID NO: 32615 - DNA, 38 bp, Artificial Sequence
  primer
gtaaaacgacggccagtccctgtgtcttcaacatttcc

SEQ ID NO: 32616 - DNA, 38 bp, Artificial Sequence
  primer
gtaaaacgacggccagttccctacaatgggactttctt

SEQ ID NO: 32617 - DNA, 39 bp, Artificial Sequence
  primer
gtaaaacgacggccagtgatgatctctgctgtgacgttg

SEQ ID NO: 32618 - DNA, 21 bp, Artificial Sequence
  primer
ctattggtcacctccctcagc

SEQ ID NO: 32619 - DNA, 38 bp, Artificial Sequence
  primer
gtaaaacgacggccagttcctcatctgtactgtgggct

SEQ ID NO: 32620 - DNA, 24 bp, Artificial Sequence
  primer
ccgctgacacataataaatactcg

SEQ ID NO: 32621 - DNA, 21 bp, Artificial Sequence
  primer
tcttgcccaagctgtaactcc

SEQ ID NO: 32622 - DNA, 21 bp, Artificial Sequence
  primer
cctccataagccaggtttgac

SEQ ID NO: 32623 - DNA, 39 bp, Artificial Sequence
  primer
gtaaaacgacggccagttgtggagaccaaagtgatgaac

SEQ ID NO: 32624 - DNA, 24 bp, Artificial Sequence
  primer
aaacagaaataaggtgcaatggtt

SEQ ID NO: 32625 - DNA, 39 bp, Artificial Sequence
  primer
gtaaaacgacggccagtaaataagatgacatgccttggg

SEQ ID NO: 32626 - DNA, 21 bp, Artificial Sequence
  primer
gcctgtcttgtactggctgtg

SEQ ID NO: 32627 - DNA, 20 bp, Artificial Sequence
  primer
aagtcacaatgcaactgccc

SEQ ID NO: 32628 - DNA, 21 bp, Artificial Sequence
  primer
gcttcatgacagcaagcattt

SEQ ID NO: 32629 - DNA, 39 bp, Artificial Sequence
  primer
gtaaaacgacggccagtacaccctttcataatcccaatg

SEQ ID NO: 32630 - DNA, 38 bp, Artificial Sequence
  primer
gtaaaacgacggccagtttgttaaatgccatggaggag

SEQ ID NO: 32631 - DNA, 37 bp, Artificial Sequence
  primer
gtaaaacgacggccagtggaagactccgttacccagc

SEQ ID NO: 32632 - DNA, 19 bp, Artificial Sequence
  primer
actcgggacgtggactgag

SEQ ID NO: 32633 - DNA, 21 bp, Artificial Sequence
  primer
tcatgatgggaacttctgtgg

SEQ ID NO: 32634 - DNA, 38 bp, Artificial Sequence
  primer
gtaaaacgacggccagtttgttccttccatctgctttg

SEQ ID NO: 32635 - DNA, 38 bp, Artificial Sequence
  primer
gtaaaacgacggccagttaagaaggatgaatgggcagg

SEQ ID NO: 32636 - DNA, 35 bp, Artificial Sequence
  primer
gtaaaacgacggccagtccctccttctcctcccag

SEQ ID NO: 32637 - DNA, 44 bp, Artificial Sequence
  primer
gtaaaacgacggccagtgagtcttctctaggcaaacagtaattt

SEQ ID NO: 32638 - DNA, 21 bp, Artificial Sequence
  primer
tctgaatgattgccgatatgc

SEQ ID NO: 32639 - DNA, 38 bp, Artificial Sequence
  primer
gtaaaacgacggccagttctgtagggctcctgaaagtg

SEQ ID NO: 32640 - DNA, 38 bp, Artificial Sequence
  primer
gtaaaacgacggccagtaatgaagttgactgcctgctg

SEQ ID NO: 32641 - DNA, 39 bp, Artificial Sequence
  primer
gtaaaacgacggccagtggagggacatatttacacaggg

SEQ ID NO: 32642 - DNA, 21 bp, Artificial Sequence
  primer
tcttgggctcaagcagtcttc

SEQ ID NO: 32643 - DNA, 38 bp, Artificial Sequence
  primer
gtaaaacgacggccagttgattgaccttggactgaacc

SEQ ID NO: 32644 - DNA, 41 bp, Artificial Sequence
  primer
gtaaaacgacggccagtcgggatttatggagttaacagctc

SEQ ID NO: 32645 - DNA, 21 bp, Artificial Sequence
  primer
gtgtgaggttgaaaccttggg

SEQ ID NO: 32646 - DNA, 21 bp, Artificial Sequence
  primer
gagtgactcacctgccaaagg

SEQ ID NO: 32647 - DNA, 21 bp, Artificial Sequence
  primer
tgtggttcttgttccaactgc

SEQ ID NO: 32648 - DNA, 21 bp, Artificial Sequence
  primer
tgggagattcatgcccttatc

SEQ ID NO: 32649 - DNA, 38 bp, Artificial Sequence
  primer
gtaaaacgacggccagtcatttgctaagcagcttgtgg

SEQ ID NO: 32650 - DNA, 20 bp, Artificial Sequence
  primer
tttaacctgggcagtgaagg

SEQ ID NO: 32651 - DNA, 39 bp, Artificial Sequence
  primer
gtaaaacgacggccagtagcctgtaagagatgaagcctg

SEQ ID NO: 32652 - DNA, 21 bp, Artificial Sequence
  primer
ctggctgagtgtttggtgttg

SEQ ID NO: 32653 - DNA, 39 bp, Artificial Sequence
  primer
gtaaaacgacggccagttcttgtgttgaaattctcaggg

SEQ ID NO: 32654 - DNA, 27 bp, Artificial Sequence
  primer
tgccagtataatattgactgttgaaag

SEQ ID NO: 32655 - DNA, 37 bp, Artificial Sequence
  primer
gtaaaacgacggccagtgtgtgctcagaaccacgaag

SEQ ID NO: 32656 - DNA, 38 bp, Artificial Sequence
  primer
gtaaaacgacggccagtggcacataggaggcatttacc

SEQ ID NO: 32657 - DNA, 38 bp, Artificial Sequence
  primer
gtaaaacgacggccagttcttccattccaagatccctg

SEQ ID NO: 32658 - DNA, 21 bp, Artificial Sequence
  primer
tgatgaatcctagtgcttggc

SEQ ID NO: 32659 - DNA, 21 bp, Artificial Sequence
  primer
acagtgtaatggatcatgggc

SEQ ID NO: 32660 - DNA, 39 bp, Artificial Sequence
  primer
gtaaaacgacggccagtgcttaggatgataattggaggc

SEQ ID NO: 32661 - DNA, 39 bp, Artificial Sequence
  primer
gtaaaacgacggccagtggaagatgtgcctttcaaattc

SEQ ID NO: 32662 - DNA, 22 bp, Artificial Sequence
  primer
ttcagtgaatcgatgtggtgac

SEQ ID NO: 32663 - DNA, 37 bp, Artificial Sequence
  primer
gtaaaacgacggccagtcccgaggataaatgatttgc

SEQ ID NO: 32664 - DNA, 43 bp, Artificial Sequence
  primer
gtaaaacgacggccagtaaatggaacatttaaagaaagctgac

SEQ ID NO: 32665 - DNA, 23 bp, Artificial Sequence
  primer
ttctttcgaccaatttagtgcag

SEQ ID NO: 32666 - DNA, 43 bp, Artificial Sequence
  primer
gtaaaacgacggccagtgacattattctggctatagaatgaca

SEQ ID NO: 32667 - DNA, 20 bp, Artificial Sequence
  primer
ctggacccaggaacacaaag

SEQ ID NO: 32668 - DNA, 38 bp, Artificial Sequence
  primer
gtaaaacgacggccagtggttaagggtgcatgctcttc

SEQ ID NO: 32669 - DNA, 21 bp, Artificial Sequence
  primer
tatttgggttctgaatgcgtc

SEQ ID NO: 32670 - DNA, 38 bp, Artificial Sequence
  primer
gtaaaacgacggccagttcactgacacactttgtccac

SEQ ID NO: 32671 - DNA, 38 bp, Artificial Sequence
  primer
gtaaaacgacggccagtaaagaatggcaccagtgtgaa

SEQ ID NO: 32672 - DNA, 42 bp, Artificial Sequence
  primer
gtaaaacgacggccagtcaacactttcctaatattcaatcgc

SEQ ID NO: 32673 - DNA, 21 bp, Artificial Sequence
  primer
agcccgacaaataaccaagtg

SEQ ID NO: 32674 - DNA, 39 bp, Artificial Sequence
  primer
gtaaaacgacggccagttgaaagtgtgcaacaaggtttg

SEQ ID NO: 32675 - DNA, 44 bp, Artificial Sequence
  primer
gtaaaacgacggccagttgagagaacttgatggtaagtacatgg

SEQ ID NO: 32676 - DNA, 38 bp, Artificial Sequence
  primer
gtaaaacgacggccagtttcaaatggtggcaggtagtg

SEQ ID NO: 32677 - DNA, 21 bp, Artificial Sequence
  primer
gctgattgtggctaacgctat

SEQ ID NO: 32678 - DNA, 38 bp, Artificial Sequence
  primer
gtaaaacgacggccagtgagcctgtgccagtttctgtc

SEQ ID NO: 32679 - DNA, 38 bp, Artificial Sequence
  primer
gtaaaacgacggccagtagagattacgctcaccttccc

SEQ ID NO: 32680 - DNA, 40 bp, Artificial Sequence
  primer
gtaaaacgacggccagtttaaatggcagcataaacattcc

SEQ ID NO: 32681 - DNA, 21 bp, Artificial Sequence
  primer
agctaggtcctgagaacaggg

SEQ ID NO: 32682 - DNA, 21 bp, Artificial Sequence
  primer
aaagcagggaggtcaagacac

SEQ ID NO: 32683 - DNA, 21 bp, Artificial Sequence
  primer
ctgtgctggcctcatagattc

SEQ ID NO: 32684 - DNA, 22 bp, Artificial Sequence
  primer
gcaggttgggagaaagtacagc

SEQ ID NO: 32685 - DNA, 38 bp, Artificial Sequence
  primer
gtaaaacgacggccagtcctggccttgtctacctcttg

SEQ ID NO: 32686 - DNA, 21 bp, Artificial Sequence
  primer
gggtatctcaggtcctctggg

SEQ ID NO: 32687 - DNA, 38 bp, Artificial Sequence
  primer
gtaaaacgacggccagtcctgagtctgagacctgtggg

SEQ ID NO: 32688 - DNA, 21 bp, Artificial Sequence
  primer
atcacaagaggctcatccctg

SEQ ID NO: 32689 - DNA, 21 bp, Artificial Sequence
  primer
gtctctgggtctttgtgggtg

SEQ ID NO: 32690 - DNA, 38 bp, Artificial Sequence; identical to SEQ ID NO: 32687
  primer

SEQ ID NO: 32691 - DNA, 18 bp, Artificial Sequence
  primer
ctgacgtcacccagtccc

SEQ ID NO: 32692 - DNA, 38 bp, Artificial Sequence
  primer
gtaaaacgacggccagtgaataggagatgccacgaagg

SEQ ID NO: 32693 - DNA, 37 bp, Artificial Sequence
  primer
gtaaaacgacggccagtgaacagagggcttcctggac

SEQ ID NO: 32694 - DNA, 21 bp, Artificial Sequence
  primer
ccagcatcctacaacctcctg

SEQ ID NO: 32695 - DNA, 20 bp, Artificial Sequence
  primer
tctttctggaggagcgtgac

SEQ ID NO: 32696 - DNA, 38 bp, Artificial Sequence; identical to SEQ ID NO: 32687
  primer

SEQ ID NO: 32697 - DNA, 21 bp, Artificial Sequence
  primer
cctggccttgtctacttctcg

SEQ ID NO: 32698 - DNA, 37 bp, Artificial Sequence
  primer
gtaaaacgacggccagtctttgtgggtggtgtaccct

SEQ ID NO: 32699 - DNA, 38 bp, Artificial Sequence; identical to SEQ ID NO: 32687
  primer

SEQ ID NO: 32700 - DNA, 38 bp, Artificial Sequence
  primer
gtaaaacgacggccagtagctcactccagcatcctaca

SEQ ID NO: 32701 - DNA, 21 bp, Artificial Sequence
  primer
gtctctgggtctttgtgggtg

SEQ ID NO: 32702 - DNA, 35 bp, Artificial Sequence
  primer
gtaaaacgacggccagtgtgtgggagggcaggaac

SEQ ID NO: 32703 - DNA, 21 bp, Artificial Sequence
  primer
gacctgattgcgactggttag

SEQ ID NO: 32704 - DNA, 20 bp, Artificial Sequence
  primer
gagctgcatgaagatggagg

SEQ ID NO: 32705 - DNA, 22 bp, Artificial Sequence
  primer
caacagtactgcgcaaacagag

SEQ ID NO: 32706 - DNA, 38 bp, Artificial Sequence
  primer
gtaaaacgacggccagttccaacttccgctcaaagaag

SEQ ID NO: 32707 - DNA, 21 bp, Artificial Sequence
  primer
aatgctgctgatcatccattg

SEQ ID NO: 32708 - DNA, 38 bp, Artificial Sequence
  primer
gtaaaacgacggccagtacttgagtggctgatggactg

SEQ ID NO: 32709 - DNA, 38 bp, Artificial Sequence
  primer
gtaaaacgacggccagttcttgggtaagaagcctttgg

SEQ ID NO: 32710 - DNA, 38 bp, Artificial Sequence
  primer
gtaaaacgacggccagtttgggtaagaagcctttggaa

SEQ ID NO: 32711 - DNA, 38 bp, Artificial Sequence
  primer
gtaaaacgacggccagtactgtcacctccaaagcaatc

SEQ ID NO: 32712 - DNA, 21 bp, Artificial Sequence
  primer
ggactcactgagggtttacgg

SEQ ID NO: 32713 - DNA, 37 bp, Artificial Sequence
  primer
gtaaaacgacggccagtttgacaggccagagcatttc

SEQ ID NO: 32714 - DNA, 40 bp, Artificial Sequence
  primer
gtaaaacgacggccagtcgcgtttcctagaaagaaatagc

SEQ ID NO: 32715 - DNA, 38 bp, Artificial Sequence
  primer
gtaaaacgacggccagtatactggaatggaatgggcag

SEQ ID NO: 32716 - DNA, 41 bp, Artificial Sequence
  primer
gtaaaacgacggccagtaaatcatcaagagaacctgtgttg

SEQ ID NO: 32717 - DNA, 37 bp, Artificial Sequence
  primer
gtaaaacgacggccagtaactctgggctagacgaccc

SEQ ID NO: 32718 - DNA, 20 bp, Artificial Sequence
  primer
acaggcagagctccaggaag

SEQ ID NO: 32719 - DNA, 21 bp, Artificial Sequence
  primer
acaggctctcgaagctaaacc

SEQ ID NO: 32720 - DNA, 39 bp, Artificial Sequence
  primer
gtaaaacgacggccagtttatcccgttctttcctttgag

SEQ ID NO: 32721 - DNA, 46 bp, Artificial Sequence
  primer
gtaaaacgacggccagtaaagtaagtcgatttataatttctcttgg

SEQ ID NO: 32722 - DNA, 26 bp, Artificial Sequence
  primer
tttcctgtacataagaaacatctcac

SEQ ID NO: 32723 - DNA, 38 bp, Artificial Sequence
  primer
gtaaaacgacggccagtaagcaaacaagggaagagctg

SEQ ID NO: 32724 - DNA, 38 bp, Artificial Sequence
  primer
gtaaaacgacggccagttgctcctttggataggtgttg

SEQ ID NO: 32725 - DNA, 21 bp, Artificial Sequence
  primer
atttagggtgtgggagccttt

SEQ ID NO: 32726 - DNA, 24 bp, Artificial Sequence
  primer
ttaatcaaactggttccttcagtt

SEQ ID NO: 32727 - DNA, 36 bp, Artificial Sequence
  primer
gtaaaacgacggccagtaaatcagtgcagccttgcc

SEQ ID NO: 32728 - DNA, 40 bp, Artificial Sequence
  primer
gtaaaacgacggccagtctgaacacatggtcagtacttgg

SEQ ID NO: 32729 - DNA, 22 bp, Artificial Sequence
  primer
gggatgacaacagaacaactca

SEQ ID NO: 32730 - DNA, 37 bp, Artificial Sequence
  primer
gtaaaacgacggccagtgatctacccaccttggcctc

SEQ ID NO: 32731 - DNA, 22 bp, Artificial Sequence
  primer
ggcagatcaggaaatgtttcag

SEQ ID NO: 32732 - DNA, 40 bp, Artificial Sequence
  primer
gtaaaacgacggccagttgaacccaataattgaatgagga

SEQ ID NO: 32733 - DNA, 38 bp, Artificial Sequence
  primer
gtaaaacgacggccagtttcagtcagctgaaggtcacg

SEQ ID NO: 32734 - DNA, 38 bp, Artificial Sequence
  primer
gtaaaacgacggccagttgctccagttcactaactgcc

SEQ ID NO: 32735 - DNA, 37 bp, Artificial Sequence
  primer
gtaaaacgacggccagttcatcgacgtgcagatcaac

SEQ ID NO: 32736 - DNA, 20 bp, Artificial Sequence
  primer
atgggtccttcaattctgcc

SEQ ID NO: 32737 - DNA, 20 bp, Artificial Sequence
  primer
gtgagtggctgacctcctcc

SEQ ID NO: 32738 - DNA, 19 bp, Artificial Sequence
  primer
cgatgccttccaggacttg

SEQ ID NO: 32739 - DNA, 38 bp, Artificial Sequence
  primer
gtaaaacgacggccagtaccttcatcacccacctcttc

SEQ ID NO: 32740 - DNA, 38 bp, Artificial Sequence
  primer
gtaaaacgacggccagtctatgggatgattgcagatgg

SEQ ID NO: 32741 - DNA, 38 bp, Artificial Sequence
  primer
gtaaaacgacggccagtaccagcagggtccttgttagc

SEQ ID NO: 32742 - DNA, 38 bp, Artificial Sequence
  primer
gtaaaacgacggccagttctgtccatctgtgatgggtc

SEQ ID NO: 32743 - DNA, 38 bp, Artificial Sequence
  primer
gtaaaacgacggccagtgggtgttgacattgtgctctc

SEQ ID NO: 32744 - DNA, 38 bp, Artificial Sequence
  primer
gtaaaacgacggccagtaggcacatttccggtctctat

SEQ ID NO: 32745 - DNA, 21 bp, Artificial Sequence
  primer
gagacccgtgtcatgtttgag

SEQ ID NO: 32746 - DNA, 38 bp, Artificial Sequence
  primer
gtaaaacgacggccagtcgaccgggtgtactatgtgag

SEQ ID NO: 32747 - DNA, 20 bp, Artificial Sequence
  primer
ggcaacttcctgcatttctg

SEQ ID NO: 32748 - DNA, 38 bp, Artificial Sequence
  primer
gtaaaacgacggccagtcgtctttgttatttccagccc

SEQ ID NO: 32749 - DNA, 38 bp, Artificial Sequence
  primer
gtaaaacgacggccagtgtagaggctgggatgttctgg

SEQ ID NO: 32750 - DNA, 21 bp, Artificial Sequence
  primer
acgcaattgcataatttgtgg

SEQ ID NO: 32751 - DNA, 35 bp, Artificial Sequence
  primer
gtaaaacgacggccagtgaatcgtggctgtgggtg

SEQ ID NO: 32752 - DNA, 21 bp, Artificial Sequence
  primer
gcctcaaatcttccactccag

SEQ ID NO: 32753 - DNA, 39 bp, Artificial Sequence
  primer
gtaaaacgacggccagtcaggcaatgaggtgtgtagttg

SEQ ID NO: 32754 - DNA, 38 bp, Artificial Sequence
  primer
gtaaaacgacggccagttctcataaggtcttcctgggc

SEQ ID NO: 32755 - DNA, 39 bp, Artificial Sequence
  primer
gtaaaacgacggccagtaaatctgtcttcacatccaggg

SEQ ID NO: 32756 - DNA, 21 bp, Artificial Sequence
  primer
atagaacacctggaaggcagg

SEQ ID NO: 32757 - DNA, 38 bp, Artificial Sequence
  primer
gtaaaacgacggccagtccaccttatctcccacattcc

SEQ ID NO: 32758 - DNA, 21 bp, Artificial Sequence
  primer
tgtgtgaggagcttctgcttc

SEQ ID NO: 32759 - DNA, 21 bp, Artificial Sequence
  primer
cctgggctacgtagagagacc

SEQ ID NO: 32760 - DNA, 38 bp, Artificial Sequence
  primer
gtaaaacgacggccagtgtgttccttatggagaacggg

SEQ ID NO: 32761 - DNA, 38 bp, Artificial Sequence
  primer
gtaaaacgacggccagtataaggaccaatgagcgaagg

SEQ ID NO: 32762 - DNA, 21 bp, Artificial Sequence
  primer
actccctggtccctattcctg

SEQ ID NO: 32763 - DNA, 22 bp, Artificial Sequence
  primer
ggctggagaggatttgtagctc

SEQ ID NO: 32764 - DNA, 21 bp, Artificial Sequence
  primer
atggtaaactaccagcctcgc

SEQ ID NO: 32765 - DNA, 21 bp, Artificial Sequence
  primer
tgtgctcagccctgtttattg

SEQ ID NO: 32766 - DNA, 21 bp, Artificial Sequence
  primer
ggtttgaatgcaggatgtgag

SEQ ID NO: 32767 - DNA, 21 bp, Artificial Sequence
  primer
ccctacgggcgtagtgttaag

SEQ ID NO: 32768 - DNA, 21 bp, Artificial Sequence
  primer
ctttgtccttcttccctctgg

SEQ ID NO: 32769 - DNA, 38 bp, Artificial Sequence
  primer
gtaaaacgacggccagtgtcaccctcacttcctccaag

SEQ ID NO: 32770 - DNA, 21 bp, Artificial Sequence
  primer
ctgtccgcaacaattaggatg

SEQ ID NO: 32771 - DNA, 38 bp, Artificial Sequence
  primer
gtaaaacgacggccagtgccagttgctagttgctgatg

SEQ ID NO: 32772 - DNA, 21 bp, Artificial Sequence
  primer
tccaaagtttgcagtgtctcc

SEQ ID NO: 32773 - DNA, 42 bp, Artificial Sequence
  primer
gtaaaacgacggccagtgaaatcttgcttctgtaagttgtgg

SEQ ID NO: 32774 - DNA, 36 bp, Artificial Sequence
  primer
gtaaaacgacggccagtcagggcttgtctgggagag

SEQ ID NO: 32775 - DNA, 38 bp, Artificial Sequence
  primer
gtaaaacgacggccagtattctccgagggcttaaccag

SEQ ID NO: 32776 - DNA, 37 bp, Artificial Sequence
  primer
gtaaaacgacggccagtctgggttgctacagccagag

SEQ ID NO: 32777 - DNA, 25 bp, Artificial Sequence
  primer
tcatgactcctccatatttatcctg

SEQ ID NO: 32778 - DNA, 39 bp, Artificial Sequence
  primer
gtaaaacgacggccagtaacatttggttaaggcaaggtg

SEQ ID NO: 32779 - DNA, 44 bp, Artificial Sequence
  primer
gtaaaacgacggccagttttgagaaggatatcatttaaggactc

SEQ ID NO: 32780 - DNA, 21 bp, Artificial Sequence
  primer
tggaagtcatgtaccagcaga

SEQ ID NO: 32781 - DNA, 39 bp, Artificial Sequence
  primer
gtaaaacgacggccagtggctgaaatcctaaacccaaag

SEQ ID NO: 32782 - DNA, 24 bp, Artificial Sequence
  primer
agcattgtttcctttgttagatgc

SEQ ID NO: 32783 - DNA, 46 bp, Artificial Sequence
  primer
gtaaaacgacggccagttctagtcatgtgaataggtaatttgagaa

SEQ ID NO: 32784 - DNA, 38 bp, Artificial Sequence
  primer
gtaaaacgacggccagttttctccagggttatgggttg

SEQ ID NO: 32785 - DNA, 37 bp, Artificial Sequence
  primer
gtaaaacgacggccagtaaagtctcacagtggcccag

SEQ ID NO: 32786 - DNA, 21 bp, Artificial Sequence
  primer
gaagcttcaagatggctgacc

SEQ ID NO: 32787 - DNA, 38 bp, Artificial Sequence
  primer
gtaaaacgacggccagtgattgtgccactatgctccag

SEQ ID NO: 32788 - DNA, 20 bp, Artificial Sequence
  primer
acctgcaccagaacatccac

SEQ ID NO: 32789 - DNA, 38 bp, Artificial Sequence
  primer
gtaaaacgacggccagtcaaagtgctggctgggattac

SEQ ID NO: 32790 - DNA, 20 bp, Artificial Sequence
  primer
cctttgctccctgttgaatg

SEQ ID NO: 32791 - DNA, 20 bp, Artificial Sequence
  primer
cctttgacctccctctgtcc

SEQ ID NO: 32792 - DNA, 38 bp, Artificial Sequence
  primer
gtaaaacgacggccagtagcctgcatgtagcagacaag

SEQ ID NO: 32793 - DNA, 38 bp, Artificial Sequence
  primer
gtaaaacgacggccagtcaagagccatctgggaggtag

SEQ ID NO: 32794 - DNA, 38 bp, Artificial Sequence
  primer
gtaaaacgacggccagtccctttgacgtggtaaagacc

SEQ ID NO: 32795 - DNA, 38 bp, Artificial Sequence
  primer
gtaaaacgacggccagttctttgcaggtcagtgtgtgg

SEQ ID NO: 32796 - DNA, 38 bp, Artificial Sequence
  primer
gtaaaacgacggccagtctttgcagtggctttgcttag

SEQ ID NO: 32797 - DNA, 37 bp, Artificial Sequence
  primer
gtaaaacgacggccagtctgtacccttcgcccgttac

SEQ ID NO: 32798 - DNA, 36 bp, Artificial Sequence
  primer
gtaaaacgacggccagtggaaggaaagcatgcaggg

SEQ ID NO: 32799 - DNA, 39 bp, Artificial Sequence
  primer
gtaaaacgacggccagtagacctttacatttcccttccc

SEQ ID NO: 32800 - DNA, 39 bp, Artificial Sequence
  primer
gtaaaacgacggccagtgtgaattaagtttggacctggg

SEQ ID NO: 32801 - DNA, 38 bp, Artificial Sequence
  primer
gtaaaacgacggccagttgtacagtggtgaacacagcg

SEQ ID NO: 32802 - DNA, 21 bp, Artificial Sequence
  primer
accagatcttgctgactgctg

SEQ ID NO: 32803 - DNA, 38 bp, Artificial Sequence
  primer
gtaaaacgacggccagttccggataggttgcttagagg

SEQ ID NO: 32804 - DNA, 38 bp, Artificial Sequence
  primer
gtaaaacgacggccagtcttgtgacctgtctggtgctg

SEQ ID NO: 32805 - DNA, 21 bp, Artificial Sequence
  primer
gtgtccagatccagtcagtgc

SEQ ID NO: 32806 - DNA, 21 bp, Artificial Sequence
  primer
ttgtctttgttctagccgtgc

SEQ ID NO: 32807 - DNA, 21 bp, Artificial Sequence
  primer
aagtgcctagcccaatacctg

SEQ ID NO: 32808 - DNA, 38 bp, Artificial Sequence
  primer
gtaaaacgacggccagtttctgggacagtctaccatgc

SEQ ID NO: 32809 - DNA, 38 bp, Artificial Sequence
  primer
gtaaaacgacggccagtggcaacgttattgttaccacg

SEQ ID NO: 32810 - DNA, 38 bp, Artificial Sequence
  primer
gtaaaacgacggccagtagtagggctgtgtccgttctc

SEQ ID NO: 32811 - DNA, 38 bp, Artificial Sequence
  primer
gtaaaacgacggccagtgctgatttatctctgagcgga

SEQ ID NO: 32812 - DNA, 37 bp, Artificial Sequence
  primer
gtaaaacgacggccagtttgtgtgagtgtctcgctgg

SEQ ID NO: 32813 - DNA, 21 bp, Artificial Sequence
  primer
caacctccatattgtccctgg

SEQ ID NO: 32814 - DNA, 37 bp, Artificial Sequence
  primer
gtaaaacgacggccagtcgcagaagcaggattactgg

SEQ ID NO: 32815 - DNA, 38 bp, Artificial Sequence
  primer
gtaaaacgacggccagtctgggatctccttagcacctg

SEQ ID NO: 32816 - DNA, 21 bp, Artificial Sequence
  primer
ctcagggcagttctgactttg

SEQ ID NO: 32817 - DNA, 20 bp, Artificial Sequence
  primer
cacagtaactgggaggaggg

SEQ ID NO: 32818 - DNA, 21 bp, Artificial Sequence
  primer
ctggaggttaggtccagcaac

SEQ ID NO: 32819 - DNA, 38 bp, Artificial Sequence
  primer
gtaaaacgacggccagtagctaaggatgcaagagccag

SEQ ID NO: 32820 - DNA, 42 bp, Artificial Sequence
  primer
gtaaaacgacggccagtggactcactcatcaacaagtttgac

SEQ ID NO: 32821 - DNA, 18 bp, Artificial Sequence
  primer
tgaacagcgcaaacggag

SEQ ID NO: 32822 - DNA, 21 bp, Artificial Sequence
  primer
ttgttcatcatgcttgaaggg

SEQ ID NO: 32823 - DNA, 38 bp, Artificial Sequence
  primer
gtaaaacgacggccagtctttgtttcccatcttccctg

SEQ ID NO: 32824 - DNA, 21 bp, Artificial Sequence
  primer
ggaaggttagtttggtgctgg

SEQ ID NO: 32825 - DNA, 40 bp, Artificial Sequence
  primer
gtaaaacgacggccagttccaatgagtgttagacattccc

SEQ ID NO: 32826 - DNA, 21 bp, Artificial Sequence
  primer
cagggtaaggcagatcaggag

SEQ ID NO: 32827 - DNA, 39 bp, Artificial Sequence
  primer
gtaaaacgacggccagtggaaacctatcattctgggctc

SEQ ID NO: 32828 - DNA, 38 bp, Artificial Sequence
  primer
gtaaaacgacggccagtcctctgggtctaagcctttcc

SEQ ID NO: 32829 - DNA, 38 bp, Artificial Sequence
  primer
gtaaaacgacggccagtttcctcttgagagttggtgcc

SEQ ID NO: 32830 - DNA, 38 bp, Artificial Sequence
  primer
gtaaaacgacggccagtttcagcttctccacattcagg

SEQ ID NO: 32831 - DNA, 37 bp, Artificial Sequence
  primer
gtaaaacgacggccagttcttatgggctgtctttggg

SEQ ID NO: 32832 - DNA, 38 bp, Artificial Sequence
  primer
gtaaaacgacggccagtagctacccacctccaaatgac

SEQ ID NO: 32833 - DNA, 37 bp, Artificial Sequence
  primer
gtaaaacgacggccagtagagtcttgggagtctgggc

SEQ ID NO: 32834 - DNA, 38 bp, Artificial Sequence
  primer
gtaaaacgacggccagttgatgaaatgtttctgcccac

SEQ ID NO: 32835 - DNA, 38 bp, Artificial Sequence
  primer
gtaaaacgacggccagtgaggctcctggtctgagtttg

SEQ ID NO: 32836 - DNA, 38 bp, Artificial Sequence
  primer
gtaaaacgacggccagtcagggttcagagaccatcctc

SEQ ID NO: 32837 - DNA, 21 bp, Artificial Sequence
  primer
agagctcatgcaggaaaggtc

SEQ ID NO: 32838 - DNA, 38 bp, Artificial Sequence
  primer
gtaaaacgacggccagtagctcatggctgagaggagtc

SEQ ID NO: 32839 - DNA, 37 bp, Artificial Sequence
  primer
gtaaaacgacggccagttttccagcggcaattatacc

SEQ ID NO: 32840 - DNA, 21 bp, Artificial Sequence
  primer
cctgtgctggataaggaggag

SEQ ID NO: 32841 - DNA, 38 bp, Artificial Sequence
  primer
gtaaaacgacggccagttcagcacttggttctgaggtg

SEQ ID NO: 32842 - DNA, 21 bp, Artificial Sequence
  primer
ctggaacagtgaaccatggag

SEQ ID NO: 32843 - DNA, 38 bp, Artificial Sequence
  primer
gtaaaacgacggccagtgttctagatcgcaaagacggg

SEQ ID NO: 32844 - DNA, 38 bp, Artificial Sequence
  primer
gtaaaacgacggccagtcttggacttgctttcccaaac

SEQ ID NO: 32845 - DNA, 38 bp, Artificial Sequence
  primer
gtaaaacgacggccagtgatgatcaggaatgtgccatc

SEQ ID NO: 32846 - DNA, 38 bp, Artificial Sequence
  primer
gtaaaacgacggccagtagatccagaagcgtggatagc

SEQ ID NO: 32847 - DNA, 38 bp, Artificial Sequence
  primer
gtaaaacgacggccagtggatgctcactggaggaattg

SEQ ID NO: 32848 - DNA, 37 bp, Artificial Sequence
  primer
gtaaaacgacggccagtaaggacctgttgggtgtgtg

SEQ ID NO: 32849 - DNA, 38 bp, Artificial Sequence
  primer
gtaaaacgacggccagtggttgatgtttgaattgggtc

SEQ ID NO: 32850 - DNA, 22 bp, Artificial Sequence
  primer
ttgagaagtaggcttctgtggg

SEQ ID NO: 32851 - DNA, 38 bp, Artificial Sequence
  primer
gtaaaacgacggccagtcagtgcagaacagagaatggg

SEQ ID NO: 32852 - DNA, 20 bp, Artificial Sequence
  primer
tggaaggagagagtggcaag

SEQ ID NO: 32853 - DNA, 38 bp, Artificial Sequence
  primer
gtaaaacgacggccagtataaatgccagccattcttcc

SEQ ID NO: 32854 - DNA, 21 bp, Artificial Sequence
  primer
cattgtgaccatagccactgc

SEQ ID NO: 32855 - DNA, 39 bp, Artificial Sequence
  primer
gtaaaacgacggccagttgactatgaagttccctgtgcc

SEQ ID NO: 32856 - DNA, 38 bp, Artificial Sequence
  primer
gtaaaacgacggccagtgtgttgaaatgggacccagac

SEQ ID NO: 32857 - DNA, 20 bp, Artificial Sequence
  primer
ccatattgtgggagtccagc

SEQ ID NO: 32858 - DNA, 39 bp, Artificial Sequence
  primer
gtaaaacgacggccagttgcccttaggattgtttctctg

SEQ ID NO: 32859 - DNA, 40 bp, Artificial Sequence
  primer
gtaaaacgacggccagtcccttcataaagtggaggttgac

SEQ ID NO: 32860 - DNA, 38 bp, Artificial Sequence
  primer
gtaaaacgacggccagtcccatattcttcgctgctctg

SEQ ID NO: 32861 - DNA, 38 bp, Artificial Sequence
  primer
gtaaaacgacggccagttgctgtgaagttgtgtttccc

SEQ ID NO: 32862 - DNA, 21 bp, Artificial Sequence
  primer
agtgcctgctctccatgtttc

SEQ ID NO: 32863 - DNA, 39 bp, Artificial Sequence
  primer
gtaaaacgacggccagtccatcaggtggagacctgttac

SEQ ID NO: 32864 - DNA, 38 bp, Artificial Sequence
  primer
gtaaaacgacggccagtgtgtctaacccagcccatctg

SEQ ID NO: 32865 - DNA, 20 bp, Artificial Sequence
  primer
aggagattggaggcagaagg

SEQ ID NO: 32866 - DNA, 38 bp, Artificial Sequence
  primer
gtaaaacgacggccagttgctttcagggagaagaccag

SEQ ID NO: 32867 - DNA, 38 bp, Artificial Sequence
  primer
gtaaaacgacggccagtgaagtgcaactggagcatctg

SEQ ID NO: 32868 - DNA, 37 bp, Artificial Sequence
  primer
gtaaaacgacggccagtccaggcagaggctaaaggag

SEQ ID NO: 32869 - DNA, 38 bp, Artificial Sequence
  primer
gtaaaacgacggccagtgaggctgccctaaagtctagc

SEQ ID NO: 32870 - DNA, 39 bp, Artificial Sequence
  primer
gtaaaacgacggccagtggaatcgctaatgaagcacaac

SEQ ID NO: 32871 - DNA, 39 bp, Artificial Sequence
  primer
gtaaaacgacggccagtggccagttccttcgtttatagg

SEQ ID NO: 32872 - DNA, 22 bp, Artificial Sequence
  primer
tgctctgtggagtgaatgtctc

SEQ ID NO: 32873 - DNA, 25 bp, Artificial Sequence
  primer
cagtaactgattcctctgcagtgat

SEQ ID NO: 32874 - DNA, 21 bp, Artificial Sequence
  primer
ttaagccgcttcttatgaccc

SEQ ID NO: 32875 - DNA, 38 bp, Artificial Sequence
  primer
gtaaaacgacggccagtacgaagtgccactgcatacac

SEQ ID NO: 32876 - DNA, 38 bp, Artificial Sequence
  primer
gtaaaacgacggccagtctcctacagtcgcccttcttc

SEQ ID NO: 32877 - DNA, 21 bp, Artificial Sequence
  primer
gcatgtgatgtttgtgttccc

SEQ ID NO: 32878 - DNA, 37 bp, Artificial Sequence
  primer
gtaaaacgacggccagtggttactcgcttaccggagg

SEQ ID NO: 32879 - DNA, 23 bp, Artificial Sequence
  primer
tttagaaaggccaacacagtctc

SEQ ID NO: 32880 - DNA, 36 bp, Artificial Sequence
  primer
gtaaaacgacggccagtgaggttgcagtaggccacg

SEQ ID NO: 32881 - DNA, 21 bp, Artificial Sequence
  primer
tatcttggtcctgcacctctg

SEQ ID NO: 32882 - DNA, 35 bp, Artificial Sequence
  primer
gtaaaacgacggccagtacgtaggagctggctcgg

SEQ ID NO: 32883 - DNA, 19 bp, Artificial Sequence
  primer
agaactgccactgccacag

SEQ ID NO: 32884 - DNA, 21 bp, Artificial Sequence
  primer
agaagaccaagctgctcaacc

SEQ ID NO: 32885 - DNA, 21 bp, Artificial Sequence
  primer
gacctgaccgagctgacctac

SEQ ID NO: 32886 - DNA, 38 bp, Artificial Sequence
  primer
gtaaaacgacggccagttatggctcaggttcagggaag

SEQ ID NO: 32887 - DNA, 21 bp, Artificial Sequence
  primer
agacatgttggacatgcatcc

SEQ ID NO: 32888 - DNA, 38 bp, Artificial Sequence
  primer
gtaaaacgacggccagtggaatggaagtcacggatctc

SEQ ID NO: 32889 - DNA, 38 bp, Artificial Sequence
  primer
gtaaaacgacggccagttgaatagcatccctttgagcc

SEQ ID NO: 32890 - DNA, 21 bp, Artificial Sequence
  primer
cctgaccttgtgatctgcttg

SEQ ID NO: 32891 - DNA, 38 bp, Artificial Sequence
  primer
gtaaaacgacggccagttagaccgaaacttgtcaacgg

SEQ ID NO: 32892 - DNA, 21 bp, Artificial Sequence
  primer
ataaatggccagcgagaagac

SEQ ID NO: 32893 - DNA, 21 bp, Artificial Sequence
  primer
tcatttctttatctgcctccg

SEQ ID NO: 32894 - DNA, 38 bp, Artificial Sequence
  primer
gtaaaacgacggccagttccctcaattctgttcatccc

SEQ ID NO: 32895 - DNA, 21 bp, Artificial Sequence
  primer
taacagttgagtgctgcggtc

SEQ ID NO: 32896 - DNA, 37 bp, Artificial Sequence
  primer
gtaaaacgacggccagtgagattggctggctcagttg

SEQ ID NO: 32897 - DNA, 21 bp, Artificial Sequence
  primer
cttagcctggatgaatcccac

SEQ ID NO: 32898 - DNA, 38 bp, Artificial Sequence
  primer
gtaaaacgacggccagttgttcctgacctttctttggg

SEQ ID NO: 32899 - DNA, 21 bp, Artificial Sequence
  primer
cctggaataagaagacggcac

SEQ ID NO: 32900 - DNA, 21 bp, Artificial Sequence
  primer
gctcaagtgatagtcctgccc

SEQ ID NO: 32901 - DNA, 38 bp, Artificial Sequence
  primer
gtaaaacgacggccagtctgtcctttcctcttgctccc

SEQ ID NO: 32902 - DNA, 38 bp, Artificial Sequence
  primer
gtaaaacgacggccagttgctaccctgtcttacacccg

SEQ ID NO: 32903 - DNA, 19 bp, Artificial Sequence
  primer
aatgtgaacgggagcaagg

SEQ ID NO: 32904 - DNA, 21 bp, Artificial Sequence
  primer
ttcaggatgtgctggtacgtg

SEQ ID NO: 32905 - DNA, 21 bp, Artificial Sequence
  primer
aaattgggttctggatgttgg

SEQ ID NO: 32906 - DNA, 21 bp, Artificial Sequence
  primer
ctctagaagaggcacaacgcc

SEQ ID NO: 32907 - DNA, 38 bp, Artificial Sequence
  primer
gtaaaacgacggccagtctcaataaccctttgctgctg

SEQ ID NO: 32908 - DNA, 38 bp, Artificial Sequence
  primer
gtaaaacgacggccagtggtctcactgtgtttccaggc

SEQ ID NO: 32909 - DNA, 18 bp, Artificial Sequence
  primer
caggatggtcctgggagg

SEQ ID NO: 32910 - DNA, 38 bp, Artificial Sequence
  primer
gtaaaacgacggccagtctcccaaagtgctgggattac

SEQ ID NO: 32911 - DNA, 21 bp, Artificial Sequence
  primer
gctgagtgatgcgtggtaaag

SEQ ID NO: 32912 - DNA, 22 bp, Artificial Sequence
  primer
aaactgttgcggtggtaatagg

SEQ ID NO: 32913 - DNA, 21 bp, Artificial Sequence
  primer
tgggaagcgtttatttgtgag

SEQ ID NO: 32914 - DNA, 39 bp, Artificial Sequence
  primer
gtaaaacgacggccagtggctcttgagtttctgttggtg

SEQ ID NO: 32915 - DNA, 18 bp, Artificial Sequence
  primer
aagtggtccgcttgcctc

SEQ ID NO: 32916 - DNA, 38 bp, Artificial Sequence
  primer
gtaaaacgacggccagtttgcttaggcaggtctcaaac

SEQ ID NO: 32917 - DNA, 21 bp, Artificial Sequence
  primer
caaatgatacacctgccttgg

SEQ ID NO: 32918 - DNA, 21 bp, Artificial Sequence
  primer
atttcttccacggacggttac

SEQ ID NO: 32919 - DNA, 21 bp, Artificial Sequence
  primer
gccttgaaccagaagttcagc

SEQ ID NO: 32920 - DNA, 38 bp, Artificial Sequence
  primer
gtaaaacgacggccagtccgtgtcttggctctgtattc

SEQ ID NO: 32921 - DNA, 21 bp, Artificial Sequence
  primer
taaatttgttgcccgagttcc

SEQ ID NO: 32922 - DNA, 38 bp, Artificial Sequence
  primer
gtaaaacgacggccagtccctatacacagctgtcaggc

SEQ ID NO: 32923 - DNA, 39 bp, Artificial Sequence
  primer
gtaaaacgacggccagtcccagggtagagaacaacacag

SEQ ID NO: 32924 - DNA, 21 bp, Artificial Sequence
  primer
gaagctcctggcacatacctg

SEQ ID NO: 32925 - DNA, 38 bp, Artificial Sequence
  primer
gtaaaacgacggccagtgatcacagagtttggcagtgg

SEQ ID NO: 32926 - DNA, 38 bp, Artificial Sequence
  primer
gtaaaacgacggccagttgatgatgcagttctgggttc

SEQ ID NO: 32927 - DNA, 38 bp, Artificial Sequence
  primer
gtaaaacgacggccagtcttggcttggtccctaaactg

SEQ ID NO: 32928 - DNA, 38 bp, Artificial Sequence
  primer
gtaaaacgacggccagtacctgggtcttgttgtgatcc

SEQ ID NO: 32929 - DNA, 38 bp, Artificial Sequence
  primer
gtaaaacgacggccagttattctcaggccactgcaatc

SEQ ID NO: 32930 - DNA, 21 bp, Artificial Sequence
  primer
ccgcaaacactgacagctaag

SEQ ID NO: 32931 - DNA, 38 bp, Artificial Sequence
  primer
gtaaaacgacggccagtccttccagaacgctaggacac

SEQ ID NO: 32932 - DNA, 37 bp, Artificial Sequence
  primer
gtaaaacgacggccagttctgccaagtcaagtcaggg

SEQ ID NO: 32933 - DNA, 38 bp, Artificial Sequence
  primer
gtaaaacgacggccagtaggctgctgtgccagtaagtc

SEQ ID NO: 32934 - DNA, 38 bp, Artificial Sequence
  primer
gtaaaacgacggccagtatacacattgttggcagcagg

SEQ ID NO: 32935 - DNA, 37 bp, Artificial Sequence
  primer
gtaaaacgacggccagtaacagagaagccaagcccag

SEQ ID NO: 32936 - DNA, 38 bp, Artificial Sequence
  primer
gtaaaacgacggccagtgtcagcacgtacaggtggaag

SEQ ID NO: 32937 - DNA, 21 bp, Artificial Sequence
  primer
atattgtctgattggcccagg

SEQ ID NO: 32938 - DNA, 38 bp, Artificial Sequence
  primer
gtaaaacgacggccagtctgcacaggtttgtctgatcc

SEQ ID NO: 32939 - DNA, 38 bp, Artificial Sequence
  primer
gtaaaacgacggccagttgttcactgtggaaatggagc

SEQ ID NO: 32940 - DNA, 38 bp, Artificial Sequence
  primer
gtaaaacgacggccagtcactgcccttctggatttcac

SEQ ID NO: 32941 - DNA, 38 bp, Artificial Sequence
  primer
gtaaaacgacggccagtgtgtgattggactgttggagc

SEQ ID NO: 32942 - DNA, 22 bp, Artificial Sequence
  primer
tccctacttagcctctcaaggg

SEQ ID NO: 32943 - DNA, 38 bp, Artificial Sequence
  primer
gtaaaacgacggccagttcactgtgggaggagattgag

SEQ ID NO: 32944 - DNA, 21 bp, Artificial Sequence
  primer
caggtggactcacctagcctg

SEQ ID NO: 32945 - DNA, 21 bp, Artificial Sequence
  primer
taccttgccaagctgctattg

SEQ ID NO: 32946 - DNA, 38 bp, Artificial Sequence
  primer
gtaaaacgacggccagtgttcattcccatgcctaaagc

SEQ ID NO: 32947 - DNA, 38 bp, Artificial Sequence
  primer
gtaaaacgacggccagtccagtgttcgccctcttctac

SEQ ID NO: 32948 - DNA, 39 bp, Artificial Sequence
  primer
gtaaaacgacggccagtaaggaagatgattcctgtttgg

SEQ ID NO: 32949 - DNA, 38 bp, Artificial Sequence
  primer
gtaaaacgacggccagtgaatgactttggtggaatggg

SEQ ID NO: 32950 - DNA, 39 bp, Artificial Sequence
  primer
gtaaaacgacggccagtcactttgagaggaaagactcgg

SEQ ID NO: 32951 - DNA, 38 bp, Artificial Sequence
  primer
gtaaaacgacggccagtcatgccagtatggtatgtccc

SEQ ID NO: 32952 - DNA, 20 bp, Artificial Sequence
  primer
ctctcctacgggtaggctgc

SEQ ID NO: 32953 - DNA, 21 bp, Artificial Sequence
  primer
cccacatcagttaaacctggc

SEQ ID NO: 32954 - DNA, 38 bp, Artificial Sequence
  primer
gtaaaacgacggccagtagtgccatatcctgtcctgtg

SEQ ID NO: 32955 - DNA, 38 bp, Artificial Sequence
  primer
gtaaaacgacggccagtagaagaacgtggtcctcacag

SEQ ID NO: 32956 - DNA, 39 bp, Artificial Sequence
  primer
gtaaaacgacggccagtcatctctgagtggctgagtgag

SEQ ID NO: 32957 - DNA, 38 bp, Artificial Sequence
  primer
gtaaaacgacggccagttaccatgccatcatttcctcc

SEQ ID NO: 32958 - DNA, 37 bp, Artificial Sequence
  primer
gtaaaacgacggccagtctgacaagtatgaacccgcc

SEQ ID NO: 32959 - DNA, 37 bp, Artificial Sequence
  primer
gtaaaacgacggccagtcattctagctaaccgcgtcg

SEQ ID NO: 32960 - DNA, 38 bp, Artificial Sequence
  primer
gtaaaacgacggccagttgggcctacatcaggacaaac

SEQ ID NO: 32961 - DNA, 38 bp, Artificial Sequence
  primer
gtaaaacgacggccagtagaacggaagttctctgcctg

SEQ ID NO: 32962 - DNA, 20 bp, Artificial Sequence
  primer
agagcgaagctccatctcaa

SEQ ID NO: 32963 - DNA, 42 bp, Artificial Sequence
  primer
gtaaaacgacggccagttggaaactttaattagcatctggtg

SEQ ID NO: 32964 - DNA, 22 bp, Artificial Sequence
  primer
ggcaacatagcaagacctcatc

SEQ ID NO: 32965 - DNA, 36 bp, Artificial Sequence
  primer
gtaaaacgacggccagtagaatccaggcccttccac

SEQ ID NO: 32966 - DNA, 22 bp, Artificial Sequence
  primer
cctaatttctttagggcattcg

SEQ ID NO: 32967 - DNA, 38 bp, Artificial Sequence
  primer
gtaaaacgacggccagttcaaatctagtctcagccggg

SEQ ID NO: 32968 - DNA, 21 bp, Artificial Sequence
  primer
tatgggccaagatgatttcag

SEQ ID NO: 32969 - DNA, 25 bp, Artificial Sequence
  primer
aatacaatgcggacttcttctttac

SEQ ID NO: 32970 - DNA, 38 bp, Artificial Sequence
  primer
gtaaaacgacggccagtgcttgagtggctgaaacaagg

SEQ ID NO: 32971 - DNA, 21 bp, Artificial Sequence
  primer
atatggtttcggtttggaagg

SEQ ID NO: 32972 - DNA, 37 bp, Artificial Sequence
  primer
gtaaaacgacggccagtaacccatgtggtggtgagag

SEQ ID NO: 32973 - DNA, 36 bp, Artificial Sequence
  primer
gtaaaacgacggccagtcctccttccctccctgaag

SEQ ID NO: 32974 - DNA, 38 bp, Artificial Sequence
  primer
gtaaaacgacggccagtttcaaacttggtttgtgtggc

SEQ ID NO: 32975 - DNA, 22 bp, Artificial Sequence
  primer
cagtagcctgtgaggactggac

SEQ ID NO: 32976 - DNA, 21 bp, Artificial Sequence
  primer
gggatgaagcaatttagccag

SEQ ID NO: 32977 - DNA, 20 bp, Artificial Sequence
  primer
agctatgatcgtgccactgc

SEQ ID NO: 32978 - DNA, 21 bp, Artificial Sequence
  primer
gagtgcgggcaagtatgagac

SEQ ID NO: 32979 - DNA, 38 bp, Artificial Sequence
  primer
gtaaaacgacggccagtaacacccttctccctccagac

SEQ ID NO: 32980 - DNA, 38 bp, Artificial Sequence
  primer
gtaaaacgacggccagtaataggacgtggctttgttgg

SEQ ID NO: 32981 - DNA, 38 bp, Artificial Sequence
  primer
gtaaaacgacggccagtcagcgcattcagtaaatctgg

SEQ ID NO: 32982 - DNA, 20 bp, Artificial Sequence
  primer
ggacacatctgtgatgctgc

SEQ ID NO: 32983 - DNA, 21 bp, Artificial Sequence
  primer
gagtgcgcagatcttgtcttg

SEQ ID NO: 32984 - DNA, 21 bp, Artificial Sequence
  primer
acccaccttgaaggattgttg

SEQ ID NO: 32985 - DNA, 21 bp, Artificial Sequence
  primer
attaccagtcggctttgatgc

SEQ ID NO: 32986 - DNA, 21 bp, Artificial Sequence
  primer
tgtcagggacttagcctagcg

SEQ ID NO: 32987 - DNA, 38 bp, Artificial Sequence
  primer
gtaaaacgacggccagtagaccaactcacagctgctcc

SEQ ID NO: 32988 - DNA, 21 bp, Artificial Sequence
  primer
cagccagtagatgcatttcaa

SEQ ID NO: 32989 - DNA, 20 bp, Artificial Sequence
  primer
tgcatactgggatagctggc

SEQ ID NO: 32990 - DNA, 23 bp, Artificial Sequence
  primer
tgctgttaatgtattcctgtggg

SEQ ID NO: 32991 - DNA, 38 bp, Artificial Sequence
  primer
gtaaaacgacggccagttgaatcaaaggagagtcccag

SEQ ID NO: 32992 - DNA, 21 bp, Artificial Sequence
  primer
ggctttctgctgacgtctaag

SEQ ID NO: 32993 - DNA, 21 bp, Artificial Sequence
  primer
ttgaggcagtaaagatggtgg

SEQ ID NO: 32994 - DNA, 40 bp, Artificial Sequence
  primer
gtaaaacgacggccagtggcttcacaagtgctgttatttg

SEQ ID NO: 32995 - DNA, 44 bp, Artificial Sequence
  primer
gtaaaacgacggccagtgatagcgaatatagtttggttgatttg

SEQ ID NO: 32996 - DNA, 22 bp, Artificial Sequence
  primer
aggtatggtctcagtttggtgc

SEQ ID NO: 32997 - DNA, 25 bp, Artificial Sequence
  primer
tgagcaatagaatttcccataagtt

SEQ ID NO: 32998 - DNA, 38 bp, Artificial Sequence
  primer
gtaaaacgacggccagtttactcaaacttggcccacac

SEQ ID NO: 32999 - DNA, 26 bp, Artificial Sequence
  primer
aagtttgccacttacatatcaaacac

SEQ ID NO: 33000 - DNA, 41 bp, Artificial Sequence
  primer
gtaaaacgacggccagtaagaatttatggtaaagctgaggc

SEQ ID NO: 33001 - DNA, 26 bp, Artificial Sequence
  primer
gcattagtgattaagtctttagccag

SEQ ID NO: 33002 - DNA, 18 bp, Artificial Sequence
  primer
cgtggtggtgcattcctg

SEQ ID NO: 33003 - DNA, 45 bp, Artificial Sequence
  primer
gtaaaacgacggccagttttaataattgagttcagattaaatggg

SEQ ID NO: 33004 - DNA, 21 bp, Artificial Sequence
  primer
ttcatcatgcatcttcttggg

SEQ ID NO: 33005 - DNA, 21 bp, Artificial Sequence
  primer
tgaaagaggtttggtccgttg

SEQ ID NO: 33006 - DNA, 39 bp, Artificial Sequence
  primer
gtaaaacgacggccagtggcaactaaagtgttacgtgga

SEQ ID NO: 33007 - DNA, 40 bp, Artificial Sequence
  primer
gtaaaacgacggccagtgactaaagacagaatgcctgagc

SEQ ID NO: 33008 - DNA, 41 bp, Artificial Sequence
  primer
gtaaaacgacggccagttgttgattggtcttgctagatgtt

SEQ ID NO: 33009 - DNA, 38 bp, Artificial Sequence
  primer
gtaaaacgacggccagttttgtgtgccagtgtttaggc

SEQ ID NO: 33010 - DNA, 38 bp, Artificial Sequence
  primer
gtaaaacgacggccagtgggtgacagaaggagacactg

SEQ ID NO: 33011 - DNA, 38 bp, Artificial Sequence
  primer
gtaaaacgacggccagtaaaggcctgcctcagaatatg

SEQ ID NO: 33012 - DNA, 21 bp, Artificial Sequence
  primer
tcctaaggagcatgccagttc

SEQ ID NO: 33013 - DNA, 21 bp, Artificial Sequence
  primer
cctagaggttatgttgctgcg

SEQ ID NO: 33014 - DNA, 43 bp, Artificial Sequence
  primer
gtaaaacgacggccagtttcttcttagataacagtgccttgaa

SEQ ID NO: 33015 - DNA, 22 bp, Artificial Sequence
  primer
tgtgtttcctgccatttatgtg

SEQ ID NO: 33016 - DNA, 43 bp, Artificial Sequence
  primer
gtaaaacgacggccagtcataagtaatagcatcagttgcttgg

SEQ ID NO: 33017 - DNA, 23 bp, Artificial Sequence
  primer
tccagaagaaagaaagcagtgag

SEQ ID NO: 33018 - DNA, 23 bp, Artificial Sequence
  primer
tttggctctggcatacgtataaa

SEQ ID NO: 33019 - DNA, 23 bp, Artificial Sequence
  primer
ggaatatgtgttctagcccttgg

SEQ ID NO: 33020 - DNA, 23 bp, Artificial Sequence
  primer
cagagtagctttgattgtttccc

SEQ ID NO: 33021 - DNA, 40 bp, Artificial Sequence
  primer
gtaaaacgacggccagtgataacagaaaggcttgctctcc

SEQ ID NO: 33022 - DNA, 19 bp, Artificial Sequence
  primer
gcctggagggaaggagttc

SEQ ID NO: 33023 - DNA, 19 bp, Artificial Sequence
  primer
tttggcaagggttgaaacg

SEQ ID NO: 33024 - DNA, 25 bp, Artificial Sequence
  primer
tccaaagagatatatccagtgattt

SEQ ID NO: 33025 - DNA, 20 bp, Artificial Sequence
  primer
tccggatatcttggcaggac

SEQ ID NO: 33026 - DNA, 21 bp, Artificial Sequence
  primer
ggctgtgttcctcattcaaac

SEQ ID NO: 33027 - DNA, 38 bp, Artificial Sequence
  primer
gtaaaacgacggccagtgttgtgggaacttcatggttg

SEQ ID NO: 33028 - DNA, 38 bp, Artificial Sequence
  primer
gtaaaacgacggccagttctgtacattgcaatcctccc

SEQ ID NO: 33029 - DNA, 21 bp, Artificial Sequence
  primer
tgaccttccacttaatcaggc

SEQ ID NO: 33030 - DNA, 38 bp, Artificial Sequence
  primer
gtaaaacgacggccagttcaggaaggtaatttggtggc

SEQ ID NO: 33031 - DNA, 38 bp, Artificial Sequence
  primer
gtaaaacgacggccagttgtgggtaaaggttgtgatgg

SEQ ID NO: 33032 - DNA, 21 bp, Artificial Sequence
  primer
ttgagtgttcctcgttcttgg

SEQ ID NO: 33033 - DNA, 23 bp, Artificial Sequence
  primer
ttcagtgaaatttgggaggttag

SEQ ID NO: 33034 - DNA, 38 bp, Artificial Sequence
  primer
gtaaaacgacggccagtcttgttggatgtgctaggctg

SEQ ID NO: 33035 - DNA, 38 bp, Artificial Sequence
  primer
gtaaaacgacggccagtaagcatttggaggttctgagg

SEQ ID NO: 33036 - DNA, 21 bp, Artificial Sequence
  primer
tgcttaaagtagggctgtgcc

SEQ ID NO: 33037 - DNA, 38 bp, Artificial Sequence
  primer
gtaaaacgacggccagtggtccatttgaaggatgaagc

SEQ ID NO: 33038 - DNA, 39 bp, Artificial Sequence
  primer
gtaaaacgacggccagttgaaccaatctccctttcattg

SEQ ID NO: 33039 - DNA, 38 bp, Artificial Sequence
  primer
gtaaaacgacggccagtctgtgcctggtgtcgttaatc

SEQ ID NO: 33040 - DNA, 41 bp, Artificial Sequence
  primer
gtaaaacgacggccagtgcccatttagaatataggctgttc

SEQ ID NO: 33041 - DNA, 38 bp, Artificial Sequence
  primer
gtaaaacgacggccagtgcatgttgcttccgtacagtg

SEQ ID NO: 33042 - DNA, 40 bp, Artificial Sequence
  primer
gtaaaacgacggccagtggcagatattgtttgtgaacagc

SEQ ID NO: 33043 - DNA, 38 bp, Artificial Sequence
  primer
gtaaaacgacggccagtatttgggaagtccaacctgtg

SEQ ID NO: 33044 - DNA, 38 bp, Artificial Sequence
  primer
gtaaaacgacggccagtaaagggctgtgtaggaaggtg

SEQ ID NO: 33045 - DNA, 38 bp, Artificial Sequence
  primer
gtaaaacgacggccagttccgaaagagacagagccaag

SEQ ID NO: 33046 - DNA, 38 bp, Artificial Sequence
  primer
gtaaaacgacggccagttgggctttgagggagatagtc

SEQ ID NO: 33047 - DNA, 21 bp, Artificial Sequence
  primer
tttatgtgcttgcacaattcg

SEQ ID NO: 33048 - DNA, 39 bp, Artificial Sequence
  primer
gtaaaacgacggccagtaacatcgtcaggactttgttcc

SEQ ID NO: 33049 - DNA, 21 bp, Artificial Sequence
  primer
caggaaagggtagctattggg

SEQ ID NO: 33050 - DNA, 42 bp, Artificial Sequence
  primer
gtaaaacgacggccagttggcgctttattgtctcataaatag

SEQ ID NO: 33051 - DNA, 22 bp, Artificial Sequence
  primer
aagaagagggagttccaccaag

SEQ ID NO: 33052 - DNA, 22 bp, Artificial Sequence
  primer
ccaggaaggatcacaattcaag

SEQ ID NO: 33053 - DNA, 21 bp, Artificial Sequence
  primer
tgtatgaaccactgctctggg

SEQ ID NO: 33054 - DNA, 38 bp, Artificial Sequence
  primer
gtaaaacgacggccagtagtgacggttatgtgtggcag

SEQ ID NO: 33055 - DNA, 39 bp, Artificial Sequence
  primer
gtaaaacgacggccagtgataattgcattcttgggaagc

SEQ ID NO: 33056 - DNA, 27 bp, Artificial Sequence
  primer
ggcaggtaactggtatatccttctatg

SEQ ID NO: 33057 - DNA, 21 bp, Artificial Sequence
  primer
aggcgtgagccactataatcc

SEQ ID NO: 33058 - DNA, 27 bp, Artificial Sequence
  primer
tcttcaacatttcagaacagtgtatgt

SEQ ID NO: 33059 - DNA, 38 bp, Artificial Sequence
  primer
gtaaaacgacggccagttgccgaatatgtgaattgtgg

SEQ ID NO: 33060 - DNA, 22 bp, Artificial Sequence
  primer
ttattgtgaagcattggtgtcg

SEQ ID NO: 33061 - DNA, 19 bp, Artificial Sequence
  primer
tttgctgttcggtggtcag

SEQ ID NO: 33062 - DNA, 23 bp, Artificial Sequence
  primer
gctaccaatctggcaactaacag

SEQ ID NO: 33063 - DNA, 44 bp, Artificial Sequence
  primer
gtaaaacgacggccagtgctctagtgattgataatgtctttcct

SEQ ID NO: 33064 - DNA, 24 bp, Artificial Sequence
  primer
ttcctaattctgactggagatgtg

SEQ ID NO: 33065 - DNA, 38 bp, Artificial Sequence
  primer
gtaaaacgacggccagtaagcaggttgctaagggcttc

SEQ ID NO: 33066 - DNA, 38 bp, Artificial Sequence
  primer
gtaaaacgacggccagtaagcacagcttcttcatagcg

SEQ ID NO: 33067 - DNA, 38 bp, Artificial Sequence
  primer
gtaaaacgacggccagtccaggtgtaagggcttattgg

SEQ ID NO: 33068 - DNA, 21 bp, Artificial Sequence
  primer
ctgcttggatggcttacagtc

SEQ ID NO: 33069 - DNA, 39 bp, Artificial Sequence
  primer
gtaaaacgacggccagtctgctggtttagggttaccatc

SEQ ID NO: 33070 - DNA, 40 bp, Artificial Sequence
  primer
gtaaaacgacggccagtcgaataatttctgggcaactagg

SEQ ID NO: 33071 - DNA, 39 bp, Artificial Sequence
  primer
gtaaaacgacggccagttgtgatgaacttgaggacttga

SEQ ID NO: 33072 - DNA, 38 bp, Artificial Sequence
  primer
gtaaaacgacggccagttttctccaagacctgtctccc

SEQ ID NO: 33073 - DNA, 39 bp, Artificial Sequence
  primer
gtaaaacgacggccagtcaatttgcatggctcatatgtc

SEQ ID NO: 33074 - DNA, 39 bp, Artificial Sequence
  primer
gtaaaacgacggccagttgcaggagaagattatgtgagg

SEQ ID NO: 33075 - DNA, 40 bp, Artificial Sequence
  primer
gtaaaacgacggccagtaagaggtcagggttcgttgatac

SEQ ID NO: 33076 - DNA, 21 bp, Artificial Sequence
  primer
catgcttagatggtcgtaccg

SEQ ID NO: 33077 - DNA, 37 bp, Artificial Sequence
  primer
gtaaaacgacggccagtggagggaaaggactgtgctc

SEQ ID NO: 33078 - DNA, 24 bp, Artificial Sequence
  primer
agtcatcatgttgtttggttatgc

SEQ ID NO: 33079 - DNA, 21 bp, Artificial Sequence
  primer
tcccttgaggctatttgcttg

SEQ ID NO: 33080 - DNA, 23 bp, Artificial Sequence
  primer
tggaaatgggaataatgtgtgag

SEQ ID NO: 33081 - DNA, 39 bp, Artificial Sequence
  primer
gtaaaacgacggccagtccactgcactagctttacccac

SEQ ID NO: 33082 - DNA, 27 bp, Artificial Sequence
  primer
tttctatgcttagggagtataccacag

SEQ ID NO: 33083 - DNA, 41 bp, Artificial Sequence
  primer
gtaaaacgacggccagtttgttaggaggtagtaaacgccag

SEQ ID NO: 33084 - DNA, 21 bp, Artificial Sequence
  primer
caaacagagcacgactccatc

SEQ ID NO: 33085 - DNA, 21 bp, Artificial Sequence
  primer
ctggagagatggagcctgaac

SEQ ID NO: 33086 - DNA, 21 bp, Artificial Sequence
  primer
gatcgggaaacaaagggtatg

SEQ ID NO: 33087 - DNA, 21 bp, Artificial Sequence
  primer
cagggcttggaggagttaatg

SEQ ID NO: 33088 - DNA, 44 bp, Artificial Sequence
  primer
gtaaaacgacggccagtaagaggtaagatatggtatgtgctgag

SEQ ID NO: 33089 - DNA, 21 bp, Artificial Sequence
  primer
gaggaatggagactggactgg

SEQ ID NO: 33090 - DNA, 39 bp, Artificial Sequence
  primer
gtaaaacgacggccagtaggacatattctcaccacccag

SEQ ID NO: 33091 - DNA, 38 bp, Artificial Sequence
  primer
gtaaaacgacggccagttagtgaaaccacagcccacag

SEQ ID NO: 33092 - DNA, 38 bp, Artificial Sequence
  primer
gtaaaacgacggccagtgagtgacccgtccctgtctac

SEQ ID NO: 33093 - DNA, 22 bp, Artificial Sequence
  primer
ttctctcttcaacccttctccc

SEQ ID NO: 33094 - DNA, 22 bp, Artificial Sequence
  primer
cctgtctttgcctgtatcttcc

SEQ ID NO: 33095 - DNA, 38 bp, Artificial Sequence
  primer
gtaaaacgacggccagtcgatgcacagtgagtggaaac

SEQ ID NO: 33096 - DNA, 20 bp, Artificial Sequence
  primer
ctttccctgtcccattcctc

SEQ ID NO: 33097 - DNA, 38 bp, Artificial Sequence
  primer
gtaaaacgacggccagtcaggccttctttctgtttgtg

SEQ ID NO: 33098 - DNA, 38 bp, Artificial Sequence
  primer
gtaaaacgacggccagttgggaagtaggtctggaatgg

SEQ ID NO: 33099 - DNA, 37 bp, Artificial Sequence
  primer
gtaaaacgacggccagtcatgccagggaggaagagac

SEQ ID NO: 33100 - DNA, 21 bp, Artificial Sequence
  primer
tgtagctggcagaggactagg

SEQ ID NO: 33101 - DNA, 38 bp, Artificial Sequence
  primer
gtaaaacgacggccagtaggtgtctggttctggaggtg

SEQ ID NO: 33102 - DNA, 38 bp, Artificial Sequence
  primer
gtaaaacgacggccagtgatcctgagtgaaatgggagc

SEQ ID NO: 33103 - DNA, 38 bp, Artificial Sequence
  primer
gtaaaacgacggccagtggttccctaagggtagttggc

SEQ ID NO: 33104 - DNA, 38 bp, Artificial Sequence
  primer
gtaaaacgacggccagtcaagacagagctcatcgttcg

SEQ ID NO: 33105 - DNA, 38 bp, Artificial Sequence
  primer
gtaaaacgacggccagtgaattgggaacatgtggaagc

SEQ ID NO: 33106 - DNA, 37 bp, Artificial Sequence
  primer
gtaaaacgacggccagtgagcttaagacagggcaggg

SEQ ID NO: 33107 - DNA, 38 bp, Artificial Sequence
  primer
gtaaaacgacggccagtctgtgataggtccctgggatg

SEQ ID NO: 33108 - DNA, 38 bp, Artificial Sequence
  primer
gtaaaacgacggccagtttcttcagcagccttctttcc

SEQ ID NO: 33109 - DNA, 38 bp, Artificial Sequence
  primer
gtaaaacgacggccagtaaacctttcaacattggctcc

SEQ ID NO: 33110 - DNA, 38 bp, Artificial Sequence
  primer
gtaaaacgacggccagtgtagggatttccttgcagtgg

SEQ ID NO: 33111 - DNA, 38 bp, Artificial Sequence
  primer
gtaaaacgacggccagtaggtagacaagtctcggcagg

SEQ ID NO: 33112 - DNA, 38 bp, Artificial Sequence
  primer
gtaaaacgacggccagttgtgtatcttgtgggaatggg

SEQ ID NO: 33113 - DNA, 38 bp, Artificial Sequence
  primer
gtaaaacgacggccagttgcctggatcactgaaggtag

SEQ ID NO: 33114 - DNA, 38 bp, Artificial Sequence
  primer
gtaaaacgacggccagtgagggctggtaatggtgagag

SEQ ID NO: 33115 - DNA, 38 bp, Artificial Sequence
  primer
gtaaaacgacggccagtctgagttgtaagcttgcgctg

SEQ ID NO: 33116 - DNA, 38 bp, Artificial Sequence
  primer
gtaaaacgacggccagtgaagtcaggatggtgggagag

SEQ ID NO: 33117 - DNA, 38 bp, Artificial Sequence
  primer
gtaaaacgacggccagtgatggagacagaggtgtgtgg

SEQ ID NO: 33118 - DNA, 38 bp, Artificial Sequence
  primer
gtaaaacgacggccagttttgggcaagagaggtaatgg

SEQ ID NO: 33119 - DNA, 38 bp, Artificial Sequence
  primer
gtaaaacgacggccagtaggagcccttagttccctttc

SEQ ID NO: 33120 - DNA, 37 bp, Artificial Sequence
  primer
gtaaaacgacggccagtagggctagtgccacactttg

SEQ ID NO: 33121 - DNA, 21 bp, Artificial Sequence
  primer
gggtgggtctcttgctatgtc

SEQ ID NO: 33122 - DNA, 39 bp, Artificial Sequence
  primer
gtaaaacgacggccagttctgcctgtatctgtccatctg

SEQ ID NO: 33123 - DNA, 21 bp, Artificial Sequence
  primer
ttagcagttgtggagtgtggc

SEQ ID NO: 33124 - DNA, 38 bp, Artificial Sequence
  primer
gtaaaacgacggccagtagtggaatctcagggaaaggg

SEQ ID NO: 33125 - DNA, 38 bp, Artificial Sequence
  primer
gtaaaacgacggccagtggccagtgtagaggtcctcag

SEQ ID NO: 33126 - DNA, 38 bp, Artificial Sequence
  primer
gtaaaacgacggccagtaggaatctgggacaagaggtg

SEQ ID NO: 33127 - DNA, 19 bp, Artificial Sequence
  primer
gatgagcctcagggctgtc

SEQ ID NO: 33128 - DNA, 38 bp, Artificial Sequence
  primer
gtaaaacgacggccagtatgattcaaaggtgcctggac

SEQ ID NO: 33129 - DNA, 21 bp, Artificial Sequence
  primer
aactacaaggccttcagccag

SEQ ID NO: 33130 - DNA, 21 bp, Artificial Sequence
  primer
ggagggaaatttgggaatctg

SEQ ID NO: 33131 - DNA, 38 bp, Artificial Sequence
  primer
gtaaaacgacggccagtctgtataacggtgcttgctgg

SEQ ID NO: 33132 - DNA, 20 bp, Artificial Sequence
  primer
atgaggtgggagtgattggg

SEQ ID NO: 33133 - DNA, 38 bp, Artificial Sequence
  primer
gtaaaacgacggccagtattcaaaggaatgatgggcac

SEQ ID NO: 33134 - DNA, 21 bp, Artificial Sequence
  primer
tgaagttgagactgtgggctg

SEQ ID NO: 33135 - DNA, 40 bp, Artificial Sequence
  primer
gtaaaacgacggccagtgggctacgatgaagaggatagtg

SEQ ID NO: 33136 - DNA, 38 bp, Artificial Sequence
  primer
gtaaaacgacggccagttgtgaaacaaacggtattgcc

SEQ ID NO: 33137 - DNA, 18 bp, Artificial Sequence
  primer
gtgagccactgtgcctgg

SEQ ID NO: 33138 - DNA, 39 bp, Artificial Sequence
  primer
gtaaaacgacggccagtggatccgtgaagactagtgagg

SEQ ID NO: 33139 - DNA, 21 bp, Artificial Sequence
  primer
gggctgggcacttgtatagag

SEQ ID NO: 33140 - DNA, 38 bp, Artificial Sequence
  primer
gtaaaacgacggccagtgaaagagttgtggcttctggc

SEQ ID NO: 33141 - DNA, 38 bp, Artificial Sequence
  primer
gtaaaacgacggccagtccttgtatgtgacagcccttg

SEQ ID NO: 33142 - DNA, 21 bp, Artificial Sequence
  primer
tgcctctcattcttcctgttg

SEQ ID NO: 33143 - DNA, 38 bp, Artificial Sequence
  primer
gtaaaacgacggccagttggtagtgcttgtgcgttagg

SEQ ID NO: 33144 - DNA, 21 bp, Artificial Sequence
  primer
gctgcaatggtatgtagtgcc

SEQ ID NO: 33145 - DNA, 38 bp, Artificial Sequence
  primer
gtaaaacgacggccagtggactgggagctttagggaac

SEQ ID NO: 33146 - DNA, 22 bp, Artificial Sequence
  primer
ctgatgtcaaatgatccacctg

SEQ ID NO: 33147 - DNA, 38 bp, Artificial Sequence
  primer
gtaaaacgacggccagttgtggaccttgccttgtactg

SEQ ID NO: 33148 - DNA, 21 bp, Artificial Sequence
  primer
ataccaagggtcttgtgggac

SEQ ID NO: 33149 - DNA, 38 bp, Artificial Sequence
  primer
gtaaaacgacggccagtagagtgggaactgtgaggacc

SEQ ID NO: 33150 - DNA, 21 bp, Artificial Sequence
  primer
tcaactacaatgatggctccc

SEQ ID NO: 33151 - DNA, 21 bp, Artificial Sequence
  primer
gttcagaaggtgagggctgtg

SEQ ID NO: 33152 - DNA, 39 bp, Artificial Sequence
  primer
gtaaaacgacggccagtcgtgttggtgggaatattgaag

SEQ ID NO: 33153 - DNA, 21 bp, Artificial Sequence
  primer
tgtgataatgcctcacgaagg

SEQ ID NO: 33154 - DNA, 35 bp, Artificial Sequence
  primer
gtaaaacgacggccagtgaggcggagactggaagg

SEQ ID NO: 33155 - DNA, 21 bp, Artificial Sequence
  primer
cacacagcaattccctctcag

SEQ ID NO: 33156 - DNA, 21 bp, Artificial Sequence
  primer
gccattgaggtaagagatggg

SEQ ID NO: 33157 - DNA, 37 bp, Artificial Sequence
  primer
gtaaaacgacggccagtgatctgcctgctgctgtctc

SEQ ID NO: 33158 - DNA, 21 bp, Artificial Sequence
  primer
agagacacccaggtggagaag

SEQ ID NO: 33159 - DNA, 21 bp, Artificial Sequence
  primer
tctgtggagaaagccagaagc

SEQ ID NO: 33160 - DNA, 37 bp, Artificial Sequence
  primer
gtaaaacgacggccagtatcgacggcatgactactgg

SEQ ID NO: 33161 - DNA, 39 bp, Artificial Sequence
  primer
gtaaaacgacggccagttgaaacaatgagaggtgagctg

SEQ ID NO: 33162 - DNA, 38 bp, Artificial Sequence
  primer
gtaaaacgacggccagtggctggtccactagggtagag

SEQ ID NO: 33163 - DNA, 38 bp, Artificial Sequence
  primer
gtaaaacgacggccagtagagcgtaacattctcagccg

SEQ ID NO: 33164 - DNA, 38 bp, Artificial Sequence
  primer
gtaaaacgacggccagttctcacttcactgggtttggg

SEQ ID NO: 33165 - DNA, 36 bp, Artificial Sequence
  primer
gtaaaacgacggccagtgctgagctgtgagcagtgg

SEQ ID NO: 33166 - DNA, 38 bp, Artificial Sequence
  primer
gtaaaacgacggccagtctagggtgggtgagaatggtc

SEQ ID NO: 33167 - DNA, 35 bp, Artificial Sequence
  primer
gtaaaacgacggccagtggctgctgccatagatcg

SEQ ID NO: 33168 - DNA, 38 bp, Artificial Sequence
  primer
gtaaaacgacggccagtagctcagtgagatgatggcag

SEQ ID NO: 33169 - DNA, 36 bp, Artificial Sequence
  primer
gtaaaacgacggccagtgagcctcttccgtgctttg

SEQ ID NO: 33170 - DNA, 38 bp, Artificial Sequence
  primer
gtaaaacgacggccagtctattcacccacccacctttc

SEQ ID NO: 33171 - DNA, 35 bp, Artificial Sequence
  primer
gtaaaacgacggccagtccctgtgccctcatttgg

SEQ ID NO: 33172 - DNA, 38 bp, Artificial Sequence
  primer
gtaaaacgacggccagtcgtcaccgtggtactgttctg

SEQ ID NO: 33173 - DNA, 37 bp, Artificial Sequence
  primer
gtaaaacgacggccagtaggagctgggtagggagatg

SEQ ID NO: 33174 - DNA, 37 bp, Artificial Sequence
  primer
gtaaaacgacggccagtggtgtgaatggctctgcatc

SEQ ID NO: 33175 - DNA, 38 bp, Artificial Sequence
  primer
gtaaaacgacggccagtctacgacaacctcaagcaggc

SEQ ID NO: 33176 - DNA, 38 bp, Artificial Sequence
  primer
gtaaaacgacggccagtgagtgggaagagtgttccagg

SEQ ID NO: 33177 - DNA, 21 bp, Artificial Sequence
  primer
actccctctacaaggaggtgg

SEQ ID NO: 33178 - DNA, 38 bp, Artificial Sequence
  primer
gtaaaacgacggccagttctttgtctcctgggactgtg

SEQ ID NO: 33179 - DNA, 38 bp, Artificial Sequence
  primer
gtaaaacgacggccagttcaagaacaaccagtccaagg

SEQ ID NO: 33180 - DNA, 38 bp, Artificial Sequence
  primer
gtaaaacgacggccagttgatgtgtggaggtgacacag

SEQ ID NO: 33181 - DNA, 21 bp, Artificial Sequence
  primer
tctctgtaaatgggtgcttgg

SEQ ID NO: 33182 - DNA, 36 bp, Artificial Sequence
  primer
gtaaaacgacggccagtacttgtctgttccctgcgg

SEQ ID NO: 33183 - DNA, 38 bp, Artificial Sequence
  primer
gtaaaacgacggccagtcacctagcaggcagctctctc

SEQ ID NO: 33184 - DNA, 21 bp, Artificial Sequence
  primer
ctgttgctgcagttccttctc

SEQ ID NO: 33185 - DNA, 38 bp, Artificial Sequence
  primer
gtaaaacgacggccagtttccctacacagtcatgcagc

SEQ ID NO: 33186 - DNA, 20 bp, Artificial Sequence
  primer
gctccaacacacagcctctc

SEQ ID NO: 33187 - DNA, 38 bp, Artificial Sequence
  primer
gtaaaacgacggccagtccattgttgggagtctgttcc

SEQ ID NO: 33188 - DNA, 38 bp, Artificial Sequence
  primer
gtaaaacgacggccagtatcccattaatccttgagccc

SEQ ID NO: 33189 - DNA, 21 bp, Artificial Sequence
  primer
ggaagtatgtgggccattgtc

SEQ ID NO: 33190 - DNA, 38 bp, Artificial Sequence
  primer
gtaaaacgacggccagtctactgctgaggccatgtcag

SEQ ID NO: 33191 - DNA, 21 bp, Artificial Sequence
  primer
taccttctcctcctcccatgc

SEQ ID NO: 33192 - DNA, 21 bp, Artificial Sequence
  primer
gatggttgaagatcagccagg

SEQ ID NO: 33193 - DNA, 38 bp, Artificial Sequence
  primer
gtaaaacgacggccagtcaagcctgtgacactttcagc

SEQ ID NO: 33194 - DNA, 38 bp, Artificial Sequence
  primer
gtaaaacgacggccagtggatcctgcttgtctctcctg

SEQ ID NO: 33195 - DNA, 36 bp, Artificial Sequence
  primer
gtaaaacgacggccagtagccaggagactgggttcc

SEQ ID NO: 33196 - DNA, 38 bp, Artificial Sequence
  primer
gtaaaacgacggccagtggtctgaagtgatcctcctgc

SEQ ID NO: 33197 - DNA, 21 bp, Artificial Sequence
  primer
ttgtttaagacccttctgggc

SEQ ID NO: 33198 - DNA, 38 bp, Artificial Sequence
  primer
gtaaaacgacggccagtttcttagccaccctggaacac

SEQ ID NO: 33199 - DNA, 38 bp, Artificial Sequence
  primer
gtaaaacgacggccagtgacttgcctgagagcgtacag

SEQ ID NO: 33200 - DNA, 38 bp, Artificial Sequence
  primer
gtaaaacgacggccagtgcagtacgtcctctttccctc

SEQ ID NO: 33201 - DNA, 37 bp, Artificial Sequence
  primer
gtaaaacgacggccagtcctccatccttccactcctc

SEQ ID NO: 33202 - DNA, 19 bp, Artificial Sequence
  primer
catccagcaggtcaggctc

SEQ ID NO: 33203 - DNA, 21 bp, Artificial Sequence
  primer
gtcaactacaaccagatgccc

SEQ ID NO: 33204 - DNA, 22 bp, Artificial Sequence
  primer
ttgggtgcaataaattagggtc

SEQ ID NO: 33205 - DNA, 21 bp, Artificial Sequence
  primer
atgctaacaacacgttggcac

SEQ ID NO: 33206 - DNA, 21 bp, Artificial Sequence
  primer
actgtctgcctcagaaggacc

SEQ ID NO: 33207 - DNA, 37 bp, Artificial Sequence
  primer
gtaaaacgacggccagtcattaaagcctgccctggtc

SEQ ID NO: 33208 - DNA, 22 bp, Artificial Sequence
  primer
aaagcactccttggcatgttag

SEQ ID NO: 33209 - DNA, 21 bp, Artificial Sequence
  primer
aggccttggtactcaaaggtg

SEQ ID NO: 33210 - DNA, 38 bp, Artificial Sequence
  primer
gtaaaacgacggccagtcttgcagctgtgtattccacc

SEQ ID NO: 33211 - DNA, 38 bp, Artificial Sequence
  primer
gtaaaacgacggccagtaggtggtcaccgtgtttattg

SEQ ID NO: 33212 - DNA, 37 bp, Artificial Sequence
  primer
gtaaaacgacggccagttcatggagagcaggatttgg

SEQ ID NO: 33213 - DNA, 39 bp, Artificial Sequence
  primer
gtaaaacgacggccagtcctgtctagtcacgtagggtgg

SEQ ID NO: 33214 - DNA, 38 bp, Artificial Sequence
  primer
gtaaaacgacggccagttagtttgaaaccagccttggg

SEQ ID NO: 33215 - DNA, 24 bp, Artificial Sequence
  primer
gaaatgatgataaagccttcaatg

SEQ ID NO: 33216 - DNA, 38 bp, Artificial Sequence
  primer
gtaaaacgacggccagtgtgtgaggccttctggctaac

SEQ ID NO: 33217 - DNA, 36 bp, Artificial Sequence
  primer
gtaaaacgacggccagtttgagcactcaatgccctg

SEQ ID NO: 33218 - DNA, 42 bp, Artificial Sequence
  primer
gtaaaacgacggccagtaattagagtgaaggttggaataccc

SEQ ID NO: 33219 - DNA, 39 bp, Artificial Sequence
  primer
gtaaaacgacggccagttttcccaggatctgtaaagcag

SEQ ID NO: 33220 - DNA, 37 bp, Artificial Sequence
  primer
gtaaaacgacggccagtatcagtcgacagcttcctgc

SEQ ID NO: 33221 - DNA, 37 bp, Artificial Sequence
  primer
gtaaaacgacggccagtgagagttggccactcacacc

SEQ ID NO: 33222 - DNA, 39 bp, Artificial Sequence
  primer
gtaaaacgacggccagtttcatggaggaactatgcactg

SEQ ID NO: 33223 - DNA, 43 bp, Artificial Sequence
  primer
gtaaaacgacggccagtttaggtttctcttgaagtaacactgg

SEQ ID NO: 33224 - DNA, 38 bp, Artificial Sequence
  primer
gtaaaacgacggccagtggcatggttctatcccaaatg

SEQ ID NO: 33225 - DNA, 38 bp, Artificial Sequence
  primer
gtaaaacgacggccagtagcccttgggatgattaacag

SEQ ID NO: 33226 - DNA, 20 bp, Artificial Sequence
  primer
agcacagcccaactctgttc

SEQ ID NO: 33227 - DNA, 37 bp, Artificial Sequence
  primer
gtaaaacgacggccagtgaatgcccagaatttcccag

SEQ ID NO: 33228 - DNA, 38 bp, Artificial Sequence
  primer
gtaaaacgacggccagttgagaaacaatgacccacagc

SEQ ID NO: 33229 - DNA, 21 bp, Artificial Sequence
  primer
caaaggtgtccgctttagcac

SEQ ID NO: 33230 - DNA, 20 bp, Artificial Sequence
  primer
ttggactgtggttgaccagg

SEQ ID NO: 33231 - DNA, 39 bp, Artificial Sequence
  primer
gtaaaacgacggccagttccgtttcaagactttctgagc

SEQ ID NO: 33232 - DNA, 37 bp, Artificial Sequence
  primer
gtaaaacgacggccagtcttccagtcatgccttgctc

SEQ ID NO: 33233 - DNA, 22 bp, Artificial Sequence
  primer
cctttcttgactttatgggctc

SEQ ID NO: 33234 - DNA, 38 bp, Artificial Sequence
  primer
gtaaaacgacggccagtttctttcacaccctttgggtc

SEQ ID NO: 33235 - DNA, 38 bp, Artificial Sequence
  primer
gtaaaacgacggccagtaccaccatctacgttgaaccc

SEQ ID NO: 33236 - DNA, 24 bp, Artificial Sequence
  primer
tgagtaggacttcagagtcccttg

SEQ ID NO: 33237 - DNA, 21 bp, Artificial Sequence
  primer
accatgatgaaagtctgctgc

SEQ ID NO: 33238 - DNA, 21 bp, Artificial Sequence
  primer
taagcaaagatgggaactgcc

SEQ ID NO: 33239 - DNA, 38 bp, Artificial Sequence
  primer
gtaaaacgacggccagtgctggaagccaagtgtttagc

SEQ ID NO: 33240 - DNA, 38 bp, Artificial Sequence
  primer
gtaaaacgacggccagtccagaggtattgcatctcacg

SEQ ID NO: 33241 - DNA, 40 bp, Artificial Sequence
  primer
gtaaaacgacggccagttgatacggttctcctggaaatag

SEQ ID NO: 33242 - DNA, 40 bp, Artificial Sequence
  primer
gtaaaacgacggccagttttcttatcgactccttctggtg

SEQ ID NO: 33243 - DNA, 38 bp, Artificial Sequence
  primer
gtaaaacgacggccagtagcatttcagccacttgtgtg

SEQ ID NO: 33244 - DNA, 21 bp, Artificial Sequence
  primer
agggtggaaataggtggagtg

SEQ ID NO: 33245 - DNA, 38 bp, Artificial Sequence
  primer
gtaaaacgacggccagtctcctgtgcagacaaccattg

SEQ ID NO: 33246 - DNA, 38 bp, Artificial Sequence
  primer
gtaaaacgacggccagtcagtgacaggtgccctagttg

SEQ ID NO: 33247 - DNA, 21 bp, Artificial Sequence
  primer
tggctgagcctattcttcgag

SEQ ID NO: 33248 - DNA, 38 bp, Artificial Sequence
  primer
gtaaaacgacggccagtgcgtctctatcaagcacaacg

SEQ ID NO: 33249 - DNA, 38 bp, Artificial Sequence
  primer
gtaaaacgacggccagtataggctttgagggcaaacac

SEQ ID NO: 33250 - DNA, 21 bp, Artificial Sequence
  primer
gcaaatgccaatagaccaagg

SEQ ID NO: 33251 - DNA, 18 bp, Artificial Sequence
  primer
ctaccagcagcagcagcc

SEQ ID NO: 33252 - DNA, 38 bp, Artificial Sequence
  primer
gtaaaacgacggccagtcagcagatgggcagctatatg

SEQ ID NO: 33253 - DNA, 21 bp, Artificial Sequence
  primer
gttaggccgcaaacccttaac

SEQ ID NO: 33254 - DNA, 21 bp, Artificial Sequence
  primer
tcagggaacttatgcctctcc

SEQ ID NO: 33255 - DNA, 21 bp, Artificial Sequence
  primer
atttataggcatgtcctcggc

SEQ ID NO: 33256 - DNA, 21 bp, Artificial Sequence
  primer
tttgtgtctctcagcattccc

SEQ ID NO: 33257 - DNA, 43 bp, Artificial Sequence
  primer
gtaaaacgacggccagtgccaatatgtatggatttatcagttg

SEQ ID NO: 33258 - DNA, 35 bp, Artificial Sequence; identical to SEQ ID NO: 15753
  primer

SEQ ID NO: 33259 - DNA, 21 bp, Artificial Sequence
  primer
gtgtggaggtggtagcaaagg

SEQ ID NO: 33260 - DNA, 38 bp, Artificial Sequence
  primer
gtaaaacgacggccagtttacgtgaaggtcctttgctg

SEQ ID NO: 33261 - DNA, 19 bp, Artificial Sequence
  primer
gctcagcagccttaatggg

SEQ ID NO: 33262 - DNA, 24 bp, Artificial Sequence
  primer
aagacccagttaacgaagtctgag

SEQ ID NO: 33263 - DNA, 38 bp, Artificial Sequence
  primer
gtaaaacgacggccagtggaaacagagcgtgtggtaag

SEQ ID NO: 33264 - DNA, 38 bp, Artificial Sequence
  primer
gtaaaacgacggccagtatgcatttgtgggtacaatgg

SEQ ID NO: 33265 - DNA, 38 bp, Artificial Sequence
  primer
gtaaaacgacggccagttgatgcatgtgctctgttagg

SEQ ID NO: 33266 - DNA, 39 bp, Artificial Sequence
  primer
gtaaaacgacggccagtggtgtctagtgagaggctctgg

SEQ ID NO: 33267 - DNA, 27 bp, Artificial Sequence
  primer
ggatgtttaatgaatgagataatcctg

SEQ ID NO: 33268 - DNA, 21 bp, Artificial Sequence
  primer
gttcctacagtttgcaatggg

SEQ ID NO: 33269 - DNA, 23 bp, Artificial Sequence
  primer
gccaataaaccctatttgctctg

SEQ ID NO: 33270 - DNA, 38 bp, Artificial Sequence
  primer
gtaaaacgacggccagtttggaatgagggtttcagcat

SEQ ID NO: 33271 - DNA, 24 bp, Artificial Sequence
  primer
tgcccaaaccatttatttattctg

SEQ ID NO: 33272 - DNA, 21 bp, Artificial Sequence
  primer
aggaatgcacaatatcggagc

SEQ ID NO: 33273 - DNA, 38 bp, Artificial Sequence
  primer
gtaaaacgacggccagttcccattcgaacacctatctg

SEQ ID NO: 33274 - DNA, 38 bp, Artificial Sequence
  primer
gtaaaacgacggccagttcacccagtgtgaattgttgc

SEQ ID NO: 33275 - DNA, 38 bp, Artificial Sequence
  primer
gtaaaacgacggccagtcctcgtgcattaagctctctg

SEQ ID NO: 33276 - DNA, 20 bp, Artificial Sequence
  primer
tgatggatgaacagcagcag

SEQ ID NO: 33277 - DNA, 21 bp, Artificial Sequence
  primer
tgctcagatgtttatcgtggg

SEQ ID NO: 33278 - DNA, 21 bp, Artificial Sequence
  primer
caaacttgtgttgtggcagtg

SEQ ID NO: 33279 - DNA, 21 bp, Artificial Sequence
  primer
aatgtcatttcccgcaatctc

SEQ ID NO: 33280 - DNA, 38 bp, Artificial Sequence
  primer
gtaaaacgacggccagtcaaccagaacaccgttcaaag

SEQ ID NO: 33281 - DNA, 38 bp, Artificial Sequence
  primer
gtaaaacgacggccagtcctttcccacactgtcatttg

SEQ ID NO: 33282 - DNA, 20 bp, Artificial Sequence
  primer
ctcgctccaacaaagcagtc

SEQ ID NO: 33283 - DNA, 21 bp, Artificial Sequence
  primer
ccaatttagagcctttgccag

SEQ ID NO: 33284 - DNA, 38 bp, Artificial Sequence
  primer
gtaaaacgacggccagtcgaactctgtaccgcattgag

SEQ ID NO: 33285 - DNA, 21 bp, Artificial Sequence
  primer
tcctccagtcatctcatctgc

SEQ ID NO: 33286 - DNA, 38 bp, Artificial Sequence
  primer
gtaaaacgacggccagtgtgcccaataccattctagcc

SEQ ID NO: 33287 - DNA, 37 bp, Artificial Sequence
  primer
gtaaaacgacggccagtgaccttctgccagagcaatg

SEQ ID NO: 33288 - DNA, 38 bp, Artificial Sequence
  primer
gtaaaacgacggccagttggctcactgcaactctgttc

SEQ ID NO: 33289 - DNA, 23 bp, Artificial Sequence
  primer
tgttcccaaacaactagacattg

SEQ ID NO: 33290 - DNA, 23 bp, Artificial Sequence
  primer
ttatgtattccttaatggacggg

SEQ ID NO: 33291 - DNA, 21 bp, Artificial Sequence
  primer
gcgatttcttagcccagaagg

SEQ ID NO: 33292 - DNA, 39 bp, Artificial Sequence
  primer
gtaaaacgacggccagtcattgagctgttaggagggaag

SEQ ID NO: 33293 - DNA, 21 bp, Artificial Sequence
  primer
gatgtttgaccgccttctcac

SEQ ID NO: 33294 - DNA, 21 bp, Artificial Sequence
  primer
gggctgttgaataaccctctg

SEQ ID NO: 33295 - DNA, 20 bp, Artificial Sequence
  primer
cagcattggcaggacttcag

SEQ ID NO: 33296 - DNA, 38 bp, Artificial Sequence
  primer
gtaaaacgacggccagtctgctgtatgtccgtcctcag

SEQ ID NO: 33297 - DNA, 21 bp, Artificial Sequence
  primer
tcagcagtagtgttgtgcctg

SEQ ID NO: 33298 - DNA, 21 bp, Artificial Sequence
  primer
ctttagggtgaatcgaaacgc

SEQ ID NO: 33299 - DNA, 44 bp, Artificial Sequence
  primer
gtaaaacgacggccagtggttcaataagatttagtctgagcttg

SEQ ID NO: 33300 - DNA, 21 bp, Artificial Sequence
  primer
tataggctggctcttcccaag

SEQ ID NO: 33301 - DNA, 23 bp, Artificial Sequence
  primer
atggtataagggtcagtcagtgg

SEQ ID NO: 33302 - DNA, 25 bp, Artificial Sequence
  primer
tcacattgtttgacagataatctcc

SEQ ID NO: 33303 - DNA, 38 bp, Artificial Sequence
  primer
gtaaaacgacggccagtccttccatgcagttctttgtg

SEQ ID NO: 33304 - DNA, 24 bp, Artificial Sequence
  primer
ccagctatcaggcctctattattg

SEQ ID NO: 33305 - DNA, 40 bp, Artificial Sequence
  primer
gtaaaacgacggccagtgactgtctcccaatttaagcctg

SEQ ID NO: 33306 - DNA, 39 bp, Artificial Sequence
  primer
gtaaaacgacggccagttggtagcaggtgagaagtcagg

SEQ ID NO: 33307 - DNA, 36 bp, Artificial Sequence
  primer
gtaaaacgacggccagtggtcgatgtgtttggcctg

SEQ ID NO: 33308 - DNA, 38 bp, Artificial Sequence
  primer
gtaaaacgacggccagtgtgtccttccatcaggttgtg

SEQ ID NO: 33309 - DNA, 22 bp, Artificial Sequence
  primer
ggaaagaatgggccataagatg

SEQ ID NO: 33310 - DNA, 21 bp, Artificial Sequence
  primer
gaagataaacagcggtggagg

SEQ ID NO: 33311 - DNA, 21 bp, Artificial Sequence
  primer
ccagatcactggtccattctc

SEQ ID NO: 33312 - DNA, 21 bp, Artificial Sequence
  primer
catttgtggcatcatccaaag

SEQ ID NO: 33313 - DNA, 23 bp, Artificial Sequence
  primer
tctgtgtgtgagaaatgttggtc

SEQ ID NO: 33314 - DNA, 22 bp, Artificial Sequence
  primer
tggtattgatcctagcctgctg

SEQ ID NO: 33315 - DNA, 38 bp, Artificial Sequence
  primer
gtaaaacgacggccagtgagttgatctcatggctgctc

SEQ ID NO: 33316 - DNA, 40 bp, Artificial Sequence
  primer
gtaaaacgacggccagtcagggatttgactaccttgtttg

SEQ ID NO: 33317 - DNA, 20 bp, Artificial Sequence
  primer
ggcaacagagcaagactgtg

SEQ ID NO: 33318 - DNA, 43 bp, Artificial Sequence
  primer
gtaaaacgacggccagtcgttacatccaatgttattgtaatcc

SEQ ID NO: 33319 - DNA, 21 bp, Artificial Sequence
  primer
ccttggagggagtttgttctg

SEQ ID NO: 33320 - DNA, 21 bp, Artificial Sequence
  primer
catctgggacttgattagccc

SEQ ID NO: 33321 - DNA, 38 bp, Artificial Sequence
  primer
gtaaaacgacggccagtttggatccggaaatataaccc

SEQ ID NO: 33322 - DNA, 40 bp, Artificial Sequence
  primer
gtaaaacgacggccagtgacactagtgggaggaaataggg

SEQ ID NO: 33323 - DNA, 36 bp, Artificial Sequence
  primer
gtaaaacgacggccagtgcatggtggcttacacctg

SEQ ID NO: 33324 - DNA, 38 bp, Artificial Sequence
  primer
gtaaaacgacggccagttgtgtggctaggtcttcatcc

SEQ ID NO: 33325 - DNA, 21 bp, Artificial Sequence
  primer
atcccttggtgccatagaagg

SEQ ID NO: 33326 - DNA, 38 bp, Artificial Sequence
  primer
gtaaaacgacggccagttctaagagctttgcctttggg

SEQ ID NO: 33327 - DNA, 22 bp, Artificial Sequence
  primer
cctctcactacctcttctgggc

SEQ ID NO: 33328 - DNA, 38 bp, Artificial Sequence
  primer
gtaaaacgacggccagttttgtagatggacaaggcgtg

SEQ ID NO: 33329 - DNA, 38 bp, Artificial Sequence
  primer
gtaaaacgacggccagtaccgtatagaattgcttcggc

SEQ ID NO: 33330 - DNA, 21 bp, Artificial Sequence
  primer
ccagcagtatacctcacgcac

SEQ ID NO: 33331 - DNA, 43 bp, Artificial Sequence
  primer
gtaaaacgacggccagtttcaaagcccatataataccattacc

SEQ ID NO: 33332 - DNA, 40 bp, Artificial Sequence
  primer
gtaaaacgacggccagttggcactattgagtatcacagga

SEQ ID NO: 33333 - DNA, 38 bp, Artificial Sequence
  primer
gtaaaacgacggccagtatgacctatagcccacatccc

SEQ ID NO: 33334 - DNA, 38 bp, Artificial Sequence
  primer
gtaaaacgacggccagttttcatgactaccattggccc

SEQ ID NO: 33335 - DNA, 43 bp, Artificial Sequence
  primer
gtaaaacgacggccagttttccactaggatgaatcctttatct

SEQ ID NO: 33336 - DNA, 21 bp, Artificial Sequence
  primer
ccagctaagtccagcatttcc

SEQ ID NO: 33337 - DNA, 21 bp, Artificial Sequence
  primer
agtgccacttctgcatctttg

SEQ ID NO: 33338 - DNA, 21 bp, Artificial Sequence
  primer
gatgaccttcggaaatgatcc

SEQ ID NO: 33339 - DNA, 21 bp, Artificial Sequence
  primer
aacccaatggtttgtttccag

SEQ ID NO: 33340 - DNA, 21 bp, Artificial Sequence
  primer
tcaaacgtcaaatccttcagc

SEQ ID NO: 33341 - DNA, 38 bp, Artificial Sequence
  primer
gtaaaacgacggccagtgcacatgaacttcccagatcc

SEQ ID NO: 33342 - DNA, 24 bp, Artificial Sequence
  primer
gtttgtagcactcacatatttgct

SEQ ID NO: 33343 - DNA, 38 bp, Artificial Sequence
  primer
gtaaaacgacggccagtatcatccttggttggacatgc

SEQ ID NO: 33344 - DNA, 21 bp, Artificial Sequence
  primer
ggaagattgtaagcctgtggc

SEQ ID NO: 33345 - DNA, 24 bp, Artificial Sequence
  primer
tgtttgctacagagataatgcagg

SEQ ID NO: 33346 - DNA, 39 bp, Artificial Sequence
  primer
gtaaaacgacggccagtaatccgagtgaagaagatgctg

SEQ ID NO: 33347 - DNA, 41 bp, Artificial Sequence
  primer
gtaaaacgacggccagtcctttagactacgacctccttagc

SEQ ID NO: 33348 - DNA, 43 bp, Artificial Sequence
  primer
gtaaaacgacggccagtagtgaaatgctagtaaattcgtcctt

SEQ ID NO: 33349 - DNA, 22 bp, Artificial Sequence
  primer
tggaagaagaaccatttaaccc

SEQ ID NO: 33350 - DNA, 43 bp, Artificial Sequence
  primer
gtaaaacgacggccagtcactgtacactgttatgcctcttagg

SEQ ID NO: 33351 - DNA, 21 bp, Artificial Sequence
  primer
cctaccctgcacttaagcaac

SEQ ID NO: 33352 - DNA, 38 bp, Artificial Sequence
  primer
gtaaaacgacggccagtctgatgccacttgacaggaat

SEQ ID NO: 33353 - DNA, 20 bp, Artificial Sequence
  primer
ctgggtgtcacagcaagacc

SEQ ID NO: 33354 - DNA, 41 bp, Artificial Sequence
  primer
gtaaaacgacggccagtcattcatcgcatttctaatcattg

SEQ ID NO: 33355 - DNA, 39 bp, Artificial Sequence
  primer
gtaaaacgacggccagtaagcacacaggagcactaattg

SEQ ID NO: 33356 - DNA, 47 bp, Artificial Sequence
  primer
gtaaaacgacggccagtaaagtcacagaaactacttgagatgatatt

SEQ ID NO: 33357 - DNA, 41 bp, Artificial Sequence
  primer
gtaaaacgacggccagttgtggtaagctctcccttaatttc

SEQ ID NO: 33358 - DNA, 21 bp, Artificial Sequence
  primer
gcatgcctcttgtgttctttg

SEQ ID NO: 33359 - DNA, 39 bp, Artificial Sequence
  primer
gtaaaacgacggccagtgaccactgaatttgaaacaccc

SEQ ID NO: 33360 - DNA, 42 bp, Artificial Sequence
  primer
gtaaaacgacggccagtggttggtgaaattgttagttgtttc

SEQ ID NO: 33361 - DNA, 23 bp, Artificial Sequence
  primer
ctacattctatgcatgggtaggg

SEQ ID NO: 33362 - DNA, 38 bp, Artificial Sequence
  primer
gtaaaacgacggccagttcatcttgatttgtggttggg

SEQ ID NO: 33363 - DNA, 24 bp, Artificial Sequence
  primer
gcaaatcatgatacctcttgtgtc

SEQ ID NO: 33364 - DNA, 38 bp, Artificial Sequence
  primer
gtaaaacgacggccagtctctcttgaaagccacagtgc

SEQ ID NO: 33365 - DNA, 42 bp, Artificial Sequence
  primer
gtaaaacgacggccagttccctttagtccagaaatatcatcc

SEQ ID NO: 33366 - DNA, 38 bp, Artificial Sequence
  primer
gtaaaacgacggccagtccctccaacaagactttgtcc

SEQ ID NO: 33367 - DNA, 24 bp, Artificial Sequence
  primer
gtgtgaaaggatgagaattgagaa

SEQ ID NO: 33368 - DNA, 28 bp, Artificial Sequence
  primer
cactgtattgtacctactttgaactgct

SEQ ID NO: 33369 - DNA, 21 bp, Artificial Sequence
  primer
acaaggcagcaagcttgtatt

SEQ ID NO: 33370 - DNA, 38 bp, Artificial Sequence
  primer
gtaaaacgacggccagtagtgatattgcatggaggcac

SEQ ID NO: 33371 - DNA, 38 bp, Artificial Sequence
  primer
gtaaaacgacggccagtttatccagcccatcacagaag

SEQ ID NO: 33372 - DNA, 38 bp, Artificial Sequence
  primer
gtaaaacgacggccagtcttattggtgctgccaaacac

SEQ ID NO: 33373 - DNA, 21 bp, Artificial Sequence
  primer
gtgaaacagacagacgcatgg

SEQ ID NO: 33374 - DNA, 25 bp, Artificial Sequence
  primer
ttctgagagatcatcttgttcttcc

SEQ ID NO: 33375 - DNA, 20 bp, Artificial Sequence
  primer
gtgcaacacagcaagaccct

SEQ ID NO: 33376 - DNA, 42 bp, Artificial Sequence
  primer
gtaaaacgacggccagtgggttaaatccatagactcttgagc

SEQ ID NO: 33377 - DNA, 27 bp, Artificial Sequence
  primer
tgactgatttatgaatgagaaatgaac

SEQ ID NO: 33378 - DNA, 23 bp, Artificial Sequence
  primer
ggcctaggttgtaattcttcagg

SEQ ID NO: 33379 - DNA, 25 bp, Artificial Sequence
  primer
gaatcttagcactgtccaagagtga

SEQ ID NO: 33380 - DNA, 21 bp, Artificial Sequence
  primer
ccacaccactattctccagcc

SEQ ID NO: 33381 - DNA, 23 bp, Artificial Sequence
  primer
catcagtagtccatagggtcacg

SEQ ID NO: 33382 - DNA, 38 bp, Artificial Sequence
  primer
gtaaaacgacggccagtaacgtattctcactggtcccg

SEQ ID NO: 33383 - DNA, 21 bp, Artificial Sequence
  primer
gacaaagcctacggaatctgg

SEQ ID NO: 33384 - DNA, 38 bp, Artificial Sequence
  primer
gtaaaacgacggccagttgtgtccctcacttcctcctc

SEQ ID NO: 33385 - DNA, 38 bp, Artificial Sequence
  primer
gtaaaacgacggccagtcgggacgagtacagctatgtg

SEQ ID NO: 33386 - DNA, 21 bp, Artificial Sequence
  primer
gacgacaggtacaactggtgc

SEQ ID NO: 33387 - DNA, 38 bp, Artificial Sequence
  primer
gtaaaacgacggccagtgctgggcatatccactctttc

SEQ ID NO: 33388 - DNA, 38 bp, Artificial Sequence
  primer
gtaaaacgacggccagtatggtgctggctagagtaggg

SEQ ID NO: 33389 - DNA, 21 bp, Artificial Sequence
  primer
aggcagcctttaagctgagac

SEQ ID NO: 33390 - DNA, 38 bp, Artificial Sequence
  primer
gtaaaacgacggccagtaggagaaaggagggaaaccag

SEQ ID NO: 33391 - DNA, 38 bp, Artificial Sequence
  primer
gtaaaacgacggccagttgctaacatgcatctgttccc

SEQ ID NO: 33392 - DNA, 21 bp, Artificial Sequence
  primer
tgatttaaacctgggcctctg

SEQ ID NO: 33393 - DNA, 21 bp, Artificial Sequence
  primer
gaggatttccgtctgtgtgtg

SEQ ID NO: 33394 - DNA, 38 bp, Artificial Sequence
  primer
gtaaaacgacggccagtgttcgtggttgaaagacttgg

SEQ ID NO: 33395 - DNA, 39 bp, Artificial Sequence
  primer
gtaaaacgacggccagtaaaccacttccttggtttctcc

SEQ ID NO: 33396 - DNA, 41 bp, Artificial Sequence
  primer
gtaaaacgacggccagtcacaggtaaatgtgagttaagccc

SEQ ID NO: 33397 - DNA, 20 bp, Artificial Sequence
  primer
ttccatcaactcatggcagg

SEQ ID NO: 33398 - DNA, 26 bp, Artificial Sequence
  primer
caaaccttaagtaacaccagtgattt

SEQ ID NO: 33399 - DNA, 40 bp, Artificial Sequence
  primer
gtaaaacgacggccagttttccaagttgggattcttagtg

SEQ ID NO: 33400 - DNA, 40 bp, Artificial Sequence
  primer
gtaaaacgacggccagttgtttcttacctcaagccatagg

SEQ ID NO: 33401 - DNA, 37 bp, Artificial Sequence
  primer
gtaaaacgacggccagttcttcaagttgccagttggg

SEQ ID NO: 33402 - DNA, 41 bp, Artificial Sequence
  primer
gtaaaacgacggccagttgtaagcatgagaacttgtgtgtg

SEQ ID NO: 33403 - DNA, 40 bp, Artificial Sequence
  primer
gtaaaacgacggccagttttggtcaaggaagaaagagagg

SEQ ID NO: 33404 - DNA, 39 bp, Artificial Sequence
  primer
gtaaaacgacggccagttttcctttggatcagtagtggg

SEQ ID NO: 33405 - DNA, 20 bp, Artificial Sequence
  primer
agtgatgggcatgaaaccac

SEQ ID NO: 33406 - DNA, 42 bp, Artificial Sequence
  primer
gtaaaacgacggccagtttgtaataggcccatcatttacttt

SEQ ID NO: 33407 - DNA, 23 bp, Artificial Sequence
  primer
gcagattgataattctgattgcc

SEQ ID NO: 33408 - DNA, 40 bp, Artificial Sequence
  primer
gtaaaacgacggccagtcatacagcaagaaacactttcgg

SEQ ID NO: 33409 - DNA, 43 bp, Artificial Sequence
  primer
gtaaaacgacggccagtttgactatcatttatttctcaagggc

SEQ ID NO: 33410 - DNA, 38 bp, Artificial Sequence
  primer
gtaaaacgacggccagtcagaaatggaatttggagctg

SEQ ID NO: 33411 - DNA, 21 bp, Artificial Sequence
  primer
aagtcattgacctgggctttg

SEQ ID NO: 33412 - DNA, 21 bp, Artificial Sequence
  primer
tgttctcactgaggagttggc

SEQ ID NO: 33413 - DNA, 39 bp, Artificial Sequence
  primer
gtaaaacgacggccagtcattccttagtttccaactggg

SEQ ID NO: 33414 - DNA, 37 bp, Artificial Sequence
  primer
gtaaaacgacggccagttcacccagctgtgagatgtg

SEQ ID NO: 33415 - DNA, 24 bp, Artificial Sequence
  primer
ttggactggcagactatgttaatc

SEQ ID NO: 33416 - DNA, 20 bp, Artificial Sequence
  primer
gtgcccagcctagctcactt

SEQ ID NO: 33417 - DNA, 38 bp, Artificial Sequence
  primer
gtaaaacgacggccagtggaacaggcagtgaagaggtc

SEQ ID NO: 33418 - DNA, 38 bp, Artificial Sequence
  primer
gtaaaacgacggccagttgctagccctgtcattctagg

SEQ ID NO: 33419 - DNA, 21 bp, Artificial Sequence
  primer
aggtcagaagccataagggag

SEQ ID NO: 33420 - DNA, 38 bp, Artificial Sequence
  primer
gtaaaacgacggccagtcagaccaggagcttcgaaatg

SEQ ID NO: 33421 - DNA, 38 bp, Artificial Sequence
  primer
gtaaaacgacggccagtaggacccgagactaggaggag

SEQ ID NO: 33422 - DNA, 37 bp, Artificial Sequence
  primer
gtaaaacgacggccagtgacaagcaagggagctgatg

SEQ ID NO: 33423 - DNA, 37 bp, Artificial Sequence
  primer
gtaaaacgacggccagtgtgtgtccttccctgagctg

SEQ ID NO: 33424 - DNA, 36 bp, Artificial Sequence
  primer
gtaaaacgacggccagtagcacaggtctcgtgggag

SEQ ID NO: 33425 - DNA, 21 bp, Artificial Sequence
  primer
gaggaagacaagcagcagaag

SEQ ID NO: 33426 - DNA, 20 bp, Artificial Sequence
  primer
ctgtttcacgtgacggttcc

SEQ ID NO: 33427 - DNA, 37 bp, Artificial Sequence
  primer
gtaaaacgacggccagtggtagcctggtttgctctgg

SEQ ID NO: 33428 - DNA, 36 bp, Artificial Sequence
  primer
gtaaaacgacggccagtatgctgccgaagcactagg

SEQ ID NO: 33429 - DNA, 20 bp, Artificial Sequence
  primer
ctggaacaacagccatgagg

SEQ ID NO: 33430 - DNA, 37 bp, Artificial Sequence
  primer
gtaaaacgacggccagtgaagatgctggacaggctcc

SEQ ID NO: 33431 - DNA, 38 bp, Artificial Sequence
  primer
gtaaaacgacggccagtgggtacccttgacactgaacc

SEQ ID NO: 33432 - DNA, 37 bp, Artificial Sequence
  primer
gtaaaacgacggccagtccacagggccatgtactctc

SEQ ID NO: 33433 - DNA, 38 bp, Artificial Sequence
  primer
gtaaaacgacggccagtgaacttggtaccgttgctgtg

SEQ ID NO: 33434 - DNA, 38 bp, Artificial Sequence
  primer
gtaaaacgacggccagtggctcgtactcaaggtcaagg

SEQ ID NO: 33435 - DNA, 38 bp, Artificial Sequence
  primer
gtaaaacgacggccagtaggataaacgggtagagacgc

SEQ ID NO: 33436 - DNA, 21 bp, Artificial Sequence
  primer
ttcccatgtctacactgcctg

SEQ ID NO: 33437 - DNA, 38 bp, Artificial Sequence
  primer
gtaaaacgacggccagtggtggtgttcctgtgtagcag

SEQ ID NO: 33438 - DNA, 21 bp, Artificial Sequence
  primer
aacttgctgaagagctttggg

SEQ ID NO: 33439 - DNA, 38 bp, Artificial Sequence
  primer
gtaaaacgacggccagttaaggctggcaaacagtcaac

SEQ ID NO: 33440 - DNA, 22 bp, Artificial Sequence
  primer
gcagggtcaagatgataagcag

SEQ ID NO: 33441 - DNA, 21 bp, Artificial Sequence
  primer
acgtacgtgtctgcatgtgtg

SEQ ID NO: 33442 - DNA, 21 bp, Artificial Sequence
  primer
tgaacacaaagggactgatgg

SEQ ID NO: 33443 - DNA, 38 bp, Artificial Sequence
  primer
gtaaaacgacggccagtcgacgaccactatgagtttgc

SEQ ID NO: 33444 - DNA, 37 bp, Artificial Sequence
  primer
gtaaaacgacggccagtgagccgcaatgtctcttgac

SEQ ID NO: 33445 - DNA, 20 bp, Artificial Sequence
  primer
ggatcctgagttggaaccac

SEQ ID NO: 33446 - DNA, 21 bp, Artificial Sequence
  primer
tatcgagctgcttgctaatgg

SEQ ID NO: 33447 - DNA, 36 bp, Artificial Sequence
  primer
gtaaaacgacggccagtctgcctcctgatgccattt

SEQ ID NO: 33448 - DNA, 21 bp, Artificial Sequence
  primer
ggctcactgtagcctcgaact

SEQ ID NO: 33449 - DNA, 38 bp, Artificial Sequence
  primer
gtaaaacgacggccagtagtgacaccttacaggcatgg

SEQ ID NO: 33450 - DNA, 38 bp, Artificial Sequence
  primer
gtaaaacgacggccagtacacatccctttctcctgtgg

SEQ ID NO: 33451 - DNA, 38 bp, Artificial Sequence
  primer
gtaaaacgacggccagtcagcagtgtgagctgtgtctg

SEQ ID NO: 33452 - DNA, 19 bp, Artificial Sequence
  primer
acggtggagctgagctgtg

SEQ ID NO: 33453 - DNA, 20 bp, Artificial Sequence
  primer
cagggcaggtctgcttcttc

SEQ ID NO: 33454 - DNA, 20 bp, Artificial Sequence
  primer
ggtgctgacgaattgtgttg

SEQ ID NO: 33455 - DNA, 37 bp, Artificial Sequence
  primer
gtaaaacgacggccagtttatcctcagtgtcgggcag

SEQ ID NO: 33456 - DNA, 21 bp, Artificial Sequence
  primer
gtctgagctttggctttgcac

SEQ ID NO: 33457 - DNA, 37 bp, Artificial Sequence
  primer
gtaaaacgacggccagtctcccactgctgtgaagtcc

SEQ ID NO: 33458 - DNA, 38 bp, Artificial Sequence
  primer
gtaaaacgacggccagtctctgctgggattcaggtagc

SEQ ID NO: 33459 - DNA, 21 bp, Artificial Sequence
  primer
agacattagccactgtgcgtg

SEQ ID NO: 33460 - DNA, 36 bp, Artificial Sequence
  primer
gtaaaacgacggccagtggaggatcgaccgacagac

SEQ ID NO: 33461 - DNA, 20 bp, Artificial Sequence
  primer
agcaaccagggaagggaaac

SEQ ID NO: 33462 - DNA, 39 bp, Artificial Sequence
  primer
gtaaaacgacggccagtagcaaataccctctgtcctcac

SEQ ID NO: 33463 - DNA, 38 bp, Artificial Sequence
  primer
gtaaaacgacggccagttctgaagacccaatcttgctg

SEQ ID NO: 33464 - DNA, 20 bp, Artificial Sequence
  primer
agggagaagctgagtctggc

SEQ ID NO: 33465 - DNA, 22 bp, Artificial Sequence
  primer
cagttcaggctttatctcctgg

SEQ ID NO: 33466 - DNA, 20 bp, Artificial Sequence
  primer
aggattccaaggaggcagag

SEQ ID NO: 33467 - DNA, 21 bp, Artificial Sequence
  primer
cctgtcagggtctttcctcac

SEQ ID NO: 33468 - DNA, 21 bp, Artificial Sequence
  primer
cactcccagcagaaagaggag

SEQ ID NO: 33469 - DNA, 21 bp, Artificial Sequence
  primer
gagagacaaagccacctgtcc

SEQ ID NO: 33470 - DNA, 35 bp, Artificial Sequence
  primer
gtaaaacgacggccagtcgtcagggctgagctagg

SEQ ID NO: 33471 - DNA, 21 bp, Artificial Sequence
  primer
aaatgggacatttctggttcc

SEQ ID NO: 33472 - DNA, 21 bp, Artificial Sequence
  primer
cagcagctctgggttgagtag

SEQ ID NO: 33473 - DNA, 38 bp, Artificial Sequence
  primer
gtaaaacgacggccagtgtggaaccacaagcaattctg

SEQ ID NO: 33474 - DNA, 38 bp, Artificial Sequence
  primer
gtaaaacgacggccagtccaacaaaggcagacacagag

SEQ ID NO: 33475 - DNA, 38 bp, Artificial Sequence
  primer
gtaaaacgacggccagtgaggagttagtggccagatcg

SEQ ID NO: 33476 - DNA, 22 bp, Artificial Sequence
  primer
gaaataaagggttatccaggcg

SEQ ID NO: 33477 - DNA, 38 bp, Artificial Sequence
  primer
gtaaaacgacggccagtcaactacggtgaggaaggagc

SEQ ID NO: 33478 - DNA, 21 bp, Artificial Sequence
  primer
aagcccttctctgaggatgtg

SEQ ID NO: 33479 - DNA, 19 bp, Artificial Sequence
  primer
ctggctgatgccactggtc

SEQ ID NO: 33480 - DNA, 21 bp, Artificial Sequence
  primer
aactccaagaggcagaactcg

SEQ ID NO: 33481 - DNA, 21 bp, Artificial Sequence
  primer
tgtcctgtacatgttggcctg

SEQ ID NO: 33482 - DNA, 21 bp, Artificial Sequence
  primer
gccacagagtatgcagcagtg

SEQ ID NO: 33483 - DNA, 40 bp, Artificial Sequence
  primer
gtaaaacgacggccagtcattctgtgctagatctcggttg

SEQ ID NO: 33484 - DNA, 38 bp, Artificial Sequence
  primer
gtaaaacgacggccagtgaaaggttctggattcccatc

SEQ ID NO: 33485 - DNA, 38 bp, Artificial Sequence
  primer
gtaaaacgacggccagtaatgggtcaagatgtggatgg

SEQ ID NO: 33486 - DNA, 21 bp, Artificial Sequence
  primer
ctctattgcagcctgggtgac

SEQ ID NO: 33487 - DNA, 21 bp, Artificial Sequence
  primer
tttatcagtgatgggatgggc

SEQ ID NO: 33488 - DNA, 37 bp, Artificial Sequence
  primer
gtaaaacgacggccagtgtgcttgttgcaactcaggg

SEQ ID NO: 33489 - DNA, 21 bp, Artificial Sequence
  primer
agcctcgtgattccttcattg

SEQ ID NO: 33490 - DNA, 39 bp, Artificial Sequence
  primer
gtaaaacgacggccagtggctagccaaggttaatccatc

SEQ ID NO: 33491 - DNA, 38 bp, Artificial Sequence
  primer
gtaaaacgacggccagtactttgctcacaatctgcacc

SEQ ID NO: 33492 - DNA, 21 bp, Artificial Sequence
  primer
ctctcacccaaagcaggaaac

SEQ ID NO: 33493 - DNA, 37 bp, Artificial Sequence
  primer
gtaaaacgacggccagtctctgcaggtcctggaaacc

SEQ ID NO: 33494 - DNA, 21 bp, Artificial Sequence
  primer
gggagtacagcaaatgggttg

SEQ ID NO: 33495 - DNA, 37 bp, Artificial Sequence
  primer
gtaaaacgacggccagttcctcacctcatgatccacc

SEQ ID NO: 33496 - DNA, 38 bp, Artificial Sequence
  primer
gtaaaacgacggccagttgcaccatacaccaataaccc

SEQ ID NO: 33497 - DNA, 38 bp, Artificial Sequence
  primer
gtaaaacgacggccagtagagatttggagagtggcgtc

SEQ ID NO: 33498 - DNA, 38 bp, Artificial Sequence
  primer
gtaaaacgacggccagtattcctgtcccttgcactgag

SEQ ID NO: 33499 - DNA, 38 bp, Artificial Sequence
  primer
gtaaaacgacggccagtcaggatctgcctacaaactgg

SEQ ID NO: 33500 - DNA, 38 bp, Artificial Sequence
  primer
gtaaaacgacggccagtagtttcacaagtctgccaggg

SEQ ID NO: 33501 - DNA, 38 bp, Artificial Sequence
  primer
gtaaaacgacggccagtcactgccattatctgggacag

SEQ ID NO: 33502 - DNA, 37 bp, Artificial Sequence
  primer
gtaaaacgacggccagtcaaatgatgcaatggctgtc

SEQ ID NO: 33503 - DNA, 37 bp, Artificial Sequence
  primer
gtaaaacgacggccagtaaacagccaggccctaattg

SEQ ID NO: 33504 - DNA, 38 bp, Artificial Sequence
  primer
gtaaaacgacggccagtgggaagagaagactgctcagg

SEQ ID NO: 33505 - DNA, 38 bp, Artificial Sequence
  primer
gtaaaacgacggccagtcagatacaggcacaaggcatc

SEQ ID NO: 33506 - DNA, 21 bp, Artificial Sequence
  primer
ctagcagcatcattcaaagcc

SEQ ID NO: 33507 - DNA, 21 bp, Artificial Sequence
  primer
gtcacctctgtgaagtttggg

SEQ ID NO: 33508 - DNA, 38 bp, Artificial Sequence
  primer
gtaaaacgacggccagtaagtccctagtggctcacctg

SEQ ID NO: 33509 - DNA, 38 bp, Artificial Sequence
  primer
gtaaaacgacggccagttgaacctgatatggtcctggg

SEQ ID NO: 33510 - DNA, 38 bp, Artificial Sequence
  primer
gtaaaacgacggccagtcatgctttactctgggctgtg

SEQ ID NO: 33511 - DNA, 21 bp, Artificial Sequence
  primer
cagtgtgggactttggtgaag

SEQ ID NO: 33512 - DNA, 37 bp, Artificial Sequence
  primer
gtaaaacgacggccagtcttgtccttggtctggcttg

SEQ ID NO: 33513 - DNA, 23 bp, Artificial Sequence
  primer
aacaactgtcctcaagttgatcg

SEQ ID NO: 33514 - DNA, 40 bp, Artificial Sequence
  primer
gtaaaacgacggccagttcatttgacaagcaacttgatcc

SEQ ID NO: 33515 - DNA, 38 bp, Artificial Sequence
  primer
gtaaaacgacggccagtccttaaatgtgctgaggtccc

SEQ ID NO: 33516 - DNA, 39 bp, Artificial Sequence
  primer
gtaaaacgacggccagtcactcccacagttctcttcacc

SEQ ID NO: 33517 - DNA, 38 bp, Artificial Sequence
  primer
gtaaaacgacggccagtgcaggttcaaactcttctccg

SEQ ID NO: 33518 - DNA, 25 bp, Artificial Sequence
  primer
gttagaatcccactttaatgtttgc

SEQ ID NO: 33519 - DNA, 22 bp, Artificial Sequence
  primer
cgtcatcctagagtgcgtgaac

SEQ ID NO: 33520 - DNA, 40 bp, Artificial Sequence
  primer
gtaaaacgacggccagtaatgggatgttacaagtaggcag

SEQ ID NO: 33521 - DNA, 38 bp, Artificial Sequence
  primer
gtaaaacgacggccagtttaggccacaaaggaatggat

SEQ ID NO: 33522 - DNA, 22 bp, Artificial Sequence
  primer
tggagtttgctcctgttaacct

SEQ ID NO: 33523 - DNA, 36 bp, Artificial Sequence
  primer
gtaaaacgacggccagtgacagccgacagcgaactc

SEQ ID NO: 33524 - DNA, 42 bp, Artificial Sequence
  primer
gtaaaacgacggccagtgttggtagctcaaattaaatgaacc

SEQ ID NO: 33525 - DNA, 41 bp, Artificial Sequence
  primer
gtaaaacgacggccagttgaattcccttcttcattaactgg

SEQ ID NO: 33526 - DNA, 21 bp, Artificial Sequence
  primer
cgatagtgatgcacaccacac

SEQ ID NO: 33527 - DNA, 21 bp, Artificial Sequence
  primer
cacaaggtgagtaccacaggg

SEQ ID NO: 33528 - DNA, 23 bp, Artificial Sequence
  primer
tcgtgtatttggtaaaggtccag

SEQ ID NO: 33529 - DNA, 21 bp, Artificial Sequence
  primer
tgtgtcaagtttgcccaattc

SEQ ID NO: 33530 - DNA, 21 bp, Artificial Sequence
  primer
cagcttctaggaccaacccag

SEQ ID NO: 33531 - DNA, 38 bp, Artificial Sequence
  primer
gtaaaacgacggccagtaggtccaaggacattgcctac

SEQ ID NO: 33532 - DNA, 38 bp, Artificial Sequence
  primer
gtaaaacgacggccagtgcacataggcactttcacacg

SEQ ID NO: 33533 - DNA, 38 bp, Artificial Sequence
  primer
gtaaaacgacggccagtagacacagagacgcactgtcc

SEQ ID NO: 33534 - DNA, 38 bp, Artificial Sequence
  primer
gtaaaacgacggccagtcttcacgtatctgcatggcac

SEQ ID NO: 33535 - DNA, 39 bp, Artificial Sequence
  primer
gtaaaacgacggccagtgggtaggagtgagaaagaaggg

SEQ ID NO: 33536 - DNA, 38 bp, Artificial Sequence
  primer
gtaaaacgacggccagttcctaacaaaggcccgtagag

SEQ ID NO: 33537 - DNA, 39 bp, Artificial Sequence
  primer
gtaaaacgacggccagtaagaacctcctgattctccagg

SEQ ID NO: 33538 - DNA, 38 bp, Artificial Sequence
  primer
gtaaaacgacggccagttgtccagaagaggtagccagg

SEQ ID NO: 33539 - DNA, 21 bp, Artificial Sequence
  primer
ggctgtactcagcctgtaggg

SEQ ID NO: 33540 - DNA, 38 bp, Artificial Sequence
  primer
gtaaaacgacggccagttccttgaccttgtgatccacc

SEQ ID NO: 33541 - DNA, 38 bp, Artificial Sequence
  primer
gtaaaacgacggccagttactagtgctggaggctgctg

SEQ ID NO: 33542 - DNA, 23 bp, Artificial Sequence
  primer
gaggatcagatgaaacactcctg

SEQ ID NO: 33543 - DNA, 21 bp, Artificial Sequence
  primer
tgctgggtcactgtctgtagg

SEQ ID NO: 33544 - DNA, 20 bp, Artificial Sequence
  primer
ccctcagtcatggcagtcag

SEQ ID NO: 33545 - DNA, 38 bp, Artificial Sequence
  primer
gtaaaacgacggccagtgccatgtggagaaagcaagac

SEQ ID NO: 33546 - DNA, 21 bp, Artificial Sequence
  primer
attctctcggctctgctgttc

SEQ ID NO: 33547 - DNA, 38 bp, Artificial Sequence
  primer
gtaaaacgacggccagttcggaactcagcctttctttc

SEQ ID NO: 33548 - DNA, 22 bp, Artificial Sequence
  primer
tcatgttgagtgtgtgtctccc

SEQ ID NO: 33549 - DNA, 38 bp, Artificial Sequence
  primer
gtaaaacgacggccagtagacccatgatttgccaacac

SEQ ID NO: 33550 - DNA, 38 bp, Artificial Sequence
  primer
gtaaaacgacggccagtctgagaatgaaggtgtgtggg

SEQ ID NO: 33551 - DNA, 38 bp, Artificial Sequence
  primer
gtaaaacgacggccagtagtatgaccggagaagcccag

SEQ ID NO: 33552 - DNA, 20 bp, Artificial Sequence
  primer
ccgaggagctgagggtttac

SEQ ID NO: 33553 - DNA, 37 bp, Artificial Sequence
  primer
gtaaaacgacggccagtatcagaagtcgcagctctgg

SEQ ID NO: 33554 - DNA, 37 bp, Artificial Sequence
  primer
gtaaaacgacggccagtcaatgtctgcctccacatcc

SEQ ID NO: 33555 - DNA, 38 bp, Artificial Sequence
  primer
gtaaaacgacggccagtcacacagtgataggagcaggg

SEQ ID NO: 33556 - DNA, 38 bp, Artificial Sequence
  primer
gtaaaacgacggccagtcccttccagtagttgctgagg

SEQ ID NO: 33557 - DNA, 38 bp, Artificial Sequence
  primer
gtaaaacgacggccagttcttctgccacaatgacatcc

SEQ ID NO: 33558 - DNA, 38 bp, Artificial Sequence
  primer
gtaaaacgacggccagttggaaagatggcttcccatag

SEQ ID NO: 33559 - DNA, 38 bp, Artificial Sequence
  primer
gtaaaacgacggccagtcaagaacagcaggtatgtggg

SEQ ID NO: 33560 - DNA, 38 bp, Artificial Sequence
  primer
gtaaaacgacggccagtagtcagtcggtgaggaaggag

SEQ ID NO: 33561 - DNA, 20 bp, Artificial Sequence
  primer
ggcatccatgtccaccatag

SEQ ID NO: 33562 - DNA, 22 bp, Artificial Sequence
  primer
ggaggaaacatactgccaaacc

SEQ ID NO: 33563 - DNA, 26 bp, Artificial Sequence
  primer
gcaaagagagagtgagatttattctg

SEQ ID NO: 33564 - DNA, 27 bp, Artificial Sequence
  primer
caatcttaatcctctcatttatcaagc

SEQ ID NO: 33565 - DNA, 26 bp, Artificial Sequence
  primer
tgtaagaaccaggatctgtagcatag

SEQ ID NO: 33566 - DNA, 40 bp, Artificial Sequence
  primer
gtaaaacgacggccagtttcctatttgctcattgttcctg

SEQ ID NO: 33567 - DNA, 22 bp, Artificial Sequence
  primer
tcccaaaggcaatgttctagtg

SEQ ID NO: 33568 - DNA, 21 bp, Artificial Sequence
  primer
caacccatgcttcatggtaag

SEQ ID NO: 33569 - DNA, 22 bp, Artificial Sequence
  primer
caccctgataaaggatgtgtcc

SEQ ID NO: 33570 - DNA, 40 bp, Artificial Sequence
  primer
gtaaaacgacggccagttggtgcaaagtagaaatacaggc

SEQ ID NO: 33571 - DNA, 21 bp, Artificial Sequence
  primer
attctgggaggtccagatgag

SEQ ID NO: 33572 - DNA, 38 bp, Artificial Sequence
  primer
gtaaaacgacggccagtcctactcatctgacaaagggc

SEQ ID NO: 33573 - DNA, 38 bp, Artificial Sequence
  primer
gtaaaacgacggccagtgaagcactgagcatggacttg

SEQ ID NO: 33574 - DNA, 39 bp, Artificial Sequence
  primer
gtaaaacgacggccagtttgggttacttaacttgcaggc

SEQ ID NO: 33575 - DNA, 21 bp, Artificial Sequence
  primer
caggtttcaactgtggcattc

SEQ ID NO: 33576 - DNA, 38 bp, Artificial Sequence
  primer
gtaaaacgacggccagtacctcctctgtctccgggtag

SEQ ID NO: 33577 - DNA, 38 bp, Artificial Sequence
  primer
gtaaaacgacggccagtgcggtaggaagacttgggata

SEQ ID NO: 33578 - DNA, 44 bp, Artificial Sequence
  primer
gtaaaacgacggccagtaattatttcactccaagaagactgttt

SEQ ID NO: 33579 - DNA, 38 bp, Artificial Sequence
  primer
gtaaaacgacggccagtagggtggttcaccatcatctc

SEQ ID NO: 33580 - DNA, 38 bp, Artificial Sequence
  primer
gtaaaacgacggccagtggagggctttgtttctcagtg

SEQ ID NO: 33581 - DNA, 44 bp, Artificial Sequence
  primer
gtaaaacgacggccagtgaattggtatctttcctgagaataaag

SEQ ID NO: 33582 - DNA, 21 bp, Artificial Sequence
  primer
attgggctactgcattccatc

SEQ ID NO: 33583 - DNA, 21 bp, Artificial Sequence
  primer
atgggagcaaagggcttattc

SEQ ID NO: 33584 - DNA, 21 bp, Artificial Sequence
  primer
cttaaatggccatgcattgag

SEQ ID NO: 33585 - DNA, 20 bp, Artificial Sequence
  primer
caaattgcattccttctggg

SEQ ID NO: 33586 - DNA, 41 bp, Artificial Sequence
  primer
gtaaaacgacggccagtttgagcaatgctgttcttactgac

SEQ ID NO: 33587 - DNA, 41 bp, Artificial Sequence
  primer
gtaaaacgacggccagttcttcaatgctaacacaaatgtcc

SEQ ID NO: 33588 - DNA, 39 bp, Artificial Sequence
  primer
gtaaaacgacggccagttccacccaagaactacaacacc

SEQ ID NO: 33589 - DNA, 21 bp, Artificial Sequence
  primer
caaggatgggtctctttggtg

SEQ ID NO: 33590 - DNA, 21 bp, Artificial Sequence
  primer
ccacttccacttatgtgagcc

SEQ ID NO: 33591 - DNA, 41 bp, Artificial Sequence
  primer
gtaaaacgacggccagtaaacacttgttggactttctttgg

SEQ ID NO: 33592 - DNA, 40 bp, Artificial Sequence
  primer
gtaaaacgacggccagtcatcactgtggtaatttgcttcc

SEQ ID NO: 33593 - DNA, 21 bp, Artificial Sequence
  primer
tgaagatgtcgaagaagctgg

SEQ ID NO: 33594 - DNA, 20 bp, Artificial Sequence
  primer
agaacaaactccaagcagcg

SEQ ID NO: 33595 - DNA, 21 bp, Artificial Sequence
  primer
tttggacaaacaaagccagag

SEQ ID NO: 33596 - DNA, 44 bp, Artificial Sequence
  primer
gtaaaacgacggccagtgagtggaaacgataatcctgttatatg

SEQ ID NO: 33597 - DNA, 40 bp, Artificial Sequence
  primer
gtaaaacgacggccagttctgtgaaacacacttcatctcc

SEQ ID NO: 33598 - DNA, 39 bp, Artificial Sequence
  primer
gtaaaacgacggccagttcttgcttagggacacttctgg

SEQ ID NO: 33599 - DNA, 41 bp, Artificial Sequence
  primer
gtaaaacgacggccagtaaacatggaattgtaggcaagttt

SEQ ID NO: 33600 - DNA, 37 bp, Artificial Sequence
  primer
gtaaaacgacggccagtctttgaaacgtgccttctgg

SEQ ID NO: 33601 - DNA, 43 bp, Artificial Sequence
  primer
gtaaaacgacggccagtaaatatgtttcaaattctgttccaaa

SEQ ID NO: 33602 - DNA, 22 bp, Artificial Sequence
  primer
ttgtaaccaccatgacttgctc

SEQ ID NO: 33603 - DNA, 39 bp, Artificial Sequence
  primer
gtaaaacgacggccagtcatggcttaatcggtaataggc

SEQ ID NO: 33604 - DNA, 39 bp, Artificial Sequence
  primer
gtaaaacgacggccagtagttaatgccagaaatgcacac

SEQ ID NO: 33605 - DNA, 38 bp, Artificial Sequence
  primer
gtaaaacgacggccagtctgcaacttcagtgcttctgg

SEQ ID NO: 33606 - DNA, 38 bp, Artificial Sequence
  primer
gtaaaacgacggccagtgaagtggtcagagggttctgc

SEQ ID NO: 33607 - DNA, 21 bp, Artificial Sequence
  primer
tacgccagtcaggatatggag

SEQ ID NO: 33608 - DNA, 24 bp, Artificial Sequence
  primer
gcaggaggtttaatattgatttgg

SEQ ID NO: 33609 - DNA, 38 bp, Artificial Sequence
  primer
gtaaaacgacggccagtctaggattcttgcatttcggg

SEQ ID NO: 33610 - DNA, 42 bp, Artificial Sequence
  primer
gtaaaacgacggccagttcatcttgcactacaatagatggtc

SEQ ID NO: 33611 - DNA, 38 bp, Artificial Sequence
  primer
gtaaaacgacggccagtcgacaaagaatctggacgatg

SEQ ID NO: 33612 - DNA, 37 bp, Artificial Sequence
  primer
gtaaaacgacggccagtgagcttgtgctgtacgggtc

SEQ ID NO: 33613 - DNA, 37 bp, Artificial Sequence
  primer
gtaaaacgacggccagtcgggagcggacttaccttac

SEQ ID NO: 33614 - DNA, 21 bp, Artificial Sequence
  primer
tgtggttaagtcgatggatgc

SEQ ID NO: 33615 - DNA, 36 bp, Artificial Sequence
  primer
gtaaaacgacggccagtactctctccgaggtgtggg

SEQ ID NO: 33616 - DNA, 27 bp, Artificial Sequence
  primer
ttactccaactaagtaaggaccaagac

SEQ ID NO: 33617 - DNA, 19 bp, Artificial Sequence
  primer
gtttgaattgctcctgggc

SEQ ID NO: 33618 - DNA, 21 bp, Artificial Sequence
  primer
acctgctggtagaactgggac

SEQ ID NO: 33619 - DNA, 38 bp, Artificial Sequence
  primer
gtaaaacgacggccagtcaacaagagaaggtggtggtg

SEQ ID NO: 33620 - DNA, 23 bp, Artificial Sequence
  primer
cgattcagagagattagccacag

SEQ ID NO: 33621 - DNA, 38 bp, Artificial Sequence
  primer
gtaaaacgacggccagttgggaatgaaactgggttctc

SEQ ID NO: 33622 - DNA, 21 bp, Artificial Sequence
  primer
ggcctcagtgagctgtgatac

SEQ ID NO: 33623 - DNA, 39 bp, Artificial Sequence
  primer
gtaaaacgacggccagtcaccaagaaagaactgctggag

SEQ ID NO: 33624 - DNA, 39 bp, Artificial Sequence
  primer
gtaaaacgacggccagttcccagcttaaagtgtgaggag

SEQ ID NO: 33625 - DNA, 38 bp, Artificial Sequence
  primer
gtaaaacgacggccagtaggcatgctggagatcagaag

SEQ ID NO: 33626 - DNA, 39 bp, Artificial Sequence
  primer
gtaaaacgacggccagtgctgtggacaaggaattacgag

SEQ ID NO: 33627 - DNA, 38 bp, Artificial Sequence
  primer
gtaaaacgacggccagtagttgataagcggacgcaaac

SEQ ID NO: 33628 - DNA, 20 bp, Artificial Sequence
  primer
tcatctggtggagcaggaag

SEQ ID NO: 33629 - DNA, 21 bp, Artificial Sequence
  primer
gagtccacaaggtttccatgc

SEQ ID NO: 33630 - DNA, 22 bp, Artificial Sequence
  primer
tttgaaggcacgttgatatgtg

SEQ ID NO: 33631 - DNA, 22 bp, Artificial Sequence
  primer
tgggaaatgagcctaatgattg

SEQ ID NO: 33632 - DNA, 39 bp, Artificial Sequence
  primer
gtaaaacgacggccagtccaagtcacttaagatgggcag

SEQ ID NO: 33633 - DNA, 37 bp, Artificial Sequence
  primer
gtaaaacgacggccagttagccctgtgcctgggatac

SEQ ID NO: 33634 - DNA, 38 bp, Artificial Sequence
  primer
gtaaaacgacggccagttggttcggaagtctaagcagg

SEQ ID NO: 33635 - DNA, 38 bp, Artificial Sequence
  primer
gtaaaacgacggccagttgcaactgctttactggaagg

SEQ ID NO: 33636 - DNA, 40 bp, Artificial Sequence
  primer
gtaaaacgacggccagtgaaacgggatagatgttccagag

SEQ ID NO: 33637 - DNA, 21 bp, Artificial Sequence
  primer
agacttgcctgggaaattgag

SEQ ID NO: 33638 - DNA, 21 bp, Artificial Sequence
  primer
ccctctcaccaaactcctttc

SEQ ID NO: 33639 - DNA, 38 bp, Artificial Sequence
  primer
gtaaaacgacggccagtgtgaaacagtgcttggattgc

SEQ ID NO: 33640 - DNA, 38 bp, Artificial Sequence
  primer
gtaaaacgacggccagtttctgctgttctgattcccaa

SEQ ID NO: 33641 - DNA, 20 bp, Artificial Sequence
  primer
gcaccctcgaagtcttgaac

SEQ ID NO: 33642 - DNA, 21 bp, Artificial Sequence
  primer
cagtgggagaagcatttctgg

SEQ ID NO: 33643 - DNA, 21 bp, Artificial Sequence
  primer
gggaactccaaagatagaggg

SEQ ID NO: 33644 - DNA, 21 bp, Artificial Sequence
  primer
agcaggctatcatcagcacag

SEQ ID NO: 33645 - DNA, 38 bp, Artificial Sequence
  primer
gtaaaacgacggccagtatgtgatgcatcgttgactga

SEQ ID NO: 33646 - DNA, 22 bp, Artificial Sequence
  primer
ttcacaagaactgtttgccatc

SEQ ID NO: 33647 - DNA, 35 bp, Artificial Sequence
  primer
gtaaaacgacggccagtgtgctagcgacacgggag

SEQ ID NO: 33648 - DNA, 21 bp, Artificial Sequence
  primer
tgctgcacgtcaaactcaatc

SEQ ID NO: 33649 - DNA, 40 bp, Artificial Sequence
  primer
gtaaaacgacggccagtaaaggtgcttcccttgatgatag

SEQ ID NO: 33650 - DNA, 40 bp, Artificial Sequence
  primer
gtaaaacgacggccagtaatatggcaaatttggagttctg

SEQ ID NO: 33651 - DNA, 39 bp, Artificial Sequence
  primer
gtaaaacgacggccagttttgatacacaaagcatttggc

SEQ ID NO: 33652 - DNA, 21 bp, Artificial Sequence
  primer
tgcattgttgaagacaccagg

SEQ ID NO: 33653 - DNA, 19 bp, Artificial Sequence
  primer
ggcgtgggatggatttatg

SEQ ID NO: 33654 - DNA, 40 bp, Artificial Sequence
  primer
gtaaaacgacggccagtccactctgtttccacattcttcc

SEQ ID NO: 33655 - DNA, 38 bp, Artificial Sequence
  primer
gtaaaacgacggccagtgtgcttagttgttgtgcatgg

SEQ ID NO: 33656 - DNA, 40 bp, Artificial Sequence
  primer
gtaaaacgacggccagtgacttactgctgaaccattctgg

SEQ ID NO: 33657 - DNA, 39 bp, Artificial Sequence
  primer
gtaaaacgacggccagttgggattattggcataagcaag

SEQ ID NO: 33658 - DNA, 38 bp, Artificial Sequence
  primer
gtaaaacgacggccagtactgccctctcccttcttgac

SEQ ID NO: 33659 - DNA, 36 bp, Artificial Sequence
  primer
gtaaaacgacggccagtaagcatttgacagcgaggg

SEQ ID NO: 33660 - DNA, 38 bp, Artificial Sequence
  primer
gtaaaacgacggccagtgttggtgcaagaaacacttgg

SEQ ID NO: 33661 - DNA, 21 bp, Artificial Sequence
  primer
aaatgacctttcaggctaccg

SEQ ID NO: 33662 - DNA, 23 bp, Artificial Sequence
  primer
caagtaatggcaattgttcttgg

SEQ ID NO: 33663 - DNA, 38 bp, Artificial Sequence
  primer
gtaaaacgacggccagttgcatgactgtatttgagggc

SEQ ID NO: 33664 - DNA, 38 bp, Artificial Sequence
  primer
gtaaaacgacggccagttttactgcacaggaggaaggg

SEQ ID NO: 33665 - DNA, 38 bp, Artificial Sequence
  primer
gtaaaacgacggccagtacagagaagacgtgacctgcc

SEQ ID NO: 33666 - DNA, 21 bp, Artificial Sequence
  primer
taggacccgctacatcagcac

SEQ ID NO: 33667 - DNA, 21 bp, Artificial Sequence
  primer
tttgactggttcttcctggtg

SEQ ID NO: 33668 - DNA, 38 bp, Artificial Sequence
  primer
gtaaaacgacggccagttccacaacaggtcataggctg

SEQ ID NO: 33669 - DNA, 38 bp, Artificial Sequence
  primer
gtaaaacgacggccagtcacctactgcctacccagtcc

SEQ ID NO: 33670 - DNA, 21 bp, Artificial Sequence
  primer
agctctagaggagctgaaccg

SEQ ID NO: 33671 - DNA, 20 bp, Artificial Sequence
  primer
tgctgctactgtatgagccg

SEQ ID NO: 33672 - DNA, 21 bp, Artificial Sequence
  primer
atgtcttcgcacctgtcaagg

SEQ ID NO: 33673 - DNA, 36 bp, Artificial Sequence
  primer
gtaaaacgacggccagttttcccatgcatttccaag

SEQ ID NO: 33674 - DNA, 21 bp, Artificial Sequence
  primer
aacaagaagaggagctgctgg

SEQ ID NO: 33675 - DNA, 39 bp, Artificial Sequence
  primer
gtaaaacgacggccagtttatggaccatgtgctgctatg

SEQ ID NO: 33676 - DNA, 41 bp, Artificial Sequence
  primer
gtaaaacgacggccagttgccataacatttagagcattctg

SEQ ID NO: 33677 - DNA, 38 bp, Artificial Sequence
  primer
gtaaaacgacggccagtaatcatggagaccttcagtgg

SEQ ID NO: 33678 - DNA, 38 bp, Artificial Sequence
  primer
gtaaaacgacggccagtgcggatacactgtcaggtgag

SEQ ID NO: 33679 - DNA, 38 bp, Artificial Sequence
  primer
gtaaaacgacggccagtggctgagattcaggcatttct

SEQ ID NO: 33680 - DNA, 37 bp, Artificial Sequence
  primer
gtaaaacgacggccagtgatgctggagaggtgctgtc

SEQ ID NO: 33681 - DNA, 21 bp, Artificial Sequence
  primer
taatccatgattgggaggtgg

SEQ ID NO: 33682 - DNA, 35 bp, Artificial Sequence
  primer
gtaaaacgacggccagttccctccacctctccctg

SEQ ID NO: 33683 - DNA, 38 bp, Artificial Sequence
  primer
gtaaaacgacggccagtttcgcatctgtagaatgaggg

SEQ ID NO: 33684 - DNA, 42 bp, Artificial Sequence
  primer
gtaaaacgacggccagttctgtatttctaaacagcatagggc

SEQ ID NO: 33685 - DNA, 42 bp, Artificial Sequence
  primer
gtaaaacgacggccagtctgcatataccgttacctatgtgtg

SEQ ID NO: 33686 - DNA, 26 bp, Artificial Sequence
  primer
ttgtacagggcttatcattatgtttc

SEQ ID NO: 33687 - DNA, 38 bp, Artificial Sequence
  primer
gtaaaacgacggccagtgttctttaggcctcttgcaca

SEQ ID NO: 33688 - DNA, 27 bp, Artificial Sequence
  primer
ttcttaaatgtgagattaaatggtctg

SEQ ID NO: 33689 - DNA, 21 bp, Artificial Sequence
  primer
ggagtcaggagagttgggttc

SEQ ID NO: 33690 - DNA, 40 bp, Artificial Sequence
  primer
gtaaaacgacggccagtgggaggtcttacaatgaaacagg

SEQ ID NO: 33691 - DNA, 36 bp, Artificial Sequence
  primer
gtaaaacgacggccagtcctcgagcttgggagacag

SEQ ID NO: 33692 - DNA, 38 bp, Artificial Sequence
  primer
gtaaaacgacggccagtctggatagtgcgctgtttgag

SEQ ID NO: 33693 - DNA, 38 bp, Artificial Sequence
  primer
gtaaaacgacggccagtctgcagagaatcaggaccttg

SEQ ID NO: 33694 - DNA, 38 bp, Artificial Sequence
  primer
gtaaaacgacggccagtttggaagtatggtggtcatgc

SEQ ID NO: 33695 - DNA, 21 bp, Artificial Sequence
  primer
cagtgcatagagctcagggtc

SEQ ID NO: 33696 - DNA, 38 bp, Artificial Sequence
  primer
gtaaaacgacggccagtaagtacggttcctgctgtgag

SEQ ID NO: 33697 - DNA, 21 bp, Artificial Sequence
  primer
gataccgctagatgcctgagc

SEQ ID NO: 33698 - DNA, 38 bp, Artificial Sequence
  primer
gtaaaacgacggccagtgttcctgctagggatggagtg

SEQ ID NO: 33699 - DNA, 38 bp, Artificial Sequence
  primer
gtaaaacgacggccagtctggcttctatctcctggtcc

SEQ ID NO: 33700 - DNA, 38 bp, Artificial Sequence
  primer
gtaaaacgacggccagtggaacctgctagcgttctgag

SEQ ID NO: 33701 - DNA, 37 bp, Artificial Sequence
  primer
gtaaaacgacggccagtctgatggtggtctcccattg

SEQ ID NO: 33702 - DNA, 38 bp, Artificial Sequence
  primer
gtaaaacgacggccagttccctactaggatgccaggtc

SEQ ID NO: 33703 - DNA, 38 bp, Artificial Sequence
  primer
gtaaaacgacggccagttaggttgtgagaggtcctccg

SEQ ID NO: 33704 - DNA, 38 bp, Artificial Sequence
  primer
gtaaaacgacggccagtccattctcgtggtcttcttgg

SEQ ID NO: 33705 - DNA, 38 bp, Artificial Sequence
  primer
gtaaaacgacggccagtagagaagtaactgggtggccc

SEQ ID NO: 33706 - DNA, 38 bp, Artificial Sequence
  primer
gtaaaacgacggccagtgtatctccagaggcagttggg

SEQ ID NO: 33707 - DNA, 21 bp, Artificial Sequence
  primer
agtctctcgaagacgggtcag

SEQ ID NO: 33708 - DNA, 37 bp, Artificial Sequence
  primer
gtaaaacgacggccagtccacactacaactcccacgg

SEQ ID NO: 33709 - DNA, 44 bp, Artificial Sequence
  primer
gtaaaacgacggccagtttaagcctaattaaggaatcaacaatg

SEQ ID NO: 33710 - DNA, 21 bp, Artificial Sequence
  primer
gcgttcgttaggagacaatgc

SEQ ID NO: 33711 - DNA, 35 bp, Artificial Sequence
  primer
gtaaaacgacggccagtctgcccatccgttctgag

SEQ ID NO: 33712 - DNA, 21 bp, Artificial Sequence
  primer
tttccagacagggaccttgag

SEQ ID NO: 33713 - DNA, 20 bp, Artificial Sequence
  primer
gtaagtcttgctccgccctg

SEQ ID NO: 33714 - DNA, 38 bp, Artificial Sequence
  primer
gtaaaacgacggccagtagcatcgcagttatagcgacc

SEQ ID NO: 33715 - DNA, 38 bp, Artificial Sequence
  primer
gtaaaacgacggccagtagcctccgcttctctatctcc

SEQ ID NO: 33716 - DNA, 36 bp, Artificial Sequence
  primer
gtaaaacgacggccagttttcataagccctgcctgg

SEQ ID NO: 33717 - DNA, 21 bp, Artificial Sequence
  primer
ctgcaggtagggagcaaagag

SEQ ID NO: 33718 - DNA, 21 bp, Artificial Sequence
  primer
catcaccctgctcactctcag

SEQ ID NO: 33719 - DNA, 38 bp, Artificial Sequence
  primer
gtaaaacgacggccagtgctccagattctacaccaggg

SEQ ID NO: 33720 - DNA, 20 bp, Artificial Sequence
  primer
gacacagacaagtgccaggg

SEQ ID NO: 33721 - DNA, 37 bp, Artificial Sequence
  primer
gtaaaacgacggccagtctcacgctgctaggaaatgg

SEQ ID NO: 33722 - DNA, 20 bp, Artificial Sequence
  primer
tgccaggtccttatcctgtg

SEQ ID NO: 33723 - DNA, 38 bp, Artificial Sequence
  primer
gtaaaacgacggccagtgacagtgtcttccagctcgtg

SEQ ID NO: 33724 - DNA, 38 bp, Artificial Sequence
  primer
gtaaaacgacggccagtatgggctttgctaccatgaag

SEQ ID NO: 33725 - DNA, 38 bp, Artificial Sequence
  primer
gtaaaacgacggccagtgcagctgagatgattgtggag

SEQ ID NO: 33726 - DNA, 20 bp, Artificial Sequence
  primer
aactacgacccgctctgctc

SEQ ID NO: 33727 - DNA, 37 bp, Artificial Sequence
  primer
gtaaaacgacggccagtctgtttgccctggtgagttc

SEQ ID NO: 33728 - DNA, 38 bp, Artificial Sequence
  primer
gtaaaacgacggccagtacagattccaagtgatgcctg

SEQ ID NO: 33729 - DNA, 21 bp, Artificial Sequence
  primer
ggtctataaagccagtccggg

SEQ ID NO: 33730 - DNA, 38 bp, Artificial Sequence
  primer
gtaaaacgacggccagttaagtgccagaaactgcaacg

SEQ ID NO: 33731 - DNA, 37 bp, Artificial Sequence
  primer
gtaaaacgacggccagtgggagcctggtctggagtag

SEQ ID NO: 33732 - DNA, 21 bp, Artificial Sequence
  primer
aagcaacgagatgaaggtcac

SEQ ID NO: 33733 - DNA, 38 bp, Artificial Sequence
  primer
gtaaaacgacggccagtactctgtgtgaggctctgtgc

SEQ ID NO: 33734 - DNA, 21 bp, Artificial Sequence
  primer
aagccttgcaagacaggagag

SEQ ID NO: 33735 - DNA, 38 bp, Artificial Sequence
  primer
gtaaaacgacggccagtaccttatgggtcattgtggtg

SEQ ID NO: 33736 - DNA, 21 bp, Artificial Sequence
  primer
agtccctgcatgactgtttcc

SEQ ID NO: 33737 - DNA, 38 bp, Artificial Sequence
  primer
gtaaaacgacggccagtcagctgctgtacttgtctggc

SEQ ID NO: 33738 - DNA, 40 bp, Artificial Sequence
  primer
gtaaaacgacggccagttttgagtccctgctctatttcag

SEQ ID NO: 33739 - DNA, 37 bp, Artificial Sequence
  primer
gtaaaacgacggccagtaatgttgctgggtcacaagg

SEQ ID NO: 33740 - DNA, 21 bp, Artificial Sequence
  primer
gcagctgaaatcagagctcac

SEQ ID NO: 33741 - DNA, 38 bp, Artificial Sequence
  primer
gtaaaacgacggccagttagttcagggcttgggttctg

SEQ ID NO: 33742 - DNA, 38 bp, Artificial Sequence
  primer
gtaaaacgacggccagtgggtggaatttctgtctctcg

SEQ ID NO: 33743 - DNA, 21 bp, Artificial Sequence
  primer
gcacattacacagcccaactc

SEQ ID NO: 33744 - DNA, 22 bp, Artificial Sequence
  primer
tgagtaagtgggtaagcatggg

SEQ ID NO: 33745 - DNA, 38 bp, Artificial Sequence
  primer
gtaaaacgacggccagtaccttagacctcccttcctgc

SEQ ID NO: 33746 - DNA, 38 bp, Artificial Sequence
  primer
gtaaaacgacggccagtgccgagattcaaactcagacc

SEQ ID NO: 33747 - DNA, 38 bp, Artificial Sequence
  primer
gtaaaacgacggccagtttgggaaaggacaggtacagg

SEQ ID NO: 33748 - DNA, 40 bp, Artificial Sequence
  primer
gtaaaacgacggccagtaaagtggccttgttaatttcagc

SEQ ID NO: 33749 - DNA, 38 bp, Artificial Sequence
  primer
gtaaaacgacggccagtgagagacctcaaggccatttg

SEQ ID NO: 33750 - DNA, 38 bp, Artificial Sequence
  primer
gtaaaacgacggccagtggctgtaatgggaagtggaag

SEQ ID NO: 33751 - DNA, 37 bp, Artificial Sequence
  primer
gtaaaacgacggccagtagcctgtcttgctgttctgg

SEQ ID NO: 33752 - DNA, 39 bp, Artificial Sequence
  primer
gtaaaacgacggccagtgctaggcaggactggtaaagtg

SEQ ID NO: 33753 - DNA, 21 bp, Artificial Sequence
  primer
cggattccatgaagtcacaac

SEQ ID NO: 33754 - DNA, 20 bp, Artificial Sequence
  primer
gggtggaagagggaatgatg

SEQ ID NO: 33755 - DNA, 38 bp, Artificial Sequence
  primer
gtaaaacgacggccagtgggtccgttctgtgctaagtc

SEQ ID NO: 33756 - DNA, 38 bp, Artificial Sequence
  primer
gtaaaacgacggccagtaggttgtttgaaagctgggtc

SEQ ID NO: 33757 - DNA, 21 bp, Artificial Sequence
  primer
agattccgtttgctctggact

SEQ ID NO: 33758 - DNA, 21 bp, Artificial Sequence
  primer
gactctggtaagtggcatgga

SEQ ID NO: 33759 - DNA, 37 bp, Artificial Sequence
  primer
gtaaaacgacggccagtagtcagaccacactggctgg

SEQ ID NO: 33760 - DNA, 20 bp, Artificial Sequence
  primer
ggccagtgtggagatgagtg

SEQ ID NO: 33761 - DNA, 38 bp, Artificial Sequence
  primer
gtaaaacgacggccagtagattccgtttgctctggact

SEQ ID NO: 33762 - DNA, 21 bp, Artificial Sequence
  primer
ggagggtgatgctatctggtc

SEQ ID NO: 33763 - DNA, 21 bp, Artificial Sequence
  primer
ctagccacagtgacaggcaac

SEQ ID NO: 33764 - DNA, 37 bp, Artificial Sequence
  primer
gtaaaacgacggccagtatgcctccgtcatgaatctg

SEQ ID NO: 33765 - DNA, 38 bp, Artificial Sequence
  primer
gtaaaacgacggccagtccatcctcttctggcagtacc

SEQ ID NO: 33766 - DNA, 38 bp, Artificial Sequence
  primer
gtaaaacgacggccagtacagctggaaggaagaagagg

SEQ ID NO: 33767 - DNA, 21 bp, Artificial Sequence
  primer
gactaagaaagggcgtgatcg

SEQ ID NO: 33768 - DNA, 38 bp, Artificial Sequence
  primer
gtaaaacgacggccagttcctccatttgaaggtcttgc

SEQ ID NO: 33769 - DNA, 38 bp, Artificial Sequence
  primer
gtaaaacgacggccagttttccattaaagtcaaccgcc

SEQ ID NO: 33770 - DNA, 38 bp, Artificial Sequence
  primer
gtaaaacgacggccagttcctctctttcatcctctggg

SEQ ID NO: 33771 - DNA, 38 bp, Artificial Sequence
  primer
gtaaaacgacggccagtatattggcacatatcccgagc

SEQ ID NO: 33772 - DNA, 38 bp, Artificial Sequence
  primer
gtaaaacgacggccagtatcagaattggcaccaagacc

SEQ ID NO: 33773 - DNA, 38 bp, Artificial Sequence
  primer
gtaaaacgacggccagtacaaatcgatgtctgtctgcc

SEQ ID NO: 33774 - DNA, 21 bp, Artificial Sequence
  primer
agctcctcctggatacacagc

SEQ ID NO: 33775 - DNA, 21 bp, Artificial Sequence
  primer
ctctggcttgccattgactac

SEQ ID NO: 33776 - DNA, 38 bp, Artificial Sequence
  primer
gtaaaacgacggccagttcatctcctttgtcctttggg

SEQ ID NO: 33777 - DNA, 21 bp, Artificial Sequence
  primer
tcacaaccaagagctggaaac

SEQ ID NO: 33778 - DNA, 38 bp, Artificial Sequence
  primer
gtaaaacgacggccagtgcttcccatccagctagagtc

SEQ ID NO: 33779 - DNA, 38 bp, Artificial Sequence
  primer
gtaaaacgacggccagtcgggacagagttctctcaagg

SEQ ID NO: 33780 - DNA, 38 bp, Artificial Sequence
  primer
gtaaaacgacggccagttcatcccacaatcgctatgag

SEQ ID NO: 33781 - DNA, 21 bp, Artificial Sequence
  primer
ctgtccatcaaggtcaacagg

SEQ ID NO: 33782 - DNA, 38 bp, Artificial Sequence
  primer
gtaaaacgacggccagtccatcttgttctggcagtttg

SEQ ID NO: 33783 - DNA, 38 bp, Artificial Sequence
  primer
gtaaaacgacggccagttgtacatccacatctccctgg

SEQ ID NO: 33784 - DNA, 21 bp, Artificial Sequence
  primer
gattgtgacgaagcagacagg

SEQ ID NO: 33785 - DNA, 21 bp, Artificial Sequence
  primer
ctggtgtgcgaagctaatgtg

SEQ ID NO: 33786 - DNA, 38 bp, Artificial Sequence
  primer
gtaaaacgacggccagttggtaagcctgatcaccattg

SEQ ID NO: 33787 - DNA, 21 bp, Artificial Sequence
  primer
caagacccttgacatatcggg

SEQ ID NO: 33788 - DNA, 21 bp, Artificial Sequence
  primer
ctccagggttctgactctgtg

SEQ ID NO: 33789 - DNA, 38 bp, Artificial Sequence
  primer
gtaaaacgacggccagtctcagaggatgaggacaagcc

SEQ ID NO: 33790 - DNA, 38 bp, Artificial Sequence
  primer
gtaaaacgacggccagtgaaccaggagaccaacaatgg

SEQ ID NO: 33791 - DNA, 21 bp, Artificial Sequence
  primer
gacaagtgtgtcccagtcacc

SEQ ID NO: 33792 - DNA, 21 bp, Artificial Sequence
  primer
ctagtgagccgactcgctttc

SEQ ID NO: 33793 - DNA, 38 bp, Artificial Sequence
  primer
gtaaaacgacggccagtatgcctcagttcctcagttcc

SEQ ID NO: 33794 - DNA, 20 bp, Artificial Sequence
  primer
ggtgagacaagagcactggg

SEQ ID NO: 33795 - DNA, 37 bp, Artificial Sequence
  primer
gtaaaacgacggccagtgaattcccatgcacatcagg

SEQ ID NO: 33796 - DNA, 40 bp, Artificial Sequence
  primer
gtaaaacgacggccagtaacagctgtctcctgttaacgtc

SEQ ID NO: 33797 - DNA, 38 bp, Artificial Sequence
  primer
gtaaaacgacggccagtgaatctgtggccttgtcactg

SEQ ID NO: 33798 - DNA, 18 bp, Artificial Sequence
  primer
gggtgggaggaacactgc

SEQ ID NO: 33799 - DNA, 20 bp, Artificial Sequence
  primer
acaggacccgggatacagag

SEQ ID NO: 33800 - DNA, 21 bp, Artificial Sequence
  primer
ataaagacgatgccagccaag

SEQ ID NO: 33801 - DNA, 37 bp, Artificial Sequence
  primer
gtaaaacgacggccagtagggtcagaagactggaggg

SEQ ID NO: 33802 - DNA, 38 bp, Artificial Sequence
  primer
gtaaaacgacggccagtagagaaggcagacaccaggag

SEQ ID NO: 33803 - DNA, 38 bp, Artificial Sequence
  primer
gtaaaacgacggccagttggacggtatggacaagtcag

SEQ ID NO: 33804 - DNA, 21 bp, Artificial Sequence
  primer
gattcctctggcacctactgg

SEQ ID NO: 33805 - DNA, 37 bp, Artificial Sequence
  primer
gtaaaacgacggccagtatgtagcagccttcccgttc

SEQ ID NO: 33806 - DNA, 19 bp, Artificial Sequence
  primer
gtggagaacgtggagtggc

SEQ ID NO: 33807 - DNA, 21 bp, Artificial Sequence
  primer
acccacgtgtaggaatgaagg

SEQ ID NO: 33808 - DNA, 21 bp, Artificial Sequence
  primer
aacctgcattactgtggtccc

SEQ ID NO: 33809 - DNA, 38 bp, Artificial Sequence
  primer
gtaaaacgacggccagtaccctaagagccctttcttgg

SEQ ID NO: 33810 - DNA, 42 bp, Artificial Sequence
  primer
gtaaaacgacggccagtgctctgatagacattatcatctgcc

SEQ ID NO: 33811 - DNA, 21 bp, Artificial Sequence
  primer
aatctgagtaagggtggcagg

SEQ ID NO: 33812 - DNA, 21 bp, Artificial Sequence
  primer
agctccctccactattctggg

SEQ ID NO: 33813 - DNA, 21 bp, Artificial Sequence
  primer
ctctgagtagcctggcctcag

SEQ ID NO: 33814 - DNA, 21 bp, Artificial Sequence
  primer
agatggagcagactgtggacc

SEQ ID NO: 33815 - DNA, 20 bp, Artificial Sequence
  primer
ggcgagtacctgctgttcac

SEQ ID NO: 33816 - DNA, 21 bp, Artificial Sequence
  primer
tactggagccttgaaacagcc

SEQ ID NO: 33817 - DNA, 19 bp, Artificial Sequence
  primer
ggatggttcctgtcctccc

SEQ ID NO: 33818 - DNA, 20 bp, Artificial Sequence
  primer
atgggtgatgtttctgctgg

SEQ ID NO: 33819 - DNA, 38 bp, Artificial Sequence
  primer
gtaaaacgacggccagttgtctgacccagtcatcatcc

SEQ ID NO: 33820 - DNA, 36 bp, Artificial Sequence
  primer
gtaaaacgacggccagtgtggttcggtcacatgcag

SEQ ID NO: 33821 - DNA, 38 bp, Artificial Sequence
  primer
gtaaaacgacggccagttggaccaagtgttaatgaccg

SEQ ID NO: 33822 - DNA, 21 bp, Artificial Sequence
  primer
ccaggctacaaacacgacatc

SEQ ID NO: 33823 - DNA, 21 bp, Artificial Sequence
  primer
tgtattcttgaacctgctccc

SEQ ID NO: 33824 - DNA, 21 bp, Artificial Sequence
  primer
aaatctgaattgcttcagccg

SEQ ID NO: 33825 - DNA, 23 bp, Artificial Sequence
  primer
tgcaacgtgttgattacatcttc

SEQ ID NO: 33826 - DNA, 35 bp, Artificial Sequence
  primer
gtaaaacgacggccagtgggaggcatgaagttggg

SEQ ID NO: 33827 - DNA, 38 bp, Artificial Sequence
  primer
gtaaaacgacggccagtagctgaaaggaagtggacgtg

SEQ ID NO: 33828 - DNA, 21 bp, Artificial Sequence
  primer
agaatgcctctgtgtgtggac

SEQ ID NO: 33829 - DNA, 38 bp, Artificial Sequence
  primer
gtaaaacgacggccagtagaactgcaccatgaaattcg

SEQ ID NO: 33830 - DNA, 38 bp, Artificial Sequence
  primer
gtaaaacgacggccagtgagatctacccggacatcacc

SEQ ID NO: 33831 - DNA, 20 bp, Artificial Sequence
  primer
cctcaccgtccttctgtgtc

SEQ ID NO: 33832 - DNA, 18 bp, Artificial Sequence
  primer
agaccagccctctccgtg

SEQ ID NO: 33833 - DNA, 37 bp, Artificial Sequence
  primer
gtaaaacgacggccagtgaggtggagaagctgttgcc

SEQ ID NO: 33834 - DNA, 21 bp, Artificial Sequence
  primer
tcacactcagtgctccattcc

SEQ ID NO: 33835 - DNA, 37 bp, Artificial Sequence
  primer
gtaaaacgacggccagtagagtctctctccatggccc

SEQ ID NO: 33836 - DNA, 40 bp, Artificial Sequence
  primer
gtaaaacgacggccagtcagattgatgaatgaaatgtggg

SEQ ID NO: 33837 - DNA, 21 bp, Artificial Sequence
  primer
agggaggtgttctctattggg

SEQ ID NO: 33838 - DNA, 37 bp, Artificial Sequence
  primer
gtaaaacgacggccagtgcaatcaatgataggcctgc

SEQ ID NO: 33839 - DNA, 20 bp, Artificial Sequence
  primer
ggactccaccggcaaactac

SEQ ID NO: 33840 - DNA, 38 bp, Artificial Sequence
  primer
gtaaaacgacggccagtcaaaggaaacagaaccgacag

SEQ ID NO: 33841 - DNA, 22 bp, Artificial Sequence
  primer
caattatggtaaccgtcttcgc

SEQ ID NO: 33842 - DNA, 37 bp, Artificial Sequence
  primer
gtaaaacgacggccagtagcaatgggaggcagaaatc

SEQ ID NO: 33843 - DNA, 38 bp, Artificial Sequence
  primer
gtaaaacgacggccagttgggcttctgatgatgtcaag

SEQ ID NO: 33844 - DNA, 21 bp, Artificial Sequence
  primer
agaattgcctagaatcgctgc

SEQ ID NO: 33845 - DNA, 38 bp, Artificial Sequence
  primer
gtaaaacgacggccagtatgctttcacacattgccttg

SEQ ID NO: 33846 - DNA, 37 bp, Artificial Sequence
  primer
gtaaaacgacggccagtacctcaagtgacctgcctgc

SEQ ID NO: 33847 - DNA, 21 bp, Artificial Sequence
  primer
cagataagatttggaagcccg

SEQ ID NO: 33848 - DNA, 21 bp, Artificial Sequence
  primer
ggaaatcattgatgcctctgg

SEQ ID NO: 33849 - DNA, 38 bp, Artificial Sequence
  primer
gtaaaacgacggccagtttaccttccttcggactgtgg

SEQ ID NO: 33850 - DNA, 38 bp, Artificial Sequence
  primer
gtaaaacgacggccagtatcacagaaaccatcccatcc

SEQ ID NO: 33851 - DNA, 21 bp, Artificial Sequence
  primer
ctcccacccagctgatatttg

SEQ ID NO: 33852 - DNA, 20 bp, Artificial Sequence
  primer
gtacctcccgctcacacctc

SEQ ID NO: 33853 - DNA, 18 bp, Artificial Sequence
  primer
tgcttgtctgggctgcac

SEQ ID NO: 33854 - DNA, 21 bp, Artificial Sequence
  primer
acacacaacaacgctctcgac

SEQ ID NO: 33855 - DNA, 22 bp, Artificial Sequence
  primer
aatgtgttcatggtgacagcag

SEQ ID NO: 33856 - DNA, 21 bp, Artificial Sequence
  primer
aatcaccagttcggtgtgaaa

SEQ ID NO: 33857 - DNA, 21 bp, Artificial Sequence
  primer
gtaagtggcatggaatgtccc

SEQ ID NO: 33858 - DNA, 36 bp, Artificial Sequence
  primer
gtaaaacgacggccagtgtgtgcctgtcctgtgacg

SEQ ID NO: 33859 - DNA, 38 bp, Artificial Sequence
  primer
gtaaaacgacggccagtctggatctcaggatctcggtc

SEQ ID NO: 33860 - DNA, 21 bp, Artificial Sequence
  primer
aaacaactcatccatccaccc

SEQ ID NO: 33861 - DNA, 42 bp, Artificial Sequence
  primer
gtaaaacgacggccagttgaagaacaagtgtcctatcagtgg

SEQ ID NO: 33862 - DNA, 38 bp, Artificial Sequence
  primer
gtaaaacgacggccagtgttgattccagacttccgagc

SEQ ID NO: 33863 - DNA, 38 bp, Artificial Sequence
  primer
gtaaaacgacggccagtggtggatgtcacctacttccc

SEQ ID NO: 33864 - DNA, 38 bp, Artificial Sequence
  primer
gtaaaacgacggccagtgtgactcgtggctgtatgagg

SEQ ID NO: 33865 - DNA, 21 bp, Artificial Sequence
  primer
gccaggaacaaagacctttcc

SEQ ID NO: 33866 - DNA, 21 bp, Artificial Sequence
  primer
ctgtctgtcatctgtcggtgg

SEQ ID NO: 33867 - DNA, 37 bp, Artificial Sequence
  primer
gtaaaacgacggccagtgagcgaagtcactgagcgag

SEQ ID NO: 33868 - DNA, 21 bp, Artificial Sequence
  primer
agtgtagacggcaggaagagg

SEQ ID NO: 33869 - DNA, 38 bp, Artificial Sequence
  primer
gtaaaacgacggccagtcacagtttatgcctgtcctgc

SEQ ID NO: 33870 - DNA, 22 bp, Artificial Sequence
  primer
tgacgtggtgctactgaacaag

SEQ ID NO: 33871 - DNA, 21 bp, Artificial Sequence
  primer
caaagacctcccaaactccac

SEQ ID NO: 33872 - DNA, 38 bp, Artificial Sequence
  primer
gtaaaacgacggccagtcctctcaggtctaggctgtgg

SEQ ID NO: 33873 - DNA, 20 bp, Artificial Sequence
  primer
gcctggaaacatggtcactg

SEQ ID NO: 33874 - DNA, 20 bp, Artificial Sequence
  primer
gtggttggctgtttcccttc

SEQ ID NO: 33875 - DNA, 38 bp, Artificial Sequence
  primer
gtaaaacgacggccagttgagaactggcaagttgttgg

SEQ ID NO: 33876 - DNA, 20 bp, Artificial Sequence
  primer
cagtctcgctctcctgttgg

SEQ ID NO: 33877 - DNA, 21 bp, Artificial Sequence
  primer
caagaagctggtttctcctcg

SEQ ID NO: 33878 - DNA, 36 bp, Artificial Sequence
  primer
gtaaaacgacggccagtggattgtcccatttgcctg

SEQ ID NO: 33879 - DNA, 38 bp, Artificial Sequence
  primer
gtaaaacgacggccagtgtggtgagtagaggtcccagg

SEQ ID NO: 33880 - DNA, 20 bp, Artificial Sequence
  primer
ggcagagaagtcactgtggg

SEQ ID NO: 33881 - DNA, 38 bp, Artificial Sequence
  primer
gtaaaacgacggccagtcccttctacctgcaaggtgtc

SEQ ID NO: 33882 - DNA, 21 bp, Artificial Sequence
  primer
ggcatgtacgaggtgtccttc

SEQ ID NO: 33883 - DNA, 38 bp, Artificial Sequence
  primer
gtaaaacgacggccagttcacacctagtggtgagtggg

SEQ ID NO: 33884 - DNA, 37 bp, Artificial Sequence
  primer
gtaaaacgacggccagttcctgctgctcatctccaag

SEQ ID NO: 33885 - DNA, 21 bp, Artificial Sequence
  primer
aggtcgtcttcctggagaagc

SEQ ID NO: 33886 - DNA, 38 bp, Artificial Sequence
  primer
gtaaaacgacggccagtggacccgcttatactcgtttg

SEQ ID NO: 33887 - DNA, 38 bp, Artificial Sequence
  primer
gtaaaacgacggccagttgtcctcttgggttccacttc

SEQ ID NO: 33888 - DNA, 38 bp, Artificial Sequence
  primer
gtaaaacgacggccagtaacagacacagcctatggtgc

SEQ ID NO: 33889 - DNA, 20 bp, Artificial Sequence
  primer
gagggtgcagtgagctatgg

SEQ ID NO: 33890 - DNA, 40 bp, Artificial Sequence
  primer
gtaaaacgacggccagtcagtggcttggtaaagctaacag

SEQ ID NO: 33891 - DNA, 37 bp, Artificial Sequence
  primer
gtaaaacgacggccagtaaacttagctgcgcatggtg

SEQ ID NO: 33892 - DNA, 38 bp, Artificial Sequence
  primer
gtaaaacgacggccagtgaccaaggtcatcgtgaaatc

SEQ ID NO: 33893 - DNA, 21 bp, Artificial Sequence
  primer
atccacatcggtcttggtttc

SEQ ID NO: 33894 - DNA, 21 bp, Artificial Sequence
  primer
atcccatcgtcttccaaagtc

SEQ ID NO: 33895 - DNA, 38 bp, Artificial Sequence
  primer
gtaaaacgacggccagtctgagcctgtagtgtggttgg

SEQ ID NO: 33896 - DNA, 20 bp, Artificial Sequence
  primer
gcccagtacatccctgagtg

SEQ ID NO: 33897 - DNA, 20 bp, Artificial Sequence
  primer
gtgctccctctcagctctcc

SEQ ID NO: 33898 - DNA, 38 bp, Artificial Sequence
  primer
gtaaaacgacggccagtagacaatgaagccaaaggagg

SEQ ID NO: 33899 - DNA, 38 bp, Artificial Sequence
  primer
gtaaaacgacggccagtagcagatcatgaccaccaatg

SEQ ID NO: 33900 - DNA, 21 bp, Artificial Sequence
  primer
ggaaataatcccaaagggctc

SEQ ID NO: 33901 - DNA, 21 bp, Artificial Sequence
  primer
ggagaaggacagtgaacccac

SEQ ID NO: 33902 - DNA, 21 bp, Artificial Sequence
  primer
gcactgacattcttcctgctg

SEQ ID NO: 33903 - DNA, 21 bp, Artificial Sequence
  primer
cctagtatgcagttccacgcc

SEQ ID NO: 33904 - DNA, 38 bp, Artificial Sequence
  primer
gtaaaacgacggccagtatctttgcctcatgtccttgg

SEQ ID NO: 33905 - DNA, 21 bp, Artificial Sequence
  primer
actcccactctgccatctctc

SEQ ID NO: 33906 - DNA, 19 bp, Artificial Sequence
  primer
cagaggttgcaggttgcag

SEQ ID NO: 33907 - DNA, 21 bp, Artificial Sequence
  primer
tttgtcacagctctcagaccc

SEQ ID NO: 33908 - DNA, 38 bp, Artificial Sequence
  primer
gtaaaacgacggccagttccttaagcctcctctgcctc

SEQ ID NO: 33909 - DNA, 38 bp, Artificial Sequence
  primer
gtaaaacgacggccagtacaatggtcctcccttaccag

SEQ ID NO: 33910 - DNA, 37 bp, Artificial Sequence
  primer
gtaaaacgacggccagtcatctgcgtctctggactgg

SEQ ID NO: 33911 - DNA, 38 bp, Artificial Sequence
  primer
gtaaaacgacggccagtggtactacagaggtgccaggg

SEQ ID NO: 33912 - DNA, 37 bp, Artificial Sequence
  primer
gtaaaacgacggccagtaagtgagtgacgctcaagcc

SEQ ID NO: 33913 - DNA, 20 bp, Artificial Sequence
  primer
cagcctggtgacagaatgag

SEQ ID NO: 33914 - DNA, 38 bp, Artificial Sequence
  primer
gtaaaacgacggccagttgttcgagaagcagtcagagc

SEQ ID NO: 33915 - DNA, 19 bp, Artificial Sequence
  primer
cctctgcaggcacactgag

SEQ ID NO: 33916 - DNA, 37 bp, Artificial Sequence
  primer
gtaaaacgacggccagtaaataccaggcaaaggacgc

SEQ ID NO: 33917 - DNA, 38 bp, Artificial Sequence
  primer
gtaaaacgacggccagtggcaattggacacacacagat

SEQ ID NO: 33918 - DNA, 21 bp, Artificial Sequence
  primer
gaagaacgaggaactgcgtct

SEQ ID NO: 33919 - DNA, 38 bp, Artificial Sequence
  primer
gtaaaacgacggccagttcaccactagcgtctggattg

SEQ ID NO: 33920 - DNA, 38 bp, Artificial Sequence
  primer
gtaaaacgacggccagtgtcccttcagaactcgtgtgg

SEQ ID NO: 33921 - DNA, 37 bp, Artificial Sequence
  primer
gtaaaacgacggccagtctagatcccagcttccaggg

SEQ ID NO: 33922 - DNA, 38 bp, Artificial Sequence
  primer
gtaaaacgacggccagtgctttccataccctcaacgag

SEQ ID NO: 33923 - DNA, 38 bp, Artificial Sequence
  primer
gtaaaacgacggccagtcattaacatcatcgtgccctg

SEQ ID NO: 33924 - DNA, 21 bp, Artificial Sequence
  primer
agaagccgtgtttgtgaggtc

SEQ ID NO: 33925 - DNA, 36 bp, Artificial Sequence
  primer
gtaaaacgacggccagtcatcgtgctcaacgtgtcc

SEQ ID NO: 33926 - DNA, 19 bp, Artificial Sequence
  primer
agcgagctcgtgtttgagg

SEQ ID NO: 33927 - DNA, 36 bp, Artificial Sequence
  primer
gtaaaacgacggccagtagaggcccaccactgtctc

SEQ ID NO: 33928 - DNA, 21 bp, Artificial Sequence
  primer
atatgacacccagagcccatc

SEQ ID NO: 33929 - DNA, 38 bp, Artificial Sequence
  primer
gtaaaacgacggccagtggacacaaaggaatctcagcc

SEQ ID NO: 33930 - DNA, 21 bp, Artificial Sequence
  primer
cagcctgaagctaaccctcac

SEQ ID NO: 33931 - DNA, 38 bp, Artificial Sequence
  primer
gtaaaacgacggccagtctcttctgtcctcttgggctg

SEQ ID NO: 33932 - DNA, 37 bp, Artificial Sequence
  primer
gtaaaacgacggccagttgacaggctggtagggactg

SEQ ID NO: 33933 - DNA, 38 bp, Artificial Sequence
  primer
gtaaaacgacggccagtcctcctgctctccatatctcg

SEQ ID NO: 33934 - DNA, 36 bp, Artificial Sequence
  primer
gtaaaacgacggccagtccctgctggtgctccttag

SEQ ID NO: 33935 - DNA, 38 bp, Artificial Sequence
  primer
gtaaaacgacggccagtaacagagtggcattacgaccc

SEQ ID NO: 33936 - DNA, 21 bp, Artificial Sequence
  primer
aaggctggtcttcatgtccac

SEQ ID NO: 33937 - DNA, 37 bp, Artificial Sequence
  primer
gtaaaacgacggccagtctttaccaaggccacgtcac

SEQ ID NO: 33938 - DNA, 21 bp, Artificial Sequence
  primer
cacagcagatgagtgctggag

SEQ ID NO: 33939 - DNA, 38 bp, Artificial Sequence
  primer
gtaaaacgacggccagtgaattagccaccagttgggac

SEQ ID NO: 33940 - DNA, 21 bp, Artificial Sequence
  primer
gctgcttaggtcttcagggtg

SEQ ID NO: 33941 - DNA, 38 bp, Artificial Sequence
  primer
gtaaaacgacggccagtctacaacctctcccgcaagac

SEQ ID NO: 33942 - DNA, 21 bp, Artificial Sequence
  primer
acgactgcgacctctacttcc

SEQ ID NO: 33943 - DNA, 21 bp, Artificial Sequence
  primer
aaaccctacaacctggacgtg

SEQ ID NO: 33944 - DNA, 40 bp, Artificial Sequence
  primer
gtaaaacgacggccagttgatgtatttgtaagcagcaggg

SEQ ID NO: 33945 - DNA, 21 bp, Artificial Sequence
  primer
ggtttgttccgtgtgtgaatg

SEQ ID NO: 33946 - DNA, 36 bp, Artificial Sequence
  primer
gtaaaacgacggccagtgatagaccagcaggagcgg

SEQ ID NO: 33947 - DNA, 38 bp, Artificial Sequence
  primer
gtaaaacgacggccagtaggcccaaggtaaagatgagg

SEQ ID NO: 33948 - DNA, 21 bp, Artificial Sequence
  primer
tttctcacctgcaaagtgtgg

SEQ ID NO: 33949 - DNA, 20 bp, Artificial Sequence
  primer
cggtttgagccttggtacag

SEQ ID NO: 33950 - DNA, 37 bp, Artificial Sequence
  primer
gtaaaacgacggccagtgatcctccctctgagccttg

SEQ ID NO: 33951 - DNA, 39 bp, Artificial Sequence
  primer
gtaaaacgacggccagtcagtgtggaaatcttcctttgc

SEQ ID NO: 33952 - DNA, 38 bp, Artificial Sequence
  primer
gtaaaacgacggccagtgccaagtggaaatgtttcagg

SEQ ID NO: 33953 - DNA, 21 bp, Artificial Sequence
  primer
tgaaccagtacagcatcccag

SEQ ID NO: 33954 - DNA, 21 bp, Artificial Sequence
  primer
tcgaggagtttgtggcctatc

SEQ ID NO: 33955 - DNA, 38 bp, Artificial Sequence
  primer
gtaaaacgacggccagttgatcagaaggcaggagtcag

SEQ ID NO: 33956 - DNA, 19 bp, Artificial Sequence
  primer
cacgtccttctctaggccg

SEQ ID NO: 33957 - DNA, 21 bp, Artificial Sequence
  primer
gacaagtttctcagtgctggc

SEQ ID NO: 33958 - DNA, 20 bp, Artificial Sequence
  primer
ctactgctacgtgcccaagg

SEQ ID NO: 33959 - DNA, 38 bp, Artificial Sequence
  primer
gtaaaacgacggccagtacaccaagttcctcttcgtgc

SEQ ID NO: 33960 - DNA, 21 bp, Artificial Sequence
  primer
aacgaggagttctaccgcaag

SEQ ID NO: 33961 - DNA, 18 bp, Artificial Sequence
  primer
tgtcccgcctcctcagtc

SEQ ID NO: 33962 - DNA, 21 bp, Artificial Sequence
  primer
tgggtcaaatgtgcctagatg

SEQ ID NO: 33963 - DNA, 38 bp, Artificial Sequence
  primer
gtaaaacgacggccagtcacagtgatcagtgacagccc

SEQ ID NO: 33964 - DNA, 21 bp, Artificial Sequence
  primer
atggcctgctctactgctacg

SEQ ID NO: 33965 - DNA, 37 bp, Artificial Sequence
  primer
gtaaaacgacggccagtagttcctggcctacctgctg

SEQ ID NO: 33966 - DNA, 39 bp, Artificial Sequence
  primer
gtaaaacgacggccagtttacttaggaggaggaggctgg

SEQ ID NO: 33967 - DNA, 37 bp, Artificial Sequence
  primer
gtaaaacgacggccagtcggattgtgcctgtgatgag

SEQ ID NO: 33968 - DNA, 38 bp, Artificial Sequence
  primer
gtaaaacgacggccagtctctcggaatgaaggtgttcc

SEQ ID NO: 33969 - DNA, 18 bp, Artificial Sequence
  primer
ctggctcgtcgttcttcg

SEQ ID NO: 33970 - DNA, 38 bp, Artificial Sequence
  primer
gtaaaacgacggccagtgacatgctgagcgctctttac

SEQ ID NO: 33971 - DNA, 38 bp, Artificial Sequence
  primer
gtaaaacgacggccagtatccgtgagagcctacaggtg

SEQ ID NO: 33972 - DNA, 37 bp, Artificial Sequence
  primer
gtaaaacgacggccagtggctaagacgctgcagacag

SEQ ID NO: 33973 - DNA, 37 bp, Artificial Sequence
  primer
gtaaaacgacggccagtaagctgggtcctgagtgatg

SEQ ID NO: 33974 - DNA, 38 bp, Artificial Sequence
  primer
gtaaaacgacggccagtatccatcatgcacctctttcc

SEQ ID NO: 33975 - DNA, 21 bp, Artificial Sequence
  primer
agaacgcatctctcttgtccc

SEQ ID NO: 33976 - DNA, 19 bp, Artificial Sequence
  primer
aagcagctcttcctgtgcg

SEQ ID NO: 33977 - DNA, 38 bp, Artificial Sequence
  primer
gtaaaacgacggccagtgtctgtacgcccttcgtcaag

SEQ ID NO: 33978 - DNA, 18 bp, Artificial Sequence
  primer
gagagcatccgcctgtcc

SEQ ID NO: 33979 - DNA, 18 bp, Artificial Sequence
  primer
ccgcaggtggaagactgg

SEQ ID NO: 33980 - DNA, 21 bp, Artificial Sequence
  primer
gggacaggaaatgatttggag

SEQ ID NO: 33981 - DNA, 38 bp, Artificial Sequence
  primer
gtaaaacgacggccagttacagccacaacatcagctcc

SEQ ID NO: 33982 - DNA, 37 bp, Artificial Sequence
  primer
gtaaaacgacggccagtacctgcctgtgacatcatcc

SEQ ID NO: 33983 - DNA, 38 bp, Artificial Sequence
  primer
gtaaaacgacggccagttcatgattgacagtcgcattg

SEQ ID NO: 33984 - DNA, 38 bp, Artificial Sequence
  primer
gtaaaacgacggccagtgggaaagtgctcgactgagac

SEQ ID NO: 33985 - DNA, 21 bp, Artificial Sequence
  primer
tcctgctcttcatcatctccc

SEQ ID NO: 33986 - DNA, 37 bp, Artificial Sequence
  primer
gtaaaacgacggccagtcgacatggacgtgtttgatg

SEQ ID NO: 33987 - DNA, 36 bp, Artificial Sequence
  primer
gtaaaacgacggccagtacagagccgaaacctgtcc

SEQ ID NO: 33988 - DNA, 38 bp, Artificial Sequence
  primer
gtaaaacgacggccagtcaagcaggacgtatgcaagac

SEQ ID NO: 33989 - DNA, 18 bp, Artificial Sequence
  primer
cctgattcgcgaggtgtg

SEQ ID NO: 33990 - DNA, 36 bp, Artificial Sequence
  primer
gtaaaacgacggccagtactctacgccttcaccggc

SEQ ID NO: 33991 - DNA, 38 bp, Artificial Sequence
  primer
gtaaaacgacggccagtctgagaccttgggagtcttgg

SEQ ID NO: 33992 - DNA, 38 bp, Artificial Sequence
  primer
gtaaaacgacggccagtacagtgacagtgctcctcctg

SEQ ID NO: 33993 - DNA, 21 bp, Artificial Sequence
  primer
caagcaggacgtatgcaagac

SEQ ID NO: 33994 - DNA, 18 bp, Artificial Sequence
  primer
cctgattcgcgaggtgtg

SEQ ID NO: 33995 - DNA, 19 bp, Artificial Sequence
  primer
actctacgccttcaccggc

SEQ ID NO: 33996 - DNA, 38 bp, Artificial Sequence
  primer
gtaaaacgacggccagtcatcatgttcatgggatgctc

SEQ ID NO: 33997 - DNA, 37 bp, Artificial Sequence
  primer
gtaaaacgacggccagtgccaactcttcaaccagcac

SEQ ID NO: 33998 - DNA, 20 bp, Artificial Sequence
  primer
ctgtccgacctcttccagtg

SEQ ID NO: 33999 - DNA, 19 bp, Artificial Sequence
  primer
ccgtagccacgtacgcatc

SEQ ID NO: 34000 - DNA, 38 bp, Artificial Sequence
  primer
gtaaaacgacggccagtagccttcaagacttcgtccag

SEQ ID NO: 34001 - DNA, 37 bp, Artificial Sequence
  primer
gtaaaacgacggccagtgcacgggatttctgaggaac

SEQ ID NO: 34002 - DNA, 38 bp, Artificial Sequence
  primer
gtaaaacgacggccagtgccgagagtactgcaagttcg

SEQ ID NO: 34003 - DNA, 21 bp, Artificial Sequence
  primer
cgaactctttaaccagcaccc

SEQ ID NO: 34004 - DNA, 38 bp, Artificial Sequence
  primer
gtaaaacgacggccagtctaacaaggtcatctgctcgc

SEQ ID NO: 34005 - DNA, 20 bp, Artificial Sequence
  primer
ctacctgaggctgcgctatg

SEQ ID NO: 34006 - DNA, 21 bp, Artificial Sequence
  primer
ctcggtgatgactatccctcc

SEQ ID NO: 34007 - DNA, 37 bp, Artificial Sequence
  primer
gtaaaacgacggccagtagcccataagcagttccctg

SEQ ID NO: 34008 - DNA, 21 bp, Artificial Sequence
  primer
ccagctgtcctttccactcag

SEQ ID NO: 34009 - DNA, 21 bp, Artificial Sequence
  primer
ggtcactcgggacttatccag

SEQ ID NO: 34010 - DNA, 21 bp, Artificial Sequence
  primer
gtgtcccgtatcttcgtggag

SEQ ID NO: 34011 - DNA, 21 bp, Artificial Sequence
  primer
gctactatcacccggtcttcg

SEQ ID NO: 34012 - DNA, 20 bp, Artificial Sequence
  primer
cgagttcgtccagtacctgc

SEQ ID NO: 34013 - DNA, 41 bp, Artificial Sequence
  primer
gtaaaacgacggccagtcattaagtcttcagccttgttgag

SEQ ID NO: 34014 - DNA, 38 bp, Artificial Sequence
  primer
gtaaaacgacggccagtggaaattgctgtaaactgggc

SEQ ID NO: 34015 - DNA, 21 bp, Artificial Sequence
  primer
agaggctttgaggcatctttg

SEQ ID NO: 34016 - DNA, 39 bp, Artificial Sequence
  primer
gtaaaacgacggccagtgagtccatgaccactttggaag

SEQ ID NO: 34017 - DNA, 21 bp, Artificial Sequence
  primer
gccttgctaaattgttctggc

SEQ ID NO: 34018 - DNA, 38 bp, Artificial Sequence
  primer
gtaaaacgacggccagtagttcagcaacatgaattggc

SEQ ID NO: 34019 - DNA, 21 bp, Artificial Sequence
  primer
tgaggtacctaaggctggctg

SEQ ID NO: 34020 - DNA, 21 bp, Artificial Sequence
  primer
tccactacttgctggattccc

SEQ ID NO: 34021 - DNA, 21 bp, Artificial Sequence
  primer
tatcattccattgaacacggc

SEQ ID NO: 34022 - DNA, 21 bp, Artificial Sequence
  primer
acatgcacgaccactacttgg

SEQ ID NO: 34023 - DNA, 21 bp, Artificial Sequence
  primer
aaccacattggactgctgttg

SEQ ID NO: 34024 - DNA, 38 bp, Artificial Sequence
  primer
gtaaaacgacggccagtccctaccagtacaggctccac

SEQ ID NO: 34025 - DNA, 21 bp, Artificial Sequence
  primer
agtacatcctggacctgctgc

SEQ ID NO: 34026 - DNA, 38 bp, Artificial Sequence
  primer
gtaaaacgacggccagtcaggaatctggatccttgtcc

SEQ ID NO: 34027 - DNA, 38 bp, Artificial Sequence
  primer
gtaaaacgacggccagtaattccttcagcgatgtcgag

SEQ ID NO: 34028 - DNA, 21 bp, Artificial Sequence
  primer
agtagtccacgtccaccatcc

SEQ ID NO: 34029 - DNA, 18 bp, Artificial Sequence
  primer
gctgcggagcaggaactc

SEQ ID NO: 34030 - DNA, 38 bp, Artificial Sequence
  primer
gtaaaacgacggccagttcgaggatgatttccacaacc

SEQ ID NO: 34031 - DNA, 36 bp, Artificial Sequence
  primer
gtaaaacgacggccagtcaggaagaggcaggtggac

SEQ ID NO: 34032 - DNA, 21 bp, Artificial Sequence
  primer
cagtctcggacacccatatcc

SEQ ID NO: 34033 - DNA, 20 bp, Artificial Sequence
  primer
ccatctggatggcttcattc

SEQ ID NO: 34034 - DNA, 21 bp, Artificial Sequence
  primer
acctgctgggtgtgtccttag

SEQ ID NO: 34035 - DNA, 38 bp, Artificial Sequence
  primer
gtaaaacgacggccagtctcctagctcctagcgtgtgg

SEQ ID NO: 34036 - DNA, 35 bp, Artificial Sequence
  primer
gtaaaacgacggccagtgcaggtggactgtccgtg

SEQ ID NO: 34037 - DNA, 38 bp, Artificial Sequence
  primer
gtaaaacgacggccagtttatttgatggctggagtggg

SEQ ID NO: 34038 - DNA, 21 bp, Artificial Sequence
  primer
cctgacgtgtttgagttctgg

SEQ ID NO: 34039 - DNA, 36 bp, Artificial Sequence
  primer
gtaaaacgacggccagttccttgatgcctgggtagg

SEQ ID NO: 34040 - DNA, 38 bp, Artificial Sequence
  primer
gtaaaacgacggccagtcacagtcaggagaggctctgg

SEQ ID NO: 34041 - DNA, 35 bp, Artificial Sequence
  primer
gtaaaacgacggccagttccaggaggtcggtggag

SEQ ID NO: 34042 - DNA, 38 bp, Artificial Sequence
  primer
gtaaaacgacggccagtaaactgacaatgacatccggg

SEQ ID NO: 34043 - DNA, 21 bp, Artificial Sequence
  primer
gaagaatgaagtgggtggcag

SEQ ID NO: 34044 - DNA, 20 bp, Artificial Sequence
  primer
ctgccctcctgtcctaggtg

SEQ ID NO: 34045 - DNA, 21 bp, Artificial Sequence
  primer
catcatcccacgtacacttgc

SEQ ID NO: 34046 - DNA, 20 bp, Artificial Sequence
  primer
ctctggagcaggttgcagtc

SEQ ID NO: 34047 - DNA, 38 bp, Artificial Sequence
  primer
gtaaaacgacggccagtgtcctcctgtcttgggtaggg

SEQ ID NO: 34048 - DNA, 21 bp, Artificial Sequence
  primer
aggacttctttggacgtgtgg

SEQ ID NO: 34049 - DNA, 38 bp, Artificial Sequence
  primer
gtaaaacgacggccagtctggttgctaagcaggtttct

SEQ ID NO: 34050 - DNA, 24 bp, Artificial Sequence
  primer
ttcatttctattctcacaccctcc

SEQ ID NO: 34051 - DNA, 21 bp, Artificial Sequence
  primer
gtgggatttcaagggatcttt

SEQ ID NO: 34052 - DNA, 27 bp, Artificial Sequence
  primer
aagaacaacaccttagtaggtaagcag

SEQ ID NO: 34053 - DNA, 42 bp, Artificial Sequence
  primer
gtaaaacgacggccagtaagaaagaaattgggtcctgatatg

SEQ ID NO: 34054 - DNA, 39 bp, Artificial Sequence
  primer
gtaaaacgacggccagtactgccatgagaatctgtgttc

SEQ ID NO: 34055 - DNA, 18 bp, Artificial Sequence
  primer
catgatctgccctcctcg

SEQ ID NO: 34056 - DNA, 18 bp, Artificial Sequence
  primer
tacaggtgtgagccgctg

SEQ ID NO: 34057 - DNA, 18 bp, Artificial Sequence
  primer
gtgcccagcctgtgactg

SEQ ID NO: 34058 - DNA, 38 bp, Artificial Sequence
  primer
gtaaaacgacggccagtaacctcaagtggtacaagccc

SEQ ID NO: 34059 - DNA, 42 bp, Artificial Sequence
  primer
gtaaaacgacggccagtgcaaattctttatctagcaaccatc

SEQ ID NO: 34060 - DNA, 35 bp, Artificial Sequence
  primer
gtaaaacgacggccagtaccttgcctggccatttc

SEQ ID NO: 34061 - DNA, 21 bp, Artificial Sequence
  primer
tccaggctcgacaacaatatg

SEQ ID NO: 34062 - DNA, 38 bp, Artificial Sequence
  primer
gtaaaacgacggccagtttgaaactgccttggacaatc

SEQ ID NO: 34063 - DNA, 38 bp, Artificial Sequence
  primer
gtaaaacgacggccagtaagctccctcaataaccctcc

SEQ ID NO: 34064 - DNA, 38 bp, Artificial Sequence
  primer
gtaaaacgacggccagttgtttccagctgtccctaacc

SEQ ID NO: 34065 - DNA, 38 bp, Artificial Sequence
  primer
gtaaaacgacggccagtttgttcctaaggcattcttgc

SEQ ID NO: 34066 - DNA, 38 bp, Artificial Sequence
  primer
gtaaaacgacggccagtcaaagggagccagtcctagag

SEQ ID NO: 34067 - DNA, 21 bp, Artificial Sequence
  primer
tgtgaagacagctcttgctgc

SEQ ID NO: 34068 - DNA, 37 bp, Artificial Sequence
  primer
gtaaaacgacggccagttttgacacaggcaccctctc

SEQ ID NO: 34069 - DNA, 21 bp, Artificial Sequence
  primer
cggagatcaggtaggttccag

SEQ ID NO: 34070 - DNA, 21 bp, Artificial Sequence
  primer
agcatgacaagccagtgtctc

SEQ ID NO: 34071 - DNA, 38 bp, Artificial Sequence
  primer
gtaaaacgacggccagtgtgggccttagataaccctcc

SEQ ID NO: 34072 - DNA, 42 bp, Artificial Sequence
  primer
gtaaaacgacggccagtttcagtgcttgagactaatgaaatc

SEQ ID NO: 34073 - DNA, 21 bp, Artificial Sequence
  primer
ctgcctcccttacttcagtgg

SEQ ID NO: 34074 - DNA, 21 bp, Artificial Sequence
  primer
actgcaagcttccttgtcatc

SEQ ID NO: 34075 - DNA, 21 bp, Artificial Sequence
  primer
tgccagtccaagaactaacca

SEQ ID NO: 34076 - DNA, 22 bp, Artificial Sequence
  primer
tgacaccttgaaatttgcattc

SEQ ID NO: 34077 - DNA, 21 bp, Artificial Sequence
  primer
tctgaagtttgcatgacttgg

SEQ ID NO: 34078 - DNA, 21 bp, Artificial Sequence
  primer
ttcccagctgacctcagtttc

SEQ ID NO: 34079 - DNA, 22 bp, Artificial Sequence
  primer
tcctaggcagagccagagtaag

SEQ ID NO: 34080 - DNA, 41 bp, Artificial Sequence
  primer
gtaaaacgacggccagtggtgctttgaaagtaaacatgtcc

SEQ ID NO: 34081 - DNA, 38 bp, Artificial Sequence
  primer
gtaaaacgacggccagtctgacagtgctactcttgccc

SEQ ID NO: 34082 - DNA, 21 bp, Artificial Sequence
  primer
ctacgtgaaatgtgccctttg

SEQ ID NO: 34083 - DNA, 22 bp, Artificial Sequence
  primer
cagaatatgccacccacatttc

SEQ ID NO: 34084 - DNA, 38 bp, Artificial Sequence
  primer
gtaaaacgacggccagtgtccaggacaattcctgatcc

SEQ ID NO: 34085 - DNA, 38 bp, Artificial Sequence
  primer
gtaaaacgacggccagtgtgccacatttatagccctgg

SEQ ID NO: 34086 - DNA, 38 bp, Artificial Sequence
  primer
gtaaaacgacggccagtactggtctctgagggagcttg

SEQ ID NO: 34087 - DNA, 39 bp, Artificial Sequence
  primer
gtaaaacgacggccagttcatcggtgcatctgttatctg

SEQ ID NO: 34088 - DNA, 40 bp, Artificial Sequence
  primer
gtaaaacgacggccagtgtgagagtgaaagggttaagcag

SEQ ID NO: 34089 - DNA, 21 bp, Artificial Sequence
  primer
ttggtgggagattaaccaagg

SEQ ID NO: 34090 - DNA, 21 bp, Artificial Sequence
  primer
gcccacagagaagtggcttag

SEQ ID NO: 34091 - DNA, 21 bp, Artificial Sequence
  primer
gaagtgacgcattcattctcg

SEQ ID NO: 34092 - DNA, 19 bp, Artificial Sequence
  primer
tgcctcaagagagctgtgg

SEQ ID NO: 34093 - DNA, 38 bp, Artificial Sequence
  primer
gtaaaacgacggccagttagcatttcaaatccagtccc

SEQ ID NO: 34094 - DNA, 21 bp, Artificial Sequence
  primer
atgccctcagtatggatttgg

SEQ ID NO: 34095 - DNA, 20 bp, Artificial Sequence
  primer
ccaattgcttgttgcatttc

SEQ ID NO: 34096 - DNA, 38 bp, Artificial Sequence
  primer
gtaaaacgacggccagtcccaaggtcctcaccactacc

SEQ ID NO: 34097 - DNA, 38 bp, Artificial Sequence
  primer
gtaaaacgacggccagttgggaacactgcagtatctgg

SEQ ID NO: 34098 - DNA, 21 bp, Artificial Sequence
  primer
gaaatggatgagaacttgggc

SEQ ID NO: 34099 - DNA, 39 bp, Artificial Sequence
  primer
gtaaaacgacggccagttggtacagacaagtgatgtggg

SEQ ID NO: 34100 - DNA, 21 bp, Artificial Sequence
  primer
ttggagaatgagtgagccttg

SEQ ID NO: 34101 - DNA, 40 bp, Artificial Sequence
  primer
gtaaaacgacggccagttttcaaagtaggaaatctggtgc

SEQ ID NO: 34102 - DNA, 21 bp, Artificial Sequence
  primer
atgggaatcctgtttgtgtgg

SEQ ID NO: 34103 - DNA, 20 bp, Artificial Sequence
  primer
tggccttgtggcagtttatg

SEQ ID NO: 34104 - DNA, 38 bp, Artificial Sequence
  primer
gtaaaacgacggccagtatgttgatatggcaaggaggc

SEQ ID NO: 34105 - DNA, 40 bp, Artificial Sequence
  primer
gtaaaacgacggccagtaagcagcaagtcattctgtatcc

SEQ ID NO: 34106 - DNA, 23 bp, Artificial Sequence
  primer
tgctctgtgaaatacttgttggc

SEQ ID NO: 34107 - DNA, 21 bp, Artificial Sequence
  primer
ttgttctcaagcacaggcaac

SEQ ID NO: 34108 - DNA, 23 bp, Artificial Sequence
  primer
aaatctgatgctgattgtggttc

SEQ ID NO: 34109 - DNA, 22 bp, Artificial Sequence
  primer
aaagggtccaaggacaggttac

SEQ ID NO: 34110 - DNA, 38 bp, Artificial Sequence
  primer
gtaaaacgacggccagtggtactgggttacaggaaggc

SEQ ID NO: 34111 - DNA, 22 bp, Artificial Sequence
  primer
tgtactccagcttggcaacata

SEQ ID NO: 34112 - DNA, 38 bp, Artificial Sequence
  primer
gtaaaacgacggccagtgagacggaatacccaggagtc

SEQ ID NO: 34113 - DNA, 39 bp, Artificial Sequence
  primer
gtaaaacgacggccagttgacctagaagtaaatgctggc

SEQ ID NO: 34114 - DNA, 22 bp, Artificial Sequence
  primer
tgtaacgttgttatgtggcaga

SEQ ID NO: 34115 - DNA, 42 bp, Artificial Sequence
  primer
gtaaaacgacggccagtgaaatagccatgtatttccaagatg

SEQ ID NO: 34116 - DNA, 21 bp, Artificial Sequence
  primer
gggctccagagcattagacac

SEQ ID NO: 34117 - DNA, 38 bp, Artificial Sequence
  primer
gtaaaacgacggccagtgcctttgcctctcttacaacg

SEQ ID NO: 34118 - DNA, 38 bp, Artificial Sequence
  primer
gtaaaacgacggccagttgtgtcctattgtgctgagcc

SEQ ID NO: 34119 - DNA, 38 bp, Artificial Sequence
  primer
gtaaaacgacggccagtcatggagtaggcgagcttagg

SEQ ID NO: 34120 - DNA, 21 bp, Artificial Sequence
  primer
ctgctcgtccttaattctggc

SEQ ID NO: 34121 - DNA, 38 bp, Artificial Sequence
  primer
gtaaaacgacggccagtctttgtctctgcccagtcttg

SEQ ID NO: 34122 - DNA, 38 bp, Artificial Sequence
  primer
gtaaaacgacggccagtgtggtgtccattctctcaggg

SEQ ID NO: 34123 - DNA, 21 bp, Artificial Sequence
  primer
cccaagtgatctgtccacctc

SEQ ID NO: 34124 - DNA, 41 bp, Artificial Sequence
  primer
gtaaaacgacggccagttccactgttacatccttaatgcac

SEQ ID NO: 34125 - DNA, 21 bp, Artificial Sequence
  primer
agagctggactgtgaacccac

SEQ ID NO: 34126 - DNA, 36 bp, Artificial Sequence
  primer
gtaaaacgacggccagtcctgttccctcccttctcc

SEQ ID NO: 34127 - DNA, 38 bp, Artificial Sequence
  primer
gtaaaacgacggccagtcatattgctgctgtctgcctg

SEQ ID NO: 34128 - DNA, 21 bp, Artificial Sequence
  primer
attggacctgcaaacatagcc

SEQ ID NO: 34129 - DNA, 35 bp, Artificial Sequence
  primer
gtaaaacgacggccagtcatccgtgtgccgtgttc

SEQ ID NO: 34130 - DNA, 21 bp, Artificial Sequence
  primer
taggagtgcagaaatgctccc

SEQ ID NO: 34131 - DNA, 38 bp, Artificial Sequence
  primer
gtaaaacgacggccagtcagagattctcggcacctttc

SEQ ID NO: 34132 - DNA, 21 bp, Artificial Sequence
  primer
gcctcaacaaacgctacacac

SEQ ID NO: 34133 - DNA, 21 bp, Artificial Sequence
  primer
aaccctccagaatcctcttcc

SEQ ID NO: 34134 - DNA, 38 bp, Artificial Sequence
  primer
gtaaaacgacggccagttgattcaggagaacgaggtcc

SEQ ID NO: 34135 - DNA, 21 bp, Artificial Sequence
  primer
tcatccacatgactttccagg

SEQ ID NO: 34136 - DNA, 21 bp, Artificial Sequence
  primer
gttccagggagtcgtttgaag

SEQ ID NO: 34137 - DNA, 38 bp, Artificial Sequence
  primer
gtaaaacgacggccagtcgtgacccatttcttaatccc

SEQ ID NO: 34138 - DNA, 21 bp, Artificial Sequence
  primer
ctgatgcttcctctgttctgg

SEQ ID NO: 34139 - DNA, 21 bp, Artificial Sequence
  primer
aactggagtagaggcagtggc

SEQ ID NO: 34140 - DNA, 38 bp, Artificial Sequence
  primer
gtaaaacgacggccagtgagaggacgaggcactgagtc

SEQ ID NO: 34141 - DNA, 38 bp, Artificial Sequence
  primer
gtaaaacgacggccagtttccacctgaaacaagacagg

SEQ ID NO: 34142 - DNA, 20 bp, Artificial Sequence
  primer
gagcactctgggagttgtgg

SEQ ID NO: 34143 - DNA, 18 bp, Artificial Sequence
  primer
ctaggaccgcttggagcc

SEQ ID NO: 34144 - DNA, 21 bp, Artificial Sequence
  primer
gagaaagttgtctgcgtctcg

SEQ ID NO: 34145 - DNA, 21 bp, Artificial Sequence
  primer
ctcctcacctggttgacaatg

SEQ ID NO: 34146 - DNA, 38 bp, Artificial Sequence
  primer
gtaaaacgacggccagtctggtcctgtgacctgctctc

SEQ ID NO: 34147 - DNA, 21 bp, Artificial Sequence
  primer
tctttggtgagaaccaggagc

SEQ ID NO: 34148 - DNA, 37 bp, Artificial Sequence
  primer
gtaaaacgacggccagtctcatcgacaacgtgagcag

SEQ ID NO: 34149 - DNA, 38 bp, Artificial Sequence
  primer
gtaaaacgacggccagtaagggtctaaagggagaaggg

SEQ ID NO: 34150 - DNA, 20 bp, Artificial Sequence
  primer
ggcaaggtggaaagggatag

SEQ ID NO: 34151 - DNA, 38 bp, Artificial Sequence
  primer
gtaaaacgacggccagtgtcctggctgaggatgttctg

SEQ ID NO: 34152 - DNA, 21 bp, Artificial Sequence
  primer
tcagagggatttggtcactcc

SEQ ID NO: 34153 - DNA, 38 bp, Artificial Sequence
  primer
gtaaaacgacggccagtagtgtgcatggagatgctctg

SEQ ID NO: 34154 - DNA, 38 bp, Artificial Sequence
  primer
gtaaaacgacggccagtcctaatgaggcactgtccagc

SEQ ID NO: 34155 - DNA, 21 bp, Artificial Sequence
  primer
atggacacattcaggctgttg

SEQ ID NO: 34156 - DNA, 38 bp, Artificial Sequence
  primer
gtaaaacgacggccagtcttcatctgggtgtaccgtcc

SEQ ID NO: 34157 - DNA, 38 bp, Artificial Sequence
  primer
gtaaaacgacggccagtaacaaagaagggacaagcgtc

SEQ ID NO: 34158 - DNA, 38 bp, Artificial Sequence
  primer
gtaaaacgacggccagtccagaaggtgggtgctgatag

SEQ ID NO: 34159 - DNA, 21 bp, Artificial Sequence
  primer
cccttcttgtaacatgggcac

SEQ ID NO: 34160 - DNA, 21 bp, Artificial Sequence
  primer
ttaaaggcatgtgctctcagc

SEQ ID NO: 34161 - DNA, 38 bp, Artificial Sequence
  primer
gtaaaacgacggccagtaactcaggtggaatgggaatg

SEQ ID NO: 34162 - DNA, 38 bp, Artificial Sequence
  primer
gtaaaacgacggccagtccttcctccatctgtctcctg

SEQ ID NO: 34163 - DNA, 21 bp, Artificial Sequence
  primer
tccttcctcaaagagacaccc

SEQ ID NO: 34164 - DNA, 21 bp, Artificial Sequence
  primer
catctcaaacccaggacacag

SEQ ID NO: 34165 - DNA, 38 bp, Artificial Sequence
  primer
gtaaaacgacggccagtagaggctaatgggcatctgtg

SEQ ID NO: 34166 - DNA, 38 bp, Artificial Sequence
  primer
gtaaaacgacggccagtagtgagaggcaaccagtaggg

SEQ ID NO: 34167 - DNA, 37 bp, Artificial Sequence
  primer
gtaaaacgacggccagtcacaaggttccttctggtgc

SEQ ID NO: 34168 - DNA, 17 bp, Artificial Sequence
  primer
gagggaacgagcgagcc

SEQ ID NO: 34169 - DNA, 38 bp, Artificial Sequence
  primer
gtaaaacgacggccagtgggctacctcatctagggtgg

SEQ ID NO: 34170 - DNA, 37 bp, Artificial Sequence
  primer
gtaaaacgacggccagtccaaccagagcaaaggtgag

SEQ ID NO: 34171 - DNA, 37 bp, Artificial Sequence
  primer
gtaaaacgacggccagtatgatgatgcgtgagttccc

SEQ ID NO: 34172 - DNA, 38 bp, Artificial Sequence
  primer
gtaaaacgacggccagtactttatccctgcctgtcctg

SEQ ID NO: 34173 - DNA, 38 bp, Artificial Sequence
  primer
gtaaaacgacggccagtccttcatgatcttcagcaagc

SEQ ID NO: 34174 - DNA, 21 bp, Artificial Sequence
  primer
agcctgcttctgcctagtacc

SEQ ID NO: 34175 - DNA, 21 bp, Artificial Sequence
  primer
aggaactgacgcaggtctagg

SEQ ID NO: 34176 - DNA, 38 bp, Artificial Sequence
  primer
gtaaaacgacggccagttgaggagtagccttcctggac

SEQ ID NO: 34177 - DNA, 21 bp, Artificial Sequence
  primer
gggagttgggtcatagtcagg

SEQ ID NO: 34178 - DNA, 21 bp, Artificial Sequence
  primer
ggatcctcctgtagcctttgg

SEQ ID NO: 34179 - DNA, 38 bp, Artificial Sequence
  primer
gtaaaacgacggccagtccaaacaaggaggagcaagag

SEQ ID NO: 34180 - DNA, 22 bp, Artificial Sequence
  primer
tgtcactaacctactggtgggc

SEQ ID NO: 34181 - DNA, 37 bp, Artificial Sequence
  primer
gtaaaacgacggccagtccatcctgcagtctgtaccc

SEQ ID NO: 34182 - DNA, 38 bp, Artificial Sequence
  primer
gtaaaacgacggccagtgtcccacttgaggtcttggtc

SEQ ID NO: 34183 - DNA, 38 bp, Artificial Sequence
  primer
gtaaaacgacggccagtcatactcagaggccagggaag

SEQ ID NO: 34184 - DNA, 38 bp, Artificial Sequence
  primer
gtaaaacgacggccagtgtagctctaggcttcacctcg

SEQ ID NO: 34185 - DNA, 38 bp, Artificial Sequence
  primer
gtaaaacgacggccagtacccagagcagagtgagttgg

SEQ ID NO: 34186 - DNA, 39 bp, Artificial Sequence
  primer
gtaaaacgacggccagtaactctttgtttctggcctttg

SEQ ID NO: 34187 - DNA, 38 bp, Artificial Sequence
  primer
gtaaaacgacggccagttctgtggacaagtgagcatgg

SEQ ID NO: 34188 - DNA, 38 bp, Artificial Sequence
  primer
gtaaaacgacggccagtaggaagaactccacgggtagg

SEQ ID NO: 34189 - DNA, 21 bp, Artificial Sequence
  primer
ctaggttgccctgtgactgtg

SEQ ID NO: 34190 - DNA, 20 bp, Artificial Sequence
  primer
catgcagctctttcaggacc

SEQ ID NO: 34191 - DNA, 19 bp, Artificial Sequence
  primer
ttccaaggtcctcggtacg

SEQ ID NO: 34192 - DNA, 41 bp, Artificial Sequence
  primer
gtaaaacgacggccagtaatcccaacaactgaatttctttc

SEQ ID NO: 34193 - DNA, 38 bp, Artificial Sequence
  primer
gtaaaacgacggccagtcttccctgtttccaagcaaag

SEQ ID NO: 34194 - DNA, 21 bp, Artificial Sequence
  primer
agccgctcacagaccttaaac

SEQ ID NO: 34195 - DNA, 39 bp, Artificial Sequence
  primer
gtaaaacgacggccagtggagtgaagtattcccatcctg

SEQ ID NO: 34196 - DNA, 38 bp, Artificial Sequence
  primer
gtaaaacgacggccagtaggtaccaggtgtggctcttg

SEQ ID NO: 34197 - DNA, 21 bp, Artificial Sequence
  primer
actcattcccaccttgtcctg

SEQ ID NO: 34198 - DNA, 38 bp, Artificial Sequence
  primer
gtaaaacgacggccagtagccctctagccactctaccc

SEQ ID NO: 34199 - DNA, 38 bp, Artificial Sequence
  primer
gtaaaacgacggccagtaagtgccggaaagtcaaagtg

SEQ ID NO: 34200 - DNA, 38 bp, Artificial Sequence
  primer
gtaaaacgacggccagtcccagtgctgatggagattag

SEQ ID NO: 34201 - DNA, 38 bp, Artificial Sequence
  primer
gtaaaacgacggccagtgctcttgcttgtggaaagtcc

SEQ ID NO: 34202 - DNA, 38 bp, Artificial Sequence
  primer
gtaaaacgacggccagtatgggaaccctctcatctcac

SEQ ID NO: 34203 - DNA, 21 bp, Artificial Sequence
  primer
ctagggcaggattagcaggtg

SEQ ID NO: 34204 - DNA, 38 bp, Artificial Sequence
  primer
gtaaaacgacggccagtggctccagttccacctcatag

SEQ ID NO: 34205 - DNA, 38 bp, Artificial Sequence
  primer
gtaaaacgacggccagtcatcagaacaggtgaggtccc

SEQ ID NO: 34206 - DNA, 37 bp, Artificial Sequence
  primer
gtaaaacgacggccagtacagagattcgccatgttgg

SEQ ID NO: 34207 - DNA, 38 bp, Artificial Sequence
  primer
gtaaaacgacggccagtcattctgtccacctttccctc

SEQ ID NO: 34208 - DNA, 38 bp, Artificial Sequence
  primer
gtaaaacgacggccagttcaccacctcacactgtttcc

SEQ ID NO: 34209 - DNA, 22 bp, Artificial Sequence
  primer
gacaaatgtgatagggcctgag

SEQ ID NO: 34210 - DNA, 38 bp, Artificial Sequence
  primer
gtaaaacgacggccagtacagcctcagggtcagatttc

SEQ ID NO: 34211 - DNA, 39 bp, Artificial Sequence
  primer
gtaaaacgacggccagtgtgatctgtgatgtggctgaag

SEQ ID NO: 34212 - DNA, 21 bp, Artificial Sequence
  primer
ccttaggaccaatggagatgg

SEQ ID NO: 34213 - DNA, 38 bp, Artificial Sequence
  primer
gtaaaacgacggccagtcatcatctgtctccttggctg

SEQ ID NO: 34214 - DNA, 21 bp, Artificial Sequence
  primer
atcaaccaactctgtttcccg

SEQ ID NO: 34215 - DNA, 21 bp, Artificial Sequence
  primer
tccaagacagaggaaagggag

SEQ ID NO: 34216 - DNA, 38 bp, Artificial Sequence
  primer
gtaaaacgacggccagttgaaatcaagatgcttcgtcg

SEQ ID NO: 34217 - DNA, 38 bp, Artificial Sequence
  primer
gtaaaacgacggccagtccacttaatgctggcaaagtg

SEQ ID NO: 34218 - DNA, 38 bp, Artificial Sequence
  primer
gtaaaacgacggccagtgaactggcttcttgtccaacc

SEQ ID NO: 34219 - DNA, 21 bp, Artificial Sequence
  primer
caacaagctcaactaccgtcg

SEQ ID NO: 34220 - DNA, 21 bp, Artificial Sequence
  primer
ggaagctgtatggaatccgag

SEQ ID NO: 34221 - DNA, 21 bp, Artificial Sequence
  primer
aagagcaatgtgggagtagcc

SEQ ID NO: 34222 - DNA, 35 bp, Artificial Sequence
  primer
gtaaaacgacggccagtcactctcagtcccagcgg

SEQ ID NO: 34223 - DNA, 35 bp, Artificial Sequence
  primer
gtaaaacgacggccagtggatgatcgtggctgcac

SEQ ID NO: 34224 - DNA, 21 bp, Artificial Sequence
  primer
cagcaagtaaggcctttgcac

SEQ ID NO: 34225 - DNA, 38 bp, Artificial Sequence
  primer
gtaaaacgacggccagtgaagggtcctttagtcccagg

SEQ ID NO: 34226 - DNA, 21 bp, Artificial Sequence
  primer
ctgattgaatggaaagccctc

SEQ ID NO: 34227 - DNA, 38 bp, Artificial Sequence
  primer
gtaaaacgacggccagtcagagtgagtcggcatttctg

SEQ ID NO: 34228 - DNA, 21 bp, Artificial Sequence
  primer
ggagagggactaccaaggagg

SEQ ID NO: 34229 - DNA, 21 bp, Artificial Sequence
  primer
caatcctaggcctccactgag

SEQ ID NO: 34230 - DNA, 36 bp, Artificial Sequence
  primer
gtaaaacgacggccagtattcactgccctggctacg

SEQ ID NO: 34231 - DNA, 18 bp, Artificial Sequence
  primer
atcggcttcaccgcctac

SEQ ID NO: 34232 - DNA, 38 bp, Artificial Sequence
  primer
gtaaaacgacggccagtacataccagccagagcaacac

SEQ ID NO: 34233 - DNA, 36 bp, Artificial Sequence
  primer
gtaaaacgacggccagtcaagctgtggtcgctgaac

SEQ ID NO: 34234 - DNA, 38 bp, Artificial Sequence
  primer
gtaaaacgacggccagtctacgccaacgacaagttcac

SEQ ID NO: 34235 - DNA, 19 bp, Artificial Sequence
  primer
acaggccagacgcctacac

SEQ ID NO: 34236 - DNA, 20 bp, Artificial Sequence
  primer
cttcaagcgtaacggcttcc

SEQ ID NO: 34237 - DNA, 39 bp, Artificial Sequence
  primer
gtaaaacgacggccagtggcggacaagtacgagtacaac

SEQ ID NO: 34238 - DNA, 21 bp, Artificial Sequence
  primer
ccaggagtatatggtccgctc

SEQ ID NO: 34239 - DNA, 21 bp, Artificial Sequence
  primer
ggccacaactatggcgtctac

SEQ ID NO: 34240 - DNA, 35 bp, Artificial Sequence
  primer
gtaaaacgacggccagtaggaggcgggatggactc

SEQ ID NO: 34241 - DNA, 38 bp, Artificial Sequence
  primer
gtaaaacgacggccagttaaggacatttgccctccaac

SEQ ID NO: 34242 - DNA, 40 bp, Artificial Sequence
  primer
gtaaaacgacggccagttcacatggctgaatttaactgac

SEQ ID NO: 34243 - DNA, 38 bp, Artificial Sequence
  primer
gtaaaacgacggccagtcttcatctccctgggaatttg

SEQ ID NO: 34244 - DNA, 38 bp, Artificial Sequence
  primer
gtaaaacgacggccagtcctcagtgctgttgctgattc

SEQ ID NO: 34245 - DNA, 37 bp, Artificial Sequence
  primer
gtaaaacgacggccagtacaacgattggtcagccttg

SEQ ID NO: 34246 - DNA, 38 bp, Artificial Sequence
  primer
gtaaaacgacggccagtggcagtaatttgggatggaac

SEQ ID NO: 34247 - DNA, 38 bp, Artificial Sequence
  primer
gtaaaacgacggccagtagtttctgccttcactgttgg

SEQ ID NO: 34248 - DNA, 38 bp, Artificial Sequence
  primer
gtaaaacgacggccagttggccacattgctttaacatc

SEQ ID NO: 34249 - DNA, 38 bp, Artificial Sequence
  primer
gtaaaacgacggccagtggcagagaatggtgactcagg

SEQ ID NO: 34250 - DNA, 18 bp, Artificial Sequence
  primer
gagccacgagaatcgctc

SEQ ID NO: 34251 - DNA, 38 bp, Artificial Sequence
  primer
gtaaaacgacggccagttttctgaacctctttcatggg

SEQ ID NO: 34252 - DNA, 38 bp, Artificial Sequence
  primer
gtaaaacgacggccagtatcgctacatgcaatttctgc

SEQ ID NO: 34253 - DNA, 21 bp, Artificial Sequence
  primer
gactggatggttgctgcttag

SEQ ID NO: 34254 - DNA, 38 bp, Artificial Sequence
  primer
gtaaaacgacggccagtttagttcttggcacagggttg

SEQ ID NO: 34255 - DNA, 38 bp, Artificial Sequence
  primer
gtaaaacgacggccagtctaccaagctcaagtctgggc

SEQ ID NO: 34256 - DNA, 38 bp, Artificial Sequence
  primer
gtaaaacgacggccagttgtcacctttgatctcggaag

SEQ ID NO: 34257 - DNA, 36 bp, Artificial Sequence
  primer
gtaaaacgacggccagtaaagattgggcactcctgc

SEQ ID NO: 34258 - DNA, 44 bp, Artificial Sequence
  primer
gtaaaacgacggccagttctcaggtagtaagaaagtctcagagc

SEQ ID NO: 34259 - DNA, 24 bp, Artificial Sequence
  primer
tttgtcctgcaatagtctgaattt

SEQ ID NO: 34260 - DNA, 26 bp, Artificial Sequence
  primer
tcaaaccaatgaattcttacaagtga

SEQ ID NO: 34261 - DNA, 27 bp, Artificial Sequence
  primer
acacataataactaaatggtgtttgga

SEQ ID NO: 34262 - DNA, 42 bp, Artificial Sequence
  primer
gtaaaacgacggccagttcaaggaataggaatttgaacattg

SEQ ID NO: 34263 - DNA, 22 bp, Artificial Sequence
  primer
aacaaagcttcaactgcattcc

SEQ ID NO: 34264 - DNA, 20 bp, Artificial Sequence
  primer
cacttcggcagggagactac

SEQ ID NO: 34265 - DNA, 35 bp, Artificial Sequence; identical to SEQ ID NO: 15753
  primer

SEQ ID NO: 34266 - DNA, 24 bp, Artificial Sequence
  primer
tcccaattacaggaaattagatcg

SEQ ID NO: 34267 - DNA, 40 bp, Artificial Sequence
  primer
gtaaaacgacggccagttcagggcataacaacagtgattc

SEQ ID NO: 34268 - DNA, 38 bp, Artificial Sequence
  primer
gtaaaacgacggccagtttctcaaccacccattatgcc

SEQ ID NO: 34269 - DNA, 22 bp, Artificial Sequence
  primer
aacaaagcttcaactgcattcc

SEQ ID NO: 34270 - DNA, 39 bp, Artificial Sequence
  primer
gtaaaacgacggccagtgtgacagttagacacactgccc

SEQ ID NO: 34271 - DNA, 21 bp, Artificial Sequence
  primer
gatctctgaaggtgaggctgc

SEQ ID NO: 34272 - DNA, 38 bp, Artificial Sequence
  primer
gtaaaacgacggccagtgtgaaagacagggagacccag

SEQ ID NO: 34273 - DNA, 20 bp, Artificial Sequence
  primer
gtgagtgccatgagtgggtc

SEQ ID NO: 34274 - DNA, 38 bp, Artificial Sequence
  primer
gtaaaacgacggccagtaacaatttccaagatgctgcc

SEQ ID NO: 34275 - DNA, 21 bp, Artificial Sequence
  primer
tcagagccatttctatcgcag

SEQ ID NO: 34276 - DNA, 21 bp, Artificial Sequence
  primer
gagatgttgttggagccttcc

SEQ ID NO: 34277 - DNA, 37 bp, Artificial Sequence
  primer
gtaaaacgacggccagtttaccatgttgcctgtgacc

SEQ ID NO: 34278 - DNA, 23 bp, Artificial Sequence
  primer
ggcaactgatagctttaaggagg

SEQ ID NO: 34279 - DNA, 21 bp, Artificial Sequence
  primer
ctactagggaggctgaggcag

SEQ ID NO: 34280 - DNA, 38 bp, Artificial Sequence
  primer
gtaaaacgacggccagttcaagcagtccttccactttg

SEQ ID NO: 34281 - DNA, 39 bp, Artificial Sequence
  primer
gtaaaacgacggccagttgatggaatccttagcttctgg

SEQ ID NO: 34282 - DNA, 37 bp, Artificial Sequence
  primer
gtaaaacgacggccagtaaaccgttccagcatcacac

SEQ ID NO: 34283 - DNA, 40 bp, Artificial Sequence
  primer
gtaaaacgacggccagtgcctggcatatgggagtacttag

SEQ ID NO: 34284 - DNA, 20 bp, Artificial Sequence
  primer
cacctgtgtccctggctatg

SEQ ID NO: 34285 - DNA, 38 bp, Artificial Sequence
  primer
gtaaaacgacggccagttatgtccagagtggcaagagc

SEQ ID NO: 34286 - DNA, 38 bp, Artificial Sequence
  primer
gtaaaacgacggccagtgtgccgagtcagttggcttac

SEQ ID NO: 34287 - DNA, 21 bp, Artificial Sequence
  primer
tgatcagcaaattatcctggc

SEQ ID NO: 34288 - DNA, 39 bp, Artificial Sequence
  primer
gtaaaacgacggccagtccctgacctagaccattcaatc

SEQ ID NO: 34289 - DNA, 41 bp, Artificial Sequence
  primer
gtaaaacgacggccagtaaagtgttgggagagcatagaatg

SEQ ID NO: 34290 - DNA, 21 bp, Artificial Sequence
  primer
ccgaattaacgaatgtcaggg

SEQ ID NO: 34291 - DNA, 38 bp, Artificial Sequence
  primer
gtaaaacgacggccagtagggcaggaaagattgtcaag

SEQ ID NO: 34292 - DNA, 38 bp, Artificial Sequence
  primer
gtaaaacgacggccagtcactgcctctcagtccctgtc

SEQ ID NO: 34293 - DNA, 37 bp, Artificial Sequence
  primer
gtaaaacgacggccagtccagccagaggtcatgaaac

SEQ ID NO: 34294 - DNA, 21 bp, Artificial Sequence
  primer
cgactacctccgacagtaccc

SEQ ID NO: 34295 - DNA, 40 bp, Artificial Sequence
  primer
gtaaaacgacggccagtctccttgtccctgatatcttgag

SEQ ID NO: 34296 - DNA, 38 bp, Artificial Sequence
  primer
gtaaaacgacggccagtgcagttagttgagttggtggc

SEQ ID NO: 34297 - DNA, 22 bp, Artificial Sequence
  primer
tgtctttgacagtgagggaagc

SEQ ID NO: 34298 - DNA, 20 bp, Artificial Sequence
  primer
tttcccttctttcctttgcc

SEQ ID NO: 34299 - DNA, 21 bp, Artificial Sequence
  primer
cagcgtgccttacacatcttc

SEQ ID NO: 34300 - DNA, 21 bp, Artificial Sequence
  primer
tatccttccttgctccctctc

SEQ ID NO: 34301 - DNA, 38 bp, Artificial Sequence
  primer
gtaaaacgacggccagtatgtggctgttggcagtctac

SEQ ID NO: 34302 - DNA, 20 bp, Artificial Sequence
  primer
gaagagggcacgaaacttcc

SEQ ID NO: 34303 - DNA, 38 bp, Artificial Sequence
  primer
gtaaaacgacggccagtagacgatcttctccgcaacag

SEQ ID NO: 34304 - DNA, 38 bp, Artificial Sequence
  primer
gtaaaacgacggccagtgaaacaaatgttgcagcttcc

SEQ ID NO: 34305 - DNA, 38 bp, Artificial Sequence
  primer
gtaaaacgacggccagttcggaggctacttgagatgtg

SEQ ID NO: 34306 - DNA, 21 bp, Artificial Sequence
  primer
tcactcgaaactgtcctggtg

SEQ ID NO: 34307 - DNA, 37 bp, Artificial Sequence
  primer
gtaaaacgacggccagtttccatcctcactgcctgtc

SEQ ID NO: 34308 - DNA, 43 bp, Artificial Sequence
  primer
gtaaaacgacggccagtcagagaccaagaaagtagtctacacg

SEQ ID NO: 34309 - DNA, 38 bp, Artificial Sequence
  primer
gtaaaacgacggccagtctgagaggccactgttcttcc

SEQ ID NO: 34310 - DNA, 23 bp, Artificial Sequence
  primer
gtgcagaacatactgtcaccatc

SEQ ID NO: 34311 - DNA, 38 bp, Artificial Sequence
  primer
gtaaaacgacggccagtgaggaccagatgaccgttacc

SEQ ID NO: 34312 - DNA, 38 bp, Artificial Sequence
  primer
gtaaaacgacggccagtgattgataagcggactcccag

SEQ ID NO: 34313 - DNA, 21 bp, Artificial Sequence
  primer
acctctagccaaattgccgtc

SEQ ID NO: 34314 - DNA, 38 bp, Artificial Sequence
  primer
gtaaaacgacggccagtaactccgtgtccgtctacctc

SEQ ID NO: 34315 - DNA, 21 bp, Artificial Sequence
  primer
cagctgcaggttgagtagcag

SEQ ID NO: 34316 - DNA, 38 bp, Artificial Sequence
  primer
gtaaaacgacggccagtacagggtgtgcatgtatggtc

SEQ ID NO: 34317 - DNA, 38 bp, Artificial Sequence
  primer
gtaaaacgacggccagttgtcacgtgggttcagaaatc

SEQ ID NO: 34318 - DNA, 38 bp, Artificial Sequence
  primer
gtaaaacgacggccagtctgaaactgacccgaccaaag

SEQ ID NO: 34319 - DNA, 20 bp, Artificial Sequence
  primer
agacggaccagccttctttc

SEQ ID NO: 34320 - DNA, 38 bp, Artificial Sequence
  primer
gtaaaacgacggccagtttctttctccgtgaaggttcg

SEQ ID NO: 34321 - DNA, 21 bp, Artificial Sequence
  primer
tttgaaataggaacagcaggg

SEQ ID NO: 34322 - DNA, 24 bp, Artificial Sequence
  primer
tgactcagtactgtttgtgttgga

SEQ ID NO: 34323 - DNA, 38 bp, Artificial Sequence
  primer
gtaaaacgacggccagtctcctcccgagtcagatttcc

SEQ ID NO: 34324 - DNA, 20 bp, Artificial Sequence
  primer
agatagcccagggacattcg

SEQ ID NO: 34325 - DNA, 37 bp, Artificial Sequence
  primer
gtaaaacgacggccagtttccctttctgtgggttgtc

SEQ ID NO: 34326 - DNA, 20 bp, Artificial Sequence
  primer
gtagagaagcccaggcgttg

SEQ ID NO: 34327 - DNA, 37 bp, Artificial Sequence
  primer
gtaaaacgacggccagtctggcacaagccactctgtc

SEQ ID NO: 34328 - DNA, 21 bp, Artificial Sequence
  primer
cgtaccctgtctctctctccc

SEQ ID NO: 34329 - DNA, 20 bp, Artificial Sequence
  primer
tggtgggcatctttgatctc

SEQ ID NO: 34330 - DNA, 21 bp, Artificial Sequence
  primer
ttggccttaaccttctcttgg

SEQ ID NO: 34331 - DNA, 38 bp, Artificial Sequence
  primer
gtaaaacgacggccagttggaggccttgttgctcttac

SEQ ID NO: 34332 - DNA, 38 bp, Artificial Sequence
  primer
gtaaaacgacggccagtctagaaccaccatcccgtacc

SEQ ID NO: 34333 - DNA, 21 bp, Artificial Sequence
  primer
ggatactgctcatatcctgcg

SEQ ID NO: 34334 - DNA, 38 bp, Artificial Sequence
  primer
gtaaaacgacggccagtggcttggctagatgctgtagg

SEQ ID NO: 34335 - DNA, 38 bp, Artificial Sequence
  primer
gtaaaacgacggccagtgtaggacccacctccactttc

SEQ ID NO: 34336 - DNA, 21 bp, Artificial Sequence
  primer
gctcctcattcttccatcacc

SEQ ID NO: 34337 - DNA, 21 bp, Artificial Sequence
  primer
aacatgcatgactgttctggc

SEQ ID NO: 34338 - DNA, 38 bp, Artificial Sequence
  primer
gtaaaacgacggccagtagcagggtaagcattgtcctc

SEQ ID NO: 34339 - DNA, 38 bp, Artificial Sequence
  primer
gtaaaacgacggccagtgggttgctcaggtaagaagga

SEQ ID NO: 34340 - DNA, 39 bp, Artificial Sequence
  primer
gtaaaacgacggccagtttacagcatcgcaggtacacac

SEQ ID NO: 34341 - DNA, 37 bp, Artificial Sequence
  primer
gtaaaacgacggccagtcatccttgcctcatagctgc

SEQ ID NO: 34342 - DNA, 39 bp, Artificial Sequence
  primer
gtaaaacgacggccagtgagcagggttactatggtgtgc

SEQ ID NO: 34343 - DNA, 21 bp, Artificial Sequence
  primer
tagcctcaaatggaaccaagg

SEQ ID NO: 34344 - DNA, 21 bp, Artificial Sequence
  primer
tcctttattaggccacttcgg

SEQ ID NO: 34345 - DNA, 21 bp, Artificial Sequence
  primer
catatgatggccatgaaccac

SEQ ID NO: 34346 - DNA, 21 bp, Artificial Sequence
  primer
gccaggtttaacaactcccag

SEQ ID NO: 34347 - DNA, 38 bp, Artificial Sequence
  primer
gtaaaacgacggccagtgaggtttcggagcactacagg

SEQ ID NO: 34348 - DNA, 18 bp, Artificial Sequence
  primer
gaccacctgatgctcgcc

SEQ ID NO: 34349 - DNA, 20 bp, Artificial Sequence
  primer
gtcctccttccagccctttc

SEQ ID NO: 34350 - DNA, 37 bp, Artificial Sequence
  primer
gtaaaacgacggccagtggaatgcagctgtgaagctc

SEQ ID NO: 34351 - DNA, 21 bp, Artificial Sequence
  primer
gaatggaggtgagaagccttg

SEQ ID NO: 34352 - DNA, 39 bp, Artificial Sequence
  primer
gtaaaacgacggccagtcctgggatgaatatgttgtttg

SEQ ID NO: 34353 - DNA, 38 bp, Artificial Sequence
  primer
gtaaaacgacggccagtctgatgcctgaccctaccttc

SEQ ID NO: 34354 - DNA, 21 bp, Artificial Sequence
  primer
taagatcatccactcggcaac

SEQ ID NO: 34355 - DNA, 38 bp, Artificial Sequence
  primer
gtaaaacgacggccagtcaggtgatagaggcaggtgtg

SEQ ID NO: 34356 - DNA, 38 bp, Artificial Sequence
  primer
gtaaaacgacggccagtcaacaagagcgaaactccatc

SEQ ID NO: 34357 - DNA, 21 bp, Artificial Sequence
  primer
agacacagacaccagacctgc

SEQ ID NO: 34358 - DNA, 37 bp, Artificial Sequence
  primer
gtaaaacgacggccagtaggtgcagccacaggtacag

SEQ ID NO: 34359 - DNA, 38 bp, Artificial Sequence
  primer
gtaaaacgacggccagtagctggtggaggtaagtgagc

SEQ ID NO: 34360 - DNA, 37 bp, Artificial Sequence
  primer
gtaaaacgacggccagtagatgttgaatgctgggctg

SEQ ID NO: 34361 - DNA, 39 bp, Artificial Sequence
  primer
gtaaaacgacggccagtaatgtgtggtgagagaaatggg

SEQ ID NO: 34362 - DNA, 38 bp, Artificial Sequence
  primer
gtaaaacgacggccagttcctgtgggagttgctattgg

SEQ ID NO: 34363 - DNA, 38 bp, Artificial Sequence
  primer
gtaaaacgacggccagtcccggcttgttacagatatgg

SEQ ID NO: 34364 - DNA, 38 bp, Artificial Sequence
  primer
gtaaaacgacggccagttttatcccagcccaaactcac

SEQ ID NO: 34365 - DNA, 21 bp, Artificial Sequence
  primer
gagaatgccacccactacctc

SEQ ID NO: 34366 - DNA, 21 bp, Artificial Sequence
  primer
gctgggaagccttctcttctg

SEQ ID NO: 34367 - DNA, 21 bp, Artificial Sequence
  primer
aggctgttagctccagagacg

SEQ ID NO: 34368 - DNA, 38 bp, Artificial Sequence
  primer
gtaaaacgacggccagtctggcccaagagtaaggagag

SEQ ID NO: 34369 - DNA, 37 bp, Artificial Sequence
  primer
gtaaaacgacggccagtgcgatggtcattgatgcaag

SEQ ID NO: 34370 - DNA, 21 bp, Artificial Sequence
  primer
tcccagatggagacactgaag

SEQ ID NO: 34371 - DNA, 38 bp, Artificial Sequence
  primer
gtaaaacgacggccagtctggaagagagagttcctccg

SEQ ID NO: 34372 - DNA, 38 bp, Artificial Sequence
  primer
gtaaaacgacggccagtgagctggaggtggtcctagtg

SEQ ID NO: 34373 - DNA, 39 bp, Artificial Sequence
  primer
gtaaaacgacggccagtgcatttgtgtgtaagtccatgc

SEQ ID NO: 34374 - DNA, 38 bp, Artificial Sequence
  primer
gtaaaacgacggccagttggcttattcaattcacgcag

SEQ ID NO: 34375 - DNA, 37 bp, Artificial Sequence
  primer
gtaaaacgacggccagtggtggaaccagctttggaag

SEQ ID NO: 34376 - DNA, 40 bp, Artificial Sequence
  primer
gtaaaacgacggccagttgttaacattgccctcttcttcc

SEQ ID NO: 34377 - DNA, 21 bp, Artificial Sequence
  primer
gaggaccaagttcaagaaggg

SEQ ID NO: 34378 - DNA, 38 bp, Artificial Sequence
  primer
gtaaaacgacggccagtaagcaagatgctaacatgccc

SEQ ID NO: 34379 - DNA, 21 bp, Artificial Sequence
  primer
tgtgcttggatcttatcgtgg

SEQ ID NO: 34380 - DNA, 26 bp, Artificial Sequence
  primer
caagcttgtgaactatatatgccatt

SEQ ID NO: 34381 - DNA, 24 bp, Artificial Sequence
  primer
gggctatcgttatcattgatcttg

SEQ ID NO: 34382 - DNA, 38 bp, Artificial Sequence
  primer
gtaaaacgacggccagttttaatcgcgacttggatacc

SEQ ID NO: 34383 - DNA, 45 bp, Artificial Sequence
  primer
gtaaaacgacggccagtcaactaggaacaactttaatgtcttctg

SEQ ID NO: 34384 - DNA, 24 bp, Artificial Sequence
  primer
aaggataagtttctcacttcggtg

SEQ ID NO: 34385 - DNA, 18 bp, Artificial Sequence
  primer
cggcaagtcctcctcctc

SEQ ID NO: 34386 - DNA, 38 bp, Artificial Sequence
  primer
gtaaaacgacggccagtggaaggatgtttctccaaagg

SEQ ID NO: 34387 - DNA, 38 bp, Artificial Sequence
  primer
gtaaaacgacggccagttctcaaagacctctcggatgg

SEQ ID NO: 34388 - DNA, 38 bp, Artificial Sequence
  primer
gtaaaacgacggccagttcaatgacatgaaggcaaagg

SEQ ID NO: 34389 - DNA, 21 bp, Artificial Sequence
  primer
atccggagactggaggaagag

SEQ ID NO: 34390 - DNA, 21 bp, Artificial Sequence
  primer
accgtggaatcactccagaag

SEQ ID NO: 34391 - DNA, 21 bp, Artificial Sequence
  primer
aaagcctcagtcagccaagtg

SEQ ID NO: 34392 - DNA, 35 bp, Artificial Sequence
  primer
gtaaaacgacggccagtctgagtggtacgcgggag

SEQ ID NO: 34393 - DNA, 18 bp, Artificial Sequence
  primer
gacaggcgtggacaaccc

SEQ ID NO: 34394 - DNA, 38 bp, Artificial Sequence
  primer
gtaaaacgacggccagtgatgagcacaagaccgacctc

SEQ ID NO: 34395 - DNA, 35 bp, Artificial Sequence
  primer
gtaaaacgacggccagtgggttcagtttcccggag

SEQ ID NO: 34396 - DNA, 21 bp, Artificial Sequence
  primer
ggacttgggaagttcctttgg

SEQ ID NO: 34397 - DNA, 19 bp, Artificial Sequence
  primer
aggtgttcacccgcttctg

SEQ ID NO: 34398 - DNA, 37 bp, Artificial Sequence
  primer
gtaaaacgacggccagtacttcagaagcgaggcacag

SEQ ID NO: 34399 - DNA, 38 bp, Artificial Sequence
  primer
gtaaaacgacggccagtaaccggagctacaaagaaggg

SEQ ID NO: 34400 - DNA, 37 bp, Artificial Sequence
  primer
gtaaaacgacggccagtagagacggacggagaggaag

SEQ ID NO: 34401 - DNA, 38 bp, Artificial Sequence
  primer
gtaaaacgacggccagttcctcaggcttcctctgtttc

SEQ ID NO: 34402 - DNA, 39 bp, Artificial Sequence
  primer
gtaaaacgacggccagtgcagaatatctctccttcctgg

SEQ ID NO: 34403 - DNA, 38 bp, Artificial Sequence
  primer
gtaaaacgacggccagtcagaagcagtgaatggagtgg

SEQ ID NO: 34404 - DNA, 35 bp, Artificial Sequence
  primer
gtaaaacgacggccagtgctcagatcgtgccactg

SEQ ID NO: 34405 - DNA, 21 bp, Artificial Sequence
  primer
cttccacctctacctcggatg

SEQ ID NO: 34406 - DNA, 21 bp, Artificial Sequence
  primer
agatcctatctcagcgggatg

SEQ ID NO: 34407 - DNA, 38 bp, Artificial Sequence
  primer
gtaaaacgacggccagtatcgcttcgcagaacctactc

SEQ ID NO: 34408 - DNA, 38 bp, Artificial Sequence
  primer
gtaaaacgacggccagtgagcaatccgagtaccctagc

SEQ ID NO: 34409 - DNA, 21 bp, Artificial Sequence
  primer
tataggcatgacccactgtgc

SEQ ID NO: 34410 - DNA, 21 bp, Artificial Sequence
  primer
tgatctgtctgccttccaaag

SEQ ID NO: 34411 - DNA, 20 bp, Artificial Sequence
  primer
ctcaaggaaagccaccacac

SEQ ID NO: 34412 - DNA, 22 bp, Artificial Sequence
  primer
gagagactaaggttgggttggg

SEQ ID NO: 34413 - DNA, 38 bp, Artificial Sequence
  primer
gtaaaacgacggccagtatctctttactgcctggctgg

SEQ ID NO: 34414 - DNA, 39 bp, Artificial Sequence
  primer
gtaaaacgacggccagtcctctgaaggttcctcctcatc

SEQ ID NO: 34415 - DNA, 22 bp, Artificial Sequence
  primer
caccctggatagggataggttc

SEQ ID NO: 34416 - DNA, 38 bp, Artificial Sequence; identical to SEQ ID NO: 34413
  primer

SEQ ID NO: 34417 - DNA, 21 bp, Artificial Sequence
  primer
aagaacagccacccatcagac

SEQ ID NO: 34418 - DNA, 20 bp, Artificial Sequence
  primer
cctggcctacccagaaacag

SEQ ID NO: 34419 - DNA, 38 bp, Artificial Sequence
  primer
gtaaaacgacggccagtggaaggaggagtaggctccag

SEQ ID NO: 34420 - DNA, 21 bp, Artificial Sequence
  primer
gagggccacagatatgtccac

SEQ ID NO: 34421 - DNA, 21 bp, Artificial Sequence
  primer
gagaaaccaggagggaaactc

SEQ ID NO: 34422 - DNA, 38 bp, Artificial Sequence
  primer
gtaaaacgacggccagtgaaccagggtgaagaagaagg

SEQ ID NO: 34423 - DNA, 21 bp, Artificial Sequence
  primer
tcctctatcctgaccacaggg

SEQ ID NO: 34424 - DNA, 21 bp, Artificial Sequence
  primer
taggagccctcaggtgctagg

SEQ ID NO: 34425 - DNA, 38 bp, Artificial Sequence
  primer
gtaaaacgacggccagttcccacttccgttactcacag

SEQ ID NO: 34426 - DNA, 38 bp, Artificial Sequence
  primer
gtaaaacgacggccagtagagagagaaagtggctgctg

SEQ ID NO: 34427 - DNA, 37 bp, Artificial Sequence
  primer
gtaaaacgacggccagtcgcagggtctctcattcatc

SEQ ID NO: 34428 - DNA, 35 bp, Artificial Sequence
  primer
gtaaaacgacggccagtccttccctctcctggctc

SEQ ID NO: 34429 - DNA, 21 bp, Artificial Sequence
  primer
agcatggcaggtacgtatgtc

SEQ ID NO: 34430 - DNA, 20 bp, Artificial Sequence
  primer
caccagggaggttgggtatc

SEQ ID NO: 34431 - DNA, 36 bp, Artificial Sequence
  primer
gtaaaacgacggccagtatgtggcttgggtcaccac

SEQ ID NO: 34432 - DNA, 21 bp, Artificial Sequence
  primer
ctttagcttgaagcggagtgg

SEQ ID NO: 34433 - DNA, 38 bp, Artificial Sequence
  primer
gtaaaacgacggccagtaagtgccttcttgctcctgtc

SEQ ID NO: 34434 - DNA, 38 bp, Artificial Sequence
  primer
gtaaaacgacggccagtgacaggtagtaggtgccagcc

SEQ ID NO: 34435 - DNA, 38 bp, Artificial Sequence
  primer
gtaaaacgacggccagtggttcagaatccctcagggtc

SEQ ID NO: 34436 - DNA, 38 bp, Artificial Sequence
  primer
gtaaaacgacggccagtctggtgcttgcacactttctg

SEQ ID NO: 34437 - DNA, 38 bp, Artificial Sequence
  primer
gtaaaacgacggccagtgatctaccggactgagatggc

SEQ ID NO: 34438 - DNA, 38 bp, Artificial Sequence
  primer
gtaaaacgacggccagttttctgtttctcttgctgggc

SEQ ID NO: 34439 - DNA, 38 bp, Artificial Sequence
  primer
gtaaaacgacggccagtgaaagtcggaagaatcccaac

SEQ ID NO: 34440 - DNA, 21 bp, Artificial Sequence
  primer
acctgtatttccttcaaggcg

SEQ ID NO: 34441 - DNA, 40 bp, Artificial Sequence
  primer
gtaaaacgacggccagttttgggtatgtaagtttgggttg

SEQ ID NO: 34442 - DNA, 21 bp, Artificial Sequence
  primer
tgaaacattctccaagccaag

SEQ ID NO: 34443 - DNA, 18 bp, Artificial Sequence
  primer
actagagggacacccgcc

SEQ ID NO: 34444 - DNA, 39 bp, Artificial Sequence
  primer
gtaaaacgacggccagttttctttgtccctccttccttc

SEQ ID NO: 34445 - DNA, 21 bp, Artificial Sequence
  primer
cacttagagctgccttcccac

SEQ ID NO: 34446 - DNA, 38 bp, Artificial Sequence
  primer
gtaaaacgacggccagttgagtgggtgattcaatggag

SEQ ID NO: 34447 - DNA, 37 bp, Artificial Sequence
  primer
gtaaaacgacggccagtgagaatggtgtgaacccagg

SEQ ID NO: 34448 - DNA, 38 bp, Artificial Sequence
  primer
gtaaaacgacggccagtgaggtattgaatgtacccgcc

SEQ ID NO: 34449 - DNA, 38 bp, Artificial Sequence
  primer
gtaaaacgacggccagtcaaaggaagcaacagggagac

SEQ ID NO: 34450 - DNA, 36 bp, Artificial Sequence
  primer
gtaaaacgacggccagtgttaggagcagcagcaggg

SEQ ID NO: 34451 - DNA, 40 bp, Artificial Sequence
  primer
gtaaaacgacggccagtgtctacaggtttaagcttctgcg

SEQ ID NO: 34452 - DNA, 38 bp, Artificial Sequence
  primer
gtaaaacgacggccagtatctcctacctccctgttccc

SEQ ID NO: 34453 - DNA, 38 bp, Artificial Sequence
  primer
gtaaaacgacggccagtgtaggcactcactacatgcgg

SEQ ID NO: 34454 - DNA, 21 bp, Artificial Sequence
  primer
tcttcatgccctcataaatgc

SEQ ID NO: 34455 - DNA, 21 bp, Artificial Sequence
  primer
ggtctagctaagggagggtcc

SEQ ID NO: 34456 - DNA, 21 bp, Artificial Sequence
  primer
ggttcagggctctttcaggta

SEQ ID NO: 34457 - DNA, 21 bp, Artificial Sequence
  primer
agcctccgggatgtaagataa

SEQ ID NO: 34458 - DNA, 21 bp, Artificial Sequence
  primer
tcttcatgccctcataaatgc

SEQ ID NO: 34459 - DNA, 21 bp, Artificial Sequence
  primer
tgtcattcattcacagccaag

SEQ ID NO: 34460 - DNA, 21 bp, Artificial Sequence
  primer
gaggcttcagtgagctgtgat

SEQ ID NO: 34461 - DNA, 38 bp, Artificial Sequence
  primer
gtaaaacgacggccagtagcctccgggatgtaacataa

SEQ ID NO: 34462 - DNA, 38 bp, Artificial Sequence
  primer
gtaaaacgacggccagtcagttctcttgcccattgacc

SEQ ID NO: 34463 - DNA, 21 bp, Artificial Sequence
  primer
acaacaagtccttccattggc

SEQ ID NO: 34464 - DNA, 38 bp, Artificial Sequence
  primer
gtaaaacgacggccagttcagagaaggagggcatcaac

SEQ ID NO: 34465 - DNA, 38 bp, Artificial Sequence
  primer
gtaaaacgacggccagtttagaacccactgtggctgtg

SEQ ID NO: 34466 - DNA, 21 bp, Artificial Sequence
  primer
ccaaagctaagaaccactgcc

SEQ ID NO: 34467 - DNA, 21 bp, Artificial Sequence
  primer
tcaagctagggaggtaatggg

SEQ ID NO: 34468 - DNA, 22 bp, Artificial Sequence
  primer
aatttcattcatgccagaggag

SEQ ID NO: 34469 - DNA, 26 bp, Artificial Sequence
  primer
catgtatcccagaacgctttatttag

SEQ ID NO: 34470 - DNA, 39 bp, Artificial Sequence
  primer
gtaaaacgacggccagttgctgttcctgttaatcaatgc

SEQ ID NO: 34471 - DNA, 38 bp, Artificial Sequence
  primer
gtaaaacgacggccagtcaaacggaccaataggaagtg

SEQ ID NO: 34472 - DNA, 38 bp, Artificial Sequence
  primer
gtaaaacgacggccagtggccttgtaaacaggcatttg

SEQ ID NO: 34473 - DNA, 37 bp, Artificial Sequence
  primer
gtaaaacgacggccagtctgagtgggtgatagctggg

SEQ ID NO: 34474 - DNA, 21 bp, Artificial Sequence
  primer
gacttccgcagaaggtgattg

SEQ ID NO: 34475 - DNA, 44 bp, Artificial Sequence
  primer
gtaaaacgacggccagtgcagttctcaatattaaagcaacagag

SEQ ID NO: 34476 - DNA, 22 bp, Artificial Sequence
  primer
cctgtaggtgatttgaaggagg

SEQ ID NO: 34477 - DNA, 38 bp, Artificial Sequence
  primer
gtaaaacgacggccagtaaccttcagcgaacaaagagg

SEQ ID NO: 34478 - DNA, 38 bp, Artificial Sequence
  primer
gtaaaacgacggccagtgggtttggctacgctgtattg

SEQ ID NO: 34479 - DNA, 39 bp, Artificial Sequence
  primer
gtaaaacgacggccagtactttcatggacttcagcaagg

SEQ ID NO: 34480 - DNA, 38 bp, Artificial Sequence
  primer
gtaaaacgacggccagtaagaggcttgccttctattgc

SEQ ID NO: 34481 - DNA, 38 bp, Artificial Sequence
  primer
gtaaaacgacggccagtgtggatgggatggagagagac

SEQ ID NO: 34482 - DNA, 38 bp, Artificial Sequence
  primer
gtaaaacgacggccagtggtggtatatggcctgttgtg

SEQ ID NO: 34483 - DNA, 21 bp, Artificial Sequence
  primer
ttctaggcccattctttaccc

SEQ ID NO: 34484 - DNA, 21 bp, Artificial Sequence
  primer
aacctaaggctttccagaccc

SEQ ID NO: 34485 - DNA, 27 bp, Artificial Sequence
  primer
atgaagtcagtaatgtttgtcaatttc

SEQ ID NO: 34486 - DNA, 21 bp, Artificial Sequence
  primer
atatggcagcaaatcttgtgg

SEQ ID NO: 34487 - DNA, 28 bp, Artificial Sequence
  primer
aatcagttgaactttaacaatgatctct

SEQ ID NO: 34488 - DNA, 38 bp, Artificial Sequence
  primer
gtaaaacgacggccagtcggaaatctcagacccttgtc

SEQ ID NO: 34489 - DNA, 24 bp, Artificial Sequence
  primer
tcatgttgcctgttcttaactctg

SEQ ID NO: 34490 - DNA, 22 bp, Artificial Sequence
  primer
gtgtccctgtggcactaatagg

SEQ ID NO: 34491 - DNA, 38 bp, Artificial Sequence
  primer
gtaaaacgacggccagtatttctcccacctggtttcac

SEQ ID NO: 34492 - DNA, 22 bp, Artificial Sequence
  primer
gctaaactgaggcttccagtcc

SEQ ID NO: 34493 - DNA, 21 bp, Artificial Sequence
  primer
aacattgtggttcacattgcc

SEQ ID NO: 34494 - DNA, 21 bp, Artificial Sequence
  primer
ttcagggaccaggagaaactg

SEQ ID NO: 34495 - DNA, 37 bp, Artificial Sequence
  primer
gtaaaacgacggccagtgtagttggctggtcagtgcc

SEQ ID NO: 34496 - DNA, 37 bp, Artificial Sequence
  primer
gtaaaacgacggccagttgtgttgcatgctgaccttc

SEQ ID NO: 34497 - DNA, 25 bp, Artificial Sequence
  primer
gaggctattccaccagtaattcttc

SEQ ID NO: 34498 - DNA, 39 bp, Artificial Sequence
  primer
gtaaaacgacggccagtggataggtggctcagtcatcag

SEQ ID NO: 34499 - DNA, 20 bp, Artificial Sequence
  primer
cgagtgacagtgctttgtgg

SEQ ID NO: 34500 - DNA, 38 bp, Artificial Sequence
  primer
gtaaaacgacggccagttgtgtgtgtgcatgtgtcttt

SEQ ID NO: 34501 - DNA, 39 bp, Artificial Sequence
  primer
gtaaaacgacggccagttgtagtgagctatgatcgcacc

SEQ ID NO: 34502 - DNA, 38 bp, Artificial Sequence
  primer
gtaaaacgacggccagtacaagagtctgggcaaagcac

SEQ ID NO: 34503 - DNA, 21 bp, Artificial Sequence
  primer
cgaatccctagaaaggcaggt

SEQ ID NO: 34504 - DNA, 37 bp, Artificial Sequence
  primer
gtaaaacgacggccagttttcctctgttggatgtcgc

SEQ ID NO: 34505 - DNA, 21 bp, Artificial Sequence
  primer
tttgatgcctagaatgccctc

SEQ ID NO: 34506 - DNA, 20 bp, Artificial Sequence
  primer
aaaccatcctgggcagattc

SEQ ID NO: 34507 - DNA, 21 bp, Artificial Sequence
  primer
gtgtagtgctttcctcctccc

SEQ ID NO: 34508 - DNA, 21 bp, Artificial Sequence
  primer
aattgtccggtggtggtactc

SEQ ID NO: 34509 - DNA, 24 bp, Artificial Sequence
  primer
ctggccttcttaatatttctgagc

SEQ ID NO: 34510 - DNA, 21 bp, Artificial Sequence
  primer
aggttggtggagggtgtgtag

SEQ ID NO: 34511 - DNA, 20 bp, Artificial Sequence
  primer
cctgctgactgctgtgtgtg

SEQ ID NO: 34512 - DNA, 38 bp, Artificial Sequence
  primer
gtaaaacgacggccagttgtcctttggcctctgaaatc

SEQ ID NO: 34513 - DNA, 21 bp, Artificial Sequence
  primer
gcatttgtggaaacgttgatg

SEQ ID NO: 34514 - DNA, 38 bp, Artificial Sequence
  primer
gtaaaacgacggccagtcaagggaactaagggacttgc

SEQ ID NO: 34515 - DNA, 36 bp, Artificial Sequence
  primer
gtaaaacgacggccagtctggcgggctaagtgagtc

SEQ ID NO: 34516 - DNA, 40 bp, Artificial Sequence
  primer
gtaaaacgacggccagtaacctcatgactgtttacccttg

SEQ ID NO: 34517 - DNA, 23 bp, Artificial Sequence
  primer
tccctttgaattctacttcctcc

SEQ ID NO: 34518 - DNA, 38 bp, Artificial Sequence
  primer
gtaaaacgacggccagtaaatgggtgagagcaattgtg

SEQ ID NO: 34519 - DNA, 36 bp, Artificial Sequence
  primer
gtaaaacgacggccagtatgtgtgcccatcctgtcc

SEQ ID NO: 34520 - DNA, 38 bp, Artificial Sequence
  primer
gtaaaacgacggccagttgacaagccatatatgcaggg

SEQ ID NO: 34521 - DNA, 41 bp, Artificial Sequence
  primer
gtaaaacgacggccagttgcgttaattgtgaaagagagttg

SEQ ID NO: 34522 - DNA, 27 bp, Artificial Sequence
  primer
gccaatatataaatgcttattcaaagg

SEQ ID NO: 34523 - DNA, 38 bp, Artificial Sequence
  primer
gtaaaacgacggccagtacccgcctagcctagtacctt

SEQ ID NO: 34524 - DNA, 42 bp, Artificial Sequence
  primer
gtaaaacgacggccagtaatggtgctagaatgggaaataaac

SEQ ID NO: 34525 - DNA, 21 bp, Artificial Sequence
  primer
gtttacatttctccgtcgtgc

SEQ ID NO: 34526 - DNA, 42 bp, Artificial Sequence
  primer
gtaaaacgacggccagttctaggtttccctttctttcttctg

SEQ ID NO: 34527 - DNA, 38 bp, Artificial Sequence
  primer
gtaaaacgacggccagtcctcttagtgctccctctccc

SEQ ID NO: 34528 - DNA, 21 bp, Artificial Sequence
  primer
cctgggcaagaagagtgaaac

SEQ ID NO: 34529 - DNA, 37 bp, Artificial Sequence
  primer
gtaaaacgacggccagttcctcgcctacctgtttgtg

SEQ ID NO: 34530 - DNA, 21 bp, Artificial Sequence
  primer
ccagtgggcttatcttcatcc

SEQ ID NO: 34531 - DNA, 21 bp, Artificial Sequence
  primer
ttgaggtgggatgatcacttg

SEQ ID NO: 34532 - DNA, 40 bp, Artificial Sequence
  primer
gtaaaacgacggccagtcatcagattagctcatggtggtc

SEQ ID NO: 34533 - DNA, 42 bp, Artificial Sequence
  primer
gtaaaacgacggccagtggtgaagtctttatctcacatctgg

SEQ ID NO: 34534 - DNA, 38 bp, Artificial Sequence
  primer
gtaaaacgacggccagtttcattgtagtgttgggtggg

SEQ ID NO: 34535 - DNA, 27 bp, Artificial Sequence
  primer
tgattatcttaattgtaactgctggac

SEQ ID NO: 34536 - DNA, 38 bp, Artificial Sequence
  primer
gtaaaacgacggccagttgagcgtagaacctgccatac

SEQ ID NO: 34537 - DNA, 22 bp, Artificial Sequence
  primer
cctggtaatgcttcagcaagag

SEQ ID NO: 34538 - DNA, 21 bp, Artificial Sequence
  primer
gccatgcttccttctaccttg

SEQ ID NO: 34539 - DNA, 21 bp, Artificial Sequence
  primer
gattaggagcatgctttgcac

SEQ ID NO: 34540 - DNA, 20 bp, Artificial Sequence
  primer
accatgcccaacctaacctt

SEQ ID NO: 34541 - DNA, 40 bp, Artificial Sequence
  primer
gtaaaacgacggccagttcgctttgaattgaacatagagg

SEQ ID NO: 34542 - DNA, 24 bp, Artificial Sequence
  primer
ccaggtagtttataccacatgcag

SEQ ID NO: 34543 - DNA, 19 bp, Artificial Sequence
  primer
gattgcttgaggccaggag

SEQ ID NO: 34544 - DNA, 38 bp, Artificial Sequence
  primer
gtaaaacgacggccagttggtcaagcttcgtgctattg

SEQ ID NO: 34545 - DNA, 22 bp, Artificial Sequence
  primer
ttcaacctaatgtttgtgtggc

SEQ ID NO: 34546 - DNA, 21 bp, Artificial Sequence
  primer
ccttggtggaaggacaaagag

SEQ ID NO: 34547 - DNA, 21 bp, Artificial Sequence
  primer
tttaagctttgacgtctggaa

SEQ ID NO: 34548 - DNA, 43 bp, Artificial Sequence
  primer
gtaaaacgacggccagtcagcaaacatgatggttatatctgtg

SEQ ID NO: 34549 - DNA, 40 bp, Artificial Sequence
  primer
gtaaaacgacggccagttgcagttatctacaactcctccc

SEQ ID NO: 34550 - DNA, 25 bp, Artificial Sequence
  primer
tccatcatctagcttcagctgttac

SEQ ID NO: 34551 - DNA, 21 bp, Artificial Sequence
  primer
tttcagctgcatcttctgacc

SEQ ID NO: 34552 - DNA, 26 bp, Artificial Sequence
  primer
tcctaattatcaacaataacttgggc

SEQ ID NO: 34553 - DNA, 38 bp, Artificial Sequence
  primer
gtaaaacgacggccagtcaggaataaagccagaggcag

SEQ ID NO: 34554 - DNA, 21 bp, Artificial Sequence
  primer
cagggaggcctgagtctactg

SEQ ID NO: 34555 - DNA, 21 bp, Artificial Sequence
  primer
gggcaaagagacttgtgtgtg

SEQ ID NO: 34556 - DNA, 22 bp, Artificial Sequence
  primer
agcctcactggagaaatgagag

SEQ ID NO: 34557 - DNA, 22 bp, Artificial Sequence
  primer
cacttccgataagttggaaacg

SEQ ID NO: 34558 - DNA, 41 bp, Artificial Sequence
  primer
gtaaaacgacggccagttccagatgtgaatttgaatgactg

SEQ ID NO: 34559 - DNA, 43 bp, Artificial Sequence
  primer
gtaaaacgacggccagttgaaacttactccagtacgaatatgg

SEQ ID NO: 34560 - DNA, 38 bp, Artificial Sequence
  primer
gtaaaacgacggccagtccaaacattgctttcttccag

SEQ ID NO: 34561 - DNA, 39 bp, Artificial Sequence
  primer
gtaaaacgacggccagtggcaatctgtcagaaactgagc

SEQ ID NO: 34562 - DNA, 38 bp, Artificial Sequence
  primer
gtaaaacgacggccagttgcattagcagagcagacagg

SEQ ID NO: 34563 - DNA, 38 bp, Artificial Sequence
  primer
gtaaaacgacggccagtcacttccaaattccctatggc

SEQ ID NO: 34564 - DNA, 40 bp, Artificial Sequence
  primer
gtaaaacgacggccagtcagatatttggtcattcccagac

SEQ ID NO: 34565 - DNA, 24 bp, Artificial Sequence
  primer
aatgtaggcacctatttgatgttg

SEQ ID NO: 34566 - DNA, 39 bp, Artificial Sequence
  primer
gtaaaacgacggccagtaaatcaaggattcaggcatcac

SEQ ID NO: 34567 - DNA, 38 bp, Artificial Sequence
  primer
gtaaaacgacggccagtttcccgtacgtgacattgaag

SEQ ID NO: 34568 - DNA, 40 bp, Artificial Sequence
  primer
gtaaaacgacggccagtgctaatgctgaatttcttgttgc

SEQ ID NO: 34569 - DNA, 21 bp, Artificial Sequence
  primer
tgtgtgtggaaggaaagaagc

SEQ ID NO: 34570 - DNA, 21 bp, Artificial Sequence
  primer
ggctagaaatgctgaccaagg

SEQ ID NO: 34571 - DNA, 38 bp, Artificial Sequence
  primer
gtaaaacgacggccagtctgctctcatcccaaaggaag

SEQ ID NO: 34572 - DNA, 38 bp, Artificial Sequence
  primer
gtaaaacgacggccagtaggaagaaaccatctgcatcc

SEQ ID NO: 34573 - DNA, 39 bp, Artificial Sequence
  primer
gtaaaacgacggccagttcccaaagtctagggctttctc

SEQ ID NO: 34574 - DNA, 22 bp, Artificial Sequence
  primer
attgatatgtagctgtgggtgc

SEQ ID NO: 34575 - DNA, 41 bp, Artificial Sequence
  primer
gtaaaacgacggccagttgtgtggtcaagaaatgttacgtc

SEQ ID NO: 34576 - DNA, 18 bp, Artificial Sequence
  primer
gtgtgagccacagcaccc

SEQ ID NO: 34577 - DNA, 45 bp, Artificial Sequence
  primer
gtaaaacgacggccagttttacctatagttccttgagaatgagaa

SEQ ID NO: 34578 - DNA, 23 bp, Artificial Sequence
  primer
tttgagcctgcaattaatcaaac

SEQ ID NO: 34579 - DNA, 38 bp, Artificial Sequence
  primer
gtaaaacgacggccagtgctacagtgggaatttggatg

SEQ ID NO: 34580 - DNA, 21 bp, Artificial Sequence
  primer
tgtcaggcaaagcaagtcaag

SEQ ID NO: 34581 - DNA, 25 bp, Artificial Sequence
  primer
tgacacttgcattaactacaacaaa

SEQ ID NO: 34582 - DNA, 21 bp, Artificial Sequence
  primer
attcatcccttaaccaatgct

SEQ ID NO: 34583 - DNA, 22 bp, Artificial Sequence
  primer
gggagaaattatggacccattg

SEQ ID NO: 34584 - DNA, 27 bp, Artificial Sequence
  primer
aaaggtttaagaaagtctcactgtgtc

SEQ ID NO: 34585 - DNA, 25 bp, Artificial Sequence
  primer
tttggtcttgattcaaattcctaag

SEQ ID NO: 34586 - DNA, 38 bp, Artificial Sequence
  primer
gtaaaacgacggccagtggaaaggaggcttagatttgc

SEQ ID NO: 34587 - DNA, 38 bp, Artificial Sequence
  primer
gtaaaacgacggccagtactgcttctttcctcctgtgc

SEQ ID NO: 34588 - DNA, 21 bp, Artificial Sequence
  primer
ttggcaccaactcatttcaac

SEQ ID NO: 34589 - DNA, 22 bp, Artificial Sequence
  primer
ctatggcagttgtcactgaagg

SEQ ID NO: 34590 - DNA, 21 bp, Artificial Sequence
  primer
agctttaccttgcttccgttc

SEQ ID NO: 34591 - DNA, 24 bp, Artificial Sequence
  primer
ccataatcagccaatactggtaag

SEQ ID NO: 34592 - DNA, 39 bp, Artificial Sequence
  primer
gtaaaacgacggccagtggttgacaggtggcagagttag

SEQ ID NO: 34593 - DNA, 24 bp, Artificial Sequence
  primer
cagcttctacgtacctgtttgaag

SEQ ID NO: 34594 - DNA, 21 bp, Artificial Sequence
  primer
gcccatagcatatcctccctt

SEQ ID NO: 34595 - DNA, 39 bp, Artificial Sequence
  primer
gtaaaacgacggccagtagccaggataggaagtacatgg

SEQ ID NO: 34596 - DNA, 41 bp, Artificial Sequence
  primer
gtaaaacgacggccagttcattcaacaaacaacatatctgc

SEQ ID NO: 34597 - DNA, 44 bp, Artificial Sequence
  primer
gtaaaacgacggccagtaatgttaccaataaattctgtccattc

SEQ ID NO: 34598 - DNA, 18 bp, Artificial Sequence
  primer
tttccaaagcctggtccc

SEQ ID NO: 34599 - DNA, 43 bp, Artificial Sequence
  primer
gtaaaacgacggccagtaaatgagcatttcagaattaacctgt

SEQ ID NO: 34600 - DNA, 39 bp, Artificial Sequence
  primer
gtaaaacgacggccagtcacaagtctaaggtggtctgcc

SEQ ID NO: 34601 - DNA, 21 bp, Artificial Sequence
  primer
tcagcccttacccatttatcc

SEQ ID NO: 34602 - DNA, 38 bp, Artificial Sequence
  primer
gtaaaacgacggccagttgtagaggccaattgcttgtc

SEQ ID NO: 34603 - DNA, 21 bp, Artificial Sequence
  primer
agttgggcgcttatgattgtc

SEQ ID NO: 34604 - DNA, 21 bp, Artificial Sequence
  primer
gaaggtagcaatttgcagagc

SEQ ID NO: 34605 - DNA, 38 bp, Artificial Sequence
  primer
gtaaaacgacggccagttgggattattaaagcttcgcc

SEQ ID NO: 34606 - DNA, 21 bp, Artificial Sequence
  primer
tctctttctctcccgtcttgc

SEQ ID NO: 34607 - DNA, 38 bp, Artificial Sequence
  primer
gtaaaacgacggccagtgtatctccttggtggtggagc

SEQ ID NO: 34608 - DNA, 21 bp, Artificial Sequence
  primer
ttcacagctgaactacctggg

SEQ ID NO: 34609 - DNA, 38 bp, Artificial Sequence
  primer
gtaaaacgacggccagtggcttaaggagctacactggg

SEQ ID NO: 34610 - DNA, 21 bp, Artificial Sequence
  primer
agggatgaccacaaagtcacc

SEQ ID NO: 34611 - DNA, 22 bp, Artificial Sequence
  primer
cctcccatcttgggtatagcac

SEQ ID NO: 34612 - DNA, 21 bp, Artificial Sequence
  primer
tcaaatgagagcagcaccatc

SEQ ID NO: 34613 - DNA, 37 bp, Artificial Sequence
  primer
gtaaaacgacggccagtcttcagccctctccaattcc

SEQ ID NO: 34614 - DNA, 38 bp, Artificial Sequence
  primer
gtaaaacgacggccagtaggacctctgtgtaactcccg

SEQ ID NO: 34615 - DNA, 22 bp, Artificial Sequence
  primer
gcctctcattctgccttattcc

SEQ ID NO: 34616 - DNA, 38 bp, Artificial Sequence
  primer
gtaaaacgacggccagttttccactactgcttccaccc

SEQ ID NO: 34617 - DNA, 38 bp, Artificial Sequence
  primer
gtaaaacgacggccagtactgggattggaggaaggaag

SEQ ID NO: 34618 - DNA, 38 bp, Artificial Sequence
  primer
gtaaaacgacggccagtaaggcagaagcctggtatttg

SEQ ID NO: 34619 - DNA, 38 bp, Artificial Sequence
  primer
gtaaaacgacggccagtagcttgccatcgttcagtatg

SEQ ID NO: 34620 - DNA, 21 bp, Artificial Sequence
  primer
acccttgaataatgaggctgg

SEQ ID NO: 34621 - DNA, 22 bp, Artificial Sequence
  primer
tcagaaggatcagctatcccag

SEQ ID NO: 34622 - DNA, 38 bp, Artificial Sequence
  primer
gtaaaacgacggccagtcccaaggagagattggttctg

SEQ ID NO: 34623 - DNA, 38 bp, Artificial Sequence
  primer
gtaaaacgacggccagtcattccgtgttattcccatcc

SEQ ID NO: 34624 - DNA, 37 bp, Artificial Sequence
  primer
gtaaaacgacggccagtagagtgggaggttctgaggc

SEQ ID NO: 34625 - DNA, 35 bp, Artificial Sequence
  primer
gtaaaacgacggccagtttctcaggagtgcggagc

SEQ ID NO: 34626 - DNA, 38 bp, Artificial Sequence
  primer
gtaaaacgacggccagtttgcagatgatggtatcctcg

SEQ ID NO: 34627 - DNA, 21 bp, Artificial Sequence
  primer
tgggagcagagggtgatttag

SEQ ID NO: 34628 - DNA, 38 bp, Artificial Sequence
  primer
gtaaaacgacggccagtggctattgtttcattgggagc

SEQ ID NO: 34629 - DNA, 37 bp, Artificial Sequence
  primer
gtaaaacgacggccagtctgggaagaaggaggaggtc

SEQ ID NO: 34630 - DNA, 37 bp, Artificial Sequence
  primer
gtaaaacgacggccagtacaaccctgcacaaggtgag

SEQ ID NO: 34631 - DNA, 38 bp, Artificial Sequence
  primer
gtaaaacgacggccagttttctgtgtctctcactgccc

SEQ ID NO: 34632 - DNA, 35 bp, Artificial Sequence
  primer
gtaaaacgacggccagtcactctgctctcggcctc

SEQ ID NO: 34633 - DNA, 38 bp, Artificial Sequence
  primer
gtaaaacgacggccagtgctctaagaactctccctgcg

SEQ ID NO: 34634 - DNA, 38 bp, Artificial Sequence
  primer
gtaaaacgacggccagtaagcagaggccattagagctg

SEQ ID NO: 34635 - DNA, 21 bp, Artificial Sequence
  primer
cagtgaataccctcagggacc

SEQ ID NO: 34636 - DNA, 39 bp, Artificial Sequence
  primer
gtaaaacgacggccagtcctcaggctgtcggtatgttag

SEQ ID NO: 34637 - DNA, 21 bp, Artificial Sequence
  primer
gcttggcaaagaggtaactgc

SEQ ID NO: 34638 - DNA, 38 bp, Artificial Sequence
  primer
gtaaaacgacggccagtctcagcaagttcctctccctc

SEQ ID NO: 34639 - DNA, 38 bp, Artificial Sequence
  primer
gtaaaacgacggccagtgcacctattggaggtaggcag

SEQ ID NO: 34640 - DNA, 38 bp, Artificial Sequence
  primer
gtaaaacgacggccagtaggtcacctccaccttctttg

SEQ ID NO: 34641 - DNA, 20 bp, Artificial Sequence
  primer
ctccctctgctgttcttccc

SEQ ID NO: 34642 - DNA, 38 bp, Artificial Sequence
  primer
gtaaaacgacggccagtgacctcagccctgagatatgc

SEQ ID NO: 34643 - DNA, 38 bp, Artificial Sequence
  primer
gtaaaacgacggccagttaaccacaggcagaacaggag

SEQ ID NO: 34644 - DNA, 38 bp, Artificial Sequence
  primer
gtaaaacgacggccagtggtagctaggagggttacggg

SEQ ID NO: 34645 - DNA, 37 bp, Artificial Sequence
  primer
gtaaaacgacggccagtcctcaccctctgaccctctc

SEQ ID NO: 34646 - DNA, 21 bp, Artificial Sequence
  primer
cttccctcagatgcacaggtc

SEQ ID NO: 34647 - DNA, 20 bp, Artificial Sequence
  primer
cttggtccttagctcccgtc

SEQ ID NO: 34648 - DNA, 37 bp, Artificial Sequence
  primer
gtaaaacgacggccagtgagtgtgagagaaggacggg

SEQ ID NO: 34649 - DNA, 38 bp, Artificial Sequence
  primer
gtaaaacgacggccagtgccacaaacgcttcctaaatg

SEQ ID NO: 34650 - DNA, 38 bp, Artificial Sequence
  primer
gtaaaacgacggccagtgtacatcccagctggaagagg

SEQ ID NO: 34651 - DNA, 38 bp, Artificial Sequence
  primer
gtaaaacgacggccagtcagtgcctgcctctattctcc

SEQ ID NO: 34652 - DNA, 20 bp, Artificial Sequence
  primer
ctgaagcgtgtccgaatctc

SEQ ID NO: 34653 - DNA, 38 bp, Artificial Sequence
  primer
gtaaaacgacggccagtatcatcatgttggctgctgtc

SEQ ID NO: 34654 - DNA, 37 bp, Artificial Sequence
  primer
gtaaaacgacggccagttctccttccctcccaatctg

SEQ ID NO: 34655 - DNA, 38 bp, Artificial Sequence
  primer
gtaaaacgacggccagtggaggcttatgtccagctcac

SEQ ID NO: 34656 - DNA, 28 bp, Artificial Sequence
  primer
tttagcacatagatcataactttccttt

SEQ ID NO: 34657 - DNA, 39 bp, Artificial Sequence
  primer
gtaaaacgacggccagtggagagggagagggattatttc

SEQ ID NO: 34658 - DNA, 44 bp, Artificial Sequence
  primer
gtaaaacgacggccagttgggtaaagacatgtagtctggtttac

SEQ ID NO: 34659 - DNA, 23 bp, Artificial Sequence
  primer
gagtctcctgctttctacttgcc

SEQ ID NO: 34660 - DNA, 35 bp, Artificial Sequence
  primer
gtaaaacgacggccagtatgcctggccgtttactg

SEQ ID NO: 34661 - DNA, 38 bp, Artificial Sequence
  primer
gtaaaacgacggccagtccctctctcctttcttgggta

SEQ ID NO: 34662 - DNA, 38 bp, Artificial Sequence
  primer
gtaaaacgacggccagtctttgcttagggagcaaggaa

SEQ ID NO: 34663 - DNA, 20 bp, Artificial Sequence
  primer
tttgctgctttagtggctgc

SEQ ID NO: 34664 - DNA, 21 bp, Artificial Sequence
  primer
ttggaaagtatcccgttctgg

SEQ ID NO: 34665 - DNA, 38 bp, Artificial Sequence
  primer
gtaaaacgacggccagttggcctagagaatgtggtttg

SEQ ID NO: 34666 - DNA, 39 bp, Artificial Sequence
  primer
gtaaaacgacggccagtccctgactgagttctatttgcc

SEQ ID NO: 34667 - DNA, 38 bp, Artificial Sequence
  primer
gtaaaacgacggccagttcctgaccagtgggtgcttac

SEQ ID NO: 34668 - DNA, 25 bp, Artificial Sequence
  primer
cagttgactcctttcttggttaagg

SEQ ID NO: 34669 - DNA, 39 bp, Artificial Sequence
  primer
gtaaaacgacggccagttgcttgctttgctctattcctg

SEQ ID NO: 34670 - DNA, 26 bp, Artificial Sequence
  primer
actttgctttgtagtcatcttcattc

SEQ ID NO: 34671 - DNA, 39 bp, Artificial Sequence; identical to SEQ ID NO: 34669
  primer

SEQ ID NO: 34672 - DNA, 40 bp, Artificial Sequence
  primer
gtaaaacgacggccagtgggcacatggactattcttcttg

SEQ ID NO: 34673 - DNA, 21 bp, Artificial Sequence
  primer
taattaccctgtttcccgagg

SEQ ID NO: 34674 - DNA, 36 bp, Artificial Sequence
  primer
gtaaaacgacggccagtccatcattgctgatgtgcc

SEQ ID NO: 34675 - DNA, 38 bp, Artificial Sequence
  primer
gtaaaacgacggccagtagctgataaacctacgctggc

SEQ ID NO: 34676 - DNA, 23 bp, Artificial Sequence
  primer
ggtttctgttccatgctattgag

SEQ ID NO: 34677 - DNA, 39 bp, Artificial Sequence
  primer
gtaaaacgacggccagtgcgaaactttcttctcaaagcc

SEQ ID NO: 34678 - DNA, 21 bp, Artificial Sequence
  primer
atatagcccaaacccaccttg

SEQ ID NO: 34679 - DNA, 38 bp, Artificial Sequence
  primer
gtaaaacgacggccagtgagatccatcaatccctttgg

SEQ ID NO: 34680 - DNA, 38 bp, Artificial Sequence
  primer
gtaaaacgacggccagtactgaagctaaatgcaagccc

SEQ ID NO: 34681 - DNA, 21 bp, Artificial Sequence
  primer
cagtgagatgcaacttcaggc

SEQ ID NO: 34682 - DNA, 21 bp, Artificial Sequence
  primer
tgttgcaggtggagttaccag

SEQ ID NO: 34683 - DNA, 21 bp, Artificial Sequence
  primer
gtgtggttcatcctccaaacc

SEQ ID NO: 34684 - DNA, 38 bp, Artificial Sequence
  primer
gtaaaacgacggccagtctctgcctaaccacaagggag

SEQ ID NO: 34685 - DNA, 37 bp, Artificial Sequence
  primer
gtaaaacgacggccagtctgatagtttaagggcccgc

SEQ ID NO: 34686 - DNA, 21 bp, Artificial Sequence
  primer
gggtttcggtaaacctcaaag

SEQ ID NO: 34687 - DNA, 38 bp, Artificial Sequence
  primer
gtaaaacgacggccagtagaggttacaggtggaatggg

SEQ ID NO: 34688 - DNA, 21 bp, Artificial Sequence
  primer
ttgggtgtagcaaagcatctc

SEQ ID NO: 34689 - DNA, 39 bp, Artificial Sequence
  primer
gtaaaacgacggccagtcagggatcactgtaggtcaagc

SEQ ID NO: 34690 - DNA, 39 bp, Artificial Sequence
  primer
gtaaaacgacggccagtggaaaggtcctcttacctggtc

SEQ ID NO: 34691 - DNA, 37 bp, Artificial Sequence
  primer
gtaaaacgacggccagtctgcagcacaacatttcacc

SEQ ID NO: 34692 - DNA, 21 bp, Artificial Sequence
  primer
gttcattctttgctgccttgg

SEQ ID NO: 34693 - DNA, 38 bp, Artificial Sequence
  primer
gtaaaacgacggccagtgtttgctttgcagagggtcag

SEQ ID NO: 34694 - DNA, 38 bp, Artificial Sequence
  primer
gtaaaacgacggccagtgggtctgcacagttgtaggtg

SEQ ID NO: 34695 - DNA, 21 bp, Artificial Sequence
  primer
atgtttgaactgactggtggc

SEQ ID NO: 34696 - DNA, 38 bp, Artificial Sequence
  primer
gtaaaacgacggccagtgactggttaggagccagaagg

SEQ ID NO: 34697 - DNA, 22 bp, Artificial Sequence
  primer
gaggacaagtatcacctttggg

SEQ ID NO: 34698 - DNA, 38 bp, Artificial Sequence
  primer
gtaaaacgacggccagtcagccactcctggtctcagtc

SEQ ID NO: 34699 - DNA, 21 bp, Artificial Sequence
  primer
ttgagggctggttcctatttg

SEQ ID NO: 34700 - DNA, 38 bp, Artificial Sequence
  primer
gtaaaacgacggccagtgcccatccacacgttgagtag

SEQ ID NO: 34701 - DNA, 38 bp, Artificial Sequence
  primer
gtaaaacgacggccagttctttactgtgcctgctctcc

SEQ ID NO: 34702 - DNA, 21 bp, Artificial Sequence
  primer
atgccttcaagaggagcacac

SEQ ID NO: 34703 - DNA, 20 bp, Artificial Sequence
  primer
aaagtgcactcagcagccag

SEQ ID NO: 34704 - DNA, 38 bp, Artificial Sequence
  primer
gtaaaacgacggccagtccagattgttgagggtaagcc

SEQ ID NO: 34705 - DNA, 38 bp, Artificial Sequence
  primer
gtaaaacgacggccagttatttggtgggaatttggctc

SEQ ID NO: 34706 - DNA, 21 bp, Artificial Sequence
  primer
tccttcctgcagcacacttac

SEQ ID NO: 34707 - DNA, 21 bp, Artificial Sequence
  primer
tccctgcctattcattcacag

SEQ ID NO: 34708 - DNA, 21 bp, Artificial Sequence
  primer
gtagattccggaggtctctgc

SEQ ID NO: 34709 - DNA, 38 bp, Artificial Sequence
  primer
gtaaaacgacggccagtcttccagggacacatctcacc

SEQ ID NO: 34710 - DNA, 21 bp, Artificial Sequence
  primer
aatgctgtttggagaaatcgg

SEQ ID NO: 34711 - DNA, 21 bp, Artificial Sequence
  primer
tgtgaagaatacacttgcccg

SEQ ID NO: 34712 - DNA, 38 bp, Artificial Sequence
  primer
gtaaaacgacggccagtcaggacttctttgtaacgccc

SEQ ID NO: 34713 - DNA, 37 bp, Artificial Sequence
  primer
gtaaaacgacggccagtgtgcgttgatgtgtctgtgc

SEQ ID NO: 34714 - DNA, 38 bp, Artificial Sequence
  primer
gtaaaacgacggccagtcatggtcacactgatggtgag

SEQ ID NO: 34715 - DNA, 21 bp, Artificial Sequence
  primer
agtacaaaggaatgcatcggg

SEQ ID NO: 34716 - DNA, 38 bp, Artificial Sequence
  primer
gtaaaacgacggccagttcacccaaatccttaagctcc

SEQ ID NO: 34717 - DNA, 38 bp, Artificial Sequence
  primer
gtaaaacgacggccagtgtttcctgggaaagttggatg

SEQ ID NO: 34718 - DNA, 37 bp, Artificial Sequence
  primer
gtaaaacgacggccagtgcatattcaggcatcaaggg

SEQ ID NO: 34719 - DNA, 36 bp, Artificial Sequence
  primer
gtaaaacgacggccagtatcgtggtgagaagggctg

SEQ ID NO: 34720 - DNA, 38 bp, Artificial Sequence
  primer
gtaaaacgacggccagtcagtgtgtgagccctcgttag

SEQ ID NO: 34721 - DNA, 36 bp, Artificial Sequence
  primer
gtaaaacgacggccagtgttgcaggtcacatggtcg

SEQ ID NO: 34722 - DNA, 37 bp, Artificial Sequence
  primer
gtaaaacgacggccagtcggatcagttctgcttccag

SEQ ID NO: 34723 - DNA, 21 bp, Artificial Sequence
  primer
gataatggcctcgtgtgtgag

SEQ ID NO: 34724 - DNA, 38 bp, Artificial Sequence
  primer
gtaaaacgacggccagtgtccctcaagtatgaggtggg

SEQ ID NO: 34725 - DNA, 38 bp, Artificial Sequence
  primer
gtaaaacgacggccagtcacactgggcccttcataatc

SEQ ID NO: 34726 - DNA, 38 bp, Artificial Sequence
  primer
gtaaaacgacggccagtgtccagtgaacatcatggctc

SEQ ID NO: 34727 - DNA, 38 bp, Artificial Sequence
  primer
gtaaaacgacggccagtgtgtctgctgctctcctcagc

SEQ ID NO: 34728 - DNA, 21 bp, Artificial Sequence
  primer
gctgctgtttagctccactgt

SEQ ID NO: 34729 - DNA, 38 bp, Artificial Sequence
  primer
gtaaaacgacggccagtacggtgctcttcaggaatcag

SEQ ID NO: 34730 - DNA, 38 bp, Artificial Sequence
  primer
gtaaaacgacggccagtgcttctttctgacgtggtctg

SEQ ID NO: 34731 - DNA, 37 bp, Artificial Sequence
  primer
gtaaaacgacggccagtccactggcaagtccagagag

SEQ ID NO: 34732 - DNA, 22 bp, Artificial Sequence
  primer
gatggtggtccttgagtttcag

SEQ ID NO: 34733 - DNA, 38 bp, Artificial Sequence
  primer
gtaaaacgacggccagttggaggaagcatcttaccagg

SEQ ID NO: 34734 - DNA, 36 bp, Artificial Sequence
  primer
gtaaaacgacggccagtgtcctccatcagggactcg

SEQ ID NO: 34735 - DNA, 21 bp, Artificial Sequence
  primer
gtgtgtgtcctcctttccctc

SEQ ID NO: 34736 - DNA, 21 bp, Artificial Sequence
  primer
ctgagaacagggagccttctg

SEQ ID NO: 34737 - DNA, 38 bp, Artificial Sequence
  primer
gtaaaacgacggccagttcctccgtctgtgtatcttgg

SEQ ID NO: 34738 - DNA, 37 bp, Artificial Sequence
  primer
gtaaaacgacggccagtgtgctgcagagaaggcagtg

SEQ ID NO: 34739 - DNA, 37 bp, Artificial Sequence
  primer
gtaaaacgacggccagtggtaggctcagggtttctgg

SEQ ID NO: 34740 - DNA, 21 bp, Artificial Sequence
  primer
tcactcactgccaggtacagc

SEQ ID NO: 34741 - DNA, 36 bp, Artificial Sequence
  primer
gtaaaacgacggccagtcatgcccagatgggaaatc

SEQ ID NO: 34742 - DNA, 37 bp, Artificial Sequence
  primer
gtaaaacgacggccagtctcctaaagcacaaggtgcg

SEQ ID NO: 34743 - DNA, 21 bp, Artificial Sequence
  primer
ggagaggactcggtgactctg

SEQ ID NO: 34744 - DNA, 20 bp, Artificial Sequence
  primer
ctgcccgtgcttactctcag

SEQ ID NO: 34745 - DNA, 38 bp, Artificial Sequence
  primer
gtaaaacgacggccagttccttcctcttcatttgggtg

SEQ ID NO: 34746 - DNA, 38 bp, Artificial Sequence
  primer
gtaaaacgacggccagtgcattcctctctgactcaggc

SEQ ID NO: 34747 - DNA, 38 bp, Artificial Sequence
  primer
gtaaaacgacggccagtcctcttcgtgactccatttcc

SEQ ID NO: 34748 - DNA, 20 bp, Artificial Sequence
  primer
gattacaggcgtgagccact

SEQ ID NO: 34749 - DNA, 38 bp, Artificial Sequence
  primer
gtaaaacgacggccagttcagggagctcagtcttaggg

SEQ ID NO: 34750 - DNA, 38 bp, Artificial Sequence
  primer
gtaaaacgacggccagtggagcctgaggttagggactc

SEQ ID NO: 34751 - DNA, 37 bp, Artificial Sequence
  primer
gtaaaacgacggccagtgacagcaggacagatggctc

SEQ ID NO: 34752 - DNA, 38 bp, Artificial Sequence
  primer
gtaaaacgacggccagtgggctgttagtctgggacttg

SEQ ID NO: 34753 - DNA, 21 bp, Artificial Sequence
  primer
tctacaagaccagtttccggg

SEQ ID NO: 34754 - DNA, 21 bp, Artificial Sequence
  primer
accagtccttgcctcggtatc

SEQ ID NO: 34755 - DNA, 19 bp, Artificial Sequence
  primer
ctctgggaggtcagagccc

SEQ ID NO: 34756 - DNA, 38 bp, Artificial Sequence
  primer
gtaaaacgacggccagtgtggttactgggaaggcagag

SEQ ID NO: 34757 - DNA, 37 bp, Artificial Sequence
  primer
gtaaaacgacggccagtcttcctgcagttctggatgc

SEQ ID NO: 34758 - DNA, 21 bp, Artificial Sequence
  primer
agcagccaggctagttattcc

SEQ ID NO: 34759 - DNA, 38 bp, Artificial Sequence
  primer
gtaaaacgacggccagtacaagacccaagtgaagctgg

SEQ ID NO: 34760 - DNA, 21 bp, Artificial Sequence
  primer
atggaaatcatggctaccctc

SEQ ID NO: 34761 - DNA, 37 bp, Artificial Sequence
  primer
gtaaaacgacggccagttgagggagaggtggtctgag

SEQ ID NO: 34762 - DNA, 38 bp, Artificial Sequence
  primer
gtaaaacgacggccagtctgttgcctcccacacatatc

SEQ ID NO: 34763 - DNA, 22 bp, Artificial Sequence
  primer
ctattcagcctggaaatgaacc

SEQ ID NO: 34764 - DNA, 37 bp, Artificial Sequence
  primer
gtaaaacgacggccagtagcactggaagggcctagag

SEQ ID NO: 34765 - DNA, 38 bp, Artificial Sequence
  primer
gtaaaacgacggccagttataccaccaagctccatccc

SEQ ID NO: 34766 - DNA, 38 bp, Artificial Sequence; identical to SEQ ID NO: 34747
  primer

SEQ ID NO: 34767 - DNA, 21 bp, Artificial Sequence
  primer
atctggcgagatcgtaatgtg

SEQ ID NO: 34768 - DNA, 20 bp, Artificial Sequence
  primer
tgccttccaggaactcagtc

SEQ ID NO: 34769 - DNA, 38 bp, Artificial Sequence; identical to SEQ ID NO: 34750
  primer

SEQ ID NO: 34770 - DNA, 37 bp, Artificial Sequence
  primer
gtaaaacgacggccagtacagatgggtcagggaggag

SEQ ID NO: 34771 - DNA, 38 bp, Artificial Sequence; identical to SEQ ID NO: 34752
  primer

SEQ ID NO: 34772 - DNA, 21 bp, Artificial Sequence
  primer
tctacaagaccagtttccggg

SEQ ID NO: 34773 - DNA, 37 bp, Artificial Sequence
  primer
gtaaaacgacggccagtctaggccctgcttccctctc

SEQ ID NO: 34774 - DNA, 36 bp, Artificial Sequence
  primer
gtaaaacgacggccagttggcagaggaggattccag

SEQ ID NO: 34775 - DNA, 38 bp, Artificial Sequence
  primer
gtaaaacgacggccagtcatgtcctgtcctcccttgtc

SEQ ID NO: 34776 - DNA, 21 bp, Artificial Sequence
  primer
tgaggttctgagagtttcggg

SEQ ID NO: 34777 - DNA, 38 bp, Artificial Sequence
  primer
gtaaaacgacggccagtggctgtggcctcttacaaatc

SEQ ID NO: 34778 - DNA, 38 bp, Artificial Sequence
  primer
gtaaaacgacggccagtctaaagtggagctggtctggg

SEQ ID NO: 34779 - DNA, 21 bp, Artificial Sequence
  primer
actcagccatcctcagctacc

SEQ ID NO: 34780 - DNA, 20 bp, Artificial Sequence
  primer
caggtgggtactcctgaggg

SEQ ID NO: 34781 - DNA, 37 bp, Artificial Sequence
  primer
gtaaaacgacggccagtgtggtggagtgggctagagg

SEQ ID NO: 34782 - DNA, 22 bp, Artificial Sequence
  primer
actgatgagtccctcttcttgg

SEQ ID NO: 34783 - DNA, 36 bp, Artificial Sequence
  primer
gtaaaacgacggccagtcgacccagagcttctccag

SEQ ID NO: 34784 - DNA, 22 bp, Artificial Sequence
  primer
cggaaacatcagtatgactggg

SEQ ID NO: 34785 - DNA, 24 bp, Artificial Sequence
  primer
acatacacctgcctaattgtttcc

SEQ ID NO: 34786 - DNA, 20 bp, Artificial Sequence
  primer
ttcccaagggatattcaggg

SEQ ID NO: 34787 - DNA, 35 bp, Artificial Sequence
  primer
gtaaaacgacggccagtacagggcatgggtgtgag

SEQ ID NO: 34788 - DNA, 38 bp, Artificial Sequence
  primer
gtaaaacgacggccagtgcatgaaacgctgtcacctac

SEQ ID NO: 34789 - DNA, 21 bp, Artificial Sequence
  primer
tcctttcttgcttgtcttgcc

SEQ ID NO: 34790 - DNA, 39 bp, Artificial Sequence
  primer
gtaaaacgacggccagtttgtttggctgggattgtattc

SEQ ID NO: 34791 - DNA, 23 bp, Artificial Sequence
  primer
cactttgggaagagtttacagca

SEQ ID NO: 34792 - DNA, 21 bp, Artificial Sequence
  primer
tctccatcccactcagaaatg

SEQ ID NO: 34793 - DNA, 36 bp, Artificial Sequence
  primer
gtaaaacgacggccagtagcgtgggagacgtacctg

SEQ ID NO: 34794 - DNA, 21 bp, Artificial Sequence
  primer
gaaggaggaagggagatggtg

SEQ ID NO: 34795 - DNA, 21 bp, Artificial Sequence
  primer
gccacaagtgtgtgtatgtgg

SEQ ID NO: 34796 - DNA, 21 bp, Artificial Sequence
  primer
tgctctgaggtcacacacacc

SEQ ID NO: 34797 - DNA, 20 bp, Artificial Sequence
  primer
ggtatgacgggagcagtgac

SEQ ID NO: 34798 - DNA, 38 bp, Artificial Sequence
  primer
gtaaaacgacggccagtcaggtactgtgagcctctccc

SEQ ID NO: 34799 - DNA, 35 bp, Artificial Sequence
  primer
gtaaaacgacggccagtcttcattagggctccggc

SEQ ID NO: 34800 - DNA, 38 bp, Artificial Sequence
  primer
gtaaaacgacggccagttacctgaaagggctctggatg

SEQ ID NO: 34801 - DNA, 21 bp, Artificial Sequence
  primer
agaacttctacaacccgctgc

SEQ ID NO: 34802 - DNA, 37 bp, Artificial Sequence
  primer
gtaaaacgacggccagtctggacaaccctccttagcc

SEQ ID NO: 34803 - DNA, 38 bp, Artificial Sequence
  primer
gtaaaacgacggccagtacttgaacctgggatggtgag

SEQ ID NO: 34804 - DNA, 38 bp, Artificial Sequence
  primer
gtaaaacgacggccagtaaattgctgctctgggacttg

SEQ ID NO: 34805 - DNA, 22 bp, Artificial Sequence
  primer
ggaaccaagtgagtgaggaaac

SEQ ID NO: 34806 - DNA, 21 bp, Artificial Sequence
  primer
cctcactgatctccatcctgg

SEQ ID NO: 34807 - DNA, 38 bp, Artificial Sequence
  primer
gtaaaacgacggccagtagggtgagagtcccagttcac

SEQ ID NO: 34808 - DNA, 38 bp, Artificial Sequence; identical to SEQ ID NO: 34803
  primer

SEQ ID NO: 34809 - DNA, 21 bp, Artificial Sequence
  primer
accaccactagcccacagttg

SEQ ID NO: 34810 - DNA, 38 bp, Artificial Sequence
  primer
gtaaaacgacggccagtcccagaaaggcttcaattgtc

SEQ ID NO: 34811 - DNA, 24 bp, Artificial Sequence
  primer
gctctctgctagcataccaacaac

SEQ ID NO: 34812 - DNA, 38 bp, Artificial Sequence
  primer
gtaaaacgacggccagttacctctctgaatcacgccag

SEQ ID NO: 34813 - DNA, 25 bp, Artificial Sequence
  primer
aactaagggaatacctctcctgatg

SEQ ID NO: 34814 - DNA, 38 bp, Artificial Sequence
  primer
gtaaaacgacggccagtccttcttattggctgggaaac

SEQ ID NO: 34815 - DNA, 21 bp, Artificial Sequence
  primer
ccactccgaattgaaccagtc

SEQ ID NO: 34816 - DNA, 38 bp, Artificial Sequence
  primer
gtaaaacgacggccagtcagtgcacaggctctaacgag

SEQ ID NO: 34817 - DNA, 37 bp, Artificial Sequence
  primer
gtaaaacgacggccagtcgcgttagcttcacaccttc

SEQ ID NO: 34818 - DNA, 38 bp, Artificial Sequence
  primer
gtaaaacgacggccagttttggtgcaggttagttgtgg

SEQ ID NO: 34819 - DNA, 39 bp, Artificial Sequence
  primer
gtaaaacgacggccagtaggcataaactgcctcagaaac

SEQ ID NO: 34820 - DNA, 38 bp, Artificial Sequence
  primer
gtaaaacgacggccagtgacagaaagaacaggcacagc

SEQ ID NO: 34821 - DNA, 38 bp, Artificial Sequence
  primer
gtaaaacgacggccagtcactggactttcagtgccaag

SEQ ID NO: 34822 - DNA, 20 bp, Artificial Sequence
  primer
tctgaccctccttctcgctg

SEQ ID NO: 34823 - DNA, 36 bp, Artificial Sequence
  primer
gtaaaacgacggccagttctcaagctgggctccttc

SEQ ID NO: 34824 - DNA, 38 bp, Artificial Sequence
  primer
gtaaaacgacggccagtcactcctgcacaatcacaacc

SEQ ID NO: 34825 - DNA, 38 bp, Artificial Sequence
  primer
gtaaaacgacggccagtacacactctgcccttcctctg

SEQ ID NO: 34826 - DNA, 21 bp, Artificial Sequence
  primer
gccacctacacagatggtgag

SEQ ID NO: 34827 - DNA, 21 bp, Artificial Sequence
  primer
aggtgttcaaggagcaagagc

SEQ ID NO: 34828 - DNA, 21 bp, Artificial Sequence
  primer
atggtgacatccagtgcaatc

SEQ ID NO: 34829 - DNA, 21 bp, Artificial Sequence
  primer
tctcctccagcctacagcatc

SEQ ID NO: 34830 - DNA, 38 bp, Artificial Sequence
  primer
gtaaaacgacggccagtggtgaatgtggatgtggactc

SEQ ID NO: 34831 - DNA, 38 bp, Artificial Sequence
  primer
gtaaaacgacggccagtccaggagggaactagcctaag

SEQ ID NO: 34832 - DNA, 38 bp, Artificial Sequence
  primer
gtaaaacgacggccagtctggtacaaccacttcttggg

SEQ ID NO: 34833 - DNA, 36 bp, Artificial Sequence
  primer
gtaaaacgacggccagttcggtgagtcagtccgtcc

SEQ ID NO: 34834 - DNA, 18 bp, Artificial Sequence
  primer
atgggcctggagatcacg

SEQ ID NO: 34835 - DNA, 38 bp, Artificial Sequence
  primer
gtaaaacgacggccagtgcagtgcaaggtgtacgactc

SEQ ID NO: 34836 - DNA, 21 bp, Artificial Sequence
  primer
tatccgggacttctacaaccc

SEQ ID NO: 34837 - DNA, 38 bp, Artificial Sequence
  primer
gtaaaacgacggccagtgtgcactctgcgaacgttaag

SEQ ID NO: 34838 - DNA, 21 bp, Artificial Sequence
  primer
ctatggatgaactgcgtggtg

SEQ ID NO: 34839 - DNA, 21 bp, Artificial Sequence
  primer
gtaccaactgcctggaggatg

SEQ ID NO: 34840 - DNA, 38 bp, Artificial Sequence
  primer
gtaaaacgacggccagtccctaacttcagctgccagag

SEQ ID NO: 34841 - DNA, 19 bp, Artificial Sequence
  primer
gtctcgcctctagcatggg

SEQ ID NO: 34842 - DNA, 37 bp, Artificial Sequence
  primer
gtaaaacgacggccagtcttcctggaccacaacatcg

SEQ ID NO: 34843 - DNA, 21 bp, Artificial Sequence
  primer
gtgtcgcagaagtacgagctg

SEQ ID NO: 34844 - DNA, 21 bp, Artificial Sequence
  primer
tgttgtgcttctgtcccaaac

SEQ ID NO: 34845 - DNA, 21 bp, Artificial Sequence
  primer
gccaagtgtaccacctgtgtg

SEQ ID NO: 34846 - DNA, 37 bp, Artificial Sequence
  primer
gtaaaacgacggccagttttgtctctttgggtgaccg

SEQ ID NO: 34847 - DNA, 38 bp, Artificial Sequence
  primer
gtaaaacgacggccagtgaagaggtccagcggttagtg

SEQ ID NO: 34848 - DNA, 37 bp, Artificial Sequence
  primer
gtaaaacgacggccagtgtatagccatgggtggaggc

SEQ ID NO: 34849 - DNA, 38 bp, Artificial Sequence
  primer
gtaaaacgacggccagtaaccctttgatccctaccaac

SEQ ID NO: 34850 - DNA, 38 bp, Artificial Sequence
  primer
gtaaaacgacggccagtacacctggattaccatccacc

SEQ ID NO: 34851 - DNA, 21 bp, Artificial Sequence
  primer
gctgtcactgtcatgcctcag

SEQ ID NO: 34852 - DNA, 21 bp, Artificial Sequence
  primer
ctacttaggatggaccacggc

SEQ ID NO: 34853 - DNA, 21 bp, Artificial Sequence
  primer
gcctttcatggaactgaggac

SEQ ID NO: 34854 - DNA, 38 bp, Artificial Sequence; identical to SEQ ID NO: 34835
  primer

SEQ ID NO: 34855 - DNA, 21 bp, Artificial Sequence
  primer
catctcccaactcaacgtcag

SEQ ID NO: 34856 - DNA, 38 bp, Artificial Sequence
  primer
gtaaaacgacggccagtccctcctcactagacagctcc

SEQ ID NO: 34857 - DNA, 39 bp, Artificial Sequence
  primer
gtaaaacgacggccagttgaacaataatagtgcctgccc

SEQ ID NO: 34858 - DNA, 38 bp, Artificial Sequence
  primer
gtaaaacgacggccagtacctggtgaccctgagaacag

SEQ ID NO: 34859 - DNA, 21 bp, Artificial Sequence
  primer
atccaaagcagatttgatggc

SEQ ID NO: 34860 - DNA, 38 bp, Artificial Sequence
  primer
gtaaaacgacggccagttgtgtgtcccagttcattctg

SEQ ID NO: 34861 - DNA, 39 bp, Artificial Sequence
  primer
gtaaaacgacggccagttttaataggcctgagcatccag

SEQ ID NO: 34862 - DNA, 38 bp, Artificial Sequence
  primer
gtaaaacgacggccagtctttctgtgccaatgtcctcc

SEQ ID NO: 34863 - DNA, 21 bp, Artificial Sequence
  primer
caggaagagagaagctgggag

SEQ ID NO: 34864 - DNA, 21 bp, Artificial Sequence
  primer
tgaggagcgattgggatagtc

SEQ ID NO: 34865 - DNA, 37 bp, Artificial Sequence
  primer
gtaaaacgacggccagtgatcccagttctccaggtcc

SEQ ID NO: 34866 - DNA, 38 bp, Artificial Sequence
  primer
gtaaaacgacggccagtccagactctgaatgcatgacc

SEQ ID NO: 34867 - DNA, 41 bp, Artificial Sequence
  primer
gtaaaacgacggccagtaggtcctgtttaacattcagctct

SEQ ID NO: 34868 - DNA, 21 bp, Artificial Sequence
  primer
acagcttctcctgccagaatc

SEQ ID NO: 34869 - DNA, 20 bp, Artificial Sequence
  primer
ggcccacaaggaggacttac

SEQ ID NO: 34870 - DNA, 40 bp, Artificial Sequence
  primer
gtaaaacgacggccagtgtgatcaatgtcacacagagagg

SEQ ID NO: 34871 - DNA, 43 bp, Artificial Sequence
  primer
gtaaaacgacggccagtagtagtgcaatgtccagtatgttacc

SEQ ID NO: 34872 - DNA, 24 bp, Artificial Sequence
  primer
ggcaataatatcatgttggaagtg

SEQ ID NO: 34873 - DNA, 36 bp, Artificial Sequence
  primer
gtaaaacgacggccagtagctgtagagggcggtgac

SEQ ID NO: 34874 - DNA, 35 bp, Artificial Sequence
  primer
gtaaaacgacggccagtcacagctctgcgtcctcg

SEQ ID NO: 34875 - DNA, 35 bp, Artificial Sequence
  primer
gtaaaacgacggccagtgctaccatgaagcggcag

SEQ ID NO: 34876 - DNA, 38 bp, Artificial Sequence
  primer
gtaaaacgacggccagtaaagacctgctgttctgggtc

SEQ ID NO: 34877 - DNA, 21 bp, Artificial Sequence
  primer
gtttgaggtcttgtgtcctgc

SEQ ID NO: 34878 - DNA, 21 bp, Artificial Sequence
  primer
agctccctaactgcctagacg

SEQ ID NO: 34879 - DNA, 21 bp, Artificial Sequence
  primer
cacagagcacgatgtctaccc

SEQ ID NO: 34880 - DNA, 38 bp, Artificial Sequence
  primer
gtaaaacgacggccagttcgctgggaaagaacattagg

SEQ ID NO: 34881 - DNA, 39 bp, Artificial Sequence
  primer
gtaaaacgacggccagttgcagaattaactccactccct

SEQ ID NO: 34882 - DNA, 39 bp, Artificial Sequence
  primer
gtaaaacgacggccagtgcccaaggtgatacaacttctc

SEQ ID NO: 34883 - DNA, 25 bp, Artificial Sequence
  primer
aaacattgtagttatcattgcctgg

SEQ ID NO: 34884 - DNA, 21 bp, Artificial Sequence
  primer
agcatcaatgtgaagcaggac

SEQ ID NO: 34885 - DNA, 39 bp, Artificial Sequence
  primer
gtaaaacgacggccagttttcccggtaaacttattctgg

SEQ ID NO: 34886 - DNA, 39 bp, Artificial Sequence
  primer
gtaaaacgacggccagttcccatctcacatggttctacc

SEQ ID NO: 34887 - DNA, 37 bp, Artificial Sequence
  primer
gtaaaacgacggccagtggccatgcctattgttgatg

SEQ ID NO: 34888 - DNA, 39 bp, Artificial Sequence
  primer
gtaaaacgacggccagtttcaatgacagacctttgcatc

SEQ ID NO: 34889 - DNA, 38 bp, Artificial Sequence
  primer
gtaaaacgacggccagtggcaactgaagggagtttgag

SEQ ID NO: 34890 - DNA, 42 bp, Artificial Sequence
  primer
gtaaaacgacggccagtcaacgtcttatcatgaagctttgtc

SEQ ID NO: 34891 - DNA, 21 bp, Artificial Sequence
  primer
caagcagggtggaactttctc

SEQ ID NO: 34892 - DNA, 38 bp, Artificial Sequence
  primer
gtaaaacgacggccagttgttccatagcacggttgttg

SEQ ID NO: 34893 - DNA, 40 bp, Artificial Sequence
  primer
gtaaaacgacggccagttgtacttgattgagggtttcctg

SEQ ID NO: 34894 - DNA, 19 bp, Artificial Sequence
  primer
gggcctcaaactgtggaag

SEQ ID NO: 34895 - DNA, 36 bp, Artificial Sequence
  primer
gtaaaacgacggccagtgggtgggaagcatgttcag

SEQ ID NO: 34896 - DNA, 21 bp, Artificial Sequence
  primer
tcgagccattcttactcctcc

SEQ ID NO: 34897 - DNA, 41 bp, Artificial Sequence
  primer
gtaaaacgacggccagttttgaattctaggatattgctggg

SEQ ID NO: 34898 - DNA, 26 bp, Artificial Sequence
  primer
aagaaatgccctgataaatcttaaac

SEQ ID NO: 34899 - DNA, 39 bp, Artificial Sequence
  primer
gtaaaacgacggccagttgcacttcacaacctacgaaac

SEQ ID NO: 34900 - DNA, 38 bp, Artificial Sequence
  primer
gtaaaacgacggccagttgccatagtacaccttgcagc

SEQ ID NO: 34901 - DNA, 21 bp, Artificial Sequence
  primer
gggcggttacacacttacacg

SEQ ID NO: 34902 - DNA, 39 bp, Artificial Sequence
  primer
gtaaaacgacggccagttttgatgcttaatgtttctggc

SEQ ID NO: 34903 - DNA, 38 bp, Artificial Sequence
  primer
gtaaaacgacggccagttttgccatttgctgtgtaatg

SEQ ID NO: 34904 - DNA, 38 bp, Artificial Sequence
  primer
gtaaaacgacggccagtcatagcagcaacatttctggg

SEQ ID NO: 34905 - DNA, 21 bp, Artificial Sequence
  primer
gctaagcaaagcccactgact

SEQ ID NO: 34906 - DNA, 38 bp, Artificial Sequence
  primer
gtaaaacgacggccagtgcatcccagagcaagatgtag

SEQ ID NO: 34907 - DNA, 38 bp, Artificial Sequence
  primer
gtaaaacgacggccagtaaaccactattgccttgggtc

SEQ ID NO: 34908 - DNA, 38 bp, Artificial Sequence
  primer
gtaaaacgacggccagtttattgctatttgccaggtcc

SEQ ID NO: 34909 - DNA, 21 bp, Artificial Sequence
  primer
agggtttcctggacagaggtc

SEQ ID NO: 34910 - DNA, 21 bp, Artificial Sequence
  primer
cacaggagcaagtgaaggatg

SEQ ID NO: 34911 - DNA, 38 bp, Artificial Sequence
  primer
gtaaaacgacggccagtcaaagtgcatgaaccatcagg

SEQ ID NO: 34912 - DNA, 21 bp, Artificial Sequence
  primer
atgaaatgctttctggccttc

SEQ ID NO: 34913 - DNA, 21 bp, Artificial Sequence
  primer
taccaccatgtttggttcctg

SEQ ID NO: 34914 - DNA, 25 bp, Artificial Sequence
  primer
cgttagtaactgtgtgtcatccaag

SEQ ID NO: 34915 - DNA, 39 bp, Artificial Sequence
  primer
gtaaaacgacggccagttggaactgttgtgtcctcttcc

SEQ ID NO: 34916 - DNA, 21 bp, Artificial Sequence
  primer
agttccagcttccatgtgctc

SEQ ID NO: 34917 - DNA, 21 bp, Artificial Sequence
  primer
ctctaatgcagctgttgctgg

SEQ ID NO: 34918 - DNA, 38 bp, Artificial Sequence
  primer
gtaaaacgacggccagttagcagaaaggtggatttggg

SEQ ID NO: 34919 - DNA, 21 bp, Artificial Sequence
  primer
agaaggatctaagggcttggc

SEQ ID NO: 34920 - DNA, 22 bp, Artificial Sequence
  primer
ttgggttccagggtactatctg

SEQ ID NO: 34921 - DNA, 38 bp, Artificial Sequence
  primer
gtaaaacgacggccagttgtgcctgtccacagcataag

SEQ ID NO: 34922 - DNA, 38 bp, Artificial Sequence
  primer
gtaaaacgacggccagtatccgtggagatccataggtg

SEQ ID NO: 34923 - DNA, 38 bp, Artificial Sequence
  primer
gtaaaacgacggccagtaacttaaagtggcggtgttcg

SEQ ID NO: 34924 - DNA, 38 bp, Artificial Sequence
  primer
gtaaaacgacggccagtgtttaaccctagccctctccc

SEQ ID NO: 34925 - DNA, 21 bp, Artificial Sequence
  primer
tctcccggaatgtatcaaagg

SEQ ID NO: 34926 - DNA, 41 bp, Artificial Sequence
  primer
gtaaaacgacggccagttgctccttggtagaattagctttc

SEQ ID NO: 34927 - DNA, 21 bp, Artificial Sequence
  primer
tgctttcaaccaattcacctg

SEQ ID NO: 34928 - DNA, 40 bp, Artificial Sequence
  primer
gtaaaacgacggccagttcgtagtcattatgtggtgtcca

SEQ ID NO: 34929 - DNA, 39 bp, Artificial Sequence
  primer
gtaaaacgacggccagtcagatctatctgatgccagagc

SEQ ID NO: 34930 - DNA, 25 bp, Artificial Sequence
  primer
tgttcactagggacatttctctgaa

SEQ ID NO: 34931 - DNA, 39 bp, Artificial Sequence
  primer
gtaaaacgacggccagtcatctatcggagctgaacttcc

SEQ ID NO: 34932 - DNA, 20 bp, Artificial Sequence
  primer
tgaagcatgctgaaatttgg

SEQ ID NO: 34933 - DNA, 23 bp, Artificial Sequence
  primer
ttggcataagaggtagtgcaaac

SEQ ID NO: 34934 - DNA, 38 bp, Artificial Sequence
  primer
gtaaaacgacggccagtcaagtgattccaaggcttctg

SEQ ID NO: 34935 - DNA, 22 bp, Artificial Sequence
  primer
cccaaagtgctaggatctcatc

SEQ ID NO: 34936 - DNA, 21 bp, Artificial Sequence
  primer
gtcagaaagatccggttcagc

SEQ ID NO: 34937 - DNA, 38 bp, Artificial Sequence
  primer
gtaaaacgacggccagtagtgtgggtgtctcagctttg

SEQ ID NO: 34938 - DNA, 38 bp, Artificial Sequence
  primer
gtaaaacgacggccagttccttctccataaccacctgc

SEQ ID NO: 34939 - DNA, 38 bp, Artificial Sequence
  primer
gtaaaacgacggccagtctgaggttcatgagggaaacc

SEQ ID NO: 34940 - DNA, 21 bp, Artificial Sequence
  primer
gatctttgtttcttggcccac

SEQ ID NO: 34941 - DNA, 38 bp, Artificial Sequence
  primer
gtaaaacgacggccagtaacaccaatgctgacatccag

SEQ ID NO: 34942 - DNA, 21 bp, Artificial Sequence
  primer
agtttggaaacggcaaatacc

SEQ ID NO: 34943 - DNA, 38 bp, Artificial Sequence
  primer
gtaaaacgacggccagtaggtcatttggaaagagctgg

SEQ ID NO: 34944 - DNA, 21 bp, Artificial Sequence
  primer
caagaatttcatgggcttgtg

SEQ ID NO: 34945 - DNA, 40 bp, Artificial Sequence
  primer
gtaaaacgacggccagttctataagcaggttctccaggtg

SEQ ID NO: 34946 - DNA, 21 bp, Artificial Sequence
  primer
cctccacagagggtcattagg

SEQ ID NO: 34947 - DNA, 38 bp, Artificial Sequence
  primer
gtaaaacgacggccagtaggaaggaagggagtgcgtag

SEQ ID NO: 34948 - DNA, 38 bp, Artificial Sequence
  primer
gtaaaacgacggccagttttcctgggagtaactcaggc

SEQ ID NO: 34949 - DNA, 20 bp, Artificial Sequence
  primer
gtacatctttgggccgtgtg

SEQ ID NO: 34950 - DNA, 37 bp, Artificial Sequence
  primer
gtaaaacgacggccagtcggagatggagtctcgagtg

SEQ ID NO: 34951 - DNA, 37 bp, Artificial Sequence
  primer
gtaaaacgacggccagtaaggaggaggtcggagactg

SEQ ID NO: 34952 - DNA, 37 bp, Artificial Sequence
  primer
gtaaaacgacggccagtagttgtaaccgcccttgacc

SEQ ID NO: 34953 - DNA, 20 bp, Artificial Sequence
  primer
ctacccactgcatcctctcg

SEQ ID NO: 34954 - DNA, 35 bp, Artificial Sequence
  primer
gtaaaacgacggccagtcacctggtgatcgttggg

SEQ ID NO: 34955 - DNA, 21 bp, Artificial Sequence
  primer
gctagagcctgaagaggaagg

SEQ ID NO: 34956 - DNA, 21 bp, Artificial Sequence
  primer
ccagcttcctgtttgtcttcc

SEQ ID NO: 34957 - DNA, 38 bp, Artificial Sequence
  primer
gtaaaacgacggccagtagtgactccaaggaaccaagg

SEQ ID NO: 34958 - DNA, 20 bp, Artificial Sequence
  primer
ttcattcctgttccactggg

SEQ ID NO: 34959 - DNA, 21 bp, Artificial Sequence
  primer
ccctaagtcaggaacaatccg

SEQ ID NO: 34960 - DNA, 38 bp, Artificial Sequence
  primer
gtaaaacgacggccagtagatctaccaggagctgacgg

SEQ ID NO: 34961 - DNA, 38 bp, Artificial Sequence
  primer
gtaaaacgacggccagtcacccaacatggacagtcaag

SEQ ID NO: 34962 - DNA, 38 bp, Artificial Sequence
  primer
gtaaaacgacggccagtgaactttctgccaagagacgg

SEQ ID NO: 34963 - DNA, 38 bp, Artificial Sequence
  primer
gtaaaacgacggccagtagcaatgcatgtccagcatac

SEQ ID NO: 34964 - DNA, 38 bp, Artificial Sequence
  primer
gtaaaacgacggccagtggtcacctcctggtacctgtc

SEQ ID NO: 34965 - DNA, 38 bp, Artificial Sequence
  primer
gtaaaacgacggccagtgtcacagtaccctagcagccc

SEQ ID NO: 34966 - DNA, 38 bp, Artificial Sequence
  primer
gtaaaacgacggccagtggccaagagcttcttgtcatc

SEQ ID NO: 34967 - DNA, 38 bp, Artificial Sequence
  primer
gtaaaacgacggccagtgtggaatttcttcctggatgg

SEQ ID NO: 34968 - DNA, 21 bp, Artificial Sequence
  primer
agagttctctaccggccttcc

SEQ ID NO: 34969 - DNA, 21 bp, Artificial Sequence
  primer
actctggaatcaggaagaggc

SEQ ID NO: 34970 - DNA, 22 bp, Artificial Sequence
  primer
tgtgtagcagtttgtccctgag

SEQ ID NO: 34971 - DNA, 39 bp, Artificial Sequence
  primer
gtaaaacgacggccagtggaccacagagctactacctgg

SEQ ID NO: 34972 - DNA, 38 bp, Artificial Sequence
  primer
gtaaaacgacggccagtgggcttgcctagagaaacagc

SEQ ID NO: 34973 - DNA, 23 bp, Artificial Sequence
  primer
tgtgaaatcaattctaggaaccc

SEQ ID NO: 34974 - DNA, 22 bp, Artificial Sequence
  primer
gctctgaaggctataagcaacc

SEQ ID NO: 34975 - DNA, 39 bp, Artificial Sequence
  primer
gtaaaacgacggccagtctaaatcccactttgttcaccc

SEQ ID NO: 34976 - DNA, 38 bp, Artificial Sequence
  primer
gtaaaacgacggccagttccggtaagtacctagcccac

SEQ ID NO: 34977 - DNA, 38 bp, Artificial Sequence
  primer
gtaaaacgacggccagttacctcagtctcccttctggg

SEQ ID NO: 34978 - DNA, 43 bp, Artificial Sequence
  primer
gtaaaacgacggccagtaagtgtccttaagatgaatggtgttc

SEQ ID NO: 34979 - DNA, 19 bp, Artificial Sequence
  primer
ccggccttgcattctttac

SEQ ID NO: 34980 - DNA, 39 bp, Artificial Sequence
  primer
gtaaaacgacggccagttttatttgtgcgccatgtagac

SEQ ID NO: 34981 - DNA, 21 bp, Artificial Sequence
  primer
ctgacctcatgatctacccgc

SEQ ID NO: 34982 - DNA, 21 bp, Artificial Sequence
  primer
accagaaatttcctgaggcac

SEQ ID NO: 34983 - DNA, 22 bp, Artificial Sequence
  primer
gctgcctccctcattctatttc

SEQ ID NO: 34984 - DNA, 25 bp, Artificial Sequence
  primer
gggttataagctagttagtggtggg

SEQ ID NO: 34985 - DNA, 38 bp, Artificial Sequence
  primer
gtaaaacgacggccagtacctgctccaaaccacaagag

SEQ ID NO: 34986 - DNA, 39 bp, Artificial Sequence
  primer
gtaaaacgacggccagtcaatctcaatctatccttgccc

SEQ ID NO: 34987 - DNA, 42 bp, Artificial Sequence
  primer
gtaaaacgacggccagtcttgtctttagtctgtgttgaagga

SEQ ID NO: 34988 - DNA, 21 bp, Artificial Sequence
  primer
aagttaaaggcccattgcaga

SEQ ID NO: 34989 - DNA, 21 bp, Artificial Sequence
  primer
ctacctgccaggctctgaatc

SEQ ID NO: 34990 - DNA, 38 bp, Artificial Sequence
  primer
gtaaaacgacggccagttgaaaccaccacaggaagttg

SEQ ID NO: 34991 - DNA, 38 bp, Artificial Sequence
  primer
gtaaaacgacggccagtggcctgcagctatagaatctg

SEQ ID NO: 34992 - DNA, 43 bp, Artificial Sequence
  primer
gtaaaacgacggccagttttgtatcctatttgagtttgtcacc

SEQ ID NO: 34993 - DNA, 22 bp, Artificial Sequence
  primer
cccttcaggattatgtgtaggc

SEQ ID NO: 34994 - DNA, 36 bp, Artificial Sequence
  primer
gtaaaacgacggccagttttcccaagtcaggcttcc

SEQ ID NO: 34995 - DNA, 22 bp, Artificial Sequence
  primer
ttgattggtttgtctgcagttg

SEQ ID NO: 34996 - DNA, 23 bp, Artificial Sequence
  primer
cccatgtcctttattgtcacttg

SEQ ID NO: 34997 - DNA, 24 bp, Artificial Sequence
  primer
gttattcctctatttctggttggg

SEQ ID NO: 34998 - DNA, 40 bp, Artificial Sequence
  primer
gtaaaacgacggccagtgaggacaaataacaggcacaaac

SEQ ID NO: 34999 - DNA, 41 bp, Artificial Sequence
  primer
gtaaaacgacggccagttcaaatgtcgatttcaaatgtttc

SEQ ID NO: 35000 - DNA, 38 bp, Artificial Sequence
  primer
gtaaaacgacggccagtcgaatttcattcaacagcagc

SEQ ID NO: 35001 - DNA, 42 bp, Artificial Sequence
  primer
gtaaaacgacggccagtcgagttcatcactccttaatgtaaa

SEQ ID NO: 35002 - DNA, 30 bp, Artificial Sequence
  primer
tgtttaagagttctataaattaagcgattc

SEQ ID NO: 35003 - DNA, 41 bp, Artificial Sequence
  primer
gtaaaacgacggccagttgaatggaagaagttgcttctaaa

SEQ ID NO: 35004 - DNA, 27 bp, Artificial Sequence
  primer
ccttcataatagcacttgattgatagc

SEQ ID NO: 35005 - DNA, 21 bp, Artificial Sequence
  primer
tgagcttgtgttgtgctgaag

SEQ ID NO: 35006 - DNA, 38 bp, Artificial Sequence
  primer
gtaaaacgacggccagtacagtttcccattgatctgcc

SEQ ID NO: 35007 - DNA, 21 bp, Artificial Sequence
  primer
ctttcttatcccacgtcctcc

SEQ ID NO: 35008 - DNA, 37 bp, Artificial Sequence
  primer
gtaaaacgacggccagtgcagggagattctgggaaac

SEQ ID NO: 35009 - DNA, 40 bp, Artificial Sequence
  primer
gtaaaacgacggccagtggactcaccattagtatccaccc

SEQ ID NO: 35010 - DNA, 36 bp, Artificial Sequence
  primer
gtaaaacgacggccagtgggagaagggaaagccaag

SEQ ID NO: 35011 - DNA, 39 bp, Artificial Sequence
  primer
gtaaaacgacggccagtacggtcttcttaaagcaccaac

SEQ ID NO: 35012 - DNA, 23 bp, Artificial Sequence
  primer
catgtttgtctctagcaactggc

SEQ ID NO: 35013 - DNA, 39 bp, Artificial Sequence
  primer
gtaaaacgacggccagtgacaactgttgacatgaccagg

SEQ ID NO: 35014 - DNA, 38 bp, Artificial Sequence
  primer
gtaaaacgacggccagttatagtgcaagctagggcacc

SEQ ID NO: 35015 - DNA, 41 bp, Artificial Sequence
  primer
gtaaaacgacggccagtgaggtgtctaaatgtgtggaaagc

SEQ ID NO: 35016 - DNA, 22 bp, Artificial Sequence
  primer
ttgtgtcgataagatgcctttg

SEQ ID NO: 35017 - DNA, 20 bp, Artificial Sequence
  primer
tcacaccctcaggctcagac

SEQ ID NO: 35018 - DNA, 19 bp, Artificial Sequence
  primer
agtcaagggccctcactgg

SEQ ID NO: 35019 - DNA, 38 bp, Artificial Sequence
  primer
gtaaaacgacggccagtcgtacctttcaccctcaccac

SEQ ID NO: 35020 - DNA, 21 bp, Artificial Sequence
  primer
gaggactttctggaggagacg

SEQ ID NO: 35021 - DNA, 35 bp, Artificial Sequence
  primer
gtaaaacgacggccagtaggacgaaggtgaagcgg

SEQ ID NO: 35022 - DNA, 18 bp, Artificial Sequence
  primer
acgtgagcacggaaggtg

SEQ ID NO: 35023 - DNA, 36 bp, Artificial Sequence
  primer
gtaaaacgacggccagtgtgctgaggagctgaagcc

SEQ ID NO: 35024 - DNA, 20 bp, Artificial Sequence
  primer
ggtgacagaaggagaccctg

SEQ ID NO: 35025 - DNA, 21 bp, Artificial Sequence
  primer
ctacgactacagacgcaagcc

SEQ ID NO: 35026 - DNA, 38 bp, Artificial Sequence
  primer
gtaaaacgacggccagtctgctagcatggtggtttgag

SEQ ID NO: 35027 - DNA, 21 bp, Artificial Sequence
  primer
aagagtctgcttctccttggg

SEQ ID NO: 35028 - DNA, 21 bp, Artificial Sequence
  primer
tggtgtagcttgcagtcttgg

SEQ ID NO: 35029 - DNA, 38 bp, Artificial Sequence
  primer
gtaaaacgacggccagtattaaacaccgccctgaagag

SEQ ID NO: 35030 - DNA, 21 bp, Artificial Sequence
  primer
gtctcctcagacctgcatttg

SEQ ID NO: 35031 - DNA, 21 bp, Artificial Sequence
  primer
ctgacaggcatgttggatagc

SEQ ID NO: 35032 - DNA, 38 bp, Artificial Sequence
  primer
gtaaaacgacggccagtgcccaccctccctatagtatg

SEQ ID NO: 35033 - DNA, 37 bp, Artificial Sequence
  primer
gtaaaacgacggccagtagctggcagtgtgatgaagg

SEQ ID NO: 35034 - DNA, 21 bp, Artificial Sequence
  primer
caaacatatcactgatggccc

SEQ ID NO: 35035 - DNA, 21 bp, Artificial Sequence
  primer
aaggaaggagtcccgatcaag

SEQ ID NO: 35036 - DNA, 17 bp, Artificial Sequence
  primer
ggggaggagacaagcgg

SEQ ID NO: 35037 - DNA, 34 bp, Artificial Sequence
  primer
gtaaaacgacggccagtagagggagcccgaggac

SEQ ID NO: 35038 - DNA, 19 bp, Artificial Sequence
  primer
gaggcaattgaggtcgcag

SEQ ID NO: 35039 - DNA, 38 bp, Artificial Sequence
  primer
gtaaaacgacggccagtcaggaggatattcgcagcatc

SEQ ID NO: 35040 - DNA, 38 bp, Artificial Sequence
  primer
gtaaaacgacggccagtaatgcctttactttcatcgcc

SEQ ID NO: 35041 - DNA, 38 bp, Artificial Sequence
  primer
gtaaaacgacggccagtagcaacaatccaaacctctcc

SEQ ID NO: 35042 - DNA, 21 bp, Artificial Sequence
  primer
ggaagggaagcaaactccatc

SEQ ID NO: 35043 - DNA, 38 bp, Artificial Sequence
  primer
gtaaaacgacggccagttgacatgggaaactgggaaag

SEQ ID NO: 35044 - DNA, 20 bp, Artificial Sequence
  primer
acctctgcctccaggatttg

SEQ ID NO: 35045 - DNA, 38 bp, Artificial Sequence
  primer
gtaaaacgacggccagtaggcaaagacctacagctccc

SEQ ID NO: 35046 - DNA, 21 bp, Artificial Sequence
  primer
gcaatgaggtgagaacactgg

SEQ ID NO: 35047 - DNA, 40 bp, Artificial Sequence
  primer
gtaaaacgacggccagtaaagtatagtccctgaagcccag

SEQ ID NO: 35048 - DNA, 21 bp, Artificial Sequence
  primer
gatctgaggagatagcgggag

SEQ ID NO: 35049 - DNA, 38 bp, Artificial Sequence
  primer
gtaaaacgacggccagtcccagactggtggtctctagg

SEQ ID NO: 35050 - DNA, 21 bp, Artificial Sequence
  primer
tcacagcaaaggaagttgagg

SEQ ID NO: 35051 - DNA, 39 bp, Artificial Sequence
  primer
gtaaaacgacggccagtgatgctgctgactgggaaatag

SEQ ID NO: 35052 - DNA, 38 bp, Artificial Sequence
  primer
gtaaaacgacggccagtcctaattctctggcatctggg

SEQ ID NO: 35053 - DNA, 38 bp, Artificial Sequence
  primer
gtaaaacgacggccagttacgggaagacagactttgcc

SEQ ID NO: 35054 - DNA, 21 bp, Artificial Sequence
  primer
agcatcccgtattcagaggtg

SEQ ID NO: 35055 - DNA, 38 bp, Artificial Sequence
  primer
gtaaaacgacggccagtattagcaacaaggctcttcgg

SEQ ID NO: 35056 - DNA, 38 bp, Artificial Sequence
  primer
gtaaaacgacggccagtaggcctgatagcaaacactgg

SEQ ID NO: 35057 - DNA, 38 bp, Artificial Sequence
  primer
gtaaaacgacggccagttgcagaatatgggacaacaca

SEQ ID NO: 35058 - DNA, 40 bp, Artificial Sequence
  primer
gtaaaacgacggccagtgggagtctaggtgctgtcttgaa

SEQ ID NO: 35059 - DNA, 37 bp, Artificial Sequence
  primer
gtaaaacgacggccagtttgaaattgctcctgccaac

SEQ ID NO: 35060 - DNA, 43 bp, Artificial Sequence
  primer
gtaaaacgacggccagtgtgataaggaaatttgtagcatcaac

SEQ ID NO: 35061 - DNA, 22 bp, Artificial Sequence
  primer
aactcatgtgagtggtggtttg

SEQ ID NO: 35062 - DNA, 39 bp, Artificial Sequence
  primer
gtaaaacgacggccagtgaacttgggaagtggtatcagg

SEQ ID NO: 35063 - DNA, 21 bp, Artificial Sequence
  primer
tgacctcaggtgattacaggc

SEQ ID NO: 35064 - DNA, 41 bp, Artificial Sequence
  primer
gtaaaacgacggccagtgactacacagaggcgtataatccc

SEQ ID NO: 35065 - DNA, 22 bp, Artificial Sequence
  primer
cactgtgcccagcctacattac

SEQ ID NO: 35066 - DNA, 38 bp, Artificial Sequence
  primer
gtaaaacgacggccagtatgtagggaatcattggcgag

SEQ ID NO: 35067 - DNA, 38 bp, Artificial Sequence
  primer
gtaaaacgacggccagtccttggtgcaaagcaggtaac

SEQ ID NO: 35068 - DNA, 18 bp, Artificial Sequence
  primer
gaccatgcctggcctctt

SEQ ID NO: 35069 - DNA, 38 bp, Artificial Sequence
  primer
gtaaaacgacggccagtgcagcttagcatctttggagc

SEQ ID NO: 35070 - DNA, 38 bp, Artificial Sequence
  primer
gtaaaacgacggccagtcctcactaaggcaggaccttg

SEQ ID NO: 35071 - DNA, 21 bp, Artificial Sequence
  primer
atctgacgtgttcccttccac

SEQ ID NO: 35072 - DNA, 21 bp, Artificial Sequence
  primer
gggttaaaggtggtgggaatc

SEQ ID NO: 35073 - DNA, 38 bp, Artificial Sequence
  primer
gtaaaacgacggccagtaggtaactgtcagtccctccc

SEQ ID NO: 35074 - DNA, 22 bp, Artificial Sequence
  primer
gaagtacctccttgttggatgg

SEQ ID NO: 35075 - DNA, 38 bp, Artificial Sequence
  primer
gtaaaacgacggccagtgcagccctagtgattctggac

SEQ ID NO: 35076 - DNA, 38 bp, Artificial Sequence
  primer
gtaaaacgacggccagtaatttcccagggcttgtaagg

SEQ ID NO: 35077 - DNA, 21 bp, Artificial Sequence
  primer
tagcaccattgtctccactcg

SEQ ID NO: 35078 - DNA, 38 bp, Artificial Sequence
  primer
gtaaaacgacggccagtctcagttctccacattgcctg

SEQ ID NO: 35079 - DNA, 22 bp, Artificial Sequence
  primer
tgatccgaaagacaaggtgaac

SEQ ID NO: 35080 - DNA, 39 bp, Artificial Sequence
  primer
gtaaaacgacggccagtttggttctccaagaatgaaagg

SEQ ID NO: 35081 - DNA, 38 bp, Artificial Sequence
  primer
gtaaaacgacggccagtatctcagggagcttgctgttg

SEQ ID NO: 35082 - DNA, 21 bp, Artificial Sequence
  primer
aacagaacaatgggcctcttc

SEQ ID NO: 35083 - DNA, 38 bp, Artificial Sequence
  primer
gtaaaacgacggccagtggccttaccacaggtctcttg

SEQ ID NO: 35084 - DNA, 39 bp, Artificial Sequence
  primer
gtaaaacgacggccagttgacacctcaatctgtcaatcg

SEQ ID NO: 35085 - DNA, 38 bp, Artificial Sequence
  primer
gtaaaacgacggccagtaatgctgtgaacttgcaggag

SEQ ID NO: 35086 - DNA, 38 bp, Artificial Sequence
  primer
gtaaaacgacggccagtctcctggagtggtgtttgttg

SEQ ID NO: 35087 - DNA, 21 bp, Artificial Sequence
  primer
gtggcctaggagagagttggg

SEQ ID NO: 35088 - DNA, 37 bp, Artificial Sequence
  primer
gtaaaacgacggccagtgtgaggacctctggcagttg

SEQ ID NO: 35089 - DNA, 38 bp, Artificial Sequence
  primer
gtaaaacgacggccagtatgagcacaaggtattggtgg

SEQ ID NO: 35090 - DNA, 38 bp, Artificial Sequence
  primer
gtaaaacgacggccagtctgagagagggcctcgtactg

SEQ ID NO: 35091 - DNA, 38 bp, Artificial Sequence
  primer
gtaaaacgacggccagtttggtaggtttgcatgtcctg

SEQ ID NO: 35092 - DNA, 38 bp, Artificial Sequence
  primer
gtaaaacgacggccagtggatgtggtgagtctttgctg

SEQ ID NO: 35093 - DNA, 21 bp, Artificial Sequence
  primer
cctagtagcctggcaagttcc

SEQ ID NO: 35094 - DNA, 21 bp, Artificial Sequence
  primer
tgtaagaccctgtgtgttggg

SEQ ID NO: 35095 - DNA, 38 bp, Artificial Sequence
  primer
gtaaaacgacggccagtggcccatttgcttgtttgtta

SEQ ID NO: 35096 - DNA, 21 bp, Artificial Sequence
  primer
aattgctcctgccaactgttc

SEQ ID NO: 35097 - DNA, 41 bp, Artificial Sequence
  primer
gtaaaacgacggccagtccacacttaagcattcattgtttg

SEQ ID NO: 35098 - DNA, 25 bp, Artificial Sequence
  primer
tggcatagaggaattggtaattaag

SEQ ID NO: 35099 - DNA, 38 bp, Artificial Sequence
  primer
gtaaaacgacggccagtaagcagctcgttcagaaatcc

SEQ ID NO: 35100 - DNA, 37 bp, Artificial Sequence
  primer
gtaaaacgacggccagtctttgccagtcctcctttcc

SEQ ID NO: 35101 - DNA, 44 bp, Artificial Sequence
  primer
gtaaaacgacggccagtttgacaatcaagaagataattcatgtg

SEQ ID NO: 35102 - DNA, 38 bp, Artificial Sequence
  primer
gtaaaacgacggccagtccaaatgggttctgtaaaggg

SEQ ID NO: 35103 - DNA, 38 bp, Artificial Sequence
  primer
gtaaaacgacggccagttgtatgtctgttgcctgggag

SEQ ID NO: 35104 - DNA, 21 bp, Artificial Sequence
  primer
agagctgctttccatgtctcc

SEQ ID NO: 35105 - DNA, 18 bp, Artificial Sequence
  primer
agacgctgcaaaccgttg

SEQ ID NO: 35106 - DNA, 38 bp, Artificial Sequence
  primer
gtaaaacgacggccagtaaacccaggccttagcttctg

SEQ ID NO: 35107 - DNA, 38 bp, Artificial Sequence
  primer
gtaaaacgacggccagtatttacagacctgccgcagac

SEQ ID NO: 35108 - DNA, 38 bp, Artificial Sequence
  primer
gtaaaacgacggccagtatattccagggcctatgcttg

SEQ ID NO: 35109 - DNA, 24 bp, Artificial Sequence
  primer
tttcagggaagagtatttgaccac

SEQ ID NO: 35110 - DNA, 39 bp, Artificial Sequence
  primer
gtaaaacgacggccagttgagctgaaagcactgaaacag

SEQ ID NO: 35111 - DNA, 37 bp, Artificial Sequence
  primer
gtaaaacgacggccagttcttacatgggacaccctgg

SEQ ID NO: 35112 - DNA, 22 bp, Artificial Sequence
  primer
aacagagctggatgtttggaag

SEQ ID NO: 35113 - DNA, 21 bp, Artificial Sequence
  primer
ttgtatgtcctgagaggcacc

SEQ ID NO: 35114 - DNA, 21 bp, Artificial Sequence
  primer
aacaggctcatgcaaacacac

SEQ ID NO: 35115 - DNA, 38 bp, Artificial Sequence
  primer
gtaaaacgacggccagtagagaagcaatcctgcctgag

SEQ ID NO: 35116 - DNA, 38 bp, Artificial Sequence
  primer
gtaaaacgacggccagttggaaatgtgagtggttcagg

SEQ ID NO: 35117 - DNA, 21 bp, Artificial Sequence
  primer
gtgggattcttcaccatcagg

SEQ ID NO: 35118 - DNA, 21 bp, Artificial Sequence
  primer
ctttgcattggtttgaagtgg

SEQ ID NO: 35119 - DNA, 21 bp, Artificial Sequence
  primer
ttaaccatgaaaccagccacc

SEQ ID NO: 35120 - DNA, 21 bp, Artificial Sequence
  primer
aagaccagcgacatcagtgag

SEQ ID NO: 35121 - DNA, 38 bp, Artificial Sequence
  primer
gtaaaacgacggccagtaatcctcctctgacaaggtcg

SEQ ID NO: 35122 - DNA, 21 bp, Artificial Sequence
  primer
gccaggctttcaacaaagttc

SEQ ID NO: 35123 - DNA, 21 bp, Artificial Sequence
  primer
aaggccaagagaaagtccacc

SEQ ID NO: 35124 - DNA, 38 bp, Artificial Sequence
  primer
gtaaaacgacggccagttgaagaggatcagggaacagg

SEQ ID NO: 35125 - DNA, 38 bp, Artificial Sequence
  primer
gtaaaacgacggccagttaaacccatacgtggaaaccc

SEQ ID NO: 35126 - DNA, 20 bp, Artificial Sequence
  primer
gggtctctcgcactcacaag

SEQ ID NO: 35127 - DNA, 37 bp, Artificial Sequence
  primer
gtaaaacgacggccagtcctacctggacatggtgctg

SEQ ID NO: 35128 - DNA, 21 bp, Artificial Sequence
  primer
cgttgatccttgtcacctgtc

SEQ ID NO: 35129 - DNA, 38 bp, Artificial Sequence
  primer
gtaaaacgacggccagtgattccgagggtgagtattcc

SEQ ID NO: 35130 - DNA, 21 bp, Artificial Sequence
  primer
ttgaatgaggatgggatctgg

SEQ ID NO: 35131 - DNA, 38 bp, Artificial Sequence
  primer
gtaaaacgacggccagtacgctgaggtcctgagaagtc

SEQ ID NO: 35132 - DNA, 38 bp, Artificial Sequence
  primer
gtaaaacgacggccagtgtttgtagcaggcctgtttgg

SEQ ID NO: 35133 - DNA, 38 bp, Artificial Sequence
  primer
gtaaaacgacggccagttcgtcatcaaattgttggctc

SEQ ID NO: 35134 - DNA, 20 bp, Artificial Sequence
  primer
tgcttcagacctggaacctg

SEQ ID NO: 35135 - DNA, 37 bp, Artificial Sequence
  primer
gtaaaacgacggccagtcaggtaagcaggtggagcag

SEQ ID NO: 35136 - DNA, 37 bp, Artificial Sequence
  primer
gtaaaacgacggccagtagtggcctagatggtccctg

SEQ ID NO: 35137 - DNA, 21 bp, Artificial Sequence
  primer
tgcgtggtctggttaattctg

SEQ ID NO: 35138 - DNA, 21 bp, Artificial Sequence
  primer
gtggacagtgttcaaggttcg

SEQ ID NO: 35139 - DNA, 38 bp, Artificial Sequence
  primer
gtaaaacgacggccagtccagggacttgtaagtgaggg

SEQ ID NO: 35140 - DNA, 21 bp, Artificial Sequence
  primer
agcaataccgctggtaagagg

SEQ ID NO: 35141 - DNA, 37 bp, Artificial Sequence
  primer
gtaaaacgacggccagtctagacctggcagccctctc

SEQ ID NO: 35142 - DNA, 21 bp, Artificial Sequence
  primer
cagcctacgtgaacaccttcc

SEQ ID NO: 35143 - DNA, 37 bp, Artificial Sequence
  primer
gtaaaacgacggccagtagccagaccaaagcaccttc

SEQ ID NO: 35144 - DNA, 38 bp, Artificial Sequence
  primer
gtaaaacgacggccagtctatggtccgacctttgaatg

SEQ ID NO: 35145 - DNA, 38 bp, Artificial Sequence
  primer
gtaaaacgacggccagtatatgcatttgtgatgtgcca

SEQ ID NO: 35146 - DNA, 38 bp, Artificial Sequence
  primer
gtaaaacgacggccagtttaccaccgcactctagcctc

SEQ ID NO: 35147 - DNA, 38 bp, Artificial Sequence
  primer
gtaaaacgacggccagtatggcaaagtgggtgaaacag

SEQ ID NO: 35148 - DNA, 21 bp, Artificial Sequence
  primer
gtccaccttctccttgaccac

SEQ ID NO: 35149 - DNA, 38 bp, Artificial Sequence
  primer
gtaaaacgacggccagtctctgggactcagctttcctg

SEQ ID NO: 35150 - DNA, 20 bp, Artificial Sequence
  primer
ctgctaaagggaccagccac

SEQ ID NO: 35151 - DNA, 38 bp, Artificial Sequence
  primer
gtaaaacgacggccagtggtagggaataaggcagtggg

SEQ ID NO: 35152 - DNA, 38 bp, Artificial Sequence
  primer
gtaaaacgacggccagttaaactgtgacgtggcactcc

SEQ ID NO: 35153 - DNA, 36 bp, Artificial Sequence
  primer
gtaaaacgacggccagtacacaggaagggatgccag

SEQ ID NO: 35154 - DNA, 40 bp, Artificial Sequence
  primer
gtaaaacgacggccagtagtttaatgtttgcgttactggg

SEQ ID NO: 35155 - DNA, 38 bp, Artificial Sequence
  primer
gtaaaacgacggccagtagctgtggacaatgaatcctg

SEQ ID NO: 35156 - DNA, 21 bp, Artificial Sequence
  primer
tgacctggactatgcatcctg

SEQ ID NO: 35157 - DNA, 27 bp, Artificial Sequence
  primer
tgtttggtaagtaaggtagcaaatacc

SEQ ID NO: 35158 - DNA, 38 bp, Artificial Sequence
  primer
gtaaaacgacggccagttctcatctctatggtcgacgg

SEQ ID NO: 35159 - DNA, 38 bp, Artificial Sequence
  primer
gtaaaacgacggccagttgcataaaggtgtccaagctg

SEQ ID NO: 35160 - DNA, 35 bp, Artificial Sequence
  primer
gtaaaacgacggccagtaggagatcgaggcaaggc

SEQ ID NO: 35161 - DNA, 21 bp, Artificial Sequence
  primer
gcttcaaccgctttcaagatt

SEQ ID NO: 35162 - DNA, 37 bp, Artificial Sequence
  primer
gtaaaacgacggccagtggctggcggcagatatatta

SEQ ID NO: 35163 - DNA, 20 bp, Artificial Sequence
  primer
gggcactagcttccttctgg

SEQ ID NO: 35164 - DNA, 40 bp, Artificial Sequence
  primer
gtaaaacgacggccagtcctcagccataggtatttgcttg

SEQ ID NO: 35165 - DNA, 43 bp, Artificial Sequence
  primer
gtaaaacgacggccagtaaattcttgtttagcatgatgtgttc

SEQ ID NO: 35166 - DNA, 27 bp, Artificial Sequence
  primer
gtaacctggaagatatttgttaccatc

SEQ ID NO: 35167 - DNA, 40 bp, Artificial Sequence
  primer
gtaaaacgacggccagtcaaatccaaggagataacttgcc

SEQ ID NO: 35168 - DNA, 26 bp, Artificial Sequence
  primer
cctagtgatgaaggtagaacattgtc

SEQ ID NO: 35169 - DNA, 39 bp, Artificial Sequence
  primer
gtaaaacgacggccagtcatattggtcatggattggatg

SEQ ID NO: 35170 - DNA, 38 bp, Artificial Sequence
  primer
gtaaaacgacggccagttcattgacgacttctgttggg

SEQ ID NO: 35171 - DNA, 21 bp, Artificial Sequence
  primer
gacccaaaggagccatctacc

SEQ ID NO: 35172 - DNA, 38 bp, Artificial Sequence
  primer
gtaaaacgacggccagtcctaagtgatttgcccacctc

SEQ ID NO: 35173 - DNA, 21 bp, Artificial Sequence
  primer
aggactttgaaacctgttccc

SEQ ID NO: 35174 - DNA, 22 bp, Artificial Sequence
  primer
tctgataattgcttgggacctt

SEQ ID NO: 35175 - DNA, 39 bp, Artificial Sequence
  primer
gtaaaacgacggccagttggttatggatcgtttacagca

SEQ ID NO: 35176 - DNA, 21 bp, Artificial Sequence
  primer
caccacacctggtcttgagtt

SEQ ID NO: 35177 - DNA, 23 bp, Artificial Sequence
  primer
ttcactttcattgaatggtttgg

SEQ ID NO: 35178 - DNA, 41 bp, Artificial Sequence
  primer
gtaaaacgacggccagtgaacaggcctttccaatatagatg

SEQ ID NO: 35179 - DNA, 24 bp, Artificial Sequence
  primer
tgggtggattagaaactaagggac

SEQ ID NO: 35180 - DNA, 41 bp, Artificial Sequence
  primer
gtaaaacgacggccagttgacttagccttgttacttgcttt

SEQ ID NO: 35181 - DNA, 39 bp, Artificial Sequence
  primer
gtaaaacgacggccagttcctgccacttctttctctgtc

SEQ ID NO: 35182 - DNA, 27 bp, Artificial Sequence
  primer
tcttaggtaagtatttactccactgcg

SEQ ID NO: 35183 - DNA, 21 bp, Artificial Sequence
  primer
aagagggaaggcctcataagc

SEQ ID NO: 35184 - DNA, 21 bp, Artificial Sequence
  primer
ctttcaggctccgtccctatc

SEQ ID NO: 35185 - DNA, 18 bp, Artificial Sequence
  primer
atcgtggtggagcagacg

SEQ ID NO: 35186 - DNA, 20 bp, Artificial Sequence
  primer
ttactttgggctctggtccc

SEQ ID NO: 35187 - DNA, 21 bp, Artificial Sequence
  primer
atttcctgaccttgtgatccg

SEQ ID NO: 35188 - DNA, 38 bp, Artificial Sequence
  primer
gtaaaacgacggccagtccttcctggtagtggcaagac

SEQ ID NO: 35189 - DNA, 37 bp, Artificial Sequence
  primer
gtaaaacgacggccagtatctccaaatcccatcccac

SEQ ID NO: 35190 - DNA, 22 bp, Artificial Sequence
  primer
caccaggtactcacccagtttc

SEQ ID NO: 35191 - DNA, 38 bp, Artificial Sequence
  primer
gtaaaacgacggccagtggtgggtacaggtctgaatgg

SEQ ID NO: 35192 - DNA, 38 bp, Artificial Sequence
  primer
gtaaaacgacggccagttggttctctaggtcaggcagg

SEQ ID NO: 35193 - DNA, 37 bp, Artificial Sequence
  primer
gtaaaacgacggccagtaggttggtccttccatagcc

SEQ ID NO: 35194 - DNA, 38 bp, Artificial Sequence
  primer
gtaaaacgacggccagtgataagcacccactctttgcc

SEQ ID NO: 35195 - DNA, 21 bp, Artificial Sequence
  primer
aagtcagaaggaagtcaggcg

SEQ ID NO: 35196 - DNA, 38 bp, Artificial Sequence
  primer
gtaaaacgacggccagtaccgctgccatagctctttag

SEQ ID NO: 35197 - DNA, 37 bp, Artificial Sequence
  primer
gtaaaacgacggccagtgaggaaactgctgcagatgg

SEQ ID NO: 35198 - DNA, 38 bp, Artificial Sequence
  primer
gtaaaacgacggccagtggtcacattgatctcagcagg

SEQ ID NO: 35199 - DNA, 20 bp, Artificial Sequence
  primer
aaagaagctgtccatggtgg

SEQ ID NO: 35200 - DNA, 21 bp, Artificial Sequence
  primer
tggtgtggcctagaaatgtcc

SEQ ID NO: 35201 - DNA, 21 bp, Artificial Sequence
  primer
tgtctttgtgagtcaccctcc

SEQ ID NO: 35202 - DNA, 22 bp, Artificial Sequence
  primer
tcacccaatgaatatgagagcc

SEQ ID NO: 35203 - DNA, 20 bp, Artificial Sequence
  primer
aagtgcctcactcccaggac

SEQ ID NO: 35204 - DNA, 37 bp, Artificial Sequence
  primer
gtaaaacgacggccagttgtgccacatcctctgtgtc

SEQ ID NO: 35205 - DNA, 36 bp, Artificial Sequence
  primer
gtaaaacgacggccagttggtatggccagtgcagag

SEQ ID NO: 35206 - DNA, 35 bp, Artificial Sequence
  primer
gtaaaacgacggccagtcttgcatcacgccctctc

SEQ ID NO: 35207 - DNA, 36 bp, Artificial Sequence
  primer
gtaaaacgacggccagtgggcaggtgaactctccac

SEQ ID NO: 35208 - DNA, 19 bp, Artificial Sequence
  primer
gcctccgttggtgtcattt

SEQ ID NO: 35209 - DNA, 43 bp, Artificial Sequence
  primer
gtaaaacgacggccagttgttatacaaaggaggactgcagata

SEQ ID NO: 35210 - DNA, 23 bp, Artificial Sequence
  primer
tcaggtgcgtagctttcatttac

SEQ ID NO: 35211 - DNA, 37 bp, Artificial Sequence
  primer
gtaaaacgacggccagtgggcctctgaatcattgcta

SEQ ID NO: 35212 - DNA, 38 bp, Artificial Sequence
  primer
gtaaaacgacggccagtaggacaggaggtgggatactc

SEQ ID NO: 35213 - DNA, 22 bp, Artificial Sequence
  primer
aatcaatttcctttgcttgagg

SEQ ID NO: 35214 - DNA, 22 bp, Artificial Sequence
  primer
ggtgacagagcaagaacctgtc

SEQ ID NO: 35215 - DNA, 43 bp, Artificial Sequence
  primer
gtaaaacgacggccagttgttaccatacgtaaatgttactccg

SEQ ID NO: 35216 - DNA, 39 bp, Artificial Sequence
  primer
gtaaaacgacggccagtggaatgtgggagtttcattagg

SEQ ID NO: 35217 - DNA, 43 bp, Artificial Sequence
  primer
gtaaaacgacggccagtccttcttcatagagttgttacaaaga

SEQ ID NO: 35218 - DNA, 38 bp, Artificial Sequence
  primer
gtaaaacgacggccagtaccatgagaaattgtgccctc

SEQ ID NO: 35219 - DNA, 40 bp, Artificial Sequence
  primer
gtaaaacgacggccagtgagtgaatggattccaatttgtg

SEQ ID NO: 35220 - DNA, 19 bp, Artificial Sequence
  primer
atgtgagccactgtgtccg

SEQ ID NO: 35221 - DNA, 35 bp, Artificial Sequence
  primer
gtaaaacgacggccagtgcgggaaagcaagaacag

SEQ ID NO: 35222 - DNA, 38 bp, Artificial Sequence
  primer
gtaaaacgacggccagtgatcccacgatgatttgtgtg

SEQ ID NO: 35223 - DNA, 41 bp, Artificial Sequence
  primer
gtaaaacgacggccagtgatttgctttgctacaatcagttc

SEQ ID NO: 35224 - DNA, 40 bp, Artificial Sequence
  primer
gtaaaacgacggccagtgaggagtagtgggacttaggagg

SEQ ID NO: 35225 - DNA, 20 bp, Artificial Sequence
  primer
cttgaagcgcaagtgaaacc

SEQ ID NO: 35226 - DNA, 36 bp, Artificial Sequence
  primer
gtaaaacgacggccagtctggcctgatccaaattgc

SEQ ID NO: 35227 - DNA, 21 bp, Artificial Sequence
  primer
agggtccagactccatctgag

SEQ ID NO: 35228 - DNA, 40 bp, Artificial Sequence
  primer
gtaaaacgacggccagtttcttggagagagcaaactcttg

SEQ ID NO: 35229 - DNA, 20 bp, Artificial Sequence
  primer
aaagccactggtcttcaggg

SEQ ID NO: 35230 - DNA, 22 bp, Artificial Sequence
  primer
aaggttctgagcagacaacagg

SEQ ID NO: 35231 - DNA, 21 bp, Artificial Sequence
  primer
tggaaactaatgcactccctg

SEQ ID NO: 35232 - DNA, 23 bp, Artificial Sequence
  primer
tgtggtttccctcataattgttg

SEQ ID NO: 35233 - DNA, 43 bp, Artificial Sequence
  primer
gtaaaacgacggccagtgggatgtgactagaatatttctggag

SEQ ID NO: 35234 - DNA, 40 bp, Artificial Sequence
  primer
gtaaaacgacggccagttttcaggctaccagtgtatttgc

SEQ ID NO: 35235 - DNA, 20 bp, Artificial Sequence
  primer
aaggcagttggcttcctctc

SEQ ID NO: 35236 - DNA, 42 bp, Artificial Sequence
  primer
gtaaaacgacggccagttcacttagctcagagtaataagccc

SEQ ID NO: 35237 - DNA, 21 bp, Artificial Sequence
  primer
ctcatggctgtgtattgtccc

SEQ ID NO: 35238 - DNA, 20 bp, Artificial Sequence
  primer
ttgatctcctgacctcgtga

SEQ ID NO: 35239 - DNA, 38 bp, Artificial Sequence
  primer
gtaaaacgacggccagttggcatgactttagatggctg

SEQ ID NO: 35240 - DNA, 22 bp, Artificial Sequence
  primer
ccaggtggtgtaagagaccaag

SEQ ID NO: 35241 - DNA, 20 bp, Artificial Sequence
  primer
tgtattgctgccctcaagtg

SEQ ID NO: 35242 - DNA, 23 bp, Artificial Sequence
  primer
aactccatcgtaaatcgagaagc

SEQ ID NO: 35243 - DNA, 21 bp, Artificial Sequence
  primer
atcccaataagcccttctgag

SEQ ID NO: 35244 - DNA, 20 bp, Artificial Sequence
  primer
agtttcagatggcaaatggc

SEQ ID NO: 35245 - DNA, 21 bp, Artificial Sequence
  primer
cacaatccaggccatgctaac

SEQ ID NO: 35246 - DNA, 21 bp, Artificial Sequence
  primer
tcccatggctttagcatattg

SEQ ID NO: 35247 - DNA, 23 bp, Artificial Sequence
  primer
cccaggtccagcttagagaatag

SEQ ID NO: 35248 - DNA, 22 bp, Artificial Sequence
  primer
aatgttgaaatcttgcactccc

SEQ ID NO: 35249 - DNA, 21 bp, Artificial Sequence
  primer
ctgagatgggatacctgggag

SEQ ID NO: 35250 - DNA, 21 bp, Artificial Sequence
  primer
cagctgtttatccagatgccc

SEQ ID NO: 35251 - DNA, 21 bp, Artificial Sequence
  primer
tctcaagggagcagctagagg

SEQ ID NO: 35252 - DNA, 19 bp, Artificial Sequence
  primer
tcagcaagacgctgctctg

SEQ ID NO: 35253 - DNA, 23 bp, Artificial Sequence
  primer
aactgtgagcactgtcttcaagc

SEQ ID NO: 35254 - DNA, 37 bp, Artificial Sequence
  primer
gtaaaacgacggccagtctggctgccaaattgttgtc

SEQ ID NO: 35255 - DNA, 21 bp, Artificial Sequence
  primer
agggcagaattgggtaaacac

SEQ ID NO: 35256 - DNA, 38 bp, Artificial Sequence
  primer
gtaaaacgacggccagtttgagggttaagcatcccaag

SEQ ID NO: 35257 - DNA, 21 bp, Artificial Sequence
  primer
ggcaaggtgagcttcattctc

SEQ ID NO: 35258 - DNA, 38 bp, Artificial Sequence
  primer
gtaaaacgacggccagttaaactggagccagcagattg

SEQ ID NO: 35259 - DNA, 39 bp, Artificial Sequence
  primer
gtaaaacgacggccagtgccgaagagttcatttatgcag

SEQ ID NO: 35260 - DNA, 38 bp, Artificial Sequence
  primer
gtaaaacgacggccagttgtgttgggtgacttggtttc

SEQ ID NO: 35261 - DNA, 38 bp, Artificial Sequence
  primer
gtaaaacgacggccagtgtccagatgggtacatcccag

SEQ ID NO: 35262 - DNA, 38 bp, Artificial Sequence
  primer
gtaaaacgacggccagtcaccgtgttgagtgagaagtg

SEQ ID NO: 35263 - DNA, 20 bp, Artificial Sequence
  primer
gtggaggcatctgtggtttc

SEQ ID NO: 35264 - DNA, 20 bp, Artificial Sequence
  primer
tgtatcccacctccatgtgc

SEQ ID NO: 35265 - DNA, 38 bp, Artificial Sequence
  primer
gtaaaacgacggccagtcaactctcgcttgcttctgtc

SEQ ID NO: 35266 - DNA, 37 bp, Artificial Sequence
  primer
gtaaaacgacggccagtctaattgagcctgcctgtgc

SEQ ID NO: 35267 - DNA, 18 bp, Artificial Sequence
  primer
ctgcgggactccactgtc

SEQ ID NO: 35268 - DNA, 37 bp, Artificial Sequence
  primer
gtaaaacgacggccagttcctggtatttcctcctggc

SEQ ID NO: 35269 - DNA, 38 bp, Artificial Sequence
  primer
gtaaaacgacggccagtgagaggagaatgccaggtgac

SEQ ID NO: 35270 - DNA, 37 bp, Artificial Sequence
  primer
gtaaaacgacggccagtatgaatatgcacgagccacc

SEQ ID NO: 35271 - DNA, 21 bp, Artificial Sequence
  primer
tgtctctcatgggattgttgg

SEQ ID NO: 35272 - DNA, 38 bp, Artificial Sequence
  primer
gtaaaacgacggccagtaatctggtccaatggaagcac

SEQ ID NO: 35273 - DNA, 21 bp, Artificial Sequence
  primer
ttctcctttcacttggccttg

SEQ ID NO: 35274 - DNA, 38 bp, Artificial Sequence
  primer
gtaaaacgacggccagtggagtggagaagagatttggg

SEQ ID NO: 35275 - DNA, 38 bp, Artificial Sequence
  primer
gtaaaacgacggccagtgtatttcccagggaggaaacc

SEQ ID NO: 35276 - DNA, 40 bp, Artificial Sequence
  primer
gtaaaacgacggccagtctgagtagttcaccttgacccag

SEQ ID NO: 35277 - DNA, 21 bp, Artificial Sequence
  primer
agcaggaagactcctctggtg

SEQ ID NO: 35278 - DNA, 38 bp, Artificial Sequence
  primer
gtaaaacgacggccagttgggtgtttctctttcccagt

SEQ ID NO: 35279 - DNA, 21 bp, Artificial Sequence
  primer
acacaatcaaggcgtctttgg

SEQ ID NO: 35280 - DNA, 38 bp, Artificial Sequence
  primer
gtaaaacgacggccagtgtttatggtgacccttggtgc

SEQ ID NO: 35281 - DNA, 37 bp, Artificial Sequence
  primer
gtaaaacgacggccagtcccttgttcctggctgtatg

SEQ ID NO: 35282 - DNA, 38 bp, Artificial Sequence
  primer
gtaaaacgacggccagtaggaaggtgattagcaagggc

SEQ ID NO: 35283 - DNA, 21 bp, Artificial Sequence
  primer
gtcttgtaccacaagccctgg

SEQ ID NO: 35284 - DNA, 38 bp, Artificial Sequence
  primer
gtaaaacgacggccagtgtcctgccattgttagggaag

SEQ ID NO: 35285 - DNA, 21 bp, Artificial Sequence
  primer
ggatgtttcattcatgctccc

SEQ ID NO: 35286 - DNA, 39 bp, Artificial Sequence
  primer
gtaaaacgacggccagttggatggagagacataagctcc

SEQ ID NO: 35287 - DNA, 37 bp, Artificial Sequence
  primer
gtaaaacgacggccagtttatggactagtgtgggcgg

SEQ ID NO: 35288 - DNA, 38 bp, Artificial Sequence
  primer
gtaaaacgacggccagtagttgtctgggtcaacaaggg

SEQ ID NO: 35289 - DNA, 38 bp, Artificial Sequence
  primer
gtaaaacgacggccagttttgtgcctacaggagaaggg

SEQ ID NO: 35290 - DNA, 22 bp, Artificial Sequence
  primer
gccgtatcaaggctgtatcttg

SEQ ID NO: 35291 - DNA, 37 bp, Artificial Sequence
  primer
gtaaaacgacggccagtcaaatggagccttctcctcc

SEQ ID NO: 35292 - DNA, 22 bp, Artificial Sequence
  primer
gcaggcttgcagctatctactc

SEQ ID NO: 35293 - DNA, 38 bp, Artificial Sequence
  primer
gtaaaacgacggccagttttcccatcagtccctctttc

SEQ ID NO: 35294 - DNA, 38 bp, Artificial Sequence
  primer
gtaaaacgacggccagtcttcctgctgctttgaacttg

SEQ ID NO: 35295 - DNA, 21 bp, Artificial Sequence
  primer
tattcctcgagctggataggc

SEQ ID NO: 35296 - DNA, 21 bp, Artificial Sequence
  primer
tgcaagttatacatgggcagg

SEQ ID NO: 35297 - DNA, 21 bp, Artificial Sequence
  primer
tcctttccctttctctcagcc

SEQ ID NO: 35298 - DNA, 38 bp, Artificial Sequence
  primer
gtaaaacgacggccagtcctctacctctgctcccttcc

SEQ ID NO: 35299 - DNA, 18 bp, Artificial Sequence
  primer
cccttcaactgctgtggg

SEQ ID NO: 35300 - DNA, 37 bp, Artificial Sequence
  primer
gtaaaacgacggccagtagggagggagagtggtgatg

SEQ ID NO: 35301 - DNA, 21 bp, Artificial Sequence
  primer
cctgctctacagcttgtgtgg

SEQ ID NO: 35302 - DNA, 21 bp, Artificial Sequence
  primer
attcatcgtggaggtacccag

SEQ ID NO: 35303 - DNA, 21 bp, Artificial Sequence
  primer
caggtgttcctctcttctcgg

SEQ ID NO: 35304 - DNA, 20 bp, Artificial Sequence
  primer
agggagagaggttcaggcag

SEQ ID NO: 35305 - DNA, 37 bp, Artificial Sequence
  primer
gtaaaacgacggccagtctttacccgtctccctcctg

SEQ ID NO: 35306 - DNA, 38 bp, Artificial Sequence
  primer
gtaaaacgacggccagtagcacctaccacagggatagc

SEQ ID NO: 35307 - DNA, 19 bp, Artificial Sequence
  primer
cgcaggcacctgtaatctc

SEQ ID NO: 35308 - DNA, 21 bp, Artificial Sequence
  primer
caccacaagttcagcaagacc

SEQ ID NO: 35309 - DNA, 38 bp, Artificial Sequence
  primer
gtaaaacgacggccagtgttgcttgtgtagcaaggcag

SEQ ID NO: 35310 - DNA, 21 bp, Artificial Sequence
  primer
cagctcctcagagcacagttg

SEQ ID NO: 35311 - DNA, 38 bp, Artificial Sequence
  primer
gtaaaacgacggccagtaaatggagactggaaaggtcg

SEQ ID NO: 35312 - DNA, 35 bp, Artificial Sequence
  primer
gtaaaacgacggccagtggagaggaagtgcggtcc

SEQ ID NO: 35313 - DNA, 39 bp, Artificial Sequence
  primer
gtaaaacgacggccagtgggctaatgtaggaccatttcc

SEQ ID NO: 35314 - DNA, 39 bp, Artificial Sequence
  primer
gtaaaacgacggccagtttatccagacatgagtgggtcc

SEQ ID NO: 35315 - DNA, 21 bp, Artificial Sequence
  primer
atagcaagtgccaaggtcctg

SEQ ID NO: 35316 - DNA, 22 bp, Artificial Sequence
  primer
cccactggaggtactaatgctg

SEQ ID NO: 35317 - DNA, 37 bp, Artificial Sequence
  primer
gtaaaacgacggccagtccttctcctcctctcccttg

SEQ ID NO: 35318 - DNA, 43 bp, Artificial Sequence
  primer
gtaaaacgacggccagttgtagatgttattgtgaccttgaagc

SEQ ID NO: 35319 - DNA, 38 bp, Artificial Sequence
  primer
gtaaaacgacggccagtgctgtatcgatgcaactcgtc

SEQ ID NO: 35320 - DNA, 40 bp, Artificial Sequence
  primer
gtaaaacgacggccagttcctgctaaagatgacaaagcat

SEQ ID NO: 35321 - DNA, 39 bp, Artificial Sequence
  primer
gtaaaacgacggccagtggctacaaataaagctgctgtg

SEQ ID NO: 35322 - DNA, 40 bp, Artificial Sequence
  primer
gtaaaacgacggccagttcaaataaccctcttgttctgga

SEQ ID NO: 35323 - DNA, 27 bp, Artificial Sequence
  primer
cctttgtgactcagtattaacctgttc

SEQ ID NO: 35324 - DNA, 39 bp, Artificial Sequence
  primer
gtaaaacgacggccagttgtgatgtttggatcactttcg

SEQ ID NO: 35325 - DNA, 40 bp, Artificial Sequence
  primer
gtaaaacgacggccagttggacatagtgtcaactgctcat

SEQ ID NO: 35326 - DNA, 21 bp, Artificial Sequence
  primer
cagcttggatgacaaagcaag

SEQ ID NO: 35327 - DNA, 21 bp, Artificial Sequence
  primer
aaaggtctgtcggttcagttg

SEQ ID NO: 35328 - DNA, 21 bp, Artificial Sequence
  primer
agcgcctctcagattgttatg

SEQ ID NO: 35329 - DNA, 39 bp, Artificial Sequence
  primer
gtaaaacgacggccagtcacccatcttcttaaccctgag

SEQ ID NO: 35330 - DNA, 22 bp, Artificial Sequence
  primer
ggaaacattgggttgaattgtc

SEQ ID NO: 35331 - DNA, 23 bp, Artificial Sequence
  primer
ttgtgtgagcctctcttgttagc

SEQ ID NO: 35332 - DNA, 25 bp, Artificial Sequence
  primer
tctagttgcaaatttagaccctcag

SEQ ID NO: 35333 - DNA, 21 bp, Artificial Sequence
  primer
cttcagcctggacaatgtagc

SEQ ID NO: 35334 - DNA, 47 bp, Artificial Sequence
  primer
gtaaaacgacggccagtagtatattactggtacatgaatcaaagtcc

SEQ ID NO: 35335 - DNA, 38 bp, Artificial Sequence
  primer
gtaaaacgacggccagttgagaggccaacttacgcttt

SEQ ID NO: 35336 - DNA, 21 bp, Artificial Sequence
  primer
cctctccgttagtcacagtgg

SEQ ID NO: 35337 - DNA, 38 bp, Artificial Sequence
  primer
gtaaaacgacggccagtctatgagggtgggcctaattg

SEQ ID NO: 35338 - DNA, 24 bp, Artificial Sequence
  primer
gaaatattgcacggtttacatttg

SEQ ID NO: 35339 - DNA, 21 bp, Artificial Sequence
  primer
tgggctacttgattagcttgg

SEQ ID NO: 35340 - DNA, 38 bp, Artificial Sequence
  primer
gtaaaacgacggccagttcacctgggtgaatatcaggc

SEQ ID NO: 35341 - DNA, 21 bp, Artificial Sequence
  primer
atgggaaagaattccgtcttg

SEQ ID NO: 35342 - DNA, 39 bp, Artificial Sequence
  primer
gtaaaacgacggccagtttcccaaggtaaccagtcattg

SEQ ID NO: 35343 - DNA, 21 bp, Artificial Sequence
  primer
ggaaagaagggcaattcaaag

SEQ ID NO: 35344 - DNA, 37 bp, Artificial Sequence
  primer
gtaaaacgacggccagttggatcacactcgtgcagtc

SEQ ID NO: 35345 - DNA, 20 bp, Artificial Sequence
  primer
ggctcattgattgagaacgg

SEQ ID NO: 35346 - DNA, 43 bp, Artificial Sequence
  primer
gtaaaacgacggccagttttaaatgatacaactaggaggcttt

SEQ ID NO: 35347 - DNA, 39 bp, Artificial Sequence
  primer
gtaaaacgacggccagttttccactttctgccataaacc

SEQ ID NO: 35348 - DNA, 39 bp, Artificial Sequence
  primer
gtaaaacgacggccagtagtggaggagattggagtgttc

SEQ ID NO: 35349 - DNA, 22 bp, Artificial Sequence
  primer
caggcttgggtggatctattac

SEQ ID NO: 35350 - DNA, 37 bp, Artificial Sequence
  primer
gtaaaacgacggccagtctggcagcatctttcagacc

SEQ ID NO: 35351 - DNA, 39 bp, Artificial Sequence
  primer
gtaaaacgacggccagtccatagtgtttgccatctttcc

SEQ ID NO: 35352 - DNA, 21 bp, Artificial Sequence
  primer
atcatccagtgtgtggagctg

SEQ ID NO: 35353 - DNA, 38 bp, Artificial Sequence
  primer
gtaaaacgacggccagtgtgacagagcacgaccctatc

SEQ ID NO: 35354 - DNA, 38 bp, Artificial Sequence
  primer
gtaaaacgacggccagtgaatgtggctaccactccagc

SEQ ID NO: 35355 - DNA, 38 bp, Artificial Sequence
  primer
gtaaaacgacggccagtgaccctaagtgtgaagccacc

SEQ ID NO: 35356 - DNA, 39 bp, Artificial Sequence
  primer
gtaaaacgacggccagtaaacacttgtgagctcgtagcc

SEQ ID NO: 35357 - DNA, 38 bp, Artificial Sequence
  primer
gtaaaacgacggccagtattgtgtttggcagaaggtgg

SEQ ID NO: 35358 - DNA, 21 bp, Artificial Sequence
  primer
tgagattgtgcctttgcagtc

SEQ ID NO: 35359 - DNA, 21 bp, Artificial Sequence
  primer
gaggtatggatgtggacaggg

SEQ ID NO: 35360 - DNA, 38 bp, Artificial Sequence
  primer
gtaaaacgacggccagttttcccgtgatggatagttgc

SEQ ID NO: 35361 - DNA, 21 bp, Artificial Sequence
  primer
gagttctgagtgtgctgtggg

SEQ ID NO: 35362 - DNA, 21 bp, Artificial Sequence
  primer
ctcctgtgtgtcactctgctg

SEQ ID NO: 35363 - DNA, 38 bp, Artificial Sequence
  primer
gtaaaacgacggccagtgtgctaaacaggagccctttc

SEQ ID NO: 35364 - DNA, 21 bp, Artificial Sequence
  primer
cttggtccctagagcaacctg

SEQ ID NO: 35365 - DNA, 21 bp, Artificial Sequence
  primer
ccaaaccagtatcaggcacac

SEQ ID NO: 35366 - DNA, 37 bp, Artificial Sequence
  primer
gtaaaacgacggccagtttggaggagtccttcccttc

SEQ ID NO: 35367 - DNA, 24 bp, Artificial Sequence
  primer
tgctttcccaagactttgctatac

SEQ ID NO: 35368 - DNA, 21 bp, Artificial Sequence
  primer
gaagtgaaatggtcatgcagc

SEQ ID NO: 35369 - DNA, 21 bp, Artificial Sequence
  primer
acagaatgggaggaattgagc

SEQ ID NO: 35370 - DNA, 38 bp, Artificial Sequence
  primer
gtaaaacgacggccagtgtcactggtgcgatcagaaag

SEQ ID NO: 35371 - DNA, 21 bp, Artificial Sequence
  primer
tctttccatggtctcaagcac

SEQ ID NO: 35372 - DNA, 38 bp, Artificial Sequence
  primer
gtaaaacgacggccagtttcccagtcacaagcacagtc

SEQ ID NO: 35373 - DNA, 38 bp, Artificial Sequence
  primer
gtaaaacgacggccagtcccaaaggtaccgtgtactcc

SEQ ID NO: 35374 - DNA, 38 bp, Artificial Sequence
  primer
gtaaaacgacggccagttggcaggcctcagtagtaaag

SEQ ID NO: 35375 - DNA, 37 bp, Artificial Sequence
  primer
gtaaaacgacggccagtaccattcaagtggatggcac

SEQ ID NO: 35376 - DNA, 39 bp, Artificial Sequence
  primer
gtaaaacgacggccagtaagtaacacaaggtgcctgctc

SEQ ID NO: 35377 - DNA, 38 bp, Artificial Sequence
  primer
gtaaaacgacggccagtgtggagtctagtgccactccc

SEQ ID NO: 35378 - DNA, 38 bp, Artificial Sequence
  primer
gtaaaacgacggccagtaccttccactccactttcacc

SEQ ID NO: 35379 - DNA, 21 bp, Artificial Sequence
  primer
cgagttcaggctcttccctac

SEQ ID NO: 35380 - DNA, 38 bp, Artificial Sequence
  primer
gtaaaacgacggccagtatggcaagtctggtcatttcc

SEQ ID NO: 35381 - DNA, 37 bp, Artificial Sequence
  primer
gtaaaacgacggccagtatccagctcattccagggtc

SEQ ID NO: 35382 - DNA, 20 bp, Artificial Sequence
  primer
acccagcagctctttgagtg

SEQ ID NO: 35383 - DNA, 38 bp, Artificial Sequence
  primer
gtaaaacgacggccagttggtcacttgctgtgtgactg

SEQ ID NO: 35384 - DNA, 21 bp, Artificial Sequence
  primer
cagagctcgcccttctacttc

SEQ ID NO: 35385 - DNA, 21 bp, Artificial Sequence
  primer
ggctgcagtgagctatgattg

SEQ ID NO: 35386 - DNA, 39 bp, Artificial Sequence
  primer
gtaaaacgacggccagtctgcatgtgctaacttccattc

SEQ ID NO: 35387 - DNA, 38 bp, Artificial Sequence
  primer
gtaaaacgacggccagtgaagcctgacttctgttgcag

SEQ ID NO: 35388 - DNA, 38 bp, Artificial Sequence
  primer
gtaaaacgacggccagtctctatagcctggtgggaacg

SEQ ID NO: 35389 - DNA, 38 bp, Artificial Sequence
  primer
gtaaaacgacggccagtggtccattggttgccatagag

SEQ ID NO: 35390 - DNA, 23 bp, Artificial Sequence
  primer
ccctaaagctgtcaataggttgg

SEQ ID NO: 35391 - DNA, 21 bp, Artificial Sequence
  primer
gccttgatctcactctcccac

SEQ ID NO: 35392 - DNA, 21 bp, Artificial Sequence
  primer
tatcccagttgtcagcagagg

SEQ ID NO: 35393 - DNA, 21 bp, Artificial Sequence
  primer
tgggtaacatagccaagaccc

SEQ ID NO: 35394 - DNA, 38 bp, Artificial Sequence
  primer
gtaaaacgacggccagttataggaggtgatggtggcag

SEQ ID NO: 35395 - DNA, 38 bp, Artificial Sequence
  primer
gtaaaacgacggccagtttgctatgcctgaagagttgc

SEQ ID NO: 35396 - DNA, 38 bp, Artificial Sequence
  primer
gtaaaacgacggccagtagccaccatggaatctgaaac

SEQ ID NO: 35397 - DNA, 40 bp, Artificial Sequence
  primer
gtaaaacgacggccagtttgctcaggcagtgttaattctc

SEQ ID NO: 35398 - DNA, 37 bp, Artificial Sequence
  primer
gtaaaacgacggccagtgcacacagaccttactgggc

SEQ ID NO: 35399 - DNA, 38 bp, Artificial Sequence
  primer
gtaaaacgacggccagtctgtctcagcctcccaaattc

SEQ ID NO: 35400 - DNA, 21 bp, Artificial Sequence
  primer
tgctgctatagaaagggaggc

SEQ ID NO: 35401 - DNA, 38 bp, Artificial Sequence; identical to SEQ ID NO: 35394
  primer

SEQ ID NO: 35402 - DNA, 39 bp, Artificial Sequence
  primer
gtaaaacgacggccagtttcaattgatgccaacagaaac

SEQ ID NO: 35403 - DNA, 21 bp, Artificial Sequence
  primer
tagaaggtatggtccgtgtgg

SEQ ID NO: 35404 - DNA, 36 bp, Artificial Sequence
  primer
gtaaaacgacggccagtgggagatctgacagctgcg

SEQ ID NO: 35405 - DNA, 23 bp, Artificial Sequence
  primer
actctactccacagattgaacgg

SEQ ID NO: 35406 - DNA, 21 bp, Artificial Sequence
  primer
acccaaatggaggatgtgttc

SEQ ID NO: 35407 - DNA, 36 bp, Artificial Sequence
  primer
gtaaaacgacggccagtaaagctgcggcattgtctc

SEQ ID NO: 35408 - DNA, 37 bp, Artificial Sequence
  primer
gtaaaacgacggccagtgggacttaagcccatgttgc

SEQ ID NO: 35409 - DNA, 39 bp, Artificial Sequence
  primer
gtaaaacgacggccagtcagcctatcctgactaaggtgg

SEQ ID NO: 35410 - DNA, 21 bp, Artificial Sequence
  primer
ttagaggctcaacaacccagg

SEQ ID NO: 35411 - DNA, 18 bp, Artificial Sequence
  primer
ggcgaagacagagcgagg

SEQ ID NO: 35412 - DNA, 18 bp, Artificial Sequence
  primer
acctgagcctggaggtgg

SEQ ID NO: 35413 - DNA, 22 bp, Artificial Sequence
  primer
ttggtggacaggaaatgtgtag

SEQ ID NO: 35414 - DNA, 20 bp, Artificial Sequence
  primer
gtgtggacgaaagaggcttg

SEQ ID NO: 35415 - DNA, 38 bp, Artificial Sequence
  primer
gtaaaacgacggccagttcctgttactgaaatgcaccg

SEQ ID NO: 35416 - DNA, 38 bp, Artificial Sequence
  primer
gtaaaacgacggccagtttcgaggtttaacttggcctc

SEQ ID NO: 35417 - DNA, 38 bp, Artificial Sequence
  primer
gtaaaacgacggccagtggaacctcacgcgatagaaac

SEQ ID NO: 35418 - DNA, 36 bp, Artificial Sequence
  primer
gtaaaacgacggccagtaaagttgggcgggaaagtc

SEQ ID NO: 35419 - DNA, 37 bp, Artificial Sequence
  primer
gtaaaacgacggccagtcctctcttgccttctgggag

SEQ ID NO: 35420 - DNA, 21 bp, Artificial Sequence
  primer
ggtgagaatgagattccaggg

SEQ ID NO: 35421 - DNA, 39 bp, Artificial Sequence
  primer
gtaaaacgacggccagtgcgacccagtgacagagtttag

SEQ ID NO: 35422 - DNA, 38 bp, Artificial Sequence
  primer
gtaaaacgacggccagttgaagctactcaccctgtccc

SEQ ID NO: 35423 - DNA, 21 bp, Artificial Sequence
  primer
cctcctgcgtctgactttagg

SEQ ID NO: 35424 - DNA, 20 bp, Artificial Sequence
  primer
gactacaattcccagcgagc

SEQ ID NO: 35425 - DNA, 46 bp, Artificial Sequence
  primer
gtaaaacgacggccagtcctttggatctgtaacattattatcattg

SEQ ID NO: 35426 - DNA, 44 bp, Artificial Sequence
  primer
gtaaaacgacggccagttgaattccaaaccttaatattacttgc

SEQ ID NO: 35427 - DNA, 23 bp, Artificial Sequence
  primer
gaaatgctctgcattctgagttc

SEQ ID NO: 35428 - DNA, 21 bp, Artificial Sequence
  primer
ggcagagtgaaaccctgactc

SEQ ID NO: 35429 - DNA, 39 bp, Artificial Sequence
  primer
gtaaaacgacggccagttggagggtgacatttcatgtat

SEQ ID NO: 35430 - DNA, 23 bp, Artificial Sequence
  primer
gatgactcgtttgtgatttggac

SEQ ID NO: 35431 - DNA, 36 bp, Artificial Sequence
  primer
gtaaaacgacggccagtcctgttggttgctgtctgc

SEQ ID NO: 35432 - DNA, 38 bp, Artificial Sequence
  primer
gtaaaacgacggccagtgcaggctggttcagtgataag

SEQ ID NO: 35433 - DNA, 35 bp, Artificial Sequence
  primer
gtaaaacgacggccagtggccatggatgtgaccag

SEQ ID NO: 35434 - DNA, 21 bp, Artificial Sequence
  primer
gatatggccagccagaaacag

SEQ ID NO: 35435 - DNA, 38 bp, Artificial Sequence
  primer
gtaaaacgacggccagtctgtctacagagcaggcttgg

SEQ ID NO: 35436 - DNA, 38 bp, Artificial Sequence
  primer
gtaaaacgacggccagtcagtttctcagggccctttac

SEQ ID NO: 35437 - DNA, 39 bp, Artificial Sequence
  primer
gtaaaacgacggccagtgatcttgaaatccaaatgctcg

SEQ ID NO: 35438 - DNA, 38 bp, Artificial Sequence
  primer
gtaaaacgacggccagtgcctggagattgttcgaagtc

SEQ ID NO: 35439 - DNA, 38 bp, Artificial Sequence
  primer
gtaaaacgacggccagtgtgttcatcaagggaacccag

SEQ ID NO: 35440 - DNA, 38 bp, Artificial Sequence
  primer
gtaaaacgacggccagtcttccacatcaacagctccag

SEQ ID NO: 35441 - DNA, 21 bp, Artificial Sequence
  primer
ttgcacagtgaaggctctcag

SEQ ID NO: 35442 - DNA, 38 bp, Artificial Sequence
  primer
gtaaaacgacggccagtttcagggaggcctttagtctg

SEQ ID NO: 35443 - DNA, 21 bp, Artificial Sequence
  primer
gactacctgccaggctctcac

SEQ ID NO: 35444 - DNA, 39 bp, Artificial Sequence
  primer
gtaaaacgacggccagttgttggcatttcactcacattc

SEQ ID NO: 35445 - DNA, 38 bp, Artificial Sequence
  primer
gtaaaacgacggccagtgttcttccttgacaccatccc

SEQ ID NO: 35446 - DNA, 21 bp, Artificial Sequence
  primer
ttaagcgggtttcttgactgc

SEQ ID NO: 35447 - DNA, 21 bp, Artificial Sequence
  primer
tgtaggcaggtctgttcaacg

SEQ ID NO: 35448 - DNA, 37 bp, Artificial Sequence
  primer
gtaaaacgacggccagttgatttgcccaggcttacac

SEQ ID NO: 35449 - DNA, 38 bp, Artificial Sequence
  primer
gtaaaacgacggccagtgtgttgccttgtaccaccaag

SEQ ID NO: 35450 - DNA, 38 bp, Artificial Sequence
  primer
gtaaaacgacggccagtaggaacagctctctgtagggc

SEQ ID NO: 35451 - DNA, 38 bp, Artificial Sequence
  primer
gtaaaacgacggccagtgagaggcgtgggattgtttag

SEQ ID NO: 35452 - DNA, 38 bp, Artificial Sequence
  primer
gtaaaacgacggccagtgctgtgtctacgaaacctccc

SEQ ID NO: 35453 - DNA, 37 bp, Artificial Sequence
  primer
gtaaaacgacggccagtacatcccacctgctctgttc

SEQ ID NO: 35454 - DNA, 38 bp, Artificial Sequence
  primer
gtaaaacgacggccagtttggtcttgctggtattggtc

SEQ ID NO: 35455 - DNA, 21 bp, Artificial Sequence
  primer
gtggtctacagcatcgtctgc

SEQ ID NO: 35456 - DNA, 22 bp, Artificial Sequence
  primer
cagcaacttccttctcatccac

SEQ ID NO: 35457 - DNA, 38 bp, Artificial Sequence
  primer
gtaaaacgacggccagtgtcctcatcatcacagcttgc

SEQ ID NO: 35458 - DNA, 21 bp, Artificial Sequence
  primer
tggagcaccacatggatttag

SEQ ID NO: 35459 - DNA, 21 bp, Artificial Sequence
  primer
ttcgactactcagagccaggg

SEQ ID NO: 35460 - DNA, 21 bp, Artificial Sequence
  primer
acgtgcaaagtcacacacctc

SEQ ID NO: 35461 - DNA, 38 bp, Artificial Sequence
  primer
gtaaaacgacggccagtcaacaatgagacctactgccg

SEQ ID NO: 35462 - DNA, 21 bp, Artificial Sequence
  primer
cccttctccattatcgctgtc

SEQ ID NO: 35463 - DNA, 21 bp, Artificial Sequence
  primer
cacacccttaagcaggtctcc

SEQ ID NO: 35464 - DNA, 21 bp, Artificial Sequence
  primer
gtctctggctcctggattctg

SEQ ID NO: 35465 - DNA, 20 bp, Artificial Sequence
  primer
gactgccgctacctttctgg

SEQ ID NO: 35466 - DNA, 37 bp, Artificial Sequence
  primer
gtaaaacgacggccagttttccgttgtttgttccctg

SEQ ID NO: 35467 - DNA, 38 bp, Artificial Sequence
  primer
gtaaaacgacggccagtttcatgtcttctgatgcccag

SEQ ID NO: 35468 - DNA, 21 bp, Artificial Sequence
  primer
aggatgaggtggttgggttag

SEQ ID NO: 35469 - DNA, 21 bp, Artificial Sequence
  primer
tgggagtcacctctgcactac

SEQ ID NO: 35470 - DNA, 38 bp, Artificial Sequence
  primer
gtaaaacgacggccagtaggatctaaggctcccaatcc

SEQ ID NO: 35471 - DNA, 21 bp, Artificial Sequence
  primer
ccttctccaagttccatcagc

SEQ ID NO: 35472 - DNA, 20 bp, Artificial Sequence
  primer
gccattggagaacacgagag

SEQ ID NO: 35473 - DNA, 21 bp, Artificial Sequence
  primer
cgctggctatttgagacaaag

SEQ ID NO: 35474 - DNA, 38 bp, Artificial Sequence
  primer
gtaaaacgacggccagtagggtaccaggatgctctttg

SEQ ID NO: 35475 - DNA, 21 bp, Artificial Sequence
  primer
gtgaagctcttccaaacggag

SEQ ID NO: 35476 - DNA, 21 bp, Artificial Sequence
  primer
cagaccttatcccacctggtc

SEQ ID NO: 35477 - DNA, 21 bp, Artificial Sequence
  primer
attggacagggtgaggttctg

SEQ ID NO: 35478 - DNA, 38 bp, Artificial Sequence
  primer
gtaaaacgacggccagtggtggatgtttgagacacagc

SEQ ID NO: 35479 - DNA, 21 bp, Artificial Sequence
  primer
cagaggtcacagatcccacag

SEQ ID NO: 35480 - DNA, 38 bp, Artificial Sequence
  primer
gtaaaacgacggccagttctttgagaccgagcctcttc

SEQ ID NO: 35481 - DNA, 21 bp, Artificial Sequence
  primer
caggcaagaaggaagaacagg

SEQ ID NO: 35482 - DNA, 18 bp, Artificial Sequence
  primer
agatgtggaccagcaggg

SEQ ID NO: 35483 - DNA, 38 bp, Artificial Sequence
  primer
gtaaaacgacggccagtgactgcctactctctgcagcc

SEQ ID NO: 35484 - DNA, 38 bp, Artificial Sequence
  primer
gtaaaacgacggccagtggccagctgcatagataaagg

SEQ ID NO: 35485 - DNA, 19 bp, Artificial Sequence
  primer
aacagctgaagcccagagc

SEQ ID NO: 35486 - DNA, 38 bp, Artificial Sequence
  primer
gtaaaacgacggccagtggtcagtagggaagagcaagc

SEQ ID NO: 35487 - DNA, 21 bp, Artificial Sequence
  primer
cccataatgcctttgttcctc

SEQ ID NO: 35488 - DNA, 37 bp, Artificial Sequence
  primer
gtaaaacgacggccagtcccttgcctctatctcccag

SEQ ID NO: 35489 - DNA, 38 bp, Artificial Sequence
  primer
gtaaaacgacggccagtgagatacagccatccctcagc

SEQ ID NO: 35490 - DNA, 21 bp, Artificial Sequence
  primer
gaaaccagaaagagctccagg

SEQ ID NO: 35491 - DNA, 35 bp, Artificial Sequence
  primer
gtaaaacgacggccagtagtggagcaggcctttgg

SEQ ID NO: 35492 - DNA, 38 bp, Artificial Sequence
  primer
gtaaaacgacggccagtgcactcagctccatgtctagc

SEQ ID NO: 35493 - DNA, 38 bp, Artificial Sequence
  primer
gtaaaacgacggccagtactgaggcccagagtcaagtc

SEQ ID NO: 35494 - DNA, 21 bp, Artificial Sequence
  primer
tttaagggcaaccctgatgtc

SEQ ID NO: 35495 - DNA, 38 bp, Artificial Sequence
  primer
gtaaaacgacggccagttttaagagtcaccctgggagc

SEQ ID NO: 35496 - DNA, 22 bp, Artificial Sequence
  primer
gcttgaaggagatgaccatgag

SEQ ID NO: 35497 - DNA, 46 bp, Artificial Sequence
  primer
gtaaaacgacggccagtttgttaaagacatactgaaataatggtgt

SEQ ID NO: 35498 - DNA, 18 bp, Artificial Sequence
  primer
gccaacacccaggaagac

SEQ ID NO: 35499 - DNA, 21 bp, Artificial Sequence
  primer
ttcctcttcggatgtcaattc

SEQ ID NO: 35500 - DNA, 38 bp, Artificial Sequence
  primer
gtaaaacgacggccagtatgcccagccataatttcttc

SEQ ID NO: 35501 - DNA, 38 bp, Artificial Sequence
  primer
gtaaaacgacggccagtaggaagcctctgccactacac

SEQ ID NO: 35502 - DNA, 38 bp, Artificial Sequence
  primer
gtaaaacgacggccagtcacttcttgcgtttcaaccag

SEQ ID NO: 35503 - DNA, 35 bp, Artificial Sequence
  primer
gtaaaacgacggccagtagatgtgcaacaagcccg

SEQ ID NO: 35504 - DNA, 21 bp, Artificial Sequence
  primer
tcaacaatggctctcctgatg

SEQ ID NO: 35505 - DNA, 21 bp, Artificial Sequence
  primer
ttggacagcttcattcagtgg

SEQ ID NO: 35506 - DNA, 21 bp, Artificial Sequence
  primer
gtaagaacagcacggtggatg

SEQ ID NO: 35507 - DNA, 21 bp, Artificial Sequence
  primer
tttgaaacccaacctttggag

SEQ ID NO: 35508 - DNA, 23 bp, Artificial Sequence
  primer
caacgtgaggagataataggtgg

SEQ ID NO: 35509 - DNA, 38 bp, Artificial Sequence
  primer
gtaaaacgacggccagtttgaaacccaacctctggaag

SEQ ID NO: 35510 - DNA, 21 bp, Artificial Sequence
  primer
cagtccagcaagaagaaatcg

SEQ ID NO: 35511 - DNA, 38 bp, Artificial Sequence
  primer
gtaaaacgacggccagtggctctttgaaactcagccac

SEQ ID NO: 35512 - DNA, 38 bp, Artificial Sequence
  primer
gtaaaacgacggccagtaacaggaggagatccaaggtg

SEQ ID NO: 35513 - DNA, 22 bp, Artificial Sequence
  primer
ggtgatgaatgtgttaagacgg

SEQ ID NO: 35514 - DNA, 38 bp, Artificial Sequence
  primer
gtaaaacgacggccagtgaatgctctttgaaacccagc

SEQ ID NO: 35515 - DNA, 39 bp, Artificial Sequence
  primer
gtaaaacgacggccagtgaccatatacaaggtggcaatg

SEQ ID NO: 35516 - DNA, 39 bp, Artificial Sequence
  primer
gtaaaacgacggccagtggatgaactgagaggagaaggg

SEQ ID NO: 35517 - DNA, 22 bp, Artificial Sequence
  primer
gacacaattgagcgtgaagaag

SEQ ID NO: 35518 - DNA, 22 bp, Artificial Sequence
  primer
gatgcctctgagagaggaaatg

SEQ ID NO: 35519 - DNA, 38 bp, Artificial Sequence
  primer
gtaaaacgacggccagtcattggtggtgatgttgaagg

SEQ ID NO: 35520 - DNA, 25 bp, Artificial Sequence
  primer
cgagcctcagagtacatttggtaag

SEQ ID NO: 35521 - DNA, 38 bp, Artificial Sequence
  primer
gtaaaacgacggccagttcaaccctaaattccctcagc

SEQ ID NO: 35522 - DNA, 39 bp, Artificial Sequence
  primer
gtaaaacgacggccagtgagcttctcaaagatgacctgg

SEQ ID NO: 35523 - DNA, 20 bp, Artificial Sequence
  primer
gctaaagctgtgatggcagg

SEQ ID NO: 35524 - DNA, 37 bp, Artificial Sequence
  primer
gtaaaacgacggccagtcaaagccaggtccatttgag

SEQ ID NO: 35525 - DNA, 39 bp, Artificial Sequence
  primer
gtaaaacgacggccagtcccaaaggcactgtaaagattg

SEQ ID NO: 35526 - DNA, 21 bp, Artificial Sequence
  primer
agaatcagacagggcagtgag

SEQ ID NO: 35527 - DNA, 21 bp, Artificial Sequence
  primer
gatacacaaagctccaagccc

SEQ ID NO: 35528 - DNA, 21 bp, Artificial Sequence
  primer
aagcgggagactgatgttcac

SEQ ID NO: 35529 - DNA, 21 bp, Artificial Sequence
  primer
cctccacctcctttgatgatg

SEQ ID NO: 35530 - DNA, 21 bp, Artificial Sequence
  primer
aaagccagcacatctcctttc

SEQ ID NO: 35531 - DNA, 38 bp, Artificial Sequence
  primer
gtaaaacgacggccagtaaagttgaactggcaacctcc

SEQ ID NO: 35532 - DNA, 21 bp, Artificial Sequence
  primer
gcccaggctctcaaagtaatg

SEQ ID NO: 35533 - DNA, 20 bp, Artificial Sequence
  primer
ccaaagcaaaccaatttccc

SEQ ID NO: 35534 - DNA, 23 bp, Artificial Sequence
  primer
tgaagcaagcactgaatgtagtc

SEQ ID NO: 35535 - DNA, 38 bp, Artificial Sequence
  primer
gtaaaacgacggccagttttagcggatctgacagaggg

SEQ ID NO: 35536 - DNA, 39 bp, Artificial Sequence
  primer
gtaaaacgacggccagtcagcaaacacaaatacagaccg

SEQ ID NO: 35537 - DNA, 21 bp, Artificial Sequence
  primer
cctctgtgaaagaatcccagc

SEQ ID NO: 35538 - DNA, 21 bp, Artificial Sequence
  primer
tcagacagccatgatgtcctc

SEQ ID NO: 35539 - DNA, 21 bp, Artificial Sequence
  primer
agaacgagctttctcagtccc

SEQ ID NO: 35540 - DNA, 18 bp, Artificial Sequence
  primer
ccaagaaggcccatgtcg

SEQ ID NO: 35541 - DNA, 38 bp, Artificial Sequence
  primer
gtaaaacgacggccagtcatgtctcctgcaacacttcg

SEQ ID NO: 35542 - DNA, 21 bp, Artificial Sequence
  primer
attccactgatcacatggtgc

SEQ ID NO: 35543 - DNA, 21 bp, Artificial Sequence
  primer
gatggttcagggaatttgagc

SEQ ID NO: 35544 - DNA, 21 bp, Artificial Sequence
  primer
tcacatagctcagaagctggc

SEQ ID NO: 35545 - DNA, 37 bp, Artificial Sequence
  primer
gtaaaacgacggccagtccaccatcctctctggtgtg

SEQ ID NO: 35546 - DNA, 21 bp, Artificial Sequence
  primer
gtcaaagcctgtcctctttgc

SEQ ID NO: 35547 - DNA, 39 bp, Artificial Sequence
  primer
gtaaaacgacggccagtcatggatggataatctccaagg

SEQ ID NO: 35548 - DNA, 22 bp, Artificial Sequence
  primer
tgagatgaactgaatgtggagc

SEQ ID NO: 35549 - DNA, 38 bp, Artificial Sequence
  primer
gtaaaacgacggccagtggctcttcttgtacttggccc

SEQ ID NO: 35550 - DNA, 21 bp, Artificial Sequence
  primer
ctactgcatgggatagggtgg

SEQ ID NO: 35551 - DNA, 21 bp, Artificial Sequence
  primer
agaagctgctgctcttcttgg

SEQ ID NO: 35552 - DNA, 20 bp, Artificial Sequence
  primer
acagggctggagagaagctg

SEQ ID NO: 35553 - DNA, 38 bp, Artificial Sequence
  primer
gtaaaacgacggccagtctgcctccaaatctcacactc

SEQ ID NO: 35554 - DNA, 38 bp, Artificial Sequence
  primer
gtaaaacgacggccagtagaaacctgtttgagcaaggc

SEQ ID NO: 35555 - DNA, 21 bp, Artificial Sequence
  primer
ctggttcaccaccctgaaatc

SEQ ID NO: 35556 - DNA, 38 bp, Artificial Sequence
  primer
gtaaaacgacggccagtcatcctggaagcagaggtttg

SEQ ID NO: 35557 - DNA, 38 bp, Artificial Sequence
  primer
gtaaaacgacggccagttcagaaatgcaccatctttgg

SEQ ID NO: 35558 - DNA, 21 bp, Artificial Sequence
  primer
ttcccatgatgtcatcttccc

SEQ ID NO: 35559 - DNA, 38 bp, Artificial Sequence
  primer
gtaaaacgacggccagtacagacagacagcacctggag

SEQ ID NO: 35560 - DNA, 39 bp, Artificial Sequence
  primer
gtaaaacgacggccagttggaaactttacagctggtcac

SEQ ID NO: 35561 - DNA, 38 bp, Artificial Sequence
  primer
gtaaaacgacggccagtgtgatgccacataaaccatgc

SEQ ID NO: 35562 - DNA, 38 bp, Artificial Sequence
  primer
gtaaaacgacggccagtgtgacctgctcaaagggaaac

SEQ ID NO: 35563 - DNA, 20 bp, Artificial Sequence
  primer
cacaccagggaccacatttc

SEQ ID NO: 35564 - DNA, 38 bp, Artificial Sequence
  primer
gtaaaacgacggccagtgccttctatttaaagtcgcgg

SEQ ID NO: 35565 - DNA, 21 bp, Artificial Sequence
  primer
ttccatggtgacagtccaaag

SEQ ID NO: 35566 - DNA, 19 bp, Artificial Sequence
  primer
catcattacgccggaaagg

SEQ ID NO: 35567 - DNA, 21 bp, Artificial Sequence
  primer
agccaggtactaaccacggag

SEQ ID NO: 35568 - DNA, 39 bp, Artificial Sequence
  primer
gtaaaacgacggccagtgaccacttcaaatacacctccg

SEQ ID NO: 35569 - DNA, 37 bp, Artificial Sequence
  primer
gtaaaacgacggccagttatggaacattgccaaaggg

SEQ ID NO: 35570 - DNA, 38 bp, Artificial Sequence
  primer
gtaaaacgacggccagtgcactctccaaaggatcagag

SEQ ID NO: 35571 - DNA, 21 bp, Artificial Sequence
  primer
tcacagtcagtgccacaacag

SEQ ID NO: 35572 - DNA, 21 bp, Artificial Sequence
  primer
attccatttctctggaggcag

SEQ ID NO: 35573 - DNA, 37 bp, Artificial Sequence
  primer
gtaaaacgacggccagtccctgaagtggagcacaaag

SEQ ID NO: 35574 - DNA, 21 bp, Artificial Sequence
  primer
agcaagaaggtgagccagttc

SEQ ID NO: 35575 - DNA, 22 bp, Artificial Sequence
  primer
ggcctcagaaagtgggtgttac

SEQ ID NO: 35576 - DNA, 21 bp, Artificial Sequence
  primer
atcgtttactccagctgtggc

SEQ ID NO: 35577 - DNA, 22 bp, Artificial Sequence
  primer
ctcaatgcaacacaggaatctc

SEQ ID NO: 35578 - DNA, 21 bp, Artificial Sequence
  primer
accacacacaaccgagatgac

SEQ ID NO: 35579 - DNA, 38 bp, Artificial Sequence
  primer
gtaaaacgacggccagtgtaccaccatatgcaacaccg

SEQ ID NO: 35580 - DNA, 21 bp, Artificial Sequence
  primer
tcacaagtttcaatccctccc

SEQ ID NO: 35581 - DNA, 21 bp, Artificial Sequence
  primer
gccagagattccaacaacctc

SEQ ID NO: 35582 - DNA, 38 bp, Artificial Sequence
  primer
gtaaaacgacggccagttttacctgattcagtccctgc

SEQ ID NO: 35583 - DNA, 21 bp, Artificial Sequence
  primer
gcctccaaatgttccagagtc

SEQ ID NO: 35584 - DNA, 21 bp, Artificial Sequence
  primer
aggtgcttctcccattgaaac

SEQ ID NO: 35585 - DNA, 21 bp, Artificial Sequence
  primer
aaagctgggttgccagtaatc

SEQ ID NO: 35586 - DNA, 21 bp, Artificial Sequence
  primer
gagcttccactcagcctatgg

SEQ ID NO: 35587 - DNA, 21 bp, Artificial Sequence
  primer
aacaagatgttgctttggcag

SEQ ID NO: 35588 - DNA, 40 bp, Artificial Sequence
  primer
gtaaaacgacggccagtgagagctttgtgcatcttctacg

SEQ ID NO: 35589 - DNA, 38 bp, Artificial Sequence
  primer
gtaaaacgacggccagtcaacccagaagaatttcagcc

SEQ ID NO: 35590 - DNA, 20 bp, Artificial Sequence
  primer
cctgcggatgtcaaagaaac

SEQ ID NO: 35591 - DNA, 21 bp, Artificial Sequence
  primer
aggctgctgtgtccagtaagg

SEQ ID NO: 35592 - DNA, 38 bp, Artificial Sequence
  primer
gtaaaacgacggccagtaagctggctgaagaaccaaag

SEQ ID NO: 35593 - DNA, 21 bp, Artificial Sequence
  primer
agggaaagaaaccatcacctg

SEQ ID NO: 35594 - DNA, 21 bp, Artificial Sequence
  primer
acctacacaaccaaaggtggc

SEQ ID NO: 35595 - DNA, 21 bp, Artificial Sequence
  primer
cctgaaggtacaattcccacc

SEQ ID NO: 35596 - DNA, 38 bp, Artificial Sequence
  primer
gtaaaacgacggccagtaactgctgatgaacccagagg

SEQ ID NO: 35597 - DNA, 21 bp, Artificial Sequence
  primer
atcagcttcctccaactttgc

SEQ ID NO: 35598 - DNA, 43 bp, Artificial Sequence
  primer
gtaaaacgacggccagttgaaatagggaagacacaaattacac

SEQ ID NO: 35599 - DNA, 24 bp, Artificial Sequence
  primer
tcagccttattctgtgaatgtagc

SEQ ID NO: 35600 - DNA, 38 bp, Artificial Sequence
  primer
gtaaaacgacggccagtaggctcacccagaaatcagag

SEQ ID NO: 35601 - DNA, 38 bp, Artificial Sequence
  primer
gtaaaacgacggccagttggctctttcttgtcgtgatg

SEQ ID NO: 35602 - DNA, 21 bp, Artificial Sequence
  primer
gaacccaaccacgtcctttag

SEQ ID NO: 35603 - DNA, 38 bp, Artificial Sequence
  primer
gtaaaacgacggccagtaccacaaactcttgcttcagg

SEQ ID NO: 35604 - DNA, 20 bp, Artificial Sequence
  primer
ttcaaagcaccacttggagg

SEQ ID NO: 35605 - DNA, 36 bp, Artificial Sequence
  primer
gtaaaacgacggccagtccagccggactttcagaag

SEQ ID NO: 35606 - DNA, 21 bp, Artificial Sequence
  primer
cggcctttatttcttcaatcg

SEQ ID NO: 35607 - DNA, 23 bp, Artificial Sequence
  primer
cccagtaagttcagtggaaagtg

SEQ ID NO: 35608 - DNA, 21 bp, Artificial Sequence
  primer
gatgtggactcaaagtcaccg

SEQ ID NO: 35609 - DNA, 38 bp, Artificial Sequence
  primer
gtaaaacgacggccagtaattctgaggcatcatttccc

SEQ ID NO: 35610 - DNA, 38 bp, Artificial Sequence
  primer
gtaaaacgacggccagtaccaaccgatagctgcagaag

SEQ ID NO: 35611 - DNA, 38 bp, Artificial Sequence
  primer
gtaaaacgacggccagtgaggacgtcagagtggctacc

SEQ ID NO: 35612 - DNA, 38 bp, Artificial Sequence
  primer
gtaaaacgacggccagtggaaatgcaagtccagaggtc

SEQ ID NO: 35613 - DNA, 21 bp, Artificial Sequence
  primer
ggcagaacaaagtacacctgc

SEQ ID NO: 35614 - DNA, 38 bp, Artificial Sequence
  primer
gtaaaacgacggccagtaaggaacttggagctcactgg

SEQ ID NO: 35615 - DNA, 21 bp, Artificial Sequence
  primer
caggatgccagaggtcaattc

SEQ ID NO: 35616 - DNA, 22 bp, Artificial Sequence
  primer
tgggtaatcttaatgctcctgg

SEQ ID NO: 35617 - DNA, 39 bp, Artificial Sequence
  primer
gtaaaacgacggccagtgccttatgcaaaccaccactac

SEQ ID NO: 35618 - DNA, 21 bp, Artificial Sequence
  primer
gggaacaagagagcccttcta

SEQ ID NO: 35619 - DNA, 39 bp, Artificial Sequence
  primer
gtaaaacgacggccagtttcagaatgctgttgctttcac

SEQ ID NO: 35620 - DNA, 20 bp, Artificial Sequence
  primer
aaacagaatcatgccgaagc

SEQ ID NO: 35621 - DNA, 39 bp, Artificial Sequence
  primer
gtaaaacgacggccagttgtaggacctggcttgctaatc

SEQ ID NO: 35622 - DNA, 38 bp, Artificial Sequence
  primer
gtaaaacgacggccagtgatctgaagacacttcgtggg

SEQ ID NO: 35623 - DNA, 39 bp, Artificial Sequence
  primer
gtaaaacgacggccagtgcagaatcctgcctaaactgtg

SEQ ID NO: 35624 - DNA, 38 bp, Artificial Sequence
  primer
gtaaaacgacggccagtgggacagcattattgcaactc

SEQ ID NO: 35625 - DNA, 20 bp, Artificial Sequence
  primer
agggtcaatctcagatcccg

SEQ ID NO: 35626 - DNA, 22 bp, Artificial Sequence
  primer
cggctctcatcgtcattatagg

SEQ ID NO: 35627 - DNA, 39 bp, Artificial Sequence
  primer
gtaaaacgacggccagtcagcttgccaccgtatttattc

SEQ ID NO: 35628 - DNA, 39 bp, Artificial Sequence
  primer
gtaaaacgacggccagtggtaatctgatggctgcaagtg

SEQ ID NO: 35629 - DNA, 38 bp, Artificial Sequence
  primer
gtaaaacgacggccagtggacaagtagcgctgtggaac

SEQ ID NO: 35630 - DNA, 38 bp, Artificial Sequence
  primer
gtaaaacgacggccagtaatgaggcagggctctgatac

SEQ ID NO: 35631 - DNA, 21 bp, Artificial Sequence
  primer
aacacacctgcttggtgtagc

SEQ ID NO: 35632 - DNA, 22 bp, Artificial Sequence
  primer
tgtcttaccttcccttactggg

SEQ ID NO: 35633 - DNA, 21 bp, Artificial Sequence
  primer
aagttatggccaagcacaagc

SEQ ID NO: 35634 - DNA, 37 bp, Artificial Sequence
  primer
gtaaaacgacggccagtgacgaggatatctggctccc

SEQ ID NO: 35635 - DNA, 38 bp, Artificial Sequence
  primer
gtaaaacgacggccagtgccaataatcctttctcctgc

SEQ ID NO: 35636 - DNA, 38 bp, Artificial Sequence
  primer
gtaaaacgacggccagtggagtcctaatgccagacagg

SEQ ID NO: 35637 - DNA, 37 bp, Artificial Sequence
  primer
gtaaaacgacggccagtctctgggcagtaggtccagg

SEQ ID NO: 35638 - DNA, 40 bp, Artificial Sequence
  primer
gtaaaacgacggccagtaaatatccaggaatgttgacagc

SEQ ID NO: 35639 - DNA, 21 bp, Artificial Sequence
  primer
cctccatttgcatcttgctac

SEQ ID NO: 35640 - DNA, 38 bp, Artificial Sequence
  primer
gtaaaacgacggccagttaggcagtccatcatagtggg

SEQ ID NO: 35641 - DNA, 40 bp, Artificial Sequence
  primer
gtaaaacgacggccagtcaggttcgcaatatcatcttcag

SEQ ID NO: 35642 - DNA, 21 bp, Artificial Sequence
  primer
agccacgctatagtgctccac

SEQ ID NO: 35643 - DNA, 20 bp, Artificial Sequence
  primer
attgccaacatctcggacag

SEQ ID NO: 35644 - DNA, 38 bp, Artificial Sequence
  primer
gtaaaacgacggccagtaacacaggttgtttgagcgac

SEQ ID NO: 35645 - DNA, 38 bp, Artificial Sequence
  primer
gtaaaacgacggccagtttgaatagcacgtgagcaagg

SEQ ID NO: 35646 - DNA, 38 bp, Artificial Sequence
  primer
gtaaaacgacggccagtttgcccttcctcactttgttc

SEQ ID NO: 35647 - DNA, 38 bp, Artificial Sequence
  primer
gtaaaacgacggccagtaacagcagatgacacagaggc

SEQ ID NO: 35648 - DNA, 38 bp, Artificial Sequence
  primer
gtaaaacgacggccagttagcaacccagacctctctgc

SEQ ID NO: 35649 - DNA, 38 bp, Artificial Sequence
  primer
gtaaaacgacggccagttaattgattcctgctgagggc

SEQ ID NO: 35650 - DNA, 22 bp, Artificial Sequence
  primer
gatcctcaaggacatggtgaag

SEQ ID NO: 35651 - DNA, 38 bp, Artificial Sequence
  primer
gtaaaacgacggccagtgtccagggttggtcttagtgg

SEQ ID NO: 35652 - DNA, 21 bp, Artificial Sequence
  primer
ctgagggttctttgtgctgag

SEQ ID NO: 35653 - DNA, 38 bp, Artificial Sequence
  primer
gtaaaacgacggccagttaatgtgcgtttaaggcctcc

SEQ ID NO: 35654 - DNA, 38 bp, Artificial Sequence
  primer
gtaaaacgacggccagtccatccactggtacgtaaggc

SEQ ID NO: 35655 - DNA, 38 bp, Artificial Sequence
  primer
gtaaaacgacggccagtggtgtgggattgtctcacttg

SEQ ID NO: 35656 - DNA, 21 bp, Artificial Sequence
  primer
ttggaaatgcacaaacaatgg

SEQ ID NO: 35657 - DNA, 24 bp, Artificial Sequence
  primer
tcaccctatgcagttctacttgtg

SEQ ID NO: 35658 - DNA, 41 bp, Artificial Sequence
  primer
gtaaaacgacggccagtaacagtgcatttatactcctgcaa

SEQ ID NO: 35659 - DNA, 21 bp, Artificial Sequence
  primer
tgtcggaagggtaacaaatcc

SEQ ID NO: 35660 - DNA, 27 bp, Artificial Sequence
  primer
cactgaaagaaatacgttgaaagtacc

SEQ ID NO: 35661 - DNA, 38 bp, Artificial Sequence
  primer
gtaaaacgacggccagtacaatccaatccttcactggc

SEQ ID NO: 35662 - DNA, 21 bp, Artificial Sequence
  primer
tgtggccatagagtgatgctc

SEQ ID NO: 35663 - DNA, 22 bp, Artificial Sequence
  primer
ctgccaaagtcttgtcagtgtt

SEQ ID NO: 35664 - DNA, 42 bp, Artificial Sequence
  primer
gtaaaacgacggccagttgctttcaattaccttagatatgcc

SEQ ID NO: 35665 - DNA, 25 bp, Artificial Sequence
  primer
tttggttagaagagaggatcaaatc

SEQ ID NO: 35666 - DNA, 21 bp, Artificial Sequence
  primer
agctccactataccagcctcg

SEQ ID NO: 35667 - DNA, 38 bp, Artificial Sequence
  primer
gtaaaacgacggccagtggcagctgtgtgaggtaacag

SEQ ID NO: 35668 - DNA, 22 bp, Artificial Sequence
  primer
tgttcactggcactgtcatagg

SEQ ID NO: 35669 - DNA, 40 bp, Artificial Sequence
  primer
gtaaaacgacggccagttgtcaaacaagactcccaatgtc

SEQ ID NO: 35670 - DNA, 38 bp, Artificial Sequence
  primer
gtaaaacgacggccagtgtacccatgaaacgacattgg

SEQ ID NO: 35671 - DNA, 18 bp, Artificial Sequence
  primer
cctgggtccctccacaac

SEQ ID NO: 35672 - DNA, 38 bp, Artificial Sequence
  primer
gtaaaacgacggccagtctgagttctgagggacacacg

SEQ ID NO: 35673 - DNA, 21 bp, Artificial Sequence
  primer
aaccctgaagagtcctcccac

SEQ ID NO: 35674 - DNA, 38 bp, Artificial Sequence
  primer
gtaaaacgacggccagtggcagagggtggtaacacaag

SEQ ID NO: 35675 - DNA, 21 bp, Artificial Sequence
  primer
cacaacacttgcgtgtgtcag

SEQ ID NO: 35676 - DNA, 38 bp, Artificial Sequence
  primer
gtaaaacgacggccagtaaaggaggcactgaccttgag

SEQ ID NO: 35677 - DNA, 44 bp, Artificial Sequence
  primer
gtaaaacgacggccagtaacatcaaatcttcctgtctaaatgac

SEQ ID NO: 35678 - DNA, 35 bp, Artificial Sequence
  primer
gtaaaacgacggccagttctctggctgggtgttgc

SEQ ID NO: 35679 - DNA, 38 bp, Artificial Sequence
  primer
gtaaaacgacggccagtacgttacgggagcctcttctc

SEQ ID NO: 35680 - DNA, 39 bp, Artificial Sequence
  primer
gtaaaacgacggccagtgactccattgaacagtgtgctc

SEQ ID NO: 35681 - DNA, 38 bp, Artificial Sequence
  primer
gtaaaacgacggccagttcagatgtgcacctgagacac

SEQ ID NO: 35682 - DNA, 39 bp, Artificial Sequence
  primer
gtaaaacgacggccagtaatgccggagatgtgaaatatg

SEQ ID NO: 35683 - DNA, 39 bp, Artificial Sequence
  primer
gtaaaacgacggccagtcaggccttgtaaatgctctttg

SEQ ID NO: 35684 - DNA, 21 bp, Artificial Sequence
  primer
atctgcgagcatcattctgtg

SEQ ID NO: 35685 - DNA, 38 bp, Artificial Sequence
  primer
gtaaaacgacggccagtagacaacattcccagctcctc

SEQ ID NO: 35686 - DNA, 38 bp, Artificial Sequence
  primer
gtaaaacgacggccagtgcagacccgtaggtcactagc

SEQ ID NO: 35687 - DNA, 38 bp, Artificial Sequence
  primer
gtaaaacgacggccagtcagctagtgtgtgggatgagc

SEQ ID NO: 35688 - DNA, 21 bp, Artificial Sequence
  primer
ctgaattctgaaggcaagcag

SEQ ID NO: 35689 - DNA, 38 bp, Artificial Sequence
  primer
gtaaaacgacggccagtcacagtggtgtcccttcagtg

SEQ ID NO: 35690 - DNA, 21 bp, Artificial Sequence
  primer
ggacctctaattccctctggg

SEQ ID NO: 35691 - DNA, 19 bp, Artificial Sequence
  primer
gagcgctaccacatccagg

SEQ ID NO: 35692 - DNA, 26 bp, Artificial Sequence
  primer
gcatgaggacagactaatacataggg

SEQ ID NO: 35693 - DNA, 21 bp, Artificial Sequence
  primer
tgaggaatgttgcctctctgc

SEQ ID NO: 35694 - DNA, 36 bp, Artificial Sequence
  primer
gtaaaacgacggccagtggcaagtcatgcttcatgg

SEQ ID NO: 35695 - DNA, 20 bp, Artificial Sequence
  primer
tgagcactggagcaggtctt

SEQ ID NO: 35696 - DNA, 20 bp, Artificial Sequence
  primer
tggagcaggtctttgaatgc

SEQ ID NO: 35697 - DNA, 38 bp, Artificial Sequence
  primer
gtaaaacgacggccagtcactgcagagtgagcttctcc

SEQ ID NO: 35698 - DNA, 21 bp, Artificial Sequence
  primer
tctcctagcctgagtgtgctg

SEQ ID NO: 35699 - DNA, 38 bp, Artificial Sequence
  primer
gtaaaacgacggccagttgatattgggtctcagcctcc

SEQ ID NO: 35700 - DNA, 43 bp, Artificial Sequence
  primer
gtaaaacgacggccagtttgcaatttaaacttgatgttctgtc

SEQ ID NO: 35701 - DNA, 21 bp, Artificial Sequence
  primer
atccactggaatgcatgtgtg

SEQ ID NO: 35702 - DNA, 21 bp, Artificial Sequence
  primer
ccgtgagggattctgagtatg

SEQ ID NO: 35703 - DNA, 21 bp, Artificial Sequence
  primer
gctgattgtgaagctggtctg

SEQ ID NO: 35704 - DNA, 21 bp, Artificial Sequence
  primer
cattaaagggagcaaagctgg

SEQ ID NO: 35705 - DNA, 21 bp, Artificial Sequence
  primer
cctgggttctaatccatcctg

SEQ ID NO: 35706 - DNA, 21 bp, Artificial Sequence
  primer
gcctcattgtcacagagcaag

SEQ ID NO: 35707 - DNA, 21 bp, Artificial Sequence
  primer
atggtctggcctgtttgtagg

SEQ ID NO: 35708 - DNA, 38 bp, Artificial Sequence
  primer
gtaaaacgacggccagtcacatatacccttcggcagtg

SEQ ID NO: 35709 - DNA, 37 bp, Artificial Sequence
  primer
gtaaaacgacggccagtaagccctgcacacagtgaac

SEQ ID NO: 35710 - DNA, 21 bp, Artificial Sequence
  primer
tccttgggaaggaagtttcag

SEQ ID NO: 35711 - DNA, 38 bp, Artificial Sequence
  primer
gtaaaacgacggccagttacatccacaccctgcagttc

SEQ ID NO: 35712 - DNA, 21 bp, Artificial Sequence
  primer
ccaaacatcactgaccctgag

SEQ ID NO: 35713 - DNA, 38 bp, Artificial Sequence
  primer
gtaaaacgacggccagtgaagccaaggtcattaggtgg

SEQ ID NO: 35714 - DNA, 21 bp, Artificial Sequence
  primer
gctttggcgagatcagtatcc

SEQ ID NO: 35715 - DNA, 21 bp, Artificial Sequence
  primer
cctgatgacgtgtctgctttg

SEQ ID NO: 35716 - DNA, 38 bp, Artificial Sequence
  primer
gtaaaacgacggccagtactgtctcactcctggctgtg

SEQ ID NO: 35717 - DNA, 21 bp, Artificial Sequence
  primer
cccatcccttgagacagacag

SEQ ID NO: 35718 - DNA, 21 bp, Artificial Sequence
  primer
tttggccttgacaataccacc

SEQ ID NO: 35719 - DNA, 21 bp, Artificial Sequence
  primer
ctgaaattgccctaggctctc

SEQ ID NO: 35720 - DNA, 20 bp, Artificial Sequence
  primer
atccagcgtcttccacacag

SEQ ID NO: 35721 - DNA, 21 bp, Artificial Sequence
  primer
gcatactgtgtagccgtgagg

SEQ ID NO: 35722 - DNA, 21 bp, Artificial Sequence
  primer
ctttgaccgcacagagacaag

SEQ ID NO: 35723 - DNA, 21 bp, Artificial Sequence
  primer
gttccaggccaagattgattc

SEQ ID NO: 35724 - DNA, 21 bp, Artificial Sequence
  primer
tgcaagaagggagatattggg

SEQ ID NO: 35725 - DNA, 21 bp, Artificial Sequence
  primer
cagcattctgaacatcaaggg

SEQ ID NO: 35726 - DNA, 39 bp, Artificial Sequence
  primer
gtaaaacgacggccagtcactagtgcccaactccagaag

SEQ ID NO: 35727 - DNA, 38 bp, Artificial Sequence
  primer
gtaaaacgacggccagtccttgtgtgggatctctcctc

SEQ ID NO: 35728 - DNA, 20 bp, Artificial Sequence
  primer
ctgaggcagagggttaaggg

SEQ ID NO: 35729 - DNA, 38 bp, Artificial Sequence
  primer
gtaaaacgacggccagtatgaccctttgtcccacattc

SEQ ID NO: 35730 - DNA, 38 bp, Artificial Sequence
  primer
gtaaaacgacggccagtccacagatgtggtctacgtgc

SEQ ID NO: 35731 - DNA, 21 bp, Artificial Sequence
  primer
acagagacccgcacagcttac

SEQ ID NO: 35732 - DNA, 35 bp, Artificial Sequence
  primer
gtaaaacgacggccagtccctgaaggaagggatgg

SEQ ID NO: 35733 - DNA, 21 bp, Artificial Sequence
  primer
tttccacagcacctgatgaac

SEQ ID NO: 35734 - DNA, 21 bp, Artificial Sequence
  primer
acagggaacatgtctgggaac

SEQ ID NO: 35735 - DNA, 36 bp, Artificial Sequence
  primer
gtaaaacgacggccagtctggattcaagcaatcggc

SEQ ID NO: 35736 - DNA, 39 bp, Artificial Sequence
  primer
gtaaaacgacggccagttcctgaggaaagagtcgttcag

SEQ ID NO: 35737 - DNA, 21 bp, Artificial Sequence
  primer
ggctcccagagacttcagttg

SEQ ID NO: 35738 - DNA, 38 bp, Artificial Sequence
  primer
gtaaaacgacggccagttcacctagtgtcttgggcctc

SEQ ID NO: 35739 - DNA, 38 bp, Artificial Sequence
  primer
gtaaaacgacggccagtgtgtctctgtccatcgcagtc

SEQ ID NO: 35740 - DNA, 38 bp, Artificial Sequence
  primer
gtaaaacgacggccagtactgaccctgctttgaacctg

SEQ ID NO: 35741 - DNA, 38 bp, Artificial Sequence
  primer
gtaaaacgacggccagtctgtgcagaacaggattggag

SEQ ID NO: 35742 - DNA, 19 bp, Artificial Sequence
  primer
gacacagctggtagtggcg

SEQ ID NO: 35743 - DNA, 38 bp, Artificial Sequence
  primer
gtaaaacgacggccagtctgttagcgactcgaatctgg

SEQ ID NO: 35744 - DNA, 21 bp, Artificial Sequence
  primer
tagggcctgaacaatagccag

SEQ ID NO: 35745 - DNA, 38 bp, Artificial Sequence
  primer
gtaaaacgacggccagtgtcacgtgctagaaggtgtgg

SEQ ID NO: 35746 - DNA, 38 bp, Artificial Sequence
  primer
gtaaaacgacggccagttgactaagcactgaggcactg

SEQ ID NO: 35747 - DNA, 21 bp, Artificial Sequence
  primer
cttggttggaaagtccaggtc

SEQ ID NO: 35748 - DNA, 21 bp, Artificial Sequence
  primer
aggctcctgaggttgagactg

SEQ ID NO: 35749 - DNA, 38 bp, Artificial Sequence
  primer
gtaaaacgacggccagtcatgtggacttctgaaggcag

SEQ ID NO: 35750 - DNA, 21 bp, Artificial Sequence
  primer
agaacacagctggactcctgg

SEQ ID NO: 35751 - DNA, 38 bp, Artificial Sequence
  primer
gtaaaacgacggccagtgactcagaagttcatgctccg

SEQ ID NO: 35752 - DNA, 38 bp, Artificial Sequence
  primer
gtaaaacgacggccagtggcaggacttacctccttcag

SEQ ID NO: 35753 - DNA, 38 bp, Artificial Sequence
  primer
gtaaaacgacggccagtcagttgggacccttctctctg

SEQ ID NO: 35754 - DNA, 38 bp, Artificial Sequence
  primer
gtaaaacgacggccagtccctacctgatccaactggtg

SEQ ID NO: 35755 - DNA, 38 bp, Artificial Sequence
  primer
gtaaaacgacggccagtaactcaaggctttcaccaagg

SEQ ID NO: 35756 - DNA, 38 bp, Artificial Sequence
  primer
gtaaaacgacggccagtgagagactccgcctctcactc

SEQ ID NO: 35757 - DNA, 38 bp, Artificial Sequence
  primer
gtaaaacgacggccagttattgaatgctcaccgtcctg

SEQ ID NO: 35758 - DNA, 37 bp, Artificial Sequence
  primer
gtaaaacgacggccagtgttggctctcactgtccagg

SEQ ID NO: 35759 - DNA, 21 bp, Artificial Sequence
  primer
acccgatagcatttgtgaacc

SEQ ID NO: 35760 - DNA, 21 bp, Artificial Sequence
  primer
ccgtggtctgtgtgaagtgac

SEQ ID NO: 35761 - DNA, 38 bp, Artificial Sequence
  primer
gtaaaacgacggccagtcacttggccggtatgtatgtc

SEQ ID NO: 35762 - DNA, 38 bp, Artificial Sequence
  primer
gtaaaacgacggccagtcaacatcgttagcaaagtcgc

SEQ ID NO: 35763 - DNA, 38 bp, Artificial Sequence
  primer
gtaaaacgacggccagtcagtgcctaggttcctccttg

SEQ ID NO: 35764 - DNA, 38 bp, Artificial Sequence
  primer
gtaaaacgacggccagtctccacacatgggaaatgaag

SEQ ID NO: 35765 - DNA, 37 bp, Artificial Sequence
  primer
gtaaaacgacggccagtgctgcagaagcgagtctttc

SEQ ID NO: 35766 - DNA, 38 bp, Artificial Sequence
  primer
gtaaaacgacggccagtgaacagggaggtgtccaagac

SEQ ID NO: 35767 - DNA, 40 bp, Artificial Sequence
  primer
gtaaaacgacggccagtggagttgcctgtaggaattaacc

SEQ ID NO: 35768 - DNA, 36 bp, Artificial Sequence
  primer
gtaaaacgacggccagtaaaccagagggcagctgtg

SEQ ID NO: 35769 - DNA, 39 bp, Artificial Sequence
  primer
gtaaaacgacggccagtcatctttgtagctcatgttgcc

SEQ ID NO: 35770 - DNA, 23 bp, Artificial Sequence
  primer
tgtattccaccagcactatttcc

SEQ ID NO: 35771 - DNA, 21 bp, Artificial Sequence
  primer
aacatgcggtgtttggttaag

SEQ ID NO: 35772 - DNA, 40 bp, Artificial Sequence
  primer
gtaaaacgacggccagtgagcctcctatggcaaattactc

SEQ ID NO: 35773 - DNA, 21 bp, Artificial Sequence
  primer
ttggctgagattggaaggaac

SEQ ID NO: 35774 - DNA, 38 bp, Artificial Sequence
  primer
gtaaaacgacggccagttcagcgtaaatccatccattc

SEQ ID NO: 35775 - DNA, 20 bp, Artificial Sequence
  primer
tcacaaatccaaagcaaggg

SEQ ID NO: 35776 - DNA, 20 bp, Artificial Sequence
  primer
acacatgctgtttgccagtg

SEQ ID NO: 35777 - DNA, 25 bp, Artificial Sequence
  primer
tcagggcattagaaggaagtatatc

SEQ ID NO: 35778 - DNA, 42 bp, Artificial Sequence
  primer
gtaaaacgacggccagtgaattattcagtatgtcatccaggg

SEQ ID NO: 35779 - DNA, 19 bp, Artificial Sequence
  primer
tgtccatagccattggcag

SEQ ID NO: 35780 - DNA, 39 bp, Artificial Sequence
  primer
gtaaaacgacggccagtggcaaacagtactcacgtgttg

SEQ ID NO: 35781 - DNA, 21 bp, Artificial Sequence
  primer
gaccctcacctctagggaatg

SEQ ID NO: 35782 - DNA, 24 bp, Artificial Sequence
  primer
cccattgaaactacacaggttagg

SEQ ID NO: 35783 - DNA, 21 bp, Artificial Sequence
  primer
tggtggtgatcttagccattg

SEQ ID NO: 35784 - DNA, 36 bp, Artificial Sequence
  primer
gtaaaacgacggccagtagactccggccatcagagg

SEQ ID NO: 35785 - DNA, 38 bp, Artificial Sequence
  primer
gtaaaacgacggccagtttggtatttgggatcttggtg

SEQ ID NO: 35786 - DNA, 40 bp, Artificial Sequence
  primer
gtaaaacgacggccagtggtcagtttgcctgtaatcctac

SEQ ID NO: 35787 - DNA, 38 bp, Artificial Sequence
  primer
gtaaaacgacggccagttccctttatggaccacctctc

SEQ ID NO: 35788 - DNA, 21 bp, Artificial Sequence
  primer
tcagctgtgccgttctacttg

SEQ ID NO: 35789 - DNA, 18 bp, Artificial Sequence
  primer
gagggatcgcaggatgag

SEQ ID NO: 35790 - DNA, 38 bp, Artificial Sequence
  primer
gtaaaacgacggccagttatcccacagaaggacttggg

SEQ ID NO: 35791 - DNA, 21 bp, Artificial Sequence
  primer
ctcagggctgagttcctcttg

SEQ ID NO: 35792 - DNA, 21 bp, Artificial Sequence
  primer
ctctacttgggagggagtggg

SEQ ID NO: 35793 - DNA, 38 bp, Artificial Sequence
  primer
gtaaaacgacggccagtctctggaggtgagggtagcag

SEQ ID NO: 35794 - DNA, 21 bp, Artificial Sequence
  primer
cacagcagtcagaactcaggg

SEQ ID NO: 35795 - DNA, 37 bp, Artificial Sequence
  primer
gtaaaacgacggccagtggcactagcctggagaggag

SEQ ID NO: 35796 - DNA, 21 bp, Artificial Sequence
  primer
atgccatctacagcctcttcc

SEQ ID NO: 35797 - DNA, 37 bp, Artificial Sequence
  primer
gtaaaacgacggccagtctggactgagagggcagttg

SEQ ID NO: 35798 - DNA, 38 bp, Artificial Sequence
  primer
gtaaaacgacggccagtgtgtcaaccgtctgtgagagg

SEQ ID NO: 35799 - DNA, 20 bp, Artificial Sequence
  primer
cagggattgctcgacagaag

SEQ ID NO: 35800 - DNA, 21 bp, Artificial Sequence
  primer
tgacaggaatgagggagaagc

SEQ ID NO: 35801 - DNA, 38 bp, Artificial Sequence
  primer
gtaaaacgacggccagtgtctgtgtgagcccaggtatg

SEQ ID NO: 35802 - DNA, 37 bp, Artificial Sequence
  primer
gtaaaacgacggccagtctttgcaggcatgaagaacc

SEQ ID NO: 35803 - DNA, 21 bp, Artificial Sequence
  primer
agtgaatgctggtcacactgg

SEQ ID NO: 35804 - DNA, 39 bp, Artificial Sequence
  primer
gtaaaacgacggccagtcccatcagagcaggtattatcc

SEQ ID NO: 35805 - DNA, 21 bp, Artificial Sequence
  primer
agggagggactgtacggaatc

SEQ ID NO: 35806 - DNA, 21 bp, Artificial Sequence
  primer
agggagggactgtacggaatc

SEQ ID NO: 35807 - DNA, 22 bp, Artificial Sequence
  primer
cagttccacccaccatagagtc

SEQ ID NO: 35808 - DNA, 38 bp, Artificial Sequence
  primer
gtaaaacgacggccagtgcagggcctagaaattcacac

SEQ ID NO: 35809 - DNA, 37 bp, Artificial Sequence
  primer
gtaaaacgacggccagtcacgagggtgagagttggtg

SEQ ID NO: 35810 - DNA, 19 bp, Artificial Sequence
  primer
aggtacctgctcctgctgc

SEQ ID NO: 35811 - DNA, 38 bp, Artificial Sequence
  primer
gtaaaacgacggccagtttgctttgttcctggttgttc

SEQ ID NO: 35812 - DNA, 21 bp, Artificial Sequence
  primer
cctgcctggacaggtagtctc

SEQ ID NO: 35813 - DNA, 21 bp, Artificial Sequence
  primer
ctccctgacagactctgcctc

SEQ ID NO: 35814 - DNA, 38 bp, Artificial Sequence
  primer
gtaaaacgacggccagtcttgtggaaggcagggagtag

SEQ ID NO: 35815 - DNA, 39 bp, Artificial Sequence
  primer
gtaaaacgacggccagtgggtaactaggagctgactggg

SEQ ID NO: 35816 - DNA, 20 bp, Artificial Sequence
  primer
agggcctcatcaatgtctcc

SEQ ID NO: 35817 - DNA, 38 bp, Artificial Sequence
  primer
gtaaaacgacggccagtcgcagccagtactcacttctc

SEQ ID NO: 35818 - DNA, 20 bp, Artificial Sequence
  primer
aagtaccagtctccaggccg

SEQ ID NO: 35819 - DNA, 22 bp, Artificial Sequence
  primer
cccagactgctacagtgagacc

SEQ ID NO: 35820 - DNA, 37 bp, Artificial Sequence
  primer
gtaaaacgacggccagtggacctcctttggctctctg

SEQ ID NO: 35821 - DNA, 19 bp, Artificial Sequence
  primer
ggagtgaagtctggcctcg

SEQ ID NO: 35822 - DNA, 21 bp, Artificial Sequence
  primer
gactcctgcacgtttacctcc

SEQ ID NO: 35823 - DNA, 38 bp, Artificial Sequence
  primer
gtaaaacgacggccagttgcttctaacccacccttcac

SEQ ID NO: 35824 - DNA, 22 bp, Artificial Sequence
  primer
ccattgcctgtgcataataaag

SEQ ID NO: 35825 - DNA, 43 bp, Artificial Sequence
  primer
gtaaaacgacggccagtagagagaaatttggtagaaagcaaac

SEQ ID NO: 35826 - DNA, 41 bp, Artificial Sequence
  primer
gtaaaacgacggccagttgttactgaccatcagagctaacc

SEQ ID NO: 35827 - DNA, 40 bp, Artificial Sequence
  primer
gtaaaacgacggccagttccatttcacctgaatttctttg

SEQ ID NO: 35828 - DNA, 41 bp, Artificial Sequence
  primer
gtaaaacgacggccagttgtcttcatggatttatttctggg

SEQ ID NO: 35829 - DNA, 41 bp, Artificial Sequence
  primer
gtaaaacgacggccagtcgtgtttattgctttaattccttg

SEQ ID NO: 35830 - DNA, 26 bp, Artificial Sequence
  primer
tgtctggtaatgatatggactaatgc

SEQ ID NO: 35831 - DNA, 21 bp, Artificial Sequence
  primer
gttgggagtgaagtggaaacc

SEQ ID NO: 35832 - DNA, 43 bp, Artificial Sequence
  primer
gtaaaacgacggccagtaggtcaggagatatattgtatgggag

SEQ ID NO: 35833 - DNA, 38 bp, Artificial Sequence
  primer
gtaaaacgacggccagtccatctacacaaatgccaacc

SEQ ID NO: 35834 - DNA, 43 bp, Artificial Sequence
  primer
gtaaaacgacggccagtctaatagcacaattgagaaagaatgg

SEQ ID NO: 35835 - DNA, 38 bp, Artificial Sequence
  primer
gtaaaacgacggccagttgccctgatttctctgcctac

SEQ ID NO: 35836 - DNA, 45 bp, Artificial Sequence
  primer
gtaaaacgacggccagtcatatttctgattaagatgtgtgtcact

SEQ ID NO: 35837 - DNA, 42 bp, Artificial Sequence
  primer
gtaaaacgacggccagttcaaatttaaggaattaaaggaacg

SEQ ID NO: 35838 - DNA, 39 bp, Artificial Sequence
  primer
gtaaaacgacggccagttgtgaactcgggttagatgttg

SEQ ID NO: 35839 - DNA, 40 bp, Artificial Sequence
  primer
gtaaaacgacggccagttgaagtagcatctttggtatggg

SEQ ID NO: 35840 - DNA, 38 bp, Artificial Sequence
  primer
gtaaaacgacggccagtaggccaagggtaaggtagtgc

SEQ ID NO: 35841 - DNA, 21 bp, Artificial Sequence
  primer
gaccttggtatagccgcattc

SEQ ID NO: 35842 - DNA, 37 bp, Artificial Sequence
  primer
gtaaaacgacggccagtgtctcccattcgcaagacag

SEQ ID NO: 35843 - DNA, 24 bp, Artificial Sequence
  primer
tgttctcatggtcattcattatcc

SEQ ID NO: 35844 - DNA, 38 bp, Artificial Sequence
  primer
gtaaaacgacggccagttctaaagagctgggtgggtgt

SEQ ID NO: 35845 - DNA, 37 bp, Artificial Sequence
  primer
gtaaaacgacggccagttgtgcagacggaacttcagc

SEQ ID NO: 35846 - DNA, 20 bp, Artificial Sequence
  primer
gaaggacgagggagatcagg

SEQ ID NO: 35847 - DNA, 37 bp, Artificial Sequence
  primer
gtaaaacgacggccagtcaagtgattgcctcagcctc

SEQ ID NO: 35848 - DNA, 38 bp, Artificial Sequence
  primer
gtaaaacgacggccagtagcccagacacaatctcttcc

SEQ ID NO: 35849 - DNA, 21 bp, Artificial Sequence
  primer
atgcaggagaatggtgtgaag

SEQ ID NO: 35850 - DNA, 37 bp, Artificial Sequence
  primer
gtaaaacgacggccagtgcctcatcctctcccatcag

SEQ ID NO: 35851 - DNA, 36 bp, Artificial Sequence
  primer
gtaaaacgacggccagtcaacaaaggagccagccag

SEQ ID NO: 35852 - DNA, 18 bp, Artificial Sequence
  primer
agtttcccgtggcatcaa

SEQ ID NO: 35853 - DNA, 36 bp, Artificial Sequence
  primer
gtaaaacgacggccagtgagggcggtttatctgtgc

SEQ ID NO: 35854 - DNA, 38 bp, Artificial Sequence
  primer
gtaaaacgacggccagtagatcagcatcgggtcttcac

SEQ ID NO: 35855 - DNA, 38 bp, Artificial Sequence
  primer
gtaaaacgacggccagtcctccagactcatgaacaagc

SEQ ID NO: 35856 - DNA, 21 bp, Artificial Sequence
  primer
agctgtatgatgggtgtgtgg

SEQ ID NO: 35857 - DNA, 37 bp, Artificial Sequence
  primer
gtaaaacgacggccagtccctgtggtccctcaatttc

SEQ ID NO: 35858 - DNA, 35 bp, Artificial Sequence
  primer
gtaaaacgacggccagtgtgagccagtgcacccag

SEQ ID NO: 35859 - DNA, 21 bp, Artificial Sequence
  primer
aggctctgtagcacccagttg

SEQ ID NO: 35860 - DNA, 35 bp, Artificial Sequence
  primer
gtaaaacgacggccagtagagcgcgttgtgagtcg

SEQ ID NO: 35861 - DNA, 40 bp, Artificial Sequence
  primer
gtaaaacgacggccagttcccttactgatgctaaagggag

SEQ ID NO: 35862 - DNA, 38 bp, Artificial Sequence
  primer
gtaaaacgacggccagtcttgtcaaacagctttctggg

SEQ ID NO: 35863 - DNA, 38 bp, Artificial Sequence
  primer
gtaaaacgacggccagttgacatcagctgcatcgtact

SEQ ID NO: 35864 - DNA, 38 bp, Artificial Sequence
  primer
gtaaaacgacggccagtcagtaacttgtcggttgtgcc

SEQ ID NO: 35865 - DNA, 37 bp, Artificial Sequence
  primer
gtaaaacgacggccagtcctactcagtgtgttcgcgg

SEQ ID NO: 35866 - DNA, 21 bp, Artificial Sequence
  primer
ataagcaccttctacacgcgg

SEQ ID NO: 35867 - DNA, 21 bp, Artificial Sequence
  primer
tgcaatcctgagattggtcag

SEQ ID NO: 35868 - DNA, 39 bp, Artificial Sequence
  primer
gtaaaacgacggccagtccattgtctatccctcaccaac

SEQ ID NO: 35869 - DNA, 38 bp, Artificial Sequence
  primer
gtaaaacgacggccagtggattaggatcctccactccg

SEQ ID NO: 35870 - DNA, 23 bp, Artificial Sequence
  primer
ttcctctgtgataagaacatggg

SEQ ID NO: 35871 - DNA, 39 bp, Artificial Sequence
  primer
gtaaaacgacggccagtttacagggttaattggtgctgg

SEQ ID NO: 35872 - DNA, 21 bp, Artificial Sequence
  primer
acaacacctgtctctccctcc

SEQ ID NO: 35873 - DNA, 38 bp, Artificial Sequence
  primer
gtaaaacgacggccagtactgctacagcgtgggtaagg

SEQ ID NO: 35874 - DNA, 21 bp, Artificial Sequence
  primer
accctgccttcctcttctagc

SEQ ID NO: 35875 - DNA, 21 bp, Artificial Sequence
  primer
tgttacaccaccctcaccttg

SEQ ID NO: 35876 - DNA, 21 bp, Artificial Sequence
  primer
agctgtcaagggctttgtctc

SEQ ID NO: 35877 - DNA, 38 bp, Artificial Sequence
  primer
gtaaaacgacggccagttggagtcagtgtcagtcaggg

SEQ ID NO: 35878 - DNA, 18 bp, Artificial Sequence
  primer
gctcctgctgagctgctg

SEQ ID NO: 35879 - DNA, 20 bp, Artificial Sequence
  primer
cgggcagaacatcaataacg

SEQ ID NO: 35880 - DNA, 38 bp, Artificial Sequence
  primer
gtaaaacgacggccagtcgcaagatggagaagagcaag

SEQ ID NO: 35881 - DNA, 21 bp, Artificial Sequence
  primer
accacctggatttaccacgac

SEQ ID NO: 35882 - DNA, 38 bp, Artificial Sequence
  primer
gtaaaacgacggccagtgtctccaccatcggtatcgtc

SEQ ID NO: 35883 - DNA, 21 bp, Artificial Sequence
  primer
gaagccatcctggacttcaac

SEQ ID NO: 35884 - DNA, 22 bp, Artificial Sequence
  primer
catgtggaagtggatcactagg

SEQ ID NO: 35885 - DNA, 37 bp, Artificial Sequence
  primer
gtaaaacgacggccagtgaagagccgtaacgattggc

SEQ ID NO: 35886 - DNA, 19 bp, Artificial Sequence
  primer
gttcctggtgggagaggtg

SEQ ID NO: 35887 - DNA, 21 bp, Artificial Sequence
  primer
ctcgaagactgcttcatgctg

SEQ ID NO: 35888 - DNA, 21 bp, Artificial Sequence
  primer
gcacgttgtaggagcatgaac

SEQ ID NO: 35889 - DNA, 21 bp, Artificial Sequence
  primer
ctccaaggcagatagtcaccc

SEQ ID NO: 35890 - DNA, 21 bp, Artificial Sequence
  primer
tacagtgttgggtgtggttcc

SEQ ID NO: 35891 - DNA, 21 bp, Artificial Sequence
  primer
ctcatcctgcaggtagctgtg

SEQ ID NO: 35892 - DNA, 38 bp, Artificial Sequence
  primer
gtaaaacgacggccagtctctccagagtgattggtggg

SEQ ID NO: 35893 - DNA, 38 bp, Artificial Sequence
  primer
gtaaaacgacggccagtcagacctttgcacccagtttc

SEQ ID NO: 35894 - DNA, 38 bp, Artificial Sequence
  primer
gtaaaacgacggccagtctgatacttcccaaggcatcc

SEQ ID NO: 35895 - DNA, 21 bp, Artificial Sequence
  primer
agcaacctgatctccttcacc

SEQ ID NO: 35896 - DNA, 38 bp, Artificial Sequence
  primer
gtaaaacgacggccagttcactgctcttcatggtggag

SEQ ID NO: 35897 - DNA, 38 bp, Artificial Sequence
  primer
gtaaaacgacggccagtctagacaacctcatcgggtcc

SEQ ID NO: 35898 - DNA, 21 bp, Artificial Sequence
  primer
gtttacaaccgggagaagctg

SEQ ID NO: 35899 - DNA, 39 bp, Artificial Sequence
  primer
gtaaaacgacggccagtcctggtgacttatgaccctacg

SEQ ID NO: 35900 - DNA, 36 bp, Artificial Sequence
  primer
gtaaaacgacggccagtggcgggttccagtctcttc

SEQ ID NO: 35901 - DNA, 20 bp, Artificial Sequence
  primer
gaggcacagcagtgatcgag

SEQ ID NO: 35902 - DNA, 38 bp, Artificial Sequence
  primer
gtaaaacgacggccagtccactgtcccttgttcctcac

SEQ ID NO: 35903 - DNA, 37 bp, Artificial Sequence
  primer
gtaaaacgacggccagttccatgggatgaggtgagac

SEQ ID NO: 35904 - DNA, 38 bp, Artificial Sequence
  primer
gtaaaacgacggccagtcaactcacagcctcaatcctg

SEQ ID NO: 35905 - DNA, 38 bp, Artificial Sequence
  primer
gtaaaacgacggccagtaaggttgaatgtgagttcggg

SEQ ID NO: 35906 - DNA, 20 bp, Artificial Sequence
  primer
agtggcactgtttcccagag

SEQ ID NO: 35907 - DNA, 22 bp, Artificial Sequence
  primer
gagcctagaggacctgcttacc

SEQ ID NO: 35908 - DNA, 43 bp, Artificial Sequence
  primer
gtaaaacgacggccagtgcctaattacaaagaaagcattaacc

SEQ ID NO: 35909 - DNA, 22 bp, Artificial Sequence
  primer
tgggcacttccatcaataattc

SEQ ID NO: 35910 - DNA, 18 bp, Artificial Sequence
  primer
gttgtcaaccaccgcacc

SEQ ID NO: 35911 - DNA, 41 bp, Artificial Sequence
  primer
gtaaaacgacggccagtaagcaactcctatgtagtgccatc

SEQ ID NO: 35912 - DNA, 38 bp, Artificial Sequence
  primer
gtaaaacgacggccagtcagagtttaaagcctgcaccc

SEQ ID NO: 35913 - DNA, 25 bp, Artificial Sequence
  primer
acctgtcagctagagaaagcattag

SEQ ID NO: 35914 - DNA, 38 bp, Artificial Sequence
  primer
gtaaaacgacggccagttgagagaattgggtttgaggg

SEQ ID NO: 35915 - DNA, 44 bp, Artificial Sequence
  primer
gtaaaacgacggccagtaacaagaaataacacttactgctctgc

SEQ ID NO: 35916 - DNA, 21 bp, Artificial Sequence
  primer
cagatggcattccattacagg

SEQ ID NO: 35917 - DNA, 20 bp, Artificial Sequence
  primer
cctgagcaacggagtgagac

SEQ ID NO: 35918 - DNA, 28 bp, Artificial Sequence
  primer
gctaataaccttaagattgacaatagcc

SEQ ID NO: 35919 - DNA, 38 bp, Artificial Sequence
  primer
gtaaaacgacggccagtaaccagtttcaacctcttggg

SEQ ID NO: 35920 - DNA, 38 bp, Artificial Sequence
  primer
gtaaaacgacggccagtttcccataaagaacgtcacgg

SEQ ID NO: 35921 - DNA, 38 bp, Artificial Sequence
  primer
gtaaaacgacggccagtacttgtttgtggaaagcgaaa

SEQ ID NO: 35922 - DNA, 22 bp, Artificial Sequence
  primer
gggtaagcaggatttgttcatt

SEQ ID NO: 35923 - DNA, 22 bp, Artificial Sequence
  primer
ttgcagtgaattgatatcgtgc

SEQ ID NO: 35924 - DNA, 38 bp, Artificial Sequence
  primer
gtaaaacgacggccagtatcatcgtgattgagtgggtg

SEQ ID NO: 35925 - DNA, 22 bp, Artificial Sequence
  primer
ccagatgctaaagaaatttggg

SEQ ID NO: 35926 - DNA, 21 bp, Artificial Sequence
  primer
aatagtctctggctggctgtg

SEQ ID NO: 35927 - DNA, 25 bp, Artificial Sequence
  primer
tgttaagcatatttgagaaaggctc

SEQ ID NO: 35928 - DNA, 38 bp, Artificial Sequence
  primer
gtaaaacgacggccagtttgtttccagagaagtggctc

SEQ ID NO: 35929 - DNA, 24 bp, Artificial Sequence
  primer
ggcaaagagtatgtgagctagatg

SEQ ID NO: 35930 - DNA, 23 bp, Artificial Sequence
  primer
ccttatatttcccagaggcaaac

SEQ ID NO: 35931 - DNA, 38 bp, Artificial Sequence
  primer
gtaaaacgacggccagtgcaaggagccatgtgctgtat

SEQ ID NO: 35932 - DNA, 39 bp, Artificial Sequence
  primer
gtaaaacgacggccagtgggcctgttcttagaaatgatg

SEQ ID NO: 35933 - DNA, 21 bp, Artificial Sequence
  primer
caagtattggctgtttggagc

SEQ ID NO: 35934 - DNA, 25 bp, Artificial Sequence
  primer
gaaagattataatggttggctttgg

SEQ ID NO: 35935 - DNA, 38 bp, Artificial Sequence
  primer
gtaaaacgacggccagtcagtgaaggcagggtatttcg

SEQ ID NO: 35936 - DNA, 38 bp, Artificial Sequence
  primer
gtaaaacgacggccagtagaatttccctttcagggtgg

SEQ ID NO: 35937 - DNA, 38 bp, Artificial Sequence
  primer
gtaaaacgacggccagttgaatgtgattgccagtagga

SEQ ID NO: 35938 - DNA, 23 bp, Artificial Sequence
  primer
cctgtctgtccacatcaactttc

SEQ ID NO: 35939 - DNA, 21 bp, Artificial Sequence
  primer
tcaggacaattgtgagttggc

SEQ ID NO: 35940 - DNA, 38 bp, Artificial Sequence
  primer
gtaaaacgacggccagtttacccacatgcagactttcc

SEQ ID NO: 35941 - DNA, 38 bp, Artificial Sequence
  primer
gtaaaacgacggccagtagaagaggccctccatgtttg

SEQ ID NO: 35942 - DNA, 38 bp, Artificial Sequence
  primer
gtaaaacgacggccagtttgagatttggtttctggctg

SEQ ID NO: 35943 - DNA, 38 bp, Artificial Sequence
  primer
gtaaaacgacggccagtttggagcaaatttccattgag

SEQ ID NO: 35944 - DNA, 38 bp, Artificial Sequence
  primer
gtaaaacgacggccagtggaaggaatttacttgcacgg

SEQ ID NO: 35945 - DNA, 21 bp, Artificial Sequence
  primer
cagtgtggaagtggtaaagcg

SEQ ID NO: 35946 - DNA, 37 bp, Artificial Sequence
  primer
gtaaaacgacggccagtcatggcaccttaatgggaaa

SEQ ID NO: 35947 - DNA, 21 bp, Artificial Sequence
  primer
atttatgaccctatcggctgc

SEQ ID NO: 35948 - DNA, 40 bp, Artificial Sequence
  primer
gtaaaacgacggccagtgagcctacattcatgtgctgttc

SEQ ID NO: 35949 - DNA, 38 bp, Artificial Sequence
  primer
gtaaaacgacggccagtagtcagtgtagctgcttgggc

SEQ ID NO: 35950 - DNA, 25 bp, Artificial Sequence
  primer
ctcttctagcatattcatttcagcc

SEQ ID NO: 35951 - DNA, 20 bp, Artificial Sequence
  primer
atgtggcagctgtgctcttc

SEQ ID NO: 35952 - DNA, 38 bp, Artificial Sequence
  primer
gtaaaacgacggccagtcacctttggagcatctgtgtg

SEQ ID NO: 35953 - DNA, 38 bp, Artificial Sequence
  primer
gtaaaacgacggccagtgcctctgtcagaaacccaaac

SEQ ID NO: 35954 - DNA, 21 bp, Artificial Sequence
  primer
tccaacctgtgctatttggag

SEQ ID NO: 35955 - DNA, 39 bp, Artificial Sequence
  primer
gtaaaacgacggccagtggtcagctgaatgagatgcaag

SEQ ID NO: 35956 - DNA, 38 bp, Artificial Sequence
  primer
gtaaaacgacggccagtgtaggcacagagttgtcctcg

SEQ ID NO: 35957 - DNA, 22 bp, Artificial Sequence
  primer
caggatggcaagagatttcatc

SEQ ID NO: 35958 - DNA, 21 bp, Artificial Sequence
  primer
cctcagccattaataccctgc

SEQ ID NO: 35959 - DNA, 26 bp, Artificial Sequence
  primer
aaggaagataattgtctagccatgtg

SEQ ID NO: 35960 - DNA, 20 bp, Artificial Sequence
  primer
ggagggtggtctgaaatgtg

SEQ ID NO: 35961 - DNA, 38 bp, Artificial Sequence
  primer
gtaaaacgacggccagtaccaccatttcccacaaattc

SEQ ID NO: 35962 - DNA, 38 bp, Artificial Sequence
  primer
gtaaaacgacggccagtagccaccacatctggctaagt

SEQ ID NO: 35963 - DNA, 26 bp, Artificial Sequence
  primer
tttacaaagtgctctctgacaagttt

SEQ ID NO: 35964 - DNA, 22 bp, Artificial Sequence
  primer
caagatgagcccaattcttgtc

SEQ ID NO: 35965 - DNA, 42 bp, Artificial Sequence
  primer
gtaaaacgacggccagttcaggattattggtgttaaacatgg

SEQ ID NO: 35966 - DNA, 43 bp, Artificial Sequence
  primer
gtaaaacgacggccagtaaattattgggacataattgaattgg

SEQ ID NO: 35967 - DNA, 41 bp, Artificial Sequence
  primer
gtaaaacgacggccagtacttaggatttgggttctttagca

SEQ ID NO: 35968 - DNA, 20 bp, Artificial Sequence
  primer
atcactcaaacctgggaggc

SEQ ID NO: 35969 - DNA, 38 bp, Artificial Sequence
  primer
gtaaaacgacggccagtcagctaaagggcatttcttcc

SEQ ID NO: 35970 - DNA, 21 bp, Artificial Sequence
  primer
ctacacccaggcagttgattc

SEQ ID NO: 35971 - DNA, 38 bp, Artificial Sequence
  primer
gtaaaacgacggccagtctctaccttctgagcccgagg

SEQ ID NO: 35972 - DNA, 38 bp, Artificial Sequence
  primer
gtaaaacgacggccagtctcctcaaggcgatagattgg

SEQ ID NO: 35973 - DNA, 38 bp, Artificial Sequence
  primer
gtaaaacgacggccagtttggttggcagatgtacttgg

SEQ ID NO: 35974 - DNA, 20 bp, Artificial Sequence
  primer
ggctgcagatgacagctctt

SEQ ID NO: 35975 - DNA, 24 bp, Artificial Sequence
  primer
tgttgcaaataaagtatgccagtc

SEQ ID NO: 35976 - DNA, 38 bp, Artificial Sequence
  primer
gtaaaacgacggccagtcaatgctcccttcatgttctg

SEQ ID NO: 35977 - DNA, 43 bp, Artificial Sequence
  primer
gtaaaacgacggccagtatggtatgatttacagatttgtggag

SEQ ID NO: 35978 - DNA, 21 bp, Artificial Sequence
  primer
ttaaatcgccaactccagaag

SEQ ID NO: 35979 - DNA, 22 bp, Artificial Sequence
  primer
tttgagattctagggttggacc

SEQ ID NO: 35980 - DNA, 22 bp, Artificial Sequence
  primer
tctggttctcatttgttcatgg

SEQ ID NO: 35981 - DNA, 38 bp, Artificial Sequence
  primer
gtaaaacgacggccagtcagtgccgtgcattatttagg

SEQ ID NO: 35982 - DNA, 21 bp, Artificial Sequence
  primer
cacctacgcatgacatggatt

SEQ ID NO: 35983 - DNA, 38 bp, Artificial Sequence
  primer
gtaaaacgacggccagtccatggaacaatgatggaaac

SEQ ID NO: 35984 - DNA, 21 bp, Artificial Sequence
  primer
tccaggtgttacctgatggtg

SEQ ID NO: 35985 - DNA, 22 bp, Artificial Sequence
  primer
gcaagaatactgagggaaggag

SEQ ID NO: 35986 - DNA, 41 bp, Artificial Sequence
  primer
gtaaaacgacggccagttgtcgacctcaagacataggtagg

SEQ ID NO: 35987 - DNA, 23 bp, Artificial Sequence
  primer
gggagtttctgtttatctctcca

SEQ ID NO: 35988 - DNA, 22 bp, Artificial Sequence
  primer
tgtgccttctggacaaattaag

SEQ ID NO: 35989 - DNA, 40 bp, Artificial Sequence
  primer
gtaaaacgacggccagtcacaacatttcagtgtcaagtgg

SEQ ID NO: 35990 - DNA, 21 bp, Artificial Sequence
  primer
cccacctacctcactatgctg

SEQ ID NO: 35991 - DNA, 38 bp, Artificial Sequence
  primer
gtaaaacgacggccagtaagagagtgcgtctgtagggc

SEQ ID NO: 35992 - DNA, 21 bp, Artificial Sequence
  primer
tcagctctaagatggattggg

SEQ ID NO: 35993 - DNA, 38 bp, Artificial Sequence
  primer
gtaaaacgacggccagtcaattctctccatccctcagc

SEQ ID NO: 35994 - DNA, 21 bp, Artificial Sequence
  primer
aagtagggtcacgaggctcag

SEQ ID NO: 35995 - DNA, 38 bp, Artificial Sequence
  primer
gtaaaacgacggccagtaaggagaaggaagaggttggc

SEQ ID NO: 35996 - DNA, 38 bp, Artificial Sequence
  primer
gtaaaacgacggccagtagggactgaggacaggttctg

SEQ ID NO: 35997 - DNA, 21 bp, Artificial Sequence
  primer
atgttgactcatcccaggacc

SEQ ID NO: 35998 - DNA, 21 bp, Artificial Sequence
  primer
taaggacagccatttgaccag

SEQ ID NO: 35999 - DNA, 38 bp, Artificial Sequence
  primer
gtaaaacgacggccagtacaaagatggagcctgaggtg

SEQ ID NO: 36000 - DNA, 37 bp, Artificial Sequence
  primer
gtaaaacgacggccagtaccagtgagtgaggaggcag

SEQ ID NO: 36001 - DNA, 21 bp, Artificial Sequence
  primer
tctttctcccatctgtctgcc

SEQ ID NO: 36002 - DNA, 38 bp, Artificial Sequence
  primer
gtaaaacgacggccagtcctgtcatgggtagattgtgg

SEQ ID NO: 36003 - DNA, 38 bp, Artificial Sequence
  primer
gtaaaacgacggccagtgcctctgagctccttgaagtc

SEQ ID NO: 36004 - DNA, 37 bp, Artificial Sequence
  primer
gtaaaacgacggccagtgccctgggtctttctgtacc

SEQ ID NO: 36005 - DNA, 38 bp, Artificial Sequence
  primer
gtaaaacgacggccagtcccatctccaagaggattgtc

SEQ ID NO: 36006 - DNA, 38 bp, Artificial Sequence
  primer
gtaaaacgacggccagtaggatggatgagagtgtgtgc

SEQ ID NO: 36007 - DNA, 22 bp, Artificial Sequence
  primer
acctggattccaaacattaagc

SEQ ID NO: 36008 - DNA, 38 bp, Artificial Sequence
  primer
gtaaaacgacggccagtctcatgcaggtcgtcaaagtc

SEQ ID NO: 36009 - DNA, 22 bp, Artificial Sequence
  primer
cacatacccaccaccaagaatc

SEQ ID NO: 36010 - DNA, 41 bp, Artificial Sequence
  primer
gtaaaacgacggccagtgctacacaaactgcaattaggagg

SEQ ID NO: 36011 - DNA, 41 bp, Artificial Sequence
  primer
gtaaaacgacggccagtggtctttagaattccctaggttgc

SEQ ID NO: 36012 - DNA, 40 bp, Artificial Sequence
  primer
gtaaaacgacggccagtcctttagttcttccaaatgagcc

SEQ ID NO: 36013 - DNA, 24 bp, Artificial Sequence
  primer
tgtgatatcctcacaggtttctct

SEQ ID NO: 36014 - DNA, 24 bp, Artificial Sequence
  primer
ggatgctcaacctgtacttctttg

SEQ ID NO: 36015 - DNA, 42 bp, Artificial Sequence
  primer
gtaaaacgacggccagttcttcaagtaccagtttgtgaaaca

SEQ ID NO: 36016 - DNA, 40 bp, Artificial Sequence
  primer
gtaaaacgacggccagttgctttctaaatttgtttgacga

SEQ ID NO: 36017 - DNA, 21 bp, Artificial Sequence
  primer
ttgcttgaagaggttggagtg

SEQ ID NO: 36018 - DNA, 27 bp, Artificial Sequence
  primer
agaataggtaagatttcctgttaaccc

SEQ ID NO: 36019 - DNA, 42 bp, Artificial Sequence
  primer
gtaaaacgacggccagttttcattcttaggtgcttatgttcc

SEQ ID NO: 36020 - DNA, 22 bp, Artificial Sequence
  primer
ggcaaggcagggtcagatatag

SEQ ID NO: 36021 - DNA, 38 bp, Artificial Sequence
  primer
gtaaaacgacggccagtggctgctgaactatttgcttg

SEQ ID NO: 36022 - DNA, 21 bp, Artificial Sequence
  primer
atcctgcttgcattatccgtc

SEQ ID NO: 36023 - DNA, 21 bp, Artificial Sequence
  primer
aatctgcagaccagtcctttg

SEQ ID NO: 36024 - DNA, 21 bp, Artificial Sequence
  primer
tgcgtttcccacaaagctaac

SEQ ID NO: 36025 - DNA, 40 bp, Artificial Sequence
  primer
gtaaaacgacggccagttgggactctgagagattatttgc

SEQ ID NO: 36026 - DNA, 18 bp, Artificial Sequence
  primer
ggcaagtcctggcaaatg

SEQ ID NO: 36027 - DNA, 23 bp, Artificial Sequence
  primer
acataaaggcatgtcttgaaagc

SEQ ID NO: 36028 - DNA, 18 bp, Artificial Sequence
  primer
ggttacgggccctgtgtg

SEQ ID NO: 36029 - DNA, 24 bp, Artificial Sequence
  primer
agcatactgcagataatgtgtgtg

SEQ ID NO: 36030 - DNA, 21 bp, Artificial Sequence
  primer
tgtttggaagcaatcaaatgg

SEQ ID NO: 36031 - DNA, 23 bp, Artificial Sequence
  primer
ggagccttaagaatggcaaatac

SEQ ID NO: 36032 - DNA, 38 bp, Artificial Sequence
  primer
gtaaaacgacggccagtcatttctgtcttgccttgcag

SEQ ID NO: 36033 - DNA, 38 bp, Artificial Sequence
  primer
gtaaaacgacggccagtattaagtcagtttgcaggccg

SEQ ID NO: 36034 - DNA, 20 bp, Artificial Sequence
  primer
atgtgtgtgtgcttgtgcag

SEQ ID NO: 36035 - DNA, 22 bp, Artificial Sequence
  primer
cagctgctagcaatcaggtaag

SEQ ID NO: 36036 - DNA, 36 bp, Artificial Sequence
  primer
gtaaaacgacggccagttcacatggtcacttgcagc

SEQ ID NO: 36037 - DNA, 38 bp, Artificial Sequence
  primer
gtaaaacgacggccagtaacctgaggatgccacatttc

SEQ ID NO: 36038 - DNA, 38 bp, Artificial Sequence
  primer
gtaaaacgacggccagtcctggtaacaagtcttggctg

SEQ ID NO: 36039 - DNA, 38 bp, Artificial Sequence
  primer
gtaaaacgacggccagtcatctagactcccttgtgccc

SEQ ID NO: 36040 - DNA, 42 bp, Artificial Sequence
  primer
gtaaaacgacggccagttctgtaggattctttgatttgcatc

SEQ ID NO: 36041 - DNA, 21 bp, Artificial Sequence
  primer
ttgaaacaggtggactcaagc

SEQ ID NO: 36042 - DNA, 20 bp, Artificial Sequence
  primer
tttgggagggctctagtgtg

SEQ ID NO: 36043 - DNA, 27 bp, Artificial Sequence
  primer
ggtcagcgtctaagtttataatttgtg

SEQ ID NO: 36044 - DNA, 21 bp, Artificial Sequence
  primer
ctgaaatgcgtagcctcaaag

SEQ ID NO: 36045 - DNA, 43 bp, Artificial Sequence
  primer
gtaaaacgacggccagtcaatctagatcagaccaaacattgtc

SEQ ID NO: 36046 - DNA, 21 bp, Artificial Sequence
  primer
gtgacagagacagaccaaccc

SEQ ID NO: 36047 - DNA, 39 bp, Artificial Sequence
  primer
gtaaaacgacggccagttgcttgtttgaatgttggaaag

SEQ ID NO: 36048 - DNA, 42 bp, Artificial Sequence
  primer
gtaaaacgacggccagttgaagtagcatttacaagctttgag

SEQ ID NO: 36049 - DNA, 39 bp, Artificial Sequence
  primer
gtaaaacgacggccagttgttaaataaatggcctgtccc

SEQ ID NO: 36050 - DNA, 20 bp, Artificial Sequence
  primer
attccagacgtgagccattg

SEQ ID NO: 36051 - DNA, 38 bp, Artificial Sequence
  primer
gtaaaacgacggccagtgacctgggctgacatctcttc

SEQ ID NO: 36052 - DNA, 38 bp, Artificial Sequence
  primer
gtaaaacgacggccagtctgcagtttcccttccttcag

SEQ ID NO: 36053 - DNA, 21 bp, Artificial Sequence
  primer
ctggagcagctctttgaaatg

SEQ ID NO: 36054 - DNA, 38 bp, Artificial Sequence
  primer
gtaaaacgacggccagttgctggagaggtgatgcttag

SEQ ID NO: 36055 - DNA, 21 bp, Artificial Sequence
  primer
gtcagctgttcctcaagagcc

SEQ ID NO: 36056 - DNA, 40 bp, Artificial Sequence
  primer
gtaaaacgacggccagtgagttgccatgacagtacatttg

SEQ ID NO: 36057 - DNA, 38 bp, Artificial Sequence
  primer
gtaaaacgacggccagttcaccactgacctcctgtacg

SEQ ID NO: 36058 - DNA, 21 bp, Artificial Sequence
  primer
gaggagaacatccagtgtggg

SEQ ID NO: 36059 - DNA, 38 bp, Artificial Sequence
  primer
gtaaaacgacggccagttcattgacttccacgtgttcc

SEQ ID NO: 36060 - DNA, 21 bp, Artificial Sequence
  primer
actgcgagaaactgcaatctg

SEQ ID NO: 36061 - DNA, 21 bp, Artificial Sequence
  primer
gctcattaagacggtgtttgc

SEQ ID NO: 36062 - DNA, 37 bp, Artificial Sequence
  primer
gtaaaacgacggccagttcctgtttctcaccattcgg

SEQ ID NO: 36063 - DNA, 38 bp, Artificial Sequence
  primer
gtaaaacgacggccagtaagagaagatgactgcgggag

SEQ ID NO: 36064 - DNA, 21 bp, Artificial Sequence
  primer
tcattgacttccacgtgttcc

SEQ ID NO: 36065 - DNA, 38 bp, Artificial Sequence
  primer
gtaaaacgacggccagtactgcgagaaactgcaatctg

SEQ ID NO: 36066 - DNA, 21 bp, Artificial Sequence
  primer
gctcattaagacggtgtttgc

SEQ ID NO: 36067 - DNA, 38 bp, Artificial Sequence
  primer
gtaaaacgacggccagtcaggtgaggtcattcttgtgc

SEQ ID NO: 36068 - DNA, 38 bp, Artificial Sequence
  primer
gtaaaacgacggccagttacctgttcattggcagcttg

SEQ ID NO: 36069 - DNA, 21 bp, Artificial Sequence
  primer
gtggattccaaggctgtcttc

SEQ ID NO: 36070 - DNA, 21 bp, Artificial Sequence
  primer
acctatgggcatgttctctgg

SEQ ID NO: 36071 - DNA, 38 bp, Artificial Sequence
  primer
gtaaaacgacggccagtgagaatgcccagtgggtttag

SEQ ID NO: 36072 - DNA, 21 bp, Artificial Sequence
  primer
atccttggccagagagatgag

SEQ ID NO: 36073 - DNA, 20 bp, Artificial Sequence
  primer
tttgttggccaggctcttag

SEQ ID NO: 36074 - DNA, 38 bp, Artificial Sequence
  primer
gtaaaacgacggccagtaaaccaggcttcctaagctcc

SEQ ID NO: 36075 - DNA, 21 bp, Artificial Sequence
  primer
atccatcctcacaggctcttg

SEQ ID NO: 36076 - DNA, 21 bp, Artificial Sequence
  primer
taaacatctggctcttgtggc

SEQ ID NO: 36077 - DNA, 38 bp, Artificial Sequence
  primer
gtaaaacgacggccagtgcttgacctttcctcaacctc

SEQ ID NO: 36078 - DNA, 37 bp, Artificial Sequence
  primer
gtaaaacgacggccagtacatggtggctggagttgac

SEQ ID NO: 36079 - DNA, 21 bp, Artificial Sequence
  primer
ctcacttcctctggagggacc

SEQ ID NO: 36080 - DNA, 38 bp, Artificial Sequence
  primer
gtaaaacgacggccagtgaaacaggatctgcctgatgg

SEQ ID NO: 36081 - DNA, 36 bp, Artificial Sequence
  primer
gtaaaacgacggccagtgttgagtgaggctgggtgg

SEQ ID NO: 36082 - DNA, 39 bp, Artificial Sequence
  primer
gtaaaacgacggccagtgaacatttccaatttccttccc

SEQ ID NO: 36083 - DNA, 39 bp, Artificial Sequence
  primer
gtaaaacgacggccagtaaagggccactactctcattcc

SEQ ID NO: 36084 - DNA, 22 bp, Artificial Sequence
  primer
aagaacctgatgtttggctcag

SEQ ID NO: 36085 - DNA, 38 bp, Artificial Sequence
  primer
gtaaaacgacggccagtgacttcacatggagccgtacc

SEQ ID NO: 36086 - DNA, 21 bp, Artificial Sequence
  primer
aggcttcaccaaaccactgag

SEQ ID NO: 36087 - DNA, 38 bp, Artificial Sequence
  primer
gtaaaacgacggccagtaacatttgctccacaatagcc

SEQ ID NO: 36088 - DNA, 38 bp, Artificial Sequence
  primer
gtaaaacgacggccagtaaagcttccatgttggagcag

SEQ ID NO: 36089 - DNA, 21 bp, Artificial Sequence
  primer
tatatgcattgatgggccaaa

SEQ ID NO: 36090 - DNA, 38 bp, Artificial Sequence
  primer
gtaaaacgacggccagtaagcctatgcaaagacaaggc

SEQ ID NO: 36091 - DNA, 38 bp, Artificial Sequence
  primer
gtaaaacgacggccagtaaagacaaccaaacccagacc

SEQ ID NO: 36092 - DNA, 41 bp, Artificial Sequence
  primer
gtaaaacgacggccagtccgagattaatcctttccattaac

SEQ ID NO: 36093 - DNA, 21 bp, Artificial Sequence
  primer
tgtcccatagtggaaggtcag

SEQ ID NO: 36094 - DNA, 23 bp, Artificial Sequence
  primer
ttgttcttggaatttggaagtga

SEQ ID NO: 36095 - DNA, 23 bp, Artificial Sequence
  primer
tgaagcctagagcaaggacatag

SEQ ID NO: 36096 - DNA, 43 bp, Artificial Sequence
  primer
gtaaaacgacggccagttggacaaatgttctttagattaatgg

SEQ ID NO: 36097 - DNA, 22 bp, Artificial Sequence
  primer
cagactccctgcctcaaactta

SEQ ID NO: 36098 - DNA, 21 bp, Artificial Sequence
  primer
aaatgggcacacttcctatgg

SEQ ID NO: 36099 - DNA, 21 bp, Artificial Sequence
  primer
gcctccgtgtgtgtcattatc

SEQ ID NO: 36100 - DNA, 41 bp, Artificial Sequence
  primer
gtaaaacgacggccagttggtccaacatcattcatatagca

SEQ ID NO: 36101 - DNA, 40 bp, Artificial Sequence
  primer
gtaaaacgacggccagtaaatatgatgatcagccaacacc

SEQ ID NO: 36102 - DNA, 38 bp, Artificial Sequence
  primer
gtaaaacgacggccagtacccaagtggagcatgatgag

SEQ ID NO: 36103 - DNA, 22 bp, Artificial Sequence
  primer
tgcttaagtcacatctccttgg

SEQ ID NO: 36104 - DNA, 38 bp, Artificial Sequence
  primer
gtaaaacgacggccagtggctatgcaatctcgccttag

SEQ ID NO: 36105 - DNA, 38 bp, Artificial Sequence
  primer
gtaaaacgacggccagtctcagagccctcctttctgtc

SEQ ID NO: 36106 - DNA, 37 bp, Artificial Sequence
  primer
gtaaaacgacggccagttttactggacagcacagccc

SEQ ID NO: 36107 - DNA, 21 bp, Artificial Sequence
  primer
gaactttccctctcatcagcc

SEQ ID NO: 36108 - DNA, 38 bp, Artificial Sequence
  primer
gtaaaacgacggccagttagtgaactgctgcttctccg

SEQ ID NO: 36109 - DNA, 37 bp, Artificial Sequence
  primer
gtaaaacgacggccagtagttcagagcatggtggctg

SEQ ID NO: 36110 - DNA, 21 bp, Artificial Sequence
  primer
ctcaaggagattccacacagc

SEQ ID NO: 36111 - DNA, 21 bp, Artificial Sequence
  primer
aggagagtgaggatcagccag

SEQ ID NO: 36112 - DNA, 38 bp, Artificial Sequence
  primer
gtaaaacgacggccagttttcttgtgcctccttcttcc

SEQ ID NO: 36113 - DNA, 38 bp, Artificial Sequence
  primer
gtaaaacgacggccagtagccctgaggtaggactggac

SEQ ID NO: 36114 - DNA, 21 bp, Artificial Sequence
  primer
tctggatgcattctggaagag

SEQ ID NO: 36115 - DNA, 38 bp, Artificial Sequence
  primer
gtaaaacgacggccagtacaacagtcacaggagttggc

SEQ ID NO: 36116 - DNA, 38 bp, Artificial Sequence
  primer
gtaaaacgacggccagtttaggacagagcctctcagcc

SEQ ID NO: 36117 - DNA, 21 bp, Artificial Sequence
  primer
gattcctcccattgagcagac

SEQ ID NO: 36118 - DNA, 37 bp, Artificial Sequence
  primer
gtaaaacgacggccagtgctgccctgtcttggtactg

SEQ ID NO: 36119 - DNA, 38 bp, Artificial Sequence
  primer
gtaaaacgacggccagtgtgagggctgggtagataagg

SEQ ID NO: 36120 - DNA, 21 bp, Artificial Sequence
  primer
gcctatgttcagagggaccac

SEQ ID NO: 36121 - DNA, 38 bp, Artificial Sequence
  primer
gtaaaacgacggccagtctactcttggcaaaggttggg

SEQ ID NO: 36122 - DNA, 21 bp, Artificial Sequence
  primer
agggaggctctctgggaatag

SEQ ID NO: 36123 - DNA, 21 bp, Artificial Sequence
  primer
tgaggcctaagactgggtcac

SEQ ID NO: 36124 - DNA, 21 bp, Artificial Sequence
  primer
gaatgtgctgggtgtaactgc

SEQ ID NO: 36125 - DNA, 38 bp, Artificial Sequence
  primer
gtaaaacgacggccagtcctcccagtacctaaagctgg

SEQ ID NO: 36126 - DNA, 38 bp, Artificial Sequence
  primer
gtaaaacgacggccagtgtctcaatcttgccacaaggg

SEQ ID NO: 36127 - DNA, 25 bp, Artificial Sequence
  primer
ttcagtgtctccaaatgataaacag

SEQ ID NO: 36128 - DNA, 38 bp, Artificial Sequence
  primer
gtaaaacgacggccagtgctttgtatgcaaatggagca

SEQ ID NO: 36129 - DNA, 40 bp, Artificial Sequence
  primer
gtaaaacgacggccagtcgtttctgataaatacttgggca

SEQ ID NO: 36130 - DNA, 22 bp, Artificial Sequence
  primer
cccaaacctcagcattacacag

SEQ ID NO: 36131 - DNA, 29 bp, Artificial Sequence
  primer
tttgtatagatacattaaggacacaatgg

SEQ ID NO: 36132 - DNA, 39 bp, Artificial Sequence
  primer
gtaaaacgacggccagttcatcaacaacttgatggctgt

SEQ ID NO: 36133 - DNA, 38 bp, Artificial Sequence
  primer
gtaaaacgacggccagtaatcctgtgccttcttgttca

SEQ ID NO: 36134 - DNA, 40 bp, Artificial Sequence
  primer
gtaaaacgacggccagtgcctctgttctcacttcaatctg

SEQ ID NO: 36135 - DNA, 24 bp, Artificial Sequence
  primer
ttcaggccatcctgtctaatactc

SEQ ID NO: 36136 - DNA, 21 bp, Artificial Sequence
  primer
caagcactgacaccctgaatg

SEQ ID NO: 36137 - DNA, 27 bp, Artificial Sequence
  primer
aatactagcttaaggcaacatgttctg

SEQ ID NO: 36138 - DNA, 22 bp, Artificial Sequence
  primer
tgtggatccagtgaaatgtagc

SEQ ID NO: 36139 - DNA, 22 bp, Artificial Sequence
  primer
ttataccaccttggtttgctcc

SEQ ID NO: 36140 - DNA, 39 bp, Artificial Sequence
  primer
gtaaaacgacggccagtccctaagtgcttctgaaattgg

SEQ ID NO: 36141 - DNA, 38 bp, Artificial Sequence
  primer
gtaaaacgacggccagtaaagcaggagaggcagatgtc

SEQ ID NO: 36142 - DNA, 23 bp, Artificial Sequence
  primer
tcatgtgccaatgatgaaattat

SEQ ID NO: 36143 - DNA, 40 bp, Artificial Sequence
  primer
gtaaaacgacggccagtaataaatgcctgtggattacagc

SEQ ID NO: 36144 - DNA, 38 bp, Artificial Sequence
  primer
gtaaaacgacggccagtagaaacggaaatggaccagtg

SEQ ID NO: 36145 - DNA, 21 bp, Artificial Sequence
  primer
tcaggaaataagtcagtgccc

SEQ ID NO: 36146 - DNA, 38 bp, Artificial Sequence
  primer
gtaaaacgacggccagttatgatagccgccatctcctc

SEQ ID NO: 36147 - DNA, 21 bp, Artificial Sequence
  primer
acctgatgattctgccatgtg

SEQ ID NO: 36148 - DNA, 38 bp, Artificial Sequence
  primer
gtaaaacgacggccagtgggaacaccacaaatatccag

SEQ ID NO: 36149 - DNA, 20 bp, Artificial Sequence
  primer
cacctccctgaatgtctccc

SEQ ID NO: 36150 - DNA, 41 bp, Artificial Sequence
  primer
gtaaaacgacggccagttgacctgctacaaatttagctgac

SEQ ID NO: 36151 - DNA, 19 bp, Artificial Sequence
  primer
accactgcactggcaacag

SEQ ID NO: 36152 - DNA, 42 bp, Artificial Sequence
  primer
gtaaaacgacggccagttgacagaatgacagaactaatttgc

SEQ ID NO: 36153 - DNA, 21 bp, Artificial Sequence
  primer
cagatgactgaggtttgctgg

SEQ ID NO: 36154 - DNA, 38 bp, Artificial Sequence
  primer
gtaaaacgacggccagtagtcaccgtgtccttcatgtg

SEQ ID NO: 36155 - DNA, 39 bp, Artificial Sequence
  primer
gtaaaacgacggccagtgataaatgaatgggtcaatgcc

SEQ ID NO: 36156 - DNA, 38 bp, Artificial Sequence
  primer
gtaaaacgacggccagtatgaggatggatggatgttcc

SEQ ID NO: 36157 - DNA, 21 bp, Artificial Sequence
  primer
aagtgagtcacctctgccagg

SEQ ID NO: 36158 - DNA, 38 bp, Artificial Sequence
  primer
gtaaaacgacggccagtaaacgccaaataagatgggtg

SEQ ID NO: 36159 - DNA, 38 bp, Artificial Sequence
  primer
gtaaaacgacggccagttccagctattaatcactgccc

SEQ ID NO: 36160 - DNA, 39 bp, Artificial Sequence
  primer
gtaaaacgacggccagttcctttgtcctgatagctctgc

SEQ ID NO: 36161 - DNA, 22 bp, Artificial Sequence
  primer
cattaaattgcctccactctcg

SEQ ID NO: 36162 - DNA, 38 bp, Artificial Sequence
  primer
gtaaaacgacggccagtgccagacaacctctacatccc

SEQ ID NO: 36163 - DNA, 23 bp, Artificial Sequence
  primer
catttccagtagaatccatgcag

SEQ ID NO: 36164 - DNA, 39 bp, Artificial Sequence
  primer
gtaaaacgacggccagttgcattggtttgtatttgttgg

SEQ ID NO: 36165 - DNA, 20 bp, Artificial Sequence
  primer
tgcttgcagctccaaagaag

SEQ ID NO: 36166 - DNA, 25 bp, Artificial Sequence
  primer
tgggaatttacctgttgattacaag

SEQ ID NO: 36167 - DNA, 38 bp, Artificial Sequence
  primer
gtaaaacgacggccagtgcaatccagttcccagttaca

SEQ ID NO: 36168 - DNA, 42 bp, Artificial Sequence
  primer
gtaaaacgacggccagtgccttcttgtcactgattaacaaac

SEQ ID NO: 36169 - DNA, 39 bp, Artificial Sequence
  primer
gtaaaacgacggccagtggctttgttgtttgagctttgt

SEQ ID NO: 36170 - DNA, 42 bp, Artificial Sequence
  primer
gtaaaacgacggccagttcaaacagacattaacaaccaaacc

SEQ ID NO: 36171 - DNA, 38 bp, Artificial Sequence
  primer
gtaaaacgacggccagtccagcacatggtccttaattg

SEQ ID NO: 36172 - DNA, 21 bp, Artificial Sequence
  primer
tttgtgtgtaacgcaatgctg

SEQ ID NO: 36173 - DNA, 42 bp, Artificial Sequence
  primer
gtaaaacgacggccagtttgctaagtggccaaataatgttta

SEQ ID NO: 36174 - DNA, 41 bp, Artificial Sequence
  primer
gtaaaacgacggccagtttacaagatcttcatgaatcaccc

SEQ ID NO: 36175 - DNA, 30 bp, Artificial Sequence
  primer
tcttacttattatcaccctagaaatggttt

SEQ ID NO: 36176 - DNA, 42 bp, Artificial Sequence
  primer
gtaaaacgacggccagtaagctggtatatgtatctggagcaa

SEQ ID NO: 36177 - DNA, 41 bp, Artificial Sequence
  primer
gtaaaacgacggccagtgcatgtttgatttctgaattgttg

SEQ ID NO: 36178 - DNA, 38 bp, Artificial Sequence
  primer
gtaaaacgacggccagttccaacttgcatccatgactt

SEQ ID NO: 36179 - DNA, 40 bp, Artificial Sequence
  primer
gtaaaacgacggccagttgcattagccttctgattctgtc

SEQ ID NO: 36180 - DNA, 21 bp, Artificial Sequence
  primer
aagcagggtgtttctgtcacc

SEQ ID NO: 36181 - DNA, 22 bp, Artificial Sequence
  primer
tttcaaagaagtgccaaagtga

SEQ ID NO: 36182 - DNA, 38 bp, Artificial Sequence
  primer
gtaaaacgacggccagttgacagactcaggcgcaatac

SEQ ID NO: 36183 - DNA, 19 bp, Artificial Sequence
  primer
gtggactccagcaacatcc

SEQ ID NO: 36184 - DNA, 38 bp, Artificial Sequence
  primer
gtaaaacgacggccagtccctccttatctgactccagc

SEQ ID NO: 36185 - DNA, 20 bp, Artificial Sequence
  primer
ctgtacctccatggcccttt

SEQ ID NO: 36186 - DNA, 21 bp, Artificial Sequence
  primer
aacaggagcgatcttgcactc

SEQ ID NO: 36187 - DNA, 41 bp, Artificial Sequence
  primer
gtaaaacgacggccagttgtagaaagcatccatttaggttg

SEQ ID NO: 36188 - DNA, 21 bp, Artificial Sequence
  primer
gggtgttatgccctttgtttg

SEQ ID NO: 36189 - DNA, 21 bp, Artificial Sequence
  primer
aaacccaccaagacagctacc

SEQ ID NO: 36190 - DNA, 41 bp, Artificial Sequence
  primer
gtaaaacgacggccagttgtcaactaagtcttctggtcagc

SEQ ID NO: 36191 - DNA, 40 bp, Artificial Sequence
  primer
gtaaaacgacggccagtcccacataatttatcgtccaatc

SEQ ID NO: 36192 - DNA, 41 bp, Artificial Sequence
  primer
gtaaaacgacggccagttccctgaaaggtagataaatgtgg

SEQ ID NO: 36193 - DNA, 38 bp, Artificial Sequence
  primer
gtaaaacgacggccagttgattgagtgaatggcgaatg

SEQ ID NO: 36194 - DNA, 22 bp, Artificial Sequence
  primer
gacccagttagccttgtccttc

SEQ ID NO: 36195 - DNA, 44 bp, Artificial Sequence
  primer
gtaaaacgacggccagtaaatgctgctcagaatctagtagtgta

SEQ ID NO: 36196 - DNA, 22 bp, Artificial Sequence
  primer
tgtctagcatagcaagtcaccc

SEQ ID NO: 36197 - DNA, 25 bp, Artificial Sequence
  primer
ttaatatgctttgaaatcgacaatg

SEQ ID NO: 36198 - DNA, 23 bp, Artificial Sequence
  primer
cattgtagaactccaggttgcat

SEQ ID NO: 36199 - DNA, 42 bp, Artificial Sequence
  primer
gtaaaacgacggccagtttcgtgtcttccgtagaaatacttg

SEQ ID NO: 36200 - DNA, 23 bp, Artificial Sequence
  primer
tttctaatctccagaggaagcac

SEQ ID NO: 36201 - DNA, 18 bp, Artificial Sequence
  primer
tttctgtgggttggcagg

SEQ ID NO: 36202 - DNA, 42 bp, Artificial Sequence
  primer
gtaaaacgacggccagtaaatgcaagactctctcacagtatg

SEQ ID NO: 36203 - DNA, 26 bp, Artificial Sequence
  primer
tttgtctctatggaagaaatgtgaaa

SEQ ID NO: 36204 - DNA, 40 bp, Artificial Sequence
  primer
gtaaaacgacggccagttggtaagttgtcctcaactctgg

SEQ ID NO: 36205 - DNA, 22 bp, Artificial Sequence
  primer
cttcttcccatattccttgtgg

SEQ ID NO: 36206 - DNA, 26 bp, Artificial Sequence
  primer
ccagatttgaataaatttgcttactg

SEQ ID NO: 36207 - DNA, 21 bp, Artificial Sequence
  primer
actctccttccagaggcattg

SEQ ID NO: 36208 - DNA, 38 bp, Artificial Sequence
  primer
gtaaaacgacggccagtttggacaaagacacggtaagg

SEQ ID NO: 36209 - DNA, 36 bp, Artificial Sequence
  primer
gtaaaacgacggccagtaggaggagagcttggagcc

SEQ ID NO: 36210 - DNA, 38 bp, Artificial Sequence
  primer
gtaaaacgacggccagtggagaaggtagcctcctctga

SEQ ID NO: 36211 - DNA, 38 bp, Artificial Sequence
  primer
gtaaaacgacggccagtctacagtctccttactgcgcc

SEQ ID NO: 36212 - DNA, 18 bp, Artificial Sequence
  primer
cgtaccaccgcactccag

SEQ ID NO: 36213 - DNA, 41 bp, Artificial Sequence
  primer
gtaaaacgacggccagtcatacagtaagtgtgcagagagcg

SEQ ID NO: 36214 - DNA, 38 bp, Artificial Sequence
  primer
gtaaaacgacggccagttctgcctaggagcttggactc

SEQ ID NO: 36215 - DNA, 21 bp, Artificial Sequence
  primer
gcctagcgagctttagtaccg

SEQ ID NO: 36216 - DNA, 38 bp, Artificial Sequence
  primer
gtaaaacgacggccagtgaagaggtcacgtcatggttg

SEQ ID NO: 36217 - DNA, 21 bp, Artificial Sequence
  primer
ctccactgggtgtgagaagtg

SEQ ID NO: 36218 - DNA, 38 bp, Artificial Sequence
  primer
gtaaaacgacggccagtgggaaggctccatctaagtcc

SEQ ID NO: 36219 - DNA, 37 bp, Artificial Sequence
  primer
gtaaaacgacggccagtgtgtgtctcaccgggttctg

SEQ ID NO: 36220 - DNA, 21 bp, Artificial Sequence
  primer
cctgcctcagcctcctaagta

SEQ ID NO: 36221 - DNA, 38 bp, Artificial Sequence
  primer
gtaaaacgacggccagtacgttcagtggctctgagttg

SEQ ID NO: 36222 - DNA, 38 bp, Artificial Sequence
  primer
gtaaaacgacggccagtcttgggttggaagattcaagg

SEQ ID NO: 36223 - DNA, 38 bp, Artificial Sequence
  primer
gtaaaacgacggccagttgtactgcaactgtgacgctg

SEQ ID NO: 36224 - DNA, 38 bp, Artificial Sequence
  primer
gtaaaacgacggccagtctggctcctctttcattccac

SEQ ID NO: 36225 - DNA, 38 bp, Artificial Sequence
  primer
gtaaaacgacggccagtttgggcaaggatctatgaagg

SEQ ID NO: 36226 - DNA, 38 bp, Artificial Sequence
  primer
gtaaaacgacggccagtatctcctgagctcgtgattcg

SEQ ID NO: 36227 - DNA, 21 bp, Artificial Sequence
  primer
gtaaatggagggttgtgaggg

SEQ ID NO: 36228 - DNA, 37 bp, Artificial Sequence
  primer
gtaaaacgacggccagtatacaaggacccacgtgctg

SEQ ID NO: 36229 - DNA, 38 bp, Artificial Sequence
  primer
gtaaaacgacggccagtatattcccagggtccacacag

SEQ ID NO: 36230 - DNA, 21 bp, Artificial Sequence
  primer
atgagtgggaaacctgtggac

SEQ ID NO: 36231 - DNA, 38 bp, Artificial Sequence
  primer
gtaaaacgacggccagtcacgtcttgtttcagaggtgc

SEQ ID NO: 36232 - DNA, 22 bp, Artificial Sequence
  primer
aatctcaaagagtgcgtgtgtg

SEQ ID NO: 36233 - DNA, 21 bp, Artificial Sequence
  primer
tctcccttcaagaaccctacg

SEQ ID NO: 36234 - DNA, 40 bp, Artificial Sequence
  primer
gtaaaacgacggccagtcagaattgcctaaattcctttgc

SEQ ID NO: 36235 - DNA, 38 bp, Artificial Sequence
  primer
gtaaaacgacggccagtgcactgccaagaccaattaag

SEQ ID NO: 36236 - DNA, 38 bp, Artificial Sequence
  primer
gtaaaacgacggccagtcaagccctaccattggatgac

SEQ ID NO: 36237 - DNA, 21 bp, Artificial Sequence
  primer
tgcagacacctgttggaagtg

SEQ ID NO: 36238 - DNA, 25 bp, Artificial Sequence
  primer
aaatgaaagatcttctgcttcacag

SEQ ID NO: 36239 - DNA, 38 bp, Artificial Sequence
  primer
gtaaaacgacggccagttttggaggcagaatgctataa

SEQ ID NO: 36240 - DNA, 39 bp, Artificial Sequence
  primer
gtaaaacgacggccagttgagtttagcttaggctcaggc

SEQ ID NO: 36241 - DNA, 40 bp, Artificial Sequence
  primer
gtaaaacgacggccagttcagtttgaattgtaagcagcac

SEQ ID NO: 36242 - DNA, 37 bp, Artificial Sequence
  primer
gtaaaacgacggccagttggccaggtagaatacccac

SEQ ID NO: 36243 - DNA, 21 bp, Artificial Sequence
  primer
gaagctccaggtcggtgatac

SEQ ID NO: 36244 - DNA, 38 bp, Artificial Sequence
  primer
gtaaaacgacggccagttcataccaggagcttgctgtc

SEQ ID NO: 36245 - DNA, 38 bp, Artificial Sequence
  primer
gtaaaacgacggccagttagggatgagcaaagagcagg

SEQ ID NO: 36246 - DNA, 38 bp, Artificial Sequence
  primer
gtaaaacgacggccagtccactctgtgggttgtctgtt

SEQ ID NO: 36247 - DNA, 21 bp, Artificial Sequence
  primer
tccagaagatgaagatgccag

SEQ ID NO: 36248 - DNA, 24 bp, Artificial Sequence
  primer
ttaaactcaagcaatgggtatctg

SEQ ID NO: 36249 - DNA, 37 bp, Artificial Sequence
  primer
gtaaaacgacggccagttctccctgctttgtttgtcg

SEQ ID NO: 36250 - DNA, 39 bp, Artificial Sequence
  primer
gtaaaacgacggccagtgcagtgtcatctcctaccacag

SEQ ID NO: 36251 - DNA, 21 bp, Artificial Sequence
  primer
gaactgctggagaggtcattg

SEQ ID NO: 36252 - DNA, 18 bp, Artificial Sequence
  primer
agcctgggcaagagcaag

SEQ ID NO: 36253 - DNA, 22 bp, Artificial Sequence
  primer
ccagggttcaaagagtgatgtc

SEQ ID NO: 36254 - DNA, 21 bp, Artificial Sequence
  primer
aagctttggacacaagcattc

SEQ ID NO: 36255 - DNA, 37 bp, Artificial Sequence
  primer
gtaaaacgacggccagtgtgggagacaatggcaagac

SEQ ID NO: 36256 - DNA, 39 bp, Artificial Sequence
  primer
gtaaaacgacggccagttgtgtctgacggagctgtagtg

SEQ ID NO: 36257 - DNA, 38 bp, Artificial Sequence
  primer
gtaaaacgacggccagttgtgtgtggtgtggcatattg

SEQ ID NO: 36258 - DNA, 21 bp, Artificial Sequence
  primer
gttggatgcaaactgtgatgc

SEQ ID NO: 36259 - DNA, 41 bp, Artificial Sequence
  primer
gtaaaacgacggccagttgggaatggatttgtgacagttag

SEQ ID NO: 36260 - DNA, 38 bp, Artificial Sequence
  primer
gtaaaacgacggccagtcatggatgtgtgcccaattat

SEQ ID NO: 36261 - DNA, 22 bp, Artificial Sequence
  primer
cccattgtaaaggctcctactg

SEQ ID NO: 36262 - DNA, 21 bp, Artificial Sequence
  primer
ccagtaatcacgtcatgtggg

SEQ ID NO: 36263 - DNA, 38 bp, Artificial Sequence
  primer
gtaaaacgacggccagttgcaaacctttggacactgac

SEQ ID NO: 36264 - DNA, 38 bp, Artificial Sequence
  primer
gtaaaacgacggccagtaaagacaggtctgctttgcct

SEQ ID NO: 36265 - DNA, 20 bp, Artificial Sequence
  primer
cacctgggagtaaagggagc

SEQ ID NO: 36266 - DNA, 38 bp, Artificial Sequence
  primer
gtaaaacgacggccagtctgtggctgctttcacacttt

SEQ ID NO: 36267 - DNA, 38 bp, Artificial Sequence
  primer
gtaaaacgacggccagtgccgtcattatctccttccat

SEQ ID NO: 36268 - DNA, 38 bp, Artificial Sequence
  primer
gtaaaacgacggccagttaaggcctgagtttgacatgg

SEQ ID NO: 36269 - DNA, 39 bp, Artificial Sequence
  primer
gtaaaacgacggccagttcccaggatatttaaggtttgg

SEQ ID NO: 36270 - DNA, 39 bp, Artificial Sequence
  primer
gtaaaacgacggccagtgagtctggcacaggaatagcac

SEQ ID NO: 36271 - DNA, 38 bp, Artificial Sequence
  primer
gtaaaacgacggccagtcctttcctcatcttcctttgc

SEQ ID NO: 36272 - DNA, 39 bp, Artificial Sequence
  primer
gtaaaacgacggccagtgccagacaggtaaagattcacg

SEQ ID NO: 36273 - DNA, 21 bp, Artificial Sequence
  primer
aatttgggagaccaaggtgag

SEQ ID NO: 36274 - DNA, 39 bp, Artificial Sequence
  primer
gtaaaacgacggccagtcaggtggaggtaattgaattgg

SEQ ID NO: 36275 - DNA, 43 bp, Artificial Sequence
  primer
gtaaaacgacggccagtttctagtaagccctggaagtagtagg

SEQ ID NO: 36276 - DNA, 22 bp, Artificial Sequence
  primer
gaggaatacagtcgtactggca

SEQ ID NO: 36277 - DNA, 44 bp, Artificial Sequence
  primer
gtaaaacgacggccagttgctaatagacattataggtgacaagc

SEQ ID NO: 36278 - DNA, 23 bp, Artificial Sequence
  primer
ctccatcattagttgaggagcat

SEQ ID NO: 36279 - DNA, 21 bp, Artificial Sequence
  primer
atgaaagatggtggtccacag

SEQ ID NO: 36280 - DNA, 24 bp, Artificial Sequence
  primer
cagatgtgatcagcaacttgtaaa

SEQ ID NO: 36281 - DNA, 38 bp, Artificial Sequence
  primer
gtaaaacgacggccagtatcgcggataatgtgagattg

SEQ ID NO: 36282 - DNA, 38 bp, Artificial Sequence
  primer
gtaaaacgacggccagtttccaatttgtctccctttcc

SEQ ID NO: 36283 - DNA, 26 bp, Artificial Sequence
  primer
gcagtcattattccctcctttaatac

SEQ ID NO: 36284 - DNA, 38 bp, Artificial Sequence
  primer
gtaaaacgacggccagtagggctctgatgtagtgggac

SEQ ID NO: 36285 - DNA, 24 bp, Artificial Sequence
  primer
tttgctatcaaatcactttcatcc

SEQ ID NO: 36286 - DNA, 23 bp, Artificial Sequence
  primer
tgtgttgattctacctctcaggg

SEQ ID NO: 36287 - DNA, 38 bp, Artificial Sequence
  primer
gtaaaacgacggccagtaaggaaatgccagcaatcata

SEQ ID NO: 36288 - DNA, 39 bp, Artificial Sequence
  primer
gtaaaacgacggccagtttacccatgccaacattaaacc

SEQ ID NO: 36289 - DNA, 20 bp, Artificial Sequence
  primer
cccagtgcataggaaacgag

SEQ ID NO: 36290 - DNA, 39 bp, Artificial Sequence
  primer
gtaaaacgacggccagtaatggaaggattaagacctggg

SEQ ID NO: 36291 - DNA, 21 bp, Artificial Sequence
  primer
agctatttccagatgggatcg

SEQ ID NO: 36292 - DNA, 18 bp, Artificial Sequence
  primer
attgggagtggaggtggg

SEQ ID NO: 36293 - DNA, 38 bp, Artificial Sequence
  primer
gtaaaacgacggccagtacaggtgtgtcattccaggtg

SEQ ID NO: 36294 - DNA, 20 bp, Artificial Sequence
  primer
ggagggaatccactctcctg

SEQ ID NO: 36295 - DNA, 37 bp, Artificial Sequence
  primer
gtaaaacgacggccagtcacgggatggagtgaaagag

SEQ ID NO: 36296 - DNA, 21 bp, Artificial Sequence
  primer
cgggagtacctgaccttgttc

SEQ ID NO: 36297 - DNA, 20 bp, Artificial Sequence
  primer
ggaagagtagggcccatttg

SEQ ID NO: 36298 - DNA, 39 bp, Artificial Sequence
  primer
gtaaaacgacggccagttgttctcagtacgagttcgtgg

SEQ ID NO: 36299 - DNA, 41 bp, Artificial Sequence
  primer
gtaaaacgacggccagtgaactggacatgaaataagatggg

SEQ ID NO: 36300 - DNA, 21 bp, Artificial Sequence
  primer
agcctgttattccttcccagg

SEQ ID NO: 36301 - DNA, 37 bp, Artificial Sequence
  primer
gtaaaacgacggccagtgccatttggctcaagcatac

SEQ ID NO: 36302 - DNA, 22 bp, Artificial Sequence
  primer
tcctgaaattaaggtcagctcc

SEQ ID NO: 36303 - DNA, 20 bp, Artificial Sequence
  primer
gctctgagaatggcatggac

SEQ ID NO: 36304 - DNA, 21 bp, Artificial Sequence
  primer
ggtcttccatcaataggtcgc

SEQ ID NO: 36305 - DNA, 38 bp, Artificial Sequence
  primer
gtaaaacgacggccagtcgcagtaatgcaaggtgattc

SEQ ID NO: 36306 - DNA, 38 bp, Artificial Sequence
  primer
gtaaaacgacggccagtactggtgtgttaaggcttggg

SEQ ID NO: 36307 - DNA, 38 bp, Artificial Sequence
  primer
gtaaaacgacggccagtccatacggtaccggagtgttg

SEQ ID NO: 36308 - DNA, 38 bp, Artificial Sequence
  primer
gtaaaacgacggccagtcagctcagtttctgtgccatc

SEQ ID NO: 36309 - DNA, 37 bp, Artificial Sequence
  primer
gtaaaacgacggccagtgcaactggccaaatcacttc

SEQ ID NO: 36310 - DNA, 38 bp, Artificial Sequence
  primer
gtaaaacgacggccagtatccacatgtccagtgctttc

SEQ ID NO: 36311 - DNA, 38 bp, Artificial Sequence
  primer
gtaaaacgacggccagtaatcgtttctcccactcaagc

SEQ ID NO: 36312 - DNA, 39 bp, Artificial Sequence; identical to SEQ ID NO: 36288
  primer

SEQ ID NO: 36313 - DNA, 21 bp, Artificial Sequence
  primer
atgcatggaaatagcagcttg

SEQ ID NO: 36314 - DNA, 37 bp, Artificial Sequence
  primer
gtaaaacgacggccagtggtccaaggtcccatacagg

SEQ ID NO: 36315 - DNA, 38 bp, Artificial Sequence
  primer
gtaaaacgacggccagtttcttgatttcatcacgcacc

SEQ ID NO: 36316 - DNA, 38 bp, Artificial Sequence
  primer
gtaaaacgacggccagtcagttgaaccctttctgccac

SEQ ID NO: 36317 - DNA, 21 bp, Artificial Sequence
  primer
gaactggttctcagtttgccc

SEQ ID NO: 36318 - DNA, 39 bp, Artificial Sequence
  primer
gtaaaacgacggccagttgctggagagtagaagctgagg

SEQ ID NO: 36319 - DNA, 38 bp, Artificial Sequence
  primer
gtaaaacgacggccagtaatagctcagcgactgaaggg

SEQ ID NO: 36320 - DNA, 21 bp, Artificial Sequence
  primer
taagccgctactagacccagg

SEQ ID NO: 36321 - DNA, 20 bp, Artificial Sequence
  primer
aggatggcaacagctaaggg

SEQ ID NO: 36322 - DNA, 21 bp, Artificial Sequence
  primer
ctgctgtcatcccagagactg

SEQ ID NO: 36323 - DNA, 21 bp, Artificial Sequence
  primer
ctcaggctgtaagacgcattg

SEQ ID NO: 36324 - DNA, 35 bp, Artificial Sequence
  primer
gtaaaacgacggccagtaaagtgaatgagggcggc

SEQ ID NO: 36325 - DNA, 21 bp, Artificial Sequence
  primer
aagaacgaattattccgaggc

SEQ ID NO: 36326 - DNA, 22 bp, Artificial Sequence
  primer
ttgctcattcatccacttgttc

SEQ ID NO: 36327 - DNA, 21 bp, Artificial Sequence
  primer
tacacacaatcctgccacacc

SEQ ID NO: 36328 - DNA, 21 bp, Artificial Sequence
  primer
gatttcccaaatggacctgag

SEQ ID NO: 36329 - DNA, 38 bp, Artificial Sequence
  primer
gtaaaacgacggccagttagaaacagctgccgttcaag

SEQ ID NO: 36330 - DNA, 38 bp, Artificial Sequence
  primer
gtaaaacgacggccagtctaacaaccctcctggagcac

SEQ ID NO: 36331 - DNA, 36 bp, Artificial Sequence
  primer
gtaaaacgacggccagtgggccgacagactgatgtc

SEQ ID NO: 36332 - DNA, 38 bp, Artificial Sequence
  primer
gtaaaacgacggccagtacacacccatgaacaatctgc

SEQ ID NO: 36333 - DNA, 21 bp, Artificial Sequence
  primer
tcagggaaatcaaagtcatgg

SEQ ID NO: 36334 - DNA, 21 bp, Artificial Sequence
  primer
aacaatgctgggtctttcgac

SEQ ID NO: 36335 - DNA, 21 bp, Artificial Sequence
  primer
aagtgtatggctgtgctgacg

SEQ ID NO: 36336 - DNA, 38 bp, Artificial Sequence
  primer
gtaaaacgacggccagtaccggagccattaagattgac

SEQ ID NO: 36337 - DNA, 21 bp, Artificial Sequence
  primer
cagagagcagactccaagcag

SEQ ID NO: 36338 - DNA, 21 bp, Artificial Sequence
  primer
gagaagggttatgcaggcaag

SEQ ID NO: 36339 - DNA, 21 bp, Artificial Sequence
  primer
gtcactcctcccaacaaccac

SEQ ID NO: 36340 - DNA, 38 bp, Artificial Sequence
  primer
gtaaaacgacggccagtacagagctgtggtttcagtgg

SEQ ID NO: 36341 - DNA, 20 bp, Artificial Sequence
  primer
ccgggttcaaacaattctgg

SEQ ID NO: 36342 - DNA, 38 bp, Artificial Sequence
  primer
gtaaaacgacggccagtatcctcatctcctcatgccac

SEQ ID NO: 36343 - DNA, 21 bp, Artificial Sequence
  primer
ctattgcaagagtggctgtgc

SEQ ID NO: 36344 - DNA, 40 bp, Artificial Sequence
  primer
gtaaaacgacggccagtgcattagataagtttgcaaaggg

SEQ ID NO: 36345 - DNA, 21 bp, Artificial Sequence
  primer
gtggcagatgcttcataaacg

SEQ ID NO: 36346 - DNA, 22 bp, Artificial Sequence
  primer
ggcttctagcaaggcttactgc

SEQ ID NO: 36347 - DNA, 38 bp, Artificial Sequence
  primer
gtaaaacgacggccagtattccttccttgccagaattg

SEQ ID NO: 36348 - DNA, 21 bp, Artificial Sequence
  primer
ttgcctgtttctcattgtgtg

SEQ ID NO: 36349 - DNA, 38 bp, Artificial Sequence
  primer
gtaaaacgacggccagtggccacactagttaagccagg

SEQ ID NO: 36350 - DNA, 21 bp, Artificial Sequence
  primer
gaccatcaaactctgaggcac

SEQ ID NO: 36351 - DNA, 38 bp, Artificial Sequence
  primer
gtaaaacgacggccagtaactgaatcaacccagtgcag

SEQ ID NO: 36352 - DNA, 38 bp, Artificial Sequence
  primer
gtaaaacgacggccagtattcagaagatccgcttaccg

SEQ ID NO: 36353 - DNA, 21 bp, Artificial Sequence
  primer
cccaaatccttggaaatatcg

SEQ ID NO: 36354 - DNA, 38 bp, Artificial Sequence
  primer
gtaaaacgacggccagttaaatctcgggcttcaaatgc

SEQ ID NO: 36355 - DNA, 20 bp, Artificial Sequence
  primer
tgatgatgtcatcggtcagg

SEQ ID NO: 36356 - DNA, 21 bp, Artificial Sequence
  primer
gaaacaccagtgtggcaaatg

SEQ ID NO: 36357 - DNA, 40 bp, Artificial Sequence
  primer
gtaaaacgacggccagttgtcctttgtgttgatttggtaa

SEQ ID NO: 36358 - DNA, 37 bp, Artificial Sequence
  primer
gtaaaacgacggccagtccctgtgctctcaggacctc

SEQ ID NO: 36359 - DNA, 38 bp, Artificial Sequence
  primer
gtaaaacgacggccagttgtgtagggacaggcaggtag

SEQ ID NO: 36360 - DNA, 38 bp, Artificial Sequence
  primer
gtaaaacgacggccagtcctcttggcttgtcttgaagg

SEQ ID NO: 36361 - DNA, 23 bp, Artificial Sequence
  primer
gccaatatttaatgagaggaggg

SEQ ID NO: 36362 - DNA, 38 bp, Artificial Sequence
  primer
gtaaaacgacggccagtatgattgaacaagaggccagg

SEQ ID NO: 36363 - DNA, 18 bp, Artificial Sequence
  primer
ctgaggactgtgccgctg

SEQ ID NO: 36364 - DNA, 39 bp, Artificial Sequence
  primer
gtaaaacgacggccagttcctgctgagtaacgagtaggg

SEQ ID NO: 36365 - DNA, 37 bp, Artificial Sequence
  primer
gtaaaacgacggccagtgtgtgtgtcacgtcagggtg

SEQ ID NO: 36366 - DNA, 38 bp, Artificial Sequence
  primer
gtaaaacgacggccagtactaagtacgggctgtagggc

SEQ ID NO: 36367 - DNA, 38 bp, Artificial Sequence
  primer
gtaaaacgacggccagttgagaccctgtgcttctcatc

SEQ ID NO: 36368 - DNA, 36 bp, Artificial Sequence
  primer
gtaaaacgacggccagtggccatgtcctgtctccag

SEQ ID NO: 36369 - DNA, 37 bp, Artificial Sequence
  primer
gtaaaacgacggccagtcttgtggtgcttgtgtgtgg

SEQ ID NO: 36370 - DNA, 19 bp, Artificial Sequence
  primer
gcctcccagacctagaggg

SEQ ID NO: 36371 - DNA, 21 bp, Artificial Sequence
  primer
tatcagtcaccatgtccgcag

SEQ ID NO: 36372 - DNA, 44 bp, Artificial Sequence
  primer
gtaaaacgacggccagtggaatggtatggaagggtatataagtc

SEQ ID NO: 36373 - DNA, 41 bp, Artificial Sequence
  primer
gtaaaacgacggccagtaaagcaatagatacaacatggcac

SEQ ID NO: 36374 - DNA, 21 bp, Artificial Sequence
  primer
tagcatgcagcaggatgtttg

SEQ ID NO: 36375 - DNA, 21 bp, Artificial Sequence
  primer
ggtcattgctttccctagtcc

SEQ ID NO: 36376 - DNA, 38 bp, Artificial Sequence
  primer
gtaaaacgacggccagtcaagatctccatttgggaagg

SEQ ID NO: 36377 - DNA, 20 bp, Artificial Sequence
  primer
aggatgcaatgcctcagttg

SEQ ID NO: 36378 - DNA, 25 bp, Artificial Sequence
  primer
ggcctggtagataattaaactttcc

SEQ ID NO: 36379 - DNA, 38 bp, Artificial Sequence
  primer
gtaaaacgacggccagtgtggccagagagtttggtgtc

SEQ ID NO: 36380 - DNA, 38 bp, Artificial Sequence
  primer
gtaaaacgacggccagtctcttaccacatgcccaactg

SEQ ID NO: 36381 - DNA, 21 bp, Artificial Sequence
  primer
caaatgatgtgcagcaagacc

SEQ ID NO: 36382 - DNA, 41 bp, Artificial Sequence
  primer
gtaaaacgacggccagttcgctgcaactatgtaacagtgta

SEQ ID NO: 36383 - DNA, 37 bp, Artificial Sequence
  primer
gtaaaacgacggccagtccctcgggtaacaaacatgg

SEQ ID NO: 36384 - DNA, 38 bp, Artificial Sequence
  primer
gtaaaacgacggccagtgggctttgatgacttgctgag

SEQ ID NO: 36385 - DNA, 21 bp, Artificial Sequence
  primer
attacgggtttatggcgtttg

SEQ ID NO: 36386 - DNA, 21 bp, Artificial Sequence
  primer
cgaggccctgtgctctataat

SEQ ID NO: 36387 - DNA, 38 bp, Artificial Sequence
  primer
gtaaaacgacggccagtggtgaggtttcactgtgttgc

SEQ ID NO: 36388 - DNA, 41 bp, Artificial Sequence
  primer
gtaaaacgacggccagtaagagattgtcaaatgggattctg

SEQ ID NO: 36389 - DNA, 38 bp, Artificial Sequence
  primer
gtaaaacgacggccagtcaccatgccatctttctgaag

SEQ ID NO: 36390 - DNA, 38 bp, Artificial Sequence
  primer
gtaaaacgacggccagtcaacatgtcgctcttcctctg

SEQ ID NO: 36391 - DNA, 19 bp, Artificial Sequence
  primer
agtgccaagctgcactcag

SEQ ID NO: 36392 - DNA, 38 bp, Artificial Sequence
  primer
gtaaaacgacggccagttcagcagcttgagctgttctc

SEQ ID NO: 36393 - DNA, 21 bp, Artificial Sequence
  primer
cctgtaagaagcgttgctgag

SEQ ID NO: 36394 - DNA, 21 bp, Artificial Sequence
  primer
ggtctcttccctgctgttagg

SEQ ID NO: 36395 - DNA, 21 bp, Artificial Sequence
  primer
gacatcatgcttgagggtgac

SEQ ID NO: 36396 - DNA, 21 bp, Artificial Sequence
  primer
aatacggtagcgatgggtgac

SEQ ID NO: 36397 - DNA, 20 bp, Artificial Sequence
  primer
caggtgcctatagtcccagc

SEQ ID NO: 36398 - DNA, 21 bp, Artificial Sequence
  primer
tagagccatcgtgcttctcag

SEQ ID NO: 36399 - DNA, 35 bp, Artificial Sequence
  primer
gtaaaacgacggccagtctgtgccgtggaaactgg

SEQ ID NO: 36400 - DNA, 37 bp, Artificial Sequence
  primer
gtaaaacgacggccagtacgggaatgggctttcttac

SEQ ID NO: 36401 - DNA, 22 bp, Artificial Sequence
  primer
aaattgtgcctaaggaggcttt

SEQ ID NO: 36402 - DNA, 20 bp, Artificial Sequence
  primer
ccaatcttgcatgaccttgg

SEQ ID NO: 36403 - DNA, 21 bp, Artificial Sequence
  primer
aaagatttgcattcttgggaa

SEQ ID NO: 36404 - DNA, 38 bp, Artificial Sequence
  primer
gtaaaacgacggccagtcaggcgtgtgatgtattctcg

SEQ ID NO: 36405 - DNA, 22 bp, Artificial Sequence
  primer
gggttcattgttattctccagg

SEQ ID NO: 36406 - DNA, 21 bp, Artificial Sequence
  primer
agggtgagtgtgaggaagcag

SEQ ID NO: 36407 - DNA, 38 bp, Artificial Sequence
  primer
gtaaaacgacggccagtgcagaagcaacacagtggaaa

SEQ ID NO: 36408 - DNA, 38 bp, Artificial Sequence
  primer
gtaaaacgacggccagttatcacagaaccactttgggc

SEQ ID NO: 36409 - DNA, 22 bp, Artificial Sequence
  primer
tcagaccagctgcaaataacag

SEQ ID NO: 36410 - DNA, 20 bp, Artificial Sequence
  primer
ctccaacagctttgctgacc

SEQ ID NO: 36411 - DNA, 19 bp, Artificial Sequence
  primer
gggccgtagtttgtccttg

SEQ ID NO: 36412 - DNA, 23 bp, Artificial Sequence
  primer
gatgcaaatagaattgcctcttc

SEQ ID NO: 36413 - DNA, 43 bp, Artificial Sequence
  primer
gtaaaacgacggccagtaaatccttggttgtttctctattctg

SEQ ID NO: 36414 - DNA, 21 bp, Artificial Sequence
  primer
catgttctccaggcagctttc

SEQ ID NO: 36415 - DNA, 21 bp, Artificial Sequence
  primer
ttggtccacaaagccagttac

SEQ ID NO: 36416 - DNA, 22 bp, Artificial Sequence
  primer
tcttcagggaactgtcttctgg

SEQ ID NO: 36417 - DNA, 20 bp, Artificial Sequence
  primer
agtgttggaagctccggttc

SEQ ID NO: 36418 - DNA, 22 bp, Artificial Sequence
  primer
caactgagatggaaacccaatc

SEQ ID NO: 36419 - DNA, 39 bp, Artificial Sequence
  primer
gtaaaacgacggccagtacttgctgcttagcatgtagcc

SEQ ID NO: 36420 - DNA, 44 bp, Artificial Sequence
  primer
gtaaaacgacggccagtccttcttaagtattgaaacggtttatg

SEQ ID NO: 36421 - DNA, 26 bp, Artificial Sequence
  primer
ctgtttagtgtaactttgagactggc

SEQ ID NO: 36422 - DNA, 24 bp, Artificial Sequence
  primer
tgtcctaaaggcaaatatgctgac

SEQ ID NO: 36423 - DNA, 22 bp, Artificial Sequence
  primer
gctttacatagggacaccttgg

SEQ ID NO: 36424 - DNA, 38 bp, Artificial Sequence
  primer
gtaaaacgacggccagtagccataggaaatggttgctg

SEQ ID NO: 36425 - DNA, 25 bp, Artificial Sequence
  primer
aaatatactgaaatgctgtggtgaa

SEQ ID NO: 36426 - DNA, 39 bp, Artificial Sequence
  primer
gtaaaacgacggccagtaagaggtttggcaacctacact

SEQ ID NO: 36427 - DNA, 26 bp, Artificial Sequence
  primer
gttatctctgcacataaagtgtaggc

SEQ ID NO: 36428 - DNA, 23 bp, Artificial Sequence
  primer
ttgactggaagaaatcaatgagg

SEQ ID NO: 36429 - DNA, 44 bp, Artificial Sequence
  primer
gtaaaacgacggccagttgaacaatttagtaacatctttgcttg

SEQ ID NO: 36430 - DNA, 24 bp, Artificial Sequence
  primer
gcatgatattctttaggcagtgag

SEQ ID NO: 36431 - DNA, 23 bp, Artificial Sequence
  primer
aaattggtgccctctagctactt

SEQ ID NO: 36432 - DNA, 21 bp, Artificial Sequence
  primer
tgggaataggaaaccaggaag

SEQ ID NO: 36433 - DNA, 39 bp, Artificial Sequence
  primer
gtaaaacgacggccagtttgacaccataggctgtaaacc

SEQ ID NO: 36434 - DNA, 38 bp, Artificial Sequence
  primer
gtaaaacgacggccagtagttgctgaaggtgaattggc

SEQ ID NO: 36435 - DNA, 38 bp, Artificial Sequence
  primer
gtaaaacgacggccagtattggtggtgggagataaacg

SEQ ID NO: 36436 - DNA, 38 bp, Artificial Sequence
  primer
gtaaaacgacggccagtaccacccttgagagcagtacc

SEQ ID NO: 36437 - DNA, 19 bp, Artificial Sequence
  primer
tttgctgccttagcccttg

SEQ ID NO: 36438 - DNA, 38 bp, Artificial Sequence
  primer
gtaaaacgacggccagtagatacatcgcttccactcgc

SEQ ID NO: 36439 - DNA, 37 bp, Artificial Sequence
  primer
gtaaaacgacggccagtgcaggtttgttacctggctg

SEQ ID NO: 36440 - DNA, 38 bp, Artificial Sequence
  primer
gtaaaacgacggccagtccattagagttcattgggcac

SEQ ID NO: 36441 - DNA, 22 bp, Artificial Sequence
  primer
tcacccttcagctaagtgattg

SEQ ID NO: 36442 - DNA, 43 bp, Artificial Sequence
  primer
gtaaaacgacggccagtgagcaaactgagctaagagttacagg

SEQ ID NO: 36443 - DNA, 39 bp, Artificial Sequence
  primer
gtaaaacgacggccagtgctcctgaatctccctaccttc

SEQ ID NO: 36444 - DNA, 38 bp, Artificial Sequence
  primer
gtaaaacgacggccagtttacacaaagtggcatggacc

SEQ ID NO: 36445 - DNA, 21 bp, Artificial Sequence
  primer
ccagacatcaagggaaatgtg

SEQ ID NO: 36446 - DNA, 38 bp, Artificial Sequence
  primer
gtaaaacgacggccagtaccttcggttagtcctggatg

SEQ ID NO: 36447 - DNA, 38 bp, Artificial Sequence
  primer
gtaaaacgacggccagttggcttgaagggaaggtaaac

SEQ ID NO: 36448 - DNA, 38 bp, Artificial Sequence
  primer
gtaaaacgacggccagtaatttgggactctctttgccc

SEQ ID NO: 36449 - DNA, 27 bp, Artificial Sequence
  primer
ttcaaagaaagactataaaggaacctg

SEQ ID NO: 36450 - DNA, 38 bp, Artificial Sequence
  primer
gtaaaacgacggccagtcagagctagggccagtgtacc

SEQ ID NO: 36451 - DNA, 20 bp, Artificial Sequence
  primer
gctgggtcagagtggtgaag

SEQ ID NO: 36452 - DNA, 38 bp, Artificial Sequence
  primer
gtaaaacgacggccagtgctcagatgtagcagtgtggg

SEQ ID NO: 36453 - DNA, 38 bp, Artificial Sequence
  primer
gtaaaacgacggccagtagtagaactggctggtggctc

SEQ ID NO: 36454 - DNA, 21 bp, Artificial Sequence
  primer
aggatagagggaagggatggg

SEQ ID NO: 36455 - DNA, 38 bp, Artificial Sequence
  primer
gtaaaacgacggccagtgatgagtcagaaggcacaggg

SEQ ID NO: 36456 - DNA, 21 bp, Artificial Sequence
  primer
tggcctcacgctactatcctc

SEQ ID NO: 36457 - DNA, 38 bp, Artificial Sequence
  primer
gtaaaacgacggccagtttctgaagccgtagagcaaac

SEQ ID NO: 36458 - DNA, 38 bp, Artificial Sequence
  primer
gtaaaacgacggccagttccctctaaaccatgtctgcc

SEQ ID NO: 36459 - DNA, 20 bp, Artificial Sequence
  primer
aaatgtgcaacagtgccctc

SEQ ID NO: 36460 - DNA, 36 bp, Artificial Sequence
  primer
gtaaaacgacggccagtcactgctcgagtacctgcg

SEQ ID NO: 36461 - DNA, 26 bp, Artificial Sequence
  primer
cattaagcagtatagtggagtggttc

SEQ ID NO: 36462 - DNA, 21 bp, Artificial Sequence
  primer
tgttcccgcttacaactcatc

SEQ ID NO: 36463 - DNA, 21 bp, Artificial Sequence
  primer
tggttgcttggattaggatgg

SEQ ID NO: 36464 - DNA, 40 bp, Artificial Sequence
  primer
gtaaaacgacggccagtgctttacagggagctgttgatag

SEQ ID NO: 36465 - DNA, 38 bp, Artificial Sequence
  primer
gtaaaacgacggccagtcacctatcaacccactgtgct

SEQ ID NO: 36466 - DNA, 23 bp, Artificial Sequence
  primer
gaatggcaaccctgtttaatagc

SEQ ID NO: 36467 - DNA, 40 bp, Artificial Sequence
  primer
gtaaaacgacggccagttgctgaagtcctgcttaaagttg

SEQ ID NO: 36468 - DNA, 21 bp, Artificial Sequence
  primer
ggtatgtgtcgcttccctttc

SEQ ID NO: 36469 - DNA, 23 bp, Artificial Sequence
  primer
tggttattccaaattgtgtgacc

SEQ ID NO: 36470 - DNA, 20 bp, Artificial Sequence
  primer
gccctgaatggctaagcaac

SEQ ID NO: 36471 - DNA, 41 bp, Artificial Sequence
  primer
gtaaaacgacggccagttgccctatagtatgggttatttgg

SEQ ID NO: 36472 - DNA, 44 bp, Artificial Sequence
  primer
gtaaaacgacggccagtaaaggttactatggtcctgaatgttta

SEQ ID NO: 36473 - DNA, 38 bp, Artificial Sequence
  primer
gtaaaacgacggccagtatgcaaccagttcttggaagc

SEQ ID NO: 36474 - DNA, 21 bp, Artificial Sequence
  primer
cccggttaaagaatgtgtgtg

SEQ ID NO: 36475 - DNA, 27 bp, Artificial Sequence
  primer
catgaataaaggaaacctagctcttag

SEQ ID NO: 36476 - DNA, 21 bp, Artificial Sequence
  primer
tggttagggagaggagcagac

SEQ ID NO: 36477 - DNA, 38 bp, Artificial Sequence
  primer
gtaaaacgacggccagtttgaaatagcagcattggtgg

SEQ ID NO: 36478 - DNA, 38 bp, Artificial Sequence
  primer
gtaaaacgacggccagttagttggccatcacaacttgc

SEQ ID NO: 36479 - DNA, 38 bp, Artificial Sequence
  primer
gtaaaacgacggccagtgtagatcagcctgtgagcacg

SEQ ID NO: 36480 - DNA, 21 bp, Artificial Sequence
  primer
ccttggtagtcaggaaggtgc

SEQ ID NO: 36481 - DNA, 22 bp, Artificial Sequence
  primer
gcttgtgaaaccgagcattaac

SEQ ID NO: 36482 - DNA, 37 bp, Artificial Sequence
  primer
gtaaaacgacggccagtgagagcccaagcagggttac

SEQ ID NO: 36483 - DNA, 41 bp, Artificial Sequence
  primer
gtaaaacgacggccagtgcatgcttcagtaatttgaaggtc

SEQ ID NO: 36484 - DNA, 21 bp, Artificial Sequence
  primer
gggatctcttgtcatgccttg

SEQ ID NO: 36485 - DNA, 40 bp, Artificial Sequence
  primer
gtaaaacgacggccagtgaactgagtgtgttcctccagtg

SEQ ID NO: 36486 - DNA, 43 bp, Artificial Sequence
  primer
gtaaaacgacggccagtaatatttgaggcagaaacaagacttt

SEQ ID NO: 36487 - DNA, 38 bp, Artificial Sequence
  primer
gtaaaacgacggccagtttgtttgcccttggtagtgac

SEQ ID NO: 36488 - DNA, 43 bp, Artificial Sequence
  primer
gtaaaacgacggccagtcagcagttgataaataagtgatggtt

SEQ ID NO: 36489 - DNA, 38 bp, Artificial Sequence
  primer
gtaaaacgacggccagtgactcctggaatgcaacagac

SEQ ID NO: 36490 - DNA, 21 bp, Artificial Sequence
  primer
ttggttgtctcagaaattgcg

SEQ ID NO: 36491 - DNA, 37 bp, Artificial Sequence
  primer
gtaaaacgacggccagtcccggaggtacacctagacc

SEQ ID NO: 36492 - DNA, 25 bp, Artificial Sequence
  primer
tcaaagtcagatgaattaacaaggc

SEQ ID NO: 36493 - DNA, 37 bp, Artificial Sequence
  primer
gtaaaacgacggccagttgccttgaaccaaattctgc

SEQ ID NO: 36494 - DNA, 21 bp, Artificial Sequence
  primer
atctgttctgacccacggttt

SEQ ID NO: 36495 - DNA, 28 bp, Artificial Sequence
  primer
aatgtgtgagtctgtgctttataacttt

SEQ ID NO: 36496 - DNA, 42 bp, Artificial Sequence
  primer
gtaaaacgacggccagttggcattaaatatcattaacccaag

SEQ ID NO: 36497 - DNA, 20 bp, Artificial Sequence
  primer
agaggtgatccctgtgcctc

SEQ ID NO: 36498 - DNA, 21 bp, Artificial Sequence
  primer
catcttccagtgcttcattgc

SEQ ID NO: 36499 - DNA, 39 bp, Artificial Sequence
  primer
gtaaaacgacggccagtaaatgaatggtttggattcagg

SEQ ID NO: 36500 - DNA, 41 bp, Artificial Sequence
  primer
gtaaaacgacggccagttgttgattgaagtgtcaagctgtc

SEQ ID NO: 36501 - DNA, 35 bp, Artificial Sequence
  primer
gtaaaacgacggccagtaagttacccgtcctggcg

SEQ ID NO: 36502 - DNA, 20 bp, Artificial Sequence
  primer
gtggctggtccaactttcac

SEQ ID NO: 36503 - DNA, 38 bp, Artificial Sequence
  primer
gtaaaacgacggccagtccctaaagacagaagcaagcc

SEQ ID NO: 36504 - DNA, 35 bp, Artificial Sequence
  primer
gtaaaacgacggccagtatgaaccaccacgatgcc

SEQ ID NO: 36505 - DNA, 21 bp, Artificial Sequence
  primer
atccaccttcatcctggtgag

SEQ ID NO: 36506 - DNA, 38 bp, Artificial Sequence
  primer
gtaaaacgacggccagtatccgtgattacgctgggtag

SEQ ID NO: 36507 - DNA, 20 bp, Artificial Sequence
  primer
ataggcataagccaccgtgc

SEQ ID NO: 36508 - DNA, 38 bp, Artificial Sequence
  primer
gtaaaacgacggccagtcctcttgattgttgctttccc

SEQ ID NO: 36509 - DNA, 21 bp, Artificial Sequence
  primer
ctgttctcccttgattcaggc

SEQ ID NO: 36510 - DNA, 39 bp, Artificial Sequence
  primer
gtaaaacgacggccagttccagagctgtagaattccagg

SEQ ID NO: 36511 - DNA, 38 bp, Artificial Sequence
  primer
gtaaaacgacggccagtcagatgtttaacggctttccc

SEQ ID NO: 36512 - DNA, 38 bp, Artificial Sequence
  primer
gtaaaacgacggccagtcactcctcaatgatgaagggc

SEQ ID NO: 36513 - DNA, 40 bp, Artificial Sequence
  primer
gtaaaacgacggccagtggaaccactattgcatagaaccc

SEQ ID NO: 36514 - DNA, 37 bp, Artificial Sequence
  primer
gtaaaacgacggccagtgtgtatttctgggtggcgtc

SEQ ID NO: 36515 - DNA, 21 bp, Artificial Sequence
  primer
agatcagacttgggatcaccc

SEQ ID NO: 36516 - DNA, 38 bp, Artificial Sequence
  primer
gtaaaacgacggccagtagcttcctggtactttggtgc

SEQ ID NO: 36517 - DNA, 38 bp, Artificial Sequence
  primer
gtaaaacgacggccagtagtaaagggcctattgagggc

SEQ ID NO: 36518 - DNA, 38 bp, Artificial Sequence
  primer
gtaaaacgacggccagtggaaatgtgcctgtttcttcc

SEQ ID NO: 36519 - DNA, 38 bp, Artificial Sequence
  primer
gtaaaacgacggccagttggcatatctggatctccatc

SEQ ID NO: 36520 - DNA, 38 bp, Artificial Sequence
  primer
gtaaaacgacggccagttggtgaacctacaggcatcag

SEQ ID NO: 36521 - DNA, 20 bp, Artificial Sequence
  primer
ctcccgtgtccatctctttg

SEQ ID NO: 36522 - DNA, 38 bp, Artificial Sequence
  primer
gtaaaacgacggccagtgtgctggagaccgacctttac

SEQ ID NO: 36523 - DNA, 27 bp, Artificial Sequence
  primer
caatgaccataattctgagtttaaatg

SEQ ID NO: 36524 - DNA, 21 bp, Artificial Sequence
  primer
ccggcctcccttaaatttcta

SEQ ID NO: 36525 - DNA, 26 bp, Artificial Sequence
  primer
ttggatttattaatgtgaatccttga

SEQ ID NO: 36526 - DNA, 36 bp, Artificial Sequence
  primer
gtaaaacgacggccagtccttcactctaccgccgac

SEQ ID NO: 36527 - DNA, 22 bp, Artificial Sequence
  primer
ggcctaacaaggtatttgatgc

SEQ ID NO: 36528 - DNA, 24 bp, Artificial Sequence
  primer
tctcctgtagctaccataaactgc

SEQ ID NO: 36529 - DNA, 21 bp, Artificial Sequence
  primer
acctgtgtcactttggcaagc

SEQ ID NO: 36530 - DNA, 21 bp, Artificial Sequence
  primer
gttcattgcatatggtctggc

SEQ ID NO: 36531 - DNA, 42 bp, Artificial Sequence
  primer
gtaaaacgacggccagtaacgtgtattgatcatcatagcaaa

SEQ ID NO: 36532 - DNA, 42 bp, Artificial Sequence
  primer
gtaaaacgacggccagtcggtacaacatacagaaagttgaga

SEQ ID NO: 36533 - DNA, 38 bp, Artificial Sequence
  primer
gtaaaacgacggccagtgcacctgctttcctgcttaat

SEQ ID NO: 36534 - DNA, 43 bp, Artificial Sequence
  primer
gtaaaacgacggccagttttagagattctacaaggaaagcctc

SEQ ID NO: 36535 - DNA, 38 bp, Artificial Sequence
  primer
gtaaaacgacggccagtggagcagcagcattccttatc

SEQ ID NO: 36536 - DNA, 43 bp, Artificial Sequence
  primer
gtaaaacgacggccagttttggtcatcctttgtgttgttatac

SEQ ID NO: 36537 - DNA, 38 bp, Artificial Sequence
  primer
gtaaaacgacggccagtctctgtatgcagctgattggg

SEQ ID NO: 36538 - DNA, 42 bp, Artificial Sequence
  primer
gtaaaacgacggccagtcaggatttgaccttatagtttggag

SEQ ID NO: 36539 - DNA, 38 bp, Artificial Sequence
  primer
gtaaaacgacggccagtctgaagcttgcatagagggaa

SEQ ID NO: 36540 - DNA, 41 bp, Artificial Sequence
  primer
gtaaaacgacggccagtttgtaaagcaagttgaaactgacg

SEQ ID NO: 36541 - DNA, 40 bp, Artificial Sequence
  primer
gtaaaacgacggccagttttcttcccttgcaacctaagtc

SEQ ID NO: 36542 - DNA, 39 bp, Artificial Sequence
  primer
gtaaaacgacggccagtaatttgcatcctttcacctctg

SEQ ID NO: 36543 - DNA, 40 bp, Artificial Sequence
  primer
gtaaaacgacggccagtgacatgttctgcattcattagca

SEQ ID NO: 36544 - DNA, 38 bp, Artificial Sequence
  primer
gtaaaacgacggccagttatcagggtttgcattcctcc

SEQ ID NO: 36545 - DNA, 35 bp, Artificial Sequence
  primer
gtaaaacgacggccagtgggacagatgagggaggg

SEQ ID NO: 36546 - DNA, 21 bp, Artificial Sequence
  primer
aatccctgacaagggtgaatg

SEQ ID NO: 36547 - DNA, 40 bp, Artificial Sequence
  primer
gtaaaacgacggccagtggttgtttattctggcgaagatg

SEQ ID NO: 36548 - DNA, 21 bp, Artificial Sequence
  primer
tgtttagcaccgtggtctcag

SEQ ID NO: 36549 - DNA, 40 bp, Artificial Sequence
  primer
gtaaaacgacggccagttgatcagtgatgcattggtagag

SEQ ID NO: 36550 - DNA, 21 bp, Artificial Sequence
  primer
tagaggaagctggaaacatgc

SEQ ID NO: 36551 - DNA, 38 bp, Artificial Sequence
  primer
gtaaaacgacggccagtcagcatgcatttgtcaatgtg

SEQ ID NO: 36552 - DNA, 20 bp, Artificial Sequence
  primer
aggcagaggccatacctagc

SEQ ID NO: 36553 - DNA, 39 bp, Artificial Sequence
  primer
gtaaaacgacggccagttgcagaattgatcagtcatgtg

SEQ ID NO: 36554 - DNA, 21 bp, Artificial Sequence
  primer
agcagcatggattcctctctc

SEQ ID NO: 36555 - DNA, 40 bp, Artificial Sequence
  primer
gtaaaacgacggccagtccctcaaagatttctccttatgc

SEQ ID NO: 36556 - DNA, 24 bp, Artificial Sequence
  primer
cccagtttattcatcagtaatcca

SEQ ID NO: 36557 - DNA, 41 bp, Artificial Sequence
  primer
gtaaaacgacggccagttggaattgaagttaagaaacgatg

SEQ ID NO: 36558 - DNA, 23 bp, Artificial Sequence
  primer
cttgagtcctaggaaatgtcacc

SEQ ID NO: 36559 - DNA, 38 bp, Artificial Sequence
  primer
gtaaaacgacggccagtcatctcgctacagtggtgctc

SEQ ID NO: 36560 - DNA, 21 bp, Artificial Sequence
  primer
gatgttgctaagcccaaccag

SEQ ID NO: 36561 - DNA, 38 bp, Artificial Sequence
  primer
gtaaaacgacggccagtagcgcgagtgcttgtttactg

SEQ ID NO: 36562 - DNA, 21 bp, Artificial Sequence
  primer
acacatgtcacaaggattggc

SEQ ID NO: 36563 - DNA, 21 bp, Artificial Sequence
  primer
aagcctttgaaagcaaacctg

SEQ ID NO: 36564 - DNA, 21 bp, Artificial Sequence
  primer
gcaagacgactctgacaaagg

SEQ ID NO: 36565 - DNA, 41 bp, Artificial Sequence
  primer
gtaaaacgacggccagtttcaagcaatagaatttcatcctg

SEQ ID NO: 36566 - DNA, 40 bp, Artificial Sequence
  primer
gtaaaacgacggccagtgggaagttcttcatttctttctg

SEQ ID NO: 36567 - DNA, 27 bp, Artificial Sequence
  primer
ccttattctcctctaaaggtcttaatg

SEQ ID NO: 36568 - DNA, 36 bp, Artificial Sequence
  primer
gtaaaacgacggccagtactgcacctggccaaacac

SEQ ID NO: 36569 - DNA, 27 bp, Artificial Sequence
  primer
gtttgaatgtcatttcactctttattt

SEQ ID NO: 36570 - DNA, 21 bp, Artificial Sequence
  primer
gttgtaacaatcgccactggg

SEQ ID NO: 36571 - DNA, 39 bp, Artificial Sequence
  primer
gtaaaacgacggccagtggaagtggatgaataatgcagg

SEQ ID NO: 36572 - DNA, 37 bp, Artificial Sequence
  primer
gtaaaacgacggccagtaaactcaacatggccaaagc

SEQ ID NO: 36573 - DNA, 39 bp, Artificial Sequence
  primer
gtaaaacgacggccagttccaaactgatgtatctgtgcc

SEQ ID NO: 36574 - DNA, 38 bp, Artificial Sequence
  primer
gtaaaacgacggccagtatggtgagtgctttcccaatc

SEQ ID NO: 36575 - DNA, 21 bp, Artificial Sequence
  primer
agatcatccacacactgtccc

SEQ ID NO: 36576 - DNA, 36 bp, Artificial Sequence
  primer
gtaaaacgacggccagtatcatgcaggagcatggtg

SEQ ID NO: 36577 - DNA, 21 bp, Artificial Sequence
  primer
cacaccatggagggatatttg

SEQ ID NO: 36578 - DNA, 24 bp, Artificial Sequence
  primer
ggtactgtcctggcagacaattag

SEQ ID NO: 36579 - DNA, 21 bp, Artificial Sequence
  primer
ctgcgtgatggagtgagactg

SEQ ID NO: 36580 - DNA, 27 bp, Artificial Sequence
  primer
gcaaatctaaataaacatgttccagag

SEQ ID NO: 36581 - DNA, 27 bp, Artificial Sequence
  primer
ttgatttagtagttacctgtgatcctg

SEQ ID NO: 36582 - DNA, 38 bp, Artificial Sequence
  primer
gtaaaacgacggccagtctgaatagcccgtacacatgg

SEQ ID NO: 36583 - DNA, 39 bp, Artificial Sequence
  primer
gtaaaacgacggccagtttcccaatactgttggagtgtg

SEQ ID NO: 36584 - DNA, 39 bp, Artificial Sequence
  primer
gtaaaacgacggccagtgagcgccagagaagattgttac

SEQ ID NO: 36585 - DNA, 21 bp, Artificial Sequence
  primer
ctgtgtggagatctgctgtgg

SEQ ID NO: 36586 - DNA, 21 bp, Artificial Sequence
  primer
tggtcactccacacacctctc

SEQ ID NO: 36587 - DNA, 44 bp, Artificial Sequence
  primer
gtaaaacgacggccagtcaaagaaacagattactttcccaattc

SEQ ID NO: 36588 - DNA, 38 bp, Artificial Sequence
  primer
gtaaaacgacggccagtgctgcctctgaaactactgcc

SEQ ID NO: 36589 - DNA, 38 bp, Artificial Sequence
  primer
gtaaaacgacggccagtgtgttccagatggagcctttc

SEQ ID NO: 36590 - DNA, 39 bp, Artificial Sequence
  primer
gtaaaacgacggccagtgaacagatgacatcattgcagc

SEQ ID NO: 36591 - DNA, 37 bp, Artificial Sequence
  primer
gtaaaacgacggccagtctttgcccttgtggaggttg

SEQ ID NO: 36592 - DNA, 23 bp, Artificial Sequence
  primer
ttatcgttgccatatctcagagg

SEQ ID NO: 36593 - DNA, 44 bp, Artificial Sequence
  primer
gtaaaacgacggccagttctattgattgcattgtcagatttatg

SEQ ID NO: 36594 - DNA, 20 bp, Artificial Sequence
  primer
aggcagaggccatacctagc

SEQ ID NO: 36595 - DNA, 39 bp, Artificial Sequence
  primer
gtaaaacgacggccagtcagcctgtagtagccaggtttc

SEQ ID NO: 36596 - DNA, 38 bp, Artificial Sequence
  primer
gtaaaacgacggccagtaagcgggcatttcagttagag

SEQ ID NO: 36597 - DNA, 38 bp, Artificial Sequence
  primer
gtaaaacgacggccagtgctaagaatcccaagtctccg

SEQ ID NO: 36598 - DNA, 18 bp, Artificial Sequence
  primer
ctggatggaggcgttctg

SEQ ID NO: 36599 - DNA, 21 bp, Artificial Sequence
  primer
actgacaaccagaggcaacag

SEQ ID NO: 36600 - DNA, 37 bp, Artificial Sequence
  primer
gtaaaacgacggccagtaacatggcatgatggaggag

SEQ ID NO: 36601 - DNA, 42 bp, Artificial Sequence
  primer
gtaaaacgacggccagtcataaagtgtttatcagtccacctg

SEQ ID NO: 36602 - DNA, 22 bp, Artificial Sequence
  primer
cctgtacatacccagccttcac

SEQ ID NO: 36603 - DNA, 38 bp, Artificial Sequence
  primer
gtaaaacgacggccagttttacgtggctgaattaaccg

SEQ ID NO: 36604 - DNA, 27 bp, Artificial Sequence
  primer
ctgtataaagaactcatctgtgaaaca

SEQ ID NO: 36605 - DNA, 21 bp, Artificial Sequence
  primer
cttctatgggtgggtgtgttg

SEQ ID NO: 36606 - DNA, 19 bp, Artificial Sequence
  primer
aaaccaggtgtgccaggac

SEQ ID NO: 36607 - DNA, 38 bp, Artificial Sequence
  primer
gtaaaacgacggccagtaggagtccctggtatgaatgg

SEQ ID NO: 36608 - DNA, 38 bp, Artificial Sequence
  primer
gtaaaacgacggccagttgaagggagaaagaggacctg

SEQ ID NO: 36609 - DNA, 38 bp, Artificial Sequence
  primer
gtaaaacgacggccagtaggtctcgatggtcctaaggg

SEQ ID NO: 36610 - DNA, 21 bp, Artificial Sequence
  primer
tttataaaggcaggccaaagg

SEQ ID NO: 36611 - DNA, 21 bp, Artificial Sequence
  primer
tgaaagggactcatgtttggg

SEQ ID NO: 36612 - DNA, 38 bp, Artificial Sequence
  primer
gtaaaacgacggccagtgaaaggacgaagttggtctgc

SEQ ID NO: 36613 - DNA, 21 bp, Artificial Sequence
  primer
atgttagggaagcatggcaag

SEQ ID NO: 36614 - DNA, 39 bp, Artificial Sequence
  primer
gtaaaacgacggccagtgagaaaccttaatggaggaccc

SEQ ID NO: 36615 - DNA, 24 bp, Artificial Sequence
  primer
tggctgcttaataaatgagcctac

SEQ ID NO: 36616 - DNA, 22 bp, Artificial Sequence
  primer
ccacatctcgctttggtatatg

SEQ ID NO: 36617 - DNA, 21 bp, Artificial Sequence
  primer
ggaaatgtgctttgtcactcc

SEQ ID NO: 36618 - DNA, 44 bp, Artificial Sequence
  primer
gtaaaacgacggccagttctgatcatgaatcatagtcttaaccc

SEQ ID NO: 36619 - DNA, 37 bp, Artificial Sequence
  primer
gtaaaacgacggccagtgcatcccatcacacgctatc

SEQ ID NO: 36620 - DNA, 19 bp, Artificial Sequence
  primer
taacctgggcaacagaggg

SEQ ID NO: 36621 - DNA, 39 bp, Artificial Sequence
  primer
gtaaaacgacggccagtgaatttctttccttccctgtgc

SEQ ID NO: 36622 - DNA, 21 bp, Artificial Sequence
  primer
ttccttgaaatgtttgcctcc

SEQ ID NO: 36623 - DNA, 40 bp, Artificial Sequence
  primer
gtaaaacgacggccagtgggcaaatgcaaattagataaag

SEQ ID NO: 36624 - DNA, 39 bp, Artificial Sequence
  primer
gtaaaacgacggccagtttccagaagaaatggaaagagc

SEQ ID NO: 36625 - DNA, 42 bp, Artificial Sequence
  primer
gtaaaacgacggccagtgcagttcttcagtaacctgacactc

SEQ ID NO: 36626 - DNA, 35 bp, Artificial Sequence
  primer
gtaaaacgacggccagttcaggtgcaattggcagg

SEQ ID NO: 36627 - DNA, 25 bp, Artificial Sequence
  primer
tgtgtttgaatgattaaggtaacgc

SEQ ID NO: 36628 - DNA, 42 bp, Artificial Sequence
  primer
gtaaaacgacggccagtgaaaccatctctcttgatgctattg

SEQ ID NO: 36629 - DNA, 39 bp, Artificial Sequence
  primer
gtaaaacgacggccagtcctgtgtcagttcactctggaa

SEQ ID NO: 36630 - DNA, 36 bp, Artificial Sequence
  primer
gtaaaacgacggccagtttccctgccaaatgtcctg

SEQ ID NO: 36631 - DNA, 38 bp, Artificial Sequence
  primer
gtaaaacgacggccagttcctggtgatgatggaatgag

SEQ ID NO: 36632 - DNA, 22 bp, Artificial Sequence
  primer
ggatttcttcattgaaagaggc

SEQ ID NO: 36633 - DNA, 42 bp, Artificial Sequence
  primer
gtaaaacgacggccagttctcttcttcgtttccattaaatcc

SEQ ID NO: 36634 - DNA, 38 bp, Artificial Sequence
  primer
gtaaaacgacggccagttgtttgagggtgggtagaggt

SEQ ID NO: 36635 - DNA, 21 bp, Artificial Sequence
  primer
ccaggactaatagccacctgc

SEQ ID NO: 36636 - DNA, 22 bp, Artificial Sequence
  primer
tgaattgaagccagtgactcag

SEQ ID NO: 36637 - DNA, 39 bp, Artificial Sequence
  primer
gtaaaacgacggccagtaagccatacacactgatgcaaa

SEQ ID NO: 36638 - DNA, 28 bp, Artificial Sequence
  primer
tggagtgagtagtgctagttacatgttt

SEQ ID NO: 36639 - DNA, 38 bp, Artificial Sequence
  primer
gtaaaacgacggccagtcaaggtcctattggatacccg

SEQ ID NO: 36640 - DNA, 40 bp, Artificial Sequence
  primer
gtaaaacgacggccagtttcacaactaccatgcacatttc

SEQ ID NO: 36641 - DNA, 21 bp, Artificial Sequence
  primer
acgatcaagggcagtttgaag

SEQ ID NO: 36642 - DNA, 23 bp, Artificial Sequence
  primer
gggttcatgtacctaaagaaggc

SEQ ID NO: 36643 - DNA, 38 bp, Artificial Sequence
  primer
gtaaaacgacggccagttcaatgcttccaggatttcag

SEQ ID NO: 36644 - DNA, 39 bp, Artificial Sequence
  primer
gtaaaacgacggccagtggcagcatagcaagtctgtctc

SEQ ID NO: 36645 - DNA, 36 bp, Artificial Sequence
  primer
gtaaaacgacggccagtgtggtccaacggtaggtgc

SEQ ID NO: 36646 - DNA, 38 bp, Artificial Sequence
  primer
gtaaaacgacggccagtttcaagaggtgcaagaggtcc

SEQ ID NO: 36647 - DNA, 44 bp, Artificial Sequence
  primer
gtaaaacgacggccagtcatagttctgtcactgtgatgaagaag

SEQ ID NO: 36648 - DNA, 39 bp, Artificial Sequence
  primer
gtaaaacgacggccagtcaaatgattgatgcaaatgaaa

SEQ ID NO: 36649 - DNA, 41 bp, Artificial Sequence
  primer
gtaaaacgacggccagtcatgtgaaatattgaaatggcaag

SEQ ID NO: 36650 - DNA, 44 bp, Artificial Sequence
  primer
gtaaaacgacggccagttcttacttgatatgctactttcagtgc

SEQ ID NO: 36651 - DNA, 37 bp, Artificial Sequence
  primer
gtaaaacgacggccagtatgcatatggcattccaccc

SEQ ID NO: 36652 - DNA, 21 bp, Artificial Sequence
  primer
gggaaagaggtcttcctggag

SEQ ID NO: 36653 - DNA, 40 bp, Artificial Sequence
  primer
gtaaaacgacggccagttggattcaactgtttctctttgg

SEQ ID NO: 36654 - DNA, 25 bp, Artificial Sequence
  primer
ttcttagtcacaaatgaaggtaggg

SEQ ID NO: 36655 - DNA, 37 bp, Artificial Sequence
  primer
gtaaaacgacggccagtagcagtgggaacccaagatt

SEQ ID NO: 36656 - DNA, 39 bp, Artificial Sequence
  primer
gtaaaacgacggccagtgtgcagaagtgtttgatcttgg

SEQ ID NO: 36657 - DNA, 42 bp, Artificial Sequence
  primer
gtaaaacgacggccagtctgctttgattaaattagaaatggc

SEQ ID NO: 36658 - DNA, 21 bp, Artificial Sequence
  primer
acatgtggtcaacatttgcat

SEQ ID NO: 36659 - DNA, 41 bp, Artificial Sequence
  primer
gtaaaacgacggccagtggatgacttataaccctgatgtgc

SEQ ID NO: 36660 - DNA, 39 bp, Artificial Sequence
  primer
gtaaaacgacggccagttttgctttccaacacatttgac

SEQ ID NO: 36661 - DNA, 21 bp, Artificial Sequence
  primer
caactacagcatcaagcctgc

SEQ ID NO: 36662 - DNA, 23 bp, Artificial Sequence
  primer
tggtgacaaagtgatattccgtc

SEQ ID NO: 36663 - DNA, 41 bp, Artificial Sequence
  primer
gtaaaacgacggccagttgactttaacctcttcacctccag

SEQ ID NO: 36664 - DNA, 39 bp, Artificial Sequence
  primer
gtaaaacgacggccagttttctcaagagatggcctaaca

SEQ ID NO: 36665 - DNA, 38 bp, Artificial Sequence
  primer
gtaaaacgacggccagtagagggttggtttccatccag

SEQ ID NO: 36666 - DNA, 44 bp, Artificial Sequence
  primer
gtaaaacgacggccagtactgctttcttatattgatgtgaagtg

SEQ ID NO: 36667 - DNA, 18 bp, Artificial Sequence
  primer
gagctgcaggtgcagagg

SEQ ID NO: 36668 - DNA, 39 bp, Artificial Sequence
  primer
gtaaaacgacggccagttccatatggtggaacttaaggg

SEQ ID NO: 36669 - DNA, 26 bp, Artificial Sequence
  primer
gccatataaccatgttctatttctaa

SEQ ID NO: 36670 - DNA, 39 bp, Artificial Sequence
  primer
gtaaaacgacggccagttccagttaggtgatgagaagga

SEQ ID NO: 36671 - DNA, 27 bp, Artificial Sequence
  primer
tgtaaatcatattctgagggataaagg

SEQ ID NO: 36672 - DNA, 38 bp, Artificial Sequence
  primer
gtaaaacgacggccagttctagggaattcctggtcctg

SEQ ID NO: 36673 - DNA, 21 bp, Artificial Sequence
  primer
cacctggtcctccaggtttac

SEQ ID NO: 36674 - DNA, 24 bp, Artificial Sequence
  primer
tctccaccaagttcatcatagaag

SEQ ID NO: 36675 - DNA, 26 bp, Artificial Sequence
  primer
gaggcagacaagagaaagtatcactc

SEQ ID NO: 36676 - DNA, 21 bp, Artificial Sequence
  primer
gcctatacccggttgtctttc

SEQ ID NO: 36677 - DNA, 38 bp, Artificial Sequence
  primer
gtaaaacgacggccagtgcttctggcatcacagttcac

SEQ ID NO: 36678 - DNA, 21 bp, Artificial Sequence
  primer
cttacctccactcagaagccc

SEQ ID NO: 36679 - DNA, 40 bp, Artificial Sequence
  primer
gtaaaacgacggccagttttgcttagccttcctttcatct

SEQ ID NO: 36680 - DNA, 38 bp, Artificial Sequence
  primer
gtaaaacgacggccagtgcgtctgaggctcatagtctg

SEQ ID NO: 36681 - DNA, 37 bp, Artificial Sequence
  primer
gtaaaacgacggccagtagccctggaaagctgagttc

SEQ ID NO: 36682 - DNA, 22 bp, Artificial Sequence
  primer
cctaggatcagacaccaggagg

SEQ ID NO: 36683 - DNA, 38 bp, Artificial Sequence
  primer
gtaaaacgacggccagtgctctccaaccatgttgactc

SEQ ID NO: 36684 - DNA, 21 bp, Artificial Sequence
  primer
ctctttctcccggatgatacc

SEQ ID NO: 36685 - DNA, 21 bp, Artificial Sequence
  primer
tcaaggttggagttgagatgg

SEQ ID NO: 36686 - DNA, 38 bp, Artificial Sequence
  primer
gtaaaacgacggccagtaaaggagagcctgcagtgttg

SEQ ID NO: 36687 - DNA, 38 bp, Artificial Sequence
  primer
gtaaaacgacggccagtcccagattcccagatctgttc

SEQ ID NO: 36688 - DNA, 21 bp, Artificial Sequence
  primer
accagaaaggagggcagactc

SEQ ID NO: 36689 - DNA, 38 bp, Artificial Sequence
  primer
gtaaaacgacggccagtgagtctttctggaggcagagg

SEQ ID NO: 36690 - DNA, 38 bp, Artificial Sequence
  primer
gtaaaacgacggccagtgcagtggatgaggatcaggag

SEQ ID NO: 36691 - DNA, 20 bp, Artificial Sequence
  primer
gacccttggtgagtgagcag

SEQ ID NO: 36692 - DNA, 20 bp, Artificial Sequence
  primer
tctcttctctctcccagggc

SEQ ID NO: 36693 - DNA, 38 bp, Artificial Sequence
  primer
gtaaaacgacggccagtttcaccagctcagtctccctc

SEQ ID NO: 36694 - DNA, 38 bp, Artificial Sequence
  primer
gtaaaacgacggccagtacctagttctccaggcttccc

SEQ ID NO: 36695 - DNA, 38 bp, Artificial Sequence
  primer
gtaaaacgacggccagttgggtgtgtgttgtaattggg

SEQ ID NO: 36696 - DNA, 21 bp, Artificial Sequence
  primer
atgggctaagtgcagaggttc

SEQ ID NO: 36697 - DNA, 37 bp, Artificial Sequence
  primer
gtaaaacgacggccagttcctcctccagggagatgac

SEQ ID NO: 36698 - DNA, 38 bp, Artificial Sequence
  primer
gtaaaacgacggccagtcagatccacagtcccacacac

SEQ ID NO: 36699 - DNA, 38 bp, Artificial Sequence
  primer
gtaaaacgacggccagtctcttgccttcttggctatcg

SEQ ID NO: 36700 - DNA, 37 bp, Artificial Sequence
  primer
gtaaaacgacggccagtcaggacctcctggacaacag

SEQ ID NO: 36701 - DNA, 38 bp, Artificial Sequence
  primer
gtaaaacgacggccagtgaaccctaaatgtctgctggg

SEQ ID NO: 36702 - DNA, 21 bp, Artificial Sequence
  primer
ttggcttcactaggtcacagg

SEQ ID NO: 36703 - DNA, 20 bp, Artificial Sequence
  primer
ccttgggattcccttgtctc

SEQ ID NO: 36704 - DNA, 38 bp, Artificial Sequence
  primer
gtaaaacgacggccagttcttaggagcttggtccttcc

SEQ ID NO: 36705 - DNA, 38 bp, Artificial Sequence
  primer
gtaaaacgacggccagtcctgccatctcctctcttcac

SEQ ID NO: 36706 - DNA, 21 bp, Artificial Sequence
  primer
cactgttgcccatttctcctc

SEQ ID NO: 36707 - DNA, 21 bp, Artificial Sequence
  primer
ctcacgggaaggagagacaac

SEQ ID NO: 36708 - DNA, 21 bp, Artificial Sequence
  primer
ccagagggaatttagctgacc

SEQ ID NO: 36709 - DNA, 37 bp, Artificial Sequence
  primer
gtaaaacgacggccagtggctggagaggtgtagaggg

SEQ ID NO: 36710 - DNA, 20 bp, Artificial Sequence
  primer
ggctggagaggtgtagaggg

SEQ ID NO: 36711 - DNA, 38 bp, Artificial Sequence
  primer
gtaaaacgacggccagtctctacaaggctccaactgcc

SEQ ID NO: 36712 - DNA, 20 bp, Artificial Sequence
  primer
acagggaacatctggtggtg

SEQ ID NO: 36713 - DNA, 20 bp, Artificial Sequence
  primer
gtttcctggaccgaaaggac

SEQ ID NO: 36714 - DNA, 21 bp, Artificial Sequence
  primer
ctcctggctacccattctcag

SEQ ID NO: 36715 - DNA, 20 bp, Artificial Sequence
  primer
ggaatttcccaggagctttg

SEQ ID NO: 36716 - DNA, 21 bp, Artificial Sequence
  primer
aggaacaaaggtcagtgaggg

SEQ ID NO: 36717 - DNA, 38 bp, Artificial Sequence
  primer
gtaaaacgacggccagtgtgagtgtgactcccagaccc

SEQ ID NO: 36718 - DNA, 38 bp, Artificial Sequence
  primer
gtaaaacgacggccagtttgtggtctgaggttctctgg

SEQ ID NO: 36719 - DNA, 38 bp, Artificial Sequence
  primer
gtaaaacgacggccagttctgtgagcctagggttgatg

SEQ ID NO: 36720 - DNA, 37 bp, Artificial Sequence
  primer
gtaaaacgacggccagttggagaggatggagacaagg

SEQ ID NO: 36721 - DNA, 21 bp, Artificial Sequence
  primer
tctgacctcctggcctttaac

SEQ ID NO: 36722 - DNA, 38 bp, Artificial Sequence
  primer
gtaaaacgacggccagtcccagctgtgtgtggtatttg

SEQ ID NO: 36723 - DNA, 38 bp, Artificial Sequence
  primer
gtaaaacgacggccagtcattggcctacaggtgtgttg

SEQ ID NO: 36724 - DNA, 21 bp, Artificial Sequence
  primer
ctcctcctctctccaccattc

SEQ ID NO: 36725 - DNA, 38 bp, Artificial Sequence
  primer
gtaaaacgacggccagtcactgcctcactgctgtaacc

SEQ ID NO: 36726 - DNA, 21 bp, Artificial Sequence
  primer
ccctggagagaaggtaactgg

SEQ ID NO: 36727 - DNA, 38 bp, Artificial Sequence
  primer
gtaaaacgacggccagtatgtcccattgtcactgaggg

SEQ ID NO: 36728 - DNA, 37 bp, Artificial Sequence
  primer
gtaaaacgacggccagttctagagaggcagtggcgtg

SEQ ID NO: 36729 - DNA, 21 bp, Artificial Sequence
  primer
ttctccatctggatcagggtc

SEQ ID NO: 36730 - DNA, 38 bp, Artificial Sequence
  primer
gtaaaacgacggccagtcaagcctcatcctctttaccc

SEQ ID NO: 36731 - DNA, 20 bp, Artificial Sequence
  primer
tctgcacatctgtgaatcgg

SEQ ID NO: 36732 - DNA, 21 bp, Artificial Sequence
  primer
ctcctagagtttggcccttcc

SEQ ID NO: 36733 - DNA, 38 bp, Artificial Sequence
  primer
gtaaaacgacggccagtgagatcctggcgctataggtg

SEQ ID NO: 36734 - DNA, 38 bp, Artificial Sequence
  primer
gtaaaacgacggccagtcaaatcttcagggtcagcaag

SEQ ID NO: 36735 - DNA, 21 bp, Artificial Sequence
  primer
agccaagggagagaaggtgag

SEQ ID NO: 36736 - DNA, 38 bp, Artificial Sequence
  primer
gtaaaacgacggccagtgatggtgagtagagggcatgg

SEQ ID NO: 36737 - DNA, 38 bp, Artificial Sequence
  primer
gtaaaacgacggccagttgtcctgtcaccaccagtacc

SEQ ID NO: 36738 - DNA, 21 bp, Artificial Sequence
  primer
tgttcctcatttcacagggac

SEQ ID NO: 36739 - DNA, 37 bp, Artificial Sequence
  primer
gtaaaacgacggccagtctccactgctgccacacttc

SEQ ID NO: 36740 - DNA, 21 bp, Artificial Sequence
  primer
ggtgtcacgtgatgaaagtgg

SEQ ID NO: 36741 - DNA, 20 bp, Artificial Sequence
  primer
cctgctcatgactctggctc

SEQ ID NO: 36742 - DNA, 21 bp, Artificial Sequence
  primer
ctcagaggagaggtgagcctg

SEQ ID NO: 36743 - DNA, 21 bp, Artificial Sequence
  primer
tgtttcccaactccacacctc

SEQ ID NO: 36744 - DNA, 21 bp, Artificial Sequence
  primer
cccaaacctctatgaccttgg

SEQ ID NO: 36745 - DNA, 21 bp, Artificial Sequence
  primer
gggctagaagttgtcacaccc

SEQ ID NO: 36746 - DNA, 38 bp, Artificial Sequence
  primer
gtaaaacgacggccagtaataggcccattatgtgctgg

SEQ ID NO: 36747 - DNA, 24 bp, Artificial Sequence
  primer
ttggaaacaaatttatgcaaagac

SEQ ID NO: 36748 - DNA, 42 bp, Artificial Sequence
  primer
gtaaaacgacggccagtttgagtacctctgggaattacaatg

SEQ ID NO: 36749 - DNA, 36 bp, Artificial Sequence
  primer
gtaaaacgacggccagtcagctgggcagagccatac

SEQ ID NO: 36750 - DNA, 40 bp, Artificial Sequence
  primer
gtaaaacgacggccagttgaacagaatgatttaaggagcc

SEQ ID NO: 36751 - DNA, 21 bp, Artificial Sequence
  primer
aaggtggcaacacaatgacag

SEQ ID NO: 36752 - DNA, 38 bp, Artificial Sequence
  primer
gtaaaacgacggccagttgaaacaaagcaattctggct

SEQ ID NO: 36753 - DNA, 40 bp, Artificial Sequence
  primer
gtaaaacgacggccagtttgaaggtccaaacctaaagacc

SEQ ID NO: 36754 - DNA, 21 bp, Artificial Sequence
  primer
ggaatgacatccagtgaaccc

SEQ ID NO: 36755 - DNA, 20 bp, Artificial Sequence
  primer
cagaatgctcacgtggtgtg

SEQ ID NO: 36756 - DNA, 21 bp, Artificial Sequence
  primer
tcaagaagcaatgtgccaaag

SEQ ID NO: 36757 - DNA, 21 bp, Artificial Sequence
  primer
ctcaatgagcaccattctccc

SEQ ID NO: 36758 - DNA, 22 bp, Artificial Sequence
  primer
ttgcaaataaattgctcatgga

SEQ ID NO: 36759 - DNA, 21 bp, Artificial Sequence
  primer
ttgtcatagtctcacccagga

SEQ ID NO: 36760 - DNA, 39 bp, Artificial Sequence
  primer
gtaaaacgacggccagtcaaattgagtgtgagtccagca

SEQ ID NO: 36761 - DNA, 23 bp, Artificial Sequence
  primer
tcacataaatgaagaggtggaca

SEQ ID NO: 36762 - DNA, 22 bp, Artificial Sequence
  primer
tttgtgctaccggacttaaacc

SEQ ID NO: 36763 - DNA, 21 bp, Artificial Sequence
  primer
agcgtaagtgagaaagaggcg

SEQ ID NO: 36764 - DNA, 38 bp, Artificial Sequence
  primer
gtaaaacgacggccagttgaggatccagggagtggtag

SEQ ID NO: 36765 - DNA, 21 bp, Artificial Sequence
  primer
ggttctgacaacattggagcc

SEQ ID NO: 36766 - DNA, 38 bp, Artificial Sequence
  primer
gtaaaacgacggccagttttcagctcatgcttctggtt

SEQ ID NO: 36767 - DNA, 23 bp, Artificial Sequence
  primer
gccgtaaatcatttgcttcattc

SEQ ID NO: 36768 - DNA, 22 bp, Artificial Sequence
  primer
aacggtcttacaggtgatgagc

SEQ ID NO: 36769 - DNA, 41 bp, Artificial Sequence
  primer
gtaaaacgacggccagtcagagagttagcaaggaacattga

SEQ ID NO: 36770 - DNA, 24 bp, Artificial Sequence
  primer
ttgatttctcacagtaacccactg

SEQ ID NO: 36771 - DNA, 42 bp, Artificial Sequence
  primer
gtaaaacgacggccagtaaacttcagttgactattccaaagg

SEQ ID NO: 36772 - DNA, 36 bp, Artificial Sequence
  primer
gtaaaacgacggccagtagcttgcatggatgctttg

SEQ ID NO: 36773 - DNA, 24 bp, Artificial Sequence
  primer
acgctgacaggtacagtaaacaac

SEQ ID NO: 36774 - DNA, 38 bp, Artificial Sequence
  primer
gtaaaacgacggccagtcagaatgcttgcagtttccag

SEQ ID NO: 36775 - DNA, 38 bp, Artificial Sequence
  primer
gtaaaacgacggccagtagcaggaggaacatctggcta

SEQ ID NO: 36776 - DNA, 21 bp, Artificial Sequence
  primer
agcgcacacgtaggtgtttag

SEQ ID NO: 36777 - DNA, 21 bp, Artificial Sequence
  primer
gaattctctgattgccttggg

SEQ ID NO: 36778 - DNA, 24 bp, Artificial Sequence
  primer
aaacagcttccctgtagaaagagc

SEQ ID NO: 36779 - DNA, 38 bp, Artificial Sequence
  primer
gtaaaacgacggccagtggtgcctgctatgttctaggg

SEQ ID NO: 36780 - DNA, 37 bp, Artificial Sequence
  primer
gtaaaacgacggccagtagtattggatggctggaggg

SEQ ID NO: 36781 - DNA, 19 bp, Artificial Sequence
  primer
gccaatccagttccaccac

SEQ ID NO: 36782 - DNA, 38 bp, Artificial Sequence
  primer
gtaaaacgacggccagtttatggagaagcacagttggc

SEQ ID NO: 36783 - DNA, 38 bp, Artificial Sequence
  primer
gtaaaacgacggccagtatgaaacacatgcaagcaacc

SEQ ID NO: 36784 - DNA, 21 bp, Artificial Sequence
  primer
tttgtcttgtcacgagcattg

SEQ ID NO: 36785 - DNA, 21 bp, Artificial Sequence
  primer
gaaggctgctctggaaatcac

SEQ ID NO: 36786 - DNA, 38 bp, Artificial Sequence
  primer
gtaaaacgacggccagtggtgaaggattcagtgtctgc

SEQ ID NO: 36787 - DNA, 41 bp, Artificial Sequence
  primer
gtaaaacgacggccagtgggactatatggaatttcctttcc

SEQ ID NO: 36788 - DNA, 21 bp, Artificial Sequence
  primer
ctaagccctgcagatggtatg

SEQ ID NO: 36789 - DNA, 41 bp, Artificial Sequence
  primer
gtaaaacgacggccagttgactaccagtgacatcaatttgg

SEQ ID NO: 36790 - DNA, 23 bp, Artificial Sequence
  primer
tgcgtagcaaggtgttatattgc

SEQ ID NO: 36791 - DNA, 38 bp, Artificial Sequence
  primer
gtaaaacgacggccagtcgctttattccgcagctagag

SEQ ID NO: 36792 - DNA, 38 bp, Artificial Sequence
  primer
gtaaaacgacggccagtcagttgggtgtgactaatggc

SEQ ID NO: 36793 - DNA, 25 bp, Artificial Sequence
  primer
aaatcttcctatttgaattgttggg

SEQ ID NO: 36794 - DNA, 26 bp, Artificial Sequence
  primer
aaatacgttcattgctactttctgtg

SEQ ID NO: 36795 - DNA, 37 bp, Artificial Sequence
  primer
gtaaaacgacggccagtttggatggctacacctcacc

SEQ ID NO: 36796 - DNA, 42 bp, Artificial Sequence
  primer
gtaaaacgacggccagtaaagcaatcaatctttctttcttcc

SEQ ID NO: 36797 - DNA, 43 bp, Artificial Sequence
  primer
gtaaaacgacggccagtaaatctctccaacaagaattatttgc

SEQ ID NO: 36798 - DNA, 20 bp, Artificial Sequence
  primer
tcatcaacattgccaactgc

SEQ ID NO: 36799 - DNA, 21 bp, Artificial Sequence
  primer
gatcacattgctctcaatggc

SEQ ID NO: 36800 - DNA, 21 bp, Artificial Sequence
  primer
tgggaaacagacttccttgtg

SEQ ID NO: 36801 - DNA, 39 bp, Artificial Sequence
  primer
gtaaaacgacggccagtttgcctcgcatatttgtatgac

SEQ ID NO: 36802 - DNA, 25 bp, Artificial Sequence
  primer
atgatgacaagtgtctgactaaatg

SEQ ID NO: 36803 - DNA, 23 bp, Artificial Sequence
  primer
tgaacgcttacactggatttatg

SEQ ID NO: 36804 - DNA, 21 bp, Artificial Sequence
  primer
atgtgcttggctctgttctcc

SEQ ID NO: 36805 - DNA, 20 bp, Artificial Sequence
  primer
atctgccttcctgggagaag

SEQ ID NO: 36806 - DNA, 38 bp, Artificial Sequence; identical to SEQ ID NO: 18221
  primer

SEQ ID NO: 36807 - DNA, 22 bp, Artificial Sequence
  primer
ggaggacatgtgcttcagagag

SEQ ID NO: 36808 - DNA, 21 bp, Artificial Sequence
  primer
gtccatctgggttgaaaggag

SEQ ID NO: 36809 - DNA, 20 bp, Artificial Sequence
  primer
gggttgcagaatggagatgg

SEQ ID NO: 36810 - DNA, 43 bp, Artificial Sequence
  primer
gtaaaacgacggccagtcttggcttaaagagtgaacttctgtg

SEQ ID NO: 36811 - DNA, 21 bp, Artificial Sequence
  primer
cacaccttggttcatattggg

SEQ ID NO: 36812 - DNA, 21 bp, Artificial Sequence
  primer
cacctccttatgggatgtgag

SEQ ID NO: 36813 - DNA, 21 bp, Artificial Sequence
  primer
ttcaacattgagcagtccacc

SEQ ID NO: 36814 - DNA, 22 bp, Artificial Sequence
  primer
gctttactcacctcttccctcc

SEQ ID NO: 36815 - DNA, 19 bp, Artificial Sequence
  primer
cccgcagtttggatagagc

SEQ ID NO: 36816 - DNA, 37 bp, Artificial Sequence
  primer
gtaaaacgacggccagtgctccaaagacatcagacgc

SEQ ID NO: 36817 - DNA, 21 bp, Artificial Sequence
  primer
gaacacaggtgggctttcttc

SEQ ID NO: 36818 - DNA, 38 bp, Artificial Sequence
  primer
gtaaaacgacggccagtctgcaaactgggttagctgtg

SEQ ID NO: 36819 - DNA, 38 bp, Artificial Sequence
  primer
gtaaaacgacggccagtcctttggttcctctctttccc

SEQ ID NO: 36820 - DNA, 21 bp, Artificial Sequence
  primer
ctcccaacccactaaccacag

SEQ ID NO: 36821 - DNA, 38 bp, Artificial Sequence
  primer
gtaaaacgacggccagttttcaggatgggaagttgagg

SEQ ID NO: 36822 - DNA, 20 bp, Artificial Sequence
  primer
gccttagggactgggtgaag

SEQ ID NO: 36823 - DNA, 20 bp, Artificial Sequence
  primer
acatcttgaatgtggtgggc

SEQ ID NO: 36824 - DNA, 21 bp, Artificial Sequence
  primer
gacctgtgtgtgtttgcttcc

SEQ ID NO: 36825 - DNA, 37 bp, Artificial Sequence
  primer
gtaaaacgacggccagtgacatgtgtggcatgtcctg

SEQ ID NO: 36826 - DNA, 38 bp, Artificial Sequence
  primer
gtaaaacgacggccagtagatctgttggctttccaagg

SEQ ID NO: 36827 - DNA, 37 bp, Artificial Sequence
  primer
gtaaaacgacggccagtagtgccctgtccactccttc

SEQ ID NO: 36828 - DNA, 37 bp, Artificial Sequence
  primer
gtaaaacgacggccagtcatcatcaccatcatgccac

SEQ ID NO: 36829 - DNA, 21 bp, Artificial Sequence
  primer
gcaaagagggacataagcctg

SEQ ID NO: 36830 - DNA, 38 bp, Artificial Sequence
  primer
gtaaaacgacggccagtagagggatggtattgtgtggg

SEQ ID NO: 36831 - DNA, 21 bp, Artificial Sequence
  primer
cttgctgaacttgcattccac

SEQ ID NO: 36832 - DNA, 21 bp, Artificial Sequence
  primer
cggtcctccttctcatcacac

SEQ ID NO: 36833 - DNA, 38 bp, Artificial Sequence
  primer
gtaaaacgacggccagtggccagatgtttcactaaccc

SEQ ID NO: 36834 - DNA, 38 bp, Artificial Sequence
  primer
gtaaaacgacggccagtgaagtagccagtcaggatggg

SEQ ID NO: 36835 - DNA, 21 bp, Artificial Sequence
  primer
acctgctgcccttcagtaaac

SEQ ID NO: 36836 - DNA, 21 bp, Artificial Sequence
  primer
agtccaaggcaacatctaggc

SEQ ID NO: 36837 - DNA, 39 bp, Artificial Sequence
  primer
gtaaaacgacggccagttggaacctgcacttctatggac

SEQ ID NO: 36838 - DNA, 38 bp, Artificial Sequence
  primer
gtaaaacgacggccagtagccagtgtgggctgatagag

SEQ ID NO: 36839 - DNA, 21 bp, Artificial Sequence
  primer
tgtgcctgagtccattgtagg

SEQ ID NO: 36840 - DNA, 21 bp, Artificial Sequence
  primer
cagcctccacatatagccctc

SEQ ID NO: 36841 - DNA, 39 bp, Artificial Sequence
  primer
gtaaaacgacggccagtagaagagaggcaatgcaaattc

SEQ ID NO: 36842 - DNA, 20 bp, Artificial Sequence
  primer
cccagacaagcaccaaagag

SEQ ID NO: 36843 - DNA, 38 bp, Artificial Sequence
  primer
gtaaaacgacggccagttccatggtgttccttgttgac

SEQ ID NO: 36844 - DNA, 37 bp, Artificial Sequence
  primer
gtaaaacgacggccagtccaaaccatactctgcaccc

SEQ ID NO: 36845 - DNA, 21 bp, Artificial Sequence
  primer
cttcctctacaaatgccaccc

SEQ ID NO: 36846 - DNA, 38 bp, Artificial Sequence
  primer
gtaaaacgacggccagtcctgaacccaaagaggatcac

SEQ ID NO: 36847 - DNA, 37 bp, Artificial Sequence
  primer
gtaaaacgacggccagtcacctttcccatagcccttg

SEQ ID NO: 36848 - DNA, 21 bp, Artificial Sequence
  primer
aggcattgggagagtttgatg

SEQ ID NO: 36849 - DNA, 21 bp, Artificial Sequence
  primer
ggaggaggtgggtattgactc

SEQ ID NO: 36850 - DNA, 38 bp, Artificial Sequence
  primer
gtaaaacgacggccagtccacctccttctgaggttctg

SEQ ID NO: 36851 - DNA, 38 bp, Artificial Sequence
  primer
gtaaaacgacggccagtccaggacaagatttacctccc

SEQ ID NO: 36852 - DNA, 21 bp, Artificial Sequence
  primer
ctcccaacccactaaccacag

SEQ ID NO: 36853 - DNA, 38 bp, Artificial Sequence; identical to SEQ ID NO: 36819
  primer

SEQ ID NO: 36854 - DNA, 22 bp, Artificial Sequence
  primer
gcttattcgcctgtcctaaatg

SEQ ID NO: 36855 - DNA, 20 bp, Artificial Sequence
  primer
tgtttgaacccaagaggcag

SEQ ID NO: 36856 - DNA, 43 bp, Artificial Sequence
  primer
gtaaaacgacggccagtcctttactgtttaacaccataattgc

SEQ ID NO: 36857 - DNA, 21 bp, Artificial Sequence
  primer
tgcccatagtgcatactcagc

SEQ ID NO: 36858 - DNA, 22 bp, Artificial Sequence
  primer
ggctctactgccaacagttacc

SEQ ID NO: 36859 - DNA, 21 bp, Artificial Sequence
  primer
agatgaggcctttcgtcattc

SEQ ID NO: 36860 - DNA, 41 bp, Artificial Sequence
  primer
gtaaaacgacggccagttcaataggttacccatcttgtggt

SEQ ID NO: 36861 - DNA, 22 bp, Artificial Sequence
  primer
gcagtgaagattgactgactgg

SEQ ID NO: 36862 - DNA, 40 bp, Artificial Sequence
  primer
gtaaaacgacggccagtcggaacttagcatagtacctggc

SEQ ID NO: 36863 - DNA, 36 bp, Artificial Sequence
  primer
gtaaaacgacggccagtactgccacagtggaaaggg

SEQ ID NO: 36864 - DNA, 21 bp, Artificial Sequence
  primer
ttaatccctttctcccttccc

SEQ ID NO: 36865 - DNA, 38 bp, Artificial Sequence
  primer
gtaaaacgacggccagttcccatgaagtctcacctttg

SEQ ID NO: 36866 - DNA, 39 bp, Artificial Sequence
  primer
gtaaaacgacggccagtcaagctagagtgataggccgag

SEQ ID NO: 36867 - DNA, 41 bp, Artificial Sequence
  primer
gtaaaacgacggccagttgcagtgtttatagctttgctgtc

SEQ ID NO: 36868 - DNA, 38 bp, Artificial Sequence
  primer
gtaaaacgacggccagttccttctttcctgtgctttcc

SEQ ID NO: 36869 - DNA, 21 bp, Artificial Sequence
  primer
aaatggacttcgacagccttg

SEQ ID NO: 36870 - DNA, 21 bp, Artificial Sequence
  primer
cattgtcatgtttgttgtggg

SEQ ID NO: 36871 - DNA, 20 bp, Artificial Sequence
  primer
aatgatgcttgctgtcaccc

SEQ ID NO: 36872 - DNA, 22 bp, Artificial Sequence
  primer
gatgggaatttcagggagaaac

SEQ ID NO: 36873 - DNA, 41 bp, Artificial Sequence
  primer
gtaaaacgacggccagttgtgtttcagtgcactttcacttt

SEQ ID NO: 36874 - DNA, 38 bp, Artificial Sequence
  primer
gtaaaacgacggccagtgcttgctgtataatcccaggc

SEQ ID NO: 36875 - DNA, 39 bp, Artificial Sequence
  primer
gtaaaacgacggccagtcagctctgactatgcagctttg

SEQ ID NO: 36876 - DNA, 22 bp, Artificial Sequence
  primer
ttagaagcaaatcatctgccaa

SEQ ID NO: 36877 - DNA, 38 bp, Artificial Sequence
  primer
gtaaaacgacggccagtttactccatgaccttccgctc

SEQ ID NO: 36878 - DNA, 39 bp, Artificial Sequence
  primer
gtaaaacgacggccagtcagagggcaaccattatttgtc

SEQ ID NO: 36879 - DNA, 38 bp, Artificial Sequence
  primer
gtaaaacgacggccagtacaggtgacactgtgctgttg

SEQ ID NO: 36880 - DNA, 36 bp, Artificial Sequence
  primer
gtaaaacgacggccagtcccaccctttcttctccag

SEQ ID NO: 36881 - DNA, 43 bp, Artificial Sequence
  primer
gtaaaacgacggccagtaactgtaaagaatgaattatccaccc

SEQ ID NO: 36882 - DNA, 39 bp, Artificial Sequence
  primer
gtaaaacgacggccagttgttctcaggacagggaaagag

SEQ ID NO: 36883 - DNA, 21 bp, Artificial Sequence
  primer
gcattgatcttgcaggtatgc

SEQ ID NO: 36884 - DNA, 43 bp, Artificial Sequence
  primer
gtaaaacgacggccagtaacagtgatctagttggtgttaatgg

SEQ ID NO: 36885 - DNA, 38 bp, Artificial Sequence
  primer
gtaaaacgacggccagtctttgcctcactgtcatcacc

SEQ ID NO: 36886 - DNA, 39 bp, Artificial Sequence
  primer
gtaaaacgacggccagtaaagtgaatcctttcaaagcca

SEQ ID NO: 36887 - DNA, 22 bp, Artificial Sequence
  primer
aagagggtttagatggtggatg

SEQ ID NO: 36888 - DNA, 20 bp, Artificial Sequence
  primer
tcctcacctggattcccaag

SEQ ID NO: 36889 - DNA, 40 bp, Artificial Sequence
  primer
gtaaaacgacggccagttgggtggtaaatttccagttaag

SEQ ID NO: 36890 - DNA, 22 bp, Artificial Sequence
  primer
gaggcttgatgtcttgctatcc

SEQ ID NO: 36891 - DNA, 37 bp, Artificial Sequence
  primer
gtaaaacgacggccagtgcaaacgcgatttactgtgg

SEQ ID NO: 36892 - DNA, 21 bp, Artificial Sequence
  primer
atctatttcagggaagctgcg

SEQ ID NO: 36893 - DNA, 38 bp, Artificial Sequence
  primer
gtaaaacgacggccagtttggtagtccagagcaagcag

SEQ ID NO: 36894 - DNA, 21 bp, Artificial Sequence
  primer
aacaggaatgaggtcctggtg

SEQ ID NO: 36895 - DNA, 38 bp, Artificial Sequence
  primer
gtaaaacgacggccagtgtttggtgtgcgtactggttg

SEQ ID NO: 36896 - DNA, 21 bp, Artificial Sequence
  primer
gcaagtcagatccacatcctg

SEQ ID NO: 36897 - DNA, 22 bp, Artificial Sequence
  primer
tctaacagaattgtttgcagcc

SEQ ID NO: 36898 - DNA, 40 bp, Artificial Sequence
  primer
gtaaaacgacggccagttcttcatcagagaagcactttcg

SEQ ID NO: 36899 - DNA, 40 bp, Artificial Sequence
  primer
gtaaaacgacggccagttctgcctagggaatccagtctac

SEQ ID NO: 36900 - DNA, 39 bp, Artificial Sequence
  primer
gtaaaacgacggccagttgtgtctctaaggacccaggtg

SEQ ID NO: 36901 - DNA, 18 bp, Artificial Sequence
  primer
cggagtcgggtttcagag

SEQ ID NO: 36902 - DNA, 38 bp, Artificial Sequence
  primer
gtaaaacgacggccagttaagacccgcttctctgcttc

SEQ ID NO: 36903 - DNA, 38 bp, Artificial Sequence
  primer
gtaaaacgacggccagttgagtgatcccgtttcatttg

SEQ ID NO: 36904 - DNA, 21 bp, Artificial Sequence
  primer
cagaaggtcatctacctgggc

SEQ ID NO: 36905 - DNA, 38 bp, Artificial Sequence
  primer
gtaaaacgacggccagtctgtacatcctcattcccacg

SEQ ID NO: 36906 - DNA, 21 bp, Artificial Sequence
  primer
cacggtttccctgtaggagag

SEQ ID NO: 36907 - DNA, 21 bp, Artificial Sequence
  primer
attgcccaggtagacaccaag

SEQ ID NO: 36908 - DNA, 22 bp, Artificial Sequence
  primer
tgaccctgtgtcatggtatctg

SEQ ID NO: 36909 - DNA, 38 bp, Artificial Sequence
  primer
gtaaaacgacggccagtgtctgttctcaccagccacag

SEQ ID NO: 36910 - DNA, 38 bp, Artificial Sequence
  primer
gtaaaacgacggccagttgaagtgaggtcttggtgtgc

SEQ ID NO: 36911 - DNA, 38 bp, Artificial Sequence
  primer
gtaaaacgacggccagtatctgaggctttagcgctttc

SEQ ID NO: 36912 - DNA, 38 bp, Artificial Sequence
  primer
gtaaaacgacggccagtcgactgttacaactccctggc

SEQ ID NO: 36913 - DNA, 21 bp, Artificial Sequence
  primer
gagcttattatctgccggtgc

SEQ ID NO: 36914 - DNA, 38 bp, Artificial Sequence
  primer
gtaaaacgacggccagtagaaacaaagggcttctgagc

SEQ ID NO: 36915 - DNA, 20 bp, Artificial Sequence
  primer
gcggcaagagagaagggtag

SEQ ID NO: 36916 - DNA, 21 bp, Artificial Sequence
  primer
gctaagtgggatcaccaaacc

SEQ ID NO: 36917 - DNA, 38 bp, Artificial Sequence
  primer
gtaaaacgacggccagtgttagccacaggtgcacagtc

SEQ ID NO: 36918 - DNA, 38 bp, Artificial Sequence
  primer
gtaaaacgacggccagttcacaagctttcagcatgacc

SEQ ID NO: 36919 - DNA, 39 bp, Artificial Sequence
  primer
gtaaaacgacggccagtccgatcagagaattcatcaacc

SEQ ID NO: 36920 - DNA, 37 bp, Artificial Sequence
  primer
gtaaaacgacggccagtagcttccaacaccacacctg

SEQ ID NO: 36921 - DNA, 38 bp, Artificial Sequence
  primer
gtaaaacgacggccagtttattcttggttcccattgcc

SEQ ID NO: 36922 - DNA, 22 bp, Artificial Sequence
  primer
ggtgagacaagaggctagatgg

SEQ ID NO: 36923 - DNA, 38 bp, Artificial Sequence
  primer
gtaaaacgacggccagtttctcagtgtctgcggtgttc

SEQ ID NO: 36924 - DNA, 20 bp, Artificial Sequence
  primer
agctgtgggaacatgctgag

SEQ ID NO: 36925 - DNA, 21 bp, Artificial Sequence
  primer
catgacttccacctacctggg

SEQ ID NO: 36926 - DNA, 38 bp, Artificial Sequence
  primer
gtaaaacgacggccagttaaatcatggctgcaggactc

SEQ ID NO: 36927 - DNA, 20 bp, Artificial Sequence
  primer
gtgccatcctgacagaggac

SEQ ID NO: 36928 - DNA, 38 bp, Artificial Sequence
  primer
gtaaaacgacggccagtagtggatcatcgtcaccactg

SEQ ID NO: 36929 - DNA, 37 bp, Artificial Sequence
  primer
gtaaaacgacggccagtgttcattggacaggctggag

SEQ ID NO: 36930 - DNA, 21 bp, Artificial Sequence
  primer
gaagatacagtgaggccaggg

SEQ ID NO: 36931 - DNA, 38 bp, Artificial Sequence
  primer
gtaaaacgacggccagttcaaaggagtaagttggcacg

SEQ ID NO: 36932 - DNA, 37 bp, Artificial Sequence
  primer
gtaaaacgacggccagtacagtggctgcctgtttctg

SEQ ID NO: 36933 - DNA, 21 bp, Artificial Sequence
  primer
ctgaagcatctacctctgccc

SEQ ID NO: 36934 - DNA, 37 bp, Artificial Sequence
  primer
gtaaaacgacggccagtacagtgtctgggttgatggg

SEQ ID NO: 36935 - DNA, 40 bp, Artificial Sequence
  primer
gtaaaacgacggccagttctctaccaatatttggcctgtg

SEQ ID NO: 36936 - DNA, 21 bp, Artificial Sequence
  primer
tgtgcccaagattgaggatag

SEQ ID NO: 36937 - DNA, 21 bp, Artificial Sequence
  primer
acagcacccaagatacaggtg

SEQ ID NO: 36938 - DNA, 38 bp, Artificial Sequence
  primer
gtaaaacgacggccagtaggccaggttatcagatggtg

SEQ ID NO: 36939 - DNA, 22 bp, Artificial Sequence
  primer
cacactgccttcaaataccctc

SEQ ID NO: 36940 - DNA, 38 bp, Artificial Sequence
  primer
gtaaaacgacggccagtgaaacattgcacttgcacctc

SEQ ID NO: 36941 - DNA, 38 bp, Artificial Sequence
  primer
gtaaaacgacggccagttgcaggaatgtgagatggttc

SEQ ID NO: 36942 - DNA, 19 bp, Artificial Sequence
  primer
agccaagatcccaccattg

SEQ ID NO: 36943 - DNA, 38 bp, Artificial Sequence
  primer
gtaaaacgacggccagttggcatcagggttaaggagtt

SEQ ID NO: 36944 - DNA, 21 bp, Artificial Sequence
  primer
ctgagagagactgatgcctgg

SEQ ID NO: 36945 - DNA, 21 bp, Artificial Sequence
  primer
ggcaggatctagctgatggtc

SEQ ID NO: 36946 - DNA, 39 bp, Artificial Sequence
  primer
gtaaaacgacggccagtaacacagtagtagcctgccagc

SEQ ID NO: 36947 - DNA, 38 bp, Artificial Sequence
  primer
gtaaaacgacggccagtcctgtggatgtcttgggtagg

SEQ ID NO: 36948 - DNA, 39 bp, Artificial Sequence
  primer
gtaaaacgacggccagttgtgaaatgagttcaaggtccc

SEQ ID NO: 36949 - DNA, 21 bp, Artificial Sequence
  primer
gactggaaacaccctgaggtc

SEQ ID NO: 36950 - DNA, 21 bp, Artificial Sequence
  primer
gagatgagggtctggaaggtg

SEQ ID NO: 36951 - DNA, 38 bp, Artificial Sequence
  primer
gtaaaacgacggccagtgatgccaggctgaaggattac

SEQ ID NO: 36952 - DNA, 21 bp, Artificial Sequence
  primer
agctctgatcaagaaggacgg

SEQ ID NO: 36953 - DNA, 21 bp, Artificial Sequence
  primer
gattcctatcttcaggctccc

SEQ ID NO: 36954 - DNA, 21 bp, Artificial Sequence
  primer
tgttacaggctgaggaaatgg

SEQ ID NO: 36955 - DNA, 21 bp, Artificial Sequence
  primer
tccatatgcttgtgtgtggtg

SEQ ID NO: 36956 - DNA, 20 bp, Artificial Sequence
  primer
agggccagggtctttctagg

SEQ ID NO: 36957 - DNA, 21 bp, Artificial Sequence
  primer
aagacttggaggtgatgcctg

SEQ ID NO: 36958 - DNA, 37 bp, Artificial Sequence
  primer
gtaaaacgacggccagtagtgtgggaccagggatagg

SEQ ID NO: 36959 - DNA, 38 bp, Artificial Sequence
  primer
gtaaaacgacggccagtctagaaggcagttgtccctcc

SEQ ID NO: 36960 - DNA, 36 bp, Artificial Sequence
  primer
gtaaaacgacggccagtacaggtgggcattcacctc

SEQ ID NO: 36961 - DNA, 38 bp, Artificial Sequence
  primer
gtaaaacgacggccagtaagggcagaaggtgagttgtg

SEQ ID NO: 36962 - DNA, 38 bp, Artificial Sequence
  primer
gtaaaacgacggccagtggtgagggtagaagatctcgc

SEQ ID NO: 36963 - DNA, 38 bp, Artificial Sequence
  primer
gtaaaacgacggccagtcaacgattgttctgccatcac

SEQ ID NO: 36964 - DNA, 38 bp, Artificial Sequence
  primer
gtaaaacgacggccagtgggaaacctgtgagtgacacc

SEQ ID NO: 36965 - DNA, 38 bp, Artificial Sequence
  primer
gtaaaacgacggccagtctggtggacccaatgtctagg

SEQ ID NO: 36966 - DNA, 21 bp, Artificial Sequence
  primer
cattgctgtcctcgcatattg

SEQ ID NO: 36967 - DNA, 38 bp, Artificial Sequence
  primer
gtaaaacgacggccagtaggagagaaggtgagggaacc

SEQ ID NO: 36968 - DNA, 38 bp, Artificial Sequence
  primer
gtaaaacgacggccagttgccctggaacttcctcttag

SEQ ID NO: 36969 - DNA, 21 bp, Artificial Sequence
  primer
ggctggttacagactcccttg

SEQ ID NO: 36970 - DNA, 38 bp, Artificial Sequence
  primer
gtaaaacgacggccagtaacagcttgggagaggacaag

SEQ ID NO: 36971 - DNA, 38 bp, Artificial Sequence
  primer
gtaaaacgacggccagttgtcagacccagtgacattcc

SEQ ID NO: 36972 - DNA, 38 bp, Artificial Sequence
  primer
gtaaaacgacggccagtgggcaagattgcttcactagc

SEQ ID NO: 36973 - DNA, 36 bp, Artificial Sequence
  primer
gtaaaacgacggccagtcagaaggtgagagggcgtc

SEQ ID NO: 36974 - DNA, 37 bp, Artificial Sequence
  primer
gtaaaacgacggccagtctgacgtgggagcattcaag

SEQ ID NO: 36975 - DNA, 38 bp, Artificial Sequence
  primer
gtaaaacgacggccagtacctggtaaacccgtgagttg

SEQ ID NO: 36976 - DNA, 21 bp, Artificial Sequence
  primer
ccggtctaccaggagttcaag

SEQ ID NO: 36977 - DNA, 38 bp, Artificial Sequence
  primer
gtaaaacgacggccagtgggagctcttctgaatttggg

SEQ ID NO: 36978 - DNA, 38 bp, Artificial Sequence
  primer
gtaaaacgacggccagttcaggtacgtctgcctgagtc

SEQ ID NO: 36979 - DNA, 38 bp, Artificial Sequence
  primer
gtaaaacgacggccagttgtgtcttacctgctgggttg

SEQ ID NO: 36980 - DNA, 21 bp, Artificial Sequence
  primer
gctcaggaaatgccagtcttc

SEQ ID NO: 36981 - DNA, 38 bp, Artificial Sequence
  primer
gtaaaacgacggccagtcagtgagtacagtgccttggg

SEQ ID NO: 36982 - DNA, 21 bp, Artificial Sequence
  primer
tctccatctctagagcccacg

SEQ ID NO: 36983 - DNA, 37 bp, Artificial Sequence
  primer
gtaaaacgacggccagtagaggaccagcttcagcctc

SEQ ID NO: 36984 - DNA, 21 bp, Artificial Sequence
  primer
gtcgcttgtctcctcttgtcc

SEQ ID NO: 36985 - DNA, 21 bp, Artificial Sequence
  primer
ctctcagctctgcaggacaag

SEQ ID NO: 36986 - DNA, 21 bp, Artificial Sequence
  primer
ctgcagaactggtgggtactg

SEQ ID NO: 36987 - DNA, 38 bp, Artificial Sequence
  primer
gtaaaacgacggccagtaactcaaagccaattgttggg

SEQ ID NO: 36988 - DNA, 21 bp, Artificial Sequence
  primer
tccctgatcagagtatctgcg

SEQ ID NO: 36989 - DNA, 38 bp, Artificial Sequence
  primer
gtaaaacgacggccagtgtgagtgcctcgccttatctc

SEQ ID NO: 36990 - DNA, 38 bp, Artificial Sequence
  primer
gtaaaacgacggccagttcagctaagtggtcctgcttg

SEQ ID NO: 36991 - DNA, 38 bp, Artificial Sequence
  primer
gtaaaacgacggccagttactcccatgacctcctctcc

SEQ ID NO: 36992 - DNA, 20 bp, Artificial Sequence
  primer
acccattacgggtcaccttc

SEQ ID NO: 36993 - DNA, 21 bp, Artificial Sequence
  primer
agctttggccatcctcttacc

SEQ ID NO: 36994 - DNA, 37 bp, Artificial Sequence
  primer
gtaaaacgacggccagtgtctccgctcctcgcattag

SEQ ID NO: 36995 - DNA, 21 bp, Artificial Sequence
  primer
cgagttaggaggctggttcag

SEQ ID NO: 36996 - DNA, 21 bp, Artificial Sequence
  primer
cccaggaggagtgactgattc

SEQ ID NO: 36997 - DNA, 21 bp, Artificial Sequence
  primer
ccttgggttgtgacctacctc

SEQ ID NO: 36998 - DNA, 38 bp, Artificial Sequence
  primer
gtaaaacgacggccagtcagacgtaatgctcccaagtg

SEQ ID NO: 36999 - DNA, 38 bp, Artificial Sequence
  primer
gtaaaacgacggccagtagaagccagctgtcctgtttc

SEQ ID NO: 37000 - DNA, 20 bp, Artificial Sequence
  primer
attcaggtgagtgtgtgccc

SEQ ID NO: 37001 - DNA, 22 bp, Artificial Sequence
  primer
cctccatcttaggatagctggg

SEQ ID NO: 37002 - DNA, 38 bp, Artificial Sequence
  primer
gtaaaacgacggccagtgaccaccggtaagttgagctg

SEQ ID NO: 37003 - DNA, 21 bp, Artificial Sequence
  primer
ctgatgtgaggttgacttggg

SEQ ID NO: 37004 - DNA, 21 bp, Artificial Sequence
  primer
ctgaggatccgccttctctac

SEQ ID NO: 37005 - DNA, 21 bp, Artificial Sequence
  primer
tttccagaggaaatggagctg

SEQ ID NO: 37006 - DNA, 38 bp, Artificial Sequence
  primer
gtaaaacgacggccagttcagagtcctgctgcaagttc

SEQ ID NO: 37007 - DNA, 38 bp, Artificial Sequence
  primer
gtaaaacgacggccagtcccagattgtcagagggtgag

SEQ ID NO: 37008 - DNA, 37 bp, Artificial Sequence
  primer
gtaaaacgacggccagtctcttcactgcacctgcctc

SEQ ID NO: 37009 - DNA, 38 bp, Artificial Sequence
  primer
gtaaaacgacggccagtgccacagtctagagggagacg

SEQ ID NO: 37010 - DNA, 21 bp, Artificial Sequence
  primer
gaatctacggaggttgctgtg

SEQ ID NO: 37011 - DNA, 38 bp, Artificial Sequence
  primer
gtaaaacgacggccagtatgcagcatctgcagtcattc

SEQ ID NO: 37012 - DNA, 22 bp, Artificial Sequence
  primer
tcccaagggacacatgtaattc

SEQ ID NO: 37013 - DNA, 39 bp, Artificial Sequence
  primer
gtaaaacgacggccagttcaacgtgaggatcagactagg

SEQ ID NO: 37014 - DNA, 39 bp, Artificial Sequence
  primer
gtaaaacgacggccagtggttatcagcttcaacagtggg

SEQ ID NO: 37015 - DNA, 37 bp, Artificial Sequence
  primer
gtaaaacgacggccagttgcacagtgggtcagatcac

SEQ ID NO: 37016 - DNA, 38 bp, Artificial Sequence
  primer
gtaaaacgacggccagtcccaaactaagaaggtcctgg

SEQ ID NO: 37017 - DNA, 21 bp, Artificial Sequence
  primer
ctgggtcacagtagccatttg

SEQ ID NO: 37018 - DNA, 38 bp, Artificial Sequence
  primer
gtaaaacgacggccagtagtaacaggcactacctcccg

SEQ ID NO: 37019 - DNA, 26 bp, Artificial Sequence
  primer
ccctatctggatttagacacactatg

SEQ ID NO: 37020 - DNA, 38 bp, Artificial Sequence
  primer
gtaaaacgacggccagtctcagaaatgtcagagcagcc

SEQ ID NO: 37021 - DNA, 38 bp, Artificial Sequence
  primer
gtaaaacgacggccagttcagaatgccacaaatgttcc

SEQ ID NO: 37022 - DNA, 20 bp, Artificial Sequence
  primer
aatgcccaaaccaggaaatc

SEQ ID NO: 37023 - DNA, 38 bp, Artificial Sequence
  primer
gtaaaacgacggccagtccaatcctggcatttcttctg

SEQ ID NO: 37024 - DNA, 21 bp, Artificial Sequence
  primer
gaaagtggtttgggactctgg

SEQ ID NO: 37025 - DNA, 21 bp, Artificial Sequence
  primer
aggagagaaggagatgcatgg

SEQ ID NO: 37026 - DNA, 38 bp, Artificial Sequence
  primer
gtaaaacgacggccagtgcatagagggtgtccttggtc

SEQ ID NO: 37027 - DNA, 21 bp, Artificial Sequence
  primer
taaccgcaaacacagatcagg

SEQ ID NO: 37028 - DNA, 21 bp, Artificial Sequence
  primer
tgaggactgagatgctggatg

SEQ ID NO: 37029 - DNA, 38 bp, Artificial Sequence
  primer
gtaaaacgacggccagttcactcaggccagaaagtcac

SEQ ID NO: 37030 - DNA, 38 bp, Artificial Sequence
  primer
gtaaaacgacggccagtccactaggagcgagtgtatgg

SEQ ID NO: 37031 - DNA, 21 bp, Artificial Sequence
  primer
ttgcctcagtttcttcttccc

SEQ ID NO: 37032 - DNA, 38 bp, Artificial Sequence
  primer
gtaaaacgacggccagtatagactctgggactgggagg

SEQ ID NO: 37033 - DNA, 38 bp, Artificial Sequence
  primer
gtaaaacgacggccagtcctaagtttggcaaccctacc

SEQ ID NO: 37034 - DNA, 21 bp, Artificial Sequence
  primer
tcccactagtgactgctttgg

SEQ ID NO: 37035 - DNA, 37 bp, Artificial Sequence
  primer
gtaaaacgacggccagtgggtccaggagagaagcaag

SEQ ID NO: 37036 - DNA, 38 bp, Artificial Sequence
  primer
gtaaaacgacggccagtgatccaagaccactagcaggg

SEQ ID NO: 37037 - DNA, 38 bp, Artificial Sequence
  primer
gtaaaacgacggccagtctggaagacagcgtccctaac

SEQ ID NO: 37038 - DNA, 21 bp, Artificial Sequence
  primer
gtgtgtgcatatgtgtgcctg

SEQ ID NO: 37039 - DNA, 38 bp, Artificial Sequence
  primer
gtaaaacgacggccagtattgagggagcctgtcttcag

SEQ ID NO: 37040 - DNA, 38 bp, Artificial Sequence
  primer
gtaaaacgacggccagtaatgctgtgtcctcaccaaca

SEQ ID NO: 37041 - DNA, 38 bp, Artificial Sequence
  primer
gtaaaacgacggccagtaggtgtggtttctggttgagc

SEQ ID NO: 37042 - DNA, 21 bp, Artificial Sequence
  primer
aaggccactgggacagtagag

SEQ ID NO: 37043 - DNA, 37 bp, Artificial Sequence
  primer
gtaaaacgacggccagttggaagtgtgcagtgtccag

SEQ ID NO: 37044 - DNA, 37 bp, Artificial Sequence
  primer
gtaaaacgacggccagtaagcccgaagaactgctctc

SEQ ID NO: 37045 - DNA, 38 bp, Artificial Sequence
  primer
gtaaaacgacggccagtagcactagtgaccacccaagg

SEQ ID NO: 37046 - DNA, 38 bp, Artificial Sequence
  primer
gtaaaacgacggccagttttagcctgatggtgagaggc

SEQ ID NO: 37047 - DNA, 21 bp, Artificial Sequence
  primer
gggaaatttagcagcgatgag

SEQ ID NO: 37048 - DNA, 38 bp, Artificial Sequence
  primer
gtaaaacgacggccagtatgccttgggaggaattatgc

SEQ ID NO: 37049 - DNA, 21 bp, Artificial Sequence
  primer
gagaggtgagaagtgtggcag

SEQ ID NO: 37050 - DNA, 21 bp, Artificial Sequence
  primer
tgaggaagccaagatcctcag

SEQ ID NO: 37051 - DNA, 38 bp, Artificial Sequence
  primer
gtaaaacgacggccagtgtgagaggtgggtagcaatgg

SEQ ID NO: 37052 - DNA, 22 bp, Artificial Sequence
  primer
tccacccatccaactatttgac

SEQ ID NO: 37053 - DNA, 21 bp, Artificial Sequence
  primer
gcctagtgagaggagaggcac

SEQ ID NO: 37054 - DNA, 21 bp, Artificial Sequence
  primer
tgtagtgcaagtgtgcgtgtg

SEQ ID NO: 37055 - DNA, 21 bp, Artificial Sequence
  primer
ttctcaacctcaggtaagggc

SEQ ID NO: 37056 - DNA, 38 bp, Artificial Sequence
  primer
gtaaaacgacggccagtgggacgattgttgagacacac

SEQ ID NO: 37057 - DNA, 38 bp, Artificial Sequence
  primer
gtaaaacgacggccagtctgagaagaccctccctcctc

SEQ ID NO: 37058 - DNA, 39 bp, Artificial Sequence
  primer
gtaaaacgacggccagtgcatgttatcatgtgcttcagg

SEQ ID NO: 37059 - DNA, 38 bp, Artificial Sequence
  primer
gtaaaacgacggccagtaaagacaaacagctcggtgac

SEQ ID NO: 37060 - DNA, 38 bp, Artificial Sequence
  primer
gtaaaacgacggccagtaactcacaaatgtcacgcagg

SEQ ID NO: 37061 - DNA, 38 bp, Artificial Sequence
  primer
gtaaaacgacggccagtcctcttctgtatccgacctcc

SEQ ID NO: 37062 - DNA, 38 bp, Artificial Sequence
  primer
gtaaaacgacggccagttaggttctgggatcagcattg

SEQ ID NO: 37063 - DNA, 21 bp, Artificial Sequence
  primer
tggatgatgtcaggaaacagc

SEQ ID NO: 37064 - DNA, 38 bp, Artificial Sequence
  primer
gtaaaacgacggccagtgggagagactccctaactccc

SEQ ID NO: 37065 - DNA, 38 bp, Artificial Sequence
  primer
gtaaaacgacggccagtctttgggagtttgacactcgg

SEQ ID NO: 37066 - DNA, 21 bp, Artificial Sequence
  primer
cctcactgcataggttcccac

SEQ ID NO: 37067 - DNA, 38 bp, Artificial Sequence
  primer
gtaaaacgacggccagtaggtaagtggtggcagagagc

SEQ ID NO: 37068 - DNA, 38 bp, Artificial Sequence
  primer
gtaaaacgacggccagtgagagtgtcaaagcagggagg

SEQ ID NO: 37069 - DNA, 21 bp, Artificial Sequence
  primer
taaatccttgggtgctggaac

SEQ ID NO: 37070 - DNA, 21 bp, Artificial Sequence
  primer
gataccaccacacacgtgacc

SEQ ID NO: 37071 - DNA, 21 bp, Artificial Sequence
  primer
gtcgtttgggaatgagtgaac

SEQ ID NO: 37072 - DNA, 20 bp, Artificial Sequence
  primer
ctacgtctttgggccagatg

SEQ ID NO: 37073 - DNA, 21 bp, Artificial Sequence
  primer
ctacacagaaccaggtgcagg

SEQ ID NO: 37074 - DNA, 38 bp, Artificial Sequence
  primer
gtaaaacgacggccagtgaaatctggagctcaagcagc

SEQ ID NO: 37075 - DNA, 21 bp, Artificial Sequence
  primer
acccgattggacacgacttac

SEQ ID NO: 37076 - DNA, 39 bp, Artificial Sequence
  primer
gtaaaacgacggccagttttcacaaaccaagcaagtctc

SEQ ID NO: 37077 - DNA, 21 bp, Artificial Sequence
  primer
ctccaggactgaaagcgtttg

SEQ ID NO: 37078 - DNA, 20 bp, Artificial Sequence
  primer
gtgtccactgtgggaagcag

SEQ ID NO: 37079 - DNA, 36 bp, Artificial Sequence
  primer
gtaaaacgacggccagtgaaggtggtcagacgtggg

SEQ ID NO: 37080 - DNA, 35 bp, Artificial Sequence
  primer
gtaaaacgacggccagtctgaagggctcagctccc

SEQ ID NO: 37081 - DNA, 18 bp, Artificial Sequence
  primer
gtaggtcccaagggcgac

SEQ ID NO: 37082 - DNA, 21 bp, Artificial Sequence
  primer
gctccttgtagaaacagctcg

SEQ ID NO: 37083 - DNA, 20 bp, Artificial Sequence
  primer
ggtgagtggcccttaaactg

SEQ ID NO: 37084 - DNA, 38 bp, Artificial Sequence
  primer
gtaaaacgacggccagtgcccagataacctgttaaccc

SEQ ID NO: 37085 - DNA, 37 bp, Artificial Sequence
  primer
gtaaaacgacggccagttattaaaccggcacaggcag

SEQ ID NO: 37086 - DNA, 37 bp, Artificial Sequence
  primer
gtaaaacgacggccagtgttgcttggcagaatgttcc

SEQ ID NO: 37087 - DNA, 21 bp, Artificial Sequence
  primer
ctgccaccaggtagacagtcc

SEQ ID NO: 37088 - DNA, 38 bp, Artificial Sequence
  primer
gtaaaacgacggccagttcttgactgttactagcgggc

SEQ ID NO: 37089 - DNA, 21 bp, Artificial Sequence
  primer
ctgcacaagttgctcagtgtc

SEQ ID NO: 37090 - DNA, 39 bp, Artificial Sequence
  primer
gtaaaacgacggccagtgggtgagagagagaagtccagg

SEQ ID NO: 37091 - DNA, 18 bp, Artificial Sequence
  primer
gtcagggctcttggtggc

SEQ ID NO: 37092 - DNA, 38 bp, Artificial Sequence
  primer
gtaaaacgacggccagtaagaccctcaagttgacaggg

SEQ ID NO: 37093 - DNA, 38 bp, Artificial Sequence
  primer
gtaaaacgacggccagtcttgaatttcctggtttggtg

SEQ ID NO: 37094 - DNA, 37 bp, Artificial Sequence
  primer
gtaaaacgacggccagtgacctgaggtatgtgcctgc

SEQ ID NO: 37095 - DNA, 37 bp, Artificial Sequence
  primer
gtaaaacgacggccagtctgtcgaggcaggcatattg

SEQ ID NO: 37096 - DNA, 20 bp, Artificial Sequence
  primer
agatgaccactgttgggagg

SEQ ID NO: 37097 - DNA, 18 bp, Artificial Sequence
  primer
agtgcacccaaagggacc

SEQ ID NO: 37098 - DNA, 19 bp, Artificial Sequence
  primer
gggctcatctccctagtgc

SEQ ID NO: 37099 - DNA, 38 bp, Artificial Sequence
  primer
gtaaaacgacggccagtggtagcctgagagctgggaac

SEQ ID NO: 37100 - DNA, 20 bp, Artificial Sequence
  primer
agtgacccactgcattctcg

SEQ ID NO: 37101 - DNA, 38 bp, Artificial Sequence
  primer
gtaaaacgacggccagtcttccagctggctctgctaag

SEQ ID NO: 37102 - DNA, 21 bp, Artificial Sequence
  primer
cagctcctaccctgactgtcc

SEQ ID NO: 37103 - DNA, 21 bp, Artificial Sequence
  primer
ctagaagggcctcaggcaaac

SEQ ID NO: 37104 - DNA, 38 bp, Artificial Sequence
  primer
gtaaaacgacggccagtattctatgcagccagcagctc

SEQ ID NO: 37105 - DNA, 20 bp, Artificial Sequence
  primer
gtgatgcaggacagaaaggc

SEQ ID NO: 37106 - DNA, 21 bp, Artificial Sequence
  primer
tgtcaggtctctgctggtctc

SEQ ID NO: 37107 - DNA, 20 bp, Artificial Sequence
  primer
gtcccaagggagagagcatc

SEQ ID NO: 37108 - DNA, 21 bp, Artificial Sequence
  primer
tcagtccacacctgtccaaag

SEQ ID NO: 37109 - DNA, 35 bp, Artificial Sequence
  primer
gtaaaacgacggccagtggcaacctgctgtggact

SEQ ID NO: 37110 - DNA, 18 bp, Artificial Sequence
  primer
ccctgcttgccagttcag

SEQ ID NO: 37111 - DNA, 35 bp, Artificial Sequence
  primer
gtaaaacgacggccagtgcctgtccacacaggtgc

SEQ ID NO: 37112 - DNA, 18 bp, Artificial Sequence
  primer
cccacaaacacccacacc

SEQ ID NO: 37113 - DNA, 35 bp, Artificial Sequence
  primer
gtaaaacgacggccagttcctgcctccacctttcc

SEQ ID NO: 37114 - DNA, 21 bp, Artificial Sequence
  primer
gctcctgaaccattctgaacc

SEQ ID NO: 37115 - DNA, 38 bp, Artificial Sequence
  primer
gtaaaacgacggccagttgttctgtttattcccagggc

SEQ ID NO: 37116 - DNA, 25 bp, Artificial Sequence
  primer
ttgaaaggagctgcatacaataaac

SEQ ID NO: 37117 - DNA, 22 bp, Artificial Sequence
  primer
tgaaccaagcagtgttcttagc

SEQ ID NO: 37118 - DNA, 38 bp, Artificial Sequence
  primer
gtaaaacgacggccagtgcagcaagatttcgtttgaag

SEQ ID NO: 37119 - DNA, 27 bp, Artificial Sequence
  primer
caaactttaacaacactgtaccagaag

SEQ ID NO: 37120 - DNA, 40 bp, Artificial Sequence
  primer
gtaaaacgacggccagtggtggacacaagtgtcatctaaa

SEQ ID NO: 37121 - DNA, 22 bp, Artificial Sequence
  primer
ttgcaattgctttcattacctg

SEQ ID NO: 37122 - DNA, 38 bp, Artificial Sequence
  primer
gtaaaacgacggccagttttagtgggagccagtgtttg

SEQ ID NO: 37123 - DNA, 38 bp, Artificial Sequence
  primer
gtaaaacgacggccagttcacgtggctcactattcctc

SEQ ID NO: 37124 - DNA, 21 bp, Artificial Sequence
  primer
aaggaacagatggaaagtccc

SEQ ID NO: 37125 - DNA, 43 bp, Artificial Sequence
  primer
gtaaaacgacggccagtaagtggtgaagctgtaacttataccc

SEQ ID NO: 37126 - DNA, 38 bp, Artificial Sequence
  primer
gtaaaacgacggccagtacgtgcctttcaagggtttag

SEQ ID NO: 37127 - DNA, 40 bp, Artificial Sequence
  primer
gtaaaacgacggccagtggaagaatgagatttggaggttc

SEQ ID NO: 37128 - DNA, 22 bp, Artificial Sequence
  primer
tgaacatttggtctcacacctg

SEQ ID NO: 37129 - DNA, 40 bp, Artificial Sequence
  primer
gtaaaacgacggccagttcatgtggaattggaattgtttc

SEQ ID NO: 37130 - DNA, 38 bp, Artificial Sequence
  primer
gtaaaacgacggccagtctgatgataagttaatgcccg

SEQ ID NO: 37131 - DNA, 38 bp, Artificial Sequence
  primer
gtaaaacgacggccagtacaacaggcgagagagacaaa

SEQ ID NO: 37132 - DNA, 23 bp, Artificial Sequence
  primer
tcagaactttgcattgtctgttg

SEQ ID NO: 37133 - DNA, 38 bp, Artificial Sequence
  primer
gtaaaacgacggccagttgtttgcaatgggaatctgag

SEQ ID NO: 37134 - DNA, 43 bp, Artificial Sequence
  primer
gtaaaacgacggccagtttgctaatgggacatgataattagtg

SEQ ID NO: 37135 - DNA, 22 bp, Artificial Sequence
  primer
ttcttcaatttcctctccaacc

SEQ ID NO: 37136 - DNA, 20 bp, Artificial Sequence
  primer
cagacaatgggtagggcaag

SEQ ID NO: 37137 - DNA, 39 bp, Artificial Sequence
  primer
gtaaaacgacggccagttcacttgaaacaacaaaccacg

SEQ ID NO: 37138 - DNA, 40 bp, Artificial Sequence
  primer
gtaaaacgacggccagttgaatgaatgaagtttgactggc

SEQ ID NO: 37139 - DNA, 23 bp, Artificial Sequence
  primer
tcaagcaagatgaagagtgatga

SEQ ID NO: 37140 - DNA, 38 bp, Artificial Sequence
  primer
gtaaaacgacggccagtgggattagatggaaatcctgg

SEQ ID NO: 37141 - DNA, 37 bp, Artificial Sequence
  primer
gtaaaacgacggccagtacctgaaagtcttggccgac

SEQ ID NO: 37142 - DNA, 38 bp, Artificial Sequence
  primer
gtaaaacgacggccagtctggagagccaggtattcagg

SEQ ID NO: 37143 - DNA, 37 bp, Artificial Sequence
  primer
gtaaaacgacggccagtagggactccagggaatgatg

SEQ ID NO: 37144 - DNA, 40 bp, Artificial Sequence
  primer
gtaaaacgacggccagtctgaattctatcagtgccatgtg

SEQ ID NO: 37145 - DNA, 21 bp, Artificial Sequence
  primer
tcactcatctccagaggttcc

SEQ ID NO: 37146 - DNA, 38 bp, Artificial Sequence
  primer
gtaaaacgacggccagtaagcctggctgaatgtttacg

SEQ ID NO: 37147 - DNA, 21 bp, Artificial Sequence
  primer
ccctgaccctgtccaaattac

SEQ ID NO: 37148 - DNA, 44 bp, Artificial Sequence
  primer
gtaaaacgacggccagtaaataagtgtttaatgttcaatggtca

SEQ ID NO: 37149 - DNA, 39 bp, Artificial Sequence
  primer
gtaaaacgacggccagttttacccttccaagggcttatc

SEQ ID NO: 37150 - DNA, 21 bp, Artificial Sequence
  primer
acaaggctgaaacaacatggc

SEQ ID NO: 37151 - DNA, 21 bp, Artificial Sequence
  primer
tcaggtgtagctcacactccc

SEQ ID NO: 37152 - DNA, 42 bp, Artificial Sequence
  primer
gtaaaacgacggccagtggtattccatttaatgaacgaaacg

SEQ ID NO: 37153 - DNA, 38 bp, Artificial Sequence
  primer
gtaaaacgacggccagtaaggcaaattggacaacagtg

SEQ ID NO: 37154 - DNA, 38 bp, Artificial Sequence
  primer
gtaaaacgacggccagttagggcatatcatttccttgc

SEQ ID NO: 37155 - DNA, 40 bp, Artificial Sequence
  primer
gtaaaacgacggccagtccatctacacactagcttcaccc

SEQ ID NO: 37156 - DNA, 37 bp, Artificial Sequence
  primer
gtaaaacgacggccagtatgccactggagagcatcac

SEQ ID NO: 37157 - DNA, 21 bp, Artificial Sequence
  primer
aaccggtgagttggcagttac

SEQ ID NO: 37158 - DNA, 21 bp, Artificial Sequence
  primer
gtgtcagaatccgaactcagg

SEQ ID NO: 37159 - DNA, 38 bp, Artificial Sequence
  primer
gtaaaacgacggccagtatggaataccaggtgctcagg

SEQ ID NO: 37160 - DNA, 21 bp, Artificial Sequence
  primer
atgcccactttgtaggagagg

SEQ ID NO: 37161 - DNA, 21 bp, Artificial Sequence
  primer
accactggttatgatcccagc

SEQ ID NO: 37162 - DNA, 42 bp, Artificial Sequence
  primer
gtaaaacgacggccagtgcagtcagaccagttggtaaattag

SEQ ID NO: 37163 - DNA, 22 bp, Artificial Sequence
  primer
tcctcattgccctattataccc

SEQ ID NO: 37164 - DNA, 38 bp, Artificial Sequence
  primer
gtaaaacgacggccagtatccatgttggctagagggtg

SEQ ID NO: 37165 - DNA, 38 bp, Artificial Sequence
  primer
gtaaaacgacggccagtagcagacgggagtttctcctc

SEQ ID NO: 37166 - DNA, 38 bp, Artificial Sequence
  primer
gtaaaacgacggccagtccaagtgtgcctcttagaccc

SEQ ID NO: 37167 - DNA, 20 bp, Artificial Sequence
  primer
tgacgagaccaagaactgcc

SEQ ID NO: 37168 - DNA, 37 bp, Artificial Sequence
  primer
gtaaaacgacggccagtgtcgaggtaatctcctgccc

SEQ ID NO: 37169 - DNA, 37 bp, Artificial Sequence
  primer
gtaaaacgacggccagtcaagggtaagcgttgcactc

SEQ ID NO: 37170 - DNA, 38 bp, Artificial Sequence
  primer
gtaaaacgacggccagtgtttcttccatcctcagtgcc

SEQ ID NO: 37171 - DNA, 37 bp, Artificial Sequence
  primer
gtaaaacgacggccagtaggtccagatcacctttggg

SEQ ID NO: 37172 - DNA, 38 bp, Artificial Sequence
  primer
gtaaaacgacggccagtgtcttcatatgcctccttggg

SEQ ID NO: 37173 - DNA, 21 bp, Artificial Sequence
  primer
cgagcctggagcttcagtaag

SEQ ID NO: 37174 - DNA, 21 bp, Artificial Sequence
  primer
caccaaacgaaggtttcactg

SEQ ID NO: 37175 - DNA, 21 bp, Artificial Sequence
  primer
gcttcatttaggagctgggtc

SEQ ID NO: 37176 - DNA, 38 bp, Artificial Sequence
  primer
gtaaaacgacggccagtcagtcccgattaaacgattgg

SEQ ID NO: 37177 - DNA, 38 bp, Artificial Sequence
  primer
gtaaaacgacggccagtgaggctgtctgaacatcatgg

SEQ ID NO: 37178 - DNA, 38 bp, Artificial Sequence
  primer
gtaaaacgacggccagtcctggtcagatggtgagtgtg

SEQ ID NO: 37179 - DNA, 21 bp, Artificial Sequence
  primer
tgctgtaagtactcctggccc

SEQ ID NO: 37180 - DNA, 38 bp, Artificial Sequence
  primer
gtaaaacgacggccagtaatgggagcaggttatgttgg

SEQ ID NO: 37181 - DNA, 38 bp, Artificial Sequence
  primer
gtaaaacgacggccagtgagagcagcccgttcactaac

SEQ ID NO: 37182 - DNA, 37 bp, Artificial Sequence
  primer
gtaaaacgacggccagtctggccctgctgtaagtgtc

SEQ ID NO: 37183 - DNA, 38 bp, Artificial Sequence
  primer
gtaaaacgacggccagtgtatcctgccaggcttcagtc

SEQ ID NO: 37184 - DNA, 21 bp, Artificial Sequence
  primer
ctcctggtattgctggtgctc

SEQ ID NO: 37185 - DNA, 38 bp, Artificial Sequence
  primer
gtaaaacgacggccagtcctgagggaaatccagaaagg

SEQ ID NO: 37186 - DNA, 20 bp, Artificial Sequence
  primer
gagcgtgtaagtgtccctgc

SEQ ID NO: 37187 - DNA, 21 bp, Artificial Sequence
  primer
ctggtcccaaggtaacctctc

SEQ ID NO: 37188 - DNA, 38 bp, Artificial Sequence
  primer
gtaaaacgacggccagtccaaaggatctcctggtgaag

SEQ ID NO: 37189 - DNA, 21 bp, Artificial Sequence
  primer
ctagggtctgactggaagccc

SEQ ID NO: 37190 - DNA, 37 bp, Artificial Sequence
  primer
gtaaaacgacggccagtagaaagggcccagcaagaag

SEQ ID NO: 37191 - DNA, 38 bp, Artificial Sequence
  primer
gtaaaacgacggccagtctcctttccatccctacctcc

SEQ ID NO: 37192 - DNA, 20 bp, Artificial Sequence
  primer
tgctgtgagtgtccctgatg

SEQ ID NO: 37193 - DNA, 38 bp, Artificial Sequence
  primer
gtaaaacgacggccagtgggtaggaaacacctctttgg

SEQ ID NO: 37194 - DNA, 21 bp, Artificial Sequence
  primer
gctgctggaatatgctgtgac

SEQ ID NO: 37195 - DNA, 21 bp, Artificial Sequence
  primer
tgtctgttcctctctccctcc

SEQ ID NO: 37196 - DNA, 38 bp, Artificial Sequence
  primer
gtaaaacgacggccagtggaaacaagcctgggagatac

SEQ ID NO: 37197 - DNA, 38 bp, Artificial Sequence
  primer
gtaaaacgacggccagtcctctcaggaaacccagacac

SEQ ID NO: 37198 - DNA, 38 bp, Artificial Sequence
  primer
gtaaaacgacggccagtctgccaaactgagctgtcaac

SEQ ID NO: 37199 - DNA, 21 bp, Artificial Sequence
  primer
ctctcagggtgaaagtggtcc

SEQ ID NO: 37200 - DNA, 38 bp, Artificial Sequence
  primer
gtaaaacgacggccagtgcatcttcctgcctccattac

SEQ ID NO: 37201 - DNA, 38 bp, Artificial Sequence
  primer
gtaaaacgacggccagtctaaaggcgaacctggtgatg

SEQ ID NO: 37202 - DNA, 20 bp, Artificial Sequence
  primer
ctgtgagtatcacccgcctc

SEQ ID NO: 37203 - DNA, 38 bp, Artificial Sequence
  primer
gtaaaacgacggccagtagtccactgctctaggttggg

SEQ ID NO: 37204 - DNA, 37 bp, Artificial Sequence
  primer
gtaaaacgacggccagtggtcctgctgtaagtgccag

SEQ ID NO: 37205 - DNA, 38 bp, Artificial Sequence
  primer
gtaaaacgacggccagtttggtagagatgactccagcg

SEQ ID NO: 37206 - DNA, 21 bp, Artificial Sequence
  primer
tgaatctggacgtgaggtgag

SEQ ID NO: 37207 - DNA, 37 bp, Artificial Sequence
  primer
gtaaaacgacggccagtaacactccatgaccacagcc

SEQ ID NO: 37208 - DNA, 39 bp, Artificial Sequence
  primer
gtaaaacgacggccagttgaggagagagagatccagcag

SEQ ID NO: 37209 - DNA, 21 bp, Artificial Sequence
  primer
ctacagatgcagacagtgccc

SEQ ID NO: 37210 - DNA, 38 bp, Artificial Sequence
  primer
gtaaaacgacggccagtaggtctctgcctatggacacc

SEQ ID NO: 37211 - DNA, 38 bp, Artificial Sequence
  primer
gtaaaacgacggccagtgcatgtcctatggaaagaggc

SEQ ID NO: 37212 - DNA, 21 bp, Artificial Sequence
  primer
tggtcctgttgtatgtagccc

SEQ ID NO: 37213 - DNA, 21 bp, Artificial Sequence
  primer
tagcctctccctccctcctac

SEQ ID NO: 37214 - DNA, 21 bp, Artificial Sequence
  primer
agctctctgaggaccctggac

SEQ ID NO: 37215 - DNA, 37 bp, Artificial Sequence
  primer
gtaaaacgacggccagtaggccatagtgccctctctc

SEQ ID NO: 37216 - DNA, 38 bp, Artificial Sequence
  primer
gtaaaacgacggccagtcggctaagttggaggtactgg

SEQ ID NO: 37217 - DNA, 21 bp, Artificial Sequence
  primer
aacaaatcaccctgctgatcc

SEQ ID NO: 37218 - DNA, 23 bp, Artificial Sequence
  primer
catgagttgaatttgaggcataa

SEQ ID NO: 37219 - DNA, 21 bp, Artificial Sequence
  primer
tagcagcttccaatcctccag

SEQ ID NO: 37220 - DNA, 41 bp, Artificial Sequence
  primer
gtaaaacgacggccagttgcacatagaaaggtctgaacaac

SEQ ID NO: 37221 - DNA, 21 bp, Artificial Sequence
  primer
ctccatttcaaagaggtgtcg

SEQ ID NO: 37222 - DNA, 39 bp, Artificial Sequence
  primer
gtaaaacgacggccagtgggagagaactagtgcaggaag

SEQ ID NO: 37223 - DNA, 38 bp, Artificial Sequence
  primer
gtaaaacgacggccagtggcttaatgggacctagaggc

SEQ ID NO: 37224 - DNA, 20 bp, Artificial Sequence
  primer
cctcaaggtttccaaggacc

SEQ ID NO: 37225 - DNA, 25 bp, Artificial Sequence
  primer
cctgacagaactcttaatgtatggg

SEQ ID NO: 37226 - DNA, 43 bp, Artificial Sequence
  primer
gtaaaacgacggccagtttgatgagaataaatactttggaggg

SEQ ID NO: 37227 - DNA, 38 bp, Artificial Sequence
  primer
gtaaaacgacggccagttgcagcagacaagacttaccc

SEQ ID NO: 37228 - DNA, 24 bp, Artificial Sequence
  primer
aaatctgtgtgtctggcataattg

SEQ ID NO: 37229 - DNA, 21 bp, Artificial Sequence
  primer
acaaagcaaatgatgcctgtg

SEQ ID NO: 37230 - DNA, 21 bp, Artificial Sequence
  primer
ctggtgagagaggacgtgttg

SEQ ID NO: 37231 - DNA, 21 bp, Artificial Sequence
  primer
accatgaatgtcttgcctttg

SEQ ID NO: 37232 - DNA, 38 bp, Artificial Sequence
  primer
gtaaaacgacggccagtagccaagatggcagaatcaag

SEQ ID NO: 37233 - DNA, 38 bp, Artificial Sequence
  primer
gtaaaacgacggccagtgtggtgaagtgggtcttccag

SEQ ID NO: 37234 - DNA, 39 bp, Artificial Sequence
  primer
gtaaaacgacggccagtcctcatagggtaatcctggagc

SEQ ID NO: 37235 - DNA, 40 bp, Artificial Sequence
  primer
gtaaaacgacggccagttgagcttctctttaccttgaccc

SEQ ID NO: 37236 - DNA, 38 bp, Artificial Sequence
  primer
gtaaaacgacggccagtaagggtgagcccgtaagtagc

SEQ ID NO: 37237 - DNA, 39 bp, Artificial Sequence
  primer
gtaaaacgacggccagttggcttggtttgtgtctgtatc

SEQ ID NO: 37238 - DNA, 20 bp, Artificial Sequence
  primer
cttctggtggtgggtgtgtc

SEQ ID NO: 37239 - DNA, 40 bp, Artificial Sequence
  primer
gtaaaacgacggccagttcccagctagtggctaatattcc

SEQ ID NO: 37240 - DNA, 37 bp, Artificial Sequence
  primer
gtaaaacgacggccagtatccgtggcagcatcataag

SEQ ID NO: 37241 - DNA, 37 bp, Artificial Sequence
  primer
gtaaaacgacggccagtcaagcaggattcaacattgc

SEQ ID NO: 37242 - DNA, 38 bp, Artificial Sequence
  primer
gtaaaacgacggccagttaggcagtatttgggctttcg

SEQ ID NO: 37243 - DNA, 38 bp, Artificial Sequence
  primer
gtaaaacgacggccagtaggtcctgatggaaacaatgg

SEQ ID NO: 37244 - DNA, 38 bp, Artificial Sequence
  primer
gtaaaacgacggccagtgatatttggtagccaccaccc

SEQ ID NO: 37245 - DNA, 40 bp, Artificial Sequence
  primer
gtaaaacgacggccagtgccaggtttatttcactctttcc

SEQ ID NO: 37246 - DNA, 21 bp, Artificial Sequence
  primer
ggctcggaagctacacaaatg

SEQ ID NO: 37247 - DNA, 38 bp, Artificial Sequence
  primer
gtaaaacgacggccagtttgtgtttcaaagcaggcaag

SEQ ID NO: 37248 - DNA, 38 bp, Artificial Sequence
  primer
gtaaaacgacggccagtatgcttcaggagagtgtacgg

SEQ ID NO: 37249 - DNA, 21 bp, Artificial Sequence
  primer
ccaaccagagtgcagtgaaag

SEQ ID NO: 37250 - DNA, 38 bp, Artificial Sequence
  primer
gtaaaacgacggccagttccaccactgttctctctccc

SEQ ID NO: 37251 - DNA, 38 bp, Artificial Sequence
  primer
gtaaaacgacggccagtcctcccagttctttgagcatc

SEQ ID NO: 37252 - DNA, 39 bp, Artificial Sequence
  primer
gtaaaacgacggccagtgccctgtaagtaagaacctggg

SEQ ID NO: 37253 - DNA, 38 bp, Artificial Sequence
  primer
gtaaaacgacggccagttaagagatgcgggaatgatcc

SEQ ID NO: 37254 - DNA, 39 bp, Artificial Sequence
  primer
gtaaaacgacggccagtgaagctgcctacctcctactcc

SEQ ID NO: 37255 - DNA, 20 bp, Artificial Sequence
  primer
tgcatcacattgtttgcatc

SEQ ID NO: 37256 - DNA, 21 bp, Artificial Sequence
  primer
tgccaagatgtaaactcaccg

SEQ ID NO: 37257 - DNA, 38 bp, Artificial Sequence
  primer
gtaaaacgacggccagtaccattgtgtgacccattcac

SEQ ID NO: 37258 - DNA, 21 bp, Artificial Sequence
  primer
gggttcgttactgagcactgg

SEQ ID NO: 37259 - DNA, 38 bp, Artificial Sequence
  primer
gtaaaacgacggccagtccggacacaaggtcagtacac

SEQ ID NO: 37260 - DNA, 38 bp, Artificial Sequence
  primer
gtaaaacgacggccagttgaataccagtccctcagtgc

SEQ ID NO: 37261 - DNA, 21 bp, Artificial Sequence
  primer
cagcagaggtgagagcctagc

SEQ ID NO: 37262 - DNA, 22 bp, Artificial Sequence
  primer
ctcaatccggagtccatttaac

SEQ ID NO: 37263 - DNA, 38 bp, Artificial Sequence
  primer
gtaaaacgacggccagtctgctggtcctagggtaggtg

SEQ ID NO: 37264 - DNA, 21 bp, Artificial Sequence
  primer
atctgctgccatggatgtctc

SEQ ID NO: 37265 - DNA, 41 bp, Artificial Sequence
  primer
gtaaaacgacggccagtcaccctcttcctcttaaatatggg

SEQ ID NO: 37266 - DNA, 24 bp, Artificial Sequence
  primer
ttggatctgagtctactcttcctg

SEQ ID NO: 37267 - DNA, 38 bp, Artificial Sequence
  primer
gtaaaacgacggccagtacacatgccaaacagtggttc

SEQ ID NO: 37268 - DNA, 21 bp, Artificial Sequence
  primer
cgaggatttggagaagctctg

SEQ ID NO: 37269 - DNA, 38 bp, Artificial Sequence
  primer
gtaaaacgacggccagtggactgtgttcctcccaaatg

SEQ ID NO: 37270 - DNA, 20 bp, Artificial Sequence
  primer
ccttccatcagaccctctcc

SEQ ID NO: 37271 - DNA, 38 bp, Artificial Sequence
  primer
gtaaaacgacggccagtggtgggtatgtgtgaagcagt

SEQ ID NO: 37272 - DNA, 20 bp, Artificial Sequence
  primer
cagcctgcctcactcttgtg

SEQ ID NO: 37273 - DNA, 36 bp, Artificial Sequence
  primer
gtaaaacgacggccagtgtgcagctctcaggtgtgg

SEQ ID NO: 37274 - DNA, 38 bp, Artificial Sequence
  primer
gtaaaacgacggccagtagaggagcatctctgctgtcc

SEQ ID NO: 37275 - DNA, 38 bp, Artificial Sequence
  primer
gtaaaacgacggccagtgcccataggcctctttactcc

SEQ ID NO: 37276 - DNA, 21 bp, Artificial Sequence
  primer
ctttcctgtccctcctgtgag

SEQ ID NO: 37277 - DNA, 20 bp, Artificial Sequence
  primer
cactccagctgacggagttc

SEQ ID NO: 37278 - DNA, 21 bp, Artificial Sequence
  primer
agtgccactttgaatcctgtg

SEQ ID NO: 37279 - DNA, 37 bp, Artificial Sequence
  primer
gtaaaacgacggccagtaagaggaggagcgagaggtg

SEQ ID NO: 37280 - DNA, 21 bp, Artificial Sequence
  primer
catcttgttcctcagccttcc

SEQ ID NO: 37281 - DNA, 19 bp, Artificial Sequence
  primer
cgtcctgcagttctgttgc

SEQ ID NO: 37282 - DNA, 36 bp, Artificial Sequence
  primer
gtaaaacgacggccagtgtcagtgctgagccaggtg

SEQ ID NO: 37283 - DNA, 21 bp, Artificial Sequence
  primer
tcctgaagccaaagtctaggg

SEQ ID NO: 37284 - DNA, 21 bp, Artificial Sequence
  primer
cattacgcagagcagggtagg

SEQ ID NO: 37285 - DNA, 38 bp, Artificial Sequence
  primer
gtaaaacgacggccagttccgtgagtcttggtagagcc

SEQ ID NO: 37286 - DNA, 37 bp, Artificial Sequence
  primer
gtaaaacgacggccagtggacatagcacagtcccacc

SEQ ID NO: 37287 - DNA, 36 bp, Artificial Sequence
  primer
gtaaaacgacggccagtctgggtccctcttgagtcc

SEQ ID NO: 37288 - DNA, 21 bp, Artificial Sequence
  primer
agtctacagctgggaagggtg

SEQ ID NO: 37289 - DNA, 38 bp, Artificial Sequence
  primer
gtaaaacgacggccagtcacattgagggtcacctccag

SEQ ID NO: 37290 - DNA, 37 bp, Artificial Sequence
  primer
gtaaaacgacggccagtgtcccagggatgggtgttac

SEQ ID NO: 37291 - DNA, 21 bp, Artificial Sequence
  primer
gctccaaggtcaggctctatg

SEQ ID NO: 37292 - DNA, 21 bp, Artificial Sequence
  primer
atctcagctctagggtcaggc

SEQ ID NO: 37293 - DNA, 38 bp, Artificial Sequence
  primer
gtaaaacgacggccagtagagggaaggatgggctagtg

SEQ ID NO: 37294 - DNA, 37 bp, Artificial Sequence
  primer
gtaaaacgacggccagtcggacagatgggaccagaag

SEQ ID NO: 37295 - DNA, 20 bp, Artificial Sequence
  primer
gaaggacagggatggagatg

SEQ ID NO: 37296 - DNA, 21 bp, Artificial Sequence
  primer
ggttacagggtgtgttgggtg

SEQ ID NO: 37297 - DNA, 36 bp, Artificial Sequence
  primer
gtaaaacgacggccagtgtgctgacagtgctggagg

SEQ ID NO: 37298 - DNA, 38 bp, Artificial Sequence
  primer
gtaaaacgacggccagttcctaggatctgggaatttgg

SEQ ID NO: 37299 - DNA, 20 bp, Artificial Sequence
  primer
gtctcaggccatctctgctg

SEQ ID NO: 37300 - DNA, 20 bp, Artificial Sequence
  primer
acccatcgttagcacacctg

SEQ ID NO: 37301 - DNA, 38 bp, Artificial Sequence
  primer
gtaaaacgacggccagtccatctaaggaccagacctgc

SEQ ID NO: 37302 - DNA, 24 bp, Artificial Sequence
  primer
tgtacttcaattggctcttgtttc

SEQ ID NO: 37303 - DNA, 21 bp, Artificial Sequence
  primer
tgattcattgggtgatcttgg

SEQ ID NO: 37304 - DNA, 38 bp, Artificial Sequence
  primer
gtaaaacgacggccagtaactttgacatagggccgaag

SEQ ID NO: 37305 - DNA, 43 bp, Artificial Sequence
  primer
gtaaaacgacggccagtattgtctagtatttctcccttgattt

SEQ ID NO: 37306 - DNA, 28 bp, Artificial Sequence
  primer
ggtatgcattatatgttgacacaacttt

SEQ ID NO: 37307 - DNA, 39 bp, Artificial Sequence
  primer
gtaaaacgacggccagttgggatgaagtttctcagcaat

SEQ ID NO: 37308 - DNA, 38 bp, Artificial Sequence
  primer
gtaaaacgacggccagtgatttgctcttggtgctaggg

SEQ ID NO: 37309 - DNA, 24 bp, Artificial Sequence
  primer
ttatatcaagcagctctggtgttc

SEQ ID NO: 37310 - DNA, 38 bp, Artificial Sequence
  primer
gtaaaacgacggccagttggaatttcctattgggttgg

SEQ ID NO: 37311 - DNA, 42 bp, Artificial Sequence
  primer
gtaaaacgacggccagtaaacctcaaataatggaattggttt

SEQ ID NO: 37312 - DNA, 25 bp, Artificial Sequence
  primer
aaaggatttcataaagatcaaaggg

SEQ ID NO: 37313 - DNA, 38 bp, Artificial Sequence
  primer
gtaaaacgacggccagtagggatatcagggaattgcag

SEQ ID NO: 37314 - DNA, 38 bp, Artificial Sequence
  primer
gtaaaacgacggccagttgacaagggtgaggttgaaga

SEQ ID NO: 37315 - DNA, 40 bp, Artificial Sequence
  primer
gtaaaacgacggccagttttataaagcctggaaatgaggg

SEQ ID NO: 37316 - DNA, 39 bp, Artificial Sequence
  primer
gtaaaacgacggccagttgctttgcagagtcaacatgag

SEQ ID NO: 37317 - DNA, 37 bp, Artificial Sequence
  primer
gtaaaacgacggccagtctggacctgctgtgagtttg

SEQ ID NO: 37318 - DNA, 26 bp, Artificial Sequence
  primer
ccttggaagtaagatggtctattctc

SEQ ID NO: 37319 - DNA, 40 bp, Artificial Sequence
  primer
gtaaaacgacggccagtttccaattgtgactgtttcttct

SEQ ID NO: 37320 - DNA, 21 bp, Artificial Sequence
  primer
aaggccttgctccttccttac

SEQ ID NO: 37321 - DNA, 40 bp, Artificial Sequence
  primer
gtaaaacgacggccagttcctctatggatgtatggtggag

SEQ ID NO: 37322 - DNA, 25 bp, Artificial Sequence
  primer
tgtacagagtctatcaaacaatcgg

SEQ ID NO: 37323 - DNA, 38 bp, Artificial Sequence
  primer
gtaaaacgacggccagttggagtttgcacgagatgttg

SEQ ID NO: 37324 - DNA, 24 bp, Artificial Sequence
  primer
atttacatgtttcacccaaatcag

SEQ ID NO: 37325 - DNA, 44 bp, Artificial Sequence
  primer
gtaaaacgacggccagtgggtctgtaattctgtcactaatgcta

SEQ ID NO: 37326 - DNA, 21 bp, Artificial Sequence
  primer
gtcaatgacaatatttccggc

SEQ ID NO: 37327 - DNA, 18 bp, Artificial Sequence
  primer
ccaggtttggatgggaag

SEQ ID NO: 37328 - DNA, 21 bp, Artificial Sequence
  primer
attaccgcacagagcaatgaa

SEQ ID NO: 37329 - DNA, 23 bp, Artificial Sequence
  primer
tttgattcccattaagtcttgga

SEQ ID NO: 37330 - DNA, 21 bp, Artificial Sequence
  primer
aagtttcttgcagaattggct

SEQ ID NO: 37331 - DNA, 21 bp, Artificial Sequence
  primer
tgcctctcacagactttcagc

SEQ ID NO: 37332 - DNA, 21 bp, Artificial Sequence
  primer
atgagagacagggcaggtagg

SEQ ID NO: 37333 - DNA, 21 bp, Artificial Sequence
  primer
cttcgagttgggactctttgg

SEQ ID NO: 37334 - DNA, 39 bp, Artificial Sequence
  primer
gtaaaacgacggccagttgctgtcatatttcacagggtg

SEQ ID NO: 37335 - DNA, 21 bp, Artificial Sequence
  primer
tatttgaacaactccctcccg

SEQ ID NO: 37336 - DNA, 21 bp, Artificial Sequence
  primer
taggaagtcaaattggcaggg

SEQ ID NO: 37337 - DNA, 38 bp, Artificial Sequence
  primer
gtaaaacgacggccagtaggtctgactctgaactcccg

SEQ ID NO: 37338 - DNA, 38 bp, Artificial Sequence
  primer
gtaaaacgacggccagtccaaagaggaagtggaaccag

SEQ ID NO: 37339 - DNA, 38 bp, Artificial Sequence
  primer
gtaaaacgacggccagtcaaggcctcaggagagacatc

SEQ ID NO: 37340 - DNA, 38 bp, Artificial Sequence
  primer
gtaaaacgacggccagtcagcacagtcaaccaatttcc

SEQ ID NO: 37341 - DNA, 21 bp, Artificial Sequence
  primer
ttcctggaattgtgatgttgg

SEQ ID NO: 37342 - DNA, 36 bp, Artificial Sequence
  primer
gtaaaacgacggccagtatctcgggatgatgttgcc

SEQ ID NO: 37343 - DNA, 21 bp, Artificial Sequence
  primer
acaatttccttcccttcctgg

SEQ ID NO: 37344 - DNA, 38 bp, Artificial Sequence
  primer
gtaaaacgacggccagttactgtgtgcagcaaaggtcc

SEQ ID NO: 37345 - DNA, 38 bp, Artificial Sequence
  primer
gtaaaacgacggccagtcagcacttggtgagaggtgag

SEQ ID NO: 37346 - DNA, 38 bp, Artificial Sequence
  primer
gtaaaacgacggccagtggtcctcactatcaccatccc

SEQ ID NO: 37347 - DNA, 21 bp, Artificial Sequence
  primer
caagacacatcccgtctaggg

SEQ ID NO: 37348 - DNA, 37 bp, Artificial Sequence
  primer
gtaaaacgacggccagtacagtgggcagctgtctttc

SEQ ID NO: 37349 - DNA, 38 bp, Artificial Sequence
  primer
gtaaaacgacggccagtcgaagatatgtgtggtggtgc

SEQ ID NO: 37350 - DNA, 21 bp, Artificial Sequence
  primer
ccaaggacatgggttggatag

SEQ ID NO: 37351 - DNA, 38 bp, Artificial Sequence
  primer
gtaaaacgacggccagtgaaatgcaaatacccactccc

SEQ ID NO: 37352 - DNA, 21 bp, Artificial Sequence
  primer
ctaagctatgccattgagccc

SEQ ID NO: 37353 - DNA, 38 bp, Artificial Sequence
  primer
gtaaaacgacggccagttaaagacccaaatgtccaccg

SEQ ID NO: 37354 - DNA, 37 bp, Artificial Sequence
  primer
gtaaaacgacggccagtcctctttcaaatgcccactg

SEQ ID NO: 37355 - DNA, 37 bp, Artificial Sequence
  primer
gtaaaacgacggccagtaacaactccgcgtttcacag

SEQ ID NO: 37356 - DNA, 38 bp, Artificial Sequence
  primer
gtaaaacgacggccagtttgcccagagggtgatatttg

SEQ ID NO: 37357 - DNA, 39 bp, Artificial Sequence
  primer
gtaaaacgacggccagtaatcgcagagttgaagcagttc

SEQ ID NO: 37358 - DNA, 38 bp, Artificial Sequence
  primer
gtaaaacgacggccagtgaatgtgtgaggacaactggg

SEQ ID NO: 37359 - DNA, 38 bp, Artificial Sequence
  primer
gtaaaacgacggccagttcctggagagcaggaactgag

SEQ ID NO: 37360 - DNA, 38 bp, Artificial Sequence
  primer
gtaaaacgacggccagttgctgataaggcaaggacaag

SEQ ID NO: 37361 - DNA, 36 bp, Artificial Sequence
  primer
gtaaaacgacggccagtcctgcaccctgcagaagac

SEQ ID NO: 37362 - DNA, 20 bp, Artificial Sequence
  primer
atcgttccaggaagctttgg

SEQ ID NO: 37363 - DNA, 21 bp, Artificial Sequence
  primer
atacacaggactggaggtggc

SEQ ID NO: 37364 - DNA, 38 bp, Artificial Sequence
  primer
gtaaaacgacggccagtttatacccattgcaacgtccc

SEQ ID NO: 37365 - DNA, 38 bp, Artificial Sequence
  primer
gtaaaacgacggccagttgaaatcgcgatatgaccatc

SEQ ID NO: 37366 - DNA, 21 bp, Artificial Sequence
  primer
tgcggtgaattgagtatgagg

SEQ ID NO: 37367 - DNA, 38 bp, Artificial Sequence
  primer
gtaaaacgacggccagtggacctgatgattcttccctg

SEQ ID NO: 37368 - DNA, 38 bp, Artificial Sequence
  primer
gtaaaacgacggccagtaaacctactcaagctgctccc

SEQ ID NO: 37369 - DNA, 38 bp, Artificial Sequence
  primer
gtaaaacgacggccagtgagtcggaattcacatccagg

SEQ ID NO: 37370 - DNA, 38 bp, Artificial Sequence
  primer
gtaaaacgacggccagtatgcctgacacagaatgatgg

SEQ ID NO: 37371 - DNA, 21 bp, Artificial Sequence
  primer
gtccctgaatattgggctgag

SEQ ID NO: 37372 - DNA, 38 bp, Artificial Sequence
  primer
gtaaaacgacggccagtgtaggtggcaagagggtatgg

SEQ ID NO: 37373 - DNA, 21 bp, Artificial Sequence
  primer
gtgtgtcgagcacatacctcc

SEQ ID NO: 37374 - DNA, 20 bp, Artificial Sequence
  primer
gtgccaatcctcatggtctg

SEQ ID NO: 37375 - DNA, 38 bp, Artificial Sequence
  primer
gtaaaacgacggccagttttgctttctgaagatgcctg

SEQ ID NO: 37376 - DNA, 21 bp, Artificial Sequence
  primer
ccatctggagagatagcagcc

SEQ ID NO: 37377 - DNA, 21 bp, Artificial Sequence
  primer
ccacttgcctataccctttgc

SEQ ID NO: 37378 - DNA, 21 bp, Artificial Sequence
  primer
atcacacatcctcaaccaggc

SEQ ID NO: 37379 - DNA, 20 bp, Artificial Sequence
  primer
tgaagcaaatccgctttcag

SEQ ID NO: 37380 - DNA, 21 bp, Artificial Sequence
  primer
gggctcacttatcaccaaggg

SEQ ID NO: 37381 - DNA, 39 bp, Artificial Sequence
  primer
gtaaaacgacggccagtatgaatgcagttccttgtgaag

SEQ ID NO: 37382 - DNA, 38 bp, Artificial Sequence
  primer
gtaaaacgacggccagtttctgtccgttgagacactgc

SEQ ID NO: 37383 - DNA, 38 bp, Artificial Sequence
  primer
gtaaaacgacggccagttggcttgtgggaatagattgg

SEQ ID NO: 37384 - DNA, 38 bp, Artificial Sequence
  primer
gtaaaacgacggccagtagggctcttggtatccagttg

SEQ ID NO: 37385 - DNA, 21 bp, Artificial Sequence
  primer
ctgcgtatggaagttgacagg

SEQ ID NO: 37386 - DNA, 21 bp, Artificial Sequence
  primer
tttactcacccacaggaaggg

SEQ ID NO: 37387 - DNA, 39 bp, Artificial Sequence
  primer
gtaaaacgacggccagtggtagactgagagccacactgg

SEQ ID NO: 37388 - DNA, 21 bp, Artificial Sequence
  primer
catcatgggaggatttgtgtg

SEQ ID NO: 37389 - DNA, 21 bp, Artificial Sequence
  primer
agagagcctgtctgggatgtc

SEQ ID NO: 37390 - DNA, 38 bp, Artificial Sequence
  primer
gtaaaacgacggccagtggcataaatcagaaaggagcc

SEQ ID NO: 37391 - DNA, 38 bp, Artificial Sequence
  primer
gtaaaacgacggccagttgatctaagaggcagactggg

SEQ ID NO: 37392 - DNA, 37 bp, Artificial Sequence
  primer
gtaaaacgacggccagtttcccaagtcctcagggttc

SEQ ID NO: 37393 - DNA, 38 bp, Artificial Sequence
  primer
gtaaaacgacggccagttagactggaatgccacagcag

SEQ ID NO: 37394 - DNA, 38 bp, Artificial Sequence
  primer
gtaaaacgacggccagtatggaagctgtgagttcaggg

SEQ ID NO: 37395 - DNA, 36 bp, Artificial Sequence
  primer
gtaaaacgacggccagtctgctacccggaggctaac

SEQ ID NO: 37396 - DNA, 21 bp, Artificial Sequence
  primer
aacaaagcagaaacctgccac

SEQ ID NO: 37397 - DNA, 37 bp, Artificial Sequence
  primer
gtaaaacgacggccagtcactcccagaaagctgttgc

SEQ ID NO: 37398 - DNA, 38 bp, Artificial Sequence
  primer
gtaaaacgacggccagtaaaggtgctccttctgctctg

SEQ ID NO: 37399 - DNA, 38 bp, Artificial Sequence
  primer
gtaaaacgacggccagtggaagtcaccaaccagctgtc

SEQ ID NO: 37400 - DNA, 21 bp, Artificial Sequence
  primer
gcagcagacaacacacagatg

SEQ ID NO: 37401 - DNA, 38 bp, Artificial Sequence
  primer
gtaaaacgacggccagtgccctcagaggtatagggaag

SEQ ID NO: 37402 - DNA, 38 bp, Artificial Sequence
  primer
gtaaaacgacggccagtcctggatctgctagctgtgtg

SEQ ID NO: 37403 - DNA, 21 bp, Artificial Sequence
  primer
ctcccaataagtggcaagagg

SEQ ID NO: 37404 - DNA, 37 bp, Artificial Sequence
  primer
gtaaaacgacggccagtcttcaggtttggcgagaatg

SEQ ID NO: 37405 - DNA, 38 bp, Artificial Sequence
  primer
gtaaaacgacggccagtgatgctaagaaggacaggccc

SEQ ID NO: 37406 - DNA, 38 bp, Artificial Sequence
  primer
gtaaaacgacggccagttcatcagtgccacttctaccc

SEQ ID NO: 37407 - DNA, 38 bp, Artificial Sequence
  primer
gtaaaacgacggccagtggacacacagagatgggtctg

SEQ ID NO: 37408 - DNA, 19 bp, Artificial Sequence
  primer
ggctagggagaggcctgag

SEQ ID NO: 37409 - DNA, 37 bp, Artificial Sequence
  primer
gtaaaacgacggccagtgaatctgggtgagtggcaag

SEQ ID NO: 37410 - DNA, 38 bp, Artificial Sequence
  primer
gtaaaacgacggccagttctctctggatgtgatgcagg

SEQ ID NO: 37411 - DNA, 20 bp, Artificial Sequence
  primer
ggaggccagataaagccttg

SEQ ID NO: 37412 - DNA, 38 bp, Artificial Sequence
  primer
gtaaaacgacggccagtagaggtccaactgcaaagacc

SEQ ID NO: 37413 - DNA, 38 bp, Artificial Sequence
  primer
gtaaaacgacggccagtggacccacaaagagaaagtgg

SEQ ID NO: 37414 - DNA, 39 bp, Artificial Sequence
  primer
gtaaaacgacggccagtggaaggaagggaggtcactaag

SEQ ID NO: 37415 - DNA, 38 bp, Artificial Sequence
  primer
gtaaaacgacggccagtgactctcgatccagcagtgtg

SEQ ID NO: 37416 - DNA, 21 bp, Artificial Sequence
  primer
ttgctttggtttggtttgaag

SEQ ID NO: 37417 - DNA, 38 bp, Artificial Sequence
  primer
gtaaaacgacggccagtcctcgatctgttcctctgtcc

SEQ ID NO: 37418 - DNA, 21 bp, Artificial Sequence
  primer
tgactgatttccctcctttgc

SEQ ID NO: 37419 - DNA, 38 bp, Artificial Sequence
  primer
gtaaaacgacggccagtgagttcaggctctgtggatgc

SEQ ID NO: 37420 - DNA, 38 bp, Artificial Sequence
  primer
gtaaaacgacggccagtgagatgagccggtaacagagg

SEQ ID NO: 37421 - DNA, 21 bp, Artificial Sequence
  primer
aggctcaggtgaagcaggtag

SEQ ID NO: 37422 - DNA, 38 bp, Artificial Sequence
  primer
gtaaaacgacggccagtaggacaagctcagtgagaggc

SEQ ID NO: 37423 - DNA, 38 bp, Artificial Sequence
  primer
gtaaaacgacggccagtgggaagataggaggaaatggg

SEQ ID NO: 37424 - DNA, 21 bp, Artificial Sequence
  primer
gctatttcctacctcctcccg

SEQ ID NO: 37425 - DNA, 21 bp, Artificial Sequence
  primer
gctatttcctacctcctcccg

SEQ ID NO: 37426 - DNA, 22 bp, Artificial Sequence
  primer
tttcacttcagagcctttggtc

SEQ ID NO: 37427 - DNA, 39 bp, Artificial Sequence
  primer
gtaaaacgacggccagtggtaacagatggaaaccctgtc

SEQ ID NO: 37428 - DNA, 21 bp, Artificial Sequence
  primer
tcatcaactaggccttggagg

SEQ ID NO: 37429 - DNA, 21 bp, Artificial Sequence
  primer
aagacactcatcaccagcgac

SEQ ID NO: 37430 - DNA, 38 bp, Artificial Sequence
  primer
gtaaaacgacggccagtatgagcaatggcactcatttg

SEQ ID NO: 37431 - DNA, 38 bp, Artificial Sequence
  primer
gtaaaacgacggccagttgtcgccaagcagacaaatac

SEQ ID NO: 37432 - DNA, 38 bp, Artificial Sequence
  primer
gtaaaacgacggccagtcaggaaatgtctctgctgtgg

SEQ ID NO: 37433 - DNA, 22 bp, Artificial Sequence
  primer
cctgatgctacttatcccatcg

SEQ ID NO: 37434 - DNA, 38 bp, Artificial Sequence
  primer
gtaaaacgacggccagtccctgctgattagggtaaggg

SEQ ID NO: 37435 - DNA, 21 bp, Artificial Sequence
  primer
gggatcacacatgttgagagg

SEQ ID NO: 37436 - DNA, 43 bp, Artificial Sequence
  primer
gtaaaacgacggccagtgaaataaccaatgcctatctcaatgt

SEQ ID NO: 37437 - DNA, 38 bp, Artificial Sequence
  primer
gtaaaacgacggccagtgataaggaaaggcaggaagcc

SEQ ID NO: 37438 - DNA, 39 bp, Artificial Sequence
  primer
gtaaaacgacggccagtttgtattgatgaggcaaccaaa

SEQ ID NO: 37439 - DNA, 38 bp, Artificial Sequence
  primer
gtaaaacgacggccagttaagccatgtgtaggactccg

SEQ ID NO: 37440 - DNA, 44 bp, Artificial Sequence
  primer
gtaaaacgacggccagttgtatagattatttccagtgcctcttt

SEQ ID NO: 37441 - DNA, 42 bp, Artificial Sequence
  primer
gtaaaacgacggccagtgggaagattgatctttaacttctgg

SEQ ID NO: 37442 - DNA, 42 bp, Artificial Sequence
  primer
gtaaaacgacggccagtccatttggaagtatagatgggatag

SEQ ID NO: 37443 - DNA, 27 bp, Artificial Sequence
  primer
ttgttgcattacagtttaagagttagg

SEQ ID NO: 37444 - DNA, 39 bp, Artificial Sequence
  primer
gtaaaacgacggccagtccataggtttgtgcttctcagg

SEQ ID NO: 37445 - DNA, 39 bp, Artificial Sequence
  primer
gtaaaacgacggccagtcaaggcacgtgtaggagcttag

SEQ ID NO: 37446 - DNA, 20 bp, Artificial Sequence
  primer
attcctggcccaatggtatg

SEQ ID NO: 37447 - DNA, 39 bp, Artificial Sequence
  primer
gtaaaacgacggccagtggactacctggaatcaaaggtg

SEQ ID NO: 37448 - DNA, 20 bp, Artificial Sequence
  primer
cgggtatcctggagacaagg

SEQ ID NO: 37449 - DNA, 25 bp, Artificial Sequence
  primer
ttgtttaccatatgcctgtttcttc

SEQ ID NO: 37450 - DNA, 40 bp, Artificial Sequence
  primer
gtaaaacgacggccagttggatatggaggaatagcaaagg

SEQ ID NO: 37451 - DNA, 39 bp, Artificial Sequence
  primer
gtaaaacgacggccagttgggaaatgaatggtttcaaag

SEQ ID NO: 37452 - DNA, 20 bp, Artificial Sequence
  primer
tccctacacgaatgcaccag

SEQ ID NO: 37453 - DNA, 24 bp, Artificial Sequence
  primer
tcatggcacatagtagacagttgg

SEQ ID NO: 37454 - DNA, 41 bp, Artificial Sequence
  primer
gtaaaacgacggccagttggtttgctccacttataacaaag

SEQ ID NO: 37455 - DNA, 21 bp, Artificial Sequence
  primer
aggtgatttaagacccaggca

SEQ ID NO: 37456 - DNA, 41 bp, Artificial Sequence
  primer
gtaaaacgacggccagtgcatgtaagacatgattctggatg

SEQ ID NO: 37457 - DNA, 43 bp, Artificial Sequence
  primer
gtaaaacgacggccagtaaagaaacattgtgtcaaattatccc

SEQ ID NO: 37458 - DNA, 39 bp, Artificial Sequence
  primer
gtaaaacgacggccagtgcagaatattggtagagggcag

SEQ ID NO: 37459 - DNA, 18 bp, Artificial Sequence
  primer
agaatggcgtgaacctgg

SEQ ID NO: 37460 - DNA, 26 bp, Artificial Sequence
  primer
ttctctttgtctaagtatgaaacgca

SEQ ID NO: 37461 - DNA, 38 bp, Artificial Sequence
  primer
gtaaaacgacggccagtgagggcctcatggtcttattg

SEQ ID NO: 37462 - DNA, 21 bp, Artificial Sequence
  primer
gttgggtggaaggatccatag

SEQ ID NO: 37463 - DNA, 44 bp, Artificial Sequence
  primer
gtaaaacgacggccagtaacccatatccagatgaatacatttac

SEQ ID NO: 37464 - DNA, 39 bp, Artificial Sequence
  primer
gtaaaacgacggccagtgggtgtcagaaagaatctgctc

SEQ ID NO: 37465 - DNA, 38 bp, Artificial Sequence
  primer
gtaaaacgacggccagtttggacaggtaccctctacgg

SEQ ID NO: 37466 - DNA, 23 bp, Artificial Sequence
  primer
tcatcttcagagctattcaaggc

SEQ ID NO: 37467 - DNA, 21 bp, Artificial Sequence
  primer
gagaagaaggtctccagggaa

SEQ ID NO: 37468 - DNA, 38 bp, Artificial Sequence
  primer
gtaaaacgacggccagtacttctcgtccaatccaatcc

SEQ ID NO: 37469 - DNA, 21 bp, Artificial Sequence
  primer
tttggattcaacatgagcacc

SEQ ID NO: 37470 - DNA, 21 bp, Artificial Sequence
  primer
gcagcaggattctgacaactg

SEQ ID NO: 37471 - DNA, 40 bp, Artificial Sequence
  primer
gtaaaacgacggccagttcatcctcctagacagtgaatcc

SEQ ID NO: 37472 - DNA, 26 bp, Artificial Sequence
  primer
aattaaaggagattgatacctccaag

SEQ ID NO: 37473 - DNA, 21 bp, Artificial Sequence
  primer
aatcttatcacctgcattcgc

SEQ ID NO: 37474 - DNA, 38 bp, Artificial Sequence
  primer
gtaaaacgacggccagtgctttgcaacactttgctacc

SEQ ID NO: 37475 - DNA, 37 bp, Artificial Sequence
  primer
gtaaaacgacggccagtaggtgccactggacaacaag

SEQ ID NO: 37476 - DNA, 37 bp, Artificial Sequence
  primer
gtaaaacgacggccagttagttcttgctgcagcgtcc

SEQ ID NO: 37477 - DNA, 23 bp, Artificial Sequence
  primer
cattaaggaatccaggaaacagg

SEQ ID NO: 37478 - DNA, 38 bp, Artificial Sequence
  primer
gtaaaacgacggccagttcatcttctgggaaagaagcc

SEQ ID NO: 37479 - DNA, 38 bp, Artificial Sequence
  primer
gtaaaacgacggccagttatggaatgggcctaaggatg

SEQ ID NO: 37480 - DNA, 38 bp, Artificial Sequence
  primer
gtaaaacgacggccagtgcagcctgtatgtaccacctc

SEQ ID NO: 37481 - DNA, 21 bp, Artificial Sequence
  primer
atccctctctcccttcattgg

SEQ ID NO: 37482 - DNA, 25 bp, Artificial Sequence
  primer
ccattgtacaagagattctgtggag

SEQ ID NO: 37483 - DNA, 23 bp, Artificial Sequence
  primer
gcaaagcagacaacatgaatcac

SEQ ID NO: 37484 - DNA, 40 bp, Artificial Sequence
  primer
gtaaaacgacggccagtggatgattgctaagtaccacagc

SEQ ID NO: 37485 - DNA, 21 bp, Artificial Sequence
  primer
aaggaccaagaggtcaaccag

SEQ ID NO: 37486 - DNA, 39 bp, Artificial Sequence
  primer
gtaaaacgacggccagtttgtcctttcagatatccaggc

SEQ ID NO: 37487 - DNA, 22 bp, Artificial Sequence
  primer
tggaaacacattcttctcctgc

SEQ ID NO: 37488 - DNA, 19 bp, Artificial Sequence
  primer
ccagcctgggctaacagaa

SEQ ID NO: 37489 - DNA, 35 bp, Artificial Sequence
  primer
gtaaaacgacggccagtttctggaggctgcctttg

SEQ ID NO: 37490 - DNA, 41 bp, Artificial Sequence
  primer
gtaaaacgacggccagttcacattatctgtgaaaggcattg

SEQ ID NO: 37491 - DNA, 38 bp, Artificial Sequence
  primer
gtaaaacgacggccagttgaactttggaggaatcgacc

SEQ ID NO: 37492 - DNA, 38 bp, Artificial Sequence
  primer
gtaaaacgacggccagtatgaaatgccggtaaatcagg

SEQ ID NO: 37493 - DNA, 27 bp, Artificial Sequence
  primer
gctgaaacactaaagacaatactgacc

SEQ ID NO: 37494 - DNA, 38 bp, Artificial Sequence
  primer
gtaaaacgacggccagtaggtgtggtattccttctgcc

SEQ ID NO: 37495 - DNA, 22 bp, Artificial Sequence
  primer
ttgcatacatgtgctgagtttg

SEQ ID NO: 37496 - DNA, 38 bp, Artificial Sequence
  primer
gtaaaacgacggccagtaagatccatattggcgtgacc

SEQ ID NO: 37497 - DNA, 21 bp, Artificial Sequence
  primer
ctttcaagaagagccagtggg

SEQ ID NO: 37498 - DNA, 37 bp, Artificial Sequence
  primer
gtaaaacgacggccagtgggaagcaaattgcctacag

SEQ ID NO: 37499 - DNA, 26 bp, Artificial Sequence
  primer
accatgtcattatctttatgtcatcc

SEQ ID NO: 37500 - DNA, 21 bp, Artificial Sequence
  primer
gagaaatcagaatcctgctgc

SEQ ID NO: 37501 - DNA, 21 bp, Artificial Sequence
  primer
ggaagcttgaggaatctgctt

SEQ ID NO: 37502 - DNA, 39 bp, Artificial Sequence
  primer
gtaaaacgacggccagttggctgtctcctctaatgatcc

SEQ ID NO: 37503 - DNA, 42 bp, Artificial Sequence
  primer
gtaaaacgacggccagtttcatactcaaattctccaggaaac

SEQ ID NO: 37504 - DNA, 39 bp, Artificial Sequence
  primer
gtaaaacgacggccagttaagtgcccaaataaggcattg

SEQ ID NO: 37505 - DNA, 23 bp, Artificial Sequence
  primer
taccctttgagtacctgtgttgg

SEQ ID NO: 37506 - DNA, 38 bp, Artificial Sequence
  primer
gtaaaacgacggccagtgatggtgcccagaggtctaag

SEQ ID NO: 37507 - DNA, 38 bp, Artificial Sequence
  primer
gtaaaacgacggccagttattgagccaggaacatttgc

SEQ ID NO: 37508 - DNA, 38 bp, Artificial Sequence
  primer
gtaaaacgacggccagtgatctcggcaagaaagctgta

SEQ ID NO: 37509 - DNA, 22 bp, Artificial Sequence
  primer
gccaatctcctccattaacacc

SEQ ID NO: 37510 - DNA, 42 bp, Artificial Sequence
  primer
gtaaaacgacggccagttctgtagagccatatattgaggcag

SEQ ID NO: 37511 - DNA, 23 bp, Artificial Sequence
  primer
tggcataaacatgttcttacacg

SEQ ID NO: 37512 - DNA, 38 bp, Artificial Sequence
  primer
gtaaaacgacggccagtttgggccttagtagggaaatg

SEQ ID NO: 37513 - DNA, 29 bp, Artificial Sequence
  primer
gggtaatatgttctcagtatcttgtcaaa

SEQ ID NO: 37514 - DNA, 22 bp, Artificial Sequence
  primer
aatctacccagaagcaccttcc

SEQ ID NO: 37515 - DNA, 21 bp, Artificial Sequence
  primer
tgatgcatttgctgaaagtca

SEQ ID NO: 37516 - DNA, 40 bp, Artificial Sequence
  primer
gtaaaacgacggccagtccacctattaacgaaattgatcg

SEQ ID NO: 37517 - DNA, 42 bp, Artificial Sequence
  primer
gtaaaacgacggccagttgtaggtctttaaccaatcaagctc

SEQ ID NO: 37518 - DNA, 25 bp, Artificial Sequence
  primer
gcatttcttggtaattagttgcttc

SEQ ID NO: 37519 - DNA, 41 bp, Artificial Sequence
  primer
gtaaaacgacggccagtcctattacagagcaatccaagagc

SEQ ID NO: 37520 - DNA, 23 bp, Artificial Sequence
  primer
gcactttgaaaggagatgagttg

SEQ ID NO: 37521 - DNA, 22 bp, Artificial Sequence
  primer
ggctttagacatagggcatgag

SEQ ID NO: 37522 - DNA, 38 bp, Artificial Sequence
  primer
gtaaaacgacggccagtgtgttgcatgttcagacagcc

SEQ ID NO: 37523 - DNA, 38 bp, Artificial Sequence
  primer
gtaaaacgacggccagtgcacaaatcagtgaacttgcc

SEQ ID NO: 37524 - DNA, 38 bp, Artificial Sequence; identical to SEQ ID NO: 37523
  primer

SEQ ID NO: 37525 - DNA, 38 bp, Artificial Sequence
  primer
gtaaaacgacggccagtcttcagagttgctcctctccc

SEQ ID NO: 37526 - DNA, 39 bp, Artificial Sequence
  primer
gtaaaacgacggccagtgcctctgagcatgtgaattatg

SEQ ID NO: 37527 - DNA, 21 bp, Artificial Sequence
  primer
aattgccatgacatcttggag

SEQ ID NO: 37528 - DNA, 38 bp, Artificial Sequence
  primer
gtaaaacgacggccagtggtcctagagcctgtacctgg

SEQ ID NO: 37529 - DNA, 37 bp, Artificial Sequence
  primer
gtaaaacgacggccagtcagatagttccaacgctgcc

SEQ ID NO: 37530 - DNA, 36 bp, Artificial Sequence
  primer
gtaaaacgacggccagtccctccctctcagatgtgg

SEQ ID NO: 37531 - DNA, 21 bp, Artificial Sequence
  primer
gtgaaccatgccttcctcttc

SEQ ID NO: 37532 - DNA, 38 bp, Artificial Sequence
  primer
gtaaaacgacggccagtatctaccctgtgacgcaggtc

SEQ ID NO: 37533 - DNA, 19 bp, Artificial Sequence
  primer
ctctgttggcggctctacc

SEQ ID NO: 37534 - DNA, 21 bp, Artificial Sequence
  primer
ccctacccactcagaagcaag

SEQ ID NO: 37535 - DNA, 38 bp, Artificial Sequence
  primer
gtaaaacgacggccagtaacccattcccacactagctc

SEQ ID NO: 37536 - DNA, 21 bp, Artificial Sequence
  primer
ctaccaggagtactcggccac

SEQ ID NO: 37537 - DNA, 38 bp, Artificial Sequence
  primer
gtaaaacgacggccagtagagcatgaatttctcagggc

SEQ ID NO: 37538 - DNA, 21 bp, Artificial Sequence
  primer
agataaaccagtgggtggagg

SEQ ID NO: 37539 - DNA, 38 bp, Artificial Sequence
  primer
gtaaaacgacggccagtgaaggcatttaagcaagggag

SEQ ID NO: 37540 - DNA, 38 bp, Artificial Sequence
  primer
gtaaaacgacggccagtctcatttggaaacaaccagcc

SEQ ID NO: 37541 - DNA, 38 bp, Artificial Sequence
  primer
gtaaaacgacggccagtcctcacatggtatctgcatcc

SEQ ID NO: 37542 - DNA, 21 bp, Artificial Sequence
  primer
ggtctgaccggtttcacagag

SEQ ID NO: 37543 - DNA, 21 bp, Artificial Sequence
  primer
agtctccctcctacccaccag

SEQ ID NO: 37544 - DNA, 38 bp, Artificial Sequence
  primer
gtaaaacgacggccagtacttgcctcaaggcctatgtc

SEQ ID NO: 37545 - DNA, 21 bp, Artificial Sequence
  primer
cctgctgattacaggaactgg

SEQ ID NO: 37546 - DNA, 21 bp, Artificial Sequence
  primer
atgttcaggtgcttgtcgatg

SEQ ID NO: 37547 - DNA, 21 bp, Artificial Sequence
  primer
agcctgtggtcaggaataagg

SEQ ID NO: 37548 - DNA, 21 bp, Artificial Sequence
  primer
cctacagagttgcgtctttgg

SEQ ID NO: 37549 - DNA, 38 bp, Artificial Sequence
  primer
gtaaaacgacggccagtgatgtgaacactgaggttggg

SEQ ID NO: 37550 - DNA, 21 bp, Artificial Sequence
  primer
tcctttcctctcacaaggctg

SEQ ID NO: 37551 - DNA, 38 bp, Artificial Sequence
  primer
gtaaaacgacggccagtacagcagggaaaggaaggaag

SEQ ID NO: 37552 - DNA, 38 bp, Artificial Sequence
  primer
gtaaaacgacggccagtaagtgcaggaggcagagtttg

SEQ ID NO: 37553 - DNA, 21 bp, Artificial Sequence
  primer
aactctctgaggtgtcagggc

SEQ ID NO: 37554 - DNA, 37 bp, Artificial Sequence
  primer
gtaaaacgacggccagtagctctgcagaaaccacagg

SEQ ID NO: 37555 - DNA, 38 bp, Artificial Sequence
  primer
gtaaaacgacggccagtcatccctttccctccatacag

SEQ ID NO: 37556 - DNA, 37 bp, Artificial Sequence
  primer
gtaaaacgacggccagtcaccagggtatgtggctctc

SEQ ID NO: 37557 - DNA, 21 bp, Artificial Sequence
  primer
tttgactctgcccatttgttg

SEQ ID NO: 37558 - DNA, 21 bp, Artificial Sequence
  primer
tctggtggagtgagggaagtc

SEQ ID NO: 37559 - DNA, 21 bp, Artificial Sequence
  primer
atgtggccatgaactaggcag

SEQ ID NO: 37560 - DNA, 38 bp, Artificial Sequence
  primer
gtaaaacgacggccagtgaatgaccagctccctctttg

SEQ ID NO: 37561 - DNA, 20 bp, Artificial Sequence
  primer
cttctgaacatgcccgtctg

SEQ ID NO: 37562 - DNA, 21 bp, Artificial Sequence
  primer
ctggaagcatcagcctctagc

SEQ ID NO: 37563 - DNA, 36 bp, Artificial Sequence
  primer
gtaaaacgacggccagtatctgcaccatggaaaggg

SEQ ID NO: 37564 - DNA, 38 bp, Artificial Sequence
  primer
gtaaaacgacggccagtctggacagcaggtatgtcagg

SEQ ID NO: 37565 - DNA, 20 bp, Artificial Sequence
  primer
cactgaagctcctccagcac

SEQ ID NO: 37566 - DNA, 21 bp, Artificial Sequence
  primer
gagagtgtgcagctgtgttgg

SEQ ID NO: 37567 - DNA, 21 bp, Artificial Sequence
  primer
gaagctacaagctgctcccac

SEQ ID NO: 37568 - DNA, 38 bp, Artificial Sequence
  primer
gtaaaacgacggccagtgtcagagctggtggaaacagg

SEQ ID NO: 37569 - DNA, 21 bp, Artificial Sequence
  primer
tcaaccttcctgttcatttgc

SEQ ID NO: 37570 - DNA, 21 bp, Artificial Sequence
  primer
aatctagggaccagttggctg

SEQ ID NO: 37571 - DNA, 21 bp, Artificial Sequence
  primer
ggtactgggtggcagaatcag

SEQ ID NO: 37572 - DNA, 38 bp, Artificial Sequence
  primer
gtaaaacgacggccagtactggagccaaggtaggtgtc

SEQ ID NO: 37573 - DNA, 38 bp, Artificial Sequence
  primer
gtaaaacgacggccagttcacacactttggttatgggc

SEQ ID NO: 37574 - DNA, 37 bp, Artificial Sequence
  primer
gtaaaacgacggccagtccatcttggagtccatgtcc

SEQ ID NO: 37575 - DNA, 20 bp, Artificial Sequence
  primer
tggctcagacacacctaccc

SEQ ID NO: 37576 - DNA, 38 bp, Artificial Sequence
  primer
gtaaaacgacggccagtcgtcctaggtggaatctgagc

SEQ ID NO: 37577 - DNA, 22 bp, Artificial Sequence
  primer
gagaccctgggtaccctgtaag

SEQ ID NO: 37578 - DNA, 22 bp, Artificial Sequence
  primer
tgggaattaaagaactaggccc

SEQ ID NO: 37579 - DNA, 38 bp, Artificial Sequence
  primer
gtaaaacgacggccagtccacaatcctctcagtccctc

SEQ ID NO: 37580 - DNA, 22 bp, Artificial Sequence
  primer
gggtccaggtgagtgactacag

SEQ ID NO: 37581 - DNA, 21 bp, Artificial Sequence
  primer
ctcacaatcctcagctcctcc

SEQ ID NO: 37582 - DNA, 38 bp, Artificial Sequence
  primer
gtaaaacgacggccagtctgtggaatcactgttctggc

SEQ ID NO: 37583 - DNA, 38 bp, Artificial Sequence
  primer
gtaaaacgacggccagtctgatatccctggaaaggctg

SEQ ID NO: 37584 - DNA, 38 bp, Artificial Sequence
  primer
gtaaaacgacggccagtgaagggcaaaggttgacagac

SEQ ID NO: 37585 - DNA, 37 bp, Artificial Sequence
  primer
gtaaaacgacggccagtcccttctactcccttgcgac

SEQ ID NO: 37586 - DNA, 21 bp, Artificial Sequence
  primer
ctcctttagggaaaggaaggc

SEQ ID NO: 37587 - DNA, 21 bp, Artificial Sequence
  primer
tggctccagattgtctctgtg

SEQ ID NO: 37588 - DNA, 38 bp, Artificial Sequence
  primer
gtaaaacgacggccagtctcccggtggtacattctctc

SEQ ID NO: 37589 - DNA, 38 bp, Artificial Sequence
  primer
gtaaaacgacggccagtaaagcatagaccagcccactg

SEQ ID NO: 37590 - DNA, 21 bp, Artificial Sequence
  primer
tctgcaaagagaggaaggacc

SEQ ID NO: 37591 - DNA, 21 bp, Artificial Sequence
  primer
cgagatacctcccaggttgtg

SEQ ID NO: 37592 - DNA, 38 bp, Artificial Sequence
  primer
gtaaaacgacggccagtcccagaaggtttccttccatc

SEQ ID NO: 37593 - DNA, 21 bp, Artificial Sequence
  primer
ctccatagagaggcagggaac

SEQ ID NO: 37594 - DNA, 38 bp, Artificial Sequence
  primer
gtaaaacgacggccagtttgtgaggaaagatggaaggg

SEQ ID NO: 37595 - DNA, 35 bp, Artificial Sequence
  primer
gtaaaacgacggccagtcaaccctgctggcttgaa

SEQ ID NO: 37596 - DNA, 38 bp, Artificial Sequence
  primer
gtaaaacgacggccagttacaacacaccacttcagggc

SEQ ID NO: 37597 - DNA, 20 bp, Artificial Sequence
  primer
catttccaatgccactaggc

SEQ ID NO: 37598 - DNA, 24 bp, Artificial Sequence
  primer
ttctttgtggaaacttcatatccc

SEQ ID NO: 37599 - DNA, 22 bp, Artificial Sequence
  primer
ttctttgagagtgctccagttg

SEQ ID NO: 37600 - DNA, 38 bp, Artificial Sequence
  primer
gtaaaacgacggccagttttctgcttggcaggtaaagg

SEQ ID NO: 37601 - DNA, 21 bp, Artificial Sequence
  primer
acatctggcttcactgcaaag

SEQ ID NO: 37602 - DNA, 38 bp, Artificial Sequence
  primer
gtaaaacgacggccagttccaagcacaaagagaagtgg

SEQ ID NO: 37603 - DNA, 24 bp, Artificial Sequence
  primer
tgtcaagttaaggatgactcttgg

SEQ ID NO: 37604 - DNA, 22 bp, Artificial Sequence
  primer
ggaaagtttgacactcctaccc

SEQ ID NO: 37605 - DNA, 42 bp, Artificial Sequence
  primer
gtaaaacgacggccagtcgattgaatgtgatttcaatttagc

SEQ ID NO: 37606 - DNA, 38 bp, Artificial Sequence
  primer
gtaaaacgacggccagtttgtaaacaattgagggcagg

SEQ ID NO: 37607 - DNA, 40 bp, Artificial Sequence
  primer
gtaaaacgacggccagttgaaatcttgagagaactttgcg

SEQ ID NO: 37608 - DNA, 26 bp, Artificial Sequence
  primer
tttggcatgtaaactgaaatataacc

SEQ ID NO: 37609 - DNA, 26 bp, Artificial Sequence
  primer
ttgtagtaaacagtgactttggatgc

SEQ ID NO: 37610 - DNA, 38 bp, Artificial Sequence
  primer
gtaaaacgacggccagtcacagcccaattccaggttag

SEQ ID NO: 37611 - DNA, 38 bp, Artificial Sequence
  primer
gtaaaacgacggccagtagggaagaatgcaaattgtgg

SEQ ID NO: 37612 - DNA, 38 bp, Artificial Sequence
  primer
gtaaaacgacggccagtaaatctggtgcaaatccatcc

SEQ ID NO: 37613 - DNA, 40 bp, Artificial Sequence
  primer
gtaaaacgacggccagtaaggcctagggatgttaagtagc

SEQ ID NO: 37614 - DNA, 21 bp, Artificial Sequence
  primer
tattgctttggaaattggctg

SEQ ID NO: 37615 - DNA, 39 bp, Artificial Sequence
  primer
gtaaaacgacggccagtcctcaagaacattgacgaatcc

SEQ ID NO: 37616 - DNA, 40 bp, Artificial Sequence
  primer
gtaaaacgacggccagttttcacattggtctttgaaacag

SEQ ID NO: 37617 - DNA, 40 bp, Artificial Sequence
  primer
gtaaaacgacggccagtatctcaaggtctgagatggacag

SEQ ID NO: 37618 - DNA, 38 bp, Artificial Sequence
  primer
gtaaaacgacggccagtgaccgttggcatattgagttg

SEQ ID NO: 37619 - DNA, 21 bp, Artificial Sequence
  primer
aaggtgatggctatcctggtg

SEQ ID NO: 37620 - DNA, 21 bp, Artificial Sequence
  primer
aaatggacctggatctgttgg

SEQ ID NO: 37621 - DNA, 37 bp, Artificial Sequence
  primer
gtaaaacgacggccagtgcagcatgaaagtcctggtc

SEQ ID NO: 37622 - DNA, 21 bp, Artificial Sequence
  primer
gcaaaccattgagccatacac

SEQ ID NO: 37623 - DNA, 22 bp, Artificial Sequence
  primer
tgtatgtcctgaaaggtgagcc

SEQ ID NO: 37624 - DNA, 38 bp, Artificial Sequence
  primer
gtaaaacgacggccagtgtgtaaagggagagcacggag

SEQ ID NO: 37625 - DNA, 38 bp, Artificial Sequence
  primer
gtaaaacgacggccagtcaaatggtccagtgctgattg

SEQ ID NO: 37626 - DNA, 39 bp, Artificial Sequence
  primer
gtaaaacgacggccagtttctgatgtcaatcattcccac

SEQ ID NO: 37627 - DNA, 21 bp, Artificial Sequence
  primer
tgtttgtgatcgacagctcag

SEQ ID NO: 37628 - DNA, 22 bp, Artificial Sequence
  primer
tgacaaggagtgattcacgttg

SEQ ID NO: 37629 - DNA, 21 bp, Artificial Sequence
  primer
agctagggaaacacagcatgg

SEQ ID NO: 37630 - DNA, 40 bp, Artificial Sequence
  primer
gtaaaacgacggccagtttggtttgttagtgtgcatgaag

SEQ ID NO: 37631 - DNA, 35 bp, Artificial Sequence
  primer
gtaaaacgacggccagtcggtagagacccggaccc

SEQ ID NO: 37632 - DNA, 38 bp, Artificial Sequence
  primer
gtaaaacgacggccagtcagtggagtcacaggaagctg

SEQ ID NO: 37633 - DNA, 38 bp, Artificial Sequence
  primer
gtaaaacgacggccagtcagagggtacctcaacacagg

SEQ ID NO: 37634 - DNA, 20 bp, Artificial Sequence
  primer
cagctgctgctctaaatggg

SEQ ID NO: 37635 - DNA, 21 bp, Artificial Sequence
  primer
ggcctcaggtaagagagggag

SEQ ID NO: 37636 - DNA, 38 bp, Artificial Sequence
  primer
gtaaaacgacggccagtcatgtgtttaagggcctggtc

SEQ ID NO: 37637 - DNA, 38 bp, Artificial Sequence
  primer
gtaaaacgacggccagtttactttccaggcatcagtgg

SEQ ID NO: 37638 - DNA, 37 bp, Artificial Sequence
  primer
gtaaaacgacggccagtctgttggctgggagaagatg

SEQ ID NO: 37639 - DNA, 37 bp, Artificial Sequence
  primer
gtaaaacgacggccagtatcgtgtcgcagatgattcc

SEQ ID NO: 37640 - DNA, 38 bp, Artificial Sequence
  primer
gtaaaacgacggccagtctttgctctgaccttcccatc

SEQ ID NO: 37641 - DNA, 19 bp, Artificial Sequence
  primer
gaaggagggaagccctctg

SEQ ID NO: 37642 - DNA, 36 bp, Artificial Sequence
  primer
gtaaaacgacggccagtgattcgagacaacgccctg

SEQ ID NO: 37643 - DNA, 21 bp, Artificial Sequence
  primer
aacacctccactttggattgc

SEQ ID NO: 37644 - DNA, 38 bp, Artificial Sequence
  primer
gtaaaacgacggccagtgaagtttgtgtcagtgcgagc

SEQ ID NO: 37645 - DNA, 21 bp, Artificial Sequence
  primer
tgcaggtagaaatggtcaccc

SEQ ID NO: 37646 - DNA, 21 bp, Artificial Sequence
  primer
gaagcccattactgccttctg

SEQ ID NO: 37647 - DNA, 21 bp, Artificial Sequence
  primer
tctgaagccaggcaaagtttc

SEQ ID NO: 37648 - DNA, 39 bp, Artificial Sequence
  primer
gtaaaacgacggccagttgggtgcatgtgcataatttag

SEQ ID NO: 37649 - DNA, 38 bp, Artificial Sequence
  primer
gtaaaacgacggccagttgaaatggacagcacctatgc

SEQ ID NO: 37650 - DNA, 38 bp, Artificial Sequence
  primer
gtaaaacgacggccagtaggatctgctgtgagtgttgc

SEQ ID NO: 37651 - DNA, 21 bp, Artificial Sequence
  primer
acggtaagagcccaaagtgac

SEQ ID NO: 37652 - DNA, 21 bp, Artificial Sequence
  primer
acagttgccaaggctacttcc

SEQ ID NO: 37653 - DNA, 38 bp, Artificial Sequence
  primer
gtaaaacgacggccagttagtctgagctccttcccagg

SEQ ID NO: 37654 - DNA, 38 bp, Artificial Sequence
  primer
gtaaaacgacggccagtgtttcccaggtcaagatggtc

SEQ ID NO: 37655 - DNA, 21 bp, Artificial Sequence
  primer
cccactgactccctgtgtacc

SEQ ID NO: 37656 - DNA, 21 bp, Artificial Sequence
  primer
gcggtgtcttgttgtagatgg

SEQ ID NO: 37657 - DNA, 21 bp, Artificial Sequence
  primer
ttatcttggctgtccatcagg

SEQ ID NO: 37658 - DNA, 38 bp, Artificial Sequence
  primer
gtaaaacgacggccagtgtggaggtctggaaactctgg

SEQ ID NO: 37659 - DNA, 38 bp, Artificial Sequence
  primer
gtaaaacgacggccagtacattggtggagaggagtgtg

SEQ ID NO: 37660 - DNA, 38 bp, Artificial Sequence
  primer
gtaaaacgacggccagttgcttcctttctttgggtctg

SEQ ID NO: 37661 - DNA, 21 bp, Artificial Sequence
  primer
atattcagccctgctgtggag

SEQ ID NO: 37662 - DNA, 38 bp, Artificial Sequence
  primer
gtaaaacgacggccagttcctatgctcctgctcctttc

SEQ ID NO: 37663 - DNA, 21 bp, Artificial Sequence
  primer
tctacatgggaggaagggaag

SEQ ID NO: 37664 - DNA, 37 bp, Artificial Sequence
  primer
gtaaaacgacggccagtcacagcaaattcctcttggg

SEQ ID NO: 37665 - DNA, 21 bp, Artificial Sequence
  primer
agagggtaagtgggagctctg

SEQ ID NO: 37666 - DNA, 38 bp, Artificial Sequence
  primer
gtaaaacgacggccagtatgggctgcacagtaacacag

SEQ ID NO: 37667 - DNA, 21 bp, Artificial Sequence
  primer
ctaaggctgctttcagatccc

SEQ ID NO: 37668 - DNA, 38 bp, Artificial Sequence
  primer
gtaaaacgacggccagtcatgtccagaccaggacacac

SEQ ID NO: 37669 - DNA, 36 bp, Artificial Sequence
  primer
gtaaaacgacggccagtctgtggcagcctcttcagg

SEQ ID NO: 37670 - DNA, 21 bp, Artificial Sequence
  primer
cctgcttctatgaccagaccc

SEQ ID NO: 37671 - DNA, 38 bp, Artificial Sequence
  primer
gtaaaacgacggccagtcccagagaggaaactgctgtc

SEQ ID NO: 37672 - DNA, 21 bp, Artificial Sequence
  primer
agacagagctgtgctgagagg

SEQ ID NO: 37673 - DNA, 38 bp, Artificial Sequence
  primer
gtaaaacgacggccagtcaaggcttctacctccctcag

SEQ ID NO: 37674 - DNA, 38 bp, Artificial Sequence
  primer
gtaaaacgacggccagtaaggaggagggaaacttggtg

SEQ ID NO: 37675 - DNA, 22 bp, Artificial Sequence
  primer
gcaggttggaacaagtctcatc

SEQ ID NO: 37676 - DNA, 22 bp, Artificial Sequence
  primer
tttccgcagtctctggactaag

SEQ ID NO: 37677 - DNA, 21 bp, Artificial Sequence
  primer
atccaagtgtcctgcactgag

SEQ ID NO: 37678 - DNA, 38 bp, Artificial Sequence
  primer
gtaaaacgacggccagtgctgggacataaagctgttcc

SEQ ID NO: 37679 - DNA, 21 bp, Artificial Sequence
  primer
tatcaggacagccacctaccc

SEQ ID NO: 37680 - DNA, 18 bp, Artificial Sequence
  primer
ggctgggaagagggacac

SEQ ID NO: 37681 - DNA, 21 bp, Artificial Sequence
  primer
ccctgtaggcctctctgtctc

SEQ ID NO: 37682 - DNA, 38 bp, Artificial Sequence
  primer
gtaaaacgacggccagttgaaccatgaactcttggcag

SEQ ID NO: 37683 - DNA, 21 bp, Artificial Sequence
  primer
cagtgtggttcaaccttgtgg

SEQ ID NO: 37684 - DNA, 39 bp, Artificial Sequence
  primer
gtaaaacgacggccagtgggaacaacttgatggtgctac

SEQ ID NO: 37685 - DNA, 42 bp, Artificial Sequence
  primer
gtaaaacgacggccagttgctacttagcaaattacatagggc

SEQ ID NO: 37686 - DNA, 36 bp, Artificial Sequence
  primer
gtaaaacgacggccagtacagcctccaactgctgtg

SEQ ID NO: 37687 - DNA, 28 bp, Artificial Sequence
  primer
aatccataattgtacgtgtaaagatttc

SEQ ID NO: 37688 - DNA, 21 bp, Artificial Sequence
  primer
gtggaaagatttgtgcatccc

SEQ ID NO: 37689 - DNA, 41 bp, Artificial Sequence
  primer
gtaaaacgacggccagtccttccttaagagttcaggacaac

SEQ ID NO: 37690 - DNA, 43 bp, Artificial Sequence
  primer
gtaaaacgacggccagtaatcctgatttcttactgtcaagatg

SEQ ID NO: 37691 - DNA, 41 bp, Artificial Sequence
  primer
gtaaaacgacggccagtggttccttccaggaatacatacac

SEQ ID NO: 37692 - DNA, 37 bp, Artificial Sequence
  primer
gtaaaacgacggccagtggaaaggtcttcctcatgcc

SEQ ID NO: 37693 - DNA, 21 bp, Artificial Sequence
  primer
cctccagtgagtcttcagcat

SEQ ID NO: 37694 - DNA, 42 bp, Artificial Sequence
  primer
gtaaaacgacggccagtaactgtgcctacaacctatcaactg

SEQ ID NO: 37695 - DNA, 26 bp, Artificial Sequence
  primer
cagatattctattaacgcttccatga

SEQ ID NO: 37696 - DNA, 36 bp, Artificial Sequence
  primer
gtaaaacgacggccagtaaactggctttgctcccac

SEQ ID NO: 37697 - DNA, 41 bp, Artificial Sequence
  primer
gtaaaacgacggccagtaacacagactccaatccttctaca

SEQ ID NO: 37698 - DNA, 39 bp, Artificial Sequence
  primer
gtaaaacgacggccagtggcaaagtagggagaaaccaag

SEQ ID NO: 37699 - DNA, 39 bp, Artificial Sequence
  primer
gtaaaacgacggccagtaatgattccttgctttacctgc

SEQ ID NO: 37700 - DNA, 24 bp, Artificial Sequence
  primer
caaagcataacactcatcgataca

SEQ ID NO: 37701 - DNA, 39 bp, Artificial Sequence
  primer
gtaaaacgacggccagttcatccacacattactggcttc

SEQ ID NO: 37702 - DNA, 38 bp, Artificial Sequence
  primer
gtaaaacgacggccagtgtggtgcagtaagttgccttg

SEQ ID NO: 37703 - DNA, 19 bp, Artificial Sequence
  primer
cacgtggtgaacgcgtaag

SEQ ID NO: 37704 - DNA, 38 bp, Artificial Sequence
  primer
gtaaaacgacggccagttaccttcagggtgagacagcc

SEQ ID NO: 37705 - DNA, 22 bp, Artificial Sequence
  primer
aatgtttcagcaacacacgaac

SEQ ID NO: 37706 - DNA, 25 bp, Artificial Sequence
  primer
gagaagagaagatagaacacttgcc

SEQ ID NO: 37707 - DNA, 21 bp, Artificial Sequence
  primer
tggcctatccttgagtgtgtg

SEQ ID NO: 37708 - DNA, 20 bp, Artificial Sequence
  primer
cagaggctacagtgagccaa

SEQ ID NO: 37709 - DNA, 21 bp, Artificial Sequence
  primer
gccctcaggtacgtagctttc

SEQ ID NO: 37710 - DNA, 38 bp, Artificial Sequence
  primer
gtaaaacgacggccagtggcctgttgaaatggatactg

SEQ ID NO: 37711 - DNA, 21 bp, Artificial Sequence
  primer
tttgagtggcacaacgtttct

SEQ ID NO: 37712 - DNA, 26 bp, Artificial Sequence
  primer
tttcttatgccatgatatttgagatt

SEQ ID NO: 37713 - DNA, 38 bp, Artificial Sequence
  primer
gtaaaacgacggccagtctagttcccacccagctgttc

SEQ ID NO: 37714 - DNA, 38 bp, Artificial Sequence
  primer
gtaaaacgacggccagtcttagaggtggagctggtccc

SEQ ID NO: 37715 - DNA, 21 bp, Artificial Sequence
  primer
gggtgacaaggtgttgacttg

SEQ ID NO: 37716 - DNA, 40 bp, Artificial Sequence
  primer
gtaaaacgacggccagtcccaaagaggcttgtgtttactg

SEQ ID NO: 37717 - DNA, 23 bp, Artificial Sequence
  primer
tcctactggtcctattggtcctc

SEQ ID NO: 37718 - DNA, 22 bp, Artificial Sequence
  primer
tgataagatgacatttcctgcc

SEQ ID NO: 37719 - DNA, 41 bp, Artificial Sequence
  primer
gtaaaacgacggccagtttcaactccttccatctgaagaat

SEQ ID NO: 37720 - DNA, 38 bp, Artificial Sequence
  primer
gtaaaacgacggccagttgaatctcagcaccagcaatc

SEQ ID NO: 37721 - DNA, 38 bp, Artificial Sequence
  primer
gtaaaacgacggccagtacaatgcagatcatgccacac

SEQ ID NO: 37722 - DNA, 26 bp, Artificial Sequence
  primer
aggatgagaaacttacacattgctac

SEQ ID NO: 37723 - DNA, 21 bp, Artificial Sequence
  primer
cagggcccaccagtaagtaac

SEQ ID NO: 37724 - DNA, 21 bp, Artificial Sequence
  primer
ttgccatccagagtcactgag

SEQ ID NO: 37725 - DNA, 21 bp, Artificial Sequence
  primer
gagaatgcatggatgaaatgg

SEQ ID NO: 37726 - DNA, 37 bp, Artificial Sequence
  primer
gtaaaacgacggccagtgagatggatctcctggtggc

SEQ ID NO: 37727 - DNA, 38 bp, Artificial Sequence
  primer
gtaaaacgacggccagtagggctttagcactttgaagg

SEQ ID NO: 37728 - DNA, 22 bp, Artificial Sequence
  primer
atctgaagtgtctgttgatggg

SEQ ID NO: 37729 - DNA, 21 bp, Artificial Sequence
  primer
tcagcatgacacaatgggaag

SEQ ID NO: 37730 - DNA, 38 bp, Artificial Sequence
  primer
gtaaaacgacggccagtacacttcctttctttccaggg

SEQ ID NO: 37731 - DNA, 41 bp, Artificial Sequence
  primer
gtaaaacgacggccagtaattctgatgacacaatgaatgaa

SEQ ID NO: 37732 - DNA, 42 bp, Artificial Sequence
  primer
gtaaaacgacggccagtcagtcaacattatgaatgcctttac

SEQ ID NO: 37733 - DNA, 23 bp, Artificial Sequence
  primer
cacatactacatgaatccctcgc

SEQ ID NO: 37734 - DNA, 39 bp, Artificial Sequence
  primer
gtaaaacgacggccagtggcacgatgaatgcttctttag

SEQ ID NO: 37735 - DNA, 35 bp, Artificial Sequence
  primer
gtaaaacgacggccagtagagctagctgtccgccg

SEQ ID NO: 37736 - DNA, 37 bp, Artificial Sequence
  primer
gtaaaacgacggccagtagtggaactgcatgacagcc

SEQ ID NO: 37737 - DNA, 21 bp, Artificial Sequence
  primer
gactcaggcagtggactttgc

SEQ ID NO: 37738 - DNA, 38 bp, Artificial Sequence
  primer
gtaaaacgacggccagtacaaggtgtcattgggtttcc

SEQ ID NO: 37739 - DNA, 38 bp, Artificial Sequence
  primer
gtaaaacgacggccagttgagggcatgactccattaac

SEQ ID NO: 37740 - DNA, 36 bp, Artificial Sequence
  primer
gtaaaacgacggccagtgagcatctggctaccctgg

SEQ ID NO: 37741 - DNA, 37 bp, Artificial Sequence
  primer
gtaaaacgacggccagtagtgatgcatgcgatgtcag

SEQ ID NO: 37742 - DNA, 21 bp, Artificial Sequence
  primer
cacagtgcgtatgaatgatgc

SEQ ID NO: 37743 - DNA, 21 bp, Artificial Sequence
  primer
gatggccaggctattgatttc

SEQ ID NO: 37744 - DNA, 38 bp, Artificial Sequence
  primer
gtaaaacgacggccagtaaggtgaaagaggatttcccg

SEQ ID NO: 37745 - DNA, 38 bp, Artificial Sequence
  primer
gtaaaacgacggccagttaacgtcagcctgaagaaggg

SEQ ID NO: 37746 - DNA, 21 bp, Artificial Sequence
  primer
atgggacaaagctattgcctg

SEQ ID NO: 37747 - DNA, 21 bp, Artificial Sequence
  primer
tgcagaggcaaggatgattag

SEQ ID NO: 37748 - DNA, 22 bp, Artificial Sequence
  primer
caatgtcaagtgagtgctggag

SEQ ID NO: 37749 - DNA, 21 bp, Artificial Sequence
  primer
tctctcgaattctttcagggc

SEQ ID NO: 37750 - DNA, 36 bp, Artificial Sequence
  primer
gtaaaacgacggccagtaggtacctgccaccacacc

SEQ ID NO: 37751 - DNA, 39 bp, Artificial Sequence
  primer
gtaaaacgacggccagtaagggagtcccgtaagtgtttc

SEQ ID NO: 37752 - DNA, 38 bp, Artificial Sequence
  primer
gtaaaacgacggccagttgatgggacaagtatctgggc

SEQ ID NO: 37753 - DNA, 38 bp, Artificial Sequence
  primer
gtaaaacgacggccagtgtccgctaccattgctgctac

SEQ ID NO: 37754 - DNA, 38 bp, Artificial Sequence
  primer
gtaaaacgacggccagtttgagagcaatgcatttccag

SEQ ID NO: 37755 - DNA, 38 bp, Artificial Sequence
  primer
gtaaaacgacggccagttttcagtgatggtctggttgg

SEQ ID NO: 37756 - DNA, 39 bp, Artificial Sequence
  primer
gtaaaacgacggccagttgcaagtggtggatagcctaag

SEQ ID NO: 37757 - DNA, 21 bp, Artificial Sequence
  primer
gttcattgacagacagggacg

SEQ ID NO: 37758 - DNA, 21 bp, Artificial Sequence
  primer
cctattccctttctgagtccg

SEQ ID NO: 37759 - DNA, 40 bp, Artificial Sequence
  primer
gtaaaacgacggccagtaaggtggcttcttgattctatgg

SEQ ID NO: 37760 - DNA, 21 bp, Artificial Sequence
  primer
ggaagaatgctcagcttaggg

SEQ ID NO: 37761 - DNA, 22 bp, Artificial Sequence
  primer
aagaagtggagaacacaggcag

SEQ ID NO: 37762 - DNA, 37 bp, Artificial Sequence
  primer
gtaaaacgacggccagtattccagctcaccgggatac

SEQ ID NO: 37763 - DNA, 21 bp, Artificial Sequence
  primer
ctcagatcaggtcggcatctc

SEQ ID NO: 37764 - DNA, 25 bp, Artificial Sequence
  primer
aaatgcattggcagtatctgttaag

SEQ ID NO: 37765 - DNA, 37 bp, Artificial Sequence
  primer
gtaaaacgacggccagtcctagagctcgtggctttcc

SEQ ID NO: 37766 - DNA, 21 bp, Artificial Sequence
  primer
tccattcaagttcccagtgtg

SEQ ID NO: 37767 - DNA, 38 bp, Artificial Sequence
  primer
gtaaaacgacggccagtgacatgggcctcaccttattc

SEQ ID NO: 37768 - DNA, 38 bp, Artificial Sequence
  primer
gtaaaacgacggccagtctgtcaacaagaacgtgagcc

SEQ ID NO: 37769 - DNA, 38 bp, Artificial Sequence
  primer
gtaaaacgacggccagttaataaccaaaccaacctgcg

SEQ ID NO: 37770 - DNA, 38 bp, Artificial Sequence
  primer
gtaaaacgacggccagtctcaggatgaggcctgtgttc

SEQ ID NO: 37771 - DNA, 21 bp, Artificial Sequence
  primer
tctcaatcttggctggttgtg

SEQ ID NO: 37772 - DNA, 38 bp, Artificial Sequence
  primer
gtaaaacgacggccagtccagatggttggctctactgc

SEQ ID NO: 37773 - DNA, 20 bp, Artificial Sequence
  primer
caggaagccctggagagaag

SEQ ID NO: 37774 - DNA, 38 bp, Artificial Sequence
  primer
gtaaaacgacggccagtgctcccttaaaggatgtcagc

SEQ ID NO: 37775 - DNA, 37 bp, Artificial Sequence
  primer
gtaaaacgacggccagtggtggttctgagctgaaagg

SEQ ID NO: 37776 - DNA, 36 bp, Artificial Sequence
  primer
gtaaaacgacggccagtacgcctcatcccatctctg

SEQ ID NO: 37777 - DNA, 38 bp, Artificial Sequence
  primer
gtaaaacgacggccagtaagggttgtcactgttggtcc

SEQ ID NO: 37778 - DNA, 38 bp, Artificial Sequence
  primer
gtaaaacgacggccagtcacaaggcaccatttgttcac

SEQ ID NO: 37779 - DNA, 27 bp, Artificial Sequence
  primer
agcaggtgtatgaatgtgtatatatgg

SEQ ID NO: 37780 - DNA, 21 bp, Artificial Sequence
  primer
tccatttggatagcttcaccc

SEQ ID NO: 37781 - DNA, 38 bp, Artificial Sequence
  primer
gtaaaacgacggccagtgactttgtgggaagcaactcc

SEQ ID NO: 37782 - DNA, 38 bp, Artificial Sequence
  primer
gtaaaacgacggccagtcatgaaggaggtaggctgctg

SEQ ID NO: 37783 - DNA, 40 bp, Artificial Sequence
  primer
gtaaaacgacggccagttgtccagctgaaatccactttac

SEQ ID NO: 37784 - DNA, 21 bp, Artificial Sequence
  primer
cagagtctaagcaatgggcac

SEQ ID NO: 37785 - DNA, 20 bp, Artificial Sequence
  primer
gcacagagtgtgtcctgtgg

SEQ ID NO: 37786 - DNA, 37 bp, Artificial Sequence
  primer
gtaaaacgacggccagtgctgggctgatcccttagag

SEQ ID NO: 37787 - DNA, 39 bp, Artificial Sequence
  primer
gtaaaacgacggccagtgctaaactcgctttgtctgtcg

SEQ ID NO: 37788 - DNA, 38 bp, Artificial Sequence
  primer
gtaaaacgacggccagtgacccttcggtgtaactctcg

SEQ ID NO: 37789 - DNA, 41 bp, Artificial Sequence
  primer
gtaaaacgacggccagttgaatcgtttctagagttggaagg

SEQ ID NO: 37790 - DNA, 21 bp, Artificial Sequence
  primer
aattctttcatcccaacccag

SEQ ID NO: 37791 - DNA, 38 bp, Artificial Sequence
  primer
gtaaaacgacggccagtaaggagacaagggtgaaaggg

SEQ ID NO: 37792 - DNA, 18 bp, Artificial Sequence
  primer
ttccttggattcatgccg

SEQ ID NO: 37793 - DNA, 23 bp, Artificial Sequence
  primer
tgttgctgaatatagggttggtg

SEQ ID NO: 37794 - DNA, 42 bp, Artificial Sequence
  primer
gtaaaacgacggccagtttgatatgcttatttccaactctgc

SEQ ID NO: 37795 - DNA, 21 bp, Artificial Sequence
  primer
attggtcggtttccaggtaag

SEQ ID NO: 37796 - DNA, 37 bp, Artificial Sequence
  primer
gtaaaacgacggccagtgctttcccagagctttccac

SEQ ID NO: 37797 - DNA, 21 bp, Artificial Sequence
  primer
attcactctgaggccttggtc

SEQ ID NO: 37798 - DNA, 39 bp, Artificial Sequence
  primer
gtaaaacgacggccagtggccaggttgtatttgtattcg

SEQ ID NO: 37799 - DNA, 42 bp, Artificial Sequence
  primer
gtaaaacgacggccagttgaggattgattcagtactttcagc

SEQ ID NO: 37800 - DNA, 38 bp, Artificial Sequence
  primer
gtaaaacgacggccagtagtcctggagcagaggatgac

SEQ ID NO: 37801 - DNA, 38 bp, Artificial Sequence
  primer
gtaaaacgacggccagtcttgttcaatctgtccatcgg

SEQ ID NO: 37802 - DNA, 38 bp, Artificial Sequence
  primer
gtaaaacgacggccagttaataatgccattgcagtccc

SEQ ID NO: 37803 - DNA, 38 bp, Artificial Sequence
  primer
gtaaaacgacggccagtggttgaaatagctgctctgcc

SEQ ID NO: 37804 - DNA, 37 bp, Artificial Sequence
  primer
gtaaaacgacggccagtccgcatacagcatatggagc

SEQ ID NO: 37805 - DNA, 38 bp, Artificial Sequence
  primer
gtaaaacgacggccagttacccatcggagttattgacg

SEQ ID NO: 37806 - DNA, 39 bp, Artificial Sequence
  primer
gtaaaacgacggccagtgaacaggcagtgtccataaagc

SEQ ID NO: 37807 - DNA, 20 bp, Artificial Sequence
  primer
cagaaagtgctccttgggtg

SEQ ID NO: 37808 - DNA, 38 bp, Artificial Sequence
  primer
gtaaaacgacggccagtaaaggtgagttcctctctggc

SEQ ID NO: 37809 - DNA, 21 bp, Artificial Sequence
  primer
gggaaaggaaacagggaagtc

SEQ ID NO: 37810 - DNA, 21 bp, Artificial Sequence
  primer
tacgacacaccttcacacacg

SEQ ID NO: 37811 - DNA, 38 bp, Artificial Sequence
  primer
gtaaaacgacggccagttctgatcccagaatggtagcc

SEQ ID NO: 37812 - DNA, 37 bp, Artificial Sequence
  primer
gtaaaacgacggccagtcctcatcatttcccggtttc

SEQ ID NO: 37813 - DNA, 38 bp, Artificial Sequence
  primer
gtaaaacgacggccagtgaggaatgccttctgaggacc

SEQ ID NO: 37814 - DNA, 37 bp, Artificial Sequence
  primer
gtaaaacgacggccagtgtgtggagggagatgctgtc

SEQ ID NO: 37815 - DNA, 21 bp, Artificial Sequence
  primer
ccacactttggaaactcaccc

SEQ ID NO: 37816 - DNA, 37 bp, Artificial Sequence
  primer
gtaaaacgacggccagttgccgaaatgttacggagac

SEQ ID NO: 37817 - DNA, 37 bp, Artificial Sequence
  primer
gtaaaacgacggccagtccttggtctctctccaaggc

SEQ ID NO: 37818 - DNA, 23 bp, Artificial Sequence
  primer
aagattcacagcacgtaggacag

SEQ ID NO: 37819 - DNA, 21 bp, Artificial Sequence
  primer
cagctaagcaaaccgcctatg

SEQ ID NO: 37820 - DNA, 21 bp, Artificial Sequence
  primer
gagcatgtgagccaatttcag

SEQ ID NO: 37821 - DNA, 38 bp, Artificial Sequence
  primer
gtaaaacgacggccagtgttggatgcctctctccattc

SEQ ID NO: 37822 - DNA, 38 bp, Artificial Sequence
  primer
gtaaaacgacggccagtaatctctcctccaactggcac

SEQ ID NO: 37823 - DNA, 38 bp, Artificial Sequence
  primer
gtaaaacgacggccagtcccacaggtgaaataacgatg

SEQ ID NO: 37824 - DNA, 38 bp, Artificial Sequence
  primer
gtaaaacgacggccagtatggctgcctctgtttctttg

SEQ ID NO: 37825 - DNA, 38 bp, Artificial Sequence
  primer
gtaaaacgacggccagtatcactgtctcgctcgctagg

SEQ ID NO: 37826 - DNA, 38 bp, Artificial Sequence
  primer
gtaaaacgacggccagtcagacttgccagagactgtcg

SEQ ID NO: 37827 - DNA, 38 bp, Artificial Sequence
  primer
gtaaaacgacggccagtctggtgtgtttggtctcccag

SEQ ID NO: 37828 - DNA, 21 bp, Artificial Sequence
  primer
aagcacagttgtctgggaagc

SEQ ID NO: 37829 - DNA, 21 bp, Artificial Sequence
  primer
caggtagagtgctgagctggg

SEQ ID NO: 37830 - DNA, 21 bp, Artificial Sequence
  primer
tctctctcaggctgtaggtgc

SEQ ID NO: 37831 - DNA, 37 bp, Artificial Sequence
  primer
gtaaaacgacggccagtagtccgtgacacacagcctc

SEQ ID NO: 37832 - DNA, 38 bp, Artificial Sequence
  primer
gtaaaacgacggccagtatgcacagaagagggctatgc

SEQ ID NO: 37833 - DNA, 21 bp, Artificial Sequence
  primer
ctcacagttgcccattcattc

SEQ ID NO: 37834 - DNA, 21 bp, Artificial Sequence
  primer
atttatcctcccacctcagcc

SEQ ID NO: 37835 - DNA, 21 bp, Artificial Sequence
  primer
atcgattagaaagagccaccg

SEQ ID NO: 37836 - DNA, 38 bp, Artificial Sequence
  primer
gtaaaacgacggccagttaatggaatgaaaggcagcac

SEQ ID NO: 37837 - DNA, 21 bp, Artificial Sequence
  primer
atttatcctcccacctcagcc

SEQ ID NO: 37838 - DNA, 21 bp, Artificial Sequence
  primer
gaagggacactgcctggtaag

SEQ ID NO: 37839 - DNA, 38 bp, Artificial Sequence
  primer
gtaaaacgacggccagtcaaggtcacctggctcctaac

SEQ ID NO: 37840 - DNA, 21 bp, Artificial Sequence
  primer
actggtagctttctggttgcc

SEQ ID NO: 37841 - DNA, 22 bp, Artificial Sequence
  primer
gagactgggtttgatgtatggg

SEQ ID NO: 37842 - DNA, 21 bp, Artificial Sequence
  primer
caatcgtttcgagctattccc

SEQ ID NO: 37843 - DNA, 40 bp, Artificial Sequence
  primer
gtaaaacgacggccagtagtcagcctgtttagtttgttgc

SEQ ID NO: 37844 - DNA, 38 bp, Artificial Sequence
  primer
gtaaaacgacggccagttaccattgcaaggttggaagc

SEQ ID NO: 37845 - DNA, 21 bp, Artificial Sequence
  primer
ttcacaggtgagacgaaggag

SEQ ID NO: 37846 - DNA, 38 bp, Artificial Sequence
  primer
gtaaaacgacggccagtacaggcatgtgccactgtact

SEQ ID NO: 37847 - DNA, 20 bp, Artificial Sequence
  primer
gtcctgccagcctgttacac

SEQ ID NO: 37848 - DNA, 37 bp, Artificial Sequence
  primer
gtaaaacgacggccagtgtcctccgggattctttgtg

SEQ ID NO: 37849 - DNA, 38 bp, Artificial Sequence
  primer
gtaaaacgacggccagtctgcaccttaagagctcctcc

SEQ ID NO: 37850 - DNA, 38 bp, Artificial Sequence
  primer
gtaaaacgacggccagtgtttacttacgggccaagctg

SEQ ID NO: 37851 - DNA, 38 bp, Artificial Sequence
  primer
gtaaaacgacggccagttggaaggtgtattgggttgtg

SEQ ID NO: 37852 - DNA, 21 bp, Artificial Sequence
  primer
caatgccacccatcctatgac

SEQ ID NO: 37853 - DNA, 37 bp, Artificial Sequence
  primer
gtaaaacgacggccagttcatgcctgaggtcaagagg

SEQ ID NO: 37854 - DNA, 38 bp, Artificial Sequence
  primer
gtaaaacgacggccagtagttcaaattgcacctgctcc

SEQ ID NO: 37855 - DNA, 37 bp, Artificial Sequence
  primer
gtaaaacgacggccagtccttacccagatacgcgctc

SEQ ID NO: 37856 - DNA, 38 bp, Artificial Sequence
  primer
gtaaaacgacggccagtataaggaagccatctttgggc

SEQ ID NO: 37857 - DNA, 22 bp, Artificial Sequence
  primer
aagtgctaaacacagagcaggc

SEQ ID NO: 37858 - DNA, 20 bp, Artificial Sequence
  primer
gtgggaatggaatgttctgc

SEQ ID NO: 37859 - DNA, 21 bp, Artificial Sequence
  primer
tcaccatgctttctcagttgc

SEQ ID NO: 37860 - DNA, 38 bp, Artificial Sequence
  primer
gtaaaacgacggccagttgcatgcaaggaaagaaacac

SEQ ID NO: 37861 - DNA, 44 bp, Artificial Sequence
  primer
gtaaaacgacggccagtttatgatagaagttgtctttctttccc

SEQ ID NO: 37862 - DNA, 21 bp, Artificial Sequence
  primer
tgtggaccaaagagtgtgttg

SEQ ID NO: 37863 - DNA, 40 bp, Artificial Sequence
  primer
gtaaaacgacggccagtgatctcaatgacagcctaactgg

SEQ ID NO: 37864 - DNA, 38 bp, Artificial Sequence
  primer
gtaaaacgacggccagtagtttctatgggctggtcgtc

SEQ ID NO: 37865 - DNA, 22 bp, Artificial Sequence
  primer
gacagaccgaaactccatcaac

SEQ ID NO: 37866 - DNA, 22 bp, Artificial Sequence
  primer
tcagtggtttgaagaattgctg

SEQ ID NO: 37867 - DNA, 21 bp, Artificial Sequence
  primer
gtgcaacagggacttagagcc

SEQ ID NO: 37868 - DNA, 21 bp, Artificial Sequence
  primer
catccaatgttcctgccctac

SEQ ID NO: 37869 - DNA, 20 bp, Artificial Sequence
  primer
ccagcctagaagacagaggg

SEQ ID NO: 37870 - DNA, 38 bp, Artificial Sequence
  primer
gtaaaacgacggccagtgaccacttaccgacccatctc

SEQ ID NO: 37871 - DNA, 23 bp, Artificial Sequence
  primer
tcaagttctcagcactgttagcc

SEQ ID NO: 37872 - DNA, 37 bp, Artificial Sequence
  primer
gtaaaacgacggccagtttcaacctctgtctcccagg

SEQ ID NO: 37873 - DNA, 38 bp, Artificial Sequence
  primer
gtaaaacgacggccagtctggctgttctgcattcattc

SEQ ID NO: 37874 - DNA, 38 bp, Artificial Sequence
  primer
gtaaaacgacggccagtcctgatgcagttgcaattctg

SEQ ID NO: 37875 - DNA, 38 bp, Artificial Sequence
  primer
gtaaaacgacggccagtatcacagtgctggcagatagc

SEQ ID NO: 37876 - DNA, 36 bp, Artificial Sequence
  primer
gtaaaacgacggccagtcttccttaaggccagcgtg

SEQ ID NO: 37877 - DNA, 22 bp, Artificial Sequence
  primer
tgggaacatagcttcacatagc

SEQ ID NO: 37878 - DNA, 40 bp, Artificial Sequence
  primer
gtaaaacgacggccagtaacagtgtaatcctttgctgctc

SEQ ID NO: 37879 - DNA, 24 bp, Artificial Sequence
  primer
tcagacagctagttggagacagac

SEQ ID NO: 37880 - DNA, 37 bp, Artificial Sequence
  primer
gtaaaacgacggccagttggcaatgctaagtgaaggg

SEQ ID NO: 37881 - DNA, 39 bp, Artificial Sequence
  primer
gtaaaacgacggccagtggccagaggagttatagccttg

SEQ ID NO: 37882 - DNA, 37 bp, Artificial Sequence
  primer
gtaaaacgacggccagtacccataggacagagcctcc

SEQ ID NO: 37883 - DNA, 40 bp, Artificial Sequence
  primer
gtaaaacgacggccagtgaccacctggtaaataaacgtcc

SEQ ID NO: 37884 - DNA, 38 bp, Artificial Sequence
  primer
gtaaaacgacggccagtaggactgaggatcttcccagg

SEQ ID NO: 37885 - DNA, 22 bp, Artificial Sequence
  primer
gctttcaatttatgggctcaac

SEQ ID NO: 37886 - DNA, 38 bp, Artificial Sequence
  primer
gtaaaacgacggccagtatttatcctcccacctcagcc

SEQ ID NO: 37887 - DNA, 21 bp, Artificial Sequence
  primer
gaagggtaggcttccttcacc

SEQ ID NO: 37888 - DNA, 26 bp, Artificial Sequence
  primer
gctgtttcacaaagtttggatttcta

SEQ ID NO: 37889 - DNA, 40 bp, Artificial Sequence
  primer
gtaaaacgacggccagtcaccagcacagaatgagtatgtt

SEQ ID NO: 37890 - DNA, 28 bp, Artificial Sequence
  primer
ataaccttgttaattcataggaaacctt

SEQ ID NO: 37891 - DNA, 38 bp, Artificial Sequence
  primer
gtaaaacgacggccagtcccatgccctcagttataagg

SEQ ID NO: 37892 - DNA, 40 bp, Artificial Sequence
  primer
gtaaaacgacggccagttgagcataccttgattaccagtg

SEQ ID NO: 37893 - DNA, 38 bp, Artificial Sequence
  primer
gtaaaacgacggccagtgtacatatgctgccacgaagc

SEQ ID NO: 37894 - DNA, 38 bp, Artificial Sequence
  primer
gtaaaacgacggccagtctgggtgacagagcaagactc

SEQ ID NO: 37895 - DNA, 19 bp, Artificial Sequence
  primer
gcagcagactggatttggc

SEQ ID NO: 37896 - DNA, 21 bp, Artificial Sequence
  primer
atcaggatttgccatgtctgc

SEQ ID NO: 37897 - DNA, 23 bp, Artificial Sequence
  primer
ttggaagttggtactgaatgctc

SEQ ID NO: 37898 - DNA, 37 bp, Artificial Sequence
  primer
gtaaaacgacggccagtacctttgtgcatttggttgc

SEQ ID NO: 37899 - DNA, 45 bp, Artificial Sequence
  primer
gtaaaacgacggccagtgagaatggtaaataatgcctaattcaaa

SEQ ID NO: 37900 - DNA, 42 bp, Artificial Sequence
  primer
gtaaaacgacggccagtcatttggatgtaacctagatagggc

SEQ ID NO: 37901 - DNA, 44 bp, Artificial Sequence
  primer
gtaaaacgacggccagttgttctgcaaagctattaactctgttc

SEQ ID NO: 37902 - DNA, 21 bp, Artificial Sequence
  primer
cctggtgtcatatcagcttgg

SEQ ID NO: 37903 - DNA, 19 bp, Artificial Sequence
  primer
accctggcaacagagcaag

SEQ ID NO: 37904 - DNA, 21 bp, Artificial Sequence
  primer
caggaacagactttgacccag

SEQ ID NO: 37905 - DNA, 37 bp, Artificial Sequence
  primer
gtaaaacgacggccagtggcagccagagagaggaaag

SEQ ID NO: 37906 - DNA, 40 bp, Artificial Sequence
  primer
gtaaaacgacggccagtcatggagtcaaaggtaaaccaag

SEQ ID NO: 37907 - DNA, 38 bp, Artificial Sequence
  primer
gtaaaacgacggccagtccatctccagccatttgtttc

SEQ ID NO: 37908 - DNA, 43 bp, Artificial Sequence
  primer
gtaaaacgacggccagtaaagcacaagaattggttcttaaatg

SEQ ID NO: 37909 - DNA, 20 bp, Artificial Sequence
  primer
ccctcctcaatttcccagag

SEQ ID NO: 37910 - DNA, 45 bp, Artificial Sequence
  primer
gtaaaacgacggccagttgagaaccttagggtgataataatatgg

SEQ ID NO: 37911 - DNA, 20 bp, Artificial Sequence
  primer
cagcgacctttctctgttgg

SEQ ID NO: 37912 - DNA, 38 bp, Artificial Sequence
  primer
gtaaaacgacggccagtaatgtcctagcagggcagatg

SEQ ID NO: 37913 - DNA, 21 bp, Artificial Sequence
  primer
cagcccatccatgatagaaac

SEQ ID NO: 37914 - DNA, 38 bp, Artificial Sequence
  primer
gtaaaacgacggccagtaggtaggcagtcatgagcaag

SEQ ID NO: 37915 - DNA, 24 bp, Artificial Sequence
  primer
gcattataccacaatacatgggtg

SEQ ID NO: 37916 - DNA, 37 bp, Artificial Sequence
  primer
gtaaaacgacggccagttccgtggtccactgtggtat

SEQ ID NO: 37917 - DNA, 38 bp, Artificial Sequence
  primer
gtaaaacgacggccagtttgctgaaatattgctttccc

SEQ ID NO: 37918 - DNA, 38 bp, Artificial Sequence
  primer
gtaaaacgacggccagtgctagctttgcaaacaggacc

SEQ ID NO: 37919 - DNA, 23 bp, Artificial Sequence
  primer
ttgaagcacaagattgtctgatg

SEQ ID NO: 37920 - DNA, 38 bp, Artificial Sequence
  primer
gtaaaacgacggccagttccatggatgcttcatttctc

SEQ ID NO: 37921 - DNA, 38 bp, Artificial Sequence
  primer
gtaaaacgacggccagtccaaggcggttcacatttaag

SEQ ID NO: 37922 - DNA, 19 bp, Artificial Sequence
  primer
ccagctccgtctctttccc

SEQ ID NO: 37923 - DNA, 21 bp, Artificial Sequence
  primer
tgccataaccactgcatcatc

SEQ ID NO: 37924 - DNA, 21 bp, Artificial Sequence
  primer
tctgcaagaagtgcatatcgg

SEQ ID NO: 37925 - DNA, 21 bp, Artificial Sequence
  primer
ctaccttggaaggcagggaag

SEQ ID NO: 37926 - DNA, 21 bp, Artificial Sequence
  primer
cacaggaaactaccaacccag

SEQ ID NO: 37927 - DNA, 43 bp, Artificial Sequence
  primer
gtaaaacgacggccagtttctgtaacctacaatgactgctttg

SEQ ID NO: 37928 - DNA, 44 bp, Artificial Sequence
  primer
gtaaaacgacggccagtgtgatctaatgatacttgggagtcttc

SEQ ID NO: 37929 - DNA, 38 bp, Artificial Sequence
  primer
gtaaaacgacggccagtaatccttcacaggatggcttc

SEQ ID NO: 37930 - DNA, 27 bp, Artificial Sequence
  primer
caaagttgcagtttctctctctacaaa

SEQ ID NO: 37931 - DNA, 22 bp, Artificial Sequence
  primer
ttagcaatgcgttgtttctctg

SEQ ID NO: 37932 - DNA, 24 bp, Artificial Sequence
  primer
gctttactgttgtttaacgcattg

SEQ ID NO: 37933 - DNA, 21 bp, Artificial Sequence
  primer
gagactctgtccacctcccac

SEQ ID NO: 37934 - DNA, 39 bp, Artificial Sequence
  primer
gtaaaacgacggccagtgcgatttgggagtgaaatgtag

SEQ ID NO: 37935 - DNA, 38 bp, Artificial Sequence
  primer
gtaaaacgacggccagtctgaagccagaaatgatcagg

SEQ ID NO: 37936 - DNA, 39 bp, Artificial Sequence
  primer
gtaaaacgacggccagtcttgcatgcatttaaactttcg

SEQ ID NO: 37937 - DNA, 43 bp, Artificial Sequence
  primer
gtaaaacgacggccagtcaaataccataaacgttactgtcacc

SEQ ID NO: 37938 - DNA, 38 bp, Artificial Sequence
  primer
gtaaaacgacggccagtgaatagggtgggctgaacttg

SEQ ID NO: 37939 - DNA, 24 bp, Artificial Sequence
  primer
aatggatactattcctgccaattc

SEQ ID NO: 37940 - DNA, 38 bp, Artificial Sequence
  primer
gtaaaacgacggccagtctgatgatgaagtccagacgc

SEQ ID NO: 37941 - DNA, 37 bp, Artificial Sequence
  primer
gtaaaacgacggccagtcagaaccagccactcctctg

SEQ ID NO: 37942 - DNA, 38 bp, Artificial Sequence
  primer
gtaaaacgacggccagtcaggtcctcgtggaaagaaag

SEQ ID NO: 37943 - DNA, 38 bp, Artificial Sequence
  primer
gtaaaacgacggccagttttcttcggaagctgtcaagc

SEQ ID NO: 37944 - DNA, 21 bp, Artificial Sequence
  primer
cagaagaaggcgaggctaatc

SEQ ID NO: 37945 - DNA, 23 bp, Artificial Sequence
  primer
cactcaaggttgaaagtcactgc

SEQ ID NO: 37946 - DNA, 41 bp, Artificial Sequence
  primer
gtaaaacgacggccagtcatggaacttacattggattgttg

SEQ ID NO: 37947 - DNA, 38 bp, Artificial Sequence
  primer
gtaaaacgacggccagtagtcaaagtgggaaggaagcc

SEQ ID NO: 37948 - DNA, 21 bp, Artificial Sequence
  primer
gtgccagaacagaggtgctta

SEQ ID NO: 37949 - DNA, 38 bp, Artificial Sequence
  primer
gtaaaacgacggccagtgatggaggaaggaagggtctg

SEQ ID NO: 37950 - DNA, 21 bp, Artificial Sequence
  primer
gtgtgtccctgattgggtctg

SEQ ID NO: 37951 - DNA, 38 bp, Artificial Sequence
  primer
gtaaaacgacggccagtctctccggctctagctctctc

SEQ ID NO: 37952 - DNA, 41 bp, Artificial Sequence
  primer
gtaaaacgacggccagttcaagtttggattgttgatttcag

SEQ ID NO: 37953 - DNA, 24 bp, Artificial Sequence
  primer
tataacttccagacggtttgtgtt

SEQ ID NO: 37954 - DNA, 38 bp, Artificial Sequence
  primer
gtaaaacgacggccagtaaatgcttcttccttgggtgt

SEQ ID NO: 37955 - DNA, 38 bp, Artificial Sequence
  primer
gtaaaacgacggccagtcaatgaagacaatgctccctc

SEQ ID NO: 37956 - DNA, 37 bp, Artificial Sequence
  primer
gtaaaacgacggccagtatttccagggacaccaggtc

SEQ ID NO: 37957 - DNA, 22 bp, Artificial Sequence
  primer
gaatttatggcgtgatcgtctc

SEQ ID NO: 37958 - DNA, 22 bp, Artificial Sequence
  primer
ttcagaaatgacgctacagcag

SEQ ID NO: 37959 - DNA, 38 bp, Artificial Sequence
  primer
gtaaaacgacggccagtcagtgtactctggccacttcc

SEQ ID NO: 37960 - DNA, 19 bp, Artificial Sequence
  primer
tgggcgacacaagtgagac

SEQ ID NO: 37961 - DNA, 38 bp, Artificial Sequence
  primer
gtaaaacgacggccagtctctctacctctgcccatccc

SEQ ID NO: 37962 - DNA, 21 bp, Artificial Sequence
  primer
ccaggacttccaggacctaag

SEQ ID NO: 37963 - DNA, 38 bp, Artificial Sequence
  primer
gtaaaacgacggccagtggttattcagccctcagcttt

SEQ ID NO: 37964 - DNA, 41 bp, Artificial Sequence
  primer
gtaaaacgacggccagtccaacatagatgtagctgtggttc

SEQ ID NO: 37965 - DNA, 37 bp, Artificial Sequence
  primer
gtaaaacgacggccagtacctccagggatacgtggtc

SEQ ID NO: 37966 - DNA, 20 bp, Artificial Sequence
  primer
ggtgagaagggtgagcaagg

SEQ ID NO: 37967 - DNA, 38 bp, Artificial Sequence
  primer
gtaaaacgacggccagtttgctgcaagctttggttaag

SEQ ID NO: 37968 - DNA, 41 bp, Artificial Sequence
  primer
gtaaaacgacggccagtcaggttaggcttagctcagaattg

SEQ ID NO: 37969 - DNA, 22 bp, Artificial Sequence
  primer
ttctaatcagttggaggatggg

SEQ ID NO: 37970 - DNA, 27 bp, Artificial Sequence
  primer
ccctcaaactgttacttacattctttg

SEQ ID NO: 37971 - DNA, 21 bp, Artificial Sequence
  primer
gctaaaggttggcctcatttg

SEQ ID NO: 37972 - DNA, 38 bp, Artificial Sequence
  primer
gtaaaacgacggccagttaggcttctccaatcacacca

SEQ ID NO: 37973 - DNA, 22 bp, Artificial Sequence
  primer
gagctttgtcaggagttcaagc

SEQ ID NO: 37974 - DNA, 21 bp, Artificial Sequence
  primer
gttattggatgggttgaaggg

SEQ ID NO: 37975 - DNA, 24 bp, Artificial Sequence
  primer
tggaatgatcacacataccatctc

SEQ ID NO: 37976 - DNA, 41 bp, Artificial Sequence
  primer
gtaaaacgacggccagtgaagtccttaaggctgtcatatcc

SEQ ID NO: 37977 - DNA, 38 bp, Artificial Sequence
  primer
gtaaaacgacggccagttacaagagtgagccactgcac

SEQ ID NO: 37978 - DNA, 40 bp, Artificial Sequence
  primer
gtaaaacgacggccagtgatgattgagaggattgtaaggc

SEQ ID NO: 37979 - DNA, 38 bp, Artificial Sequence
  primer
gtaaaacgacggccagttcggcattaaattctctgtgg

SEQ ID NO: 37980 - DNA, 43 bp, Artificial Sequence
  primer
gtaaaacgacggccagtttcttgcttaatatgatatggttccc

SEQ ID NO: 37981 - DNA, 23 bp, Artificial Sequence
  primer
gccagaaataatttgagaagcac

SEQ ID NO: 37982 - DNA, 38 bp, Artificial Sequence
  primer
gtaaaacgacggccagtaacagtgccttacgtccaacc

SEQ ID NO: 37983 - DNA, 22 bp, Artificial Sequence
  primer
gccagtggcctactcaactatg

SEQ ID NO: 37984 - DNA, 39 bp, Artificial Sequence
  primer
gtaaaacgacggccagtcacttgagtagcttgctttgcc

SEQ ID NO: 37985 - DNA, 22 bp, Artificial Sequence
  primer
ggaaagaaacaaggtgttctgg

SEQ ID NO: 37986 - DNA, 26 bp, Artificial Sequence
  primer
ttgtgtttgtgaggctcattattatc

SEQ ID NO: 37987 - DNA, 38 bp, Artificial Sequence
  primer
gtaaaacgacggccagtaccttaggcacttggcttctc

SEQ ID NO: 37988 - DNA, 38 bp, Artificial Sequence
  primer
gtaaaacgacggccagttagccaacaaacaccagcatc

SEQ ID NO: 37989 - DNA, 42 bp, Artificial Sequence
  primer
gtaaaacgacggccagtggataaagaagggagcatatggaag

SEQ ID NO: 37990 - DNA, 40 bp, Artificial Sequence
  primer
gtaaaacgacggccagtaaataatttggccttgtttcagt

SEQ ID NO: 37991 - DNA, 39 bp, Artificial Sequence
  primer
gtaaaacgacggccagtttgtgaattccattaattgccc

SEQ ID NO: 37992 - DNA, 24 bp, Artificial Sequence
  primer
ttagaaagggaatcagcataggtc

SEQ ID NO: 37993 - DNA, 24 bp, Artificial Sequence
  primer
tgccactatgtaattcttatgccc

SEQ ID NO: 37994 - DNA, 38 bp, Artificial Sequence
  primer
gtaaaacgacggccagtgattcccaggtatttgaaggg

SEQ ID NO: 37995 - DNA, 23 bp, Artificial Sequence
  primer
gaacttaggtcactttggcttcc

SEQ ID NO: 37996 - DNA, 38 bp, Artificial Sequence
  primer
gtaaaacgacggccagtatcccagaagcaaatggattg

SEQ ID NO: 37997 - DNA, 38 bp, Artificial Sequence
  primer
gtaaaacgacggccagtgcccatgatatctgacaatgc

SEQ ID NO: 37998 - DNA, 21 bp, Artificial Sequence
  primer
gcaagtttccttgaaaggctg

SEQ ID NO: 37999 - DNA, 21 bp, Artificial Sequence
  primer
caaatgcaatcctcaaagtgc

SEQ ID NO: 38000 - DNA, 38 bp, Artificial Sequence
  primer
gtaaaacgacggccagtaagctcagcacacatctttgg

SEQ ID NO: 38001 - DNA, 40 bp, Artificial Sequence
  primer
gtaaaacgacggccagttgaccactaatggctcttaaacc

SEQ ID NO: 38002 - DNA, 38 bp, Artificial Sequence
  primer
gtaaaacgacggccagtttaccttccagctgctcacag

SEQ ID NO: 38003 - DNA, 22 bp, Artificial Sequence
  primer
ttacttcgggttactttgccag

SEQ ID NO: 38004 - DNA, 21 bp, Artificial Sequence
  primer
cccaaaccggctatttatttg

SEQ ID NO: 38005 - DNA, 38 bp, Artificial Sequence
  primer
gtaaaacgacggccagttatgacagtgctctttgtgcg

SEQ ID NO: 38006 - DNA, 21 bp, Artificial Sequence
  primer
agctggtttcggaacaaagac

SEQ ID NO: 38007 - DNA, 38 bp, Artificial Sequence
  primer
gtaaaacgacggccagtgatccctttggtttcagcttg

SEQ ID NO: 38008 - DNA, 21 bp, Artificial Sequence
  primer
ccacatggtttcaggctcttg

SEQ ID NO: 38009 - DNA, 37 bp, Artificial Sequence
  primer
gtaaaacgacggccagtgcccaaggttcagagatgtg

SEQ ID NO: 38010 - DNA, 23 bp, Artificial Sequence
  primer
tccttgtatcattggacaactgg

SEQ ID NO: 38011 - DNA, 38 bp, Artificial Sequence
  primer
gtaaaacgacggccagtgggagtgactctcaacatgcc

SEQ ID NO: 38012 - DNA, 39 bp, Artificial Sequence
  primer
gtaaaacgacggccagttcccagagagatactggtttgg

SEQ ID NO: 38013 - DNA, 37 bp, Artificial Sequence
  primer
gtaaaacgacggccagtcttctcaccctttggcagtg

SEQ ID NO: 38014 - DNA, 38 bp, Artificial Sequence
  primer
gtaaaacgacggccagtctgctagttagggagcctggg

SEQ ID NO: 38015 - DNA, 21 bp, Artificial Sequence
  primer
caggcagtgacaagagacagc

SEQ ID NO: 38016 - DNA, 40 bp, Artificial Sequence
  primer
gtaaaacgacggccagttgctaaatcctgaactcagttgg

SEQ ID NO: 38017 - DNA, 38 bp, Artificial Sequence
  primer
gtaaaacgacggccagttaccctgcaatgtcatccaag

SEQ ID NO: 38018 - DNA, 38 bp, Artificial Sequence
  primer
gtaaaacgacggccagtcctagggatgggctttaatgg

SEQ ID NO: 38019 - DNA, 38 bp, Artificial Sequence
  primer
gtaaaacgacggccagtgacttgggaaaggcatgaaag

SEQ ID NO: 38020 - DNA, 22 bp, Artificial Sequence
  primer
ttgtttccaacatatgccacag

SEQ ID NO: 38021 - DNA, 21 bp, Artificial Sequence
  primer
tgattgagctgctgtgttgag

SEQ ID NO: 38022 - DNA, 38 bp, Artificial Sequence
  primer
gtaaaacgacggccagtgccttcagattccctctatgg

SEQ ID NO: 38023 - DNA, 22 bp, Artificial Sequence
  primer
tgccaatatgtacccaaggttc

SEQ ID NO: 38024 - DNA, 38 bp, Artificial Sequence
  primer
gtaaaacgacggccagtacaaagcattggtcacactgg

SEQ ID NO: 38025 - DNA, 20 bp, Artificial Sequence
  primer
cagctgctgagtgggaagag

SEQ ID NO: 38026 - DNA, 38 bp, Artificial Sequence
  primer
gtaaaacgacggccagttgtaagggccataaggcaaag

SEQ ID NO: 38027 - DNA, 22 bp, Artificial Sequence
  primer
tcctgaccttcaagagaagtga

SEQ ID NO: 38028 - DNA, 38 bp, Artificial Sequence
  primer
gtaaaacgacggccagtaacaaggctggagctgagaag

SEQ ID NO: 38029 - DNA, 22 bp, Artificial Sequence
  primer
cctaacaagccaaaccaatcag

SEQ ID NO: 38030 - DNA, 38 bp, Artificial Sequence
  primer
gtaaaacgacggccagtagtgccatgtccctattcagg

SEQ ID NO: 38031 - DNA, 38 bp, Artificial Sequence
  primer
gtaaaacgacggccagtaaagagggctgtggtggtatg

SEQ ID NO: 38032 - DNA, 37 bp, Artificial Sequence
  primer
gtaaaacgacggccagtagctaactgctccctgagcc

SEQ ID NO: 38033 - DNA, 37 bp, Artificial Sequence
  primer
gtaaaacgacggccagttctgccctttgttcatcacc

SEQ ID NO: 38034 - DNA, 22 bp, Artificial Sequence
  primer
gctcctctggctacactgaatc

SEQ ID NO: 38035 - DNA, 39 bp, Artificial Sequence
  primer
gtaaaacgacggccagttcattgggtctagctccttcag

SEQ ID NO: 38036 - DNA, 38 bp, Artificial Sequence
  primer
gtaaaacgacggccagttccctggaaacaaaggtgaag

SEQ ID NO: 38037 - DNA, 37 bp, Artificial Sequence
  primer
gtaaaacgacggccagtaataaggacctcgcaatgcc

SEQ ID NO: 38038 - DNA, 38 bp, Artificial Sequence
  primer
gtaaaacgacggccagtacaggcgagtgagttaggcag

SEQ ID NO: 38039 - DNA, 22 bp, Artificial Sequence
  primer
ggtctggctcctacctaactgc

SEQ ID NO: 38040 - DNA, 38 bp, Artificial Sequence
  primer
gtaaaacgacggccagttgtcagtccctaggccttctg

SEQ ID NO: 38041 - DNA, 21 bp, Artificial Sequence
  primer
actccttcctgcagtcctgtg

SEQ ID NO: 38042 - DNA, 38 bp, Artificial Sequence
  primer
gtaaaacgacggccagttatcacacagtgccatcctgg

SEQ ID NO: 38043 - DNA, 21 bp, Artificial Sequence
  primer
ttgggcatgacacataagtcc

SEQ ID NO: 38044 - DNA, 21 bp, Artificial Sequence
  primer
agggtcatcgtgaggattgag

SEQ ID NO: 38045 - DNA, 38 bp, Artificial Sequence
  primer
gtaaaacgacggccagttggatgtaaacccaaaccacc

SEQ ID NO: 38046 - DNA, 37 bp, Artificial Sequence
  primer
gtaaaacgacggccagtgtagcagtggagcacccatc

SEQ ID NO: 38047 - DNA, 37 bp, Artificial Sequence
  primer
gtaaaacgacggccagtgagcctgtttccctttggag

SEQ ID NO: 38048 - DNA, 37 bp, Artificial Sequence
  primer
gtaaaacgacggccagttgacctcctaaagtggtgcg

SEQ ID NO: 38049 - DNA, 38 bp, Artificial Sequence
  primer
gtaaaacgacggccagttcttctgagtgcccaggattc

SEQ ID NO: 38050 - DNA, 37 bp, Artificial Sequence
  primer
gtaaaacgacggccagtgctggcttgtttgcagagag

SEQ ID NO: 38051 - DNA, 38 bp, Artificial Sequence
  primer
gtaaaacgacggccagttgtgtctcgaggaatttgcag

SEQ ID NO: 38052 - DNA, 38 bp, Artificial Sequence
  primer
gtaaaacgacggccagtgaggacaagctcgtcttgtgg

SEQ ID NO: 38053 - DNA, 37 bp, Artificial Sequence
  primer
gtaaaacgacggccagtagctttccaaggagctggag

SEQ ID NO: 38054 - DNA, 36 bp, Artificial Sequence
  primer
gtaaaacgacggccagtgttgccactgagatgcctg

SEQ ID NO: 38055 - DNA, 37 bp, Artificial Sequence
  primer
gtaaaacgacggccagtagttgaccggatagccacag

SEQ ID NO: 38056 - DNA, 21 bp, Artificial Sequence
  primer
ctgggcctgtttcttcgttag

SEQ ID NO: 38057 - DNA, 18 bp, Artificial Sequence
  primer
agtgccaggaggacagcc

SEQ ID NO: 38058 - DNA, 21 bp, Artificial Sequence
  primer
acttgcagaaggtgctcttgg

SEQ ID NO: 38059 - DNA, 21 bp, Artificial Sequence
  primer
tttctgaaacattcctgccac

SEQ ID NO: 38060 - DNA, 38 bp, Artificial Sequence
  primer
gtaaaacgacggccagtacccttatcagtcggaggtgg

SEQ ID NO: 38061 - DNA, 38 bp, Artificial Sequence
  primer
gtaaaacgacggccagtttccagagtctcctgtccctc

SEQ ID NO: 38062 - DNA, 21 bp, Artificial Sequence
  primer
gctcctggaaagtcatcgttc

SEQ ID NO: 38063 - DNA, 38 bp, Artificial Sequence
  primer
gtaaaacgacggccagtacatgtttgtggcttggacag

SEQ ID NO: 38064 - DNA, 38 bp, Artificial Sequence
  primer
gtaaaacgacggccagtacgctcaacttggtttaacgg

SEQ ID NO: 38065 - DNA, 38 bp, Artificial Sequence
  primer
gtaaaacgacggccagtagggtgcatagatgctgtgtg

SEQ ID NO: 38066 - DNA, 39 bp, Artificial Sequence
  primer
gtaaaacgacggccagtaggcacacgtgatcttctaagg

SEQ ID NO: 38067 - DNA, 38 bp, Artificial Sequence
  primer
gtaaaacgacggccagtagctggtaaacctggcgtatg

SEQ ID NO: 38068 - DNA, 19 bp, Artificial Sequence
  primer
gttctgggtggagtcaggg

SEQ ID NO: 38069 - DNA, 21 bp, Artificial Sequence
  primer
atttggagtcaggtccttccc

SEQ ID NO: 38070 - DNA, 38 bp, Artificial Sequence
  primer
gtaaaacgacggccagtagcagtttgaaaggatgggag

SEQ ID NO: 38071 - DNA, 38 bp, Artificial Sequence
  primer
gtaaaacgacggccagtagactaggacctgggttggtg

SEQ ID NO: 38072 - DNA, 37 bp, Artificial Sequence
  primer
gtaaaacgacggccagttctcagcaaatgctgtgtgg

SEQ ID NO: 38073 - DNA, 38 bp, Artificial Sequence
  primer
gtaaaacgacggccagtagggtcaggcttattgttccc

SEQ ID NO: 38074 - DNA, 38 bp, Artificial Sequence
  primer
gtaaaacgacggccagtcatgagacacagccacacctc

SEQ ID NO: 38075 - DNA, 37 bp, Artificial Sequence
  primer
gtaaaacgacggccagtatctgtcagcttcagcgagc

SEQ ID NO: 38076 - DNA, 21 bp, Artificial Sequence
  primer
gttacagctgggaacgcagag

SEQ ID NO: 38077 - DNA, 21 bp, Artificial Sequence
  primer
gctctcagaatggtggtggag

SEQ ID NO: 38078 - DNA, 38 bp, Artificial Sequence
  primer
gtaaaacgacggccagtatgtcctttctctctgctccg

SEQ ID NO: 38079 - DNA, 38 bp, Artificial Sequence
  primer
gtaaaacgacggccagtagacaggtaggtgggtggttg

SEQ ID NO: 38080 - DNA, 38 bp, Artificial Sequence
  primer
gtaaaacgacggccagttctcaataacccgggagacag

SEQ ID NO: 38081 - DNA, 21 bp, Artificial Sequence
  primer
cgggcatttagagagtgactg

SEQ ID NO: 38082 - DNA, 20 bp, Artificial Sequence
  primer
gcaggctttgatagccacag

SEQ ID NO: 38083 - DNA, 38 bp, Artificial Sequence
  primer
gtaaaacgacggccagtagaaatgacacctgcgttcag

SEQ ID NO: 38084 - DNA, 38 bp, Artificial Sequence
  primer
gtaaaacgacggccagtagccatggaaataacggtcac

SEQ ID NO: 38085 - DNA, 21 bp, Artificial Sequence
  primer
gaaacaagagacatgggcctc

SEQ ID NO: 38086 - DNA, 38 bp, Artificial Sequence
  primer
gtaaaacgacggccagtcatgaccagggctgtccttag

SEQ ID NO: 38087 - DNA, 20 bp, Artificial Sequence
  primer
ctggtgagaggtctgcgttg

SEQ ID NO: 38088 - DNA, 37 bp, Artificial Sequence
  primer
gtaaaacgacggccagtatgaaatgggacaggtgcag

SEQ ID NO: 38089 - DNA, 21 bp, Artificial Sequence
  primer
cacctgggagcttggagttac

SEQ ID NO: 38090 - DNA, 21 bp, Artificial Sequence
  primer
tccctctcttgggtaatgagc

SEQ ID NO: 38091 - DNA, 36 bp, Artificial Sequence
  primer
gtaaaacgacggccagttttagggccacctggaaag

SEQ ID NO: 38092 - DNA, 38 bp, Artificial Sequence
  primer
gtaaaacgacggccagtagactgaactgacgacgttgg

SEQ ID NO: 38093 - DNA, 22 bp, Artificial Sequence
  primer
ccctctgtgagtatccatggtc

SEQ ID NO: 38094 - DNA, 38 bp, Artificial Sequence
  primer
gtaaaacgacggccagtaggtcgtgaaagctgtgtgtg

SEQ ID NO: 38095 - DNA, 38 bp, Artificial Sequence
  primer
gtaaaacgacggccagtaagtgtgcctgagactccaag

SEQ ID NO: 38096 - DNA, 38 bp, Artificial Sequence
  primer
gtaaaacgacggccagtatgcttgaaaccgtagcactg

SEQ ID NO: 38097 - DNA, 38 bp, Artificial Sequence
  primer
gtaaaacgacggccagtgcagatacttggaaaggctgg

SEQ ID NO: 38098 - DNA, 21 bp, Artificial Sequence
  primer
ataaagtgcactgggttgtcg

SEQ ID NO: 38099 - DNA, 39 bp, Artificial Sequence
  primer
gtaaaacgacggccagttggttctttgtgatgaactccc

SEQ ID NO: 38100 - DNA, 38 bp, Artificial Sequence
  primer
gtaaaacgacggccagtggctggccgaggagtaaatag

SEQ ID NO: 38101 - DNA, 20 bp, Artificial Sequence
  primer
gaggcctttacctgggactg

SEQ ID NO: 38102 - DNA, 38 bp, Artificial Sequence
  primer
gtaaaacgacggccagtatgtggagaattagggcaacc

SEQ ID NO: 38103 - DNA, 35 bp, Artificial Sequence
  primer
gtaaaacgacggccagtcctcctgggaagactggc

SEQ ID NO: 38104 - DNA, 37 bp, Artificial Sequence
  primer
gtaaaacgacggccagtatagcgggtgggatgacttc

SEQ ID NO: 38105 - DNA, 39 bp, Artificial Sequence
  primer
gtaaaacgacggccagtggaggctgaccatgatgtaaag

SEQ ID NO: 38106 - DNA, 38 bp, Artificial Sequence
  primer
gtaaaacgacggccagtaggatcagaaagcagccacag

SEQ ID NO: 38107 - DNA, 21 bp, Artificial Sequence
  primer
ctctagccgggcaaatacaag

SEQ ID NO: 38108 - DNA, 38 bp, Artificial Sequence
  primer
gtaaaacgacggccagtcaaggatccaggagggtacag

SEQ ID NO: 38109 - DNA, 38 bp, Artificial Sequence
  primer
gtaaaacgacggccagttgtccctgctctgctcatatc

SEQ ID NO: 38110 - DNA, 38 bp, Artificial Sequence
  primer
gtaaaacgacggccagtctggactgaaatgtcacagcg

SEQ ID NO: 38111 - DNA, 20 bp, Artificial Sequence
  primer
tcctgtgacctccagtctcc

SEQ ID NO: 38112 - DNA, 21 bp, Artificial Sequence
  primer
gaccacagtgtgagtgaagcc

SEQ ID NO: 38113 - DNA, 21 bp, Artificial Sequence
  primer
ctgggtaggagacaggacacc

SEQ ID NO: 38114 - DNA, 38 bp, Artificial Sequence
  primer
gtaaaacgacggccagtaaagaagagcccacagctgac

SEQ ID NO: 38115 - DNA, 38 bp, Artificial Sequence
  primer
gtaaaacgacggccagtgaatccacaagatggctcacc

SEQ ID NO: 38116 - DNA, 44 bp, Artificial Sequence
  primer
gtaaaacgacggccagtactgtaattctgactccagaagaaatc

SEQ ID NO: 38117 - DNA, 23 bp, Artificial Sequence
  primer
gctttacatatttcacacgctgg

SEQ ID NO: 38118 - DNA, 21 bp, Artificial Sequence
  primer
ggagaggaggaaatggtcatc

SEQ ID NO: 38119 - DNA, 39 bp, Artificial Sequence
  primer
gtaaaacgacggccagttgccataatgtgcacctagttc

SEQ ID NO: 38120 - DNA, 38 bp, Artificial Sequence
  primer
gtaaaacgacggccagttgccattaagaagtctgtgcc

SEQ ID NO: 38121 - DNA, 39 bp, Artificial Sequence
  primer
gtaaaacgacggccagttccaggctttaaagtcaagcac

SEQ ID NO: 38122 - DNA, 40 bp, Artificial Sequence
  primer
gtaaaacgacggccagtctccttgaatttagctgccttcc

SEQ ID NO: 38123 - DNA, 21 bp, Artificial Sequence
  primer
acttcagcagccataacagcc

SEQ ID NO: 38124 - DNA, 22 bp, Artificial Sequence
  primer
ttagacagtgctgagcgatttg

SEQ ID NO: 38125 - DNA, 24 bp, Artificial Sequence
  primer
tgggtaaattaatgaaagccacag

SEQ ID NO: 38126 - DNA, 24 bp, Artificial Sequence
  primer
catgaactcaatacctggcattac

SEQ ID NO: 38127 - DNA, 38 bp, Artificial Sequence
  primer
gtaaaacgacggccagttttgaagggtgagaacactgc

SEQ ID NO: 38128 - DNA, 23 bp, Artificial Sequence
  primer
agtttccgtcaatcttaagtccc

SEQ ID NO: 38129 - DNA, 21 bp, Artificial Sequence
  primer
gcccattaaagccaggttaag

SEQ ID NO: 38130 - DNA, 27 bp, Artificial Sequence
  primer
catttatgactaccatatcagcttgtg

SEQ ID NO: 38131 - DNA, 27 bp, Artificial Sequence
  primer
ttgaaacactttatgtttgtgattgac

SEQ ID NO: 38132 - DNA, 38 bp, Artificial Sequence
  primer
gtaaaacgacggccagttggcctctttcagtatttggg

SEQ ID NO: 38133 - DNA, 24 bp, Artificial Sequence
  primer
ggctggacatctgtatactagcac

SEQ ID NO: 38134 - DNA, 38 bp, Artificial Sequence
  primer
gtaaaacgacggccagttgcatttatggcatgtgaagc

SEQ ID NO: 38135 - DNA, 20 bp, Artificial Sequence
  primer
aaaccgactcagctggagag

SEQ ID NO: 38136 - DNA, 42 bp, Artificial Sequence
  primer
gtaaaacgacggccagttgtgactgacttcgttaaattaggc

SEQ ID NO: 38137 - DNA, 39 bp, Artificial Sequence
  primer
gtaaaacgacggccagtctatagccatgttggcttgatg

SEQ ID NO: 38138 - DNA, 37 bp, Artificial Sequence
  primer
gtaaaacgacggccagtatgctagttggcggaatgtg

SEQ ID NO: 38139 - DNA, 21 bp, Artificial Sequence
  primer
tttggcagagaaattctgaaa

SEQ ID NO: 38140 - DNA, 38 bp, Artificial Sequence
  primer
gtaaaacgacggccagtaaggtgacactttgggtgatg

SEQ ID NO: 38141 - DNA, 38 bp, Artificial Sequence
  primer
gtaaaacgacggccagttccaggctccataggaatcag

SEQ ID NO: 38142 - DNA, 36 bp, Artificial Sequence
  primer
gtaaaacgacggccagtgaccctgggaaacctggag

SEQ ID NO: 38143 - DNA, 43 bp, Artificial Sequence
  primer
gtaaaacgacggccagtgacttcaaacaataccatttggttac

SEQ ID NO: 38144 - DNA, 28 bp, Artificial Sequence
  primer
caatcctataaattgactagctgttgtg

SEQ ID NO: 38145 - DNA, 26 bp, Artificial Sequence
  primer
aatggcacattaatagaaactaggtg

SEQ ID NO: 38146 - DNA, 38 bp, Artificial Sequence
  primer
gtaaaacgacggccagtccgcagtagaagccatttctc

SEQ ID NO: 38147 - DNA, 38 bp, Artificial Sequence
  primer
gtaaaacgacggccagtttgaaatagcgttcaattgcc

SEQ ID NO: 38148 - DNA, 20 bp, Artificial Sequence
  primer
caggctcacctggatacgac

SEQ ID NO: 38149 - DNA, 22 bp, Artificial Sequence
  primer
gataatgatttgcaaaggcagc

SEQ ID NO: 38150 - DNA, 39 bp, Artificial Sequence
  primer
gtaaaacgacggccagttcctacacagtgaccaatgtcc

SEQ ID NO: 38151 - DNA, 38 bp, Artificial Sequence
  primer
gtaaaacgacggccagttttgagacttctgaccttggg

SEQ ID NO: 38152 - DNA, 25 bp, Artificial Sequence
  primer
aacttgtttgtgctagttgagcttc

SEQ ID NO: 38153 - DNA, 38 bp, Artificial Sequence
  primer
gtaaaacgacggccagttcctggaccacaaggtttagc

SEQ ID NO: 38154 - DNA, 41 bp, Artificial Sequence
  primer
gtaaaacgacggccagtcaacatgaaaggaaatctaaaggc

SEQ ID NO: 38155 - DNA, 38 bp, Artificial Sequence
  primer
gtaaaacgacggccagttgaggcagacagcgttatgtc

SEQ ID NO: 38156 - DNA, 43 bp, Artificial Sequence
  primer
gtaaaacgacggccagtgctgtacccaacttattgtaaattcc

SEQ ID NO: 38157 - DNA, 38 bp, Artificial Sequence
  primer
gtaaaacgacggccagtatagaaggagcccagaggcac

SEQ ID NO: 38158 - DNA, 22 bp, Artificial Sequence
  primer
ggtagaaaccgttcttctgctg

SEQ ID NO: 38159 - DNA, 23 bp, Artificial Sequence
  primer
gagggaaaggatgagacttgaaa

SEQ ID NO: 38160 - DNA, 44 bp, Artificial Sequence
  primer
gtaaaacgacggccagtacgtattgttgacatcctgtatctatg

SEQ ID NO: 38161 - DNA, 22 bp, Artificial Sequence
  primer
tgatcacctaccattctttggg

SEQ ID NO: 38162 - DNA, 23 bp, Artificial Sequence
  primer
tggtcaactcatgtagacattgc

SEQ ID NO: 38163 - DNA, 46 bp, Artificial Sequence
  primer
gtaaaacgacggccagtaggtgattagtccattaaagatgtaaact

SEQ ID NO: 38164 - DNA, 40 bp, Artificial Sequence
  primer
gtaaaacgacggccagttccctatgaaccaagttctacca

SEQ ID NO: 38165 - DNA, 39 bp, Artificial Sequence
  primer
gtaaaacgacggccagtcgactagaatgtagaaaggccc

SEQ ID NO: 38166 - DNA, 44 bp, Artificial Sequence
  primer
gtaaaacgacggccagtcagctagaatagcttactttatgacaa

SEQ ID NO: 38167 - DNA, 21 bp, Artificial Sequence
  primer
aagtgtctgggaaggttgctg

SEQ ID NO: 38168 - DNA, 38 bp, Artificial Sequence
  primer
gtaaaacgacggccagtgcacaaagtttcccaacttcc

SEQ ID NO: 38169 - DNA, 21 bp, Artificial Sequence
  primer
ctctatcctggagtcctgggc

SEQ ID NO: 38170 - DNA, 37 bp, Artificial Sequence
  primer
gtaaaacgacggccagtagttggagtaggaggcctgg

SEQ ID NO: 38171 - DNA, 37 bp, Artificial Sequence
  primer
gtaaaacgacggccagtcctcacagatggcaggtgag

SEQ ID NO: 38172 - DNA, 23 bp, Artificial Sequence
  primer
ccctgataggatctttccttctc

SEQ ID NO: 38173 - DNA, 38 bp, Artificial Sequence
  primer
gtaaaacgacggccagtagtcatattcctgagccaccc

SEQ ID NO: 38174 - DNA, 37 bp, Artificial Sequence
  primer
gtaaaacgacggccagtgagcctcctctgtccctgtc

SEQ ID NO: 38175 - DNA, 38 bp, Artificial Sequence
  primer
gtaaaacgacggccagtatgccacgatcctagaggttg

SEQ ID NO: 38176 - DNA, 21 bp, Artificial Sequence
  primer
cagcagtctctggatttcacg

SEQ ID NO: 38177 - DNA, 37 bp, Artificial Sequence
  primer
gtaaaacgacggccagtgggtgctggagagaaaggag

SEQ ID NO: 38178 - DNA, 21 bp, Artificial Sequence
  primer
gggaggtcagcctgaggttag

SEQ ID NO: 38179 - DNA, 21 bp, Artificial Sequence
  primer
gccatgatccctctttgattc

SEQ ID NO: 38180 - DNA, 38 bp, Artificial Sequence
  primer
gtaaaacgacggccagtgatgccggtaagaaggagatg

SEQ ID NO: 38181 - DNA, 21 bp, Artificial Sequence
  primer
aggtgtggacatagtgggagg

SEQ ID NO: 38182 - DNA, 21 bp, Artificial Sequence
  primer
atagagcctcggcgtaaggag

SEQ ID NO: 38183 - DNA, 21 bp, Artificial Sequence
  primer
gggtacagtggcacacacttg

SEQ ID NO: 38184 - DNA, 39 bp, Artificial Sequence
  primer
gtaaaacgacggccagtgttgatgatgaagttgggttcc

SEQ ID NO: 38185 - DNA, 38 bp, Artificial Sequence
  primer
gtaaaacgacggccagtaggctcatccttgactcttgg

SEQ ID NO: 38186 - DNA, 38 bp, Artificial Sequence
  primer
gtaaaacgacggccagtgtcatgatccctgtgtccctc

SEQ ID NO: 38187 - DNA, 38 bp, Artificial Sequence
  primer
gtaaaacgacggccagtcttagtctgcaggttcccagg

SEQ ID NO: 38188 - DNA, 38 bp, Artificial Sequence
  primer
gtaaaacgacggccagtgggttgtaccttcctgttccc

SEQ ID NO: 38189 - DNA, 38 bp, Artificial Sequence
  primer
gtaaaacgacggccagtacctgcatctctcggtgtctc

SEQ ID NO: 38190 - DNA, 21 bp, Artificial Sequence
  primer
ccaaaggcaatgtggtatgtg

SEQ ID NO: 38191 - DNA, 21 bp, Artificial Sequence
  primer
cttagaccgtgaccaggcttc

SEQ ID NO: 38192 - DNA, 38 bp, Artificial Sequence
  primer
gtaaaacgacggccagtatttcttaaccttgaggcggc

SEQ ID NO: 38193 - DNA, 38 bp, Artificial Sequence
  primer
gtaaaacgacggccagtctgagcacctctgtctctccc

SEQ ID NO: 38194 - DNA, 37 bp, Artificial Sequence
  primer
gtaaaacgacggccagtgagaaccatgagctgggaaa

SEQ ID NO: 38195 - DNA, 22 bp, Artificial Sequence
  primer
gggactatcctggctgctttag

SEQ ID NO: 38196 - DNA, 37 bp, Artificial Sequence
  primer
gtaaaacgacggccagtggagagggagtcccaatcat

SEQ ID NO: 38197 - DNA, 36 bp, Artificial Sequence
  primer
gtaaaacgacggccagtgaccagctccagatgaggg

SEQ ID NO: 38198 - DNA, 37 bp, Artificial Sequence
  primer
gtaaaacgacggccagtatcccattagcccattcacc

SEQ ID NO: 38199 - DNA, 38 bp, Artificial Sequence
  primer
gtaaaacgacggccagtgagaagagggctgccttgtag

SEQ ID NO: 38200 - DNA, 21 bp, Artificial Sequence
  primer
agacagctttctgggtctgtg

SEQ ID NO: 38201 - DNA, 21 bp, Artificial Sequence
  primer
agtggagaggtcatctgtggg

SEQ ID NO: 38202 - DNA, 21 bp, Artificial Sequence
  primer
ggacctggaagacttggtctc

SEQ ID NO: 38203 - DNA, 21 bp, Artificial Sequence
  primer
gtctccaacccaaagggctac

SEQ ID NO: 38204 - DNA, 38 bp, Artificial Sequence
  primer
gtaaaacgacggccagtgagtgaggtcaccctcattgg

SEQ ID NO: 38205 - DNA, 21 bp, Artificial Sequence
  primer
ggccagattcctgatcctatc

SEQ ID NO: 38206 - DNA, 38 bp, Artificial Sequence
  primer
gtaaaacgacggccagttgtcttaggccctcaggtcag

SEQ ID NO: 38207 - DNA, 38 bp, Artificial Sequence
  primer
gtaaaacgacggccagtgacctcctggtgaacaaggtc

SEQ ID NO: 38208 - DNA, 37 bp, Artificial Sequence
  primer
gtaaaacgacggccagtcagtcccaggagagaggtgg

SEQ ID NO: 38209 - DNA, 38 bp, Artificial Sequence
  primer
gtaaaacgacggccagtctcagaactcagtgcctggtg

SEQ ID NO: 38210 - DNA, 36 bp, Artificial Sequence
  primer
gtaaaacgacggccagtctagggcctcctcagggtc

SEQ ID NO: 38211 - DNA, 38 bp, Artificial Sequence
  primer
gtaaaacgacggccagtggttcacagagaggaagggtc

SEQ ID NO: 38212 - DNA, 21 bp, Artificial Sequence
  primer
gtctgatcccatctgttggtg

SEQ ID NO: 38213 - DNA, 38 bp, Artificial Sequence
  primer
gtaaaacgacggccagtctcagtcttgacccttgagcc

SEQ ID NO: 38214 - DNA, 21 bp, Artificial Sequence
  primer
tttgggcagaaaggagatgac

SEQ ID NO: 38215 - DNA, 38 bp, Artificial Sequence
  primer
gtaaaacgacggccagtggtatctgtggtcaatgtggc

SEQ ID NO: 38216 - DNA, 22 bp, Artificial Sequence
  primer
ccactggatcagaggtgagaac

SEQ ID NO: 38217 - DNA, 21 bp, Artificial Sequence
  primer
agaaggtgagtgagggaaggc

SEQ ID NO: 38218 - DNA, 38 bp, Artificial Sequence
  primer
gtaaaacgacggccagtcccttggacaacctaggctac

SEQ ID NO: 38219 - DNA, 38 bp, Artificial Sequence
  primer
gtaaaacgacggccagtgaatgttcgctctaccaagcc

SEQ ID NO: 38220 - DNA, 36 bp, Artificial Sequence
  primer
gtaaaacgacggccagtcacagacctgggcactgac

SEQ ID NO: 38221 - DNA, 38 bp, Artificial Sequence
  primer
gtaaaacgacggccagtcaggaatgtgagcagcttgag

SEQ ID NO: 38222 - DNA, 21 bp, Artificial Sequence
  primer
ccactcacccagacctcattc

SEQ ID NO: 38223 - DNA, 38 bp, Artificial Sequence
  primer
gtaaaacgacggccagtctctgtgcacctactccctcc

SEQ ID NO: 38224 - DNA, 19 bp, Artificial Sequence
  primer
atcccatcaccgtttggag

SEQ ID NO: 38225 - DNA, 38 bp, Artificial Sequence
  primer
gtaaaacgacggccagtgcctactctgaccatcccttg

SEQ ID NO: 38226 - DNA, 38 bp, Artificial Sequence
  primer
gtaaaacgacggccagtagattggtgcatcctctgctc

SEQ ID NO: 38227 - DNA, 21 bp, Artificial Sequence
  primer
tcctttggtaggattgaaggc

SEQ ID NO: 38228 - DNA, 21 bp, Artificial Sequence
  primer
accaatactgacccgatgtcc

SEQ ID NO: 38229 - DNA, 20 bp, Artificial Sequence
  primer
cccaaggctgtatgtgtgtg

SEQ ID NO: 38230 - DNA, 38 bp, Artificial Sequence
  primer
gtaaaacgacggccagtctgcctgtctctctttctccc

SEQ ID NO: 38231 - DNA, 20 bp, Artificial Sequence
  primer
acctgcctgatggtgaggtc

SEQ ID NO: 38232 - DNA, 38 bp, Artificial Sequence
  primer
gtaaaacgacggccagtactgtgtgaggagggaaatgc

SEQ ID NO: 38233 - DNA, 37 bp, Artificial Sequence
  primer
gtaaaacgacggccagtagtggatggagattccaggg

SEQ ID NO: 38234 - DNA, 21 bp, Artificial Sequence
  primer
gagctgtctttcaaccagacg

SEQ ID NO: 38235 - DNA, 18 bp, Artificial Sequence
  primer
ctccgctctcactctggc

SEQ ID NO: 38236 - DNA, 18 bp, Artificial Sequence
  primer
aggcacaggagcggtttg

SEQ ID NO: 38237 - DNA, 21 bp, Artificial Sequence
  primer
gcaagtccagctgtgtgtcag

SEQ ID NO: 38238 - DNA, 37 bp, Artificial Sequence
  primer
gtaaaacgacggccagtgagacagggaccagcacctc

SEQ ID NO: 38239 - DNA, 36 bp, Artificial Sequence
  primer
gtaaaacgacggccagtgagggtgtgggttctccag

SEQ ID NO: 38240 - DNA, 38 bp, Artificial Sequence
  primer
gtaaaacgacggccagtcatcgtggacatgatcgtgag

SEQ ID NO: 38241 - DNA, 20 bp, Artificial Sequence
  primer
cgtgtccacctgtgtgtctg

SEQ ID NO: 38242 - DNA, 19 bp, Artificial Sequence
  primer
ccgtatgtccgtggctttc

SEQ ID NO: 38243 - DNA, 19 bp, Artificial Sequence
  primer
agacaggaacgaaggcagg

SEQ ID NO: 38244 - DNA, 38 bp, Artificial Sequence
  primer
gtaaaacgacggccagtctccttggcccaaatcctatc

SEQ ID NO: 38245 - DNA, 21 bp, Artificial Sequence
  primer
accagggaatgaaggtacgtg

SEQ ID NO: 38246 - DNA, 35 bp, Artificial Sequence
  primer
gtaaaacgacggccagtgttaccctctgcggagcc

SEQ ID NO: 38247 - DNA, 21 bp, Artificial Sequence
  primer
cccatgattctcagcagtgat

SEQ ID NO: 38248 - DNA, 37 bp, Artificial Sequence
  primer
gtaaaacgacggccagtgtctgctaggcagggctttc

SEQ ID NO: 38249 - DNA, 37 bp, Artificial Sequence
  primer
gtaaaacgacggccagtagtttacccacttggccgtc

SEQ ID NO: 38250 - DNA, 38 bp, Artificial Sequence
  primer
gtaaaacgacggccagtgcctgaagtatgggtgagagg

SEQ ID NO: 38251 - DNA, 21 bp, Artificial Sequence
  primer
gcctgaagtatgggtgagagg

SEQ ID NO: 38252 - DNA, 21 bp, Artificial Sequence
  primer
cttctgatcctctttgctcgg

SEQ ID NO: 38253 - DNA, 21 bp, Artificial Sequence
  primer
gatgcctcttcccacagtctc

SEQ ID NO: 38254 - DNA, 38 bp, Artificial Sequence
  primer
gtaaaacgacggccagtaagatagccatagccagccac

SEQ ID NO: 38255 - DNA, 21 bp, Artificial Sequence
  primer
accaaagtcatctgggagagg

SEQ ID NO: 38256 - DNA, 37 bp, Artificial Sequence
  primer
gtaaaacgacggccagtactctatggccctgggtgtc

SEQ ID NO: 38257 - DNA, 35 bp, Artificial Sequence
  primer
gtaaaacgacggccagtccacagtcggcacctgag

SEQ ID NO: 38258 - DNA, 35 bp, Artificial Sequence
  primer
gtaaaacgacggccagtaggaacatgcccaagctg

SEQ ID NO: 38259 - DNA, 20 bp, Artificial Sequence
  primer
ccaggaaatgtgtgtggtgg

SEQ ID NO: 38260 - DNA, 21 bp, Artificial Sequence
  primer
gacgatgtaagtgtggatggg

SEQ ID NO: 38261 - DNA, 36 bp, Artificial Sequence
  primer
gtaaaacgacggccagtcctcacagcaccgtcactg

SEQ ID NO: 38262 - DNA, 21 bp, Artificial Sequence
  primer
gtttctatgaccacgtcaggg

SEQ ID NO: 38263 - DNA, 21 bp, Artificial Sequence
  primer
cctgggtctctgggtacatcc

SEQ ID NO: 38264 - DNA, 20 bp, Artificial Sequence
  primer
caacgtgtcaggtgaggatg

SEQ ID NO: 38265 - DNA, 21 bp, Artificial Sequence
  primer
ttcatccaccaaggaagattg

SEQ ID NO: 38266 - DNA, 36 bp, Artificial Sequence
  primer
gtaaaacgacggccagtaacgtgcaggagctcaagg

SEQ ID NO: 38267 - DNA, 36 bp, Artificial Sequence
  primer
gtaaaacgacggccagtcatcgccctggtcatcact

SEQ ID NO: 38268 - DNA, 38 bp, Artificial Sequence
  primer
gtaaaacgacggccagtagctcactgttacctccaggg

SEQ ID NO: 38269 - DNA, 38 bp, Artificial Sequence
  primer
gtaaaacgacggccagtagtaggtgcatggctcactcc

SEQ ID NO: 38270 - DNA, 38 bp, Artificial Sequence
  primer
gtaaaacgacggccagtcagccacaactttgacaccac

SEQ ID NO: 38271 - DNA, 21 bp, Artificial Sequence
  primer
gctatgtgacccgcttctacc

SEQ ID NO: 38272 - DNA, 38 bp, Artificial Sequence
  primer
gtaaaacgacggccagtggcacccactaaacatctgtg

SEQ ID NO: 38273 - DNA, 38 bp, Artificial Sequence
  primer
gtaaaacgacggccagtgaggtcaaacccacaaacagg

SEQ ID NO: 38274 - DNA, 38 bp, Artificial Sequence
  primer
gtaaaacgacggccagtatccacgtgtacttcgtgctg

SEQ ID NO: 38275 - DNA, 18 bp, Artificial Sequence
  primer
ctggccaacatgacggag

SEQ ID NO: 38276 - DNA, 38 bp, Artificial Sequence
  primer
gtaaaacgacggccagtatcatcaaggtcatggtgagc

SEQ ID NO: 38277 - DNA, 38 bp, Artificial Sequence
  primer
gtaaaacgacggccagtagagtcgtgggctacacgttc

SEQ ID NO: 38278 - DNA, 38 bp, Artificial Sequence
  primer
gtaaaacgacggccagtaccaagacttctccacttggg

SEQ ID NO: 38279 - DNA, 38 bp, Artificial Sequence
  primer
gtaaaacgacggccagtagacaggtgagtgtccttgcc

SEQ ID NO: 38280 - DNA, 38 bp, Artificial Sequence
  primer
gtaaaacgacggccagtgagaacactagatgccagcgg

SEQ ID NO: 38281 - DNA, 20 bp, Artificial Sequence
  primer
tttctcagtggtggctttgg

SEQ ID NO: 38282 - DNA, 38 bp, Artificial Sequence
  primer
gtaaaacgacggccagtgctttcctcctacacagggtg

SEQ ID NO: 38283 - DNA, 36 bp, Artificial Sequence
  primer
gtaaaacgacggccagtgtcttggtcgttggcacac

SEQ ID NO: 38284 - DNA, 21 bp, Artificial Sequence
  primer
caaacttcggtgtcactggac

SEQ ID NO: 38285 - DNA, 21 bp, Artificial Sequence
  primer
tttctgtccaccttccctcag

SEQ ID NO: 38286 - DNA, 21 bp, Artificial Sequence
  primer
ttccgctggaagataataggg

SEQ ID NO: 38287 - DNA, 38 bp, Artificial Sequence
  primer
gtaaaacgacggccagtcctgtagagaaggagcatcgg

SEQ ID NO: 38288 - DNA, 38 bp, Artificial Sequence
  primer
gtaaaacgacggccagtaggagctatgggtgaaacagg

SEQ ID NO: 38289 - DNA, 37 bp, Artificial Sequence
  primer
gtaaaacgacggccagtctgcagtgtccacaggattg

SEQ ID NO: 38290 - DNA, 37 bp, Artificial Sequence
  primer
gtaaaacgacggccagtgacccaggttgtggagtcag

SEQ ID NO: 38291 - DNA, 20 bp, Artificial Sequence
  primer
gctcacagccagaactcgac

SEQ ID NO: 38292 - DNA, 38 bp, Artificial Sequence
  primer
gtaaaacgacggccagttcacccagagtgtgaatgagc

SEQ ID NO: 38293 - DNA, 38 bp, Artificial Sequence
  primer
gtaaaacgacggccagtagatgctcccgtttaaaggac

SEQ ID NO: 38294 - DNA, 21 bp, Artificial Sequence
  primer
ggcacagccttgtcttactcc

SEQ ID NO: 38295 - DNA, 20 bp, Artificial Sequence
  primer
aggtaggttggtggccagtc

SEQ ID NO: 38296 - DNA, 38 bp, Artificial Sequence
  primer
gtaaaacgacggccagtgaggttggtagggacaggacc

SEQ ID NO: 38297 - DNA, 21 bp, Artificial Sequence
  primer
gacctacgtgagggagacctg

SEQ ID NO: 38298 - DNA, 38 bp, Artificial Sequence
  primer
gtaaaacgacggccagtaacttcgtcatcaacgtggtc

SEQ ID NO: 38299 - DNA, 21 bp, Artificial Sequence
  primer
acgtatcgactccctgtcgag

SEQ ID NO: 38300 - DNA, 21 bp, Artificial Sequence
  primer
gcctgtctaggcagatcagtg

SEQ ID NO: 38301 - DNA, 37 bp, Artificial Sequence
  primer
gtaaaacgacggccagtagagcccagtggtctgtgag

SEQ ID NO: 38302 - DNA, 20 bp, Artificial Sequence
  primer
tggacatcgtcttcctgctg

SEQ ID NO: 38303 - DNA, 38 bp, Artificial Sequence
  primer
gtaaaacgacggccagttacctgaactccttctcgcac

SEQ ID NO: 38304 - DNA, 37 bp, Artificial Sequence
  primer
gtaaaacgacggccagtaaatgccgctcttcactctg

SEQ ID NO: 38305 - DNA, 38 bp, Artificial Sequence
  primer
gtaaaacgacggccagttttaccaccgcaagctttctc

SEQ ID NO: 38306 - DNA, 38 bp, Artificial Sequence
  primer
gtaaaacgacggccagtaaaggacgtagaaagcatggg

SEQ ID NO: 38307 - DNA, 21 bp, Artificial Sequence
  primer
cctggttcccaggtaagtgag

SEQ ID NO: 38308 - DNA, 21 bp, Artificial Sequence
  primer
aacccacataccgagttcctg

SEQ ID NO: 38309 - DNA, 38 bp, Artificial Sequence
  primer
gtaaaacgacggccagttttgtttgcccatatttcgtg

SEQ ID NO: 38310 - DNA, 21 bp, Artificial Sequence
  primer
tccttggacacctactccacc

SEQ ID NO: 38311 - DNA, 38 bp, Artificial Sequence
  primer
gtaaaacgacggccagtttgaattgtgcttggtaaggc

SEQ ID NO: 38312 - DNA, 38 bp, Artificial Sequence
  primer
gtaaaacgacggccagtatcttatccaggtggcagtgg

SEQ ID NO: 38313 - DNA, 38 bp, Artificial Sequence
  primer
gtaaaacgacggccagtcatgtgtgcacgtgttgtagg

SEQ ID NO: 38314 - DNA, 21 bp, Artificial Sequence
  primer
gtgcgcgactttgtaatgaac

SEQ ID NO: 38315 - DNA, 38 bp, Artificial Sequence
  primer
gtaaaacgacggccagttggtttcctgttatgctctcg

SEQ ID NO: 38316 - DNA, 38 bp, Artificial Sequence
  primer
gtaaaacgacggccagtatgagctcaatgtgaagccag

SEQ ID NO: 38317 - DNA, 38 bp, Artificial Sequence
  primer
gtaaaacgacggccagtggctaattccagggtaatccc

SEQ ID NO: 38318 - DNA, 21 bp, Artificial Sequence
  primer
tgtccagagagtggtggaaag

SEQ ID NO: 38319 - DNA, 21 bp, Artificial Sequence
  primer
gtcctgaggaacatcctggtc

SEQ ID NO: 38320 - DNA, 38 bp, Artificial Sequence
  primer
gtaaaacgacggccagtgtcacgtccttcccaagtacc

SEQ ID NO: 38321 - DNA, 38 bp, Artificial Sequence
  primer
gtaaaacgacggccagtgtctttctcatcgatgggtcc

SEQ ID NO: 38322 - DNA, 19 bp, Artificial Sequence
  primer
tttcacgatcgccaggaac

SEQ ID NO: 38323 - DNA, 21 bp, Artificial Sequence
  primer
cctgggttgagggctacttac

SEQ ID NO: 38324 - DNA, 37 bp, Artificial Sequence
  primer
gtaaaacgacggccagtgctctcgaatttgtggcaag

SEQ ID NO: 38325 - DNA, 21 bp, Artificial Sequence
  primer
ggctaaagaggcatggatttg

SEQ ID NO: 38326 - DNA, 21 bp, Artificial Sequence
  primer
aggcagattattgacgccatc

SEQ ID NO: 38327 - DNA, 37 bp, Artificial Sequence
  primer
gtaaaacgacggccagtctgggttgtccctactgctg

SEQ ID NO: 38328 - DNA, 21 bp, Artificial Sequence
  primer
taatcattcctcaacttgggc

SEQ ID NO: 38329 - DNA, 38 bp, Artificial Sequence
  primer
gtaaaacgacggccagtccggaaacaattattcagcag

SEQ ID NO: 38330 - DNA, 21 bp, Artificial Sequence
  primer
ttcatctcacaccgtgaaacc

SEQ ID NO: 38331 - DNA, 38 bp, Artificial Sequence
  primer
gtaaaacgacggccagtcagtaacagggaaagccatgc

SEQ ID NO: 38332 - DNA, 21 bp, Artificial Sequence
  primer
gtgaaatctgctttctgctgc

SEQ ID NO: 38333 - DNA, 38 bp, Artificial Sequence
  primer
gtaaaacgacggccagtggtgagagaggaatccaaagg

SEQ ID NO: 38334 - DNA, 38 bp, Artificial Sequence
  primer
gtaaaacgacggccagtttcccaggagagaaggtatgc

SEQ ID NO: 38335 - DNA, 38 bp, Artificial Sequence
  primer
gtaaaacgacggccagtaaattggactggatggtctgg

SEQ ID NO: 38336 - DNA, 21 bp, Artificial Sequence
  primer
tttgccttcatggtgaatgag

SEQ ID NO: 38337 - DNA, 38 bp, Artificial Sequence
  primer
gtaaaacgacggccagtggatgttacctggatgggttg

SEQ ID NO: 38338 - DNA, 38 bp, Artificial Sequence
  primer
gtaaaacgacggccagtgagtgtactgaagtccggtgc

SEQ ID NO: 38339 - DNA, 38 bp, Artificial Sequence
  primer
gtaaaacgacggccagtgctgatgaggtgtggtttctg

SEQ ID NO: 38340 - DNA, 38 bp, Artificial Sequence
  primer
gtaaaacgacggccagtccgctttgatcatctgttacc

SEQ ID NO: 38341 - DNA, 38 bp, Artificial Sequence
  primer
gtaaaacgacggccagtattcacgatctggattgaggc

SEQ ID NO: 38342 - DNA, 38 bp, Artificial Sequence
  primer
gtaaaacgacggccagtaatttgtgcatgccatttctg

SEQ ID NO: 38343 - DNA, 37 bp, Artificial Sequence
  primer
gtaaaacgacggccagtcatgttgcagcacccttacc

SEQ ID NO: 38344 - DNA, 38 bp, Artificial Sequence
  primer
gtaaaacgacggccagttcaaggatccacttctcaggg

SEQ ID NO: 38345 - DNA, 38 bp, Artificial Sequence
  primer
gtaaaacgacggccagtctgaggattatccaagcgtcc

SEQ ID NO: 38346 - DNA, 38 bp, Artificial Sequence
  primer
gtaaaacgacggccagtaaagtgtgacccacacgtctc

SEQ ID NO: 38347 - DNA, 38 bp, Artificial Sequence
  primer
gtaaaacgacggccagttgatggagtcccttgggttag

SEQ ID NO: 38348 - DNA, 38 bp, Artificial Sequence
  primer
gtaaaacgacggccagtagggaaacacatttgctccag

SEQ ID NO: 38349 - DNA, 39 bp, Artificial Sequence
  primer
gtaaaacgacggccagttcgatgtaagttgcatgtgtcc

SEQ ID NO: 38350 - DNA, 21 bp, Artificial Sequence
  primer
ttaaagcaatgtgccctcatc

SEQ ID NO: 38351 - DNA, 21 bp, Artificial Sequence
  primer
ttaaagcaatgtgccctcatc

SEQ ID NO: 38352 - DNA, 21 bp, Artificial Sequence
  primer
caccctctactttccacaggg

SEQ ID NO: 38353 - DNA, 39 bp, Artificial Sequence
  primer
gtaaaacgacggccagtctgccctattgggaagttaatc

SEQ ID NO: 38354 - DNA, 38 bp, Artificial Sequence
  primer
gtaaaacgacggccagtagctgtgttatcctgctgtgg

SEQ ID NO: 38355 - DNA, 38 bp, Artificial Sequence
  primer
gtaaaacgacggccagttcagacaactggacatgagcc

SEQ ID NO: 38356 - DNA, 21 bp, Artificial Sequence
  primer
ggaggtatacaccttcgccag

SEQ ID NO: 38357 - DNA, 21 bp, Artificial Sequence
  primer
atggatccaatgccatcatac

SEQ ID NO: 38358 - DNA, 21 bp, Artificial Sequence
  primer
tacatccaacccagtgacgac

SEQ ID NO: 38359 - DNA, 21 bp, Artificial Sequence
  primer
cctctctcgctcatgcactac

SEQ ID NO: 38360 - DNA, 21 bp, Artificial Sequence
  primer
cattaatcacagcaggcaacc

SEQ ID NO: 38361 - DNA, 21 bp, Artificial Sequence
  primer
ctgccacagtagggtcatcag

SEQ ID NO: 38362 - DNA, 21 bp, Artificial Sequence
  primer
agagggcctttgatggtactg

SEQ ID NO: 38363 - DNA, 37 bp, Artificial Sequence
  primer
gtaaaacgacggccagtgggtaggagaccggaacatc

SEQ ID NO: 38364 - DNA, 36 bp, Artificial Sequence
  primer
gtaaaacgacggccagtgcaggcaagaccaggactc

SEQ ID NO: 38365 - DNA, 38 bp, Artificial Sequence
  primer
gtaaaacgacggccagtcctggtttgcataagatgagg

SEQ ID NO: 38366 - DNA, 38 bp, Artificial Sequence
  primer
gtaaaacgacggccagtctcaagagagcctgatacccg

SEQ ID NO: 38367 - DNA, 37 bp, Artificial Sequence
  primer
gtaaaacgacggccagtctaccatgcctcccaagatg

SEQ ID NO: 38368 - DNA, 21 bp, Artificial Sequence
  primer
ggtcaagctatttgctgtggg

SEQ ID NO: 38369 - DNA, 38 bp, Artificial Sequence
  primer
gtaaaacgacggccagttgctgattccatcctatgtgc

SEQ ID NO: 38370 - DNA, 38 bp, Artificial Sequence
  primer
gtaaaacgacggccagtgtgactggctacaaggtccag

SEQ ID NO: 38371 - DNA, 36 bp, Artificial Sequence
  primer
gtaaaacgacggccagtgagcaattctgccagcctc

SEQ ID NO: 38372 - DNA, 21 bp, Artificial Sequence
  primer
gtgagtgagagatgtgggctg

SEQ ID NO: 38373 - DNA, 37 bp, Artificial Sequence
  primer
gtaaaacgacggccagtgaccgtgagcaccctatttg

SEQ ID NO: 38374 - DNA, 38 bp, Artificial Sequence
  primer
gtaaaacgacggccagtctcctttcctggaacttggtg

SEQ ID NO: 38375 - DNA, 37 bp, Artificial Sequence
  primer
gtaaaacgacggccagtatgtgacccgctaccagttg

SEQ ID NO: 38376 - DNA, 21 bp, Artificial Sequence
  primer
ccatatcccagctctctggtc

SEQ ID NO: 38377 - DNA, 38 bp, Artificial Sequence
  primer
gtaaaacgacggccagtagtactgcaggaggcttgtgg

SEQ ID NO: 38378 - DNA, 21 bp, Artificial Sequence
  primer
atttcggattagctggagcac

SEQ ID NO: 38379 - DNA, 38 bp, Artificial Sequence
  primer
gtaaaacgacggccagtcctccactggacctattcacc

SEQ ID NO: 38380 - DNA, 38 bp, Artificial Sequence
  primer
gtaaaacgacggccagtatacagggtttcctggcactc

SEQ ID NO: 38381 - DNA, 21 bp, Artificial Sequence
  primer
gctgcctaaagtgacctgtcc

SEQ ID NO: 38382 - DNA, 38 bp, Artificial Sequence
  primer
gtaaaacgacggccagtgagtgaaggtatggctccctg

SEQ ID NO: 38383 - DNA, 21 bp, Artificial Sequence
  primer
gaccaggattggtagtgagcc

SEQ ID NO: 38384 - DNA, 38 bp, Artificial Sequence
  primer
gtaaaacgacggccagttaacagagccagtgaagtggg

SEQ ID NO: 38385 - DNA, 21 bp, Artificial Sequence
  primer
tcaataagacaaaccggaccc

SEQ ID NO: 38386 - DNA, 38 bp, Artificial Sequence
  primer
gtaaaacgacggccagtccagctacatcctatcctggc

SEQ ID NO: 38387 - DNA, 38 bp, Artificial Sequence
  primer
gtaaaacgacggccagtacagacgccaggtatagtggg

SEQ ID NO: 38388 - DNA, 21 bp, Artificial Sequence
  primer
tgtgtttctccaggctctgtg

SEQ ID NO: 38389 - DNA, 38 bp, Artificial Sequence
  primer
gtaaaacgacggccagttcccatgaccttggcattatc

SEQ ID NO: 38390 - DNA, 39 bp, Artificial Sequence
  primer
gtaaaacgacggccagtaggcttctggtaaggagtaggc

SEQ ID NO: 38391 - DNA, 39 bp, Artificial Sequence
  primer
gtaaaacgacggccagtcaggcatccttcactactcagg

SEQ ID NO: 38392 - DNA, 39 bp, Artificial Sequence; identical to SEQ ID NO: 38391
  primer

SEQ ID NO: 38393 - DNA, 21 bp, Artificial Sequence
  primer
ccactctgacccacatctgac

SEQ ID NO: 38394 - DNA, 38 bp, Artificial Sequence
  primer
gtaaaacgacggccagtgattacccttcctagggcctg

SEQ ID NO: 38395 - DNA, 38 bp, Artificial Sequence
  primer
gtaaaacgacggccagtgaattgggctctgtgaagctc

SEQ ID NO: 38396 - DNA, 37 bp, Artificial Sequence
  primer
gtaaaacgacggccagtacctcttcacctcctcaggg

SEQ ID NO: 38397 - DNA, 38 bp, Artificial Sequence
  primer
gtaaaacgacggccagtgtcttcccagggttcttccac

SEQ ID NO: 38398 - DNA, 38 bp, Artificial Sequence
  primer
gtaaaacgacggccagtcgcgaataggaatagctggac

SEQ ID NO: 38399 - DNA, 20 bp, Artificial Sequence
  primer
gaccctggaccatcggtaag

SEQ ID NO: 38400 - DNA, 38 bp, Artificial Sequence
  primer
gtaaaacgacggccagtagtgccatgtgatgcagagac

SEQ ID NO: 38401 - DNA, 38 bp, Artificial Sequence
  primer
gtaaaacgacggccagtatctttgggagtgaggtgtgg

SEQ ID NO: 38402 - DNA, 20 bp, Artificial Sequence
  primer
ctgttcattccctgacctgc

SEQ ID NO: 38403 - DNA, 21 bp, Artificial Sequence
  primer
aggctgacttgatgatgtccc

SEQ ID NO: 38404 - DNA, 38 bp, Artificial Sequence
  primer
gtaaaacgacggccagtagggtgactctgaggatggag

SEQ ID NO: 38405 - DNA, 21 bp, Artificial Sequence
  primer
agagttccctccaggtcagag

SEQ ID NO: 38406 - DNA, 38 bp, Artificial Sequence
  primer
gtaaaacgacggccagtagaaggtaagtgcaacctggg

SEQ ID NO: 38407 - DNA, 38 bp, Artificial Sequence
  primer
gtaaaacgacggccagtaaatcccaatcttccctgacc

SEQ ID NO: 38408 - DNA, 21 bp, Artificial Sequence
  primer
cagcctctagccctgtctgtc

SEQ ID NO: 38409 - DNA, 21 bp, Artificial Sequence
  primer
tactagggatgtggcagatgg

SEQ ID NO: 38410 - DNA, 38 bp, Artificial Sequence
  primer
gtaaaacgacggccagtgcggtgactctgtgacttctg

SEQ ID NO: 38411 - DNA, 22 bp, Artificial Sequence
  primer
ggaggtttctacagggttgagg

SEQ ID NO: 38412 - DNA, 38 bp, Artificial Sequence
  primer
gtaaaacgacggccagtgaacgggtaagtgaagcgaag

SEQ ID NO: 38413 - DNA, 38 bp, Artificial Sequence
  primer
gtaaaacgacggccagtcttatccttccatccacaggg

SEQ ID NO: 38414 - DNA, 21 bp, Artificial Sequence
  primer
agtgagtacccgttaccctgg

SEQ ID NO: 38415 - DNA, 21 bp, Artificial Sequence
  primer
ctcctggagagaagggagacc

SEQ ID NO: 38416 - DNA, 38 bp, Artificial Sequence
  primer
gtaaaacgacggccagtaccagttcatccatccactcc

SEQ ID NO: 38417 - DNA, 37 bp, Artificial Sequence
  primer
gtaaaacgacggccagtggcagtgtagcgggtcatag

SEQ ID NO: 38418 - DNA, 21 bp, Artificial Sequence
  primer
caaccagccaattcccaatac

SEQ ID NO: 38419 - DNA, 20 bp, Artificial Sequence
  primer
ctcagaagggatggagggtc

SEQ ID NO: 38420 - DNA, 21 bp, Artificial Sequence
  primer
ctttggctccacatcatgtcc

SEQ ID NO: 38421 - DNA, 38 bp, Artificial Sequence
  primer
gtaaaacgacggccagtggtggagggtaagaaagaccc

SEQ ID NO: 38422 - DNA, 21 bp, Artificial Sequence
  primer
ggaaagggtgagtgtgattgg

SEQ ID NO: 38423 - DNA, 38 bp, Artificial Sequence
  primer
gtaaaacgacggccagtggaaagggtgagtgtgattgg

SEQ ID NO: 38424 - DNA, 38 bp, Artificial Sequence
  primer
gtaaaacgacggccagtttatctgaccctgttccctcc

SEQ ID NO: 38425 - DNA, 38 bp, Artificial Sequence
  primer
gtaaaacgacggccagtgcgagacctgttgtctgtgtc

SEQ ID NO: 38426 - DNA, 38 bp, Artificial Sequence
  primer
gtaaaacgacggccagttcttcataggccctccaagtc

SEQ ID NO: 38427 - DNA, 38 bp, Artificial Sequence
  primer
gtaaaacgacggccagtggattaccggtgagaccagac

SEQ ID NO: 38428 - DNA, 21 bp, Artificial Sequence
  primer
tatgcaggcacacccttagac

SEQ ID NO: 38429 - DNA, 21 bp, Artificial Sequence
  primer
gtgaatgtttgggctgatgtg

SEQ ID NO: 38430 - DNA, 21 bp, Artificial Sequence
  primer
gagagaaaggagattcaggcg

SEQ ID NO: 38431 - DNA, 38 bp, Artificial Sequence
  primer
gtaaaacgacggccagtatgatgtttcaatgggcaacc

SEQ ID NO: 38432 - DNA, 21 bp, Artificial Sequence
  primer
atgatgtttcaatgggcaacc

SEQ ID NO: 38433 - DNA, 36 bp, Artificial Sequence
  primer
gtaaaacgacggccagtaggtagccacagcacccac

SEQ ID NO: 38434 - DNA, 38 bp, Artificial Sequence
  primer
gtaaaacgacggccagtaccaagtgctaaagggtgctc

SEQ ID NO: 38435 - DNA, 38 bp, Artificial Sequence
  primer
gtaaaacgacggccagtatcaaggtgggttgtttaggg

SEQ ID NO: 38436 - DNA, 38 bp, Artificial Sequence
  primer
gtaaaacgacggccagtgtgagcagaagtggctcagtg

SEQ ID NO: 38437 - DNA, 20 bp, Artificial Sequence
  primer
caggagagagggtgaggctg

SEQ ID NO: 38438 - DNA, 38 bp, Artificial Sequence
  primer
gtaaaacgacggccagtaaggagaacgtggagaacagg

SEQ ID NO: 38439 - DNA, 21 bp, Artificial Sequence
  primer
taaccctggaatttctgaccc

SEQ ID NO: 38440 - DNA, 20 bp, Artificial Sequence
  primer
gtctgtggatgagccaggtc

SEQ ID NO: 38441 - DNA, 38 bp, Artificial Sequence
  primer
gtaaaacgacggccagtctccacccttccatagagtcc

SEQ ID NO: 38442 - DNA, 38 bp, Artificial Sequence
  primer
gtaaaacgacggccagttgtattgtcctgtgtgcaggg

SEQ ID NO: 38443 - DNA, 23 bp, Artificial Sequence
  primer
gaaagggtgaggtatggaaattg

SEQ ID NO: 38444 - DNA, 21 bp, Artificial Sequence
  primer
tatgtagggtctgcagggtcc

SEQ ID NO: 38445 - DNA, 37 bp, Artificial Sequence
  primer
gtaaaacgacggccagtgtctggaagggctgggatag

SEQ ID NO: 38446 - DNA, 21 bp, Artificial Sequence
  primer
tttctctagggtcttgctggc

SEQ ID NO: 38447 - DNA, 38 bp, Artificial Sequence
  primer
gtaaaacgacggccagtcagtctctgggttgtttgcag

SEQ ID NO: 38448 - DNA, 21 bp, Artificial Sequence
  primer
cttgtggtgagtgagtccctg

SEQ ID NO: 38449 - DNA, 38 bp, Artificial Sequence
  primer
gtaaaacgacggccagtacatccgacttgttctccgtc

SEQ ID NO: 38450 - DNA, 38 bp, Artificial Sequence
  primer
gtaaaacgacggccagtgcctgaaatatgaggagtggg

SEQ ID NO: 38451 - DNA, 38 bp, Artificial Sequence
  primer
gtaaaacgacggccagttctttgaccctgacttccacc

SEQ ID NO: 38452 - DNA, 21 bp, Artificial Sequence
  primer
ccacaagcctgtttccaaatg

SEQ ID NO: 38453 - DNA, 21 bp, Artificial Sequence
  primer
tctgacagcagatgttctggg

SEQ ID NO: 38454 - DNA, 38 bp, Artificial Sequence
  primer
gtaaaacgacggccagtctgtgactgatgcctgtgttg

SEQ ID NO: 38455 - DNA, 38 bp, Artificial Sequence
  primer
gtaaaacgacggccagtcttggtcgcatgtctgagttc

SEQ ID NO: 38456 - DNA, 38 bp, Artificial Sequence
  primer
gtaaaacgacggccagtctctcaaatgctgtttgctgg

SEQ ID NO: 38457 - DNA, 38 bp, Artificial Sequence
  primer
gtaaaacgacggccagtcaggaggaagagggagttctg

SEQ ID NO: 38458 - DNA, 20 bp, Artificial Sequence
  primer
gtgaatccatggtgggtgag

SEQ ID NO: 38459 - DNA, 38 bp, Artificial Sequence
  primer
gtaaaacgacggccagtctcgtgaggacttaggatggg

SEQ ID NO: 38460 - DNA, 22 bp, Artificial Sequence
  primer
aaggagacaaggtaggtgggac

SEQ ID NO: 38461 - DNA, 37 bp, Artificial Sequence
  primer
gtaaaacgacggccagtggtgtcctgttggtctccag

SEQ ID NO: 38462 - DNA, 37 bp, Artificial Sequence
  primer
gtaaaacgacggccagtctctggccctcctcgtctac

SEQ ID NO: 38463 - DNA, 20 bp, Artificial Sequence
  primer
ggagaaggtaggaacgtggg

SEQ ID NO: 38464 - DNA, 38 bp, Artificial Sequence
  primer
gtaaaacgacggccagtggagtgcaggactaaagggtg

SEQ ID NO: 38465 - DNA, 38 bp, Artificial Sequence
  primer
gtaaaacgacggccagtgagagctcaaactcccagagg

SEQ ID NO: 38466 - DNA, 38 bp, Artificial Sequence
  primer
gtaaaacgacggccagtcgggctcgttgtattctaagc

SEQ ID NO: 38467 - DNA, 21 bp, Artificial Sequence
  primer
cagagccagcatcacacacac

SEQ ID NO: 38468 - DNA, 37 bp, Artificial Sequence
  primer
gtaaaacgacggccagttccctacccactatccaggg

SEQ ID NO: 38469 - DNA, 38 bp, Artificial Sequence
  primer
gtaaaacgacggccagtggtcaggaaggcctaatgttg

SEQ ID NO: 38470 - DNA, 21 bp, Artificial Sequence
  primer
tcacagagtgaggtgtctggg

SEQ ID NO: 38471 - DNA, 21 bp, Artificial Sequence
  primer
aggagagatggtgagtgtggg

SEQ ID NO: 38472 - DNA, 21 bp, Artificial Sequence
  primer
ttgggttacagaaggtttggg

SEQ ID NO: 38473 - DNA, 38 bp, Artificial Sequence
  primer
gtaaaacgacggccagtccatggtcatggtgaattgag

SEQ ID NO: 38474 - DNA, 21 bp, Artificial Sequence
  primer
cataaccatcttccagcctgc

SEQ ID NO: 38475 - DNA, 38 bp, Artificial Sequence
  primer
gtaaaacgacggccagtggagcaggtgagtagggattc

SEQ ID NO: 38476 - DNA, 38 bp, Artificial Sequence
  primer
gtaaaacgacggccagtgaagggagaagctgcactgac

SEQ ID NO: 38477 - DNA, 21 bp, Artificial Sequence
  primer
tctcctgttaccctctcctgc

SEQ ID NO: 38478 - DNA, 21 bp, Artificial Sequence
  primer
ctcccagaactttcttcaccc

SEQ ID NO: 38479 - DNA, 38 bp, Artificial Sequence
  primer
gtaaaacgacggccagttgcacacagtggaaatcagtg

SEQ ID NO: 38480 - DNA, 21 bp, Artificial Sequence
  primer
ccctgaagctccttgggatag

SEQ ID NO: 38481 - DNA, 36 bp, Artificial Sequence
  primer
gtaaaacgacggccagtcctgttgtagcctccgctc

SEQ ID NO: 38482 - DNA, 24 bp, Artificial Sequence
  primer
ttctgatgttaaagactgtttccc

SEQ ID NO: 38483 - DNA, 44 bp, Artificial Sequence
  primer
gtaaaacgacggccagtttgataagtattaggcaaatgtgtcag

SEQ ID NO: 38484 - DNA, 44 bp, Artificial Sequence
  primer
gtaaaacgacggccagtagtagaaataccattagccagtttacg

SEQ ID NO: 38485 - DNA, 21 bp, Artificial Sequence
  primer
gagttggaaagccaggtatgc

SEQ ID NO: 38486 - DNA, 20 bp, Artificial Sequence
  primer
aggaccaaagggtgatcgag

SEQ ID NO: 38487 - DNA, 38 bp, Artificial Sequence
  primer
gtaaaacgacggccagtctaaaggagacaagggcttcg

SEQ ID NO: 38488 - DNA, 38 bp, Artificial Sequence
  primer
gtaaaacgacggccagtttcaaggacctcctgggatac

SEQ ID NO: 38489 - DNA, 21 bp, Artificial Sequence
  primer
ggagaaggtgggattgtaggg

SEQ ID NO: 38490 - DNA, 21 bp, Artificial Sequence
  primer
ttccctggtatagggaaaccc

SEQ ID NO: 38491 - DNA, 21 bp, Artificial Sequence
  primer
aagaaaggcaagaatggaggg

SEQ ID NO: 38492 - DNA, 21 bp, Artificial Sequence
  primer
cggcagacagaactacaaccc

SEQ ID NO: 38493 - DNA, 37 bp, Artificial Sequence
  primer
gtaaaacgacggccagtcctagtgccaaaccacccag

SEQ ID NO: 38494 - DNA, 38 bp, Artificial Sequence
  primer
gtaaaacgacggccagttcttcctctcccgtgtacctc

SEQ ID NO: 38495 - DNA, 36 bp, Artificial Sequence
  primer
gtaaaacgacggccagtcatgggaaagccaggactc

SEQ ID NO: 38496 - DNA, 19 bp, Artificial Sequence
  primer
ggcagaaaggtgacttggg

SEQ ID NO: 38497 - DNA, 18 bp, Artificial Sequence
  primer
aagccacagtttgggctg

SEQ ID NO: 38498 - DNA, 20 bp, Artificial Sequence
  primer
cgtgaaatttgaccggactc

SEQ ID NO: 38499 - DNA, 38 bp, Artificial Sequence
  primer
gtaaaacgacggccagtcgagatgcctctggttctctc

SEQ ID NO: 38500 - DNA, 21 bp, Artificial Sequence
  primer
agaatcgtttgaacccaggag

SEQ ID NO: 38501 - DNA, 42 bp, Artificial Sequence
  primer
gtaaaacgacggccagtaaagccaaacactttacctctaagc

SEQ ID NO: 38502 - DNA, 20 bp, Artificial Sequence
  primer
tcaggattggccaagatgac

SEQ ID NO: 38503 - DNA, 38 bp, Artificial Sequence
  primer
gtaaaacgacggccagtggattatgtggcattgggaac

SEQ ID NO: 38504 - DNA, 24 bp, Artificial Sequence
  primer
gaagaatactccttcttgacgacg

SEQ ID NO: 38505 - DNA, 21 bp, Artificial Sequence
  primer
tggaacatttggcagattcag

SEQ ID NO: 38506 - DNA, 21 bp, Artificial Sequence
  primer
tgaaagcttccaacccatttc

SEQ ID NO: 38507 - DNA, 37 bp, Artificial Sequence
  primer
gtaaaacgacggccagtctatgctagtggcgggtctg

SEQ ID NO: 38508 - DNA, 38 bp, Artificial Sequence
  primer
gtaaaacgacggccagtagaatatggcggagaccaaag

SEQ ID NO: 38509 - DNA, 21 bp, Artificial Sequence
  primer
atcagacatgggcgagagttg

SEQ ID NO: 38510 - DNA, 38 bp, Artificial Sequence
  primer
gtaaaacgacggccagtcgctccacttccttcctttag

SEQ ID NO: 38511 - DNA, 42 bp, Artificial Sequence
  primer
gtaaaacgacggccagttcaagaagaaataatcacaacaggc

SEQ ID NO: 38512 - DNA, 21 bp, Artificial Sequence
  primer
gtggatgccaggcttaatagc

SEQ ID NO: 38513 - DNA, 40 bp, Artificial Sequence
  primer
gtaaaacgacggccagtgcaaaggaatgttagaggagctg

SEQ ID NO: 38514 - DNA, 37 bp, Artificial Sequence
  primer
gtaaaacgacggccagtcctgcaagatcttaggtggc

SEQ ID NO: 38515 - DNA, 37 bp, Artificial Sequence
  primer
gtaaaacgacggccagtcaggtctatgcatggctgag

SEQ ID NO: 38516 - DNA, 21 bp, Artificial Sequence
  primer
gagaacatgcccatgagtcag

SEQ ID NO: 38517 - DNA, 22 bp, Artificial Sequence
  primer
tgcaatggagttctgtaactgg

SEQ ID NO: 38518 - DNA, 38 bp, Artificial Sequence
  primer
gtaaaacgacggccagtgcactgatttagggaagcagg

SEQ ID NO: 38519 - DNA, 40 bp, Artificial Sequence
  primer
gtaaaacgacggccagtgaccaagcctatttctatgttcg

SEQ ID NO: 38520 - DNA, 46 bp, Artificial Sequence
  primer
gtaaaacgacggccagtactatttcttggtattacctttggttatg

SEQ ID NO: 38521 - DNA, 38 bp, Artificial Sequence
  primer
gtaaaacgacggccagtcaagtttacctgaggtgcctg

SEQ ID NO: 38522 - DNA, 38 bp, Artificial Sequence
  primer
gtaaaacgacggccagttagagcaaagccattgtggtg

SEQ ID NO: 38523 - DNA, 38 bp, Artificial Sequence
  primer
gtaaaacgacggccagtattcagtcactccaagcctcc

SEQ ID NO: 38524 - DNA, 21 bp, Artificial Sequence
  primer
gacacggtatgtcctgagctg

SEQ ID NO: 38525 - DNA, 21 bp, Artificial Sequence
  primer
cctatttcccaccctactccc

SEQ ID NO: 38526 - DNA, 35 bp, Artificial Sequence
  primer
gtaaaacgacggccagtagtgtgcagtgggcttgg

SEQ ID NO: 38527 - DNA, 38 bp, Artificial Sequence
  primer
gtaaaacgacggccagttctgggtaaggcagattgatg

SEQ ID NO: 38528 - DNA, 21 bp, Artificial Sequence
  primer
tctgggtaaggcagattgatg

SEQ ID NO: 38529 - DNA, 20 bp, Artificial Sequence
  primer
ggatggcctatgcctttagc

SEQ ID NO: 38530 - DNA, 23 bp, Artificial Sequence
  primer
gaatatgaaagagaggcaaaccc

SEQ ID NO: 38531 - DNA, 21 bp, Artificial Sequence
  primer
acttgtgcttatccacccacc

SEQ ID NO: 38532 - DNA, 38 bp, Artificial Sequence
  primer
gtaaaacgacggccagtatgattctgggaacactgtgg

SEQ ID NO: 38533 - DNA, 38 bp, Artificial Sequence
  primer
gtaaaacgacggccagtccggagttaatctgttcatgg

SEQ ID NO: 38534 - DNA, 38 bp, Artificial Sequence
  primer
gtaaaacgacggccagtaggatgcagagtgcaggaaac

SEQ ID NO: 38535 - DNA, 20 bp, Artificial Sequence
  primer
acctggctccttgcagagtc

SEQ ID NO: 38536 - DNA, 41 bp, Artificial Sequence
  primer
gtaaaacgacggccagtaaggcatttggaatacctctcttt

SEQ ID NO: 38537 - DNA, 40 bp, Artificial Sequence
  primer
gtaaaacgacggccagttttgctgaaagtttaaagatgcg

SEQ ID NO: 38538 - DNA, 21 bp, Artificial Sequence
  primer
atcaccagtcatcatccatcg

SEQ ID NO: 38539 - DNA, 18 bp, Artificial Sequence
  primer
ccgcatattcaggagccc

SEQ ID NO: 38540 - DNA, 21 bp, Artificial Sequence
  primer
ggcacacagtgcctgctatac

SEQ ID NO: 38541 - DNA, 21 bp, Artificial Sequence
  primer
agtgaggagagcctttgggag

SEQ ID NO: 38542 - DNA, 38 bp, Artificial Sequence
  primer
gtaaaacgacggccagttatcctctttggcctttgacc

SEQ ID NO: 38543 - DNA, 38 bp, Artificial Sequence
  primer
gtaaaacgacggccagtcctaggccttcatgaggtgtg

SEQ ID NO: 38544 - DNA, 38 bp, Artificial Sequence
  primer
gtaaaacgacggccagtttgggagtggctgtagagagg

SEQ ID NO: 38545 - DNA, 38 bp, Artificial Sequence
  primer
gtaaaacgacggccagtagtacaacctgcaagggcttc

SEQ ID NO: 38546 - DNA, 21 bp, Artificial Sequence
  primer
cactggctctgcaattctctg

SEQ ID NO: 38547 - DNA, 38 bp, Artificial Sequence
  primer
gtaaaacgacggccagtcctgtcaatcaggccttcatc

SEQ ID NO: 38548 - DNA, 38 bp, Artificial Sequence
  primer
gtaaaacgacggccagtgagaagggtctttgagcaagc

SEQ ID NO: 38549 - DNA, 21 bp, Artificial Sequence
  primer
atttcctggtgagagacgagg

SEQ ID NO: 38550 - DNA, 21 bp, Artificial Sequence
  primer
agtgaaggtgagagctcctgg

SEQ ID NO: 38551 - DNA, 38 bp, Artificial Sequence
  primer
gtaaaacgacggccagtcgtagtagtccctcccgtctg

SEQ ID NO: 38552 - DNA, 38 bp, Artificial Sequence
  primer
gtaaaacgacggccagtaagattgaaggtgggcatcag

SEQ ID NO: 38553 - DNA, 38 bp, Artificial Sequence
  primer
gtaaaacgacggccagtccaagggagagacggtaagtg

SEQ ID NO: 38554 - DNA, 38 bp, Artificial Sequence
  primer
gtaaaacgacggccagtgctcctacagctacagccaca

SEQ ID NO: 38555 - DNA, 21 bp, Artificial Sequence
  primer
aagggtactcccaaggctctc

SEQ ID NO: 38556 - DNA, 21 bp, Artificial Sequence
  primer
acactgcagctgtctcagagg

SEQ ID NO: 38557 - DNA, 38 bp, Artificial Sequence
  primer
gtaaaacgacggccagtcctttcttgcctctggatctc

SEQ ID NO: 38558 - DNA, 38 bp, Artificial Sequence
  primer
gtaaaacgacggccagttggaagacaggccattctctg

SEQ ID NO: 38559 - DNA, 38 bp, Artificial Sequence
  primer
gtaaaacgacggccagtctctgtttaggcttcgttggg

SEQ ID NO: 38560 - DNA, 38 bp, Artificial Sequence
  primer
gtaaaacgacggccagtgcaaattagctgagacccagg

SEQ ID NO: 38561 - DNA, 38 bp, Artificial Sequence
  primer
gtaaaacgacggccagtcctaggtttgctttgctggtc

SEQ ID NO: 38562 - DNA, 21 bp, Artificial Sequence
  primer
ctgagagctgctgaggttgtg

SEQ ID NO: 38563 - DNA, 38 bp, Artificial Sequence
  primer
gtaaaacgacggccagtggatctcagggttctggtctg

SEQ ID NO: 38564 - DNA, 37 bp, Artificial Sequence
  primer
gtaaaacgacggccagtgcaaagtggtgagttccagc

SEQ ID NO: 38565 - DNA, 20 bp, Artificial Sequence
  primer
gcaaagtggtgagttccagc

SEQ ID NO: 38566 - DNA, 20 bp, Artificial Sequence
  primer
aagggacaggtgagtcctcc

SEQ ID NO: 38567 - DNA, 38 bp, Artificial Sequence
  primer
gtaaaacgacggccagtaccttcccaagtaagcccttg

SEQ ID NO: 38568 - DNA, 36 bp, Artificial Sequence
  primer
gtaaaacgacggccagtcatcggaatgctctgcctc

SEQ ID NO: 38569 - DNA, 21 bp, Artificial Sequence
  primer
cgtgaccatttccaactttcc

SEQ ID NO: 38570 - DNA, 39 bp, Artificial Sequence
  primer
gtaaaacgacggccagtggcagagtcctttctcctatgg

SEQ ID NO: 38571 - DNA, 20 bp, Artificial Sequence
  primer
cgccagtcccaggataattt

SEQ ID NO: 38572 - DNA, 18 bp, Artificial Sequence
  primer
aggctttgggtctcaccg

SEQ ID NO: 38573 - DNA, 38 bp, Artificial Sequence
  primer
gtaaaacgacggccagtttccagtctgtccagttcacc

SEQ ID NO: 38574 - DNA, 21 bp, Artificial Sequence
  primer
tacagatgccactgagggatg

SEQ ID NO: 38575 - DNA, 21 bp, Artificial Sequence
  primer
tacagcaggcagacagtggac

SEQ ID NO: 38576 - DNA, 37 bp, Artificial Sequence
  primer
gtaaaacgacggccagtgtcacacttcagagggaggg

SEQ ID NO: 38577 - DNA, 36 bp, Artificial Sequence
  primer
gtaaaacgacggccagtgaccagacacccatccctg

SEQ ID NO: 38578 - DNA, 19 bp, Artificial Sequence
  primer
ctgagcaagcacgcaagtc

SEQ ID NO: 38579 - DNA, 37 bp, Artificial Sequence
  primer
gtaaaacgacggccagtaatgatccagacccgacctc

SEQ ID NO: 38580 - DNA, 38 bp, Artificial Sequence
  primer
gtaaaacgacggccagtcaggtggattctgtcgttgtc

SEQ ID NO: 38581 - DNA, 36 bp, Artificial Sequence
  primer
gtaaaacgacggccagtcatcatctgtgcggagtgg

SEQ ID NO: 38582 - DNA, 20 bp, Artificial Sequence
  primer
ggactgctctggaactgtgg

SEQ ID NO: 38583 - DNA, 21 bp, Artificial Sequence
  primer
tgatcaagccctgcacatatc

SEQ ID NO: 38584 - DNA, 21 bp, Artificial Sequence
  primer
ctagaggaagggctgcttgtg

SEQ ID NO: 38585 - DNA, 20 bp, Artificial Sequence
  primer
ctccagccatctctgaccac

SEQ ID NO: 38586 - DNA, 21 bp, Artificial Sequence
  primer
ccaccatagctccttggtgtc

SEQ ID NO: 38587 - DNA, 21 bp, Artificial Sequence
  primer
gaaaccagataactgccaggg

SEQ ID NO: 38588 - DNA, 38 bp, Artificial Sequence
  primer
gtaaaacgacggccagtggccttactcatcccttgtcc

SEQ ID NO: 38589 - DNA, 37 bp, Artificial Sequence
  primer
gtaaaacgacggccagtcacaaggctgggagaagttg

SEQ ID NO: 38590 - DNA, 19 bp, Artificial Sequence
  primer
cctgaccgcaagctctctc

SEQ ID NO: 38591 - DNA, 21 bp, Artificial Sequence
  primer
aggcgtccctgtgagtatctg

SEQ ID NO: 38592 - DNA, 38 bp, Artificial Sequence
  primer
gtaaaacgacggccagtgtccagggtatgcctgagttc

SEQ ID NO: 38593 - DNA, 37 bp, Artificial Sequence
  primer
gtaaaacgacggccagtcttccaggtgggtgaggttg

SEQ ID NO: 38594 - DNA, 21 bp, Artificial Sequence
  primer
gggacttcactacccacaagg

SEQ ID NO: 38595 - DNA, 38 bp, Artificial Sequence
  primer
gtaaaacgacggccagtacacctacggaggcttgagag

SEQ ID NO: 38596 - DNA, 21 bp, Artificial Sequence
  primer
agcaggtgtgtggatgatttg

SEQ ID NO: 38597 - DNA, 36 bp, Artificial Sequence
  primer
gtaaaacgacggccagtactgcccagatccgagatg

SEQ ID NO: 38598 - DNA, 21 bp, Artificial Sequence
  primer
tttcacagggttgagatcgtg

SEQ ID NO: 38599 - DNA, 21 bp, Artificial Sequence
  primer
ctggaagacagcaccgtgtag

SEQ ID NO: 38600 - DNA, 38 bp, Artificial Sequence
  primer
gtaaaacgacggccagtgtgtacaggtgggtccctctc

SEQ ID NO: 38601 - DNA, 37 bp, Artificial Sequence
  primer
gtaaaacgacggccagtacagctggatgtcaagtccc

SEQ ID NO: 38602 - DNA, 37 bp, Artificial Sequence
  primer
gtaaaacgacggccagtatggtccatttggagcactg

SEQ ID NO: 38603 - DNA, 38 bp, Artificial Sequence
  primer
gtaaaacgacggccagtaaccatgtccaccttaccctg

SEQ ID NO: 38604 - DNA, 24 bp, Artificial Sequence
  primer
aaacatcctctgccatagtcattc

SEQ ID NO: 38605 - DNA, 21 bp, Artificial Sequence
  primer
aattcactccttcctccctcc

SEQ ID NO: 38606 - DNA, 39 bp, Artificial Sequence
  primer
gtaaaacgacggccagtttggaaagagagcaaatgttcc

SEQ ID NO: 38607 - DNA, 21 bp, Artificial Sequence
  primer
ctttgtcaactttgtgctggc

SEQ ID NO: 38608 - DNA, 21 bp, Artificial Sequence
  primer
gatgaagctgccaacacactc

SEQ ID NO: 38609 - DNA, 38 bp, Artificial Sequence
  primer
gtaaaacgacggccagtttggtgcttgagtgagtgagg

SEQ ID NO: 38610 - DNA, 21 bp, Artificial Sequence
  primer
tagggcagggagacaaatagc

SEQ ID NO: 38611 - DNA, 21 bp, Artificial Sequence
  primer
ctgtgatgtaggaaggagggc

SEQ ID NO: 38612 - DNA, 37 bp, Artificial Sequence
  primer
gtaaaacgacggccagtgggctccggtactttgtagc

SEQ ID NO: 38613 - DNA, 38 bp, Artificial Sequence
  primer
gtaaaacgacggccagtctgcctttaggatgaagtggg

SEQ ID NO: 38614 - DNA, 21 bp, Artificial Sequence
  primer
tgtggctgtgccttaagtttg

SEQ ID NO: 38615 - DNA, 38 bp, Artificial Sequence
  primer
gtaaaacgacggccagtgtgtaggagttggtgtcctgc

SEQ ID NO: 38616 - DNA, 37 bp, Artificial Sequence
  primer
gtaaaacgacggccagtaagagatccgcctaccttgg

SEQ ID NO: 38617 - DNA, 38 bp, Artificial Sequence
  primer
gtaaaacgacggccagtgacctctgtaaaggccgtgtc

SEQ ID NO: 38618 - DNA, 37 bp, Artificial Sequence
  primer
gtaaaacgacggccagtaggtgacagaggatcccagg

SEQ ID NO: 38619 - DNA, 35 bp, Artificial Sequence
  primer
gtaaaacgacggccagtggacgacttcctcggctg

SEQ ID NO: 38620 - DNA, 21 bp, Artificial Sequence
  primer
gatccacgagcagaaggaaag

SEQ ID NO: 38621 - DNA, 38 bp, Artificial Sequence
  primer
gtaaaacgacggccagttgttgctcaagcagtgtgttt

SEQ ID NO: 38622 - DNA, 22 bp, Artificial Sequence
  primer
tgatttctgaaacatccaaggc

SEQ ID NO: 38623 - DNA, 21 bp, Artificial Sequence
  primer
aagtgtgttcgggatctttgg

SEQ ID NO: 38624 - DNA, 21 bp, Artificial Sequence
  primer
aacaacctgaacctgacccag

SEQ ID NO: 38625 - DNA, 21 bp, Artificial Sequence
  primer
aacgacaccctggaggatatg

SEQ ID NO: 38626 - DNA, 21 bp, Artificial Sequence
  primer
acgcttccagctctttgagac

SEQ ID NO: 38627 - DNA, 38 bp, Artificial Sequence; identical to SEQ ID NO: 38617
  primer

SEQ ID NO: 38628 - DNA, 37 bp, Artificial Sequence; identical to SEQ ID NO: 38618
  primer

SEQ ID NO: 38629 - DNA, 38 bp, Artificial Sequence
  primer
gtaaaacgacggccagtgcctctgaaacacagctgaag

SEQ ID NO: 38630 - DNA, 21 bp, Artificial Sequence
  primer
gcctcactttaacatccgttg

SEQ ID NO: 38631 - DNA, 23 bp, Artificial Sequence
  primer
tcattccaggataaatgacatgc

SEQ ID NO: 38632 - DNA, 38 bp, Artificial Sequence
  primer
gtaaaacgacggccagtaccaggctttcccagaatagg

SEQ ID NO: 38633 - DNA, 21 bp, Artificial Sequence
  primer
tgaataaaggatgagcccagg

SEQ ID NO: 38634 - DNA, 38 bp, Artificial Sequence
  primer
gtaaaacgacggccagtttaggagatttgaaggtcggg

SEQ ID NO: 38635 - DNA, 21 bp, Artificial Sequence
  primer
ttgatgcctgctcagtttcac

SEQ ID NO: 38636 - DNA, 21 bp, Artificial Sequence
  primer
aacgtatggtcacactgctgc

SEQ ID NO: 38637 - DNA, 23 bp, Artificial Sequence
  primer
ctactctcttcccttcttcccac

SEQ ID NO: 38638 - DNA, 38 bp, Artificial Sequence
  primer
gtaaaacgacggccagtaagcaaccaaggaatctggtg

SEQ ID NO: 38639 - DNA, 38 bp, Artificial Sequence
  primer
gtaaaacgacggccagtgaaacaaagcgtcctgtcttg

SEQ ID NO: 38640 - DNA, 38 bp, Artificial Sequence
  primer
gtaaaacgacggccagtcctttgaaattcctcccaagg

SEQ ID NO: 38641 - DNA, 38 bp, Artificial Sequence
  primer
gtaaaacgacggccagttgtccacagaaacggtgattc

SEQ ID NO: 38642 - DNA, 21 bp, Artificial Sequence
  primer
cgtaccctaaatccaaggctg

SEQ ID NO: 38643 - DNA, 38 bp, Artificial Sequence
  primer
gtaaaacgacggccagtcagaagcaacatcaaagcagg

SEQ ID NO: 38644 - DNA, 21 bp, Artificial Sequence
  primer
cttggtaaaggcatgggagac

SEQ ID NO: 38645 - DNA, 37 bp, Artificial Sequence
  primer
gtaaaacgacggccagtctggatcagaagaagcgtgg

SEQ ID NO: 38646 - DNA, 38 bp, Artificial Sequence
  primer
gtaaaacgacggccagtagcactgaccacatgctaacg

SEQ ID NO: 38647 - DNA, 38 bp, Artificial Sequence
  primer
gtaaaacgacggccagtgatggtgacccttcctctgtc

SEQ ID NO: 38648 - DNA, 21 bp, Artificial Sequence
  primer
cttggtaaaggcatgggagac

SEQ ID NO: 38649 - DNA, 38 bp, Artificial Sequence
  primer
gtaaaacgacggccagtaacaggaggcctatccacatc

SEQ ID NO: 38650 - DNA, 38 bp, Artificial Sequence
  primer
gtaaaacgacggccagtgtctgtgtccaggatggtgac

SEQ ID NO: 38651 - DNA, 21 bp, Artificial Sequence
  primer
tctgcccagagaatgatgttg

SEQ ID NO: 38652 - DNA, 38 bp, Artificial Sequence
  primer
gtaaaacgacggccagtagaacccactgtctcctctgg

SEQ ID NO: 38653 - DNA, 21 bp, Artificial Sequence
  primer
ctcagatttacaagccagccc

SEQ ID NO: 38654 - DNA, 38 bp, Artificial Sequence
  primer
gtaaaacgacggccagtaccctctgggacatctttgtg

SEQ ID NO: 38655 - DNA, 38 bp, Artificial Sequence
  primer
gtaaaacgacggccagtgatcacaaagcattccttccc

SEQ ID NO: 38656 - DNA, 38 bp, Artificial Sequence
  primer
gtaaaacgacggccagtatgtcagtgcaagtagcagcc

SEQ ID NO: 38657 - DNA, 38 bp, Artificial Sequence
  primer
gtaaaacgacggccagttgatcaagtagactgccctcg

SEQ ID NO: 38658 - DNA, 37 bp, Artificial Sequence
  primer
gtaaaacgacggccagtggtcaagacctctggagctg

SEQ ID NO: 38659 - DNA, 37 bp, Artificial Sequence
  primer
gtaaaacgacggccagtgcaaaggtcgctcacatctc

SEQ ID NO: 38660 - DNA, 39 bp, Artificial Sequence
  primer
gtaaaacgacggccagtcagcccaaggatagagattctg

SEQ ID NO: 38661 - DNA, 21 bp, Artificial Sequence
  primer
aaaggagtacctttcccaccc

SEQ ID NO: 38662 - DNA, 38 bp, Artificial Sequence
  primer
gtaaaacgacggccagtcacttaggttggatcccttgg

SEQ ID NO: 38663 - DNA, 37 bp, Artificial Sequence
  primer
gtaaaacgacggccagtcaggcctctcactccaaatg

SEQ ID NO: 38664 - DNA, 38 bp, Artificial Sequence; identical to SEQ ID NO: 38655
  primer

SEQ ID NO: 38665 - DNA, 38 bp, Artificial Sequence
  primer
gtaaaacgacggccagtttactgcagggaatgcttcag

SEQ ID NO: 38666 - DNA, 37 bp, Artificial Sequence; identical to SEQ ID NO: 38658
  primer

SEQ ID NO: 38667 - DNA, 39 bp, Artificial Sequence; identical to SEQ ID NO: 38660
  primer

SEQ ID NO: 38668 - DNA, 38 bp, Artificial Sequence
  primer
gtaaaacgacggccagttgtgctaactctgccttggtg

SEQ ID NO: 38669 - DNA, 38 bp, Artificial Sequence
  primer
gtaaaacgacggccagtgccgctgtttgataaggtttg

SEQ ID NO: 38670 - DNA, 38 bp, Artificial Sequence
  primer
gtaaaacgacggccagtggctatttaggcacatctcgg

SEQ ID NO: 38671 - DNA, 43 bp, Artificial Sequence
  primer
gtaaaacgacggccagttgggctatttcagtgatttaagagtc

SEQ ID NO: 38672 - DNA, 38 bp, Artificial Sequence
  primer
gtaaaacgacggccagttgagtttggtcatgccagatg

SEQ ID NO: 38673 - DNA, 38 bp, Artificial Sequence
  primer
gtaaaacgacggccagtctccaacacgattggagtgtc

SEQ ID NO: 38674 - DNA, 37 bp, Artificial Sequence
  primer
gtaaaacgacggccagttttggaaatgtacccgttgc

SEQ ID NO: 38675 - DNA, 38 bp, Artificial Sequence
  primer
gtaaaacgacggccagttatgacctgcgtcaccacaag

SEQ ID NO: 38676 - DNA, 21 bp, Artificial Sequence
  primer
taatcctgaatcttccagccc

SEQ ID NO: 38677 - DNA, 38 bp, Artificial Sequence
  primer
gtaaaacgacggccagtttcctgctgagtggagatttg

SEQ ID NO: 38678 - DNA, 26 bp, Artificial Sequence
  primer
aaaccactcagaggacaatcttatgt

SEQ ID NO: 38679 - DNA, 27 bp, Artificial Sequence
  primer
ttctatttgcatgtgtctgaataacac

SEQ ID NO: 38680 - DNA, 38 bp, Artificial Sequence
  primer
gtaaaacgacggccagttctcccatagagcctagcacc

SEQ ID NO: 38681 - DNA, 38 bp, Artificial Sequence
  primer
gtaaaacgacggccagttccgaggagcataaggaacac

SEQ ID NO: 38682 - DNA, 38 bp, Artificial Sequence
  primer
gtaaaacgacggccagtgagcctctggccaacttactg

SEQ ID NO: 38683 - DNA, 38 bp, Artificial Sequence
  primer
gtaaaacgacggccagttggtcagtggttaaggaatgc

SEQ ID NO: 38684 - DNA, 44 bp, Artificial Sequence
  primer
gtaaaacgacggccagttttgaagtctgtaattcatctgaaact

SEQ ID NO: 38685 - DNA, 19 bp, Artificial Sequence
  primer
ggacaagcgagagctggac

SEQ ID NO: 38686 - DNA, 39 bp, Artificial Sequence
  primer
gtaaaacgacggccagttttcacttgatcttgttgctca

SEQ ID NO: 38687 - DNA, 37 bp, Artificial Sequence
  primer
gtaaaacgacggccagtgaaagcaccgagctgacaag

SEQ ID NO: 38688 - DNA, 25 bp, Artificial Sequence
  primer
ttgcacggaatatcaggttacttac

SEQ ID NO: 38689 - DNA, 21 bp, Artificial Sequence
  primer
gggtggaaagtagagccattc

SEQ ID NO: 38690 - DNA, 40 bp, Artificial Sequence
  primer
gtaaaacgacggccagtggcgcttggaatatcagataaag

SEQ ID NO: 38691 - DNA, 21 bp, Artificial Sequence
  primer
aaagctgttgcgtgtttgttg

SEQ ID NO: 38692 - DNA, 38 bp, Artificial Sequence
  primer
gtaaaacgacggccagtttgcatctttcttgagcttgg

SEQ ID NO: 38693 - DNA, 38 bp, Artificial Sequence
  primer
gtaaaacgacggccagtcagggaaggattctgggagac

SEQ ID NO: 38694 - DNA, 20 bp, Artificial Sequence
  primer
gagaacaagaggccagaggg

SEQ ID NO: 38695 - DNA, 38 bp, Artificial Sequence
  primer
gtaaaacgacggccagtttgtgggtgtagaggatggtg

SEQ ID NO: 38696 - DNA, 38 bp, Artificial Sequence
  primer
gtaaaacgacggccagtagcctgtctgttccttatcgc

SEQ ID NO: 38697 - DNA, 38 bp, Artificial Sequence
  primer
gtaaaacgacggccagtgagggaaagaaagaccgacag

SEQ ID NO: 38698 - DNA, 38 bp, Artificial Sequence
  primer
gtaaaacgacggccagtagtttcatcctctccagtgcg

SEQ ID NO: 38699 - DNA, 38 bp, Artificial Sequence
  primer
gtaaaacgacggccagtccacatagccttgaatggttg

SEQ ID NO: 38700 - DNA, 38 bp, Artificial Sequence
  primer
gtaaaacgacggccagtctattcctcgacgggtgagag

SEQ ID NO: 38701 - DNA, 21 bp, Artificial Sequence
  primer
accatatcaaccctcactcgc

SEQ ID NO: 38702 - DNA, 38 bp, Artificial Sequence
  primer
gtaaaacgacggccagtcctagacaggagcacgttcag

SEQ ID NO: 38703 - DNA, 36 bp, Artificial Sequence
  primer
gtaaaacgacggccagtgcgggtggatgtagcaatc

SEQ ID NO: 38704 - DNA, 21 bp, Artificial Sequence
  primer
gagcccacgtgtcactgttag

SEQ ID NO: 38705 - DNA, 38 bp, Artificial Sequence
  primer
gtaaaacgacggccagtctggatgctaagtccgatgtg

SEQ ID NO: 38706 - DNA, 40 bp, Artificial Sequence
  primer
gtaaaacgacggccagttgtaaatatgaccagcgttgaaa

SEQ ID NO: 38707 - DNA, 38 bp, Artificial Sequence
  primer
gtaaaacgacggccagtttgcttgcagtaccaaattgc

SEQ ID NO: 38708 - DNA, 37 bp, Artificial Sequence
  primer
gtaaaacgacggccagtgtgtgctgagggcatgtaaa

SEQ ID NO: 38709 - DNA, 19 bp, Artificial Sequence
  primer
gaaagtgcggttgtggatg

SEQ ID NO: 38710 - DNA, 38 bp, Artificial Sequence
  primer
gtaaaacgacggccagtagaacaggcataacacctggc

SEQ ID NO: 38711 - DNA, 21 bp, Artificial Sequence
  primer
tctgtgttagggagtgggtcc

SEQ ID NO: 38712 - DNA, 38 bp, Artificial Sequence
  primer
gtaaaacgacggccagttggattgagatcttggagctg

SEQ ID NO: 38713 - DNA, 38 bp, Artificial Sequence
  primer
gtaaaacgacggccagtagtctcacagccaagcaggtc

SEQ ID NO: 38714 - DNA, 38 bp, Artificial Sequence
  primer
gtaaaacgacggccagtaatgtttagggcaggatggag

SEQ ID NO: 38715 - DNA, 20 bp, Artificial Sequence
  primer
cttgctgccctcatacttgc

SEQ ID NO: 38716 - DNA, 38 bp, Artificial Sequence
  primer
gtaaaacgacggccagtattgatgcgtgattgttcctg

SEQ ID NO: 38717 - DNA, 21 bp, Artificial Sequence
  primer
tttcctttggagcagagaacc

SEQ ID NO: 38718 - DNA, 38 bp, Artificial Sequence
  primer
gtaaaacgacggccagtaaagcggtagttcggtctctg

SEQ ID NO: 38719 - DNA, 40 bp, Artificial Sequence
  primer
gtaaaacgacggccagtcccaacatttgtttgttaagagg

SEQ ID NO: 38720 - DNA, 35 bp, Artificial Sequence
  primer
gtaaaacgacggccagtttccatgctgctgcttcc

SEQ ID NO: 38721 - DNA, 38 bp, Artificial Sequence
  primer
gtaaaacgacggccagttttcctaccgatttcctctcc

SEQ ID NO: 38722 - DNA, 20 bp, Artificial Sequence
  primer
atgtgtgaagggtgcatgtg

SEQ ID NO: 38723 - DNA, 39 bp, Artificial Sequence
  primer
gtaaaacgacggccagtcctttggttctagagtctcggg

SEQ ID NO: 38724 - DNA, 23 bp, Artificial Sequence
  primer
tctcctgcttccagagtcttatg

SEQ ID NO: 38725 - DNA, 20 bp, Artificial Sequence
  primer
atagcagtgtgcagccttcg

SEQ ID NO: 38726 - DNA, 21 bp, Artificial Sequence
  primer
aagactttcttggagggaggg

SEQ ID NO: 38727 - DNA, 21 bp, Artificial Sequence
  primer
atgggtaaggcacatgactcg

SEQ ID NO: 38728 - DNA, 38 bp, Artificial Sequence
  primer
gtaaaacgacggccagtgcaggttcagggctcacttac

SEQ ID NO: 38729 - DNA, 37 bp, Artificial Sequence
  primer
gtaaaacgacggccagttaccttgaggctggacgttg

SEQ ID NO: 38730 - DNA, 38 bp, Artificial Sequence
  primer
gtaaaacgacggccagtgagactagaggagcgcagtgg

SEQ ID NO: 38731 - DNA, 21 bp, Artificial Sequence
  primer
cgaggagagaggaagtacccg

SEQ ID NO: 38732 - DNA, 19 bp, Artificial Sequence
  primer
tggccatgataggctctgc

SEQ ID NO: 38733 - DNA, 21 bp, Artificial Sequence
  primer
ttccacatccgagacactacg

SEQ ID NO: 38734 - DNA, 39 bp, Artificial Sequence
  primer
gtaaaacgacggccagtccagtaaactcctcttccagcc

SEQ ID NO: 38735 - DNA, 21 bp, Artificial Sequence
  primer
acatcaacgagtgtgagaccg

SEQ ID NO: 38736 - DNA, 35 bp, Artificial Sequence
  primer
gtaaaacgacggccagtggtcgtgcgtggtgagtg

SEQ ID NO: 38737 - DNA, 21 bp, Artificial Sequence
  primer
cccacttacactctcccacag

SEQ ID NO: 38738 - DNA, 38 bp, Artificial Sequence
  primer
gtaaaacgacggccagtaggttccttgaggaggagacg

SEQ ID NO: 38739 - DNA, 38 bp, Artificial Sequence
  primer
gtaaaacgacggccagtgcttccatgaagttgggactc

SEQ ID NO: 38740 - DNA, 38 bp, Artificial Sequence
  primer
gtaaaacgacggccagtcactgccagagaaatgacctc

SEQ ID NO: 38741 - DNA, 36 bp, Artificial Sequence
  primer
gtaaaacgacggccagtagtaaggaggccacctggg

SEQ ID NO: 38742 - DNA, 38 bp, Artificial Sequence
  primer
gtaaaacgacggccagtgacaatgacggagtccctgac

SEQ ID NO: 38743 - DNA, 37 bp, Artificial Sequence
  primer
gtaaaacgacggccagtctatgctgaggacagggtgc

SEQ ID NO: 38744 - DNA, 19 bp, Artificial Sequence
  primer
caggtttgggttctgggtg

SEQ ID NO: 38745 - DNA, 38 bp, Artificial Sequence
  primer
gtaaaacgacggccagtccaactgtctctccaggaagg

SEQ ID NO: 38746 - DNA, 38 bp, Artificial Sequence
  primer
gtaaaacgacggccagttagcaccaactatgtccaggg

SEQ ID NO: 38747 - DNA, 37 bp, Artificial Sequence
  primer
gtaaaacgacggccagtgggtcttctgcttctcccag

SEQ ID NO: 38748 - DNA, 36 bp, Artificial Sequence
  primer
gtaaaacgacggccagtgtggcactccaagcaaagg

SEQ ID NO: 38749 - DNA, 21 bp, Artificial Sequence
  primer
ggacaccagggaggtgaaata

SEQ ID NO: 38750 - DNA, 38 bp, Artificial Sequence
  primer
gtaaaacgacggccagttgacaggcgctgttgtatagg

SEQ ID NO: 38751 - DNA, 36 bp, Artificial Sequence
  primer
gtaaaacgacggccagtgagcacccatcctggtttg

SEQ ID NO: 38752 - DNA, 35 bp, Artificial Sequence
  primer
gtaaaacgacggccagtccagatgatgcccgagac

SEQ ID NO: 38753 - DNA, 19 bp, Artificial Sequence
  primer
cctcttcctgggtgagcag

SEQ ID NO: 38754 - DNA, 35 bp, Artificial Sequence
  primer
gtaaaacgacggccagtgttccgaagggccagtcc

SEQ ID NO: 38755 - DNA, 39 bp, Artificial Sequence
  primer
gtaaaacgacggccagtggattctatgatgacctgcgag

SEQ ID NO: 38756 - DNA, 35 bp, Artificial Sequence
  primer
gtaaaacgacggccagtggtcccaggcaccttcac

SEQ ID NO: 38757 - DNA, 21 bp, Artificial Sequence
  primer
ttgaagccattcattgcaaac

SEQ ID NO: 38758 - DNA, 20 bp, Artificial Sequence
  primer
cagacacctccctccgagac

SEQ ID NO: 38759 - DNA, 38 bp, Artificial Sequence
  primer
gtaaaacgacggccagtgcttcctccataggtgaggct

SEQ ID NO: 38760 - DNA, 21 bp, Artificial Sequence
  primer
tgatctatccaagggctggag

SEQ ID NO: 38761 - DNA, 38 bp, Artificial Sequence
  primer
gtaaaacgacggccagtattacccaactgtgaggaggg

SEQ ID NO: 38762 - DNA, 38 bp, Artificial Sequence
  primer
gtaaaacgacggccagtacctacagcatggtgaggatg

SEQ ID NO: 38763 - DNA, 21 bp, Artificial Sequence
  primer
tctaggctaccactgacaccg

SEQ ID NO: 38764 - DNA, 21 bp, Artificial Sequence
  primer
agcatgtcgaatgaatgaacc

SEQ ID NO: 38765 - DNA, 39 bp, Artificial Sequence
  primer
gtaaaacgacggccagtaagccttgtttgacatggattc

SEQ ID NO: 38766 - DNA, 24 bp, Artificial Sequence
  primer
cctcaaatcttaaacaaggctttc

SEQ ID NO: 38767 - DNA, 38 bp, Artificial Sequence
  primer
gtaaaacgacggccagttagctgagccgttaagcaatg

SEQ ID NO: 38768 - DNA, 22 bp, Artificial Sequence
  primer
cagaattggtaggatgacctgc

SEQ ID NO: 38769 - DNA, 21 bp, Artificial Sequence
  primer
ggagcagaagagaagacggtg

SEQ ID NO: 38770 - DNA, 40 bp, Artificial Sequence
  primer
gtaaaacgacggccagtcaacgagtagcttgattcattgg

SEQ ID NO: 38771 - DNA, 39 bp, Artificial Sequence
  primer
gtaaaacgacggccagtgggtcagaatgaaagaaccaag

SEQ ID NO: 38772 - DNA, 39 bp, Artificial Sequence
  primer
gtaaaacgacggccagtttaatcagcttgctggcttacc

SEQ ID NO: 38773 - DNA, 21 bp, Artificial Sequence
  primer
taagggatgcattcaggtgtc

SEQ ID NO: 38774 - DNA, 21 bp, Artificial Sequence
  primer
tgccaagccttaaaggaagag

SEQ ID NO: 38775 - DNA, 21 bp, Artificial Sequence
  primer
agattggtgtctgtgcaatgg

SEQ ID NO: 38776 - DNA, 38 bp, Artificial Sequence
  primer
gtaaaacgacggccagtttaggaagcagctcaactggc

SEQ ID NO: 38777 - DNA, 39 bp, Artificial Sequence
  primer
gtaaaacgacggccagtggaacaattgctgaggaacatc

SEQ ID NO: 38778 - DNA, 38 bp, Artificial Sequence
  primer
gtaaaacgacggccagtggtaagtgcacaatgtgagcc

SEQ ID NO: 38779 - DNA, 38 bp, Artificial Sequence
  primer
gtaaaacgacggccagttagagaccattcccttccacc

SEQ ID NO: 38780 - DNA, 37 bp, Artificial Sequence
  primer
gtaaaacgacggccagtcgtttcctaggtttgttccg

SEQ ID NO: 38781 - DNA, 21 bp, Artificial Sequence
  primer
cctagacagggagtgtcgtcc

SEQ ID NO: 38782 - DNA, 38 bp, Artificial Sequence
  primer
gtaaaacgacggccagtgatgctttgcagagtccttgg

SEQ ID NO: 38783 - DNA, 38 bp, Artificial Sequence
  primer
gtaaaacgacggccagtaggccctcaaactaaggatgg

SEQ ID NO: 38784 - DNA, 21 bp, Artificial Sequence
  primer
ctgccatgttccatccattag

SEQ ID NO: 38785 - DNA, 40 bp, Artificial Sequence
  primer
gtaaaacgacggccagttcaaaggaggctccataactttc

SEQ ID NO: 38786 - DNA, 38 bp, Artificial Sequence
  primer
gtaaaacgacggccagtaagtaggcagaagcttggcac

SEQ ID NO: 38787 - DNA, 39 bp, Artificial Sequence
  primer
gtaaaacgacggccagtgccatgaaacgaactaggattg

SEQ ID NO: 38788 - DNA, 21 bp, Artificial Sequence
  primer
gaagctgaggttggaggattg

SEQ ID NO: 38789 - DNA, 21 bp, Artificial Sequence
  primer
aagtccaactcaggtaagcgg

SEQ ID NO: 38790 - DNA, 39 bp, Artificial Sequence
  primer
gtaaaacgacggccagtttaatgttcactgtgtgccagg

SEQ ID NO: 38791 - DNA, 38 bp, Artificial Sequence
  primer
gtaaaacgacggccagtaacaggagacaggagggtagc

SEQ ID NO: 38792 - DNA, 38 bp, Artificial Sequence
  primer
gtaaaacgacggccagtagaggtaggagggtctagccg

SEQ ID NO: 38793 - DNA, 22 bp, Artificial Sequence
  primer
tcagctttatagcccatcatcc

SEQ ID NO: 38794 - DNA, 37 bp, Artificial Sequence
  primer
gtaaaacgacggccagtcatggtgttgggatcctttg

SEQ ID NO: 38795 - DNA, 38 bp, Artificial Sequence
  primer
gtaaaacgacggccagtgtctactgtgcccattgaggg

SEQ ID NO: 38796 - DNA, 22 bp, Artificial Sequence
  primer
cacgatatagattgacctgccc

SEQ ID NO: 38797 - DNA, 21 bp, Artificial Sequence
  primer
gaaccttgtcacttgggtttg

SEQ ID NO: 38798 - DNA, 24 bp, Artificial Sequence
  primer
gatggaaattgtcggtaatctagg

SEQ ID NO: 38799 - DNA, 21 bp, Artificial Sequence
  primer
cccaggcaacagagtgagact

SEQ ID NO: 38800 - DNA, 21 bp, Artificial Sequence
  primer
tctctttgccctgatctcctc

SEQ ID NO: 38801 - DNA, 21 bp, Artificial Sequence
  primer
gcatcccataagctgacattc

SEQ ID NO: 38802 - DNA, 20 bp, Artificial Sequence
  primer
gcttcatgggagtgtgtgtg

SEQ ID NO: 38803 - DNA, 24 bp, Artificial Sequence
  primer
cccaaactatctagttcttccacc

SEQ ID NO: 38804 - DNA, 38 bp, Artificial Sequence
  primer
gtaaaacgacggccagttgcagttagcactggatcttg

SEQ ID NO: 38805 - DNA, 21 bp, Artificial Sequence
  primer
agcaaagcaagaccctgtctc

SEQ ID NO: 38806 - DNA, 35 bp, Artificial Sequence
  primer
gtaaaacgacggccagtgtgagtgcctggcccttg

SEQ ID NO: 38807 - DNA, 21 bp, Artificial Sequence
  primer
gaaagcagagttcccagttcc

SEQ ID NO: 38808 - DNA, 41 bp, Artificial Sequence
  primer
gtaaaacgacggccagtggtatccttatcactgaaggatgg

SEQ ID NO: 38809 - DNA, 39 bp, Artificial Sequence
  primer
gtaaaacgacggccagtaaaggaaggagaagaatgcaaa

SEQ ID NO: 38810 - DNA, 22 bp, Artificial Sequence
  primer
tttcatatgtgagggctgtctc

SEQ ID NO: 38811 - DNA, 38 bp, Artificial Sequence
  primer
gtaaaacgacggccagtgacttaatcatttggccaggg

SEQ ID NO: 38812 - DNA, 25 bp, Artificial Sequence
  primer
tgcctattgatggtgaataataagg

SEQ ID NO: 38813 - DNA, 26 bp, Artificial Sequence
  primer
cagaattgatgggagtattaaaccag

SEQ ID NO: 38814 - DNA, 24 bp, Artificial Sequence
  primer
tcttggtgtctactctttccaacc

SEQ ID NO: 38815 - DNA, 20 bp, Artificial Sequence
  primer
agctccaagctggacaacag

SEQ ID NO: 38816 - DNA, 39 bp, Artificial Sequence
  primer
gtaaaacgacggccagtggtgtcattgaattgaattggg

SEQ ID NO: 38817 - DNA, 39 bp, Artificial Sequence
  primer
gtaaaacgacggccagtggaagttccacgtcagtcagtc

SEQ ID NO: 38818 - DNA, 21 bp, Artificial Sequence
  primer
aaagcttgaagaccactgctg

SEQ ID NO: 38819 - DNA, 24 bp, Artificial Sequence
  primer
gaggatctggaataccatcttgtg

SEQ ID NO: 38820 - DNA, 21 bp, Artificial Sequence
  primer
gcaaggaagaattgggttgtg

SEQ ID NO: 38821 - DNA, 29 bp, Artificial Sequence
  primer
ttgcttcttctaaagactgtgtcttagtt

SEQ ID NO: 38822 - DNA, 22 bp, Artificial Sequence
  primer
tcagaaatatggtggatttgcc

SEQ ID NO: 38823 - DNA, 26 bp, Artificial Sequence
  primer
ggaaatctattatcctgagaatttgg

SEQ ID NO: 38824 - DNA, 38 bp, Artificial Sequence
  primer
gtaaaacgacggccagttgggtctctttcacctgacac

SEQ ID NO: 38825 - DNA, 22 bp, Artificial Sequence
  primer
ggaaatggagctctctgttagg

SEQ ID NO: 38826 - DNA, 21 bp, Artificial Sequence
  primer
tttccagccattctcaccttc

SEQ ID NO: 38827 - DNA, 26 bp, Artificial Sequence
  primer
gccctagtaattcatgtcatacacag

SEQ ID NO: 38828 - DNA, 39 bp, Artificial Sequence
  primer
gtaaaacgacggccagttttggagcagaaagtgagtgtg

SEQ ID NO: 38829 - DNA, 21 bp, Artificial Sequence
  primer
acataatagctggccaccctc

SEQ ID NO: 38830 - DNA, 21 bp, Artificial Sequence
  primer
ctgggcaacagagacttcatc

SEQ ID NO: 38831 - DNA, 38 bp, Artificial Sequence
  primer
gtaaaacgacggccagttttgagcaagagggagattgg

SEQ ID NO: 38832 - DNA, 22 bp, Artificial Sequence
  primer
gagggaaatgatttgctctgtg

SEQ ID NO: 38833 - DNA, 42 bp, Artificial Sequence
  primer
gtaaaacgacggccagttgcacagttaacagaataatgttgg

SEQ ID NO: 38834 - DNA, 38 bp, Artificial Sequence
  primer
gtaaaacgacggccagtatccctcatacccttgcagtg

SEQ ID NO: 38835 - DNA, 22 bp, Artificial Sequence
  primer
cttacccagtcaggtttcaagg

SEQ ID NO: 38836 - DNA, 39 bp, Artificial Sequence
  primer
gtaaaacgacggccagtacagggtggaagtacattcagg

SEQ ID NO: 38837 - DNA, 21 bp, Artificial Sequence
  primer
tctcctgacctcatgatccac

SEQ ID NO: 38838 - DNA, 37 bp, Artificial Sequence
  primer
gtaaaacgacggccagttttgaatcatgaacccacgg

SEQ ID NO: 38839 - DNA, 38 bp, Artificial Sequence
  primer
gtaaaacgacggccagtactacatttcctagcgtgccc

SEQ ID NO: 38840 - DNA, 20 bp, Artificial Sequence
  primer
gcctgtctgtcatgctcacc

SEQ ID NO: 38841 - DNA, 38 bp, Artificial Sequence
  primer
gtaaaacgacggccagtagtgtactgcagtggaggtgg

SEQ ID NO: 38842 - DNA, 21 bp, Artificial Sequence
  primer
tctctggacctgtctgcttcc

SEQ ID NO: 38843 - DNA, 21 bp, Artificial Sequence
  primer
aaatgtgggagtgagggtgtc

SEQ ID NO: 38844 - DNA, 36 bp, Artificial Sequence
  primer
gtaaaacgacggccagtgtggctcgggcacttagtc

SEQ ID NO: 38845 - DNA, 21 bp, Artificial Sequence
  primer
tctctgtgcagtgctggagtc

SEQ ID NO: 38846 - DNA, 21 bp, Artificial Sequence
  primer
gaggaggtgaccttgtgtggt

SEQ ID NO: 38847 - DNA, 38 bp, Artificial Sequence
  primer
gtaaaacgacggccagttgaaggttctccgagatcagc

SEQ ID NO: 38848 - DNA, 21 bp, Artificial Sequence
  primer
atcaaggagtaccaggccaag

SEQ ID NO: 38849 - DNA, 38 bp, Artificial Sequence
  primer
gtaaaacgacggccagtctgtagaaccactgtggcacc

SEQ ID NO: 38850 - DNA, 39 bp, Artificial Sequence
  primer
gtaaaacgacggccagtttgtagaggcttgattgccatt

SEQ ID NO: 38851 - DNA, 40 bp, Artificial Sequence
  primer
gtaaaacgacggccagtcatacccagaaagccctgtttag

SEQ ID NO: 38852 - DNA, 37 bp, Artificial Sequence
  primer
gtaaaacgacggccagtgtgtgggctgatcctgaaag

SEQ ID NO: 38853 - DNA, 37 bp, Artificial Sequence
  primer
gtaaaacgacggccagttgcctttgtggagacaggag

SEQ ID NO: 38854 - DNA, 21 bp, Artificial Sequence
  primer
ggctcgtgtagtaatctgggc

SEQ ID NO: 38855 - DNA, 40 bp, Artificial Sequence
  primer
gtaaaacgacggccagtcatgagaaacgcttacttcctcc

SEQ ID NO: 38856 - DNA, 21 bp, Artificial Sequence
  primer
ggtctctgaggaccaggacag

SEQ ID NO: 38857 - DNA, 37 bp, Artificial Sequence
  primer
gtaaaacgacggccagtgagaaggctgaaggacccac

SEQ ID NO: 38858 - DNA, 38 bp, Artificial Sequence
  primer
gtaaaacgacggccagtacggctctcatctctcaccag

SEQ ID NO: 38859 - DNA, 38 bp, Artificial Sequence
  primer
gtaaaacgacggccagtgctgagcagagggtttgagtc

SEQ ID NO: 38860 - DNA, 38 bp, Artificial Sequence
  primer
gtaaaacgacggccagttccaaaggacttctgactggg

SEQ ID NO: 38861 - DNA, 38 bp, Artificial Sequence
  primer
gtaaaacgacggccagtcctaaggaaggactcagtggg

SEQ ID NO: 38862 - DNA, 20 bp, Artificial Sequence
  primer
tgccctgtctccaagttctg

SEQ ID NO: 38863 - DNA, 38 bp, Artificial Sequence
  primer
gtaaaacgacggccagtcttctgcctgaagacccattc

SEQ ID NO: 38864 - DNA, 20 bp, Artificial Sequence
  primer
ttcatgagtgtggcctctcc

SEQ ID NO: 38865 - DNA, 21 bp, Artificial Sequence
  primer
ccctgtaagggaggatgtgtc

SEQ ID NO: 38866 - DNA, 38 bp, Artificial Sequence
  primer
gtaaaacgacggccagtcacatgtcttctgcttcccac

SEQ ID NO: 38867 - DNA, 38 bp, Artificial Sequence
  primer
gtaaaacgacggccagtggtagggtggaacaccttgag

SEQ ID NO: 38868 - DNA, 20 bp, Artificial Sequence
  primer
ggatgggaatcaccttggtc

SEQ ID NO: 38869 - DNA, 20 bp, Artificial Sequence
  primer
gattggatggcttgttgctg

SEQ ID NO: 38870 - DNA, 21 bp, Artificial Sequence
  primer
cacctgtggaaagagttgcag

SEQ ID NO: 38871 - DNA, 37 bp, Artificial Sequence
  primer
gtaaaacgacggccagtaaagcccttcagaacatggg

SEQ ID NO: 38872 - DNA, 21 bp, Artificial Sequence
  primer
gcccgtttcactacaccagag

SEQ ID NO: 38873 - DNA, 21 bp, Artificial Sequence
  primer
cgagtatggcagtgacagagc

SEQ ID NO: 38874 - DNA, 26 bp, Artificial Sequence
  primer
tggtatagcccataaagttgaagtag

SEQ ID NO: 38875 - DNA, 21 bp, Artificial Sequence
  primer
ggtttatgcattgaaagccag

SEQ ID NO: 38876 - DNA, 23 bp, Artificial Sequence
  primer
caatgcatcagttgtgtttagga

SEQ ID NO: 38877 - DNA, 38 bp, Artificial Sequence
  primer
gtaaaacgacggccagtacaattggaaattggctaggg

SEQ ID NO: 38878 - DNA, 36 bp, Artificial Sequence
  primer
gtaaaacgacggccagtgtttgggttctgccctttg

SEQ ID NO: 38879 - DNA, 21 bp, Artificial Sequence
  primer
tggtttatcagttgctccagg

SEQ ID NO: 38880 - DNA, 38 bp, Artificial Sequence
  primer
gtaaaacgacggccagttttgtgtacatgtgacctggg

SEQ ID NO: 38881 - DNA, 38 bp, Artificial Sequence
  primer
gtaaaacgacggccagtagggcatgtgtgtttaactgg

SEQ ID NO: 38882 - DNA, 39 bp, Artificial Sequence
  primer
gtaaaacgacggccagttcgagataattagttccggcag

SEQ ID NO: 38883 - DNA, 21 bp, Artificial Sequence
  primer
ccttcctcctctcttcaaccc

SEQ ID NO: 38884 - DNA, 21 bp, Artificial Sequence
  primer
agaaatggtggtatccttggg

SEQ ID NO: 38885 - DNA, 44 bp, Artificial Sequence
  primer
gtaaaacgacggccagtcaatgttcctgtcatacatagttcctc

SEQ ID NO: 38886 - DNA, 25 bp, Artificial Sequence
  primer
tcatggtacttgtaaatttggtctg

SEQ ID NO: 38887 - DNA, 40 bp, Artificial Sequence
  primer
gtaaaacgacggccagttggaagctttgaaagatgctaag

SEQ ID NO: 38888 - DNA, 24 bp, Artificial Sequence
  primer
gatttccaggctaatgcaaataag

SEQ ID NO: 38889 - DNA, 38 bp, Artificial Sequence
  primer
gtaaaacgacggccagttggcatttatgaggtggtcag

SEQ ID NO: 38890 - DNA, 39 bp, Artificial Sequence
  primer
gtaaaacgacggccagtaatccatttgactcacaggagg

SEQ ID NO: 38891 - DNA, 38 bp, Artificial Sequence
  primer
gtaaaacgacggccagtttggcagaaggttatgtgtgc

SEQ ID NO: 38892 - DNA, 38 bp, Artificial Sequence
  primer
gtaaaacgacggccagtactgtccatccattgacccag

SEQ ID NO: 38893 - DNA, 26 bp, Artificial Sequence
  primer
aagtctttatcatacctgtgttctcg

SEQ ID NO: 38894 - DNA, 23 bp, Artificial Sequence
  primer
tctatgccttatgggtctttcag

SEQ ID NO: 38895 - DNA, 20 bp, Artificial Sequence
  primer
cttgaaccagcggaagtgac

SEQ ID NO: 38896 - DNA, 21 bp, Artificial Sequence
  primer
agagagaagtgggaggtccag

SEQ ID NO: 38897 - DNA, 39 bp, Artificial Sequence
  primer
gtaaaacgacggccagtgcaggatggatttcttgcatac

SEQ ID NO: 38898 - DNA, 38 bp, Artificial Sequence
  primer
gtaaaacgacggccagtcaggttcagctcttcatcagc

SEQ ID NO: 38899 - DNA, 41 bp, Artificial Sequence
  primer
gtaaaacgacggccagtttcctgaaagagtatggaaacctc

SEQ ID NO: 38900 - DNA, 44 bp, Artificial Sequence
  primer
gtaaaacgacggccagtgatagcagatacatgaaatgtgttgac

SEQ ID NO: 38901 - DNA, 37 bp, Artificial Sequence
  primer
gtaaaacgacggccagtcgctccagcctagatgacag

SEQ ID NO: 38902 - DNA, 38 bp, Artificial Sequence
  primer
gtaaaacgacggccagttacaggcatgtgctatcacgc

SEQ ID NO: 38903 - DNA, 21 bp, Artificial Sequence
  primer
tggccgctctgtacacattta

SEQ ID NO: 38904 - DNA, 18 bp, Artificial Sequence
  primer
ccatgttgccttccatgc

SEQ ID NO: 38905 - DNA, 39 bp, Artificial Sequence
  primer
gtaaaacgacggccagtgcacccttgtgaacagtgtaag

SEQ ID NO: 38906 - DNA, 38 bp, Artificial Sequence
  primer
gtaaaacgacggccagtttagggtggttcctggaattg

SEQ ID NO: 38907 - DNA, 38 bp, Artificial Sequence
  primer
gtaaaacgacggccagttagcatctcaggttccctctg

SEQ ID NO: 38908 - DNA, 42 bp, Artificial Sequence
  primer
gtaaaacgacggccagttgaaagaaaccaaggtatgtagaaa

SEQ ID NO: 38909 - DNA, 22 bp, Artificial Sequence
  primer
ttgaataatgcattgaaggctg

SEQ ID NO: 38910 - DNA, 40 bp, Artificial Sequence
  primer
gtaaaacgacggccagtgcagcttagtatgttgaattgcc

SEQ ID NO: 38911 - DNA, 20 bp, Artificial Sequence
  primer
agccaatattgcaccactgc

SEQ ID NO: 38912 - DNA, 42 bp, Artificial Sequence
  primer
gtaaaacgacggccagtaaggtaacagatgagttgatttgga

SEQ ID NO: 38913 - DNA, 39 bp, Artificial Sequence
  primer
gtaaaacgacggccagttgactgcagaccataattacca

SEQ ID NO: 38914 - DNA, 39 bp, Artificial Sequence
  primer
gtaaaacgacggccagtgcaagattctaaacccaaaggg

SEQ ID NO: 38915 - DNA, 21 bp, Artificial Sequence
  primer
agcaagaattgggaaatagcc

SEQ ID NO: 38916 - DNA, 20 bp, Artificial Sequence
  primer
tcctgccactgcagtctagc

SEQ ID NO: 38917 - DNA, 38 bp, Artificial Sequence
  primer
gtaaaacgacggccagtggtaagagtttgttcccgtgg

SEQ ID NO: 38918 - DNA, 38 bp, Artificial Sequence
  primer
gtaaaacgacggccagttccctttccatcgctctaaat

SEQ ID NO: 38919 - DNA, 21 bp, Artificial Sequence
  primer
atagatttcgcatctgggctg

SEQ ID NO: 38920 - DNA, 42 bp, Artificial Sequence
  primer
gtaaaacgacggccagtgaggaaggtaggagttattcacctc

SEQ ID NO: 38921 - DNA, 23 bp, Artificial Sequence
  primer
ttgcctccgaaagttaataatcc

SEQ ID NO: 38922 - DNA, 21 bp, Artificial Sequence
  primer
cccttgaagtgtgaggaaacc

SEQ ID NO: 38923 - DNA, 21 bp, Artificial Sequence
  primer
gaactgcctgaatttggaagc

SEQ ID NO: 38924 - DNA, 26 bp, Artificial Sequence
  primer
aaactaaactcattggagttacatgg

SEQ ID NO: 38925 - DNA, 39 bp, Artificial Sequence
  primer
gtaaaacgacggccagtttaatttgtcaaaggtcacccg

SEQ ID NO: 38926 - DNA, 21 bp, Artificial Sequence
  primer
tttccctgggataagttacgg

SEQ ID NO: 38927 - DNA, 38 bp, Artificial Sequence
  primer
gtaaaacgacggccagtgttcccactgatctcagaccc

SEQ ID NO: 38928 - DNA, 20 bp, Artificial Sequence
  primer
ttagtctggcatggtggtgc

SEQ ID NO: 38929 - DNA, 21 bp, Artificial Sequence
  primer
gggcagagaatggagaatgag

SEQ ID NO: 38930 - DNA, 38 bp, Artificial Sequence
  primer
gtaaaacgacggccagtccagctgtgactctggcttag

SEQ ID NO: 38931 - DNA, 38 bp, Artificial Sequence
  primer
gtaaaacgacggccagtaaccctcagatcctgctcttg

SEQ ID NO: 38932 - DNA, 38 bp, Artificial Sequence
  primer
gtaaaacgacggccagtaactccactggtaatggaggg

SEQ ID NO: 38933 - DNA, 37 bp, Artificial Sequence
  primer
gtaaaacgacggccagtctctgaagcgggtaggacag

SEQ ID NO: 38934 - DNA, 37 bp, Artificial Sequence
  primer
gtaaaacgacggccagtactttcacgtgcaggactgg

SEQ ID NO: 38935 - DNA, 38 bp, Artificial Sequence
  primer
gtaaaacgacggccagtgtgcctttacaatccagtccc

SEQ ID NO: 38936 - DNA, 38 bp, Artificial Sequence
  primer
gtaaaacgacggccagtagttaacattggccgggaaag

SEQ ID NO: 38937 - DNA, 38 bp, Artificial Sequence
  primer
gtaaaacgacggccagttagatccctggatgcataggg

SEQ ID NO: 38938 - DNA, 39 bp, Artificial Sequence
  primer
gtaaaacgacggccagtgatttaggaatgggagtggagg

SEQ ID NO: 38939 - DNA, 20 bp, Artificial Sequence
  primer
taagcaattcgcccatcttg

SEQ ID NO: 38940 - DNA, 21 bp, Artificial Sequence
  primer
agcagacaaccagatgagcag

SEQ ID NO: 38941 - DNA, 21 bp, Artificial Sequence
  primer
tccttcagttatttgcatggg

SEQ ID NO: 38942 - DNA, 20 bp, Artificial Sequence
  primer
gagccactgcacttgtcctg

SEQ ID NO: 38943 - DNA, 21 bp, Artificial Sequence
  primer
tttcccgaagaaccagagttg

SEQ ID NO: 38944 - DNA, 42 bp, Artificial Sequence
  primer
gtaaaacgacggccagtgattcagtagtagatttggtttggg

SEQ ID NO: 38945 - DNA, 38 bp, Artificial Sequence
  primer
gtaaaacgacggccagttagaggcagctgttggctatg

SEQ ID NO: 38946 - DNA, 38 bp, Artificial Sequence
  primer
gtaaaacgacggccagtgtctttgggaaggagtgaacg

SEQ ID NO: 38947 - DNA, 37 bp, Artificial Sequence
  primer
gtaaaacgacggccagtgctcgtttctgctcatctgg

SEQ ID NO: 38948 - DNA, 37 bp, Artificial Sequence
  primer
gtaaaacgacggccagtctctgagtacagcttcccgc

SEQ ID NO: 38949 - DNA, 38 bp, Artificial Sequence
  primer
gtaaaacgacggccagtaagaaactgaagcccaaaggg

SEQ ID NO: 38950 - DNA, 38 bp, Artificial Sequence
  primer
gtaaaacgacggccagtgtatgtttggcttgggacctg

SEQ ID NO: 38951 - DNA, 24 bp, Artificial Sequence
  primer
ttctcatgccttaatttgctattg

SEQ ID NO: 38952 - DNA, 22 bp, Artificial Sequence
  primer
agaaatctttgggttcatctgg

SEQ ID NO: 38953 - DNA, 43 bp, Artificial Sequence
  primer
gtaaaacgacggccagttctgtacaactaatgtcatggacaag

SEQ ID NO: 38954 - DNA, 38 bp, Artificial Sequence
  primer
gtaaaacgacggccagtcgttaaatgcatgttgtgctg

SEQ ID NO: 38955 - DNA, 42 bp, Artificial Sequence
  primer
gtaaaacgacggccagtaatgtccaagcctctatgatgtaag

SEQ ID NO: 38956 - DNA, 38 bp, Artificial Sequence
  primer
gtaaaacgacggccagttgacaatcaaacacctgagcc

SEQ ID NO: 38957 - DNA, 39 bp, Artificial Sequence
  primer
gtaaaacgacggccagttctgaccaagttgaggtaaggg

SEQ ID NO: 38958 - DNA, 38 bp, Artificial Sequence
  primer
gtaaaacgacggccagttgccttgaaggagagaaatcc

SEQ ID NO: 38959 - DNA, 20 bp, Artificial Sequence
  primer
gcctggctggtaactccttc

SEQ ID NO: 38960 - DNA, 38 bp, Artificial Sequence
  primer
gtaaaacgacggccagttcctgttgtgctctcacttcc

SEQ ID NO: 38961 - DNA, 38 bp, Artificial Sequence
  primer
gtaaaacgacggccagtttctttgtgtggttggtggag

SEQ ID NO: 38962 - DNA, 21 bp, Artificial Sequence
  primer
cctgtcctaagtcaagcaggc

SEQ ID NO: 38963 - DNA, 21 bp, Artificial Sequence
  primer
gagaagttcagtgcatctgcc

SEQ ID NO: 38964 - DNA, 38 bp, Artificial Sequence
  primer
gtaaaacgacggccagtggccttagagagcttcttccc

SEQ ID NO: 38965 - DNA, 21 bp, Artificial Sequence
  primer
gatgtaagggactcgggaagg

SEQ ID NO: 38966 - DNA, 38 bp, Artificial Sequence
  primer
gtaaaacgacggccagtgatgtatcctagggccagcag

SEQ ID NO: 38967 - DNA, 21 bp, Artificial Sequence
  primer
gcctagggtgcagtaatggag

SEQ ID NO: 38968 - DNA, 21 bp, Artificial Sequence
  primer
gtctttccaagggttctccag

SEQ ID NO: 38969 - DNA, 38 bp, Artificial Sequence
  primer
gtaaaacgacggccagtggcctctgaaactctccattg

SEQ ID NO: 38970 - DNA, 38 bp, Artificial Sequence
  primer
gtaaaacgacggccagtctccttcccagtccttgtttg

SEQ ID NO: 38971 - DNA, 38 bp, Artificial Sequence
  primer
gtaaaacgacggccagtacctggaaggtggagatgttg

SEQ ID NO: 38972 - DNA, 38 bp, Artificial Sequence
  primer
gtaaaacgacggccagtaatcaccctaaccactgcacc

SEQ ID NO: 38973 - DNA, 21 bp, Artificial Sequence
  primer
gcgtttaagccaagtggagac

SEQ ID NO: 38974 - DNA, 21 bp, Artificial Sequence
  primer
gcttcagttctagcctacccg

SEQ ID NO: 38975 - DNA, 39 bp, Artificial Sequence
  primer
gtaaaacgacggccagttctgggatgcactcttcttctc

SEQ ID NO: 38976 - DNA, 38 bp, Artificial Sequence
  primer
gtaaaacgacggccagttgtagttcctgaaggtgcgtg

SEQ ID NO: 38977 - DNA, 21 bp, Artificial Sequence
  primer
tgtatgggagggattgacaag

SEQ ID NO: 38978 - DNA, 21 bp, Artificial Sequence
  primer
aacagtttccttgcatttggc

SEQ ID NO: 38979 - DNA, 21 bp, Artificial Sequence
  primer
agtgttgcccgataatggaac

SEQ ID NO: 38980 - DNA, 21 bp, Artificial Sequence
  primer
tccctagagtaagcgaccacg

SEQ ID NO: 38981 - DNA, 22 bp, Artificial Sequence
  primer
ggtcctttgtgatttgagttgc

SEQ ID NO: 38982 - DNA, 38 bp, Artificial Sequence
  primer
gtaaaacgacggccagtctaccatgggccagtctcttc

SEQ ID NO: 38983 - DNA, 38 bp, Artificial Sequence
  primer
gtaaaacgacggccagttagggaaagtcgaaggctagg

SEQ ID NO: 38984 - DNA, 38 bp, Artificial Sequence
  primer
gtaaaacgacggccagtgatgccactccttccctttag

SEQ ID NO: 38985 - DNA, 24 bp, Artificial Sequence
  primer
cgcttatggtatatctgcatgttc

SEQ ID NO: 38986 - DNA, 19 bp, Artificial Sequence
  primer
atgtgccttcgtgcctagc

SEQ ID NO: 38987 - DNA, 37 bp, Artificial Sequence
  primer
gtaaaacgacggccagtggcgaaagtgatctcggaac

SEQ ID NO: 38988 - DNA, 18 bp, Artificial Sequence
  primer
tgggtggcagagcaagac

SEQ ID NO: 38989 - DNA, 41 bp, Artificial Sequence
  primer
gtaaaacgacggccagttttgtttcgtctgtgaatagatgt

SEQ ID NO: 38990 - DNA, 22 bp, Artificial Sequence
  primer
ttcagacctttaagcatcctgc

SEQ ID NO: 38991 - DNA, 41 bp, Artificial Sequence
  primer
gtaaaacgacggccagttcacctcatggttaatcttgtttc

SEQ ID NO: 38992 - DNA, 38 bp, Artificial Sequence
  primer
gtaaaacgacggccagtatttggaagaaaggaggaggg

SEQ ID NO: 38993 - DNA, 22 bp, Artificial Sequence
  primer
tgcatgaaactcttggaaattg

SEQ ID NO: 38994 - DNA, 38 bp, Artificial Sequence
  primer
gtaaaacgacggccagtgtaggctacgccgtcagaatc

SEQ ID NO: 38995 - DNA, 36 bp, Artificial Sequence
  primer
gtaaaacgacggccagttccgtcgcctgacagaatc

SEQ ID NO: 38996 - DNA, 38 bp, Artificial Sequence
  primer
gtaaaacgacggccagtggaaacaaaggctcagaccag

SEQ ID NO: 38997 - DNA, 38 bp, Artificial Sequence
  primer
gtaaaacgacggccagtctcctctgtacattctcccgc

SEQ ID NO: 38998 - DNA, 38 bp, Artificial Sequence
  primer
gtaaaacgacggccagtggtgagagttgtgacggtgtc

SEQ ID NO: 38999 - DNA, 21 bp, Artificial Sequence
  primer
tctcctgtactccaagccaag

SEQ ID NO: 39000 - DNA, 38 bp, Artificial Sequence
  primer
gtaaaacgacggccagtgaggcctttgtgaggatgaac

SEQ ID NO: 39001 - DNA, 38 bp, Artificial Sequence
  primer
gtaaaacgacggccagttgtgtatcagatttcagggcg

SEQ ID NO: 39002 - DNA, 20 bp, Artificial Sequence
  primer
gcaaagccaggtcatttcag

SEQ ID NO: 39003 - DNA, 21 bp, Artificial Sequence
  primer
actcctgtgcctctgttaccc

SEQ ID NO: 39004 - DNA, 38 bp, Artificial Sequence
  primer
gtaaaacgacggccagttagaatccaggcagcctaacc

SEQ ID NO: 39005 - DNA, 21 bp, Artificial Sequence
  primer
agctaaagctgtcttggcctc

SEQ ID NO: 39006 - DNA, 22 bp, Artificial Sequence
  primer
cccacttaattcaggttcttgc

SEQ ID NO: 39007 - DNA, 38 bp, Artificial Sequence
  primer
gtaaaacgacggccagtgagagtatccgaaggtttccg

SEQ ID NO: 39008 - DNA, 37 bp, Artificial Sequence
  primer
gtaaaacgacggccagtgggattggagtgctctgctc

SEQ ID NO: 39009 - DNA, 21 bp, Artificial Sequence
  primer
gtcttacagttgtgggcaggg

SEQ ID NO: 39010 - DNA, 39 bp, Artificial Sequence
  primer
gtaaaacgacggccagttgctatacaacctggaactggg

SEQ ID NO: 39011 - DNA, 21 bp, Artificial Sequence
  primer
aggttcacattcagtccgagg

SEQ ID NO: 39012 - DNA, 21 bp, Artificial Sequence
  primer
tgtcctgggaccttgctttag

SEQ ID NO: 39013 - DNA, 38 bp, Artificial Sequence
  primer
gtaaaacgacggccagtatcctgccacacaacaatcag

SEQ ID NO: 39014 - DNA, 38 bp, Artificial Sequence
  primer
gtaaaacgacggccagtgctgttggaatccagaatgtg

SEQ ID NO: 39015 - DNA, 38 bp, Artificial Sequence
  primer
gtaaaacgacggccagtgcccaggctgtttgtaagttc

SEQ ID NO: 39016 - DNA, 38 bp, Artificial Sequence
  primer
gtaaaacgacggccagtggcaagttgggtagcattagc

SEQ ID NO: 39017 - DNA, 38 bp, Artificial Sequence
  primer
gtaaaacgacggccagtcgagttctgtttcctcttggg

SEQ ID NO: 39018 - DNA, 38 bp, Artificial Sequence
  primer
gtaaaacgacggccagtatctggcttgctaggagatgg

SEQ ID NO: 39019 - DNA, 21 bp, Artificial Sequence
  primer
ttgagcctaggagtttgaggc

SEQ ID NO: 39020 - DNA, 21 bp, Artificial Sequence
  primer
gtcttacagttgtgggcaggg

SEQ ID NO: 39021 - DNA, 21 bp, Artificial Sequence
  primer
tccgagtgattgacagtgacc

SEQ ID NO: 39022 - DNA, 38 bp, Artificial Sequence
  primer
gtaaaacgacggccagtaagtgccctttctgctgtctg

SEQ ID NO: 39023 - DNA, 37 bp, Artificial Sequence
  primer
gtaaaacgacggccagtgtatgccgcttggatgagtg

SEQ ID NO: 39024 - DNA, 21 bp, Artificial Sequence
  primer
tggtgcagaggttaagaagcc

SEQ ID NO: 39025 - DNA, 21 bp, Artificial Sequence
  primer
tggttacagtggcagagttgg

SEQ ID NO: 39026 - DNA, 38 bp, Artificial Sequence
  primer
gtaaaacgacggccagtgccagccctgaatcttacaac

SEQ ID NO: 39027 - DNA, 35 bp, Artificial Sequence
  primer
gtaaaacgacggccagtctcccggcttctctccag

SEQ ID NO: 39028 - DNA, 38 bp, Artificial Sequence
  primer
gtaaaacgacggccagtctacaggagtctctggcctgc

SEQ ID NO: 39029 - DNA, 38 bp, Artificial Sequence
  primer
gtaaaacgacggccagtcccagcatgtgcttagaggag

SEQ ID NO: 39030 - DNA, 38 bp, Artificial Sequence
  primer
gtaaaacgacggccagttcacatggacccagagtgaag

SEQ ID NO: 39031 - DNA, 21 bp, Artificial Sequence
  primer
cctagggctgagtaaaccgtg

SEQ ID NO: 39032 - DNA, 21 bp, Artificial Sequence
  primer
gtgggtgaagatgctggtctc

SEQ ID NO: 39033 - DNA, 39 bp, Artificial Sequence
  primer
gtaaaacgacggccagtgatggtagtgttgtccagaggg

SEQ ID NO: 39034 - DNA, 38 bp, Artificial Sequence
  primer
gtaaaacgacggccagtctgatttgtcctgcctgtctc

SEQ ID NO: 39035 - DNA, 21 bp, Artificial Sequence
  primer
gatttgggaagatcgcttgag

SEQ ID NO: 39036 - DNA, 21 bp, Artificial Sequence
  primer
tggcgcttaaagttcagtttg

SEQ ID NO: 39037 - DNA, 39 bp, Artificial Sequence
  primer
gtaaaacgacggccagttggaatgtgctgttctaaatgg

SEQ ID NO: 39038 - DNA, 22 bp, Artificial Sequence
  primer
ggctttcatcttcgtctttgtg

SEQ ID NO: 39039 - DNA, 45 bp, Artificial Sequence
  primer
gtaaaacgacggccagttttgtagcttgatttcattatcatacac

SEQ ID NO: 39040 - DNA, 30 bp, Artificial Sequence
  primer
ttctagaatcaagaccatagaatagctaaa

SEQ ID NO: 39041 - DNA, 21 bp, Artificial Sequence
  primer
gaacatggatgcctcactctg

SEQ ID NO: 39042 - DNA, 38 bp, Artificial Sequence
  primer
gtaaaacgacggccagttaccattagggtgtcccttcc

SEQ ID NO: 39043 - DNA, 38 bp, Artificial Sequence
  primer
gtaaaacgacggccagtactgggagccatagaatcctg

SEQ ID NO: 39044 - DNA, 21 bp, Artificial Sequence
  primer
tagcgatgcttgataaatggc

SEQ ID NO: 39045 - DNA, 38 bp, Artificial Sequence
  primer
gtaaaacgacggccagtctcagctccatcagacattcc

SEQ ID NO: 39046 - DNA, 21 bp, Artificial Sequence
  primer
tcttagttgccagggcacttc

SEQ ID NO: 39047 - DNA, 22 bp, Artificial Sequence
  primer
acccacaatacatgccacatac

SEQ ID NO: 39048 - DNA, 38 bp, Artificial Sequence
  primer
gtaaaacgacggccagtaggagaaagatgctgattggc

SEQ ID NO: 39049 - DNA, 21 bp, Artificial Sequence
  primer
caagtgattccttgtgatccg

SEQ ID NO: 39050 - DNA, 36 bp, Artificial Sequence
  primer
gtaaaacgacggccagttttatgcccgtttggaagc

SEQ ID NO: 39051 - DNA, 38 bp, Artificial Sequence
  primer
gtaaaacgacggccagttgtatgccaatgaagcagagg

SEQ ID NO: 39052 - DNA, 38 bp, Artificial Sequence
  primer
gtaaaacgacggccagtgcagttcaaacacaggtcagc

SEQ ID NO: 39053 - DNA, 38 bp, Artificial Sequence
  primer
gtaaaacgacggccagtgaggaatgtgctttcctgtgg

SEQ ID NO: 39054 - DNA, 38 bp, Artificial Sequence
  primer
gtaaaacgacggccagtaattagaggtgtggcaatggg

SEQ ID NO: 39055 - DNA, 21 bp, Artificial Sequence
  primer
gaatacattgagaggtgggca

SEQ ID NO: 39056 - DNA, 21 bp, Artificial Sequence
  primer
ttggctagcctcactagcctc

SEQ ID NO: 39057 - DNA, 38 bp, Artificial Sequence
  primer
gtaaaacgacggccagttcctcaggatagcatggacac

SEQ ID NO: 39058 - DNA, 36 bp, Artificial Sequence
  primer
gtaaaacgacggccagttggagatgatgctgggacc

SEQ ID NO: 39059 - DNA, 21 bp, Artificial Sequence
  primer
caccacagctttcctctctgg

SEQ ID NO: 39060 - DNA, 38 bp, Artificial Sequence
  primer
gtaaaacgacggccagtggactgcacagtcatggtgag

SEQ ID NO: 39061 - DNA, 36 bp, Artificial Sequence
  primer
gtaaaacgacggccagtgtgctgctcagtgcaggtg

SEQ ID NO: 39062 - DNA, 38 bp, Artificial Sequence
  primer
gtaaaacgacggccagtccttcttatccaccatcagcc

SEQ ID NO: 39063 - DNA, 38 bp, Artificial Sequence
  primer
gtaaaacgacggccagtagtttacccaggcgtgagatg

SEQ ID NO: 39064 - DNA, 20 bp, Artificial Sequence
  primer
cgtctacctctgtggcaagg

SEQ ID NO: 39065 - DNA, 38 bp, Artificial Sequence
  primer
gtaaaacgacggccagtgaacaagtgtgagatcgccag

SEQ ID NO: 39066 - DNA, 21 bp, Artificial Sequence
  primer
acagtgcctcgaaaggtgatg

SEQ ID NO: 39067 - DNA, 21 bp, Artificial Sequence
  primer
taactgggtaaaccgagaccc

SEQ ID NO: 39068 - DNA, 21 bp, Artificial Sequence
  primer
cagcaaacatttcctgctcac

SEQ ID NO: 39069 - DNA, 38 bp, Artificial Sequence
  primer
gtaaaacgacggccagtcaacgacgaagtcatagccag

SEQ ID NO: 39070 - DNA, 37 bp, Artificial Sequence
  primer
gtaaaacgacggccagtaggccctcagagttggagag

SEQ ID NO: 39071 - DNA, 21 bp, Artificial Sequence
  primer
ctcagcatgcaaggacaagag

SEQ ID NO: 39072 - DNA, 38 bp, Artificial Sequence
  primer
gtaaaacgacggccagtcttagtgaggccagctaaggc

SEQ ID NO: 39073 - DNA, 21 bp, Artificial Sequence
  primer
accagtgtggtctacgtctgc

SEQ ID NO: 39074 - DNA, 21 bp, Artificial Sequence
  primer
gaggactggaagtggaggatg

SEQ ID NO: 39075 - DNA, 38 bp, Artificial Sequence
  primer
gtaaaacgacggccagttaacagagtgcaagcctggag

SEQ ID NO: 39076 - DNA, 37 bp, Artificial Sequence
  primer
gtaaaacgacggccagtgtagtggtgggtttgggagg

SEQ ID NO: 39077 - DNA, 40 bp, Artificial Sequence
  primer
gtaaaacgacggccagttcctacttggagcatttcatttg

SEQ ID NO: 39078 - DNA, 38 bp, Artificial Sequence
  primer
gtaaaacgacggccagttaaatgagaaatgggcctgag

SEQ ID NO: 39079 - DNA, 38 bp, Artificial Sequence
  primer
gtaaaacgacggccagtaacattctgcctttcatccag

SEQ ID NO: 39080 - DNA, 21 bp, Artificial Sequence
  primer
ctggtagggcctctgacaatc

SEQ ID NO: 39081 - DNA, 38 bp, Artificial Sequence
  primer
gtaaaacgacggccagtgaacatgaatggcagttggtg

SEQ ID NO: 39082 - DNA, 20 bp, Artificial Sequence
  primer
aaatggctcgcttaattggg

SEQ ID NO: 39083 - DNA, 21 bp, Artificial Sequence
  primer
cccaactactgctgggtttgt

SEQ ID NO: 39084 - DNA, 21 bp, Artificial Sequence
  primer
accgggaacactaaattctgc

SEQ ID NO: 39085 - DNA, 21 bp, Artificial Sequence
  primer
gactgttcccaggaaggtgag

SEQ ID NO: 39086 - DNA, 21 bp, Artificial Sequence
  primer
cagatagatcggccagtgctc

SEQ ID NO: 39087 - DNA, 39 bp, Artificial Sequence
  primer
gtaaaacgacggccagtagatgagagctctgtgtgtccc

SEQ ID NO: 39088 - DNA, 38 bp, Artificial Sequence
  primer
gtaaaacgacggccagtgcctagattcacacccagctc

SEQ ID NO: 39089 - DNA, 38 bp, Artificial Sequence
  primer
gtaaaacgacggccagtgatctgtggcttaggctggtg

SEQ ID NO: 39090 - DNA, 21 bp, Artificial Sequence
  primer
ggccagcatgtaactatgagg

SEQ ID NO: 39091 - DNA, 38 bp, Artificial Sequence
  primer
gtaaaacgacggccagtatgtggatgagagggatccag

SEQ ID NO: 39092 - DNA, 22 bp, Artificial Sequence
  primer
ccatggcagcaattcttatctc

SEQ ID NO: 39093 - DNA, 21 bp, Artificial Sequence
  primer
ctgggcaataaagtgagaccc

SEQ ID NO: 39094 - DNA, 21 bp, Artificial Sequence
  primer
agcccagtgtcggtatttgtc

SEQ ID NO: 39095 - DNA, 38 bp, Artificial Sequence
  primer
gtaaaacgacggccagtagtttcctcaattcagcaggg

SEQ ID NO: 39096 - DNA, 38 bp, Artificial Sequence
  primer
gtaaaacgacggccagtgtctgcatggctctgagtgtc

SEQ ID NO: 39097 - DNA, 38 bp, Artificial Sequence
  primer
gtaaaacgacggccagtcatgttaatgtgaccgcctcc

SEQ ID NO: 39098 - DNA, 38 bp, Artificial Sequence
  primer
gtaaaacgacggccagtcttggatgcttcttcctttcc

SEQ ID NO: 39099 - DNA, 21 bp, Artificial Sequence
  primer
aaggaccttccagtccagttg

SEQ ID NO: 39100 - DNA, 38 bp, Artificial Sequence
  primer
gtaaaacgacggccagtatctcagaaagcctggtgtcc

SEQ ID NO: 39101 - DNA, 38 bp, Artificial Sequence
  primer
gtaaaacgacggccagttgtgtgccagggatgtatcag

SEQ ID NO: 39102 - DNA, 38 bp, Artificial Sequence
  primer
gtaaaacgacggccagtggctgaggacatgggtgtatc

SEQ ID NO: 39103 - DNA, 21 bp, Artificial Sequence
  primer
aaagtcagtcttgccaccacc

SEQ ID NO: 39104 - DNA, 21 bp, Artificial Sequence
  primer
ctagaagccaggtttccttgg

SEQ ID NO: 39105 - DNA, 38 bp, Artificial Sequence
  primer
gtaaaacgacggccagtgagcttgagaagtgaccaccc

SEQ ID NO: 39106 - DNA, 21 bp, Artificial Sequence
  primer
cacagtgcaaaggcatagagg

SEQ ID NO: 39107 - DNA, 37 bp, Artificial Sequence
  primer
gtaaaacgacggccagtgtttgaacttccctcccacc

SEQ ID NO: 39108 - DNA, 21 bp, Artificial Sequence
  primer
atgtatcaagcagtgggaggc

SEQ ID NO: 39109 - DNA, 36 bp, Artificial Sequence
  primer
gtaaaacgacggccagtctgccattctcacacccac

SEQ ID NO: 39110 - DNA, 21 bp, Artificial Sequence
  primer
gtctacctgtgtggcaaggtg

SEQ ID NO: 39111 - DNA, 38 bp, Artificial Sequence
  primer
gtaaaacgacggccagttgtgcaatatgcatggtaggc

SEQ ID NO: 39112 - DNA, 38 bp, Artificial Sequence
  primer
gtaaaacgacggccagtcctatcatcatgactgtgccc

SEQ ID NO: 39113 - DNA, 38 bp, Artificial Sequence
  primer
gtaaaacgacggccagtctgcactctggcccaatctac

SEQ ID NO: 39114 - DNA, 18 bp, Artificial Sequence
  primer
ctcggtatcagggcgtgg

SEQ ID NO: 39115 - DNA, 37 bp, Artificial Sequence
  primer
gtaaaacgacggccagtatgcatctcgaatggtgcag

SEQ ID NO: 39116 - DNA, 38 bp, Artificial Sequence
  primer
gtaaaacgacggccagtctacccacaggccattgctac

SEQ ID NO: 39117 - DNA, 37 bp, Artificial Sequence
  primer
gtaaaacgacggccagtaaagtgtcacctcggaagcc

SEQ ID NO: 39118 - DNA, 38 bp, Artificial Sequence
  primer
gtaaaacgacggccagttctcctggagcagcctagttc

SEQ ID NO: 39119 - DNA, 20 bp, Artificial Sequence
  primer
ggaagcctgtctgggagaag

SEQ ID NO: 39120 - DNA, 21 bp, Artificial Sequence
  primer
gtctcaggcagctgaacactc

SEQ ID NO: 39121 - DNA, 38 bp, Artificial Sequence
  primer
gtaaaacgacggccagtctctgtgaggctttcaggcag

SEQ ID NO: 39122 - DNA, 22 bp, Artificial Sequence
  primer
aaacccagattctctttccctg

SEQ ID NO: 39123 - DNA, 37 bp, Artificial Sequence
  primer
gtaaaacgacggccagtcagtcactgtggtgcctgtc

SEQ ID NO: 39124 - DNA, 38 bp, Artificial Sequence
  primer
gtaaaacgacggccagtgcagtgtcagcacacagtcag

SEQ ID NO: 39125 - DNA, 39 bp, Artificial Sequence
  primer
gtaaaacgacggccagttgtactgttacgaggtggtccc

SEQ ID NO: 39126 - DNA, 21 bp, Artificial Sequence
  primer
gaggtactccgcgtcctacag

SEQ ID NO: 39127 - DNA, 21 bp, Artificial Sequence
  primer
acaaccagcaggtaggaccag

SEQ ID NO: 39128 - DNA, 21 bp, Artificial Sequence
  primer
ccctgtgtgtctgcgtttatg

SEQ ID NO: 39129 - DNA, 38 bp, Artificial Sequence
  primer
gtaaaacgacggccagttccatgctgtacatccacctg

SEQ ID NO: 39130 - DNA, 36 bp, Artificial Sequence
  primer
gtaaaacgacggccagtggcagagagcttgggtcac

SEQ ID NO: 39131 - DNA, 36 bp, Artificial Sequence
  primer
gtaaaacgacggccagtctcgctgtgggtaaggagg

SEQ ID NO: 39132 - DNA, 38 bp, Artificial Sequence
  primer
gtaaaacgacggccagtagactgtgctcacaggtcagg

SEQ ID NO: 39133 - DNA, 38 bp, Artificial Sequence
  primer
gtaaaacgacggccagtagcagtgaggagaggcaagac

SEQ ID NO: 39134 - DNA, 20 bp, Artificial Sequence
  primer
agcagtgaagcaaggctgtc

SEQ ID NO: 39135 - DNA, 38 bp, Artificial Sequence
  primer
gtaaaacgacggccagtacactaggcctcgcctacaac

SEQ ID NO: 39136 - DNA, 21 bp, Artificial Sequence
  primer
tcctatatgaagctgaggccc

SEQ ID NO: 39137 - DNA, 38 bp, Artificial Sequence
  primer
gtaaaacgacggccagttcaacacgttactgtccaggg

SEQ ID NO: 39138 - DNA, 38 bp, Artificial Sequence
  primer
gtaaaacgacggccagtgatgctgaaactcatggaagc

SEQ ID NO: 39139 - DNA, 18 bp, Artificial Sequence
  primer
tccagaggctgaagcagg

SEQ ID NO: 39140 - DNA, 21 bp, Artificial Sequence
  primer
ccttgtcagggttgttcttgg

SEQ ID NO: 39141 - DNA, 38 bp, Artificial Sequence
  primer
gtaaaacgacggccagtctctctcccagctgctgaatg

SEQ ID NO: 39142 - DNA, 35 bp, Artificial Sequence
  primer
gtaaaacgacggccagtgggcactgattgctccag

SEQ ID NO: 39143 - DNA, 36 bp, Artificial Sequence
  primer
gtaaaacgacggccagtgagctgcgtactttgtccg

SEQ ID NO: 39144 - DNA, 20 bp, Artificial Sequence
  primer
cattatggaaagcgccagag

SEQ ID NO: 39145 - DNA, 21 bp, Artificial Sequence
  primer
caggctcttatggaatggtgg

SEQ ID NO: 39146 - DNA, 38 bp, Artificial Sequence
  primer
gtaaaacgacggccagtctaagcggaggtggagagatg

SEQ ID NO: 39147 - DNA, 38 bp, Artificial Sequence
  primer
gtaaaacgacggccagttatctttgaatgcttgctgcc

SEQ ID NO: 39148 - DNA, 35 bp, Artificial Sequence
  primer
gtaaaacgacggccagtcgacggccaatgaagagg

SEQ ID NO: 39149 - DNA, 20 bp, Artificial Sequence
  primer
ccagcgcgtctgttagattg

SEQ ID NO: 39150 - DNA, 38 bp, Artificial Sequence
  primer
gtaaaacgacggccagtgatgagtgcttccctcctgtc

SEQ ID NO: 39151 - DNA, 21 bp, Artificial Sequence
  primer
tgctgaatttccatttccatc

SEQ ID NO: 39152 - DNA, 38 bp, Artificial Sequence
  primer
gtaaaacgacggccagtgtccatttctccagccatttc

SEQ ID NO: 39153 - DNA, 38 bp, Artificial Sequence
  primer
gtaaaacgacggccagtctacaggcatacaccaccacg

SEQ ID NO: 39154 - DNA, 38 bp, Artificial Sequence; identical to SEQ ID NO: 39152
  primer

SEQ ID NO: 39155 - DNA, 21 bp, Artificial Sequence
  primer
taagccctggtcaaaccaaac

SEQ ID NO: 39156 - DNA, 38 bp, Artificial Sequence
  primer
gtaaaacgacggccagtgacagggatagcagggaaatg

SEQ ID NO: 39157 - DNA, 22 bp, Artificial Sequence
  primer
gctgcagtgacatctgaaacac

SEQ ID NO: 39158 - DNA, 20 bp, Artificial Sequence
  primer
gtgtggctcctcatcctcag

SEQ ID NO: 39159 - DNA, 38 bp, Artificial Sequence
  primer
gtaaaacgacggccagtccaagcacaaccacagcttag

SEQ ID NO: 39160 - DNA, 21 bp, Artificial Sequence
  primer
ctttcaacatgcctctttgcc

SEQ ID NO: 39161 - DNA, 20 bp, Artificial Sequence
  primer
agatggccaactcaaacctg

SEQ ID NO: 39162 - DNA, 38 bp, Artificial Sequence
  primer
gtaaaacgacggccagttgtgtgctggaggaaagtgag

SEQ ID NO: 39163 - DNA, 24 bp, Artificial Sequence
  primer
tggagccctataaataaactttgg

SEQ ID NO: 39164 - DNA, 39 bp, Artificial Sequence
  primer
gtaaaacgacggccagtttagtgcatctgtgtcctcagc

SEQ ID NO: 39165 - DNA, 20 bp, Artificial Sequence
  primer
acacacaaatgcgcaaggag

SEQ ID NO: 39166 - DNA, 19 bp, Artificial Sequence
  primer
ccggaactactcccacagg

SEQ ID NO: 39167 - DNA, 20 bp, Artificial Sequence
  primer
ttagtggctggctttgcttc

SEQ ID NO: 39168 - DNA, 22 bp, Artificial Sequence
  primer
tggtctgattgaagatgttgct

SEQ ID NO: 39169 - DNA, 44 bp, Artificial Sequence
  primer
gtaaaacgacggccagtcaattagtttatatgaaggatggcttg

SEQ ID NO: 39170 - DNA, 21 bp, Artificial Sequence
  primer
tcaagaagtgccagggtattg

SEQ ID NO: 39171 - DNA, 38 bp, Artificial Sequence
  primer
gtaaaacgacggccagttgcctctactggataggtgga

SEQ ID NO: 39172 - DNA, 38 bp, Artificial Sequence
  primer
gtaaaacgacggccagtctctggtgatgactgcctttg

SEQ ID NO: 39173 - DNA, 21 bp, Artificial Sequence
  primer
cgaagatttgacctctcgtcc

SEQ ID NO: 39174 - DNA, 37 bp, Artificial Sequence
  primer
gtaaaacgacggccagtacaggctcatgacatcccaa

SEQ ID NO: 39175 - DNA, 27 bp, Artificial Sequence
  primer
gaagacctcaaatatacaagaggacag

SEQ ID NO: 39176 - DNA, 39 bp, Artificial Sequence
  primer
gtaaaacgacggccagttcacgaagtgtactggaatgct

SEQ ID NO: 39177 - DNA, 21 bp, Artificial Sequence
  primer
agctaagaagcgcgtcaacag

SEQ ID NO: 39178 - DNA, 39 bp, Artificial Sequence
  primer
gtaaaacgacggccagtgctatggtacttcgcgctaatc

SEQ ID NO: 39179 - DNA, 38 bp, Artificial Sequence
  primer
gtaaaacgacggccagtctgatggcagctgtttctgac

SEQ ID NO: 39180 - DNA, 39 bp, Artificial Sequence
  primer
gtaaaacgacggccagtcctaccaagttgcaggactgag

SEQ ID NO: 39181 - DNA, 20 bp, Artificial Sequence
  primer
gcaactgtagtcccagccac

SEQ ID NO: 39182 - DNA, 21 bp, Artificial Sequence
  primer
gccttagagatctttgctgcc

SEQ ID NO: 39183 - DNA, 38 bp, Artificial Sequence
  primer
gtaaaacgacggccagtctgttggagaactcctgttgc

SEQ ID NO: 39184 - DNA, 38 bp, Artificial Sequence
  primer
gtaaaacgacggccagtttcatggttgctgagtggttc

SEQ ID NO: 39185 - DNA, 39 bp, Artificial Sequence
  primer
gtaaaacgacggccagttgtagtgcatggacatctaccc

SEQ ID NO: 39186 - DNA, 38 bp, Artificial Sequence
  primer
gtaaaacgacggccagtggatgtggaggtttgtgtgtg

SEQ ID NO: 39187 - DNA, 38 bp, Artificial Sequence
  primer
gtaaaacgacggccagtcacctgtcagagagaagcagg

SEQ ID NO: 39188 - DNA, 22 bp, Artificial Sequence
  primer
tcttcataggcatgggcatatc

SEQ ID NO: 39189 - DNA, 36 bp, Artificial Sequence
  primer
gtaaaacgacggccagtgagcttgctgactccgagg

SEQ ID NO: 39190 - DNA, 38 bp, Artificial Sequence
  primer
gtaaaacgacggccagtgctcttaaggctgttgtgtgg

SEQ ID NO: 39191 - DNA, 38 bp, Artificial Sequence
  primer
gtaaaacgacggccagtatagatggaggtggcaggacc

SEQ ID NO: 39192 - DNA, 21 bp, Artificial Sequence
  primer
agaatggatcatttgcgttgg

SEQ ID NO: 39193 - DNA, 38 bp, Artificial Sequence
  primer
gtaaaacgacggccagtagatgatccagggtttcaagg

SEQ ID NO: 39194 - DNA, 38 bp, Artificial Sequence
  primer
gtaaaacgacggccagtagtggttgaatgttgcagagg

SEQ ID NO: 39195 - DNA, 38 bp, Artificial Sequence
  primer
gtaaaacgacggccagtgtcgggaggatttaacctgtg

SEQ ID NO: 39196 - DNA, 38 bp, Artificial Sequence
  primer
gtaaaacgacggccagtaccttgaaacactgggacacc

SEQ ID NO: 39197 - DNA, 35 bp, Artificial Sequence; identical to SEQ ID NO: 5637
  primer

SEQ ID NO: 39198 - DNA, 38 bp, Artificial Sequence
  primer
gtaaaacgacggccagtttcactgctgtcacctgttcc

SEQ ID NO: 39199 - DNA, 38 bp, Artificial Sequence
  primer
gtaaaacgacggccagtatcttgtaccgtcagccttgc

SEQ ID NO: 39200 - DNA, 21 bp, Artificial Sequence
  primer
gctaacagtttgtcctcagcg

SEQ ID NO: 39201 - DNA, 25 bp, Artificial Sequence
  primer
gaaccactgttaataatttcaagcg

SEQ ID NO: 39202 - DNA, 39 bp, Artificial Sequence
  primer
gtaaaacgacggccagtaagagaatggagacccagacag

SEQ ID NO: 39203 - DNA, 21 bp, Artificial Sequence
  primer
ttctgtcctacctgcctctgc

SEQ ID NO: 39204 - DNA, 38 bp, Artificial Sequence
  primer
gtaaaacgacggccagttgaccgagaggagaaagaagc

SEQ ID NO: 39205 - DNA, 38 bp, Artificial Sequence
  primer
gtaaaacgacggccagtagcctttaggagcttgtgagc

SEQ ID NO: 39206 - DNA, 38 bp, Artificial Sequence
  primer
gtaaaacgacggccagtggaaggtagggcttatttggc

SEQ ID NO: 39207 - DNA, 21 bp, Artificial Sequence
  primer
aggagggcttgaactgatctc

SEQ ID NO: 39208 - DNA, 20 bp, Artificial Sequence
  primer
ggcgcccaatagtaacttcc

SEQ ID NO: 39209 - DNA, 38 bp, Artificial Sequence
  primer
gtaaaacgacggccagtgagacagggagggactgtgac

SEQ ID NO: 39210 - DNA, 22 bp, Artificial Sequence
  primer
tgggaaggttgaactacaccag

SEQ ID NO: 39211 - DNA, 21 bp, Artificial Sequence
  primer
cagtgctccagactcaacagg

SEQ ID NO: 39212 - DNA, 19 bp, Artificial Sequence
  primer
accatcatggctttgcctc

SEQ ID NO: 39213 - DNA, 21 bp, Artificial Sequence
  primer
gagttccgtccctaccaacac

SEQ ID NO: 39214 - DNA, 38 bp, Artificial Sequence
  primer
gtaaaacgacggccagtgatcctgggtagtctggcttg

SEQ ID NO: 39215 - DNA, 22 bp, Artificial Sequence
  primer
cctgagtgacagattgagaccc

SEQ ID NO: 39216 - DNA, 37 bp, Artificial Sequence
  primer
gtaaaacgacggccagtacaaacaggtgggcaaagtg

SEQ ID NO: 39217 - DNA, 19 bp, Artificial Sequence
  primer
accatcccacagcagatcc

SEQ ID NO: 39218 - DNA, 38 bp, Artificial Sequence
  primer
gtaaaacgacggccagtgagcagtgtgagggaggtagg

SEQ ID NO: 39219 - DNA, 37 bp, Artificial Sequence
  primer
gtaaaacgacggccagtgcgagtactatttccgcgtg

SEQ ID NO: 39220 - DNA, 37 bp, Artificial Sequence
  primer
gtaaaacgacggccagtgccattctcaagtttgtggc

SEQ ID NO: 39221 - DNA, 39 bp, Artificial Sequence
  primer
gtaaaacgacggccagttttatctgtcaccacctccacc

SEQ ID NO: 39222 - DNA, 37 bp, Artificial Sequence
  primer
gtaaaacgacggccagtgaatccgaggagcaggactc

SEQ ID NO: 39223 - DNA, 38 bp, Artificial Sequence
  primer
gtaaaacgacggccagttccaagctattaccctcctcg

SEQ ID NO: 39224 - DNA, 22 bp, Artificial Sequence
  primer
gaaacagaagctcttccaggtg

SEQ ID NO: 39225 - DNA, 38 bp, Artificial Sequence
  primer
gtaaaacgacggccagttaggagtccaatctgggaagg

SEQ ID NO: 39226 - DNA, 38 bp, Artificial Sequence
  primer
gtaaaacgacggccagtcgcaagactcggaggtagttc

SEQ ID NO: 39227 - DNA, 38 bp, Artificial Sequence
  primer
gtaaaacgacggccagtgatgctcttgcatgactttgc

SEQ ID NO: 39228 - DNA, 24 bp, Artificial Sequence
  primer
ttaatggatctcaaattaacggtg

SEQ ID NO: 39229 - DNA, 22 bp, Artificial Sequence
  primer
aggcagtcttgggttaatatgg

SEQ ID NO: 39230 - DNA, 37 bp, Artificial Sequence
  primer
gtaaaacgacggccagtaatgcggcttaagtgtgcag

SEQ ID NO: 39231 - DNA, 38 bp, Artificial Sequence
  primer
gtaaaacgacggccagtgctgcctccactattccagac

SEQ ID NO: 39232 - DNA, 38 bp, Artificial Sequence
  primer
gtaaaacgacggccagttcccactgtcatgtgttgatg

SEQ ID NO: 39233 - DNA, 37 bp, Artificial Sequence
  primer
gtaaaacgacggccagtttccttggctttcctgattg

SEQ ID NO: 39234 - DNA, 40 bp, Artificial Sequence
  primer
gtaaaacgacggccagtaaagcggaaggaattgaataaag

SEQ ID NO: 39235 - DNA, 20 bp, Artificial Sequence
  primer
gataaggctccgcaatggtc

SEQ ID NO: 39236 - DNA, 21 bp, Artificial Sequence
  primer
gtcctcaagaccattcattgc

SEQ ID NO: 39237 - DNA, 21 bp, Artificial Sequence
  primer
gtcatttccgagagacttccg

SEQ ID NO: 39238 - DNA, 21 bp, Artificial Sequence
  primer
tggagcgtggattcctttaac

SEQ ID NO: 39239 - DNA, 38 bp, Artificial Sequence
  primer
gtaaaacgacggccagtcactggagcttgcgttacttg

SEQ ID NO: 39240 - DNA, 21 bp, Artificial Sequence
  primer
aggacaacggtctaggtgctc

SEQ ID NO: 39241 - DNA, 40 bp, Artificial Sequence
  primer
gtaaaacgacggccagtttgtgtcaatcaagcaaataagg

SEQ ID NO: 39242 - DNA, 20 bp, Artificial Sequence
  primer
ggaggcatccctacaacagg

SEQ ID NO: 39243 - DNA, 38 bp, Artificial Sequence
  primer
gtaaaacgacggccagtcaccctagccattagcctttc

SEQ ID NO: 39244 - DNA, 38 bp, Artificial Sequence
  primer
gtaaaacgacggccagtggagtgactggtccagacttg

SEQ ID NO: 39245 - DNA, 21 bp, Artificial Sequence
  primer
tgtgccagatatttgccattc

SEQ ID NO: 39246 - DNA, 39 bp, Artificial Sequence
  primer
gtaaaacgacggccagtgcagtgtttacagggcaatagg

SEQ ID NO: 39247 - DNA, 41 bp, Artificial Sequence
  primer
gtaaaacgacggccagtggtacggattgctataaatcatgg

SEQ ID NO: 39248 - DNA, 21 bp, Artificial Sequence
  primer
tccattcaccacaaataagcg

SEQ ID NO: 39249 - DNA, 38 bp, Artificial Sequence
  primer
gtaaaacgacggccagttgacaccagagcataagtggg

SEQ ID NO: 39250 - DNA, 44 bp, Artificial Sequence
  primer
gtaaaacgacggccagtaacttctgttctcattctttcctttag

SEQ ID NO: 39251 - DNA, 38 bp, Artificial Sequence
  primer
gtaaaacgacggccagttggtcctggaaagtctgtgag

SEQ ID NO: 39252 - DNA, 39 bp, Artificial Sequence
  primer
gtaaaacgacggccagtgcattaattctgaggaaggtgg

SEQ ID NO: 39253 - DNA, 22 bp, Artificial Sequence
  primer
gcactcagatggctaggtatgc

SEQ ID NO: 39254 - DNA, 38 bp, Artificial Sequence
  primer
gtaaaacgacggccagtccctgggacgcagtataaatc

SEQ ID NO: 39255 - DNA, 21 bp, Artificial Sequence
  primer
gacatttccagttcctgggtc

SEQ ID NO: 39256 - DNA, 39 bp, Artificial Sequence
  primer
gtaaaacgacggccagtggtgcaaagtctcagttctctg

SEQ ID NO: 39257 - DNA, 38 bp, Artificial Sequence
  primer
gtaaaacgacggccagttttggtgcaaagtgcctagaa

SEQ ID NO: 39258 - DNA, 42 bp, Artificial Sequence
  primer
gtaaaacgacggccagtcaatatccctgagctgaacattaac

SEQ ID NO: 39259 - DNA, 44 bp, Artificial Sequence
  primer
gtaaaacgacggccagtaaattggaatacatttaaagaaccatc

SEQ ID NO: 39260 - DNA, 21 bp, Artificial Sequence
  primer
agacaattctgggaggaccag

SEQ ID NO: 39261 - DNA, 38 bp, Artificial Sequence
  primer
gtaaaacgacggccagtatcccactcagtacccagacc

SEQ ID NO: 39262 - DNA, 38 bp, Artificial Sequence
  primer
gtaaaacgacggccagttaggcaggatgaccagtaggc

SEQ ID NO: 39263 - DNA, 38 bp, Artificial Sequence
  primer
gtaaaacgacggccagtttccaaatagctttccaagcc

SEQ ID NO: 39264 - DNA, 40 bp, Artificial Sequence
  primer
gtaaaacgacggccagttcatcccagatccctatgtaatg

SEQ ID NO: 39265 - DNA, 38 bp, Artificial Sequence
  primer
gtaaaacgacggccagtccagttgacaggcaaacactg

SEQ ID NO: 39266 - DNA, 21 bp, Artificial Sequence
  primer
tatacgaactggccatcccac

SEQ ID NO: 39267 - DNA, 20 bp, Artificial Sequence
  primer
cgggagtttgttcaagcaag

SEQ ID NO: 39268 - DNA, 38 bp, Artificial Sequence
  primer
gtaaaacgacggccagtcacacctatggtgtcctgtgg

SEQ ID NO: 39269 - DNA, 41 bp, Artificial Sequence
  primer
gtaaaacgacggccagttccaggaatactctcttgtcagaa

SEQ ID NO: 39270 - DNA, 40 bp, Artificial Sequence
  primer
gtaaaacgacggccagtaaggaaggaaggataatttgagg

SEQ ID NO: 39271 - DNA, 41 bp, Artificial Sequence
  primer
gtaaaacgacggccagttggaggcagttgttattcttaatg

SEQ ID NO: 39272 - DNA, 38 bp, Artificial Sequence
  primer
gtaaaacgacggccagtgtggcttgaccaaactctcag

SEQ ID NO: 39273 - DNA, 38 bp, Artificial Sequence
  primer
gtaaaacgacggccagtctgagggattcatggaaccag

SEQ ID NO: 39274 - DNA, 24 bp, Artificial Sequence
  primer
ggtaaatacatggatcctgaaggc

SEQ ID NO: 39275 - DNA, 22 bp, Artificial Sequence
  primer
tcttagtgtgattggcaaagga

SEQ ID NO: 39276 - DNA, 40 bp, Artificial Sequence
  primer
gtaaaacgacggccagttgatgtcctaaaggtttcttggg

SEQ ID NO: 39277 - DNA, 39 bp, Artificial Sequence
  primer
gtaaaacgacggccagtagtcatcatctttcatccgttg

SEQ ID NO: 39278 - DNA, 38 bp, Artificial Sequence
  primer
gtaaaacgacggccagtttccttaggcaactgctctcc

SEQ ID NO: 39279 - DNA, 38 bp, Artificial Sequence
  primer
gtaaaacgacggccagtttatcatggagggtgagaggg

SEQ ID NO: 39280 - DNA, 37 bp, Artificial Sequence
  primer
gtaaaacgacggccagtcttgttgagacccttggtgc

SEQ ID NO: 39281 - DNA, 38 bp, Artificial Sequence
  primer
gtaaaacgacggccagtagaacttctggcaccaacagc

SEQ ID NO: 39282 - DNA, 38 bp, Artificial Sequence
  primer
gtaaaacgacggccagttgtgtggtcgtagctccattg

SEQ ID NO: 39283 - DNA, 20 bp, Artificial Sequence
  primer
caaacccacctgagtgatgg

SEQ ID NO: 39284 - DNA, 21 bp, Artificial Sequence
  primer
ccagaagcagtgaccacagag

SEQ ID NO: 39285 - DNA, 21 bp, Artificial Sequence
  primer
aatcagggcacttgtgttgag

SEQ ID NO: 39286 - DNA, 21 bp, Artificial Sequence
  primer
caactccatgcaaagaactgg

SEQ ID NO: 39287 - DNA, 37 bp, Artificial Sequence
  primer
gtaaaacgacggccagtcaggctaagcaggctctgtg

SEQ ID NO: 39288 - DNA, 38 bp, Artificial Sequence
  primer
gtaaaacgacggccagtacagagctttggacagggttg

SEQ ID NO: 39289 - DNA, 36 bp, Artificial Sequence
  primer
gtaaaacgacggccagtcctcagctgccatccctac

SEQ ID NO: 39290 - DNA, 38 bp, Artificial Sequence
  primer
gtaaaacgacggccagtcgcagagactaacaggtgcag

SEQ ID NO: 39291 - DNA, 39 bp, Artificial Sequence
  primer
gtaaaacgacggccagttgggctcaagataaagtggatg

SEQ ID NO: 39292 - DNA, 38 bp, Artificial Sequence
  primer
gtaaaacgacggccagtgggccagaataagggaaagtc

SEQ ID NO: 39293 - DNA, 37 bp, Artificial Sequence
  primer
gtaaaacgacggccagtcaaaccctccgaccctacag

SEQ ID NO: 39294 - DNA, 39 bp, Artificial Sequence
  primer
gtaaaacgacggccagttggtctagggtagaaaggaggc

SEQ ID NO: 39295 - DNA, 20 bp, Artificial Sequence
  primer
gatccctggttcacatctgg

SEQ ID NO: 39296 - DNA, 21 bp, Artificial Sequence
  primer
agggaaaggagtgtcccagag

SEQ ID NO: 39297 - DNA, 38 bp, Artificial Sequence
  primer
gtaaaacgacggccagttagtgatgcatggtgacctcc

SEQ ID NO: 39298 - DNA, 38 bp, Artificial Sequence
  primer
gtaaaacgacggccagtattctatgttctgctgtcggg

SEQ ID NO: 39299 - DNA, 25 bp, Artificial Sequence
  primer
tttaatatagaggttccattgcgtg

SEQ ID NO: 39300 - DNA, 37 bp, Artificial Sequence
  primer
gtaaaacgacggccagtagtagcatgtgcttggtggg

SEQ ID NO: 39301 - DNA, 21 bp, Artificial Sequence
  primer
taccactcttgcaattgctcc

SEQ ID NO: 39302 - DNA, 37 bp, Artificial Sequence
  primer
gtaaaacgacggccagtcccaaattcctttcatggtg

SEQ ID NO: 39303 - DNA, 39 bp, Artificial Sequence
  primer
gtaaaacgacggccagtcacactggacagcacagctcta

SEQ ID NO: 39304 - DNA, 21 bp, Artificial Sequence
  primer
aagaagatatcccaggcaggc

SEQ ID NO: 39305 - DNA, 21 bp, Artificial Sequence
  primer
tatgtcccatggtcccttctg

SEQ ID NO: 39306 - DNA, 26 bp, Artificial Sequence
  primer
tgctcctttaaagactattcatttcc

SEQ ID NO: 39307 - DNA, 23 bp, Artificial Sequence
  primer
cagacacctgcagagagaatttg

SEQ ID NO: 39308 - DNA, 38 bp, Artificial Sequence
  primer
gtaaaacgacggccagtgcagccctgtaaacatgagag

SEQ ID NO: 39309 - DNA, 37 bp, Artificial Sequence
  primer
gtaaaacgacggccagtaactgaattccggcttcacc

SEQ ID NO: 39310 - DNA, 21 bp, Artificial Sequence
  primer
cactgggtggattccaaagtc

SEQ ID NO: 39311 - DNA, 38 bp, Artificial Sequence
  primer
gtaaaacgacggccagttcacagtcagagttgcaaggg

SEQ ID NO: 39312 - DNA, 21 bp, Artificial Sequence
  primer
gcctggttacgtctgggatag

SEQ ID NO: 39313 - DNA, 38 bp, Artificial Sequence
  primer
gtaaaacgacggccagtctgccagatactgcttgttgg

SEQ ID NO: 39314 - DNA, 22 bp, Artificial Sequence
  primer
cccatatgcaaagatatggcag

SEQ ID NO: 39315 - DNA, 37 bp, Artificial Sequence
  primer
gtaaaacgacggccagtcaagattagggtcccggaag

SEQ ID NO: 39316 - DNA, 21 bp, Artificial Sequence
  primer
gcttccaagtcacggataagc

SEQ ID NO: 39317 - DNA, 38 bp, Artificial Sequence
  primer
gtaaaacgacggccagtgagggtggatgctgttctagg

SEQ ID NO: 39318 - DNA, 38 bp, Artificial Sequence
  primer
gtaaaacgacggccagtgctcaatgaggactaggagcc

SEQ ID NO: 39319 - DNA, 21 bp, Artificial Sequence
  primer
caccatggactaggtgctctg

SEQ ID NO: 39320 - DNA, 21 bp, Artificial Sequence
  primer
gccacctccctcagtttacag

SEQ ID NO: 39321 - DNA, 22 bp, Artificial Sequence
  primer
ttgaggagcaaactctggattc

SEQ ID NO: 39322 - DNA, 38 bp, Artificial Sequence
  primer
gtaaaacgacggccagttctaggtgctgtgctgtcctg

SEQ ID NO: 39323 - DNA, 38 bp, Artificial Sequence
  primer
gtaaaacgacggccagtgaaggaccatgtgcttctcag

SEQ ID NO: 39324 - DNA, 21 bp, Artificial Sequence
  primer
ctcctgcgtagaaagagggtc

SEQ ID NO: 39325 - DNA, 38 bp, Artificial Sequence
  primer
gtaaaacgacggccagtctttatgcacagccagtggag

SEQ ID NO: 39326 - DNA, 21 bp, Artificial Sequence
  primer
agggacagggagaacattcag

SEQ ID NO: 39327 - DNA, 38 bp, Artificial Sequence
  primer
gtaaaacgacggccagttacccagtgcttaaagctgcc

SEQ ID NO: 39328 - DNA, 38 bp, Artificial Sequence
  primer
gtaaaacgacggccagtaaatccaagcctttggttctg

SEQ ID NO: 39329 - DNA, 37 bp, Artificial Sequence
  primer
gtaaaacgacggccagtccaggatatcagaggctccc

SEQ ID NO: 39330 - DNA, 20 bp, Artificial Sequence
  primer
tgctcacctttccattggtc

SEQ ID NO: 39331 - DNA, 21 bp, Artificial Sequence
  primer
gccatctccaccttcaacttc

SEQ ID NO: 39332 - DNA, 38 bp, Artificial Sequence
  primer
gtaaaacgacggccagtgagtagagaatgggctgggtg

SEQ ID NO: 39333 - DNA, 21 bp, Artificial Sequence
  primer
gctcactctcaaccttcctcg

SEQ ID NO: 39334 - DNA, 38 bp, Artificial Sequence
  primer
gtaaaacgacggccagtgaaagttcctgtccctcgttg

SEQ ID NO: 39335 - DNA, 23 bp, Artificial Sequence
  primer
cctgatgatgcaagcattaagtc

SEQ ID NO: 39336 - DNA, 27 bp, Artificial Sequence
  primer
caccacagtctttctttacatagatgc

SEQ ID NO: 39337 - DNA, 21 bp, Artificial Sequence
  primer
atgtgcactccttgaattcgg

SEQ ID NO: 39338 - DNA, 38 bp, Artificial Sequence
  primer
gtaaaacgacggccagtaaagaagcctggactttcgag

SEQ ID NO: 39339 - DNA, 22 bp, Artificial Sequence
  primer
aattacgattaagaggctgccc

SEQ ID NO: 39340 - DNA, 40 bp, Artificial Sequence
  primer
gtaaaacgacggccagtggtctccactactaatccagtgc

SEQ ID NO: 39341 - DNA, 40 bp, Artificial Sequence
  primer
gtaaaacgacggccagtcagcttaacagtgctgatttgtg

SEQ ID NO: 39342 - DNA, 38 bp, Artificial Sequence
  primer
gtaaaacgacggccagtgatcgatgaggctcaaacaac

SEQ ID NO: 39343 - DNA, 20 bp, Artificial Sequence
  primer
caccagatgccaaggaactc

SEQ ID NO: 39344 - DNA, 20 bp, Artificial Sequence
  primer
ggagagccctgacctagctg

SEQ ID NO: 39345 - DNA, 21 bp, Artificial Sequence
  primer
agctcagctttgtccattccc

SEQ ID NO: 39346 - DNA, 39 bp, Artificial Sequence
  primer
gtaaaacgacggccagtaacatctccagaaactgccaag

SEQ ID NO: 39347 - DNA, 21 bp, Artificial Sequence
  primer
tattcatccagacggacaagc

SEQ ID NO: 39348 - DNA, 38 bp, Artificial Sequence
  primer
gtaaaacgacggccagttaacccataacagcgactgcc

SEQ ID NO: 39349 - DNA, 21 bp, Artificial Sequence
  primer
ttaatcttgggaccttcgctg

SEQ ID NO: 39350 - DNA, 20 bp, Artificial Sequence
  primer
ctgctcagggaaggagaagg

SEQ ID NO: 39351 - DNA, 38 bp, Artificial Sequence
  primer
gtaaaacgacggccagtctgtggtcctcagacaccttg

SEQ ID NO: 39352 - DNA, 38 bp, Artificial Sequence
  primer
gtaaaacgacggccagtactatgtcaacctggccttcc

SEQ ID NO: 39353 - DNA, 38 bp, Artificial Sequence
  primer
gtaaaacgacggccagttcaggtgtgtgtttcagggac

SEQ ID NO: 39354 - DNA, 38 bp, Artificial Sequence
  primer
gtaaaacgacggccagttctacaaagaagcctgctggg

SEQ ID NO: 39355 - DNA, 21 bp, Artificial Sequence
  primer
tgagagggtgtttcttctggg

SEQ ID NO: 39356 - DNA, 20 bp, Artificial Sequence
  primer
agaatggccgtcttcctgtg

SEQ ID NO: 39357 - DNA, 21 bp, Artificial Sequence
  primer
tctcaatgcgtagacaggagc

SEQ ID NO: 39358 - DNA, 38 bp, Artificial Sequence
  primer
gtaaaacgacggccagtcaacctctgtctctgggcttc

SEQ ID NO: 39359 - DNA, 38 bp, Artificial Sequence
  primer
gtaaaacgacggccagttgataaagaggttgggatggg

SEQ ID NO: 39360 - DNA, 38 bp, Artificial Sequence
  primer
gtaaaacgacggccagtgggtgattcattcccttatgc

SEQ ID NO: 39361 - DNA, 22 bp, Artificial Sequence
  primer
tgttaaccctgccaggtaagag

SEQ ID NO: 39362 - DNA, 20 bp, Artificial Sequence
  primer
ctagggtgcctctctgagcc

SEQ ID NO: 39363 - DNA, 21 bp, Artificial Sequence
  primer
gaggctgacaagtctggtgtg

SEQ ID NO: 39364 - DNA, 38 bp, Artificial Sequence
  primer
gtaaaacgacggccagttaaggatagggatgggacagc

SEQ ID NO: 39365 - DNA, 38 bp, Artificial Sequence
  primer
gtaaaacgacggccagtttgaagtcattgctgtgggag

SEQ ID NO: 39366 - DNA, 21 bp, Artificial Sequence
  primer
tccaggtaccatcagggaaag

SEQ ID NO: 39367 - DNA, 37 bp, Artificial Sequence
  primer
gtaaaacgacggccagtacaaagctggtgtcactgcc

SEQ ID NO: 39368 - DNA, 38 bp, Artificial Sequence
  primer
gtaaaacgacggccagtccatccctgggtaaagctgtc

SEQ ID NO: 39369 - DNA, 21 bp, Artificial Sequence
  primer
cagagtggtgtaggtccctgg

SEQ ID NO: 39370 - DNA, 38 bp, Artificial Sequence
  primer
gtaaaacgacggccagtgagagagctccgtcttcaagc

SEQ ID NO: 39371 - DNA, 21 bp, Artificial Sequence
  primer
ctgaacaaggacatccaggtg

SEQ ID NO: 39372 - DNA, 19 bp, Artificial Sequence
  primer
ggatgcctcagaagccagt

SEQ ID NO: 39373 - DNA, 21 bp, Artificial Sequence
  primer
ttcctgttccagctgtcttcc

SEQ ID NO: 39374 - DNA, 36 bp, Artificial Sequence
  primer
gtaaaacgacggccagtcttggccatacctccatgc

SEQ ID NO: 39375 - DNA, 38 bp, Artificial Sequence
  primer
gtaaaacgacggccagtttaggctaggcttccaagacg

SEQ ID NO: 39376 - DNA, 21 bp, Artificial Sequence
  primer
tggactaccaggaaaccttcg

SEQ ID NO: 39377 - DNA, 21 bp, Artificial Sequence
  primer
ataattctggctgttcccacc

SEQ ID NO: 39378 - DNA, 19 bp, Artificial Sequence
  primer
aggcttcctgggacatcag

SEQ ID NO: 39379 - DNA, 19 bp, Artificial Sequence
  primer
ggatagccatccttgagcg

SEQ ID NO: 39380 - DNA, 38 bp, Artificial Sequence
  primer
gtaaaacgacggccagtggtatccctgaaatcagccag

SEQ ID NO: 39381 - DNA, 22 bp, Artificial Sequence
  primer
gactactacgaacccggtaggc

SEQ ID NO: 39382 - DNA, 19 bp, Artificial Sequence
  primer
gggacccagggacatcttc

SEQ ID NO: 39383 - DNA, 35 bp, Artificial Sequence
  primer
gtaaaacgacggccagtctctgggccacggatctc

SEQ ID NO: 39384 - DNA, 38 bp, Artificial Sequence
  primer
gtaaaacgacggccagttgcctgtgagatcaaggtctg

SEQ ID NO: 39385 - DNA, 38 bp, Artificial Sequence
  primer
gtaaaacgacggccagtacagctaccaaggcaacaatg

SEQ ID NO: 39386 - DNA, 38 bp, Artificial Sequence
  primer
gtaaaacgacggccagtacacaatgttggcactcttgg

SEQ ID NO: 39387 - DNA, 21 bp, Artificial Sequence
  primer
ggttccaacccttgttcactc

SEQ ID NO: 39388 - DNA, 21 bp, Artificial Sequence
  primer
cctaccttgcttgcattctcc

SEQ ID NO: 39389 - DNA, 38 bp, Artificial Sequence
  primer
gtaaaacgacggccagtcaagtgggaaacggtatgatg

SEQ ID NO: 39390 - DNA, 38 bp, Artificial Sequence
  primer
gtaaaacgacggccagttgtcgggtttcacttgttgag

SEQ ID NO: 39391 - DNA, 39 bp, Artificial Sequence
  primer
gtaaaacgacggccagtacctcaataggaaatgctgctc

SEQ ID NO: 39392 - DNA, 38 bp, Artificial Sequence
  primer
gtaaaacgacggccagtcctggaccaaggtatatgcac

SEQ ID NO: 39393 - DNA, 42 bp, Artificial Sequence
  primer
gtaaaacgacggccagtaaacataccatcctaatcctgtgat

SEQ ID NO: 39394 - DNA, 41 bp, Artificial Sequence
  primer
gtaaaacgacggccagttgttacttacatgctttgaatgcc

SEQ ID NO: 39395 - DNA, 24 bp, Artificial Sequence
  primer
tgcacagtgaaacatttgtaatga

SEQ ID NO: 39396 - DNA, 21 bp, Artificial Sequence
  primer
tgattgacccacaggaacaag

SEQ ID NO: 39397 - DNA, 19 bp, Artificial Sequence
  primer
acacacatgcacgcacaag

SEQ ID NO: 39398 - DNA, 21 bp, Artificial Sequence
  primer
attaccatgtgtgtggatggg

SEQ ID NO: 39399 - DNA, 38 bp, Artificial Sequence
  primer
gtaaaacgacggccagttttcttcatgctcacctgctg

SEQ ID NO: 39400 - DNA, 38 bp, Artificial Sequence
  primer
gtaaaacgacggccagtgaagttgtctgcttgctttgg

SEQ ID NO: 39401 - DNA, 27 bp, Artificial Sequence
  primer
ttagtatcaccagtgtttaaatttccc

SEQ ID NO: 39402 - DNA, 21 bp, Artificial Sequence
  primer
tatcaccacttcgtagcaccc

SEQ ID NO: 39403 - DNA, 38 bp, Artificial Sequence
  primer
gtaaaacgacggccagtgagaaaggcaattctggcttc

SEQ ID NO: 39404 - DNA, 39 bp, Artificial Sequence
  primer
gtaaaacgacggccagtaatacgttgtctgggaaaccac

SEQ ID NO: 39405 - DNA, 38 bp, Artificial Sequence
  primer
gtaaaacgacggccagtcccaattgtgattgccataaa

SEQ ID NO: 39406 - DNA, 42 bp, Artificial Sequence
  primer
gtaaaacgacggccagttttaaatcaaacaattcccagtttg

SEQ ID NO: 39407 - DNA, 20 bp, Artificial Sequence
  primer
tttgacgtccatttgggaac

SEQ ID NO: 39408 - DNA, 42 bp, Artificial Sequence; identical to SEQ ID NO: 39406
  primer

SEQ ID NO: 39409 - DNA, 38 bp, Artificial Sequence
  primer
gtaaaacgacggccagtgagagtgaccaaactcgtccc

SEQ ID NO: 39410 - DNA, 18 bp, Artificial Sequence
  primer
ctgctggaagatggcgag

SEQ ID NO: 39411 - DNA, 21 bp, Artificial Sequence
  primer
gcgactaccacaactacgagc

SEQ ID NO: 39412 - DNA, 38 bp, Artificial Sequence
  primer
gtaaaacgacggccagtccacgaagaggagttggagtc

SEQ ID NO: 39413 - DNA, 24 bp, Artificial Sequence
  primer
tctccaagagagatattggagttt

SEQ ID NO: 39414 - DNA, 21 bp, Artificial Sequence
  primer
cagatgccttctccaatttca

SEQ ID NO: 39415 - DNA, 38 bp, Artificial Sequence
  primer
gtaaaacgacggccagtggtgcagagagaaattatgcg

SEQ ID NO: 39416 - DNA, 23 bp, Artificial Sequence
  primer
tcgctaagtgtaagaggatgaaa

SEQ ID NO: 39417 - DNA, 18 bp, Artificial Sequence
  primer
tttctgcctcctttgcca

SEQ ID NO: 39418 - DNA, 38 bp, Artificial Sequence
  primer
gtaaaacgacggccagttgtgttcacatttgccttgag

SEQ ID NO: 39419 - DNA, 23 bp, Artificial Sequence
  primer
gctagtcctttccgtattgatgc

SEQ ID NO: 39420 - DNA, 21 bp, Artificial Sequence
  primer
ctcacataccctgttggaagc

SEQ ID NO: 39421 - DNA, 40 bp, Artificial Sequence
  primer
gtaaaacgacggccagttgaacacgttagcttatcaatgc

SEQ ID NO: 39422 - DNA, 43 bp, Artificial Sequence
  primer
gtaaaacgacggccagtctgaactcctaaattcctgtttgttc

SEQ ID NO: 39423 - DNA, 35 bp, Artificial Sequence
  primer
gtaaaacgacggccagtacctgccttcccagggtt

SEQ ID NO: 39424 - DNA, 27 bp, Artificial Sequence
  primer
catctatttgataaatgttctttggtc

SEQ ID NO: 39425 - DNA, 21 bp, Artificial Sequence
  primer
ttctgtttgaggcatgagagg

SEQ ID NO: 39426 - DNA, 40 bp, Artificial Sequence
  primer
gtaaaacgacggccagtttgcttgagatagtggcttatgg

SEQ ID NO: 39427 - DNA, 24 bp, Artificial Sequence
  primer
tgtatccatgaaggttaacttggg

SEQ ID NO: 39428 - DNA, 38 bp, Artificial Sequence
  primer
gtaaaacgacggccagtcagttgcccaaataaatcagg

SEQ ID NO: 39429 - DNA, 38 bp, Artificial Sequence
  primer
gtaaaacgacggccagttgggaagcactgaagatagga

SEQ ID NO: 39430 - DNA, 22 bp, Artificial Sequence
  primer
tgcctcaagctagtgcctctac

SEQ ID NO: 39431 - DNA, 38 bp, Artificial Sequence
  primer
gtaaaacgacggccagtggcaatgcatcatctccttag

SEQ ID NO: 39432 - DNA, 38 bp, Artificial Sequence
  primer
gtaaaacgacggccagtaagttccattgtaagcggctg

SEQ ID NO: 39433 - DNA, 38 bp, Artificial Sequence
  primer
gtaaaacgacggccagtagtagaggctggtgcggaact

SEQ ID NO: 39434 - DNA, 21 bp, Artificial Sequence
  primer
taacaggtgggtagctgggag

SEQ ID NO: 39435 - DNA, 19 bp, Artificial Sequence
  primer
aaatgctgacatgggaggg

SEQ ID NO: 39436 - DNA, 45 bp, Artificial Sequence
  primer
gtaaaacgacggccagttctgagaaagttagacatgaggaatact

SEQ ID NO: 39437 - DNA, 21 bp, Artificial Sequence
  primer
cctgcaaagctttcaactcat

SEQ ID NO: 39438 - DNA, 39 bp, Artificial Sequence
  primer
gtaaaacgacggccagttcccttacagcagatgatttcc

SEQ ID NO: 39439 - DNA, 20 bp, Artificial Sequence
  primer
gggtctacggtatttgctgg

SEQ ID NO: 39440 - DNA, 39 bp, Artificial Sequence
  primer
gtaaaacgacggccagtaggtgaactgagctagactggg

SEQ ID NO: 39441 - DNA, 38 bp, Artificial Sequence
  primer
gtaaaacgacggccagtaattcaggtggctggattgag

SEQ ID NO: 39442 - DNA, 21 bp, Artificial Sequence
  primer
tggaaatcttcactcccaacc

SEQ ID NO: 39443 - DNA, 21 bp, Artificial Sequence
  primer
ttccacaaattggccaagaat

SEQ ID NO: 39444 - DNA, 36 bp, Artificial Sequence
  primer
gtaaaacgacggccagtcttggatgtctggcctgtg

SEQ ID NO: 39445 - DNA, 38 bp, Artificial Sequence
  primer
gtaaaacgacggccagtcttgttgggtggctgtaggag

SEQ ID NO: 39446 - DNA, 42 bp, Artificial Sequence
  primer
gtaaaacgacggccagttcaaatgctaaatgtctattggatg

SEQ ID NO: 39447 - DNA, 38 bp, Artificial Sequence
  primer
gtaaaacgacggccagttattctctcaggcatctgggc

SEQ ID NO: 39448 - DNA, 38 bp, Artificial Sequence
  primer
gtaaaacgacggccagtggaggagaatgctggtgattc

SEQ ID NO: 39449 - DNA, 38 bp, Artificial Sequence
  primer
gtaaaacgacggccagtgcaaatgcttccactcaacac

SEQ ID NO: 39450 - DNA, 22 bp, Artificial Sequence
  primer
gcttcagtatctccagagcacg

SEQ ID NO: 39451 - DNA, 20 bp, Artificial Sequence
  primer
gcagatgcctgtagtcccag

SEQ ID NO: 39452 - DNA, 38 bp, Artificial Sequence
  primer
gtaaaacgacggccagtaatatcccgcattcctgtgtg

SEQ ID NO: 39453 - DNA, 35 bp, Artificial Sequence
  primer
gtaaaacgacggccagtagagcccggaccttccac

SEQ ID NO: 39454 - DNA, 39 bp, Artificial Sequence
  primer
gtaaaacgacggccagtcgactcagagaacggcttctac

SEQ ID NO: 39455 - DNA, 21 bp, Artificial Sequence
  primer
ctcagagaacggcttctaccc

SEQ ID NO: 39456 - DNA, 27 bp, Artificial Sequence
  primer
tgatttcacatagaaagatctcaagac

SEQ ID NO: 39457 - DNA, 38 bp, Artificial Sequence
  primer
gtaaaacgacggccagttttctttctttcgttgggtgg

SEQ ID NO: 39458 - DNA, 38 bp, Artificial Sequence
  primer
gtaaaacgacggccagtatgtcctccaatgcaaggaac

SEQ ID NO: 39459 - DNA, 22 bp, Artificial Sequence
  primer
ctttatgctgcctttgttgttg

SEQ ID NO: 39460 - DNA, 38 bp, Artificial Sequence
  primer
gtaaaacgacggccagttcacctgcatcaccttcattt

SEQ ID NO: 39461 - DNA, 43 bp, Artificial Sequence
  primer
gtaaaacgacggccagtttcacatggaattgagtattctaacc

SEQ ID NO: 39462 - DNA, 27 bp, Artificial Sequence
  primer
ttgtgttctcttgtagaaggtaaatgg

SEQ ID NO: 39463 - DNA, 38 bp, Artificial Sequence
  primer
gtaaaacgacggccagtctccaccacctccatccttag

SEQ ID NO: 39464 - DNA, 24 bp, Artificial Sequence
  primer
tcttatctgccattctactcctgg

SEQ ID NO: 39465 - DNA, 21 bp, Artificial Sequence
  primer
agaaactgcccatttcctcag

SEQ ID NO: 39466 - DNA, 21 bp, Artificial Sequence
  primer
attgcaattggctagtagcgg

SEQ ID NO: 39467 - DNA, 38 bp, Artificial Sequence
  primer
gtaaaacgacggccagtagaggacagcttcttccaggg

SEQ ID NO: 39468 - DNA, 19 bp, Artificial Sequence
  primer
caccaaagcgtgaatgcag

SEQ ID NO: 39469 - DNA, 39 bp, Artificial Sequence
  primer
gtaaaacgacggccagtgcaggaagcaaatgatatggtg

SEQ ID NO: 39470 - DNA, 21 bp, Artificial Sequence
  primer
actgctttggcctttgatagc

SEQ ID NO: 39471 - DNA, 38 bp, Artificial Sequence
  primer
gtaaaacgacggccagtatgcttctctctgcacttcgg

SEQ ID NO: 39472 - DNA, 22 bp, Artificial Sequence
  primer
ggtttcacttccgtaaagatgc

SEQ ID NO: 39473 - DNA, 38 bp, Artificial Sequence
  primer
gtaaaacgacggccagtaaagtccctttgtcccacttg

SEQ ID NO: 39474 - DNA, 21 bp, Artificial Sequence
  primer
tgaaatgcacaaatcagtggg

SEQ ID NO: 39475 - DNA, 20 bp, Artificial Sequence
  primer
aattcttccttctcctgggc

SEQ ID NO: 39476 - DNA, 38 bp, Artificial Sequence
  primer
gtaaaacgacggccagttgaaagcagcgtctgattgag

SEQ ID NO: 39477 - DNA, 37 bp, Artificial Sequence
  primer
gtaaaacgacggccagtaggcgtgagacatcaggttg

SEQ ID NO: 39478 - DNA, 39 bp, Artificial Sequence
  primer
gtaaaacgacggccagtgctagtgcaaagcaatactggg

SEQ ID NO: 39479 - DNA, 21 bp, Artificial Sequence
  primer
attatcaagaagccactgggc

SEQ ID NO: 39480 - DNA, 20 bp, Artificial Sequence
  primer
catcagcagcaaaggaggtc

SEQ ID NO: 39481 - DNA, 43 bp, Artificial Sequence
  primer
gtaaaacgacggccagttgtcccatctaatgaaacttactgtc

SEQ ID NO: 39482 - DNA, 23 bp, Artificial Sequence
  primer
ttgaaagcaagtcaattcagctc

SEQ ID NO: 39483 - DNA, 21 bp, Artificial Sequence
  primer
ttgacctcttacctcccgttc

SEQ ID NO: 39484 - DNA, 22 bp, Artificial Sequence
  primer
tgctgtttccttgtttctttgc

SEQ ID NO: 39485 - DNA, 22 bp, Artificial Sequence
  primer
aagaaagagggtgaaggcagat

SEQ ID NO: 39486 - DNA, 20 bp, Artificial Sequence
  primer
ttgtgcatgattcctttccc

SEQ ID NO: 39487 - DNA, 38 bp, Artificial Sequence
  primer
gtaaaacgacggccagtaaacgatgggttgggatacac

SEQ ID NO: 39488 - DNA, 38 bp, Artificial Sequence
  primer
gtaaaacgacggccagttttgatgaaacggttggtgag

SEQ ID NO: 39489 - DNA, 23 bp, Artificial Sequence
  primer
tgggtggaaatgtacatgtatgg

SEQ ID NO: 39490 - DNA, 38 bp, Artificial Sequence
  primer
gtaaaacgacggccagtagggtgacctgtgaccacttc

SEQ ID NO: 39491 - DNA, 39 bp, Artificial Sequence
  primer
gtaaaacgacggccagtggagtgtggctgagacactagc

SEQ ID NO: 39492 - DNA, 36 bp, Artificial Sequence
  primer
gtaaaacgacggccagtgtccttgtgtgcctggtgg

SEQ ID NO: 39493 - DNA, 38 bp, Artificial Sequence
  primer
gtaaaacgacggccagtgttgtcacatcttcccaagcc

SEQ ID NO: 39494 - DNA, 19 bp, Artificial Sequence
  primer
cttggaggtgaggtccagc

SEQ ID NO: 39495 - DNA, 38 bp, Artificial Sequence
  primer
gtaaaacgacggccagtaatgacaggactgaggcttgg

SEQ ID NO: 39496 - DNA, 37 bp, Artificial Sequence
  primer
gtaaaacgacggccagtcgcgaaacctagtgctgaag

SEQ ID NO: 39497 - DNA, 21 bp, Artificial Sequence
  primer
tgctacacacagggaccaatg

SEQ ID NO: 39498 - DNA, 38 bp, Artificial Sequence
  primer
gtaaaacgacggccagttccctgtcctctcaactctgg

SEQ ID NO: 39499 - DNA, 22 bp, Artificial Sequence
  primer
tgcccttgaatagatgaggttg

SEQ ID NO: 39500 - DNA, 21 bp, Artificial Sequence
  primer
catagttcccaagtgtctgcc

SEQ ID NO: 39501 - DNA, 37 bp, Artificial Sequence
  primer
gtaaaacgacggccagtacaactgccatcaggaccag

SEQ ID NO: 39502 - DNA, 38 bp, Artificial Sequence
  primer
gtaaaacgacggccagtgaccggagtaccgagacgtag

SEQ ID NO: 39503 - DNA, 38 bp, Artificial Sequence
  primer
gtaaaacgacggccagttaagtcaccatgaaacaggcg

SEQ ID NO: 39504 - DNA, 38 bp, Artificial Sequence
  primer
gtaaaacgacggccagtgggaatttgtaccgtagggag

SEQ ID NO: 39505 - DNA, 38 bp, Artificial Sequence
  primer
gtaaaacgacggccagtcacctggagcctaaaccaaag

SEQ ID NO: 39506 - DNA, 39 bp, Artificial Sequence
  primer
gtaaaacgacggccagttgtgatgcgattatgtctttgc

SEQ ID NO: 39507 - DNA, 39 bp, Artificial Sequence
  primer
gtaaaacgacggccagttgggtaatagaatgtcaagccc

SEQ ID NO: 39508 - DNA, 23 bp, Artificial Sequence
  primer
tgacaggaatggatcttaggttg

SEQ ID NO: 39509 - DNA, 21 bp, Artificial Sequence
  primer
ttacatgcattgcacaaaggc

SEQ ID NO: 39510 - DNA, 38 bp, Artificial Sequence
  primer
gtaaaacgacggccagtttacaagcgggaagctaggtg

SEQ ID NO: 39511 - DNA, 39 bp, Artificial Sequence
  primer
gtaaaacgacggccagtaaagacccaatgaaagcatgag

SEQ ID NO: 39512 - DNA, 21 bp, Artificial Sequence
  primer
agcccagtaggtagaggttgc

SEQ ID NO: 39513 - DNA, 37 bp, Artificial Sequence
  primer
gtaaaacgacggccagtcaggccacttcctgacagac

SEQ ID NO: 39514 - DNA, 21 bp, Artificial Sequence
  primer
atgcattcacacatacccacc

SEQ ID NO: 39515 - DNA, 21 bp, Artificial Sequence
  primer
gaaacgtcactatgtgtgccc

SEQ ID NO: 39516 - DNA, 21 bp, Artificial Sequence
  primer
taacaggaacgctctgaccac

SEQ ID NO: 39517 - DNA, 20 bp, Artificial Sequence
  primer
ttgcttgaacctgagaggca

SEQ ID NO: 39518 - DNA, 21 bp, Artificial Sequence
  primer
tttccctagtacccagccctc

SEQ ID NO: 39519 - DNA, 20 bp, Artificial Sequence
  primer
caagctgggacctgtagtcg

SEQ ID NO: 39520 - DNA, 38 bp, Artificial Sequence
  primer
gtaaaacgacggccagttggaggttaaggttgtggagg

SEQ ID NO: 39521 - DNA, 38 bp, Artificial Sequence
  primer
gtaaaacgacggccagtctgtgagacaacctagcctgc

SEQ ID NO: 39522 - DNA, 38 bp, Artificial Sequence
  primer
gtaaaacgacggccagtcagccaggtactgactctccc

SEQ ID NO: 39523 - DNA, 38 bp, Artificial Sequence
  primer
gtaaaacgacggccagtggaagtaggccctggtaatcc

SEQ ID NO: 39524 - DNA, 38 bp, Artificial Sequence
  primer
gtaaaacgacggccagtctgcaggtgggtagagaagtg

SEQ ID NO: 39525 - DNA, 20 bp, Artificial Sequence
  primer
ctaagtggactgcgctggag

SEQ ID NO: 39526 - DNA, 38 bp, Artificial Sequence
  primer
gtaaaacgacggccagtgctgaagcttgtgggagagag

SEQ ID NO: 39527 - DNA, 37 bp, Artificial Sequence
  primer
gtaaaacgacggccagtaaagcccatgtaaccaaggc

SEQ ID NO: 39528 - DNA, 38 bp, Artificial Sequence
  primer
gtaaaacgacggccagtatgggaggctgtcagatcaac

SEQ ID NO: 39529 - DNA, 38 bp, Artificial Sequence
  primer
gtaaaacgacggccagttgagtacctgcttctctgggc

SEQ ID NO: 39530 - DNA, 38 bp, Artificial Sequence
  primer
gtaaaacgacggccagtgattcctgcaggcacgtagac

SEQ ID NO: 39531 - DNA, 37 bp, Artificial Sequence
  primer
gtaaaacgacggccagtgggtgatttcaggactggtg

SEQ ID NO: 39532 - DNA, 24 bp, Artificial Sequence
  primer
gcctgtaacaagggacttcttatg

SEQ ID NO: 39533 - DNA, 38 bp, Artificial Sequence
  primer
gtaaaacgacggccagtctaagcctgggatatggttgg

SEQ ID NO: 39534 - DNA, 38 bp, Artificial Sequence
  primer
gtaaaacgacggccagtcagcatagcaggtgtctgtcc

SEQ ID NO: 39535 - DNA, 38 bp, Artificial Sequence
  primer
gtaaaacgacggccagtagcagaatgatttccagcagc

SEQ ID NO: 39536 - DNA, 21 bp, Artificial Sequence
  primer
gggtctcttaccctctctggg

SEQ ID NO: 39537 - DNA, 38 bp, Artificial Sequence
  primer
gtaaaacgacggccagtagatggaaactgaggtgtggg

SEQ ID NO: 39538 - DNA, 21 bp, Artificial Sequence
  primer
ccacagctcctatcctgacac

SEQ ID NO: 39539 - DNA, 21 bp, Artificial Sequence
  primer
ctgtctctggaagtgtggctg

SEQ ID NO: 39540 - DNA, 38 bp, Artificial Sequence
  primer
gtaaaacgacggccagtacccaaacagaagacagaggg

SEQ ID NO: 39541 - DNA, 38 bp, Artificial Sequence
  primer
gtaaaacgacggccagtgattctagggccaaggaggag

SEQ ID NO: 39542 - DNA, 21 bp, Artificial Sequence
  primer
acccattaggaaccattgcac

SEQ ID NO: 39543 - DNA, 38 bp, Artificial Sequence
  primer
gtaaaacgacggccagtttcccatgtcccatctacctc

SEQ ID NO: 39544 - DNA, 38 bp, Artificial Sequence
  primer
gtaaaacgacggccagttgggttgggctcattaggtag

SEQ ID NO: 39545 - DNA, 38 bp, Artificial Sequence
  primer
gtaaaacgacggccagtagtggcctagaggagggtagg

SEQ ID NO: 39546 - DNA, 38 bp, Artificial Sequence
  primer
gtaaaacgacggccagtttccagtctgtctcacaaggc

SEQ ID NO: 39547 - DNA, 37 bp, Artificial Sequence
  primer
gtaaaacgacggccagtgagggtttgggatgaaggag

SEQ ID NO: 39548 - DNA, 38 bp, Artificial Sequence
  primer
gtaaaacgacggccagtatagtgccgctcacaacttcc

SEQ ID NO: 39549 - DNA, 42 bp, Artificial Sequence
  primer
gtaaaacgacggccagttgacaattggtcttaagaagtcacc

SEQ ID NO: 39550 - DNA, 40 bp, Artificial Sequence
  primer
gtaaaacgacggccagtttgtgaaagtttgtccttgattg

SEQ ID NO: 39551 - DNA, 23 bp, Artificial Sequence
  primer
cactgcacctggctctaaatatg

SEQ ID NO: 39552 - DNA, 38 bp, Artificial Sequence
  primer
gtaaaacgacggccagtcattgcttaatgcagacctgg

SEQ ID NO: 39553 - DNA, 39 bp, Artificial Sequence
  primer
gtaaaacgacggccagtagttagacttcaggtggttgcc

SEQ ID NO: 39554 - DNA, 38 bp, Artificial Sequence
  primer
gtaaaacgacggccagttagcaagaacctaggaagggc

SEQ ID NO: 39555 - DNA, 38 bp, Artificial Sequence
  primer
gtaaaacgacggccagttcccaagtagggactgcatag

SEQ ID NO: 39556 - DNA, 24 bp, Artificial Sequence
  primer
tcattcatttaaagtcacattggc

SEQ ID NO: 39557 - DNA, 22 bp, Artificial Sequence
  primer
tgagtgtatttcatctttcgcc

SEQ ID NO: 39558 - DNA, 38 bp, Artificial Sequence
  primer
gtaaaacgacggccagtttgttaggaagtaggcgccag

SEQ ID NO: 39559 - DNA, 23 bp, Artificial Sequence
  primer
tttattgtgggcaaagataaagc

SEQ ID NO: 39560 - DNA, 38 bp, Artificial Sequence
  primer
gtaaaacgacggccagtacctcctcagtggcaggtaag

SEQ ID NO: 39561 - DNA, 23 bp, Artificial Sequence
  primer
tgcaatggatcatacctatggag

SEQ ID NO: 39562 - DNA, 40 bp, Artificial Sequence
  primer
gtaaaacgacggccagttggtagctagggtagagactggc

SEQ ID NO: 39563 - DNA, 39 bp, Artificial Sequence
  primer
gtaaaacgacggccagtttagtggctgctgaagtatccc

SEQ ID NO: 39564 - DNA, 21 bp, Artificial Sequence
  primer
attgggaggctttctcctttg

SEQ ID NO: 39565 - DNA, 37 bp, Artificial Sequence
  primer
gtaaaacgacggccagtgttgggaagaagggaagtgc

SEQ ID NO: 39566 - DNA, 21 bp, Artificial Sequence
  primer
ggagaggctcattgacaaacc

SEQ ID NO: 39567 - DNA, 40 bp, Artificial Sequence
  primer
gtaaaacgacggccagttgctgtagtcactagggttgtgg

SEQ ID NO: 39568 - DNA, 38 bp, Artificial Sequence
  primer
gtaaaacgacggccagtaggaagagaggacaagcatgg

SEQ ID NO: 39569 - DNA, 39 bp, Artificial Sequence
  primer
gtaaaacgacggccagtgcatcacaatggtttctcaagc

SEQ ID NO: 39570 - DNA, 21 bp, Artificial Sequence
  primer
tagactcccaggctttggttc

SEQ ID NO: 39571 - DNA, 38 bp, Artificial Sequence
  primer
gtaaaacgacggccagtcctaggagcttggccttattg

SEQ ID NO: 39572 - DNA, 21 bp, Artificial Sequence
  primer
ttcaatgatgtctgtctgccc

SEQ ID NO: 39573 - DNA, 21 bp, Artificial Sequence
  primer
ttggcagggtatgtaatgtgc

SEQ ID NO: 39574 - DNA, 20 bp, Artificial Sequence
  primer
gcatagcaacatggcctagc

SEQ ID NO: 39575 - DNA, 21 bp, Artificial Sequence
  primer
aaaggcttgaaatggttcctg

SEQ ID NO: 39576 - DNA, 22 bp, Artificial Sequence
  primer
ggaaggagacagcaacactagc

SEQ ID NO: 39577 - DNA, 21 bp, Artificial Sequence
  primer
gttgctttggtcaatgtgcag

SEQ ID NO: 39578 - DNA, 37 bp, Artificial Sequence
  primer
gtaaaacgacggccagtcccagagcaggactcaaatc

SEQ ID NO: 39579 - DNA, 21 bp, Artificial Sequence
  primer
ccctcttccctctctcacttc

SEQ ID NO: 39580 - DNA, 21 bp, Artificial Sequence
  primer
tctcggtaacagcctgaatcc

SEQ ID NO: 39581 - DNA, 21 bp, Artificial Sequence
  primer
ccctacccagatccaacagtg

SEQ ID NO: 39582 - DNA, 38 bp, Artificial Sequence
  primer
gtaaaacgacggccagtttcataactgccagaaccagg

SEQ ID NO: 39583 - DNA, 20 bp, Artificial Sequence
  primer
acatgtccagcacccagaag

SEQ ID NO: 39584 - DNA, 21 bp, Artificial Sequence
  primer
tgctgtgatggaatgtgtgtc

SEQ ID NO: 39585 - DNA, 20 bp, Artificial Sequence
  primer
gcttgtctccaagcatctgg

SEQ ID NO: 39586 - DNA, 37 bp, Artificial Sequence
  primer
gtaaaacgacggccagttgatctgctggatggtaggg

SEQ ID NO: 39587 - DNA, 37 bp, Artificial Sequence
  primer
gtaaaacgacggccagtgaggatggaataagggcctg

SEQ ID NO: 39588 - DNA, 38 bp, Artificial Sequence
  primer
gtaaaacgacggccagtcagctgactcctctgttgacc

SEQ ID NO: 39589 - DNA, 38 bp, Artificial Sequence
  primer
gtaaaacgacggccagtagatccttgtctctcaagccg

SEQ ID NO: 39590 - DNA, 21 bp, Artificial Sequence
  primer
gtttcttcctctgtgggcaac

SEQ ID NO: 39591 - DNA, 38 bp, Artificial Sequence
  primer
gtaaaacgacggccagttcctccttaaacccttctccc

SEQ ID NO: 39592 - DNA, 38 bp, Artificial Sequence
  primer
gtaaaacgacggccagttttgggtttcagtttccttgg

SEQ ID NO: 39593 - DNA, 37 bp, Artificial Sequence
  primer
gtaaaacgacggccagtacttcaccaaggccacacac

SEQ ID NO: 39594 - DNA, 38 bp, Artificial Sequence
  primer
gtaaaacgacggccagttgctgaaggatttaacatggg

SEQ ID NO: 39595 - DNA, 37 bp, Artificial Sequence
  primer
gtaaaacgacggccagtcacctggactcagttcccac

SEQ ID NO: 39596 - DNA, 21 bp, Artificial Sequence
  primer
aagagctgtcaccctccaaag

SEQ ID NO: 39597 - DNA, 39 bp, Artificial Sequence
  primer
gtaaaacgacggccagttccatgttcactctcccatttc

SEQ ID NO: 39598 - DNA, 38 bp, Artificial Sequence
  primer
gtaaaacgacggccagtaggacaagtccactctcctgc

SEQ ID NO: 39599 - DNA, 20 bp, Artificial Sequence
  primer
gtcaagtgagcagaggctgg

SEQ ID NO: 39600 - DNA, 38 bp, Artificial Sequence
  primer
gtaaaacgacggccagtcccagggaccctagaggatag

SEQ ID NO: 39601 - DNA, 38 bp, Artificial Sequence
  primer
gtaaaacgacggccagtaagagaagagctggttgctgg

SEQ ID NO: 39602 - DNA, 38 bp, Artificial Sequence
  primer
gtaaaacgacggccagtcaaccctagcccaactcaaag

SEQ ID NO: 39603 - DNA, 38 bp, Artificial Sequence
  primer
gtaaaacgacggccagtctatggtgacatcatgcccag

SEQ ID NO: 39604 - DNA, 21 bp, Artificial Sequence
  primer
cctcccactcaagacagatcc

SEQ ID NO: 39605 - DNA, 38 bp, Artificial Sequence
  primer
gtaaaacgacggccagtagctggtctggagaactgagg

SEQ ID NO: 39606 - DNA, 37 bp, Artificial Sequence
  primer
gtaaaacgacggccagtatgtctgtttgggcatggag

SEQ ID NO: 39607 - DNA, 38 bp, Artificial Sequence
  primer
gtaaaacgacggccagttgctgaagagaccaccatagg

SEQ ID NO: 39608 - DNA, 38 bp, Artificial Sequence
  primer
gtaaaacgacggccagtcccttcccttgtttcaaagac

SEQ ID NO: 39609 - DNA, 38 bp, Artificial Sequence
  primer
gtaaaacgacggccagtcctccctacagatcccagctc

SEQ ID NO: 39610 - DNA, 37 bp, Artificial Sequence
  primer
gtaaaacgacggccagtgacagcccaaccactacctg

SEQ ID NO: 39611 - DNA, 38 bp, Artificial Sequence
  primer
gtaaaacgacggccagttaggctagatgcgagggaaag

SEQ ID NO: 39612 - DNA, 38 bp, Artificial Sequence
  primer
gtaaaacgacggccagtcctcagacctggaagcatttc

SEQ ID NO: 39613 - DNA, 23 bp, Artificial Sequence
  primer
gctgtcccatgtgtctttaagtg

SEQ ID NO: 39614 - DNA, 21 bp, Artificial Sequence
  primer
accttcgtcttccaccatttg

SEQ ID NO: 39615 - DNA, 21 bp, Artificial Sequence
  primer
attagaagctgtctcctcccg

SEQ ID NO: 39616 - DNA, 38 bp, Artificial Sequence
  primer
gtaaaacgacggccagtaggaggtcttcccagggtatg

SEQ ID NO: 39617 - DNA, 38 bp, Artificial Sequence
  primer
gtaaaacgacggccagtaagaagcctccttgtgagcag

SEQ ID NO: 39618 - DNA, 37 bp, Artificial Sequence
  primer
gtaaaacgacggccagtagccctgcttacctgtggag

SEQ ID NO: 39619 - DNA, 36 bp, Artificial Sequence
  primer
gtaaaacgacggccagtgcagtgaagctcatggtgg

SEQ ID NO: 39620 - DNA, 38 bp, Artificial Sequence
  primer
gtaaaacgacggccagtcacagacacctcctctcaggc

SEQ ID NO: 39621 - DNA, 37 bp, Artificial Sequence
  primer
gtaaaacgacggccagtgaaacgacaaagccagctcc

SEQ ID NO: 39622 - DNA, 38 bp, Artificial Sequence
  primer
gtaaaacgacggccagtcttccacccaggtctctatcc

SEQ ID NO: 39623 - DNA, 38 bp, Artificial Sequence
  primer
gtaaaacgacggccagtgacaaggcctctaaaggtggg

SEQ ID NO: 39624 - DNA, 21 bp, Artificial Sequence
  primer
atgcaactcccatccctcttc

SEQ ID NO: 39625 - DNA, 38 bp, Artificial Sequence
  primer
gtaaaacgacggccagtggcgtggtttctctacctgtc

SEQ ID NO: 39626 - DNA, 21 bp, Artificial Sequence
  primer
acctctggcaggtgcttactg

SEQ ID NO: 39627 - DNA, 35 bp, Artificial Sequence
  primer
gtaaaacgacggccagtagcagctgaccgagggac

SEQ ID NO: 39628 - DNA, 37 bp, Artificial Sequence
  primer
gtaaaacgacggccagtaaggtaggagctcgaggcag

SEQ ID NO: 39629 - DNA, 21 bp, Artificial Sequence
  primer
tctgaaggcggttctaggaag

SEQ ID NO: 39630 - DNA, 38 bp, Artificial Sequence
  primer
gtaaaacgacggccagtgtagtcaccactcggctctgg

SEQ ID NO: 39631 - DNA, 37 bp, Artificial Sequence
  primer
gtaaaacgacggccagtcttctgcctccaccctcaac

SEQ ID NO: 39632 - DNA, 22 bp, Artificial Sequence
  primer
tggagtccagtgatgttcagtc

SEQ ID NO: 39633 - DNA, 42 bp, Artificial Sequence
  primer
gtaaaacgacggccagttgcaagggtaagtctaggaattagg

SEQ ID NO: 39634 - DNA, 26 bp, Artificial Sequence
  primer
tgatttccctgaataaataagagagg

SEQ ID NO: 39635 - DNA, 21 bp, Artificial Sequence
  primer
gcatgtaagccacggaatatg

SEQ ID NO: 39636 - DNA, 43 bp, Artificial Sequence
  primer
gtaaaacgacggccagttcacatggtaagattaatgcatattg

SEQ ID NO: 39637 - DNA, 27 bp, Artificial Sequence
  primer
tttgttagggaagaaccatgttattat

SEQ ID NO: 39638 - DNA, 38 bp, Artificial Sequence
  primer
gtaaaacgacggccagtaacttggccatttgcattaaa

SEQ ID NO: 39639 - DNA, 36 bp, Artificial Sequence
  primer
gtaaaacgacggccagtcagcaacagcggaactgac

SEQ ID NO: 39640 - DNA, 21 bp, Artificial Sequence
  primer
aggagctctgtcaaactgcac

SEQ ID NO: 39641 - DNA, 23 bp, Artificial Sequence
  primer
attaatgaaattgtccggcatac

SEQ ID NO: 39642 - DNA, 38 bp, Artificial Sequence
  primer
gtaaaacgacggccagtatgcataagaagggaaggcag

SEQ ID NO: 39643 - DNA, 21 bp, Artificial Sequence
  primer
tttcatgctggtcttcaaagg

SEQ ID NO: 39644 - DNA, 21 bp, Artificial Sequence
  primer
tgcgtatgctttggcatatct

SEQ ID NO: 39645 - DNA, 44 bp, Artificial Sequence
  primer
gtaaaacgacggccagttgagtgtcaacgtgtattattctcatc

SEQ ID NO: 39646 - DNA, 37 bp, Artificial Sequence
  primer
gtaaaacgacggccagtgtgtgccagcatgcactaac

SEQ ID NO: 39647 - DNA, 19 bp, Artificial Sequence
  primer
cacacaccaccacacctgg

SEQ ID NO: 39648 - DNA, 39 bp, Artificial Sequence
  primer
gtaaaacgacggccagtgatttccttgttgtccacattg

SEQ ID NO: 39649 - DNA, 24 bp, Artificial Sequence
  primer
tctccattactctcagattccctg

SEQ ID NO: 39650 - DNA, 21 bp, Artificial Sequence
  primer
cccgtgactttctgctgagac

SEQ ID NO: 39651 - DNA, 38 bp, Artificial Sequence
  primer
gtaaaacgacggccagtcagagccaaagactccaacac

SEQ ID NO: 39652 - DNA, 21 bp, Artificial Sequence
  primer
aagaaagggaaagatgggagg

SEQ ID NO: 39653 - DNA, 37 bp, Artificial Sequence
  primer
gtaaaacgacggccagtccttgcctccctcttgaaac

SEQ ID NO: 39654 - DNA, 21 bp, Artificial Sequence
  primer
gtaagggagagtggatgccag

SEQ ID NO: 39655 - DNA, 40 bp, Artificial Sequence
  primer
gtaaaacgacggccagtacaagctgcctaatgttaaaggg

SEQ ID NO: 39656 - DNA, 38 bp, Artificial Sequence
  primer
gtaaaacgacggccagtgatgactccttgccattggtc

SEQ ID NO: 39657 - DNA, 38 bp, Artificial Sequence
  primer
gtaaaacgacggccagttagatgtccgatgggaagttg

SEQ ID NO: 39658 - DNA, 40 bp, Artificial Sequence
  primer
gtaaaacgacggccagttgaacctttagttcctgaaatgg

SEQ ID NO: 39659 - DNA, 20 bp, Artificial Sequence
  primer
aaaggttctttccgcctgtg

SEQ ID NO: 39660 - DNA, 20 bp, Artificial Sequence
  primer
atgttgcctaagacctcggg

SEQ ID NO: 39661 - DNA, 22 bp, Artificial Sequence
  primer
tcttcatgcaagtgttgctttc

SEQ ID NO: 39662 - DNA, 19 bp, Artificial Sequence
  primer
tcatatgccgcacgttgac

SEQ ID NO: 39663 - DNA, 21 bp, Artificial Sequence
  primer
gcctaggccttactggtcttc

SEQ ID NO: 39664 - DNA, 23 bp, Artificial Sequence
  primer
tgtaacctgaaaggctcacattg

SEQ ID NO: 39665 - DNA, 37 bp, Artificial Sequence
  primer
gtaaaacgacggccagtgttccagctgatgggaactg

SEQ ID NO: 39666 - DNA, 21 bp, Artificial Sequence
  primer
gttggtacaaggcacatcagg

SEQ ID NO: 39667 - DNA, 21 bp, Artificial Sequence
  primer
gccttaaacactgactgcacc

SEQ ID NO: 39668 - DNA, 21 bp, Artificial Sequence
  primer
gaaagcaactggaaatctggg

SEQ ID NO: 39669 - DNA, 21 bp, Artificial Sequence
  primer
accttggtactcacgagttgg

SEQ ID NO: 39670 - DNA, 20 bp, Artificial Sequence
  primer
taagcctgctccctctcagg

SEQ ID NO: 39671 - DNA, 40 bp, Artificial Sequence
  primer
gtaaaacgacggccagtttctgacaatacagtcaccctgg

SEQ ID NO: 39672 - DNA, 21 bp, Artificial Sequence
  primer
gcagcagctgtttaaagtccc

SEQ ID NO: 39673 - DNA, 38 bp, Artificial Sequence
  primer
gtaaaacgacggccagttgttaactgccagtcactccc

SEQ ID NO: 39674 - DNA, 38 bp, Artificial Sequence
  primer
gtaaaacgacggccagtccctatgtgctaggatcaccg

SEQ ID NO: 39675 - DNA, 21 bp, Artificial Sequence
  primer
ccttatcatgaccttgggacc

SEQ ID NO: 39676 - DNA, 39 bp, Artificial Sequence
  primer
gtaaaacgacggccagtaacacacaacaaagcttcctga

SEQ ID NO: 39677 - DNA, 40 bp, Artificial Sequence
  primer
gtaaaacgacggccagtttcagttgagtcttcattgaccc

SEQ ID NO: 39678 - DNA, 25 bp, Artificial Sequence
  primer
tgatatgtttactgcttgttggaaa

SEQ ID NO: 39679 - DNA, 24 bp, Artificial Sequence
  primer
ttggaagtcacattgaaatcagag

SEQ ID NO: 39680 - DNA, 38 bp, Artificial Sequence
  primer
gtaaaacgacggccagtctctacggcccacagataacc

SEQ ID NO: 39681 - DNA, 24 bp, Artificial Sequence
  primer
ttgtagacagtggtaacttctcgg

SEQ ID NO: 39682 - DNA, 38 bp, Artificial Sequence
  primer
gtaaaacgacggccagtctgattgccagactctcttgg

SEQ ID NO: 39683 - DNA, 38 bp, Artificial Sequence
  primer
gtaaaacgacggccagtgtgctgaccaggatttatgcc

SEQ ID NO: 39684 - DNA, 21 bp, Artificial Sequence
  primer
ttgcatcgtgcaagtagatgg

SEQ ID NO: 39685 - DNA, 38 bp, Artificial Sequence
  primer
gtaaaacgacggccagttcctattattccgcaagtggc

SEQ ID NO: 39686 - DNA, 21 bp, Artificial Sequence
  primer
ccatggagaaagtgagagagg

SEQ ID NO: 39687 - DNA, 21 bp, Artificial Sequence
  primer
tcagtctacagtctcgggctc

SEQ ID NO: 39688 - DNA, 21 bp, Artificial Sequence
  primer
tgaaattgaacttgtcaccgc

SEQ ID NO: 39689 - DNA, 38 bp, Artificial Sequence
  primer
gtaaaacgacggccagtaagcaattccacgggtcatac

SEQ ID NO: 39690 - DNA, 44 bp, Artificial Sequence
  primer
gtaaaacgacggccagtacactttatacttatgggtttccagag

SEQ ID NO: 39691 - DNA, 38 bp, Artificial Sequence
  primer
gtaaaacgacggccagtcttagcctggactgactggtg

SEQ ID NO: 39692 - DNA, 43 bp, Artificial Sequence
  primer
gtaaaacgacggccagtggagagatgtaaatatcacagtcagg

SEQ ID NO: 39693 - DNA, 38 bp, Artificial Sequence
  primer
gtaaaacgacggccagtgggctaccactcgagctaatg

SEQ ID NO: 39694 - DNA, 40 bp, Artificial Sequence
  primer
gtaaaacgacggccagtcccgactggaactataggttgtc

SEQ ID NO: 39695 - DNA, 39 bp, Artificial Sequence
  primer
gtaaaacgacggccagttttgcaagtattgccctgatac

SEQ ID NO: 39696 - DNA, 38 bp, Artificial Sequence
  primer
gtaaaacgacggccagttgcatctgttaggaccaaagg

SEQ ID NO: 39697 - DNA, 23 bp, Artificial Sequence
  primer
ggaatttggcagagagataatcg

SEQ ID NO: 39698 - DNA, 39 bp, Artificial Sequence
  primer
gtaaaacgacggccagtaacagctggaaaccagtggtag

SEQ ID NO: 39699 - DNA, 20 bp, Artificial Sequence
  primer
ttcaagtcggatgcttggac

SEQ ID NO: 39700 - DNA, 21 bp, Artificial Sequence
  primer
gtactttccatttgtgcgtgc

SEQ ID NO: 39701 - DNA, 40 bp, Artificial Sequence
  primer
gtaaaacgacggccagttttaatataaagcatccggcaac

SEQ ID NO: 39702 - DNA, 22 bp, Artificial Sequence
  primer
tccaagtctctatccatggcac

SEQ ID NO: 39703 - DNA, 39 bp, Artificial Sequence
  primer
gtaaaacgacggccagtggcattgacttgaatggctaag

SEQ ID NO: 39704 - DNA, 20 bp, Artificial Sequence
  primer
ggtgaggtctgagacatggg

SEQ ID NO: 39705 - DNA, 37 bp, Artificial Sequence
  primer
gtaaaacgacggccagtgactgagttcgctgctgtcc

SEQ ID NO: 39706 - DNA, 20 bp, Artificial Sequence
  primer
acagctgtctccagaagccc

SEQ ID NO: 39707 - DNA, 38 bp, Artificial Sequence
  primer
gtaaaacgacggccagtctgaccaagaatgacaggagc

SEQ ID NO: 39708 - DNA, 38 bp, Artificial Sequence
  primer
gtaaaacgacggccagtaggtgagtggtaggcttggtg

SEQ ID NO: 39709 - DNA, 38 bp, Artificial Sequence
  primer
gtaaaacgacggccagtctgaagaccctgtcactgcac

SEQ ID NO: 39710 - DNA, 18 bp, Artificial Sequence
  primer
gagtgccagctgaggcag

SEQ ID NO: 39711 - DNA, 38 bp, Artificial Sequence
  primer
gtaaaacgacggccagttacgagcctaccctcctcatc

SEQ ID NO: 39712 - DNA, 38 bp, Artificial Sequence
  primer
gtaaaacgacggccagttaggtgtgtgtcctgggagtg

SEQ ID NO: 39713 - DNA, 21 bp, Artificial Sequence
  primer
tcgctgttgtacctgaaccag

SEQ ID NO: 39714 - DNA, 38 bp, Artificial Sequence
  primer
gtaaaacgacggccagtacgacaagatggtcatctccc

SEQ ID NO: 39715 - DNA, 20 bp, Artificial Sequence
  primer
cagcgtgagttgggactagg

SEQ ID NO: 39716 - DNA, 38 bp, Artificial Sequence
  primer
gtaaaacgacggccagtgtacctgttcctgggttctcg

SEQ ID NO: 39717 - DNA, 38 bp, Artificial Sequence
  primer
gtaaaacgacggccagtaaagaagaagcgagtggatgc

SEQ ID NO: 39718 - DNA, 38 bp, Artificial Sequence
  primer
gtaaaacgacggccagtgccacctactcctttgaggtg

SEQ ID NO: 39719 - DNA, 21 bp, Artificial Sequence
  primer
acagcatcctgaacattggac

SEQ ID NO: 39720 - DNA, 21 bp, Artificial Sequence
  primer
gacctggagattgtggtttgc

SEQ ID NO: 39721 - DNA, 38 bp, Artificial Sequence
  primer
gtaaaacgacggccagttaaggaggaggtaggtgcgag

SEQ ID NO: 39722 - DNA, 39 bp, Artificial Sequence
  primer
gtaaaacgacggccagtctgaagagtgactcctacggtg

SEQ ID NO: 39723 - DNA, 38 bp, Artificial Sequence
  primer
gtaaaacgacggccagtctcagagactaggtgcgtggg

SEQ ID NO: 39724 - DNA, 37 bp, Artificial Sequence
  primer
gtaaaacgacggccagtaccatggaggtaggtggtgc

SEQ ID NO: 39725 - DNA, 37 bp, Artificial Sequence
  primer
gtaaaacgacggccagttacccacagcccacctcttc

SEQ ID NO: 39726 - DNA, 19 bp, Artificial Sequence
  primer
gggtgggtgtggtacaagg

SEQ ID NO: 39727 - DNA, 38 bp, Artificial Sequence
  primer
gtaaaacgacggccagttctgtggtagaagggagacgc

SEQ ID NO: 39728 - DNA, 37 bp, Artificial Sequence
  primer
gtaaaacgacggccagtacagagctgagggcaacatc

SEQ ID NO: 39729 - DNA, 21 bp, Artificial Sequence
  primer
cctacctgtcctatgatgccc

SEQ ID NO: 39730 - DNA, 39 bp, Artificial Sequence
  primer
gtaaaacgacggccagtgaaggagtttgagaccatcgag

SEQ ID NO: 39731 - DNA, 37 bp, Artificial Sequence
  primer
gtaaaacgacggccagtggtcagctgggaggctattc

SEQ ID NO: 39732 - DNA, 36 bp, Artificial Sequence
  primer
gtaaaacgacggccagtgtcgggcctcaaaggctac

SEQ ID NO: 39733 - DNA, 19 bp, Artificial Sequence
  primer
cagaaggtgtgccagtccc

SEQ ID NO: 39734 - DNA, 38 bp, Artificial Sequence
  primer
gtaaaacgacggccagtgtcatgaagagcatttcgctg

SEQ ID NO: 39735 - DNA, 37 bp, Artificial Sequence
  primer
gtaaaacgacggccagtacttcatggtggacaatgcc

SEQ ID NO: 39736 - DNA, 38 bp, Artificial Sequence
  primer
gtaaaacgacggccagtgaaggtgagtgcttcctccac

SEQ ID NO: 39737 - DNA, 20 bp, Artificial Sequence
  primer
cacgtggtttggtgagtgtg

SEQ ID NO: 39738 - DNA, 35 bp, Artificial Sequence
  primer
gtaaaacgacggccagtaccatgctgccacaccac

SEQ ID NO: 39739 - DNA, 21 bp, Artificial Sequence
  primer
caaccgctacctgtacctgag

SEQ ID NO: 39740 - DNA, 21 bp, Artificial Sequence
  primer
tggaaatgggcctttaaactg

SEQ ID NO: 39741 - DNA, 40 bp, Artificial Sequence
  primer
gtaaaacgacggccagttttgtagctatggagagcacagg

SEQ ID NO: 39742 - DNA, 38 bp, Artificial Sequence
  primer
gtaaaacgacggccagtgtcggaaagttgggtctgaac

SEQ ID NO: 39743 - DNA, 40 bp, Artificial Sequence
  primer
gtaaaacgacggccagttgaagcctgctttcactatatgc

SEQ ID NO: 39744 - DNA, 39 bp, Artificial Sequence
  primer
gtaaaacgacggccagttggttagcaggatgtacaccaa

SEQ ID NO: 39745 - DNA, 27 bp, Artificial Sequence
  primer
tgaagaaagattgagagttaatgacac

SEQ ID NO: 39746 - DNA, 21 bp, Artificial Sequence
  primer
caaatttaagcaaccagtggg

SEQ ID NO: 39747 - DNA, 23 bp, Artificial Sequence
  primer
tctcatatcccactgctttaacc

SEQ ID NO: 39748 - DNA, 39 bp, Artificial Sequence
  primer
gtaaaacgacggccagttgtggtctattgttgttgaccg

SEQ ID NO: 39749 - DNA, 21 bp, Artificial Sequence
  primer
aaattgcatcagctttggatg

SEQ ID NO: 39750 - DNA, 21 bp, Artificial Sequence
  primer
aagagcgagacccaatctcag

SEQ ID NO: 39751 - DNA, 38 bp, Artificial Sequence
  primer
gtaaaacgacggccagtggtcattgtgggactcagatg

SEQ ID NO: 39752 - DNA, 39 bp, Artificial Sequence
  primer
gtaaaacgacggccagtgatctgtcaaaggacttcaggg

SEQ ID NO: 39753 - DNA, 21 bp, Artificial Sequence
  primer
tgaatcagagcaacccatgtc

SEQ ID NO: 39754 - DNA, 38 bp, Artificial Sequence
  primer
gtaaaacgacggccagtgtggctgtgcttccaatttag

SEQ ID NO: 39755 - DNA, 21 bp, Artificial Sequence
  primer
catgtggacactgttcttccc

SEQ ID NO: 39756 - DNA, 38 bp, Artificial Sequence
  primer
gtaaaacgacggccagtcatgttccaagtgctagtgcc

SEQ ID NO: 39757 - DNA, 26 bp, Artificial Sequence
  primer
ttccttctacacatacctactcttgg

SEQ ID NO: 39758 - DNA, 40 bp, Artificial Sequence
  primer
gtaaaacgacggccagtacaatttctttgtgttcaaaggc

SEQ ID NO: 39759 - DNA, 40 bp, Artificial Sequence
  primer
gtaaaacgacggccagtgaaataattgaagcactgaaccg

SEQ ID NO: 39760 - DNA, 39 bp, Artificial Sequence
  primer
gtaaaacgacggccagtggagaagtgaattgcttagccc

SEQ ID NO: 39761 - DNA, 23 bp, Artificial Sequence
  primer
ttgtgtgctttatttcttggttg

SEQ ID NO: 39762 - DNA, 22 bp, Artificial Sequence
  primer
tgtgaaggctctttcagtgatg

SEQ ID NO: 39763 - DNA, 39 bp, Artificial Sequence
  primer
gtaaaacgacggccagtgccagcactccagatagatgag

SEQ ID NO: 39764 - DNA, 21 bp, Artificial Sequence
  primer
tacaagttgaatcggctggag

SEQ ID NO: 39765 - DNA, 21 bp, Artificial Sequence
  primer
atgcaactgccctcatcatag

SEQ ID NO: 39766 - DNA, 40 bp, Artificial Sequence
  primer
gtaaaacgacggccagtaaggtggtaccaaattaaggagc

SEQ ID NO: 39767 - DNA, 38 bp, Artificial Sequence
  primer
gtaaaacgacggccagttttccgttgctgtactttgct

SEQ ID NO: 39768 - DNA, 39 bp, Artificial Sequence
  primer
gtaaaacgacggccagttggtgggttgtagttgtagcct

SEQ ID NO: 39769 - DNA, 22 bp, Artificial Sequence
  primer
gcaggcaaataatacaaatccc

SEQ ID NO: 39770 - DNA, 20 bp, Artificial Sequence
  primer
attagctggctgtggtggtg

SEQ ID NO: 39771 - DNA, 21 bp, Artificial Sequence
  primer
tgacctctgcacacacagatg

SEQ ID NO: 39772 - DNA, 38 bp, Artificial Sequence
  primer
gtaaaacgacggccagtgaagcgaaggaggagtgtgtg

SEQ ID NO: 39773 - DNA, 21 bp, Artificial Sequence
  primer
ggtcagaggtcagaagggttc

SEQ ID NO: 39774 - DNA, 21 bp, Artificial Sequence
  primer
ggtacctcagcttcttcaggc

SEQ ID NO: 39775 - DNA, 38 bp, Artificial Sequence
  primer
gtaaaacgacggccagtgggctcagaaacactcttccc

SEQ ID NO: 39776 - DNA, 20 bp, Artificial Sequence
  primer
gacagccagcatttgaaacc

SEQ ID NO: 39777 - DNA, 38 bp, Artificial Sequence
  primer
gtaaaacgacggccagtggctggaatttaagagcatgg

SEQ ID NO: 39778 - DNA, 18 bp, Artificial Sequence
  primer
gctgcccactgtcctgag

SEQ ID NO: 39779 - DNA, 38 bp, Artificial Sequence
  primer
gtaaaacgacggccagtatttggtgggcactcccttag

SEQ ID NO: 39780 - DNA, 37 bp, Artificial Sequence
  primer
gtaaaacgacggccagtattgcagataaccgcttccc

SEQ ID NO: 39781 - DNA, 21 bp, Artificial Sequence
  primer
gcaagattccagtctctgctg

SEQ ID NO: 39782 - DNA, 40 bp, Artificial Sequence
  primer
gtaaaacgacggccagtcatgaattcaagcatattctccc

SEQ ID NO: 39783 - DNA, 42 bp, Artificial Sequence
  primer
gtaaaacgacggccagtttatccctatgtttcaattaggagc

SEQ ID NO: 39784 - DNA, 22 bp, Artificial Sequence
  primer
tggttgactggtttactgcttg

SEQ ID NO: 39785 - DNA, 25 bp, Artificial Sequence
  primer
ggctaggaaatctaccttgaaagac

SEQ ID NO: 39786 - DNA, 38 bp, Artificial Sequence
  primer
gtaaaacgacggccagtatgctaagggagggcagaaac

SEQ ID NO: 39787 - DNA, 21 bp, Artificial Sequence
  primer
aaagaaacgtcctctgccctc

SEQ ID NO: 39788 - DNA, 42 bp, Artificial Sequence
  primer
gtaaaacgacggccagtaaagatttgtactgaaatccttggc

SEQ ID NO: 39789 - DNA, 43 bp, Artificial Sequence
  primer
gtaaaacgacggccagtgtctgactggccataactagacttag

SEQ ID NO: 39790 - DNA, 21 bp, Artificial Sequence
  primer
tcaaccttctaagcagctggg

SEQ ID NO: 39791 - DNA, 39 bp, Artificial Sequence
  primer
gtaaaacgacggccagttgtagtttgcataggcacaagg

SEQ ID NO: 39792 - DNA, 38 bp, Artificial Sequence
  primer
gtaaaacgacggccagttgtgtgtacacggaaagatgg

SEQ ID NO: 39793 - DNA, 38 bp, Artificial Sequence
  primer
gtaaaacgacggccagtgtccacccttaggtcctccag

SEQ ID NO: 39794 - DNA, 21 bp, Artificial Sequence
  primer
ttacactagctcctcctccgc

SEQ ID NO: 39795 - DNA, 41 bp, Artificial Sequence
  primer
gtaaaacgacggccagtcacatgtcagaagcagctagtatg

SEQ ID NO: 39796 - DNA, 38 bp, Artificial Sequence
  primer
gtaaaacgacggccagtatcccaagtggtttgatggtg

SEQ ID NO: 39797 - DNA, 38 bp, Artificial Sequence
  primer
gtaaaacgacggccagtaagtcgttattggcagctcag

SEQ ID NO: 39798 - DNA, 22 bp, Artificial Sequence
  primer
gactgtctttgtagcggtggac

SEQ ID NO: 39799 - DNA, 37 bp, Artificial Sequence
  primer
gtaaaacgacggccagtcacaccctcttctcactgcc

SEQ ID NO: 39800 - DNA, 21 bp, Artificial Sequence
  primer
gtgctctccctctgactttcc

SEQ ID NO: 39801 - DNA, 21 bp, Artificial Sequence
  primer
accaggactgaccctgcttag

SEQ ID NO: 39802 - DNA, 21 bp, Artificial Sequence
  primer
ttcctaaggcacaagtgaggc

SEQ ID NO: 39803 - DNA, 38 bp, Artificial Sequence
  primer
gtaaaacgacggccagtttaggactgcgttccctgttc

SEQ ID NO: 39804 - DNA, 38 bp, Artificial Sequence
  primer
gtaaaacgacggccagtattgtgacagtgtgcaggatg

SEQ ID NO: 39805 - DNA, 22 bp, Artificial Sequence
  primer
ccatctactgacctcgtgatcc

SEQ ID NO: 39806 - DNA, 38 bp, Artificial Sequence
  primer
gtaaaacgacggccagtcagagtcagggtacggtcgtc

SEQ ID NO: 39807 - DNA, 38 bp, Artificial Sequence
  primer
gtaaaacgacggccagtgggaacatcatcaacatggag

SEQ ID NO: 39808 - DNA, 24 bp, Artificial Sequence
  primer
aggtgcaaagtgaattagtccatc

SEQ ID NO: 39809 - DNA, 38 bp, Artificial Sequence
  primer
gtaaaacgacggccagttctgcaaagaacaaccctctc

SEQ ID NO: 39810 - DNA, 21 bp, Artificial Sequence
  primer
tccaatttccttctgggtgtg

SEQ ID NO: 39811 - DNA, 38 bp, Artificial Sequence
  primer
gtaaaacgacggccagtatgaagtccacgtctccttgc

SEQ ID NO: 39812 - DNA, 38 bp, Artificial Sequence
  primer
gtaaaacgacggccagttgcggtggctaacttagatcc

SEQ ID NO: 39813 - DNA, 22 bp, Artificial Sequence
  primer
tgaggcctttggagacatagac

SEQ ID NO: 39814 - DNA, 21 bp, Artificial Sequence
  primer
attacaaggagaagccaccga

SEQ ID NO: 39815 - DNA, 38 bp, Artificial Sequence
  primer
gtaaaacgacggccagttggcagaaaggaatttcaatg

SEQ ID NO: 39816 - DNA, 37 bp, Artificial Sequence
  primer
gtaaaacgacggccagtgagctttcaaggcccaaatc

SEQ ID NO: 39817 - DNA, 38 bp, Artificial Sequence
  primer
gtaaaacgacggccagtagccagttcccaagacttcac

SEQ ID NO: 39818 - DNA, 38 bp, Artificial Sequence
  primer
gtaaaacgacggccagtctgagacagttcacagccacc

SEQ ID NO: 39819 - DNA, 38 bp, Artificial Sequence
  primer
gtaaaacgacggccagtaagaccagcaacttgaccagg

SEQ ID NO: 39820 - DNA, 38 bp, Artificial Sequence
  primer
gtaaaacgacggccagtggaggttggattcaggagatg

SEQ ID NO: 39821 - DNA, 37 bp, Artificial Sequence
  primer
gtaaaacgacggccagtctcaagtcatggtgggcaag

SEQ ID NO: 39822 - DNA, 38 bp, Artificial Sequence
  primer
gtaaaacgacggccagttagattggtccttgggtcagc

SEQ ID NO: 39823 - DNA, 38 bp, Artificial Sequence
  primer
gtaaaacgacggccagttcatgtatcgccgtaaactgg

SEQ ID NO: 39824 - DNA, 37 bp, Artificial Sequence
  primer
gtaaaacgacggccagtgtcacctagtgcatgggagg

SEQ ID NO: 39825 - DNA, 35 bp, Artificial Sequence
  primer
gtaaaacgacggccagtcagcctggcacacacacc

SEQ ID NO: 39826 - DNA, 22 bp, Artificial Sequence
  primer
tgggaagctaagatcacaccac

SEQ ID NO: 39827 - DNA, 38 bp, Artificial Sequence
  primer
gtaaaacgacggccagttctgggaggtaatagccttgc

SEQ ID NO: 39828 - DNA, 38 bp, Artificial Sequence
  primer
gtaaaacgacggccagtcatgcctcctagacatgaccc

SEQ ID NO: 39829 - DNA, 37 bp, Artificial Sequence
  primer
gtaaaacgacggccagtgcaaaggcctcatcaagaag

SEQ ID NO: 39830 - DNA, 37 bp, Artificial Sequence
  primer
gtaaaacgacggccagtcgttcctgtaccagcgagtc

SEQ ID NO: 39831 - DNA, 21 bp, Artificial Sequence
  primer
tgtctggctcagagtaggtcg

SEQ ID NO: 39832 - DNA, 37 bp, Artificial Sequence
  primer
gtaaaacgacggccagtctgagggaaactgggaggtc

SEQ ID NO: 39833 - DNA, 38 bp, Artificial Sequence
  primer
gtaaaacgacggccagtttctcaagctcagagacggtg

SEQ ID NO: 39834 - DNA, 18 bp, Artificial Sequence
  primer
gagatcccgggtctgagg

SEQ ID NO: 39835 - DNA, 38 bp, Artificial Sequence
  primer
gtaaaacgacggccagttgggtgctcagtaatgtctgg

SEQ ID NO: 39836 - DNA, 38 bp, Artificial Sequence
  primer
gtaaaacgacggccagtgtgactttggaagcttggtgc

SEQ ID NO: 39837 - DNA, 38 bp, Artificial Sequence
  primer
gtaaaacgacggccagtctctttgggtttctgtcccac

SEQ ID NO: 39838 - DNA, 21 bp, Artificial Sequence
  primer
atgacccggtaactcctcctc

SEQ ID NO: 39839 - DNA, 21 bp, Artificial Sequence
  primer
gatggctgacttctttggctc

SEQ ID NO: 39840 - DNA, 38 bp, Artificial Sequence
  primer
gtaaaacgacggccagtacctgtatttgggtcagtggc

SEQ ID NO: 39841 - DNA, 37 bp, Artificial Sequence
  primer
gtaaaacgacggccagtgtatgtcacacccacgcctc

SEQ ID NO: 39842 - DNA, 22 bp, Artificial Sequence
  primer
actttgaacaactgacgacacc

SEQ ID NO: 39843 - DNA, 36 bp, Artificial Sequence
  primer
gtaaaacgacggccagtgagactgtggaagggcagg

SEQ ID NO: 39844 - DNA, 38 bp, Artificial Sequence
  primer
gtaaaacgacggccagtcaatggattcccacatcttcc

SEQ ID NO: 39845 - DNA, 37 bp, Artificial Sequence
  primer
gtaaaacgacggccagtaacctgagaccgcatctgtg

SEQ ID NO: 39846 - DNA, 21 bp, Artificial Sequence
  primer
cgcaaccttaactccacatcc

SEQ ID NO: 39847 - DNA, 38 bp, Artificial Sequence
  primer
gtaaaacgacggccagttcggccatcttgaattctctc

SEQ ID NO: 39848 - DNA, 38 bp, Artificial Sequence
  primer
gtaaaacgacggccagtgggttgatattcccaccttgc

SEQ ID NO: 39849 - DNA, 20 bp, Artificial Sequence
  primer
agaaggaggcccggatttac

SEQ ID NO: 39850 - DNA, 36 bp, Artificial Sequence
  primer
gtaaaacgacggccagtggcctgcactcctgcatag

SEQ ID NO: 39851 - DNA, 38 bp, Artificial Sequence
  primer
gtaaaacgacggccagtcccttagccctcttgtttctc

SEQ ID NO: 39852 - DNA, 21 bp, Artificial Sequence
  primer
gagtcctgacgcagtgtcttg

SEQ ID NO: 39853 - DNA, 40 bp, Artificial Sequence
  primer
gtaaaacgacggccagttgtcagtcgcttctgattattgg

SEQ ID NO: 39854 - DNA, 37 bp, Artificial Sequence
  primer
gtaaaacgacggccagttttagggctatgctgttggg

SEQ ID NO: 39855 - DNA, 38 bp, Artificial Sequence
  primer
gtaaaacgacggccagttgccatttcctttgtctatgc

SEQ ID NO: 39856 - DNA, 21 bp, Artificial Sequence
  primer
tatggctttcaatcctgaccc

SEQ ID NO: 39857 - DNA, 38 bp, Artificial Sequence
  primer
gtaaaacgacggccagtaagatgggaacattgtgagcc

SEQ ID NO: 39858 - DNA, 21 bp, Artificial Sequence
  primer
tatcgccaaggatggctctac

SEQ ID NO: 39859 - DNA, 38 bp, Artificial Sequence
  primer
gtaaaacgacggccagtgtcacggtgcagaaactcaac

SEQ ID NO: 39860 - DNA, 38 bp, Artificial Sequence
  primer
gtaaaacgacggccagtatgtggtgagttgggaggttt

SEQ ID NO: 39861 - DNA, 39 bp, Artificial Sequence
  primer
gtaaaacgacggccagttttatggtgctatccaaggtcc

SEQ ID NO: 39862 - DNA, 20 bp, Artificial Sequence
  primer
caggctggaatttgctgaag

SEQ ID NO: 39863 - DNA, 21 bp, Artificial Sequence
  primer
cagccctgtaacacagagagg

SEQ ID NO: 39864 - DNA, 36 bp, Artificial Sequence
  primer
gtaaaacgacggccagtgtgttgggcttctgaccac

SEQ ID NO: 39865 - DNA, 20 bp, Artificial Sequence
  primer
gtcaccttccagtgtgggac

SEQ ID NO: 39866 - DNA, 38 bp, Artificial Sequence
  primer
gtaaaacgacggccagttgcccagagtattgatgtcca

SEQ ID NO: 39867 - DNA, 39 bp, Artificial Sequence
  primer
gtaaaacgacggccagttggaaagattgctccttcattg

SEQ ID NO: 39868 - DNA, 21 bp, Artificial Sequence
  primer
tatttcaccaagcaaatgggc

SEQ ID NO: 39869 - DNA, 21 bp, Artificial Sequence
  primer
aatatgcacaataagtgggcg

SEQ ID NO: 39870 - DNA, 38 bp, Artificial Sequence
  primer
gtaaaacgacggccagtatagtcccgtcacgtttctcc

SEQ ID NO: 39871 - DNA, 22 bp, Artificial Sequence
  primer
ggcttgagtttatttcggattg

SEQ ID NO: 39872 - DNA, 38 bp, Artificial Sequence
  primer
gtaaaacgacggccagtgataggcagcttgtccaaagg

SEQ ID NO: 39873 - DNA, 38 bp, Artificial Sequence
  primer
gtaaaacgacggccagtgaggcttacatttgccctcag

SEQ ID NO: 39874 - DNA, 38 bp, Artificial Sequence
  primer
gtaaaacgacggccagtaccaacccaataaacagggag

SEQ ID NO: 39875 - DNA, 38 bp, Artificial Sequence
  primer
gtaaaacgacggccagtgatcccactcagggaaagttg

SEQ ID NO: 39876 - DNA, 21 bp, Artificial Sequence
  primer
gagggtgcactactaccgtcc

SEQ ID NO: 39877 - DNA, 19 bp, Artificial Sequence
  primer
gcactcggcaggaagagac

SEQ ID NO: 39878 - DNA, 38 bp, Artificial Sequence
  primer
gtaaaacgacggccagttgttagatcctggtggtgtgg

SEQ ID NO: 39879 - DNA, 38 bp, Artificial Sequence
  primer
gtaaaacgacggccagtctttaccagcacagctcttgg

SEQ ID NO: 39880 - DNA, 21 bp, Artificial Sequence
  primer
catggtctcagggtagggaag

SEQ ID NO: 39881 - DNA, 21 bp, Artificial Sequence
  primer
acacagggcaggaactctgtc

SEQ ID NO: 39882 - DNA, 38 bp, Artificial Sequence
  primer
gtaaaacgacggccagtcagtaagcttggaggcctgag

SEQ ID NO: 39883 - DNA, 21 bp, Artificial Sequence
  primer
tcagacccagaaactccagtg

SEQ ID NO: 39884 - DNA, 21 bp, Artificial Sequence
  primer
ctcctgtaccatgatgggatg

SEQ ID NO: 39885 - DNA, 38 bp, Artificial Sequence
  primer
gtaaaacgacggccagtgcctgaagctgtatgtgatgg

SEQ ID NO: 39886 - DNA, 38 bp, Artificial Sequence
  primer
gtaaaacgacggccagtaccctgatggctatgagatcg

SEQ ID NO: 39887 - DNA, 18 bp, Artificial Sequence
  primer
cggcagtggaggtctgtg

SEQ ID NO: 39888 - DNA, 21 bp, Artificial Sequence
  primer
ccctcagagaagggagggtag

SEQ ID NO: 39889 - DNA, 21 bp, Artificial Sequence
  primer
caacagagccagcaagttagc

SEQ ID NO: 39890 - DNA, 36 bp, Artificial Sequence
  primer
gtaaaacgacggccagtgtgaccacgggtgtgtttg

SEQ ID NO: 39891 - DNA, 21 bp, Artificial Sequence
  primer
ctgtgcaggagaggacagttg

SEQ ID NO: 39892 - DNA, 38 bp, Artificial Sequence
  primer
gtaaaacgacggccagtcaatcaaccgtgtctggaaag

SEQ ID NO: 39893 - DNA, 21 bp, Artificial Sequence
  primer
ttaggatgaggagttcagggc

SEQ ID NO: 39894 - DNA, 38 bp, Artificial Sequence
  primer
gtaaaacgacggccagtagctgtaaatgtcctggagcc

SEQ ID NO: 39895 - DNA, 38 bp, Artificial Sequence
  primer
gtaaaacgacggccagtcaatgcacagcacacattagg

SEQ ID NO: 39896 - DNA, 38 bp, Artificial Sequence
  primer
gtaaaacgacggccagtaagctagagattgggctgcac

SEQ ID NO: 39897 - DNA, 37 bp, Artificial Sequence
  primer
gtaaaacgacggccagtaggctgtggaggaaagcaag

SEQ ID NO: 39898 - DNA, 21 bp, Artificial Sequence
  primer
caacacaatgtgacaagcacc

SEQ ID NO: 39899 - DNA, 36 bp, Artificial Sequence
  primer
gtaaaacgacggccagtcatctttgggtcaaagggc

SEQ ID NO: 39900 - DNA, 35 bp, Artificial Sequence
  primer
gtaaaacgacggccagtccctgtttgacagctggg

SEQ ID NO: 39901 - DNA, 38 bp, Artificial Sequence
  primer
gtaaaacgacggccagttcttaaacatccttgctgccc

SEQ ID NO: 39902 - DNA, 37 bp, Artificial Sequence
  primer
gtaaaacgacggccagttgacagcccactctgttgtg

SEQ ID NO: 39903 - DNA, 36 bp, Artificial Sequence
  primer
gtaaaacgacggccagtcagggagctggtcttggag

SEQ ID NO: 39904 - DNA, 21 bp, Artificial Sequence
  primer
tctctctagcttctggcgctg

SEQ ID NO: 39905 - DNA, 38 bp, Artificial Sequence
  primer
gtaaaacgacggccagttaaatgtctgatgcgtgacgg

SEQ ID NO: 39906 - DNA, 21 bp, Artificial Sequence
  primer
ctacaaccacaccaccttccc

SEQ ID NO: 39907 - DNA, 21 bp, Artificial Sequence
  primer
ggactaagggtgctgtgtgtg

SEQ ID NO: 39908 - DNA, 21 bp, Artificial Sequence
  primer
cccatctggtcattcttgctg

SEQ ID NO: 39909 - DNA, 38 bp, Artificial Sequence
  primer
gtaaaacgacggccagtgtgagacccatctggaaggag

SEQ ID NO: 39910 - DNA, 38 bp, Artificial Sequence
  primer
gtaaaacgacggccagttggtgcgttgatgtagagacc

SEQ ID NO: 39911 - DNA, 38 bp, Artificial Sequence
  primer
gtaaaacgacggccagtcctctcctacctgcagacacc

SEQ ID NO: 39912 - DNA, 38 bp, Artificial Sequence
  primer
gtaaaacgacggccagtagtacctgctgcactcacctg

SEQ ID NO: 39913 - DNA, 38 bp, Artificial Sequence
  primer
gtaaaacgacggccagtctcgttaaagatggcagagcg

SEQ ID NO: 39914 - DNA, 21 bp, Artificial Sequence
  primer
ggagtggtcatcgaaggtttc

SEQ ID NO: 39915 - DNA, 21 bp, Artificial Sequence
  primer
gactactggagactgctgccc

SEQ ID NO: 39916 - DNA, 38 bp, Artificial Sequence
  primer
gtaaaacgacggccagtagcacaatgattggtcactcc

SEQ ID NO: 39917 - DNA, 18 bp, Artificial Sequence
  primer
actccagcctgggtgatg

SEQ ID NO: 39918 - DNA, 21 bp, Artificial Sequence
  primer
gggctttgagatctttggatt

SEQ ID NO: 39919 - DNA, 23 bp, Artificial Sequence
  primer
ccaagaagaatgtgaaacttggg

SEQ ID NO: 39920 - DNA, 21 bp, Artificial Sequence
  primer
gacatcttccttgccctgtgt

SEQ ID NO: 39921 - DNA, 21 bp, Artificial Sequence
  primer
atctgtggaaccatcagaacc

SEQ ID NO: 39922 - DNA, 21 bp, Artificial Sequence
  primer
ccttggccagtttaacagtga

SEQ ID NO: 39923 - DNA, 37 bp, Artificial Sequence
  primer
gtaaaacgacggccagtgtagcctgtgcaactctgcc

SEQ ID NO: 39924 - DNA, 21 bp, Artificial Sequence
  primer
aacaccaatcatagcaccctg

SEQ ID NO: 39925 - DNA, 22 bp, Artificial Sequence
  primer
tcctgcattgtaatccttctgg

SEQ ID NO: 39926 - DNA, 38 bp, Artificial Sequence
  primer
gtaaaacgacggccagtctgggtgacagcaagactctg

SEQ ID NO: 39927 - DNA, 38 bp, Artificial Sequence
  primer
gtaaaacgacggccagtccttgtgctagggagaattgg

SEQ ID NO: 39928 - DNA, 20 bp, Artificial Sequence
  primer
caggtgcctcaactctctgg

SEQ ID NO: 39929 - DNA, 37 bp, Artificial Sequence
  primer
gtaaaacgacggccagtatgatttggcttctgagccc

SEQ ID NO: 39930 - DNA, 23 bp, Artificial Sequence
  primer
tgacaactgtagaatcaccttgg

SEQ ID NO: 39931 - DNA, 22 bp, Artificial Sequence
  primer
tttctgtgatccacctatcagc

SEQ ID NO: 39932 - DNA, 39 bp, Artificial Sequence
  primer
gtaaaacgacggccagttttcctcaaagcagtcaattcc

SEQ ID NO: 39933 - DNA, 38 bp, Artificial Sequence
  primer
gtaaaacgacggccagtggtctgccatggtgtaatctg

SEQ ID NO: 39934 - DNA, 41 bp, Artificial Sequence
  primer
gtaaaacgacggccagttgaaatatgagcagaacccatatc

SEQ ID NO: 39935 - DNA, 21 bp, Artificial Sequence
  primer
tcacaatggaacggtggtaac

SEQ ID NO: 39936 - DNA, 40 bp, Artificial Sequence
  primer
gtaaaacgacggccagtgcttccttgttagtgagatgtgg

SEQ ID NO: 39937 - DNA, 38 bp, Artificial Sequence
  primer
gtaaaacgacggccagtactctctggcttccagattgc

SEQ ID NO: 39938 - DNA, 21 bp, Artificial Sequence
  primer
ttagctgggcctgaacctaag

SEQ ID NO: 39939 - DNA, 21 bp, Artificial Sequence
  primer
ttaagcgcacagtcacaggtc

SEQ ID NO: 39940 - DNA, 37 bp, Artificial Sequence
  primer
gtaaaacgacggccagttatgacctggctggttgagg

SEQ ID NO: 39941 - DNA, 22 bp, Artificial Sequence
  primer
aagaaatgggagtcaggaaatg

SEQ ID NO: 39942 - DNA, 38 bp, Artificial Sequence
  primer
gtaaaacgacggccagtaggatgacttgtcactggctg

SEQ ID NO: 39943 - DNA, 38 bp, Artificial Sequence
  primer
gtaaaacgacggccagttggcaatctgtagtgggactg

SEQ ID NO: 39944 - DNA, 23 bp, Artificial Sequence
  primer
cgtcttgcaaagatatcaggaac

SEQ ID NO: 39945 - DNA, 21 bp, Artificial Sequence
  primer
cttggacataagtcaggtggc

SEQ ID NO: 39946 - DNA, 38 bp, Artificial Sequence
  primer
gtaaaacgacggccagtgtgccggacactatttaaggg

SEQ ID NO: 39947 - DNA, 38 bp, Artificial Sequence
  primer
gtaaaacgacggccagtggagtttgggagtaagcaggg

SEQ ID NO: 39948 - DNA, 21 bp, Artificial Sequence
  primer
ctcctccgcctatcctaaatg

SEQ ID NO: 39949 - DNA, 20 bp, Artificial Sequence
  primer
ttcttcttccaatgttgccc

SEQ ID NO: 39950 - DNA, 21 bp, Artificial Sequence
  primer
ctccattgctccaggattgtc

SEQ ID NO: 39951 - DNA, 21 bp, Artificial Sequence
  primer
gggttgtgagaggtaatgctg

SEQ ID NO: 39952 - DNA, 38 bp, Artificial Sequence
  primer
gtaaaacgacggccagtgtggtatcaagcagcatctgg

SEQ ID NO: 39953 - DNA, 38 bp, Artificial Sequence
  primer
gtaaaacgacggccagtaattacccaaagctggtctgc

SEQ ID NO: 39954 - DNA, 38 bp, Artificial Sequence
  primer
gtaaaacgacggccagttgtaaccctggctatgtgctg

SEQ ID NO: 39955 - DNA, 38 bp, Artificial Sequence
  primer
gtaaaacgacggccagtgttgctattgcttcttggcct

SEQ ID NO: 39956 - DNA, 38 bp, Artificial Sequence
  primer
gtaaaacgacggccagttacccataccgtccaggaaac

SEQ ID NO: 39957 - DNA, 21 bp, Artificial Sequence
  primer
tggaaccacggtcacttacac

SEQ ID NO: 39958 - DNA, 38 bp, Artificial Sequence
  primer
gtaaaacgacggccagttgccttcaggaaattggagtc

SEQ ID NO: 39959 - DNA, 39 bp, Artificial Sequence
  primer
gtaaaacgacggccagtcaactcctctctgccaaagttc

SEQ ID NO: 39960 - DNA, 21 bp, Artificial Sequence
  primer
acctgaatgaagaccgctcac

SEQ ID NO: 39961 - DNA, 37 bp, Artificial Sequence
  primer
gtaaaacgacggccagtcacccagagatagtgcaggc

SEQ ID NO: 39962 - DNA, 41 bp, Artificial Sequence
  primer
gtaaaacgacggccagtttaagggaaatttctgctttcttg

SEQ ID NO: 39963 - DNA, 38 bp, Artificial Sequence
  primer
gtaaaacgacggccagtctgggacattaccatgaaacg

SEQ ID NO: 39964 - DNA, 38 bp, Artificial Sequence
  primer
gtaaaacgacggccagtctagcaataggccctgcaatc

SEQ ID NO: 39965 - DNA, 39 bp, Artificial Sequence
  primer
gtaaaacgacggccagttgtgttgggaattatggaaagc

SEQ ID NO: 39966 - DNA, 21 bp, Artificial Sequence
  primer
gtcaaatgctcctttcccttg

SEQ ID NO: 39967 - DNA, 21 bp, Artificial Sequence
  primer
cccgagagtgtgagtgtaggc

SEQ ID NO: 39968 - DNA, 39 bp, Artificial Sequence
  primer
gtaaaacgacggccagtttacattgtagtgggctttggg

SEQ ID NO: 39969 - DNA, 39 bp, Artificial Sequence
  primer
gtaaaacgacggccagtttcccttatcatctcgtcatcc

SEQ ID NO: 39970 - DNA, 21 bp, Artificial Sequence
  primer
cccgagagtgtgagtgtaggc

SEQ ID NO: 39971 - DNA, 38 bp, Artificial Sequence
  primer
gtaaaacgacggccagtacagtcataacagggcttccc

SEQ ID NO: 39972 - DNA, 38 bp, Artificial Sequence
  primer
gtaaaacgacggccagtctctctctagggttgttgccc

SEQ ID NO: 39973 - DNA, 21 bp, Artificial Sequence
  primer
gaactccctcctcatccttcc

SEQ ID NO: 39974 - DNA, 38 bp, Artificial Sequence
  primer
gtaaaacgacggccagtagagagtggagcaacacatgg

SEQ ID NO: 39975 - DNA, 38 bp, Artificial Sequence
  primer
gtaaaacgacggccagtatggctgatgacaaagagctg

SEQ ID NO: 39976 - DNA, 38 bp, Artificial Sequence
  primer
gtaaaacgacggccagtctgaaatcccttggaatggtc

SEQ ID NO: 39977 - DNA, 38 bp, Artificial Sequence
  primer
gtaaaacgacggccagttggttagggtaatggctgtgg

SEQ ID NO: 39978 - DNA, 38 bp, Artificial Sequence
  primer
gtaaaacgacggccagtatatcaggtgagggaggcttg

SEQ ID NO: 39979 - DNA, 38 bp, Artificial Sequence
  primer
gtaaaacgacggccagttaacccagcaggctatcaacc

SEQ ID NO: 39980 - DNA, 38 bp, Artificial Sequence
  primer
gtaaaacgacggccagtgatttggagtcggccttattc

SEQ ID NO: 39981 - DNA, 21 bp, Artificial Sequence
  primer
tgtgcctctcacttctccttg

SEQ ID NO: 39982 - DNA, 39 bp, Artificial Sequence; identical to SEQ ID NO: 39969
  primer

SEQ ID NO: 39983 - DNA, 21 bp, Artificial Sequence
  primer
gaagtgaggtctgtgagtggg

SEQ ID NO: 39984 - DNA, 21 bp, Artificial Sequence
  primer
accctgtcctgatccagattg

SEQ ID NO: 39985 - DNA, 38 bp, Artificial Sequence
  primer
gtaaaacgacggccagttttagggcatagctgaaaggg

SEQ ID NO: 39986 - DNA, 21 bp, Artificial Sequence
  primer
cagcctcagctttcacacttc

SEQ ID NO: 39987 - DNA, 36 bp, Artificial Sequence
  primer
gtaaaacgacggccagttgggagttgagcgcatacc

SEQ ID NO: 39988 - DNA, 36 bp, Artificial Sequence
  primer
gtaaaacgacggccagtgtatgaccagtgcccgacc

SEQ ID NO: 39989 - DNA, 38 bp, Artificial Sequence
  primer
gtaaaacgacggccagtttcaatgctcattgttgtccc

SEQ ID NO: 39990 - DNA, 40 bp, Artificial Sequence
  primer
gtaaaacgacggccagtgcacacacacaggaaattgaatg

SEQ ID NO: 39991 - DNA, 37 bp, Artificial Sequence
  primer
gtaaaacgacggccagttggttccagaacctgacgac

SEQ ID NO: 39992 - DNA, 38 bp, Artificial Sequence
  primer
gtaaaacgacggccagtgcctgctccaactgtcttatg

SEQ ID NO: 39993 - DNA, 20 bp, Artificial Sequence
  primer
aaatccctaggtggtggtgg

SEQ ID NO: 39994 - DNA, 21 bp, Artificial Sequence
  primer
ctatcctccctccattgatgc

SEQ ID NO: 39995 - DNA, 38 bp, Artificial Sequence
  primer
gtaaaacgacggccagttgacactgtctttagggccac

SEQ ID NO: 39996 - DNA, 38 bp, Artificial Sequence
  primer
gtaaaacgacggccagttggaagcattgccttcttctc

SEQ ID NO: 39997 - DNA, 38 bp, Artificial Sequence
  primer
gtaaaacgacggccagtggtagtggtgtgaggaaagcc

SEQ ID NO: 39998 - DNA, 36 bp, Artificial Sequence
  primer
gtaaaacgacggccagtaaggaggctgctgaccttg

SEQ ID NO: 39999 - DNA, 38 bp, Artificial Sequence
  primer
gtaaaacgacggccagttcttgtgcctcctactccagg

SEQ ID NO: 40000 - DNA, 38 bp, Artificial Sequence
  primer
gtaaaacgacggccagtttctgactttcttcccaacgg

SEQ ID NO: 40001 - DNA, 21 bp, Artificial Sequence
  primer
cagcacaggaagcaatgactc

SEQ ID NO: 40002 - DNA, 21 bp, Artificial Sequence
  primer
tcccaggtaccctgtgtcatc

SEQ ID NO: 40003 - DNA, 38 bp, Artificial Sequence
  primer
gtaaaacgacggccagttttggaatgttcagtggcttc

SEQ ID NO: 40004 - DNA, 38 bp, Artificial Sequence
  primer
gtaaaacgacggccagtgaacatctaagcccttggctc

SEQ ID NO: 40005 - DNA, 38 bp, Artificial Sequence
  primer
gtaaaacgacggccagtagcctttcagtgttctcgacc

SEQ ID NO: 40006 - DNA, 38 bp, Artificial Sequence
  primer
gtaaaacgacggccagtgctggtgtttcttcccttgtc

SEQ ID NO: 40007 - DNA, 38 bp, Artificial Sequence
  primer
gtaaaacgacggccagtgtgggctggagaagtgagttg

SEQ ID NO: 40008 - DNA, 38 bp, Artificial Sequence
  primer
gtaaaacgacggccagtgaagctcttcgcacaagtctg

SEQ ID NO: 40009 - DNA, 38 bp, Artificial Sequence
  primer
gtaaaacgacggccagtgtcgataggagcttctcgtcc

SEQ ID NO: 40010 - DNA, 21 bp, Artificial Sequence
  primer
ggctgtaactcagcgaccttg

SEQ ID NO: 40011 - DNA, 38 bp, Artificial Sequence
  primer
gtaaaacgacggccagtgtgcccaggactacagctttg

SEQ ID NO: 40012 - DNA, 21 bp, Artificial Sequence
  primer
tctccatagccaggtagaggg

SEQ ID NO: 40013 - DNA, 21 bp, Artificial Sequence
  primer
gaagactagacctcccgctcc

SEQ ID NO: 40014 - DNA, 21 bp, Artificial Sequence
  primer
ctagcaggtccctgtctaccc

SEQ ID NO: 40015 - DNA, 20 bp, Artificial Sequence
  primer
gtgatccaaggacctcctcc

SEQ ID NO: 40016 - DNA, 38 bp, Artificial Sequence
  primer
gtaaaacgacggccagttcccagagaggtacaaatggg

SEQ ID NO: 40017 - DNA, 37 bp, Artificial Sequence
  primer
gtaaaacgacggccagttcaaccaaagagtggttggg

SEQ ID NO: 40018 - DNA, 38 bp, Artificial Sequence
  primer
gtaaaacgacggccagtaacaaactcacacctccctgg

SEQ ID NO: 40019 - DNA, 38 bp, Artificial Sequence
  primer
gtaaaacgacggccagtcttgagcttgagaggctcctg

SEQ ID NO: 40020 - DNA, 37 bp, Artificial Sequence
  primer
gtaaaacgacggccagtcttcatccagatggctttgc

SEQ ID NO: 40021 - DNA, 38 bp, Artificial Sequence
  primer
gtaaaacgacggccagttcagaatctagtgctgggtgg

SEQ ID NO: 40022 - DNA, 38 bp, Artificial Sequence
  primer
gtaaaacgacggccagttgaaacgaaggctctctctgg

SEQ ID NO: 40023 - DNA, 39 bp, Artificial Sequence
  primer
gtaaaacgacggccagtagactgtgctgttccagagaga

SEQ ID NO: 40024 - DNA, 38 bp, Artificial Sequence
  primer
gtaaaacgacggccagtccgctcctctctgagacagac

SEQ ID NO: 40025 - DNA, 21 bp, Artificial Sequence
  primer
aatgagtttggttgaggcagc

SEQ ID NO: 40026 - DNA, 21 bp, Artificial Sequence
  primer
ctccaatccctgtcaaggaag

SEQ ID NO: 40027 - DNA, 36 bp, Artificial Sequence
  primer
gtaaaacgacggccagttgtgcaacttcccacaagc

SEQ ID NO: 40028 - DNA, 38 bp, Artificial Sequence
  primer
gtaaaacgacggccagtccatgggtcttgggttgatag

SEQ ID NO: 40029 - DNA, 22 bp, Artificial Sequence
  primer
gccagtatagcagtcaacctcc

SEQ ID NO: 40030 - DNA, 43 bp, Artificial Sequence
  primer
gtaaaacgacggccagtcatgacacaggtggaatatagaattg

SEQ ID NO: 40031 - DNA, 38 bp, Artificial Sequence
  primer
gtaaaacgacggccagtggaatccactgcgaagaagac

SEQ ID NO: 40032 - DNA, 38 bp, Artificial Sequence
  primer
gtaaaacgacggccagttgaaatcgcaaccacactttc

SEQ ID NO: 40033 - DNA, 21 bp, Artificial Sequence
  primer
gaatgaccagcaatggtgttg

SEQ ID NO: 40034 - DNA, 21 bp, Artificial Sequence
  primer
tgcatgtgtgtgtgtgaaatg

SEQ ID NO: 40035 - DNA, 22 bp, Artificial Sequence
  primer
caatgctgactccaaactctcc

SEQ ID NO: 40036 - DNA, 39 bp, Artificial Sequence
  primer
gtaaaacgacggccagtgatatgtggtttcaccgtcaac

SEQ ID NO: 40037 - DNA, 21 bp, Artificial Sequence
  primer
ttggtttcagaacaagggatg

SEQ ID NO: 40038 - DNA, 38 bp, Artificial Sequence
  primer
gtaaaacgacggccagtgcagtcagtgaatgatggcac

SEQ ID NO: 40039 - DNA, 38 bp, Artificial Sequence
  primer
gtaaaacgacggccagttggaagtggacaacgaaacac

SEQ ID NO: 40040 - DNA, 21 bp, Artificial Sequence
  primer
ctgtatccatggcaactgctc

SEQ ID NO: 40041 - DNA, 27 bp, Artificial Sequence
  primer
ttaattagcttggcattgactacatac

SEQ ID NO: 40042 - DNA, 39 bp, Artificial Sequence
  primer
gtaaaacgacggccagttgctgttccagagagataaggc

SEQ ID NO: 40043 - DNA, 38 bp, Artificial Sequence
  primer
gtaaaacgacggccagttctggttggtcttcattcctg

SEQ ID NO: 40044 - DNA, 21 bp, Artificial Sequence
  primer
attagtgctggttggagggac

SEQ ID NO: 40045 - DNA, 19 bp, Artificial Sequence
  primer
tgtgcatgcagagacccac

SEQ ID NO: 40046 - DNA, 40 bp, Artificial Sequence
  primer
gtaaaacgacggccagtgagtctctaactctggagcaggc

SEQ ID NO: 40047 - DNA, 36 bp, Artificial Sequence
  primer
gtaaaacgacggccagtgacctggtcaacgggtgag

SEQ ID NO: 40048 - DNA, 39 bp, Artificial Sequence
  primer
gtaaaacgacggccagtcgctagcctggtcatagtgaag

SEQ ID NO: 40049 - DNA, 20 bp, Artificial Sequence
  primer
cgagtctgccctctctcttg

SEQ ID NO: 40050 - DNA, 38 bp, Artificial Sequence
  primer
gtaaaacgacggccagtagacagctggtaaggcaggag

SEQ ID NO: 40051 - DNA, 21 bp, Artificial Sequence
  primer
cgacatgtgaggaagatgtgg

SEQ ID NO: 40052 - DNA, 38 bp, Artificial Sequence
  primer
gtaaaacgacggccagttggccagaataccaccttctc

SEQ ID NO: 40053 - DNA, 21 bp, Artificial Sequence
  primer
ccactgtgcttgtcctgagac

SEQ ID NO: 40054 - DNA, 21 bp, Artificial Sequence
  primer
gtcctgtgtggatctgtggac

SEQ ID NO: 40055 - DNA, 37 bp, Artificial Sequence
  primer
gtaaaacgacggccagtaagctctgcctcctttctgc

SEQ ID NO: 40056 - DNA, 38 bp, Artificial Sequence
  primer
gtaaaacgacggccagtactgcaatgccagttatggtg

SEQ ID NO: 40057 - DNA, 38 bp, Artificial Sequence
  primer
gtaaaacgacggccagttagatgataggtgggtgcgtg

SEQ ID NO: 40058 - DNA, 36 bp, Artificial Sequence
  primer
gtaaaacgacggccagtgcgccagttgtctctcctg

SEQ ID NO: 40059 - DNA, 38 bp, Artificial Sequence
  primer
gtaaaacgacggccagtaggcagagtttgaattgggac

SEQ ID NO: 40060 - DNA, 19 bp, Artificial Sequence
  primer
gatgccattcaggtggagg

SEQ ID NO: 40061 - DNA, 20 bp, Artificial Sequence
  primer
tgatggctcaggaggacttg

SEQ ID NO: 40062 - DNA, 19 bp, Artificial Sequence
  primer
gatgccattcaggtggagg

SEQ ID NO: 40063 - DNA, 20 bp, Artificial Sequence
  primer
cactttcaggcttgggtacg

SEQ ID NO: 40064 - DNA, 20 bp, Artificial Sequence
  primer
ccctcttcacggtgctgtag

SEQ ID NO: 40065 - DNA, 18 bp, Artificial Sequence
  primer
gtgcccggcctgtatttc

SEQ ID NO: 40066 - DNA, 19 bp, Artificial Sequence
  primer
tctagtctgggcaacgcag

SEQ ID NO: 40067 - DNA, 42 bp, Artificial Sequence
  primer
gtaaaacgacggccagtgatccgtaccttaggttatctttgg

SEQ ID NO: 40068 - DNA, 41 bp, Artificial Sequence
  primer
gtaaaacgacggccagtcttcatagatagtcacgtcatggg

SEQ ID NO: 40069 - DNA, 37 bp, Artificial Sequence
  primer
gtaaaacgacggccagtctgggactgagatgggactg

SEQ ID NO: 40070 - DNA, 44 bp, Artificial Sequence
  primer
gtaaaacgacggccagtaaccttaaagagaagggtttatttcaa

SEQ ID NO: 40071 - DNA, 21 bp, Artificial Sequence
  primer
cagtgactttcgtgctccatc

SEQ ID NO: 40072 - DNA, 40 bp, Artificial Sequence
  primer
gtaaaacgacggccagtagctcatacctcatttcttggtg

SEQ ID NO: 40073 - DNA, 23 bp, Artificial Sequence
  primer
cagggaactgtatggatcaaatc

SEQ ID NO: 40074 - DNA, 39 bp, Artificial Sequence
  primer
gtaaaacgacggccagtgcctttaaagtcacgaaagcac

SEQ ID NO: 40075 - DNA, 38 bp, Artificial Sequence
  primer
gtaaaacgacggccagtttgtcacttgggaagagctga

SEQ ID NO: 40076 - DNA, 21 bp, Artificial Sequence
  primer
ggaaagtgattggtgtggttg

SEQ ID NO: 40077 - DNA, 40 bp, Artificial Sequence
  primer
gtaaaacgacggccagtaagcactagcagctttctgtgag

SEQ ID NO: 40078 - DNA, 44 bp, Artificial Sequence
  primer
gtaaaacgacggccagtcttgaatatattagacccttcttggtg

SEQ ID NO: 40079 - DNA, 39 bp, Artificial Sequence
  primer
gtaaaacgacggccagtttcttagtagtggcgcgaagag

SEQ ID NO: 40080 - DNA, 23 bp, Artificial Sequence
  primer
tgttggttgctgtgagctatttc

SEQ ID NO: 40081 - DNA, 20 bp, Artificial Sequence
  primer
ctgtagggaaccgagagcag

SEQ ID NO: 40082 - DNA, 38 bp, Artificial Sequence
  primer
gtaaaacgacggccagtagagggacagtggataggtgc

SEQ ID NO: 40083 - DNA, 37 bp, Artificial Sequence
  primer
gtaaaacgacggccagtcgctttctgaggtaggttgg

SEQ ID NO: 40084 - DNA, 38 bp, Artificial Sequence
  primer
gtaaaacgacggccagtaccatgaccacacctactccc

SEQ ID NO: 40085 - DNA, 38 bp, Artificial Sequence
  primer
gtaaaacgacggccagtcatatggaggagctggcagag

SEQ ID NO: 40086 - DNA, 38 bp, Artificial Sequence
  primer
gtaaaacgacggccagtggtcagggaagctgtagaagg

SEQ ID NO: 40087 - DNA, 20 bp, Artificial Sequence
  primer
attctgaaacgtgtgcggag

SEQ ID NO: 40088 - DNA, 20 bp, Artificial Sequence
  primer
cagtgcagagatggaggagg

SEQ ID NO: 40089 - DNA, 37 bp, Artificial Sequence
  primer
gtaaaacgacggccagtagcacctgcatcttggtgag

SEQ ID NO: 40090 - DNA, 38 bp, Artificial Sequence
  primer
gtaaaacgacggccagtgagcatggaggtaagaggctt

SEQ ID NO: 40091 - DNA, 36 bp, Artificial Sequence
  primer
gtaaaacgacggccagtaggcaggagctctggactg

SEQ ID NO: 40092 - DNA, 38 bp, Artificial Sequence
  primer
gtaaaacgacggccagtacagtaatgggaggttgcagg

SEQ ID NO: 40093 - DNA, 20 bp, Artificial Sequence
  primer
ctcctcacctcacaaccacc

SEQ ID NO: 40094 - DNA, 38 bp, Artificial Sequence
  primer
gtaaaacgacggccagttagggaggaggtgggtagatg

SEQ ID NO: 40095 - DNA, 20 bp, Artificial Sequence
  primer
agtccgtgtcccacaatgtc

SEQ ID NO: 40096 - DNA, 38 bp, Artificial Sequence
  primer
gtaaaacgacggccagtatagagcattgtgtgccttgc

SEQ ID NO: 40097 - DNA, 21 bp, Artificial Sequence
  primer
gaacaaggtaaagcctgccac

SEQ ID NO: 40098 - DNA, 37 bp, Artificial Sequence
  primer
gtaaaacgacggccagtaatccactcccttgcctgac

SEQ ID NO: 40099 - DNA, 38 bp, Artificial Sequence
  primer
gtaaaacgacggccagtcctatcttgactgaaacgggc

SEQ ID NO: 40100 - DNA, 21 bp, Artificial Sequence
  primer
gtaggagggagtggtcgactg

SEQ ID NO: 40101 - DNA, 38 bp, Artificial Sequence
  primer
gtaaaacgacggccagtaccactaggccatgaatgtgg

SEQ ID NO: 40102 - DNA, 21 bp, Artificial Sequence
  primer
tggtctagatccagcttgcag

SEQ ID NO: 40103 - DNA, 37 bp, Artificial Sequence
  primer
gtaaaacgacggccagtcggagagagaggaaccttgc

SEQ ID NO: 40104 - DNA, 38 bp, Artificial Sequence
  primer
gtaaaacgacggccagtcatatcgagcagtggatgagg

SEQ ID NO: 40105 - DNA, 40 bp, Artificial Sequence
  primer
gtaaaacgacggccagtctttcaatcatccttcactgagc

SEQ ID NO: 40106 - DNA, 38 bp, Artificial Sequence
  primer
gtaaaacgacggccagtgggaagttgcctacactcagc

SEQ ID NO: 40107 - DNA, 21 bp, Artificial Sequence
  primer
tctgcaccttggagatctgtc

SEQ ID NO: 40108 - DNA, 38 bp, Artificial Sequence
  primer
gtaaaacgacggccagtcccattgggaggtgattcttc

SEQ ID NO: 40109 - DNA, 21 bp, Artificial Sequence
  primer
cttctacgctaaccacctccc

SEQ ID NO: 40110 - DNA, 38 bp, Artificial Sequence
  primer
gtaaaacgacggccagtacctccaccctagctcctagc

SEQ ID NO: 40111 - DNA, 21 bp, Artificial Sequence
  primer
tcttccagaggaaactgtccc

SEQ ID NO: 40112 - DNA, 21 bp, Artificial Sequence
  primer
taaagctgtgctgtccagagg

SEQ ID NO: 40113 - DNA, 21 bp, Artificial Sequence
  primer
cacctggagtgagggaatgtg

SEQ ID NO: 40114 - DNA, 38 bp, Artificial Sequence
  primer
gtaaaacgacggccagtaaggacaagaaacatgcccag

SEQ ID NO: 40115 - DNA, 20 bp, Artificial Sequence
  primer
tttgggagtggtgacagagc

SEQ ID NO: 40116 - DNA, 38 bp, Artificial Sequence
  primer
gtaaaacgacggccagtgaaagagccagggttatgtgc

SEQ ID NO: 40117 - DNA, 21 bp, Artificial Sequence
  primer
ccaaagagggtcactggtttc

SEQ ID NO: 40118 - DNA, 20 bp, Artificial Sequence
  primer
cggttagaggctggaagctc

SEQ ID NO: 40119 - DNA, 41 bp, Artificial Sequence
  primer
gtaaaacgacggccagtcgatctgatacctctttcatttcc

SEQ ID NO: 40120 - DNA, 38 bp, Artificial Sequence
  primer
gtaaaacgacggccagtctcctgacctcaggtgatacg

SEQ ID NO: 40121 - DNA, 38 bp, Artificial Sequence
  primer
gtaaaacgacggccagtaccttggatgaatgacttccc

SEQ ID NO: 40122 - DNA, 21 bp, Artificial Sequence
  primer
atggaatttggactttagcgg

SEQ ID NO: 40123 - DNA, 38 bp, Artificial Sequence
  primer
gtaaaacgacggccagttgagtccaagctctccttgtg

SEQ ID NO: 40124 - DNA, 18 bp, Artificial Sequence
  primer
ctgtgcccttgttccctg

SEQ ID NO: 40125 - DNA, 38 bp, Artificial Sequence
  primer
gtaaaacgacggccagtgaggagcccagaaactgtagg

SEQ ID NO: 40126 - DNA, 21 bp, Artificial Sequence
  primer
gcccaagaagtgaaaggactg

SEQ ID NO: 40127 - DNA, 38 bp, Artificial Sequence
  primer
gtaaaacgacggccagtttacccaacctgtgccactac

SEQ ID NO: 40128 - DNA, 21 bp, Artificial Sequence
  primer
cccagtgaggaaacactctcc

SEQ ID NO: 40129 - DNA, 21 bp, Artificial Sequence
  primer
cctaagggtatcccaacccag

SEQ ID NO: 40130 - DNA, 38 bp, Artificial Sequence
  primer
gtaaaacgacggccagtcaggtacgcctgggttatttc

SEQ ID NO: 40131 - DNA, 38 bp, Artificial Sequence
  primer
gtaaaacgacggccagtgaaggcaggtacagcacacag

SEQ ID NO: 40132 - DNA, 21 bp, Artificial Sequence
  primer
ctacccggccagatctacttc

SEQ ID NO: 40133 - DNA, 38 bp, Artificial Sequence
  primer
gtaaaacgacggccagtaggtcgtcaagaagcaagagg

SEQ ID NO: 40134 - DNA, 38 bp, Artificial Sequence
  primer
gtaaaacgacggccagtgcccaaagaactacagccaag

SEQ ID NO: 40135 - DNA, 38 bp, Artificial Sequence
  primer
gtaaaacgacggccagtggtacctctgggttgcagaag

SEQ ID NO: 40136 - DNA, 38 bp, Artificial Sequence; identical to SEQ ID NO: 40134
  primer

SEQ ID NO: 40137 - DNA, 21 bp, Artificial Sequence
  primer
tttaaaggaacatcccagcac

SEQ ID NO: 40138 - DNA, 21 bp, Artificial Sequence
  primer
tttaaagggccaagagactgg

SEQ ID NO: 40139 - DNA, 38 bp, Artificial Sequence
  primer
gtaaaacgacggccagttttggcctttgagagcttgag

SEQ ID NO: 40140 - DNA, 21 bp, Artificial Sequence
  primer
atgtgacattgttgtccctgc

SEQ ID NO: 40141 - DNA, 38 bp, Artificial Sequence
  primer
gtaaaacgacggccagtcacaccaaaccataggccttc

SEQ ID NO: 40142 - DNA, 23 bp, Artificial Sequence
  primer
aggaaacattaacaatagcatcg

SEQ ID NO: 40143 - DNA, 21 bp, Artificial Sequence
  primer
gcttgggtttcttcccttacc

SEQ ID NO: 40144 - DNA, 38 bp, Artificial Sequence
  primer
gtaaaacgacggccagttgttgttgaaagtgcacaggg

SEQ ID NO: 40145 - DNA, 22 bp, Artificial Sequence
  primer
tctctgaggagtccacaagtcc

SEQ ID NO: 40146 - DNA, 38 bp, Artificial Sequence
  primer
gtaaaacgacggccagttgttgctgtggctgagatttg

SEQ ID NO: 40147 - DNA, 38 bp, Artificial Sequence
  primer
gtaaaacgacggccagttcatagaaacgtggcagttgg

SEQ ID NO: 40148 - DNA, 38 bp, Artificial Sequence
  primer
gtaaaacgacggccagtacagtgggaaccttgttccag

SEQ ID NO: 40149 - DNA, 21 bp, Artificial Sequence
  primer
actttaaccagacccacccag

SEQ ID NO: 40150 - DNA, 38 bp, Artificial Sequence
  primer
gtaaaacgacggccagtaactgtgtgagcatttcccag

SEQ ID NO: 40151 - DNA, 21 bp, Artificial Sequence
  primer
tggtcggtattatccatcagc

SEQ ID NO: 40152 - DNA, 21 bp, Artificial Sequence
  primer
gccctttatcacccatccttc

SEQ ID NO: 40153 - DNA, 40 bp, Artificial Sequence
  primer
gtaaaacgacggccagtttctccctaggcttgtttactgc

SEQ ID NO: 40154 - DNA, 39 bp, Artificial Sequence
  primer
gtaaaacgacggccagtcaccaattgtttatatggtggc

SEQ ID NO: 40155 - DNA, 38 bp, Artificial Sequence
  primer
gtaaaacgacggccagtacatcacttggctctcctgac

SEQ ID NO: 40156 - DNA, 20 bp, Artificial Sequence
  primer
gccaggcagatctcaaactg

SEQ ID NO: 40157 - DNA, 37 bp, Artificial Sequence
  primer
gtaaaacgacggccagttgggcttctggtgtatcagg

SEQ ID NO: 40158 - DNA, 40 bp, Artificial Sequence
  primer
gtaaaacgacggccagtggacactgagtttctctcttggg

SEQ ID NO: 40159 - DNA, 36 bp, Artificial Sequence
  primer
gtaaaacgacggccagtttctgttgcctgtgcgttc

SEQ ID NO: 40160 - DNA, 38 bp, Artificial Sequence
  primer
gtaaaacgacggccagtggatcattctggctcaccttg

SEQ ID NO: 40161 - DNA, 20 bp, Artificial Sequence
  primer
gggcgacaagagtgaaactg

SEQ ID NO: 40162 - DNA, 21 bp, Artificial Sequence
  primer
atttctggtaggacaggtgcc

SEQ ID NO: 40163 - DNA, 21 bp, Artificial Sequence
  primer
attgtaggttgcatgagcagc

SEQ ID NO: 40164 - DNA, 38 bp, Artificial Sequence
  primer
gtaaaacgacggccagtaggcttgtaagagtcttcccg

SEQ ID NO: 40165 - DNA, 38 bp, Artificial Sequence
  primer
gtaaaacgacggccagtatgtcacagcagccaggattc

SEQ ID NO: 40166 - DNA, 23 bp, Artificial Sequence
  primer
ttcttactgttgggaatggaagt

SEQ ID NO: 40167 - DNA, 21 bp, Artificial Sequence
  primer
tctgcctgtggtacctgtctg

SEQ ID NO: 40168 - DNA, 21 bp, Artificial Sequence
  primer
tttcattgtcctcactgaccc

SEQ ID NO: 40169 - DNA, 35 bp, Artificial Sequence
  primer
gtaaaacgacggccagtgggcaacagagcaagacc

SEQ ID NO: 40170 - DNA, 38 bp, Artificial Sequence
  primer
gtaaaacgacggccagtgtggacgcacacacagacttc

SEQ ID NO: 40171 - DNA, 21 bp, Artificial Sequence
  primer
aagttctaagcgtttgtccgc

SEQ ID NO: 40172 - DNA, 38 bp, Artificial Sequence
  primer
gtaaaacgacggccagttttcttccgtgtttggagaac

SEQ ID NO: 40173 - DNA, 38 bp, Artificial Sequence
  primer
gtaaaacgacggccagtcattcacagaggtgcagttcc

SEQ ID NO: 40174 - DNA, 38 bp, Artificial Sequence
  primer
gtaaaacgacggccagtcagggtgttgtttgttgcttg

SEQ ID NO: 40175 - DNA, 21 bp, Artificial Sequence
  primer
tcctggctttagtccttgctc

SEQ ID NO: 40176 - DNA, 20 bp, Artificial Sequence
  primer
cacacatgcatgggactctg

SEQ ID NO: 40177 - DNA, 38 bp, Artificial Sequence
  primer
gtaaaacgacggccagtgtgacctactttggcctgagc

SEQ ID NO: 40178 - DNA, 21 bp, Artificial Sequence
  primer
ctcagccacctgcctattctg

SEQ ID NO: 40179 - DNA, 21 bp, Artificial Sequence
  primer
gtccatgatcccatcttgtcc

SEQ ID NO: 40180 - DNA, 21 bp, Artificial Sequence
  primer
ccatcctgccagaagatgaag

SEQ ID NO: 40181 - DNA, 38 bp, Artificial Sequence
  primer
gtaaaacgacggccagttgcctcaacatcaaacacaag

SEQ ID NO: 40182 - DNA, 40 bp, Artificial Sequence
  primer
gtaaaacgacggccagtcagagtctgccttctcctacctc

SEQ ID NO: 40183 - DNA, 19 bp, Artificial Sequence
  primer
cacagggaagcctaccagc

SEQ ID NO: 40184 - DNA, 37 bp, Artificial Sequence
  primer
gtaaaacgacggccagtagcacctgtaccgggtgaac

SEQ ID NO: 40185 - DNA, 20 bp, Artificial Sequence
  primer
cctgtgatatccatgcaggc

SEQ ID NO: 40186 - DNA, 36 bp, Artificial Sequence
  primer
gtaaaacgacggccagtgctctgcaagacctgctgc

SEQ ID NO: 40187 - DNA, 37 bp, Artificial Sequence
  primer
gtaaaacgacggccagtccaagtacgtggccaatcag

SEQ ID NO: 40188 - DNA, 21 bp, Artificial Sequence
  primer
cttgaacatcatgaacccagg

SEQ ID NO: 40189 - DNA, 19 bp, Artificial Sequence
  primer
caacatccagcaagccctg

SEQ ID NO: 40190 - DNA, 19 bp, Artificial Sequence
  primer
gtcccagcctccacattcc

SEQ ID NO: 40191 - DNA, 21 bp, Artificial Sequence
  primer
agcacccaggtctcttactgg

SEQ ID NO: 40192 - DNA, 21 bp, Artificial Sequence
  primer
gaagaactctgctccctgctg

SEQ ID NO: 40193 - DNA, 38 bp, Artificial Sequence
  primer
gtaaaacgacggccagtcacaggccataactcatctgg

SEQ ID NO: 40194 - DNA, 38 bp, Artificial Sequence
  primer
gtaaaacgacggccagtctcatcttcccactgtttccc

SEQ ID NO: 40195 - DNA, 39 bp, Artificial Sequence
  primer
gtaaaacgacggccagttgatggcttgtaagccctaaac

SEQ ID NO: 40196 - DNA, 22 bp, Artificial Sequence
  primer
gagtatctgggacacagggatg

SEQ ID NO: 40197 - DNA, 38 bp, Artificial Sequence
  primer
gtaaaacgacggccagtagctttcccttcttcagctcc

SEQ ID NO: 40198 - DNA, 21 bp, Artificial Sequence
  primer
ggagtctcctgacacttggaa

SEQ ID NO: 40199 - DNA, 38 bp, Artificial Sequence
  primer
gtaaaacgacggccagtagagagcttgcagccattgag

SEQ ID NO: 40200 - DNA, 21 bp, Artificial Sequence
  primer
ttgggtaaatcattccttggg

SEQ ID NO: 40201 - DNA, 38 bp, Artificial Sequence
  primer
gtaaaacgacggccagtcctgctggctgaagtaagacc

SEQ ID NO: 40202 - DNA, 38 bp, Artificial Sequence
  primer
gtaaaacgacggccagtgcaactcaagcagtccatctg

SEQ ID NO: 40203 - DNA, 21 bp, Artificial Sequence
  primer
agggagttgaacctctccagg

SEQ ID NO: 40204 - DNA, 38 bp, Artificial Sequence
  primer
gtaaaacgacggccagtgtactaaagcgccagtgctcc

SEQ ID NO: 40205 - DNA, 38 bp, Artificial Sequence
  primer
gtaaaacgacggccagtaaggaagtggagggttgagtg

SEQ ID NO: 40206 - DNA, 39 bp, Artificial Sequence
  primer
gtaaaacgacggccagttgtcattactgtcaccagtggg

SEQ ID NO: 40207 - DNA, 38 bp, Artificial Sequence
  primer
gtaaaacgacggccagtccagcagtctgtcttcagtgg

SEQ ID NO: 40208 - DNA, 21 bp, Artificial Sequence
  primer
atctgcctcctcactattgcc

SEQ ID NO: 40209 - DNA, 38 bp, Artificial Sequence
  primer
gtaaaacgacggccagtcacccagagactgtcatggag

SEQ ID NO: 40210 - DNA, 21 bp, Artificial Sequence
  primer
agacccagaaggcatttgatg

SEQ ID NO: 40211 - DNA, 38 bp, Artificial Sequence
  primer
gtaaaacgacggccagtgacctctagccatgggagttc

SEQ ID NO: 40212 - DNA, 21 bp, Artificial Sequence
  primer
acaattcacccacgtaaccaa

SEQ ID NO: 40213 - DNA, 21 bp, Artificial Sequence
  primer
atgaaccaatcccttctcctg

SEQ ID NO: 40214 - DNA, 22 bp, Artificial Sequence
  primer
ccagtcaagctctagggacatc

SEQ ID NO: 40215 - DNA, 35 bp, Artificial Sequence
  primer
gtaaaacgacggccagtactgcacccggcctaatc

SEQ ID NO: 40216 - DNA, 38 bp, Artificial Sequence
  primer
gtaaaacgacggccagtaccctcaacctattgaaaccg

SEQ ID NO: 40217 - DNA, 38 bp, Artificial Sequence
  primer
gtaaaacgacggccagtgagcctggacttctgagcttc

SEQ ID NO: 40218 - DNA, 20 bp, Artificial Sequence
  primer
atcgtgagctccgtgtcttg

SEQ ID NO: 40219 - DNA, 38 bp, Artificial Sequence
  primer
gtaaaacgacggccagtcagaggcacaagctaagctcc

SEQ ID NO: 40220 - DNA, 21 bp, Artificial Sequence
  primer
acacctattgcaaggcctgag

SEQ ID NO: 40221 - DNA, 20 bp, Artificial Sequence
  primer
gaggtcctatgacttggccc

SEQ ID NO: 40222 - DNA, 38 bp, Artificial Sequence
  primer
gtaaaacgacggccagtccacggcaccttagaacagac

SEQ ID NO: 40223 - DNA, 22 bp, Artificial Sequence
  primer
gaacacagcgatttagagtggg

SEQ ID NO: 40224 - DNA, 21 bp, Artificial Sequence
  primer
tacctcatggcctctcctttg

SEQ ID NO: 40225 - DNA, 38 bp, Artificial Sequence
  primer
gtaaaacgacggccagtgaatcacagattcaggcatgg

SEQ ID NO: 40226 - DNA, 18 bp, Artificial Sequence
  primer
gagggagggaaggcaagg

SEQ ID NO: 40227 - DNA, 38 bp, Artificial Sequence
  primer
gtaaaacgacggccagtgcagtgtgaaggagaagggac

SEQ ID NO: 40228 - DNA, 21 bp, Artificial Sequence
  primer
ccataccatttaatcccaggc

SEQ ID NO: 40229 - DNA, 21 bp, Artificial Sequence
  primer
aagagctgctccacacctgtc

SEQ ID NO: 40230 - DNA, 21 bp, Artificial Sequence
  primer
gtgaagaggctggaatatggg

SEQ ID NO: 40231 - DNA, 38 bp, Artificial Sequence
  primer
gtaaaacgacggccagttgatcaggtgtgtgggagttc

SEQ ID NO: 40232 - DNA, 21 bp, Artificial Sequence
  primer
gaaatcctttcacgaagaccc

SEQ ID NO: 40233 - DNA, 40 bp, Artificial Sequence
  primer
gtaaaacgacggccagtatgttacgatctcccaattcaac

SEQ ID NO: 40234 - DNA, 40 bp, Artificial Sequence
  primer
gtaaaacgacggccagtagggatgttcaacctgtatttcc

SEQ ID NO: 40235 - DNA, 21 bp, Artificial Sequence
  primer
cagtgctgcacacacagactc

SEQ ID NO: 40236 - DNA, 38 bp, Artificial Sequence
  primer
gtaaaacgacggccagtgaaatcctttcacgaagaccc

SEQ ID NO: 40237 - DNA, 42 bp, Artificial Sequence
  primer
gtaaaacgacggccagtcccagagtatattcttccaataggg

SEQ ID NO: 40238 - DNA, 26 bp, Artificial Sequence
  primer
tcattgttctaagtgctgaagaagat

SEQ ID NO: 40239 - DNA, 20 bp, Artificial Sequence
  primer
agccgtgatcacacttaccg

SEQ ID NO: 40240 - DNA, 38 bp, Artificial Sequence
  primer
gtaaaacgacggccagtgtgacaaagcaaattgatggc

SEQ ID NO: 40241 - DNA, 38 bp, Artificial Sequence
  primer
gtaaaacgacggccagtagtcagttcctttccgctttg

SEQ ID NO: 40242 - DNA, 38 bp, Artificial Sequence
  primer
gtaaaacgacggccagttcttagccaccgaagtatggg

SEQ ID NO: 40243 - DNA, 40 bp, Artificial Sequence
  primer
gtaaaacgacggccagttttaattgcaaagccaaataagg

SEQ ID NO: 40244 - DNA, 21 bp, Artificial Sequence
  primer
taggatcgattggctgttgag

SEQ ID NO: 40245 - DNA, 38 bp, Artificial Sequence
  primer
gtaaaacgacggccagttaacatttgtggagtgcctgc

SEQ ID NO: 40246 - DNA, 40 bp, Artificial Sequence; identical to SEQ ID NO: 40234
  primer

SEQ ID NO: 40247 - DNA, 21 bp, Artificial Sequence
  primer
ccagctgagcgaactctaacc

SEQ ID NO: 40248 - DNA, 20 bp, Artificial Sequence
  primer
tcagcccttggatttcttcc

SEQ ID NO: 40249 - DNA, 21 bp, Artificial Sequence
  primer
tgagctccgatcagttaaggg

SEQ ID NO: 40250 - DNA, 37 bp, Artificial Sequence
  primer
gtaaaacgacggccagtctatgctgagtggcagggag

SEQ ID NO: 40251 - DNA, 19 bp, Artificial Sequence
  primer
actacagagcccgggaatg

SEQ ID NO: 40252 - DNA, 20 bp, Artificial Sequence
  primer
cattgctggatgactttccc

SEQ ID NO: 40253 - DNA, 21 bp, Artificial Sequence
  primer
tccttcctgtctccaaattgc

SEQ ID NO: 40254 - DNA, 39 bp, Artificial Sequence
  primer
gtaaaacgacggccagtgattgagtgaattcatggaccc

SEQ ID NO: 40255 - DNA, 23 bp, Artificial Sequence
  primer
gagaggaagataggtctccttgc

SEQ ID NO: 40256 - DNA, 36 bp, Artificial Sequence
  primer
gtaaaacgacggccagtgcatctcctcaccaggcag

SEQ ID NO: 40257 - DNA, 38 bp, Artificial Sequence
  primer
gtaaaacgacggccagtgacccagaaggaggagagagg

SEQ ID NO: 40258 - DNA, 38 bp, Artificial Sequence
  primer
gtaaaacgacggccagttgtccctagctggtgtgagtg

SEQ ID NO: 40259 - DNA, 21 bp, Artificial Sequence
  primer
atccatctacgcatccatctg

SEQ ID NO: 40260 - DNA, 21 bp, Artificial Sequence
  primer
gacaagcagagcctcaaactg

SEQ ID NO: 40261 - DNA, 21 bp, Artificial Sequence
  primer
gtcacctccctgtgtgacttg

SEQ ID NO: 40262 - DNA, 37 bp, Artificial Sequence
  primer
gtaaaacgacggccagtcaaacccaggtcagaggagg

SEQ ID NO: 40263 - DNA, 38 bp, Artificial Sequence
  primer
gtaaaacgacggccagtaagcaccttgaaggaggtgtg

SEQ ID NO: 40264 - DNA, 38 bp, Artificial Sequence
  primer
gtaaaacgacggccagttcatcacagaggatgctgtcc

SEQ ID NO: 40265 - DNA, 38 bp, Artificial Sequence
  primer
gtaaaacgacggccagtgatcctggtcctgctggtaag

SEQ ID NO: 40266 - DNA, 37 bp, Artificial Sequence
  primer
gtaaaacgacggccagtcagagacctgccactccctc

SEQ ID NO: 40267 - DNA, 21 bp, Artificial Sequence
  primer
catgctgttcttcgtcaatcc

SEQ ID NO: 40268 - DNA, 38 bp, Artificial Sequence
  primer
gtaaaacgacggccagttgcaaagcagtcgtgttaagg

SEQ ID NO: 40269 - DNA, 35 bp, Artificial Sequence
  primer
gtaaaacgacggccagtgctcactctcgcgtccac

SEQ ID NO: 40270 - DNA, 18 bp, Artificial Sequence
  primer
gagctgctcttggacggc

SEQ ID NO: 40271 - DNA, 38 bp, Artificial Sequence
  primer
gtaaaacgacggccagttgaggtgcgtacaccttatcc

SEQ ID NO: 40272 - DNA, 38 bp, Artificial Sequence
  primer
gtaaaacgacggccagtcaatgacacctggagcacttc

SEQ ID NO: 40273 - DNA, 38 bp, Artificial Sequence
  primer
gtaaaacgacggccagtgctgagtctctacctggcctc

SEQ ID NO: 40274 - DNA, 21 bp, Artificial Sequence
  primer
gtatttgatggcatgtccacg

SEQ ID NO: 40275 - DNA, 38 bp, Artificial Sequence
  primer
gtaaaacgacggccagtatgatcctagccctgttgtgg

SEQ ID NO: 40276 - DNA, 21 bp, Artificial Sequence
  primer
gtcctggagattgggtctcag

SEQ ID NO: 40277 - DNA, 38 bp, Artificial Sequence
  primer
gtaaaacgacggccagtcaggtaggataggtgtgtgcg

SEQ ID NO: 40278 - DNA, 37 bp, Artificial Sequence
  primer
gtaaaacgacggccagtcggaagaaacaccaccactg

SEQ ID NO: 40279 - DNA, 21 bp, Artificial Sequence
  primer
agtggaccgtggaatatctgc

SEQ ID NO: 40280 - DNA, 38 bp, Artificial Sequence
  primer
gtaaaacgacggccagtagttccttgtcatgagggtgg

SEQ ID NO: 40281 - DNA, 21 bp, Artificial Sequence
  primer
catgcagggtccctagatacg

SEQ ID NO: 40282 - DNA, 21 bp, Artificial Sequence
  primer
gacctgcagatggatgtgatg

SEQ ID NO: 40283 - DNA, 20 bp, Artificial Sequence
  primer
tctgagatgtccaagctgcc

SEQ ID NO: 40284 - DNA, 19 bp, Artificial Sequence
  primer
gagccagtggacgaagagg

SEQ ID NO: 40285 - DNA, 21 bp, Artificial Sequence
  primer
taatcttgacatcccagtgcg

SEQ ID NO: 40286 - DNA, 21 bp, Artificial Sequence
  primer
ctttccctaccgtcctctttg

SEQ ID NO: 40287 - DNA, 21 bp, Artificial Sequence
  primer
ggtttgtggaagcaaggagac

SEQ ID NO: 40288 - DNA, 21 bp, Artificial Sequence
  primer
ggcagtgtcgtatagaccagg

SEQ ID NO: 40289 - DNA, 38 bp, Artificial Sequence
  primer
gtaaaacgacggccagtgggaatttctgttccttggtg

SEQ ID NO: 40290 - DNA, 21 bp, Artificial Sequence
  primer
tgctgatgactagaacccagg

SEQ ID NO: 40291 - DNA, 21 bp, Artificial Sequence
  primer
attgctcaaacgcaaagaagc

SEQ ID NO: 40292 - DNA, 38 bp, Artificial Sequence
  primer
gtaaaacgacggccagtcagggaccgtatttcagcatc

SEQ ID NO: 40293 - DNA, 38 bp, Artificial Sequence
  primer
gtaaaacgacggccagtattgacccttggtctgagtgc

SEQ ID NO: 40294 - DNA, 37 bp, Artificial Sequence
  primer
gtaaaacgacggccagtacgtaattgttggtggctgg

SEQ ID NO: 40295 - DNA, 38 bp, Artificial Sequence
  primer
gtaaaacgacggccagttcccttaaagcaaacagcacc

SEQ ID NO: 40296 - DNA, 38 bp, Artificial Sequence
  primer
gtaaaacgacggccagtatcatgactgggtgtgctttg

SEQ ID NO: 40297 - DNA, 22 bp, Artificial Sequence
  primer
tttcaccaagttccagaagtcc

SEQ ID NO: 40298 - DNA, 38 bp, Artificial Sequence
  primer
gtaaaacgacggccagtgagtgcaccatttggattgag

SEQ ID NO: 40299 - DNA, 23 bp, Artificial Sequence
  primer
ccaagttgctgatctctatttgc

SEQ ID NO: 40300 - DNA, 23 bp, Artificial Sequence
  primer
tgcatacaggctatcaatcaatg

SEQ ID NO: 40301 - DNA, 37 bp, Artificial Sequence
  primer
gtaaaacgacggccagtagggtccaagtcctgggttc

SEQ ID NO: 40302 - DNA, 19 bp, Artificial Sequence
  primer
atgcgggctaagtgcacag

SEQ ID NO: 40303 - DNA, 37 bp, Artificial Sequence
  primer
gtaaaacgacggccagtacctctctgggcaaggactg

SEQ ID NO: 40304 - DNA, 37 bp, Artificial Sequence
  primer
gtaaaacgacggccagtaaaccctactgcaaccaccc

SEQ ID NO: 40305 - DNA, 18 bp, Artificial Sequence
  primer
gggacgggttatcgaggc

SEQ ID NO: 40306 - DNA, 19 bp, Artificial Sequence
  primer
ctccgggtctcagaaggag

SEQ ID NO: 40307 - DNA, 38 bp, Artificial Sequence
  primer
gtaaaacgacggccagtcacaagttctgcctcaagtgc

SEQ ID NO: 40308 - DNA, 35 bp, Artificial Sequence
  primer
gtaaaacgacggccagttttctgagatgcccggtg

SEQ ID NO: 40309 - DNA, 19 bp, Artificial Sequence
  primer
cgcgggctcctacatctac

SEQ ID NO: 40310 - DNA, 38 bp, Artificial Sequence
  primer
gtaaaacgacggccagtgcagcaagaaggtgtacttcg

SEQ ID NO: 40311 - DNA, 19 bp, Artificial Sequence
  primer
ctgcgggaagacactgacc

SEQ ID NO: 40312 - DNA, 38 bp, Artificial Sequence
  primer
gtaaaacgacggccagtgtgagtgtagccagggtggtc

SEQ ID NO: 40313 - DNA, 21 bp, Artificial Sequence
  primer
tagccctttgtctcccaagtg

SEQ ID NO: 40314 - DNA, 38 bp, Artificial Sequence
  primer
gtaaaacgacggccagtcactcatctccaggaagcagg

SEQ ID NO: 40315 - DNA, 37 bp, Artificial Sequence
  primer
gtaaaacgacggccagtgaccacagtggaaatgctgg

SEQ ID NO: 40316 - DNA, 21 bp, Artificial Sequence
  primer
tggccttgagtaacccacttc

SEQ ID NO: 40317 - DNA, 38 bp, Artificial Sequence
  primer
gtaaaacgacggccagttcagctctgggcctgtagaag

SEQ ID NO: 40318 - DNA, 38 bp, Artificial Sequence
  primer
gtaaaacgacggccagtgaggtgatccaaggcaggtag

SEQ ID NO: 40319 - DNA, 38 bp, Artificial Sequence
  primer
gtaaaacgacggccagtagtggttatgttgggaggagg

SEQ ID NO: 40320 - DNA, 36 bp, Artificial Sequence
  primer
gtaaaacgacggccagtgagacccacgcctaacagc

SEQ ID NO: 40321 - DNA, 38 bp, Artificial Sequence
  primer
gtaaaacgacggccagtagcattaacaggctcctacgg

SEQ ID NO: 40322 - DNA, 42 bp, Artificial Sequence
  primer
gtaaaacgacggccagtatagacccattcctaaagtactccc

SEQ ID NO: 40323 - DNA, 21 bp, Artificial Sequence
  primer
tcctgtgtgttgcgtaagtgg

SEQ ID NO: 40324 - DNA, 25 bp, Artificial Sequence
  primer
tgttagccaaacactctctttatcc

SEQ ID NO: 40325 - DNA, 21 bp, Artificial Sequence
  primer
caaacaacagtcctgcctttc

SEQ ID NO: 40326 - DNA, 42 bp, Artificial Sequence
  primer
gtaaaacgacggccagtactggagaaatggaatccaatataa

SEQ ID NO: 40327 - DNA, 38 bp, Artificial Sequence
  primer
gtaaaacgacggccagttttgtgaattcaagggccaac

SEQ ID NO: 40328 - DNA, 40 bp, Artificial Sequence
  primer
gtaaaacgacggccagttgagtaccacatgctcattcatc

SEQ ID NO: 40329 - DNA, 38 bp, Artificial Sequence
  primer
gtaaaacgacggccagtgccatgcccaaagtaaaccta

SEQ ID NO: 40330 - DNA, 22 bp, Artificial Sequence
  primer
gattggaaatctcacacccatc

SEQ ID NO: 40331 - DNA, 41 bp, Artificial Sequence
  primer
gtaaaacgacggccagtaataagatggtctctttcctcagc

SEQ ID NO: 40332 - DNA, 41 bp, Artificial Sequence; identical to SEQ ID NO: 40331
  primer

SEQ ID NO: 40333 - DNA, 39 bp, Artificial Sequence
  primer
gtaaaacgacggccagttgggaatcacagttcctttgag

SEQ ID NO: 40334 - DNA, 24 bp, Artificial Sequence
  primer
ttcaactcagatttagtggcaatg

SEQ ID NO: 40335 - DNA, 22 bp, Artificial Sequence
  primer
atgtgtaaactggcaccagaag

SEQ ID NO: 40336 - DNA, 38 bp, Artificial Sequence
  primer
gtaaaacgacggccagtctgggtttgaaaggcaacatc

SEQ ID NO: 40337 - DNA, 21 bp, Artificial Sequence
  primer
cttggcatttggctgttgtag

SEQ ID NO: 40338 - DNA, 38 bp, Artificial Sequence
  primer
gtaaaacgacggccagtcccagcctgtgaaattatggt

SEQ ID NO: 40339 - DNA, 22 bp, Artificial Sequence
  primer
gcgatgctaacttgtttgttcc

SEQ ID NO: 40340 - DNA, 36 bp, Artificial Sequence
  primer
gtaaaacgacggccagttctgctggctccatgtgac

SEQ ID NO: 40341 - DNA, 39 bp, Artificial Sequence
  primer
gtaaaacgacggccagtgtcatagctttggcagtcattg

SEQ ID NO: 40342 - DNA, 27 bp, Artificial Sequence
  primer
ttgattacttagggtaggcatattacc

SEQ ID NO: 40343 - DNA, 21 bp, Artificial Sequence
  primer
tcattaacggtgggtactggg

SEQ ID NO: 40344 - DNA, 39 bp, Artificial Sequence
  primer
gtaaaacgacggccagtgcataatctttgtccaacggtc

SEQ ID NO: 40345 - DNA, 21 bp, Artificial Sequence
  primer
ggttgcaagattatggtcagg

SEQ ID NO: 40346 - DNA, 38 bp, Artificial Sequence
  primer
gtaaaacgacggccagttgctcacttccctactctccg

SEQ ID NO: 40347 - DNA, 21 bp, Artificial Sequence
  primer
caaactggcacacttcctttg

SEQ ID NO: 40348 - DNA, 38 bp, Artificial Sequence
  primer
gtaaaacgacggccagtagattgatttggaggccagtg

SEQ ID NO: 40349 - DNA, 40 bp, Artificial Sequence
  primer
gtaaaacgacggccagtttacgccaaagtgtctttctacc

SEQ ID NO: 40350 - DNA, 23 bp, Artificial Sequence
  primer
tgaatgataaacgttggcttctc

SEQ ID NO: 40351 - DNA, 23 bp, Artificial Sequence
  primer
aaacctagtaaccagaagggctc

SEQ ID NO: 40352 - DNA, 39 bp, Artificial Sequence
  primer
gtaaaacgacggccagtcctaagatcaccaccttaagcc

SEQ ID NO: 40353 - DNA, 20 bp, Artificial Sequence
  primer
gcgcacagcaaatgtgtaag

SEQ ID NO: 40354 - DNA, 38 bp, Artificial Sequence
  primer
gtaaaacgacggccagttcagtgcaaaggaacaacctg

SEQ ID NO: 40355 - DNA, 43 bp, Artificial Sequence
  primer
gtaaaacgacggccagttcacataagtggtaaatagttgggac

SEQ ID NO: 40356 - DNA, 38 bp, Artificial Sequence
  primer
gtaaaacgacggccagtcggaagaatggtgttgatttg

SEQ ID NO: 40357 - DNA, 37 bp, Artificial Sequence
  primer
gtaaaacgacggccagtcagaaatgatgctgctgctg

SEQ ID NO: 40358 - DNA, 24 bp, Artificial Sequence
  primer
gggcttgtacaattgacctatttc

SEQ ID NO: 40359 - DNA, 38 bp, Artificial Sequence
  primer
gtaaaacgacggccagttcaggatgtcagcgacttcag

SEQ ID NO: 40360 - DNA, 22 bp, Artificial Sequence
  primer
ccatctggattcatagagctgc

SEQ ID NO: 40361 - DNA, 21 bp, Artificial Sequence
  primer
gtgaccggctcctactaatgc

SEQ ID NO: 40362 - DNA, 38 bp, Artificial Sequence
  primer
gtaaaacgacggccagtcagagcattggctgtaggctc

SEQ ID NO: 40363 - DNA, 36 bp, Artificial Sequence
  primer
gtaaaacgacggccagtgaattggccgctattcacc

SEQ ID NO: 40364 - DNA, 21 bp, Artificial Sequence
  primer
caacccttcacctcgtacctc

SEQ ID NO: 40365 - DNA, 38 bp, Artificial Sequence
  primer
gtaaaacgacggccagtccttggaagaggatcagtccc

SEQ ID NO: 40366 - DNA, 20 bp, Artificial Sequence
  primer
gccgctgaaatgattctttg

SEQ ID NO: 40367 - DNA, 21 bp, Artificial Sequence
  primer
ttggattgcagaatgttccag

SEQ ID NO: 40368 - DNA, 21 bp, Artificial Sequence
  primer
tggaatccacatgaatgaagc

SEQ ID NO: 40369 - DNA, 39 bp, Artificial Sequence
  primer
gtaaaacgacggccagtgagttgaggacaaatgtttggg

SEQ ID NO: 40370 - DNA, 21 bp, Artificial Sequence
  primer
ggatctataggcctcaccagg

SEQ ID NO: 40371 - DNA, 38 bp, Artificial Sequence
  primer
gtaaaacgacggccagtggtagtctagtggcccattgc

SEQ ID NO: 40372 - DNA, 21 bp, Artificial Sequence
  primer
gtatggcggtttcctttcatc

SEQ ID NO: 40373 - DNA, 37 bp, Artificial Sequence
  primer
gtaaaacgacggccagtcagcagtgaatgatggagcc

SEQ ID NO: 40374 - DNA, 21 bp, Artificial Sequence
  primer
ctcttccactacgggagcaag

SEQ ID NO: 40375 - DNA, 20 bp, Artificial Sequence
  primer
gctgctgtgaagctgaaacc

SEQ ID NO: 40376 - DNA, 38 bp, Artificial Sequence
  primer
gtaaaacgacggccagttctgcatttccatttccagtg

SEQ ID NO: 40377 - DNA, 21 bp, Artificial Sequence
  primer
gaaccagtttccagatccagg

SEQ ID NO: 40378 - DNA, 38 bp, Artificial Sequence
  primer
gtaaaacgacggccagtgtgtgcctaaccagagaatgg

SEQ ID NO: 40379 - DNA, 38 bp, Artificial Sequence
  primer
gtaaaacgacggccagtaaacagacttgagcagctccc

SEQ ID NO: 40380 - DNA, 21 bp, Artificial Sequence
  primer
cccaattcagagagacatggg

SEQ ID NO: 40381 - DNA, 21 bp, Artificial Sequence
  primer
acaagcggcataagtccaaac

SEQ ID NO: 40382 - DNA, 38 bp, Artificial Sequence
  primer
gtaaaacgacggccagtaagaagtctccagcaagtcgg

SEQ ID NO: 40383 - DNA, 38 bp, Artificial Sequence
  primer
gtaaaacgacggccagtaagaacgggagctgaagtctg

SEQ ID NO: 40384 - DNA, 38 bp, Artificial Sequence
  primer
gtaaaacgacggccagttcttgattgggctggtttctc

SEQ ID NO: 40385 - DNA, 38 bp, Artificial Sequence
  primer
gtaaaacgacggccagtcgcagtcgtcattccagtatc

SEQ ID NO: 40386 - DNA, 38 bp, Artificial Sequence
  primer
gtaaaacgacggccagttgaaagcacagggaacaagag

SEQ ID NO: 40387 - DNA, 21 bp, Artificial Sequence
  primer
tcttcccacaattgcttctcc

SEQ ID NO: 40388 - DNA, 41 bp, Artificial Sequence
  primer
gtaaaacgacggccagtcgtaaccaggcattatgatctttg

SEQ ID NO: 40389 - DNA, 35 bp, Artificial Sequence
  primer
gtaaaacgacggccagttcgtgatctgccagcctc

SEQ ID NO: 40390 - DNA, 38 bp, Artificial Sequence
  primer
gtaaaacgacggccagtgtttgtcttccagagcaaggg

SEQ ID NO: 40391 - DNA, 24 bp, Artificial Sequence
  primer
tctagagaacctgtggtcaactcc

SEQ ID NO: 40392 - DNA, 27 bp, Artificial Sequence
  primer
aagagtagaagtaatcatgaactgggt

SEQ ID NO: 40393 - DNA, 21 bp, Artificial Sequence
  primer
tggagtgttaggttgctctgg

SEQ ID NO: 40394 - DNA, 38 bp, Artificial Sequence
  primer
gtaaaacgacggccagtggttgcaatccgacatatcaa

SEQ ID NO: 40395 - DNA, 21 bp, Artificial Sequence
  primer
tctgttctctgcctttctgcc

SEQ ID NO: 40396 - DNA, 39 bp, Artificial Sequence
  primer
gtaaaacgacggccagtcaggtgtgagaccctttgaaac

SEQ ID NO: 40397 - DNA, 38 bp, Artificial Sequence
  primer
gtaaaacgacggccagtacatttcccacagtctttgcc

SEQ ID NO: 40398 - DNA, 21 bp, Artificial Sequence
  primer
tgctgttgccagttgaagaag

SEQ ID NO: 40399 - DNA, 38 bp, Artificial Sequence
  primer
gtaaaacgacggccagtgacctgagcatccctcaaatg

SEQ ID NO: 40400 - DNA, 37 bp, Artificial Sequence
  primer
gtaaaacgacggccagtttgcacagtgtgtgtgtttg

SEQ ID NO: 40401 - DNA, 21 bp, Artificial Sequence
  primer
taacccttccacagcatgtcc

SEQ ID NO: 40402 - DNA, 21 bp, Artificial Sequence
  primer
ttatcccagcctgaagcagag

SEQ ID NO: 40403 - DNA, 21 bp, Artificial Sequence
  primer
cccgtccaaacaggacttatg

SEQ ID NO: 40404 - DNA, 35 bp, Artificial Sequence
  primer
gtaaaacgacggccagtgggctaaggcgtgcagag

SEQ ID NO: 40405 - DNA, 21 bp, Artificial Sequence
  primer
ttgacaggcactggcttagag

SEQ ID NO: 40406 - DNA, 38 bp, Artificial Sequence
  primer
gtaaaacgacggccagtcaatgggatctgtctcagcac

SEQ ID NO: 40407 - DNA, 38 bp, Artificial Sequence
  primer
gtaaaacgacggccagttgtatgggccctttggataag

SEQ ID NO: 40408 - DNA, 19 bp, Artificial Sequence
  primer
ggctgctcagacttgctcc

SEQ ID NO: 40409 - DNA, 20 bp, Artificial Sequence
  primer
tttcaggaccaccatgaacc

SEQ ID NO: 40410 - DNA, 38 bp, Artificial Sequence
  primer
gtaaaacgacggccagtctgagactgtcctgtctgccc

SEQ ID NO: 40411 - DNA, 21 bp, Artificial Sequence
  primer
atgtgttgtctgcaccctgag

SEQ ID NO: 40412 - DNA, 19 bp, Artificial Sequence
  primer
tccatctaggccaagtgcc

SEQ ID NO: 40413 - DNA, 38 bp, Artificial Sequence
  primer
gtaaaacgacggccagtgacagtgtggactggaaggtg

SEQ ID NO: 40414 - DNA, 38 bp, Artificial Sequence
  primer
gtaaaacgacggccagtaggactcggtccttgagaaac

SEQ ID NO: 40415 - DNA, 21 bp, Artificial Sequence
  primer
aaccaggtaggaaggagggac

SEQ ID NO: 40416 - DNA, 38 bp, Artificial Sequence
  primer
gtaaaacgacggccagtgaatgaagcctccttcagtgg

SEQ ID NO: 40417 - DNA, 38 bp, Artificial Sequence
  primer
gtaaaacgacggccagtcgatggtgacctctgcttatg

SEQ ID NO: 40418 - DNA, 20 bp, Artificial Sequence
  primer
tgacaggtgcctgtaatccc

SEQ ID NO: 40419 - DNA, 18 bp, Artificial Sequence
  primer
gcgacaagagcaagaccc

SEQ ID NO: 40420 - DNA, 21 bp, Artificial Sequence
  primer
gggtacaggctagagaaaggg

SEQ ID NO: 40421 - DNA, 20 bp, Artificial Sequence
  primer
gtcagcgagactgtgaaccc

SEQ ID NO: 40422 - DNA, 38 bp, Artificial Sequence
  primer
gtaaaacgacggccagtgagggagactggttagggatg

SEQ ID NO: 40423 - DNA, 20 bp, Artificial Sequence
  primer
gtcaatcaaggtcgtcgtgg

SEQ ID NO: 40424 - DNA, 26 bp, Artificial Sequence
  primer
aattgaagaagatggttatacagtgc

SEQ ID NO: 40425 - DNA, 38 bp, Artificial Sequence
  primer
gtaaaacgacggccagtcaagaacgctagagacccacc

SEQ ID NO: 40426 - DNA, 22 bp, Artificial Sequence
  primer
ttcaggatctttcaagcatgtg

SEQ ID NO: 40427 - DNA, 38 bp, Artificial Sequence
  primer
gtaaaacgacggccagttatggccttcccaagaatacc

SEQ ID NO: 40428 - DNA, 41 bp, Artificial Sequence
  primer
gtaaaacgacggccagtccctaagagtagtctcccatttcc

SEQ ID NO: 40429 - DNA, 41 bp, Artificial Sequence
  primer
gtaaaacgacggccagtcagtgcctggagtatagcaagaac

SEQ ID NO: 40430 - DNA, 21 bp, Artificial Sequence
  primer
gctggaagagtacaaccctgg

SEQ ID NO: 40431 - DNA, 38 bp, Artificial Sequence
  primer
gtaaaacgacggccagtctcctggtcctttgtagctgg

SEQ ID NO: 40432 - DNA, 20 bp, Artificial Sequence
  primer
agaagtacggcggcatgttc

SEQ ID NO: 40433 - DNA, 38 bp, Artificial Sequence
  primer
gtaaaacgacggccagtgtccgtgtctctatccctccc

SEQ ID NO: 40434 - DNA, 20 bp, Artificial Sequence
  primer
tgaagctggtgatggatctg

SEQ ID NO: 40435 - DNA, 21 bp, Artificial Sequence
  primer
atgtgccctgcctgagttatc

SEQ ID NO: 40436 - DNA, 41 bp, Artificial Sequence
  primer
gtaaaacgacggccagtggtagtggtaatgatgtggctacc

SEQ ID NO: 40437 - DNA, 38 bp, Artificial Sequence
  primer
gtaaaacgacggccagtcatcctcaggctggataggtg

SEQ ID NO: 40438 - DNA, 21 bp, Artificial Sequence
  primer
tccacatgaatgtgtttgcag

SEQ ID NO: 40439 - DNA, 38 bp, Artificial Sequence
  primer
gtaaaacgacggccagtggaaggtggatgggtgtgtag

SEQ ID NO: 40440 - DNA, 21 bp, Artificial Sequence
  primer
caatggagcagatttcccttc

SEQ ID NO: 40441 - DNA, 36 bp, Artificial Sequence
  primer
gtaaaacgacggccagtagtgttctggccttcagcc

SEQ ID NO: 40442 - DNA, 38 bp, Artificial Sequence
  primer
gtaaaacgacggccagtattcattcactggctgtgctg

SEQ ID NO: 40443 - DNA, 37 bp, Artificial Sequence
  primer
gtaaaacgacggccagtagctggcagtcttccatttg

SEQ ID NO: 40444 - DNA, 21 bp, Artificial Sequence
  primer
tgattatagaaagccaccggc

SEQ ID NO: 40445 - DNA, 21 bp, Artificial Sequence
  primer
gacctcaggtttctctctcgc

SEQ ID NO: 40446 - DNA, 21 bp, Artificial Sequence
  primer
agtgcatggcagagtacatgg

SEQ ID NO: 40447 - DNA, 38 bp, Artificial Sequence
  primer
gtaaaacgacggccagtccctgaaggtcagcagtcttg

SEQ ID NO: 40448 - DNA, 37 bp, Artificial Sequence
  primer
gtaaaacgacggccagtttcctcgctctcccttcttc

SEQ ID NO: 40449 - DNA, 21 bp, Artificial Sequence
  primer
ttcagtctcatggaggaatgg

SEQ ID NO: 40450 - DNA, 40 bp, Artificial Sequence
  primer
gtaaaacgacggccagttcttattcctcaaggattccagg

SEQ ID NO: 40451 - DNA, 38 bp, Artificial Sequence
  primer
gtaaaacgacggccagtccagaacttggctcatggtag

SEQ ID NO: 40452 - DNA, 25 bp, Artificial Sequence
  primer
tcataagcttcttgttgaactaggc

SEQ ID NO: 40453 - DNA, 21 bp, Artificial Sequence
  primer
agtttccaggctttggtatgg

SEQ ID NO: 40454 - DNA, 38 bp, Artificial Sequence
  primer
gtaaaacgacggccagtagagtaccggtccatcctgac

SEQ ID NO: 40455 - DNA, 23 bp, Artificial Sequence
  primer
cacctggccagtaatctatcctc

SEQ ID NO: 40456 - DNA, 38 bp, Artificial Sequence
  primer
gtaaaacgacggccagtttggtggctatcttgttggtg

SEQ ID NO: 40457 - DNA, 38 bp, Artificial Sequence
  primer
gtaaaacgacggccagtatctggatcatggtatgtggg

SEQ ID NO: 40458 - DNA, 39 bp, Artificial Sequence
  primer
gtaaaacgacggccagtgcctctagggcagtgcaataac

SEQ ID NO: 40459 - DNA, 39 bp, Artificial Sequence
  primer
gtaaaacgacggccagttgatacttcagctgtgctttgg

SEQ ID NO: 40460 - DNA, 21 bp, Artificial Sequence
  primer
tttccgatgtcattaactggg

SEQ ID NO: 40461 - DNA, 38 bp, Artificial Sequence
  primer
gtaaaacgacggccagtggaggtaatcatccggatttc

SEQ ID NO: 40462 - DNA, 20 bp, Artificial Sequence
  primer
aaccaaggtccatgtttggg

SEQ ID NO: 40463 - DNA, 20 bp, Artificial Sequence
  primer
tccatctccctgtggatgtc

SEQ ID NO: 40464 - DNA, 38 bp, Artificial Sequence
  primer
gtaaaacgacggccagttgtgaatgccacccaacatac

SEQ ID NO: 40465 - DNA, 19 bp, Artificial Sequence
  primer
agagggtgggagatgggtc

SEQ ID NO: 40466 - DNA, 20 bp, Artificial Sequence
  primer
atttagccaggtgtgatggc

SEQ ID NO: 40467 - DNA, 19 bp, Artificial Sequence
  primer
ctcagcccacatcctgctc

SEQ ID NO: 40468 - DNA, 21 bp, Artificial Sequence
  primer
gtaggattctgtggctctccc

SEQ ID NO: 40469 - DNA, 38 bp, Artificial Sequence
  primer
gtaaaacgacggccagtgttctcagctctgtttgcagg

SEQ ID NO: 40470 - DNA, 38 bp, Artificial Sequence
  primer
gtaaaacgacggccagtctacaaggcattgtgggtctg

SEQ ID NO: 40471 - DNA, 35 bp, Artificial Sequence
  primer
gtaaaacgacggccagttaccaggagggccagcag

SEQ ID NO: 40472 - DNA, 22 bp, Artificial Sequence
  primer
cagtacaagaagaggtgctcgg

SEQ ID NO: 40473 - DNA, 38 bp, Artificial Sequence
  primer
gtaaaacgacggccagtgacacagagcacagccaagac

SEQ ID NO: 40474 - DNA, 38 bp, Artificial Sequence
  primer
gtaaaacgacggccagtaggaagacccaatccctgaac

SEQ ID NO: 40475 - DNA, 19 bp, Artificial Sequence
  primer
ccctgcccaagcatagttt

SEQ ID NO: 40476 - DNA, 38 bp, Artificial Sequence
  primer
gtaaaacgacggccagttggtggacacagagctagtgg

SEQ ID NO: 40477 - DNA, 38 bp, Artificial Sequence
  primer
gtaaaacgacggccagtgggcaggacatagctcttctc

SEQ ID NO: 40478 - DNA, 38 bp, Artificial Sequence
  primer
gtaaaacgacggccagtagaggcagcatttggaatgag

SEQ ID NO: 40479 - DNA, 22 bp, Artificial Sequence
  primer
tgtgtatccctggaaccagaag

SEQ ID NO: 40480 - DNA, 21 bp, Artificial Sequence
  primer
gtagggtgcttggagatcaca

SEQ ID NO: 40481 - DNA, 38 bp, Artificial Sequence
  primer
gtaaaacgacggccagttttctctccaaactcctgcct

SEQ ID NO: 40482 - DNA, 38 bp, Artificial Sequence
  primer
gtaaaacgacggccagtctctctgggtctcttcttggg

SEQ ID NO: 40483 - DNA, 37 bp, Artificial Sequence
  primer
gtaaaacgacggccagtctattgttgctggtgggtgg

SEQ ID NO: 40484 - DNA, 38 bp, Artificial Sequence
  primer
gtaaaacgacggccagtcttctgccaggactgggttag

SEQ ID NO: 40485 - DNA, 38 bp, Artificial Sequence
  primer
gtaaaacgacggccagtgactcgtcctagctgtggctc

SEQ ID NO: 40486 - DNA, 21 bp, Artificial Sequence
  primer
ggaggccttctcatcagtcat

SEQ ID NO: 40487 - DNA, 21 bp, Artificial Sequence
  primer
gacagttacttgtccctccgc

SEQ ID NO: 40488 - DNA, 37 bp, Artificial Sequence
  primer
gtaaaacgacggccagttaggcagcaagaagcctgag

SEQ ID NO: 40489 - DNA, 38 bp, Artificial Sequence
  primer
gtaaaacgacggccagtagcactcactatgcatccagg

SEQ ID NO: 40490 - DNA, 18 bp, Artificial Sequence
  primer
cctgggtccagggatctg

SEQ ID NO: 40491 - DNA, 37 bp, Artificial Sequence
  primer
gtaaaacgacggccagtcagtgcctgatccactccag

SEQ ID NO: 40492 - DNA, 37 bp, Artificial Sequence
  primer
gtaaaacgacggccagtgcccaagttcagtgtggttg

SEQ ID NO: 40493 - DNA, 38 bp, Artificial Sequence
  primer
gtaaaacgacggccagtgagtggcgagcactaaaggag

SEQ ID NO: 40494 - DNA, 21 bp, Artificial Sequence
  primer
catcactccagctccaggtag

SEQ ID NO: 40495 - DNA, 38 bp, Artificial Sequence
  primer
gtaaaacgacggccagtgcagggatgacagtgagtgag

SEQ ID NO: 40496 - DNA, 38 bp, Artificial Sequence
  primer
gtaaaacgacggccagtagagagaacgggtaagcctgg

SEQ ID NO: 40497 - DNA, 36 bp, Artificial Sequence
  primer
gtaaaacgacggccagtagacagtctggccctgcac

SEQ ID NO: 40498 - DNA, 38 bp, Artificial Sequence
  primer
gtaaaacgacggccagtaggtcacgtaggtcacccttc

SEQ ID NO: 40499 - DNA, 37 bp, Artificial Sequence
  primer
gtaaaacgacggccagtaggtcacagtgggagcagag

SEQ ID NO: 40500 - DNA, 21 bp, Artificial Sequence
  primer
accctccaggtgagatgactg

SEQ ID NO: 40501 - DNA, 38 bp, Artificial Sequence
  primer
gtaaaacgacggccagtagagacaggtttggcttcagg

SEQ ID NO: 40502 - DNA, 39 bp, Artificial Sequence
  primer
gtaaaacgacggccagtgggttaggttattccatcaggg

SEQ ID NO: 40503 - DNA, 21 bp, Artificial Sequence
  primer
aggtacctgacaacccgtcac

SEQ ID NO: 40504 - DNA, 38 bp, Artificial Sequence
  primer
gtaaaacgacggccagtgacctttcctgaaactgtggc

SEQ ID NO: 40505 - DNA, 38 bp, Artificial Sequence
  primer
gtaaaacgacggccagttgtgtgtaggagggatttcgg

SEQ ID NO: 40506 - DNA, 44 bp, Artificial Sequence
  primer
gtaaaacgacggccagttgaaacatacatacctcaagaaatgag

SEQ ID NO: 40507 - DNA, 21 bp, Artificial Sequence
  primer
gtttcctttcaccttccctcc

SEQ ID NO: 40508 - DNA, 23 bp, Artificial Sequence
  primer
ctaaatggaatagtcgttgaggc

SEQ ID NO: 40509 - DNA, 41 bp, Artificial Sequence
  primer
gtaaaacgacggccagtgtgattgaccaacagaagttgaag

SEQ ID NO: 40510 - DNA, 23 bp, Artificial Sequence
  primer
ggataaattaaacccaaagaggc

SEQ ID NO: 40511 - DNA, 24 bp, Artificial Sequence
  primer
ttgctgttaccttaaacatccctc

SEQ ID NO: 40512 - DNA, 38 bp, Artificial Sequence
  primer
gtaaaacgacggccagtgggcatcaattccataagttg

SEQ ID NO: 40513 - DNA, 40 bp, Artificial Sequence
  primer
gtaaaacgacggccagtagcacaacgataaccatcttagc

SEQ ID NO: 40514 - DNA, 21 bp, Artificial Sequence
  primer
gcagtctgtgggaaatgattg

SEQ ID NO: 40515 - DNA, 38 bp, Artificial Sequence
  primer
gtaaaacgacggccagttcctagatatgctgtggtccc

SEQ ID NO: 40516 - DNA, 37 bp, Artificial Sequence
  primer
gtaaaacgacggccagttccgccactttcatgttgtc

SEQ ID NO: 40517 - DNA, 21 bp, Artificial Sequence
  primer
ggactcaagtgatcctcccac

SEQ ID NO: 40518 - DNA, 22 bp, Artificial Sequence
  primer
gggatgaacacttcagttgtgg

SEQ ID NO: 40519 - DNA, 22 bp, Artificial Sequence
  primer
ctcacatggaacaagtgtcagg

SEQ ID NO: 40520 - DNA, 24 bp, Artificial Sequence
  primer
tctattggcatcataagtggtttc

SEQ ID NO: 40521 - DNA, 38 bp, Artificial Sequence
  primer
gtaaaacgacggccagtactcgatgggctaaggttctg

SEQ ID NO: 40522 - DNA, 22 bp, Artificial Sequence
  primer
gggccagaattactctctcttg

SEQ ID NO: 40523 - DNA, 25 bp, Artificial Sequence
  primer
agcagttactgaactgtagggaatc

SEQ ID NO: 40524 - DNA, 41 bp, Artificial Sequence
  primer
gtaaaacgacggccagttttgatgcaatgattatggtgaac

SEQ ID NO: 40525 - DNA, 39 bp, Artificial Sequence
  primer
gtaaaacgacggccagttgcaggtgataatttgcttctc

SEQ ID NO: 40526 - DNA, 21 bp, Artificial Sequence
  primer
atatgacctgacagcagccac

SEQ ID NO: 40527 - DNA, 21 bp, Artificial Sequence
  primer
gtgctgcccacaagttcatag

SEQ ID NO: 40528 - DNA, 21 bp, Artificial Sequence
  primer
ttaatacagcttcgtgagcgg

SEQ ID NO: 40529 - DNA, 21 bp, Artificial Sequence
  primer
tcattgcaggatttgatcgtc

SEQ ID NO: 40530 - DNA, 41 bp, Artificial Sequence
  primer
gtaaaacgacggccagtccagatgaaataaagtcctggttg

SEQ ID NO: 40531 - DNA, 38 bp, Artificial Sequence
  primer
gtaaaacgacggccagttagtggcgcaaactcccttac

SEQ ID NO: 40532 - DNA, 38 bp, Artificial Sequence
  primer
gtaaaacgacggccagtccaggctatgggagagatttg

SEQ ID NO: 40533 - DNA, 21 bp, Artificial Sequence
  primer
tcacagacatgtcgaggaagg

SEQ ID NO: 40534 - DNA, 38 bp, Artificial Sequence
  primer
gtaaaacgacggccagtactttgaaggaagccagtccc

SEQ ID NO: 40535 - DNA, 18 bp, Artificial Sequence
  primer
cgagactccgtttcccag

SEQ ID NO: 40536 - DNA, 38 bp, Artificial Sequence
  primer
gtaaaacgacggccagtgtcgagatggaacctttcctg

SEQ ID NO: 40537 - DNA, 38 bp, Artificial Sequence
  primer
gtaaaacgacggccagtacacacacgactcgtaaagcc

SEQ ID NO: 40538 - DNA, 37 bp, Artificial Sequence
  primer
gtaaaacgacggccagtcgttctgttcgcaggttagg

SEQ ID NO: 40539 - DNA, 38 bp, Artificial Sequence
  primer
gtaaaacgacggccagttgactgagaagcagttgaggg

SEQ ID NO: 40540 - DNA, 20 bp, Artificial Sequence
  primer
cctgtggtgacagaaggagg

SEQ ID NO: 40541 - DNA, 20 bp, Artificial Sequence
  primer
cttcaagtgatctgcctgcc

SEQ ID NO: 40542 - DNA, 21 bp, Artificial Sequence
  primer
gtctcacggtcacacacgaag

SEQ ID NO: 40543 - DNA, 21 bp, Artificial Sequence
  primer
agcagccttccaaacactttc

SEQ ID NO: 40544 - DNA, 38 bp, Artificial Sequence
  primer
gtaaaacgacggccagttcctacccgttactgtctggg

SEQ ID NO: 40545 - DNA, 38 bp, Artificial Sequence
  primer
gtaaaacgacggccagtctctgtagtgaggcctgggtc

SEQ ID NO: 40546 - DNA, 22 bp, Artificial Sequence
  primer
gagctccatgcagtgtgtttac

SEQ ID NO: 40547 - DNA, 20 bp, Artificial Sequence
  primer
gtgctcagcgctatctccag

SEQ ID NO: 40548 - DNA, 37 bp, Artificial Sequence
  primer
gtaaaacgacggccagtccagaaagctgcttcacacc

SEQ ID NO: 40549 - DNA, 21 bp, Artificial Sequence
  primer
gggtctatgcctttggtttcc

SEQ ID NO: 40550 - DNA, 38 bp, Artificial Sequence
  primer
gtaaaacgacggccagttgttgctgtgaggagttccag

SEQ ID NO: 40551 - DNA, 22 bp, Artificial Sequence
  primer
ggatgccaagtcctcctcttag

SEQ ID NO: 40552 - DNA, 35 bp, Artificial Sequence
  primer
gtaaaacgacggccagtgcttcctgttctgaggcg

SEQ ID NO: 40553 - DNA, 23 bp, Artificial Sequence
  primer
ttgccttataaccatactgctgg

SEQ ID NO: 40554 - DNA, 38 bp, Artificial Sequence
  primer
gtaaaacgacggccagtagtggttgtaagcaaaggctg

SEQ ID NO: 40555 - DNA, 41 bp, Artificial Sequence
  primer
gtaaaacgacggccagttgtgtgtgtaatgttaaggatgga

SEQ ID NO: 40556 - DNA, 27 bp, Artificial Sequence
  primer
gattctcttaggtaaagtacgcaacac

SEQ ID NO: 40557 - DNA, 38 bp, Artificial Sequence
  primer
gtaaaacgacggccagtgcctttcatttcttgacctgg

SEQ ID NO: 40558 - DNA, 21 bp, Artificial Sequence
  primer
ttgaccgtggaagtttcagtg

SEQ ID NO: 40559 - DNA, 40 bp, Artificial Sequence
  primer
gtaaaacgacggccagtaagacacaacccagactttatgg

SEQ ID NO: 40560 - DNA, 38 bp, Artificial Sequence
  primer
gtaaaacgacggccagtgtggctaaactgcacaatgga

SEQ ID NO: 40561 - DNA, 41 bp, Artificial Sequence
  primer
gtaaaacgacggccagtaagcacagtaatctactcttgggc

SEQ ID NO: 40562 - DNA, 26 bp, Artificial Sequence
  primer
tttaggatccttcaatagttggtttg

SEQ ID NO: 40563 - DNA, 39 bp, Artificial Sequence
  primer
gtaaaacgacggccagtgccagtgtacatttgccattag

SEQ ID NO: 40564 - DNA, 40 bp, Artificial Sequence
  primer
gtaaaacgacggccagttcatttgtaaatcgatagggcac

SEQ ID NO: 40565 - DNA, 47 bp, Artificial Sequence
  primer
gtaaaacgacggccagtgatttataattctgagccttacttgatgat

SEQ ID NO: 40566 - DNA, 21 bp, Artificial Sequence
  primer
agagacgaggcagcaataagg

SEQ ID NO: 40567 - DNA, 38 bp, Artificial Sequence
  primer
gtaaaacgacggccagtactgggacagctttgagttcc

SEQ ID NO: 40568 - DNA, 40 bp, Artificial Sequence
  primer
gtaaaacgacggccagtaagtggagtttgaactgaagctg

SEQ ID NO: 40569 - DNA, 38 bp, Artificial Sequence
  primer
gtaaaacgacggccagtgggagcaaggtgagatgtttc

SEQ ID NO: 40570 - DNA, 41 bp, Artificial Sequence
  primer
gtaaaacgacggccagtacttaactagagacctgtctgggc

SEQ ID NO: 40571 - DNA, 22 bp, Artificial Sequence
  primer
gaggactaacacatggtcaggg

SEQ ID NO: 40572 - DNA, 38 bp, Artificial Sequence
  primer
gtaaaacgacggccagtccagaaggacgttgtttcatt

SEQ ID NO: 40573 - DNA, 37 bp, Artificial Sequence
  primer
gtaaaacgacggccagttttcctcagtttcccgcttc

SEQ ID NO: 40574 - DNA, 41 bp, Artificial Sequence
  primer
gtaaaacgacggccagtcatgtttcctatttggtaaccagc

SEQ ID NO: 40575 - DNA, 22 bp, Artificial Sequence
  primer
ttcaataatgaaatcgtgccag

SEQ ID NO: 40576 - DNA, 23 bp, Artificial Sequence
  primer
tcaggcatgacatgttaacacac

SEQ ID NO: 40577 - DNA, 45 bp, Artificial Sequence
  primer
gtaaaacgacggccagtaatatatgattgttacaccacaaggagt

SEQ ID NO: 40578 - DNA, 38 bp, Artificial Sequence
  primer
gtaaaacgacggccagttcaatgctgtaggtgcctttg

SEQ ID NO: 40579 - DNA, 38 bp, Artificial Sequence
  primer
gtaaaacgacggccagtaaatgcaggacagtggaaacc

SEQ ID NO: 40580 - DNA, 38 bp, Artificial Sequence
  primer
gtaaaacgacggccagtggaattaacgaagtgggaggg

SEQ ID NO: 40581 - DNA, 26 bp, Artificial Sequence
  primer
tttattgaaccaggtaattgtgtagc

SEQ ID NO: 40582 - DNA, 43 bp, Artificial Sequence
  primer
gtaaaacgacggccagtgatacttaacaccacagcttaatccc

SEQ ID NO: 40583 - DNA, 22 bp, Artificial Sequence
  primer
tccggatatgtgtaaatcctgc

SEQ ID NO: 40584 - DNA, 38 bp, Artificial Sequence
  primer
gtaaaacgacggccagtctacggtttcctccagaggtc

SEQ ID NO: 40585 - DNA, 21 bp, Artificial Sequence
  primer
tttgacaccgaggttgtatgc

SEQ ID NO: 40586 - DNA, 37 bp, Artificial Sequence
  primer
gtaaaacgacggccagtttcctgggtgagtgtatgcg

SEQ ID NO: 40587 - DNA, 42 bp, Artificial Sequence
  primer
gtaaaacgacggccagtcatccacagatgctcatagtgaagt

SEQ ID NO: 40588 - DNA, 23 bp, Artificial Sequence
  primer
aaccatattggcggctattagag

SEQ ID NO: 40589 - DNA, 38 bp, Artificial Sequence
  primer
gtaaaacgacggccagtatatcaccctgaaaccttcgg

SEQ ID NO: 40590 - DNA, 20 bp, Artificial Sequence
  primer
gtgagccatgattacgccac

SEQ ID NO: 40591 - DNA, 21 bp, Artificial Sequence
  primer
ggatatggtggtgtgacttgg

SEQ ID NO: 40592 - DNA, 21 bp, Artificial Sequence
  primer
caaaccaatgcctatttcagc

SEQ ID NO: 40593 - DNA, 44 bp, Artificial Sequence
  primer
gtaaaacgacggccagtactagatactgcctactctgtgaaggt

SEQ ID NO: 40594 - DNA, 38 bp, Artificial Sequence
  primer
gtaaaacgacggccagtaggctggcctcatagtcactg

SEQ ID NO: 40595 - DNA, 21 bp, Artificial Sequence
  primer
ttcaacttcattccgtgcttc

SEQ ID NO: 40596 - DNA, 21 bp, Artificial Sequence
  primer
tttctcagagcaagaaccagg

SEQ ID NO: 40597 - DNA, 20 bp, Artificial Sequence
  primer
aaagcttgaccaagcacctg

SEQ ID NO: 40598 - DNA, 22 bp, Artificial Sequence
  primer
ttcccactgtacatttcacaca

SEQ ID NO: 40599 - DNA, 21 bp, Artificial Sequence
  primer
ttaccaagtgtcctgcacagc

SEQ ID NO: 40600 - DNA, 41 bp, Artificial Sequence
  primer
gtaaaacgacggccagtggagaatatatatgtgtgtgggcg

SEQ ID NO: 40601 - DNA, 25 bp, Artificial Sequence
  primer
gaagggatagtcatagattgcatgt

SEQ ID NO: 40602 - DNA, 43 bp, Artificial Sequence
  primer
gtaaaacgacggccagttgtgatcatccagatcattcataaac

SEQ ID NO: 40603 - DNA, 38 bp, Artificial Sequence
  primer
gtaaaacgacggccagtaggccttaattgctgagttgc

SEQ ID NO: 40604 - DNA, 21 bp, Artificial Sequence
  primer
ctaatttgcattccatttggc

SEQ ID NO: 40605 - DNA, 21 bp, Artificial Sequence
  primer
gccagaaataggcaagaaagg

SEQ ID NO: 40606 - DNA, 28 bp, Artificial Sequence
  primer
caaggtttgagagtttctataatgttga

SEQ ID NO: 40607 - DNA, 41 bp, Artificial Sequence
  primer
gtaaaacgacggccagttttcagttatctggaaagcagttg

SEQ ID NO: 40608 - DNA, 22 bp, Artificial Sequence
  primer
ggtttgcatttgcctcttaatc

SEQ ID NO: 40609 - DNA, 40 bp, Artificial Sequence
  primer
gtaaaacgacggccagttgaaatggattagttgtcgatcc

SEQ ID NO: 40610 - DNA, 38 bp, Artificial Sequence
  primer
gtaaaacgacggccagtccagctgtattgtgcagaagc

SEQ ID NO: 40611 - DNA, 20 bp, Artificial Sequence
  primer
cccaggcaacagtgtgagac

SEQ ID NO: 40612 - DNA, 37 bp, Artificial Sequence
  primer
gtaaaacgacggccagtgtgttgtaatggagcccagc

SEQ ID NO: 40613 - DNA, 39 bp, Artificial Sequence
  primer
gtaaaacgacggccagttccggatatgtgtaaatcctgc

SEQ ID NO: 40614 - DNA, 38 bp, Artificial Sequence
  primer
gtaaaacgacggccagtaaatgtccctgtgtttgggag

SEQ ID NO: 40615 - DNA, 20 bp, Artificial Sequence
  primer
ggaagcctcctcttcgtacc

SEQ ID NO: 40616 - DNA, 22 bp, Artificial Sequence
  primer
aagaaacggtagaggagatggc

SEQ ID NO: 40617 - DNA, 41 bp, Artificial Sequence
  primer
gtaaaacgacggccagtaaacactgttatgtgtacttgccc

SEQ ID NO: 40618 - DNA, 23 bp, Artificial Sequence
  primer
tttgtgattcagtgatgtggatg

SEQ ID NO: 40619 - DNA, 41 bp, Artificial Sequence
  primer
gtaaaacgacggccagtccaaattcctagtgatttagaggg

SEQ ID NO: 40620 - DNA, 21 bp, Artificial Sequence
  primer
ccgggatgatttgtaacacag

SEQ ID NO: 40621 - DNA, 21 bp, Artificial Sequence
  primer
cccggccaaatagtaatcttg

SEQ ID NO: 40622 - DNA, 39 bp, Artificial Sequence
  primer
gtaaaacgacggccagtggttcaaatccattcctttcag

SEQ ID NO: 40623 - DNA, 25 bp, Artificial Sequence
  primer
tcaagcagtatgaaagggttcttag

SEQ ID NO: 40624 - DNA, 36 bp, Artificial Sequence
  primer
gtaaaacgacggccagtgggcaacaggctttgagac

SEQ ID NO: 40625 - DNA, 38 bp, Artificial Sequence
  primer
gtaaaacgacggccagtccctaagttacgcacaggagg

SEQ ID NO: 40626 - DNA, 40 bp, Artificial Sequence
  primer
gtaaaacgacggccagttcacagtagaatggagttgtggg

SEQ ID NO: 40627 - DNA, 20 bp, Artificial Sequence
  primer
ctcctcctcctcctttggtg

SEQ ID NO: 40628 - DNA, 38 bp, Artificial Sequence
  primer
gtaaaacgacggccagtagcaggtaggagacgacatgg

SEQ ID NO: 40629 - DNA, 38 bp, Artificial Sequence
  primer
gtaaaacgacggccagtatttctggctcagctcaatgg

SEQ ID NO: 40630 - DNA, 38 bp, Artificial Sequence
  primer
gtaaaacgacggccagtaggagcatccatgacctgaag

SEQ ID NO: 40631 - DNA, 38 bp, Artificial Sequence
  primer
gtaaaacgacggccagtacaagcacagtggcaagatcc

SEQ ID NO: 40632 - DNA, 39 bp, Artificial Sequence
  primer
gtaaaacgacggccagttctttcagtcctcggaactcac

SEQ ID NO: 40633 - DNA, 20 bp, Artificial Sequence
  primer
gacagtgatgctgcctcctc

SEQ ID NO: 40634 - DNA, 21 bp, Artificial Sequence
  primer
aacagacgaactggaaggagc

SEQ ID NO: 40635 - DNA, 21 bp, Artificial Sequence
  primer
gaactgcatttcccagaggtc

SEQ ID NO: 40636 - DNA, 38 bp, Artificial Sequence
  primer
gtaaaacgacggccagtagagcagtctttgatcctggg

SEQ ID NO: 40637 - DNA, 38 bp, Artificial Sequence
  primer
gtaaaacgacggccagttccttgaagcagaatgtgagc

SEQ ID NO: 40638 - DNA, 18 bp, Artificial Sequence
  primer
gcccagcaggtgacacag

SEQ ID NO: 40639 - DNA, 38 bp, Artificial Sequence
  primer
gtaaaacgacggccagtgccaggtggtcatttcttctc

SEQ ID NO: 40640 - DNA, 21 bp, Artificial Sequence
  primer
aaagttgaaagtgagccaggg

SEQ ID NO: 40641 - DNA, 21 bp, Artificial Sequence
  primer
tttagatgccctttcctccac

SEQ ID NO: 40642 - DNA, 22 bp, Artificial Sequence
  primer
gccattaggcttgataggaagg

SEQ ID NO: 40643 - DNA, 21 bp, Artificial Sequence
  primer
ggagatcatcttgtcttcggc

SEQ ID NO: 40644 - DNA, 21 bp, Artificial Sequence
  primer
caagaaggcttagctcccaag

SEQ ID NO: 40645 - DNA, 21 bp, Artificial Sequence
  primer
agcacctggaacgagtaattg

SEQ ID NO: 40646 - DNA, 39 bp, Artificial Sequence
  primer
gtaaaacgacggccagttcgagtggagttgtataaagcg

SEQ ID NO: 40647 - DNA, 38 bp, Artificial Sequence
  primer
gtaaaacgacggccagtatgggagagaaaggcactctg

SEQ ID NO: 40648 - DNA, 38 bp, Artificial Sequence
  primer
gtaaaacgacggccagtacactccaggtctgacttgcc

SEQ ID NO: 40649 - DNA, 21 bp, Artificial Sequence
  primer
aaggtgccatgagacataccc

SEQ ID NO: 40650 - DNA, 38 bp, Artificial Sequence
  primer
gtaaaacgacggccagtgaacccaaccctgtgaaagag

SEQ ID NO: 40651 - DNA, 21 bp, Artificial Sequence
  primer
atttaggctcaggaaagcacg

SEQ ID NO: 40652 - DNA, 38 bp, Artificial Sequence
  primer
gtaaaacgacggccagttgtcacagagctagagcaggg

SEQ ID NO: 40653 - DNA, 38 bp, Artificial Sequence
  primer
gtaaaacgacggccagtactccatagaggagagctggc

SEQ ID NO: 40654 - DNA, 20 bp, Artificial Sequence
  primer
aggcagagtataggcagggc

SEQ ID NO: 40655 - DNA, 38 bp, Artificial Sequence
  primer
gtaaaacgacggccagtgtggatactgcacttggttgg

SEQ ID NO: 40656 - DNA, 21 bp, Artificial Sequence
  primer
tctcttcctccttcttctccc

SEQ ID NO: 40657 - DNA, 21 bp, Artificial Sequence
  primer
tattggacagcattgctccag

SEQ ID NO: 40658 - DNA, 21 bp, Artificial Sequence
  primer
gaagggtcttacaagggaggg

SEQ ID NO: 40659 - DNA, 38 bp, Artificial Sequence
  primer
gtaaaacgacggccagtagtgtataggcaggcagagcc

SEQ ID NO: 40660 - DNA, 38 bp, Artificial Sequence
  primer
gtaaaacgacggccagtaaagaatgactcagaagcggg

SEQ ID NO: 40661 - DNA, 38 bp, Artificial Sequence
  primer
gtaaaacgacggccagtgcttccagacagatggaggag

SEQ ID NO: 40662 - DNA, 38 bp, Artificial Sequence
  primer
gtaaaacgacggccagtctctcagttcttgcctctccc

SEQ ID NO: 40663 - DNA, 21 bp, Artificial Sequence
  primer
accttcccgtggagataggac

SEQ ID NO: 40664 - DNA, 19 bp, Artificial Sequence
  primer
ctgggcgacggagactaag

SEQ ID NO: 40665 - DNA, 38 bp, Artificial Sequence
  primer
gtaaaacgacggccagtatacaagggaactggctgagg

SEQ ID NO: 40666 - DNA, 22 bp, Artificial Sequence
  primer
caacctctacaagcaggtagcc

SEQ ID NO: 40667 - DNA, 21 bp, Artificial Sequence
  primer
taaatttggcttcccaagctg

SEQ ID NO: 40668 - DNA, 21 bp, Artificial Sequence
  primer
tgttgtatgcctgtttgcttg

SEQ ID NO: 40669 - DNA, 38 bp, Artificial Sequence
  primer
gtaaaacgacggccagttgcctagcacagtccctacag

SEQ ID NO: 40670 - DNA, 21 bp, Artificial Sequence
  primer
gtggcagagtgagaacctgtc

SEQ ID NO: 40671 - DNA, 38 bp, Artificial Sequence
  primer
gtaaaacgacggccagtaagtgaatgagcggcagagtc

SEQ ID NO: 40672 - DNA, 35 bp, Artificial Sequence
  primer
gtaaaacgacggccagttccttccttcctttcgcc

SEQ ID NO: 40673 - DNA, 20 bp, Artificial Sequence
  primer
gtgggctacctggagatcag

SEQ ID NO: 40674 - DNA, 38 bp, Artificial Sequence
  primer
gtaaaacgacggccagtgtgcctggacttggtcttgag

SEQ ID NO: 40675 - DNA, 38 bp, Artificial Sequence
  primer
gtaaaacgacggccagtgtggtcttggttccctttgag

SEQ ID NO: 40676 - DNA, 37 bp, Artificial Sequence
  primer
gtaaaacgacggccagtatttgggcaggaggcagtag

SEQ ID NO: 40677 - DNA, 21 bp, Artificial Sequence
  primer
ctaagtttcaagcctggcctc

SEQ ID NO: 40678 - DNA, 38 bp, Artificial Sequence
  primer
gtaaaacgacggccagtccatatcctgttcctccctcc

SEQ ID NO: 40679 - DNA, 21 bp, Artificial Sequence
  primer
tccacagggagaaatcaggtc

SEQ ID NO: 40680 - DNA, 21 bp, Artificial Sequence
  primer
tgcaaacttctgcacttaggc

SEQ ID NO: 40681 - DNA, 19 bp, Artificial Sequence
  primer
cctgcgatcagactctggg

SEQ ID NO: 40682 - DNA, 38 bp, Artificial Sequence
  primer
gtaaaacgacggccagtctactggtcccagctgtttgc

SEQ ID NO: 40683 - DNA, 37 bp, Artificial Sequence
  primer
gtaaaacgacggccagtaaatgatccacagctgccac

SEQ ID NO: 40684 - DNA, 38 bp, Artificial Sequence
  primer
gtaaaacgacggccagtatgactccgtgtgtcagggac

SEQ ID NO: 40685 - DNA, 38 bp, Artificial Sequence
  primer
gtaaaacgacggccagtcaagcttggttctcatgatgc

SEQ ID NO: 40686 - DNA, 20 bp, Artificial Sequence
  primer
cagtggtttcccaagcacac

SEQ ID NO: 40687 - DNA, 21 bp, Artificial Sequence
  primer
gcagttgagctattcccatgc

SEQ ID NO: 40688 - DNA, 35 bp, Artificial Sequence
  primer
gtaaaacgacggccagtagcatgccaggctatggg

SEQ ID NO: 40689 - DNA, 21 bp, Artificial Sequence
  primer
ctcaggtacccacctttcctg

SEQ ID NO: 40690 - DNA, 20 bp, Artificial Sequence
  primer
ccttacccaggcttgaggag

SEQ ID NO: 40691 - DNA, 35 bp, Artificial Sequence
  primer
gtaaaacgacggccagtacagccacagcagccaag

SEQ ID NO: 40692 - DNA, 21 bp, Artificial Sequence
  primer
agacattgccagcatacccag

SEQ ID NO: 40693 - DNA, 21 bp, Artificial Sequence
  primer
agctgacatctagggccagac

SEQ ID NO: 40694 - DNA, 37 bp, Artificial Sequence
  primer
gtaaaacgacggccagtgacgaactcaagatcgaccc

SEQ ID NO: 40695 - DNA, 35 bp, Artificial Sequence
  primer
gtaaaacgacggccagttggctacggctggaggag

SEQ ID NO: 40696 - DNA, 38 bp, Artificial Sequence
  primer
gtaaaacgacggccagtaggtgtgagctactgtgcctg

SEQ ID NO: 40697 - DNA, 38 bp, Artificial Sequence
  primer
gtaaaacgacggccagtgttaaccagattggctctggc

SEQ ID NO: 40698 - DNA, 22 bp, Artificial Sequence
  primer
cattgttctttcctcatttggc

SEQ ID NO: 40699 - DNA, 38 bp, Artificial Sequence
  primer
gtaaaacgacggccagtttacttccaccttagctgccc

SEQ ID NO: 40700 - DNA, 18 bp, Artificial Sequence
  primer
cccaccctgttccagacc

SEQ ID NO: 40701 - DNA, 37 bp, Artificial Sequence; identical to SEQ ID NO: 16300
  primer

SEQ ID NO: 40702 - DNA, 38 bp, Artificial Sequence
  primer
gtaaaacgacggccagtagaatttctgggctggtgttg

SEQ ID NO: 40703 - DNA, 21 bp, Artificial Sequence
  primer
ctgaagccatgggatgctaag

SEQ ID NO: 40704 - DNA, 21 bp, Artificial Sequence
  primer
gatctctgctcttccctgacc

SEQ ID NO: 40705 - DNA, 21 bp, Artificial Sequence
  primer
cccatcagtaatgttggcatc

SEQ ID NO: 40706 - DNA, 38 bp, Artificial Sequence
  primer
gtaaaacgacggccagtgctaaagaaggtgggaagctc

SEQ ID NO: 40707 - DNA, 38 bp, Artificial Sequence
  primer
gtaaaacgacggccagtctgtcattgcctctgttcctg

SEQ ID NO: 40708 - DNA, 37 bp, Artificial Sequence
  primer
gtaaaacgacggccagttgggaaatggaaggaggaag

SEQ ID NO: 40709 - DNA, 37 bp, Artificial Sequence
  primer
gtaaaacgacggccagtagaaagcaccggaaaccttg

SEQ ID NO: 40710 - DNA, 18 bp, Artificial Sequence
  primer
taccttgacccaaggccc

SEQ ID NO: 40711 - DNA, 21 bp, Artificial Sequence
  primer
gacttgtcctcaaggagggag

SEQ ID NO: 40712 - DNA, 38 bp, Artificial Sequence
  primer
gtaaaacgacggccagtacaggactggaaggatcatgg

SEQ ID NO: 40713 - DNA, 38 bp, Artificial Sequence
  primer
gtaaaacgacggccagtccaccttgttgaacttgatcg

SEQ ID NO: 40714 - DNA, 24 bp, Artificial Sequence
  primer
ttgaatagagattctcaggctttg

SEQ ID NO: 40715 - DNA, 20 bp, Artificial Sequence
  primer
cttgtctcaaactcctgggc

SEQ ID NO: 40716 - DNA, 21 bp, Artificial Sequence
  primer
ccttaggcctggaagtttgag

SEQ ID NO: 40717 - DNA, 21 bp, Artificial Sequence
  primer
aaaggtttcagccatgtttgg

SEQ ID NO: 40718 - DNA, 39 bp, Artificial Sequence
  primer
gtaaaacgacggccagttcatcatcgcatgtgacagtag

SEQ ID NO: 40719 - DNA, 22 bp, Artificial Sequence
  primer
tctcaggcttcctctcactctg

SEQ ID NO: 40720 - DNA, 38 bp, Artificial Sequence
  primer
gtaaaacgacggccagttcagactttcagcttctcccg

SEQ ID NO: 40721 - DNA, 37 bp, Artificial Sequence
  primer
gtaaaacgacggccagtcaaagcactctgggatcctg

SEQ ID NO: 40722 - DNA, 38 bp, Artificial Sequence
  primer
gtaaaacgacggccagtgactgtcatcagctgggtttg

SEQ ID NO: 40723 - DNA, 38 bp, Artificial Sequence
  primer
gtaaaacgacggccagttggtaagtgagtgagcatccc

SEQ ID NO: 40724 - DNA, 38 bp, Artificial Sequence
  primer
gtaaaacgacggccagtcaaccaggatggaattcttgg

SEQ ID NO: 40725 - DNA, 21 bp, Artificial Sequence
  primer
catgcaggtatgattggatgg

SEQ ID NO: 40726 - DNA, 38 bp, Artificial Sequence
  primer
gtaaaacgacggccagtaccctccacagatgtgtgtcc

SEQ ID NO: 40727 - DNA, 21 bp, Artificial Sequence
  primer
tctccgagctcctatttcagc

SEQ ID NO: 40728 - DNA, 21 bp, Artificial Sequence
  primer
tctcttggaagcgaaggtgtc

SEQ ID NO: 40729 - DNA, 44 bp, Artificial Sequence
  primer
gtaaaacgacggccagtggtaataagatgataggttggcatttc

SEQ ID NO: 40730 - DNA, 41 bp, Artificial Sequence
  primer
gtaaaacgacggccagttgcctagaatctaatgggttatgc

SEQ ID NO: 40731 - DNA, 24 bp, Artificial Sequence
  primer
caagctaacaccctcaaagacttc

SEQ ID NO: 40732 - DNA, 39 bp, Artificial Sequence
  primer
gtaaaacgacggccagtgagggcttatttaggccttcag

SEQ ID NO: 40733 - DNA, 20 bp, Artificial Sequence
  primer
tgcacaaggacgactgaaac

SEQ ID NO: 40734 - DNA, 21 bp, Artificial Sequence
  primer
atttggttgtttgtcatgtcg

SEQ ID NO: 40735 - DNA, 21 bp, Artificial Sequence
  primer
tttctttgccttgactttggc

SEQ ID NO: 40736 - DNA, 38 bp, Artificial Sequence
  primer
gtaaaacgacggccagtatgggcagcagagatgagaag

SEQ ID NO: 40737 - DNA, 21 bp, Artificial Sequence
  primer
gaggcaagccgtttgaatatc

SEQ ID NO: 40738 - DNA, 39 bp, Artificial Sequence
  primer
gtaaaacgacggccagtagctgtcaacacttctgtgagc

SEQ ID NO: 40739 - DNA, 39 bp, Artificial Sequence
  primer
gtaaaacgacggccagtggtaagaatgaagcattggagc

SEQ ID NO: 40740 - DNA, 37 bp, Artificial Sequence
  primer
gtaaaacgacggccagtgggactaagggtggagttgc

SEQ ID NO: 40741 - DNA, 21 bp, Artificial Sequence
  primer
aaacagcgaaccagtttctcc

SEQ ID NO: 40742 - DNA, 38 bp, Artificial Sequence
  primer
gtaaaacgacggccagtttctctcccaggaaggaactg

SEQ ID NO: 40743 - DNA, 21 bp, Artificial Sequence
  primer
aagccttcagagtctgggttc

SEQ ID NO: 40744 - DNA, 38 bp, Artificial Sequence
  primer
gtaaaacgacggccagtagtagcaccgagacactgtgg

SEQ ID NO: 40745 - DNA, 21 bp, Artificial Sequence
  primer
ctgttctgtgaccgtaggcag

SEQ ID NO: 40746 - DNA, 38 bp, Artificial Sequence
  primer
gtaaaacgacggccagtagggcccagattcctttgtag

SEQ ID NO: 40747 - DNA, 38 bp, Artificial Sequence
  primer
gtaaaacgacggccagtctccagatcctctgtggcttg

SEQ ID NO: 40748 - DNA, 38 bp, Artificial Sequence
  primer
gtaaaacgacggccagtatacagaccaggctctctggc

SEQ ID NO: 40749 - DNA, 21 bp, Artificial Sequence
  primer
ggaggaaatggaacctcagtg

SEQ ID NO: 40750 - DNA, 38 bp, Artificial Sequence
  primer
gtaaaacgacggccagtgataagtgtgctccctgtccc

SEQ ID NO: 40751 - DNA, 38 bp, Artificial Sequence
  primer
gtaaaacgacggccagttggtggcatatatagggaggg

SEQ ID NO: 40752 - DNA, 21 bp, Artificial Sequence
  primer
tgtccaggagacagtcacagg

SEQ ID NO: 40753 - DNA, 19 bp, Artificial Sequence
  primer
cccttctgcagtcagtggg

SEQ ID NO: 40754 - DNA, 21 bp, Artificial Sequence
  primer
tgacatcaccattccagaagc

SEQ ID NO: 40755 - DNA, 39 bp, Artificial Sequence
  primer
gtaaaacgacggccagtgagaaggatgaattacccggac

SEQ ID NO: 40756 - DNA, 21 bp, Artificial Sequence
  primer
gcatttggtctcacctaaggg

SEQ ID NO: 40757 - DNA, 37 bp, Artificial Sequence
  primer
gtaaaacgacggccagtaggaacaaaggcagagggag

SEQ ID NO: 40758 - DNA, 21 bp, Artificial Sequence
  primer
tttacctttcaaggcattccc

SEQ ID NO: 40759 - DNA, 22 bp, Artificial Sequence
  primer
tgccctgtctacactggaagag

SEQ ID NO: 40760 - DNA, 38 bp, Artificial Sequence
  primer
gtaaaacgacggccagtaaacgaaagatgccttctccc

SEQ ID NO: 40761 - DNA, 42 bp, Artificial Sequence
  primer
gtaaaacgacggccagtttctcacaaatctgttgccttaatc

SEQ ID NO: 40762 - DNA, 40 bp, Artificial Sequence
  primer
gtaaaacgacggccagttgtgttgagtaaagaggctcagg

SEQ ID NO: 40763 - DNA, 36 bp, Artificial Sequence
  primer
gtaaaacgacggccagtctgtgtgtggctcgaaacg

SEQ ID NO: 40764 - DNA, 21 bp, Artificial Sequence
  primer
ggacctttagttccgagaggg

SEQ ID NO: 40765 - DNA, 38 bp, Artificial Sequence
  primer
gtaaaacgacggccagtaacctctgagcgatccatttc

SEQ ID NO: 40766 - DNA, 38 bp, Artificial Sequence
  primer
gtaaaacgacggccagtctgctggtggagaacataggg

SEQ ID NO: 40767 - DNA, 38 bp, Artificial Sequence
  primer
gtaaaacgacggccagtctagcccagtcactcctggac

SEQ ID NO: 40768 - DNA, 20 bp, Artificial Sequence
  primer
tgcaatccctgctttacctg

SEQ ID NO: 40769 - DNA, 38 bp, Artificial Sequence
  primer
gtaaaacgacggccagtccgttctagacccaattgctg

SEQ ID NO: 40770 - DNA, 38 bp, Artificial Sequence
  primer
gtaaaacgacggccagtaaggctgatttgggagacaag

SEQ ID NO: 40771 - DNA, 38 bp, Artificial Sequence
  primer
gtaaaacgacggccagtgaattgtgtgcgtgtgcatag

SEQ ID NO: 40772 - DNA, 37 bp, Artificial Sequence
  primer
gtaaaacgacggccagtagctccaaggaggctgaaag

SEQ ID NO: 40773 - DNA, 39 bp, Artificial Sequence
  primer
gtaaaacgacggccagttttatgtgactcctgcactgct

SEQ ID NO: 40774 - DNA, 38 bp, Artificial Sequence
  primer
gtaaaacgacggccagtgaaaggcaagtagggagtggg

SEQ ID NO: 40775 - DNA, 21 bp, Artificial Sequence
  primer
tgaacaggctcatctctctcg

SEQ ID NO: 40776 - DNA, 38 bp, Artificial Sequence
  primer
gtaaaacgacggccagtcagggatcaatgaaggacagg

SEQ ID NO: 40777 - DNA, 38 bp, Artificial Sequence
  primer
gtaaaacgacggccagtgctctgggacagtctgaaacc

SEQ ID NO: 40778 - DNA, 38 bp, Artificial Sequence
  primer
gtaaaacgacggccagtctgcttatagccagagccagg

SEQ ID NO: 40779 - DNA, 21 bp, Artificial Sequence
  primer
agagtgatgtgtgggacatgc

SEQ ID NO: 40780 - DNA, 20 bp, Artificial Sequence
  primer
cagaggctcagtgctggaag

SEQ ID NO: 40781 - DNA, 38 bp, Artificial Sequence
  primer
gtaaaacgacggccagtcacatcaacacctggcttctc

SEQ ID NO: 40782 - DNA, 38 bp, Artificial Sequence
  primer
gtaaaacgacggccagtacctccctctaatgcccaaag

SEQ ID NO: 40783 - DNA, 21 bp, Artificial Sequence
  primer
aaggttcaaggtcagcagctc

SEQ ID NO: 40784 - DNA, 37 bp, Artificial Sequence
  primer
gtaaaacgacggccagtattctttccggcatctggag

SEQ ID NO: 40785 - DNA, 38 bp, Artificial Sequence
  primer
gtaaaacgacggccagtgaggaatgtaggcaggcagag

SEQ ID NO: 40786 - DNA, 21 bp, Artificial Sequence
  primer
gaaagagagagagcccactgc

SEQ ID NO: 40787 - DNA, 21 bp, Artificial Sequence
  primer
gtgctgtgccatgtctattgg

SEQ ID NO: 40788 - DNA, 23 bp, Artificial Sequence
  primer
ctgattgtgtcactttcgttgac

SEQ ID NO: 40789 - DNA, 21 bp, Artificial Sequence
  primer
agtaaaccattcagccaaccc

SEQ ID NO: 40790 - DNA, 38 bp, Artificial Sequence
  primer
gtaaaacgacggccagtgtaagtcctgggtaccggatg

SEQ ID NO: 40791 - DNA, 37 bp, Artificial Sequence
  primer
gtaaaacgacggccagtggaggtgtagggactggagc

SEQ ID NO: 40792 - DNA, 38 bp, Artificial Sequence
  primer
gtaaaacgacggccagtatcatttccagtgaatgcagg

SEQ ID NO: 40793 - DNA, 19 bp, Artificial Sequence
  primer
tcgcatcatccgtgtcaac

SEQ ID NO: 40794 - DNA, 21 bp, Artificial Sequence
  primer
aattccatgccacaacctacc

SEQ ID NO: 40795 - DNA, 20 bp, Artificial Sequence
  primer
cagccagtgatagcaatccg

SEQ ID NO: 40796 - DNA, 18 bp, Artificial Sequence
  primer
cagcagccctcctgctat

SEQ ID NO: 40797 - DNA, 21 bp, Artificial Sequence
  primer
agctggactgcctaacaatgc

SEQ ID NO: 40798 - DNA, 36 bp, Artificial Sequence
  primer
gtaaaacgacggccagtccgacagcactaacgctcc

SEQ ID NO: 40799 - DNA, 21 bp, Artificial Sequence
  primer
tactgtgtgcagcaggtctgg

SEQ ID NO: 40800 - DNA, 38 bp, Artificial Sequence
  primer
gtaaaacgacggccagtggcttctgtttctgggagagg

SEQ ID NO: 40801 - DNA, 21 bp, Artificial Sequence
  primer
ctgccatgtggtagatgggtc

SEQ ID NO: 40802 - DNA, 37 bp, Artificial Sequence
  primer
gtaaaacgacggccagtaggcggtactgaagctttcc

SEQ ID NO: 40803 - DNA, 25 bp, Artificial Sequence
  primer
ggtgaaaggaatttctaaagtaggc

SEQ ID NO: 40804 - DNA, 25 bp, Artificial Sequence
  primer
gctttcaaggtgataagttctgagc

SEQ ID NO: 40805 - DNA, 35 bp, Artificial Sequence
  primer
gtaaaacgacggccagtccagcccaacttgccatt

SEQ ID NO: 40806 - DNA, 21 bp, Artificial Sequence
  primer
ccactcaccaacctctcttcc

SEQ ID NO: 40807 - DNA, 20 bp, Artificial Sequence
  primer
atgattcctgatgttgggct

SEQ ID NO: 40808 - DNA, 40 bp, Artificial Sequence
  primer
gtaaaacgacggccagtcaaagtggttcatttgaggaatg

SEQ ID NO: 40809 - DNA, 21 bp, Artificial Sequence
  primer
ggccactgaatctaaaggcac

SEQ ID NO: 40810 - DNA, 39 bp, Artificial Sequence
  primer
gtaaaacgacggccagtgaagttaggatggaagtggtgg

SEQ ID NO: 40811 - DNA, 21 bp, Artificial Sequence
  primer
gtcttgtcttcacagggaggg

SEQ ID NO: 40812 - DNA, 21 bp, Artificial Sequence
  primer
ttggaaagctgctgttcattg

SEQ ID NO: 40813 - DNA, 36 bp, Artificial Sequence
  primer
gtaaaacgacggccagtgctcataaagggcacagcc

SEQ ID NO: 40814 - DNA, 21 bp, Artificial Sequence
  primer
gtgtctaagggaagggcagag

SEQ ID NO: 40815 - DNA, 21 bp, Artificial Sequence
  primer
caaacccatgctgtttgtagg

SEQ ID NO: 40816 - DNA, 20 bp, Artificial Sequence
  primer
caagctcttgagggaggcag

SEQ ID NO: 40817 - DNA, 38 bp, Artificial Sequence
  primer
gtaaaacgacggccagtcatccctgggctcagtgtaac

SEQ ID NO: 40818 - DNA, 21 bp, Artificial Sequence
  primer
ttcacgagtcctttgttcacc

SEQ ID NO: 40819 - DNA, 21 bp, Artificial Sequence
  primer
gccagcctcctccctaatatc

SEQ ID NO: 40820 - DNA, 38 bp, Artificial Sequence
  primer
gtaaaacgacggccagttttgcagacaattgaagcctg

SEQ ID NO: 40821 - DNA, 24 bp, Artificial Sequence
  primer
tgaaatgagatcagtggtaagctc

SEQ ID NO: 40822 - DNA, 38 bp, Artificial Sequence
  primer
gtaaaacgacggccagttgtgagcttgttgaaggcaag

SEQ ID NO: 40823 - DNA, 18 bp, Artificial Sequence
  primer
gcctgggtgacagtgcaa

SEQ ID NO: 40824 - DNA, 38 bp, Artificial Sequence
  primer
gtaaaacgacggccagtaggttgcatttgctgtttgtg

SEQ ID NO: 40825 - DNA, 21 bp, Artificial Sequence
  primer
ccttaaagttagggtgggtcc

SEQ ID NO: 40826 - DNA, 38 bp, Artificial Sequence
  primer
gtaaaacgacggccagtatgttctggctggtaccttgg

SEQ ID NO: 40827 - DNA, 21 bp, Artificial Sequence
  primer
ttctgtcacatggaggacgag

SEQ ID NO: 40828 - DNA, 21 bp, Artificial Sequence
  primer
tcaggcagatgggatttatgg

SEQ ID NO: 40829 - DNA, 21 bp, Artificial Sequence
  primer
gcccagagagtgttgcatatt

SEQ ID NO: 40830 - DNA, 42 bp, Artificial Sequence
  primer
gtaaaacgacggccagtttagctgtgagatttagggtctgtc

SEQ ID NO: 40831 - DNA, 38 bp, Artificial Sequence
  primer
gtaaaacgacggccagttcctgcagaacaactaatgcc

SEQ ID NO: 40832 - DNA, 38 bp, Artificial Sequence
  primer
gtaaaacgacggccagttaatcgcatggcccaaatatc

SEQ ID NO: 40833 - DNA, 37 bp, Artificial Sequence
  primer
gtaaaacgacggccagtcacttcccatcccatttctg

SEQ ID NO: 40834 - DNA, 39 bp, Artificial Sequence
  primer
gtaaaacgacggccagtgtgagagagaatgggagtaggg

SEQ ID NO: 40835 - DNA, 38 bp, Artificial Sequence
  primer
gtaaaacgacggccagtttgcccataactttgctcttt

SEQ ID NO: 40836 - DNA, 37 bp, Artificial Sequence
  primer
gtaaaacgacggccagtagccttggatcaccttctcc

SEQ ID NO: 40837 - DNA, 21 bp, Artificial Sequence
  primer
tcctttcaaccttgtcaaccc

SEQ ID NO: 40838 - DNA, 21 bp, Artificial Sequence
  primer
cccagatgatgggaaagagtc

SEQ ID NO: 40839 - DNA, 39 bp, Artificial Sequence
  primer
gtaaaacgacggccagtagacttccctggcagataaagc

SEQ ID NO: 40840 - DNA, 19 bp, Artificial Sequence
  primer
actgtgcctggccacaaag

SEQ ID NO: 40841 - DNA, 21 bp, Artificial Sequence
  primer
gaagatcgggaccagtctgag

SEQ ID NO: 40842 - DNA, 38 bp, Artificial Sequence
  primer
gtaaaacgacggccagtgattgggttgacctctcttgg

SEQ ID NO: 40843 - DNA, 20 bp, Artificial Sequence
  primer
tggaggacagacgatatccc

SEQ ID NO: 40844 - DNA, 37 bp, Artificial Sequence
  primer
gtaaaacgacggccagttggctataggctggcatgag

SEQ ID NO: 40845 - DNA, 39 bp, Artificial Sequence
  primer
gtaaaacgacggccagtccatgctttgtttctgatcttg

SEQ ID NO: 40846 - DNA, 21 bp, Artificial Sequence
  primer
gaagtgggagaattgcctgag

SEQ ID NO: 40847 - DNA, 38 bp, Artificial Sequence
  primer
gtaaaacgacggccagtgactgggctaagtccttggag

SEQ ID NO: 40848 - DNA, 37 bp, Artificial Sequence
  primer
gtaaaacgacggccagtagactgagctgcagggtttg

SEQ ID NO: 40849 - DNA, 21 bp, Artificial Sequence
  primer
tctgtggaggtgtggtttgac

SEQ ID NO: 40850 - DNA, 38 bp, Artificial Sequence
  primer
gtaaaacgacggccagttctgtgaggaggagacttggg

SEQ ID NO: 40851 - DNA, 21 bp, Artificial Sequence
  primer
ttggactgttgctttgctcac

SEQ ID NO: 40852 - DNA, 39 bp, Artificial Sequence
  primer
gtaaaacgacggccagtttctggtagaaagggaagggag

SEQ ID NO: 40853 - DNA, 38 bp, Artificial Sequence
  primer
gtaaaacgacggccagtacaggatcccatttgttggag

SEQ ID NO: 40854 - DNA, 21 bp, Artificial Sequence
  primer
ctctggcatcagacccttacc

SEQ ID NO: 40855 - DNA, 38 bp, Artificial Sequence
  primer
gtaaaacgacggccagttgcaaagagcttagagctggg

SEQ ID NO: 40856 - DNA, 38 bp, Artificial Sequence
  primer
gtaaaacgacggccagttgtggatgtgagtgggacttc

SEQ ID NO: 40857 - DNA, 38 bp, Artificial Sequence
  primer
gtaaaacgacggccagtacatggcagttcttcctgatg

SEQ ID NO: 40858 - DNA, 38 bp, Artificial Sequence
  primer
gtaaaacgacggccagtatctggctccagggaaagaag

SEQ ID NO: 40859 - DNA, 21 bp, Artificial Sequence
  primer
ctctcggtctctctgtggctc

SEQ ID NO: 40860 - DNA, 39 bp, Artificial Sequence
  primer
gtaaaacgacggccagtcaactaaagccctagtggaggg

SEQ ID NO: 40861 - DNA, 22 bp, Artificial Sequence
  primer
aggtctgagcaaggtgtgctac

SEQ ID NO: 40862 - DNA, 38 bp, Artificial Sequence
  primer
gtaaaacgacggccagtccagctcaacaaggtcttcag

SEQ ID NO: 40863 - DNA, 23 bp, Artificial Sequence
  primer
gcaagatatttgcagtggctagt

SEQ ID NO: 40864 - DNA, 38 bp, Artificial Sequence
  primer
gtaaaacgacggccagtccaagctctgactcctaccct

SEQ ID NO: 40865 - DNA, 38 bp, Artificial Sequence
  primer
gtaaaacgacggccagttcgtgtgagtttctagcctgc

SEQ ID NO: 40866 - DNA, 19 bp, Artificial Sequence
  primer
cgaggagcccaagagagag

SEQ ID NO: 40867 - DNA, 39 bp, Artificial Sequence
  primer
gtaaaacgacggccagtttatgagatcttggcttgctcc

SEQ ID NO: 40868 - DNA, 21 bp, Artificial Sequence
  primer
ctaagcactgtggcaatgtgg

SEQ ID NO: 40869 - DNA, 41 bp, Artificial Sequence
  primer
gtaaaacgacggccagttcactctggtgtacttgaaagcag

SEQ ID NO: 40870 - DNA, 23 bp, Artificial Sequence
  primer
tcaggatgtgaagtaccttgctc

SEQ ID NO: 40871 - DNA, 23 bp, Artificial Sequence
  primer
tcatcctaaatggtgttctttgg

SEQ ID NO: 40872 - DNA, 22 bp, Artificial Sequence
  primer
gttaggtgctctgggactaagc

SEQ ID NO: 40873 - DNA, 35 bp, Artificial Sequence
  primer
gtaaaacgacggccagtcctggccctgatcacttg

SEQ ID NO: 40874 - DNA, 37 bp, Artificial Sequence
  primer
gtaaaacgacggccagtatgccagggactgaatatgg

SEQ ID NO: 40875 - DNA, 21 bp, Artificial Sequence
  primer
cagcatgacatcctcttgtgg

SEQ ID NO: 40876 - DNA, 29 bp, Artificial Sequence
  primer
gctgcagtaataaagtctataatcttccc

SEQ ID NO: 40877 - DNA, 39 bp, Artificial Sequence
  primer
gtaaaacgacggccagtggctaggactagagttaggccc

SEQ ID NO: 40878 - DNA, 38 bp, Artificial Sequence
  primer
gtaaaacgacggccagtactcgcagaagtcatcagcac

SEQ ID NO: 40879 - DNA, 21 bp, Artificial Sequence
  primer
gccaaacgtagaaggctaagg

SEQ ID NO: 40880 - DNA, 22 bp, Artificial Sequence
  primer
tgttgtacttcaaactccagcc

SEQ ID NO: 40881 - DNA, 22 bp, Artificial Sequence
  primer
tggaattcacaatcaaggacag

SEQ ID NO: 40882 - DNA, 24 bp, Artificial Sequence
  primer
tgaagctttcacattggacttatg

SEQ ID NO: 40883 - DNA, 42 bp, Artificial Sequence
  primer
gtaaaacgacggccagtgatgaatttaacttgatggtggttg

SEQ ID NO: 40884 - DNA, 21 bp, Artificial Sequence
  primer
ttcagtgaaattctggatggg

SEQ ID NO: 40885 - DNA, 43 bp, Artificial Sequence
  primer
gtaaaacgacggccagtcctttggcacaagaatatgtaagaac

SEQ ID NO: 40886 - DNA, 44 bp, Artificial Sequence
  primer
gtaaaacgacggccagttcaatttcattgaagtaataacaaagg

SEQ ID NO: 40887 - DNA, 38 bp, Artificial Sequence
  primer
gtaaaacgacggccagtatgccatgccatgactgttac

SEQ ID NO: 40888 - DNA, 38 bp, Artificial Sequence
  primer
gtaaaacgacggccagtaatagcagccagccaacctac

SEQ ID NO: 40889 - DNA, 21 bp, Artificial Sequence
  primer
ctgatgggagctgtgacattc

SEQ ID NO: 40890 - DNA, 21 bp, Artificial Sequence
  primer
aggcagctggactggagtatc

SEQ ID NO: 40891 - DNA, 21 bp, Artificial Sequence
  primer
tgagtcatttgggcagttagg

SEQ ID NO: 40892 - DNA, 22 bp, Artificial Sequence
  primer
aatgggtcaggagtgcttactg

SEQ ID NO: 40893 - DNA, 21 bp, Artificial Sequence
  primer
tcagagtcaggtttactgccc

SEQ ID NO: 40894 - DNA, 21 bp, Artificial Sequence
  primer
aaagtgaggccctgtagaccc

SEQ ID NO: 40895 - DNA, 23 bp, Artificial Sequence
  primer
gacccattcatgtagagggaaac

SEQ ID NO: 40896 - DNA, 38 bp, Artificial Sequence
  primer
gtaaaacgacggccagtagaagcaggtaatgtcgctcc

SEQ ID NO: 40897 - DNA, 21 bp, Artificial Sequence
  primer
tccaatcagcatctctccttg

SEQ ID NO: 40898 - DNA, 18 bp, Artificial Sequence
  primer
gattgtgccactgcgctc

SEQ ID NO: 40899 - DNA, 22 bp, Artificial Sequence
  primer
aggtaatgctcaggctgtgaag

SEQ ID NO: 40900 - DNA, 38 bp, Artificial Sequence
  primer
gtaaaacgacggccagtaaagattggtggtggcatagc

SEQ ID NO: 40901 - DNA, 23 bp, Artificial Sequence
  primer
tttggtaagatgatggtggagac

SEQ ID NO: 40902 - DNA, 39 bp, Artificial Sequence
  primer
gtaaaacgacggccagtgggaacgaattctttgctgtag

SEQ ID NO: 40903 - DNA, 21 bp, Artificial Sequence
  primer
cgtagccaaattattccaggc

SEQ ID NO: 40904 - DNA, 38 bp, Artificial Sequence
  primer
gtaaaacgacggccagtgagctcctgtacacagccagt

SEQ ID NO: 40905 - DNA, 22 bp, Artificial Sequence
  primer
cttagtcatgaaacaggcatgg

SEQ ID NO: 40906 - DNA, 23 bp, Artificial Sequence
  primer
aaatcaacaggtccttctcttcc

SEQ ID NO: 40907 - DNA, 38 bp, Artificial Sequence
  primer
gtaaaacgacggccagtaagggtgacatagtggttgcc

SEQ ID NO: 40908 - DNA, 25 bp, Artificial Sequence
  primer
tttaaatgtagagagctatctcggg

SEQ ID NO: 40909 - DNA, 19 bp, Artificial Sequence
  primer
ttcatggtggactttgggc

SEQ ID NO: 40910 - DNA, 19 bp, Artificial Sequence
  primer
aaatgcagcccacctaagc

SEQ ID NO: 40911 - DNA, 38 bp, Artificial Sequence
  primer
gtaaaacgacggccagtttactttaatggctacgcggg

SEQ ID NO: 40912 - DNA, 21 bp, Artificial Sequence
  primer
acatgcctccgtgagtatgac

SEQ ID NO: 40913 - DNA, 38 bp, Artificial Sequence
  primer
gtaaaacgacggccagtgaaggcaggtattgatgccac

SEQ ID NO: 40914 - DNA, 21 bp, Artificial Sequence
  primer
acagggtagaggtgtgatggg

SEQ ID NO: 40915 - DNA, 41 bp, Artificial Sequence
  primer
gtaaaacgacggccagtaaccatcttaatttcaaaggtccc

SEQ ID NO: 40916 - DNA, 21 bp, Artificial Sequence
  primer
tgacttgactggctgctcttc

SEQ ID NO: 40917 - DNA, 21 bp, Artificial Sequence
  primer
tccaatcagcatctctccttg

SEQ ID NO: 40918 - DNA, 20 bp, Artificial Sequence
  primer
cctcacctcctttctctccg

SEQ ID NO: 40919 - DNA, 22 bp, Artificial Sequence
  primer
tgttcttgttatgttgcttgcc

SEQ ID NO: 40920 - DNA, 37 bp, Artificial Sequence
  primer
gtaaaacgacggccagtgctgggaatagccacaaatg

SEQ ID NO: 40921 - DNA, 38 bp, Artificial Sequence
  primer
gtaaaacgacggccagtgctcaggagctcagaggactg

SEQ ID NO: 40922 - DNA, 38 bp, Artificial Sequence
  primer
gtaaaacgacggccagtagaagaatgacctctgcccac

SEQ ID NO: 40923 - DNA, 25 bp, Artificial Sequence
  primer
cacaagtgaaagtggatagatgacc

SEQ ID NO: 40924 - DNA, 21 bp, Artificial Sequence
  primer
agaccgtgggaagaccactac

SEQ ID NO: 40925 - DNA, 21 bp, Artificial Sequence
  primer
ggagagacactgccacaacag

SEQ ID NO: 40926 - DNA, 22 bp, Artificial Sequence
  primer
catttcccttgagctgactagc

SEQ ID NO: 40927 - DNA, 21 bp, Artificial Sequence
  primer
gaaagagcagtgcccagtttc

SEQ ID NO: 40928 - DNA, 37 bp, Artificial Sequence
  primer
gtaaaacgacggccagttgggtccaagcaaacatgag

SEQ ID NO: 40929 - DNA, 21 bp, Artificial Sequence
  primer
ctaggatatcagggcagctcg

SEQ ID NO: 40930 - DNA, 38 bp, Artificial Sequence
  primer
gtaaaacgacggccagttgcaaagagagttcctccacc

SEQ ID NO: 40931 - DNA, 21 bp, Artificial Sequence
  primer
tctacccaggctttccacaac

SEQ ID NO: 40932 - DNA, 21 bp, Artificial Sequence
  primer
ctcagggaggtgagtctgagg

SEQ ID NO: 40933 - DNA, 21 bp, Artificial Sequence
  primer
gatgccgtcagtctcttaggg

SEQ ID NO: 40934 - DNA, 38 bp, Artificial Sequence
  primer
gtaaaacgacggccagtacaggcttctctctccagctc

SEQ ID NO: 40935 - DNA, 38 bp, Artificial Sequence
  primer
gtaaaacgacggccagtcaagttagagtggagggagcc

SEQ ID NO: 40936 - DNA, 38 bp, Artificial Sequence
  primer
gtaaaacgacggccagtaccagctacttcacctccctg

SEQ ID NO: 40937 - DNA, 20 bp, Artificial Sequence
  primer
agctgtgctggaggctagtg

SEQ ID NO: 40938 - DNA, 20 bp, Artificial Sequence
  primer
caaagccatccctagcagtg

SEQ ID NO: 40939 - DNA, 37 bp, Artificial Sequence
  primer
gtaaaacgacggccagtagagccagaaggaggaccag

SEQ ID NO: 40940 - DNA, 38 bp, Artificial Sequence
  primer
gtaaaacgacggccagtggaaagtgaaagtttgcctgg

SEQ ID NO: 40941 - DNA, 38 bp, Artificial Sequence
  primer
gtaaaacgacggccagtgaaagctggatttgagggatg

SEQ ID NO: 40942 - DNA, 20 bp, Artificial Sequence
  primer
tgtctttccacgtgtggttg

SEQ ID NO: 40943 - DNA, 37 bp, Artificial Sequence
  primer
gtaaaacgacggccagttctcctagttgctggcatgg

SEQ ID NO: 40944 - DNA, 38 bp, Artificial Sequence
  primer
gtaaaacgacggccagtgaaaggccaagggaatttgac

SEQ ID NO: 40945 - DNA, 37 bp, Artificial Sequence
  primer
gtaaaacgacggccagtcagggctgagctaggagatg

SEQ ID NO: 40946 - DNA, 37 bp, Artificial Sequence
  primer
gtaaaacgacggccagtcaaagccatccctagcagtg

SEQ ID NO: 40947 - DNA, 21 bp, Artificial Sequence
  primer
ctggagaggccagtgagattc

SEQ ID NO: 40948 - DNA, 38 bp, Artificial Sequence
  primer
gtaaaacgacggccagtaagacagaccatccatctgcc

SEQ ID NO: 40949 - DNA, 21 bp, Artificial Sequence
  primer
ttgggaggactcttgcaactc

SEQ ID NO: 40950 - DNA, 37 bp, Artificial Sequence
  primer
gtaaaacgacggccagtggagagaagaagggcctctg

SEQ ID NO: 40951 - DNA, 38 bp, Artificial Sequence
  primer
gtaaaacgacggccagtgagaggaacgtgtgtccagtg

SEQ ID NO: 40952 - DNA, 21 bp, Artificial Sequence
  primer
acccatctcagagtcaggacg

SEQ ID NO: 40953 - DNA, 39 bp, Artificial Sequence
  primer
gtaaaacgacggccagtagcttccttgtcacctatgtcc

SEQ ID NO: 40954 - DNA, 21 bp, Artificial Sequence
  primer
ggcagggaggagagcaatatc

SEQ ID NO: 40955 - DNA, 38 bp, Artificial Sequence
  primer
gtaaaacgacggccagttccttaaaggctgaggattgg

SEQ ID NO: 40956 - DNA, 21 bp, Artificial Sequence
  primer
ctgtgacatagctgctcaggg

SEQ ID NO: 40957 - DNA, 21 bp, Artificial Sequence
  primer
ttatctgactgcaatcctggc

SEQ ID NO: 40958 - DNA, 22 bp, Artificial Sequence
  primer
gcacagggaagtaggtactggg

SEQ ID NO: 40959 - DNA, 38 bp, Artificial Sequence
  primer
gtaaaacgacggccagttaagtgggctccactcacctc

SEQ ID NO: 40960 - DNA, 20 bp, Artificial Sequence
  primer
gagcacccactgtgttccag

SEQ ID NO: 40961 - DNA, 21 bp, Artificial Sequence
  primer
cacaacaaggcagagtcaagc

SEQ ID NO: 40962 - DNA, 38 bp, Artificial Sequence
  primer
gtaaaacgacggccagtccacagcttcctatcacaggg

SEQ ID NO: 40963 - DNA, 21 bp, Artificial Sequence
  primer
tctctgccatctgtgtgtctg

SEQ ID NO: 40964 - DNA, 37 bp, Artificial Sequence
  primer
gtaaaacgacggccagtctgagtccaagtccagtggc

SEQ ID NO: 40965 - DNA, 21 bp, Artificial Sequence
  primer
cagaaagggaggttccagttg

SEQ ID NO: 40966 - DNA, 38 bp, Artificial Sequence
  primer
gtaaaacgacggccagtgatgaggcctgtctccacttc

SEQ ID NO: 40967 - DNA, 38 bp, Artificial Sequence
  primer
gtaaaacgacggccagtgttgttcactccagcagggac

SEQ ID NO: 40968 - DNA, 21 bp, Artificial Sequence
  primer
tccaactacattgtcaagggc

SEQ ID NO: 40969 - DNA, 21 bp, Artificial Sequence
  primer
taaagcctaagcctgccacac

SEQ ID NO: 40970 - DNA, 20 bp, Artificial Sequence
  primer
tggtaaagcatgccaaggac

SEQ ID NO: 40971 - DNA, 19 bp, Artificial Sequence
  primer
ccacagacccaccttccag

SEQ ID NO: 40972 - DNA, 22 bp, Artificial Sequence
  primer
ttccacagttcaggtagttccc

SEQ ID NO: 40973 - DNA, 38 bp, Artificial Sequence
  primer
gtaaaacgacggccagtaagtgagagaatgtgggcctg

SEQ ID NO: 40974 - DNA, 38 bp, Artificial Sequence
  primer
gtaaaacgacggccagtacagggcagggtctatgactg

SEQ ID NO: 40975 - DNA, 21 bp, Artificial Sequence
  primer
aaacatgctggtgcttccttc

SEQ ID NO: 40976 - DNA, 39 bp, Artificial Sequence
  primer
gtaaaacgacggccagtgacactaaggaccctgtcatgc

SEQ ID NO: 40977 - DNA, 37 bp, Artificial Sequence
  primer
gtaaaacgacggccagttcttgcttctgccaggagag

SEQ ID NO: 40978 - DNA, 38 bp, Artificial Sequence
  primer
gtaaaacgacggccagttgagcactcgaggaacctttc

SEQ ID NO: 40979 - DNA, 20 bp, Artificial Sequence
  primer
ggtcttgctcaaggtccctc

SEQ ID NO: 40980 - DNA, 38 bp, Artificial Sequence
  primer
gtaaaacgacggccagttcaggactcttgggaggtagg

SEQ ID NO: 40981 - DNA, 39 bp, Artificial Sequence
  primer
gtaaaacgacggccagtagctcatgacctctgtgtgatg

SEQ ID NO: 40982 - DNA, 37 bp, Artificial Sequence
  primer
gtaaaacgacggccagtctccaagcttcctcctgtcc

SEQ ID NO: 40983 - DNA, 38 bp, Artificial Sequence
  primer
gtaaaacgacggccagtgtgtctagcatgagacacggg

SEQ ID NO: 40984 - DNA, 38 bp, Artificial Sequence
  primer
gtaaaacgacggccagtggtatggcaggagctaggagc

SEQ ID NO: 40985 - DNA, 39 bp, Artificial Sequence
  primer
gtaaaacgacggccagtttaaggaatactgcaccaaccc

SEQ ID NO: 40986 - DNA, 38 bp, Artificial Sequence
  primer
gtaaaacgacggccagtctgtggcatctacgggtacag

SEQ ID NO: 40987 - DNA, 36 bp, Artificial Sequence
  primer
gtaaaacgacggccagtcttgaatcctcctgcaccc

SEQ ID NO: 40988 - DNA, 38 bp, Artificial Sequence
  primer
gtaaaacgacggccagtctgtcccgttcaggttctctc

SEQ ID NO: 40989 - DNA, 21 bp, Artificial Sequence
  primer
aaacaggcttccagctttgac

SEQ ID NO: 40990 - DNA, 38 bp, Artificial Sequence
  primer
gtaaaacgacggccagtggagtggcctctggttatgtc

SEQ ID NO: 40991 - DNA, 21 bp, Artificial Sequence
  primer
tcgtctgtctccctagttccc

SEQ ID NO: 40992 - DNA, 20 bp, Artificial Sequence
  primer
cccaggtaatttcctcccag

SEQ ID NO: 40993 - DNA, 21 bp, Artificial Sequence
  primer
ggattaaaggcacccagtgtc

SEQ ID NO: 40994 - DNA, 21 bp, Artificial Sequence
  primer
cagggcagagaggaactgaac

SEQ ID NO: 40995 - DNA, 37 bp, Artificial Sequence
  primer
gtaaaacgacggccagtccatgtctccaggttccaag

SEQ ID NO: 40996 - DNA, 21 bp, Artificial Sequence
  primer
cccagcatttcctcatttgta

SEQ ID NO: 40997 - DNA, 21 bp, Artificial Sequence
  primer
tgaagctgatgggtgagtgtc

SEQ ID NO: 40998 - DNA, 20 bp, Artificial Sequence
  primer
gaaatgagccgtgctctcac

SEQ ID NO: 40999 - DNA, 21 bp, Artificial Sequence
  primer
gatcaggtcctttatgggcag

SEQ ID NO: 41000 - DNA, 20 bp, Artificial Sequence
  primer
gaaatgagccgtgctctcac

SEQ ID NO: 41001 - DNA, 21 bp, Artificial Sequence
  primer
gatcaggtcctttatgggcag

SEQ ID NO: 41002 - DNA, 38 bp, Artificial Sequence
  primer
gtaaaacgacggccagtctttgaatcccacctctgtcc

SEQ ID NO: 41003 - DNA, 20 bp, Artificial Sequence
  primer
gaaatgagccgtgctctcac

SEQ ID NO: 41004 - DNA, 21 bp, Artificial Sequence
  primer
gatcaggtcctttatgggcag

SEQ ID NO: 41005 - DNA, 38 bp, Artificial Sequence
  primer
gtaaaacgacggccagtgctgcacagtgacagacaagg

SEQ ID NO: 41006 - DNA, 38 bp, Artificial Sequence
  primer
gtaaaacgacggccagtgaaggtgaggcctctgagtct

SEQ ID NO: 41007 - DNA, 38 bp, Artificial Sequence
  primer
gtaaaacgacggccagtgtgacaacagaggaaccaagc

SEQ ID NO: 41008 - DNA, 37 bp, Artificial Sequence
  primer
gtaaaacgacggccagtggtagggcatgggtaggatg

SEQ ID NO: 41009 - DNA, 21 bp, Artificial Sequence
  primer
caacgtggacagatggtgaac

SEQ ID NO: 41010 - DNA, 37 bp, Artificial Sequence
  primer
gtaaaacgacggccagtaacctggagagcctgaggtg

SEQ ID NO: 41011 - DNA, 38 bp, Artificial Sequence
  primer
gtaaaacgacggccagtctgggagcagccaacagtatc

SEQ ID NO: 41012 - DNA, 38 bp, Artificial Sequence
  primer
gtaaaacgacggccagtgaggctccgtttgtatgatcc

SEQ ID NO: 41013 - DNA, 38 bp, Artificial Sequence
  primer
gtaaaacgacggccagtttgacctaccaaaggtcaccc

SEQ ID NO: 41014 - DNA, 38 bp, Artificial Sequence
  primer
gtaaaacgacggccagtccctcactagaggtctgaggc

SEQ ID NO: 41015 - DNA, 21 bp, Artificial Sequence
  primer
gaagccacaagaagtccaacc

SEQ ID NO: 41016 - DNA, 38 bp, Artificial Sequence
  primer
gtaaaacgacggccagtatcttctggaccaacgctcag

SEQ ID NO: 41017 - DNA, 37 bp, Artificial Sequence
  primer
gtaaaacgacggccagtcagagatggctgtttggagg

SEQ ID NO: 41018 - DNA, 21 bp, Artificial Sequence
  primer
ctaagtcccttccagccttcc

SEQ ID NO: 41019 - DNA, 19 bp, Artificial Sequence
  primer
acccagacagggacagtgg

SEQ ID NO: 41020 - DNA, 37 bp, Artificial Sequence
  primer
gtaaaacgacggccagtggagcttctagggcttcctg

SEQ ID NO: 41021 - DNA, 38 bp, Artificial Sequence
  primer
gtaaaacgacggccagtaagcctactactggcctggtg

SEQ ID NO: 41022 - DNA, 38 bp, Artificial Sequence
  primer
gtaaaacgacggccagttcccaaatcaattcgtgtcag

SEQ ID NO: 41023 - DNA, 21 bp, Artificial Sequence
  primer
gacctcccgagctacactgtc

SEQ ID NO: 41024 - DNA, 21 bp, Artificial Sequence
  primer
actgagtatggttaagggcgg

SEQ ID NO: 41025 - DNA, 38 bp, Artificial Sequence
  primer
gtaaaacgacggccagtctccttctcatggcatttgtg

SEQ ID NO: 41026 - DNA, 38 bp, Artificial Sequence
  primer
gtaaaacgacggccagtacaccacactctcgctttgag

SEQ ID NO: 41027 - DNA, 38 bp, Artificial Sequence
  primer
gtaaaacgacggccagtcgggtggaaatcctacctatg

SEQ ID NO: 41028 - DNA, 38 bp, Artificial Sequence
  primer
gtaaaacgacggccagtgagctccagacccatttcttg

SEQ ID NO: 41029 - DNA, 21 bp, Artificial Sequence
  primer
ccagtccatttccaggagttc

SEQ ID NO: 41030 - DNA, 20 bp, Artificial Sequence
  primer
tatccactagcacaagcccg

SEQ ID NO: 41031 - DNA, 21 bp, Artificial Sequence
  primer
gaggaaacgcaacagaaatcc

SEQ ID NO: 41032 - DNA, 21 bp, Artificial Sequence
  primer
tattcttcatttcgcctggtg

SEQ ID NO: 41033 - DNA, 21 bp, Artificial Sequence
  primer
attcattcctgcatgactccc

SEQ ID NO: 41034 - DNA, 21 bp, Artificial Sequence
  primer
ctagaggaaggcatccaaacg

SEQ ID NO: 41035 - DNA, 20 bp, Artificial Sequence
  primer
tatccattagcacaagcccg

SEQ ID NO: 41036 - DNA, 38 bp, Artificial Sequence
  primer
gtaaaacgacggccagtacagaaatccgtgagtggatg

SEQ ID NO: 41037 - DNA, 21 bp, Artificial Sequence
  primer
tgggaggagcttccaaattat

SEQ ID NO: 41038 - DNA, 21 bp, Artificial Sequence
  primer
tctctgaatgttcctggtccc

SEQ ID NO: 41039 - DNA, 22 bp, Artificial Sequence
  primer
ttcccagaagagtaacagtggg

SEQ ID NO: 41040 - DNA, 21 bp, Artificial Sequence
  primer
ctattccgacatcctccaaca

SEQ ID NO: 41041 - DNA, 39 bp, Artificial Sequence
  primer
gtaaaacgacggccagtggcctttctctacaccctgaag

SEQ ID NO: 41042 - DNA, 21 bp, Artificial Sequence
  primer
cctctacccagtaccgtcagc

SEQ ID NO: 41043 - DNA, 38 bp, Artificial Sequence
  primer
gtaaaacgacggccagtggagtctcaacaggaagggac

SEQ ID NO: 41044 - DNA, 38 bp, Artificial Sequence
  primer
gtaaaacgacggccagtcaccaaggtaatcaggtgacg

SEQ ID NO: 41045 - DNA, 37 bp, Artificial Sequence
  primer
gtaaaacgacggccagtcctcaaatgcctgactgagc

SEQ ID NO: 41046 - DNA, 21 bp, Artificial Sequence
  primer
aatctgggacttccctaaccc

SEQ ID NO: 41047 - DNA, 38 bp, Artificial Sequence
  primer
gtaaaacgacggccagtgtgcctgatagtccagtcagc

SEQ ID NO: 41048 - DNA, 20 bp, Artificial Sequence
  primer
ccctgaacatgaaggagctg

SEQ ID NO: 41049 - DNA, 20 bp, Artificial Sequence
  primer
aacaaagtcgccgtcaagtg

SEQ ID NO: 41050 - DNA, 21 bp, Artificial Sequence
  primer
tccttccctgtctcacacctc

SEQ ID NO: 41051 - DNA, 38 bp, Artificial Sequence
  primer
gtaaaacgacggccagtcttggatgggtagggtttgag

SEQ ID NO: 41052 - DNA, 37 bp, Artificial Sequence
  primer
gtaaaacgacggccagtaggccctgagagagaaggtg

SEQ ID NO: 41053 - DNA, 20 bp, Artificial Sequence
  primer
ctgagaggctgctgggtagg

SEQ ID NO: 41054 - DNA, 21 bp, Artificial Sequence
  primer
atgctatgagagggaagcgag

SEQ ID NO: 41055 - DNA, 20 bp, Artificial Sequence
  primer
agagcgagactccgtctcaa

SEQ ID NO: 41056 - DNA, 22 bp, Artificial Sequence
  primer
tggcagtagataattgccatcc

SEQ ID NO: 41057 - DNA, 24 bp, Artificial Sequence
  primer
cagacattatctggaacactgaat

SEQ ID NO: 41058 - DNA, 36 bp, Artificial Sequence
  primer
gtaaaacgacggccagtttccatctttcccgcaatg

SEQ ID NO: 41059 - DNA, 39 bp, Artificial Sequence
  primer
gtaaaacgacggccagtcaaagcgggtttgatataggac

SEQ ID NO: 41060 - DNA, 38 bp, Artificial Sequence
  primer
gtaaaacgacggccagttgctgtgtggatacaacatgg

SEQ ID NO: 41061 - DNA, 42 bp, Artificial Sequence
  primer
gtaaaacgacggccagtggtgtcttaattcctttggagatca

SEQ ID NO: 41062 - DNA, 21 bp, Artificial Sequence
  primer
ctgaacaagatcgtagcagcc

SEQ ID NO: 41063 - DNA, 21 bp, Artificial Sequence
  primer
gagcaatccacttgctgactg

SEQ ID NO: 41064 - DNA, 38 bp, Artificial Sequence
  primer
gtaaaacgacggccagttctgggatcatttgacattgg

SEQ ID NO: 41065 - DNA, 38 bp, Artificial Sequence
  primer
gtaaaacgacggccagtccctcctttcaggtggaagtc

SEQ ID NO: 41066 - DNA, 21 bp, Artificial Sequence
  primer
ctgtgtagccacgtgtatccc

SEQ ID NO: 41067 - DNA, 38 bp, Artificial Sequence
  primer
gtaaaacgacggccagtgcctttccaggttcttagctg

SEQ ID NO: 41068 - DNA, 20 bp, Artificial Sequence
  primer
atctccctgctcgctctttc

SEQ ID NO: 41069 - DNA, 39 bp, Artificial Sequence
  primer
gtaaaacgacggccagttttatccgggtattgttatggc

SEQ ID NO: 41070 - DNA, 23 bp, Artificial Sequence
  primer
gggtttctgattaaggaatgagg

SEQ ID NO: 41071 - DNA, 38 bp, Artificial Sequence
  primer
gtaaaacgacggccagtttatgtccatggattgttggg

SEQ ID NO: 41072 - DNA, 21 bp, Artificial Sequence
  primer
attgcatgccatttaaccagt

SEQ ID NO: 41073 - DNA, 21 bp, Artificial Sequence
  primer
ctctctgcaatctgtcttccc

SEQ ID NO: 41074 - DNA, 21 bp, Artificial Sequence
  primer
tatccttccctccatacaccc

SEQ ID NO: 41075 - DNA, 21 bp, Artificial Sequence
  primer
tggtccagttggtcaaacaat

SEQ ID NO: 41076 - DNA, 40 bp, Artificial Sequence
  primer
gtaaaacgacggccagttgcatctttgaagatttggattg

SEQ ID NO: 41077 - DNA, 21 bp, Artificial Sequence
  primer
tctccctacccttcaaggagc

SEQ ID NO: 41078 - DNA, 21 bp, Artificial Sequence
  primer
atgcagacataatggctttgg

SEQ ID NO: 41079 - DNA, 21 bp, Artificial Sequence
  primer
tgtgaaagcgaaatgagcttg

SEQ ID NO: 41080 - DNA, 38 bp, Artificial Sequence
  primer
gtaaaacgacggccagtcacaagaacaaccacaccgac

SEQ ID NO: 41081 - DNA, 37 bp, Artificial Sequence
  primer
gtaaaacgacggccagtctccttccacactgactggc

SEQ ID NO: 41082 - DNA, 38 bp, Artificial Sequence
  primer
gtaaaacgacggccagttcaaaggcttaccactctggg

SEQ ID NO: 41083 - DNA, 40 bp, Artificial Sequence
  primer
gtaaaacgacggccagtacaattaaagaaccaacccaaca

SEQ ID NO: 41084 - DNA, 38 bp, Artificial Sequence
  primer
gtaaaacgacggccagttgtgtttcagctttggctcac

SEQ ID NO: 41085 - DNA, 41 bp, Artificial Sequence
  primer
gtaaaacgacggccagtttcttaggataatgatccattggg

SEQ ID NO: 41086 - DNA, 21 bp, Artificial Sequence
  primer
aatgcactgcctattcttgcc

SEQ ID NO: 41087 - DNA, 38 bp, Artificial Sequence
  primer
gtaaaacgacggccagttcccatcttaaacccacgttc

SEQ ID NO: 41088 - DNA, 40 bp, Artificial Sequence
  primer
gtaaaacgacggccagtgtgtggtcacacagtgaaagaaa

SEQ ID NO: 41089 - DNA, 21 bp, Artificial Sequence
  primer
aatattatggcattggaggca

SEQ ID NO: 41090 - DNA, 41 bp, Artificial Sequence
  primer
gtaaaacgacggccagtacaaactgtagggatttgtaagcc

SEQ ID NO: 41091 - DNA, 44 bp, Artificial Sequence
  primer
gtaaaacgacggccagtaagttgggatcttctatactcaatgtg

SEQ ID NO: 41092 - DNA, 43 bp, Artificial Sequence
  primer
gtaaaacgacggccagttgcagatattctcaaacatttaatcc

SEQ ID NO: 41093 - DNA, 38 bp, Artificial Sequence
  primer
gtaaaacgacggccagtgttgagtgaagcaggttggag

SEQ ID NO: 41094 - DNA, 20 bp, Artificial Sequence
  primer
cagggtttgctgtcatccac

SEQ ID NO: 41095 - DNA, 38 bp, Artificial Sequence
  primer
gtaaaacgacggccagtacactcctgcaaattccgaag

SEQ ID NO: 41096 - DNA, 24 bp, Artificial Sequence
  primer
tgttggctaaggtactttggagtc

SEQ ID NO: 41097 - DNA, 21 bp, Artificial Sequence
  primer
gagactggagggttcctcaac

SEQ ID NO: 41098 - DNA, 41 bp, Artificial Sequence
  primer
gtaaaacgacggccagtggaatagagacatttcagtccgtg

SEQ ID NO: 41099 - DNA, 25 bp, Artificial Sequence
  primer
gtagtcctacatgtgtcacaccttc

SEQ ID NO: 41100 - DNA, 38 bp, Artificial Sequence
  primer
gtaaaacgacggccagttttggccagagctcaataaga

SEQ ID NO: 41101 - DNA, 41 bp, Artificial Sequence
  primer
gtaaaacgacggccagtcacacgtagactccagtgtaatca

SEQ ID NO: 41102 - DNA, 18 bp, Artificial Sequence
  primer
caaaggcaatggcactgg

SEQ ID NO: 41103 - DNA, 20 bp, Artificial Sequence
  primer
cacttgaacccaagaggtgg

SEQ ID NO: 41104 - DNA, 20 bp, Artificial Sequence
  primer
aagaccttgccatccaaagc

SEQ ID NO: 41105 - DNA, 37 bp, Artificial Sequence
  primer
gtaaaacgacggccagtttgtttgtttggagcacagg

SEQ ID NO: 41106 - DNA, 39 bp, Artificial Sequence
  primer
gtaaaacgacggccagtaaagatttcaatatgttgcgcc

SEQ ID NO: 41107 - DNA, 21 bp, Artificial Sequence
  primer
taccatctgtaagctgcctgg

SEQ ID NO: 41108 - DNA, 20 bp, Artificial Sequence
  primer
ggaattcgccttcatttctg

SEQ ID NO: 41109 - DNA, 22 bp, Artificial Sequence
  primer
tcagtatgggtgtctgtatggg

SEQ ID NO: 41110 - DNA, 46 bp, Artificial Sequence
  primer
gtaaaacgacggccagtcattatctttaagtgtgacaactctgctt

SEQ ID NO: 41111 - DNA, 39 bp, Artificial Sequence
  primer
gtaaaacgacggccagttgatacccattggtctcttgtg

SEQ ID NO: 41112 - DNA, 20 bp, Artificial Sequence
  primer
agcgggtcagtgaaatcatc

SEQ ID NO: 41113 - DNA, 38 bp, Artificial Sequence
  primer
gtaaaacgacggccagttgggaatcgtttgaacatcac

SEQ ID NO: 41114 - DNA, 38 bp, Artificial Sequence
  primer
gtaaaacgacggccagtacataggtttcgccatgttgc

SEQ ID NO: 41115 - DNA, 21 bp, Artificial Sequence
  primer
tactcgggcgtgtactttcag

SEQ ID NO: 41116 - DNA, 41 bp, Artificial Sequence
  primer
gtaaaacgacggccagtcatattgactgcataaccatttcc

SEQ ID NO: 41117 - DNA, 21 bp, Artificial Sequence
  primer
atccttaaactccgctttccc

SEQ ID NO: 41118 - DNA, 21 bp, Artificial Sequence
  primer
catctgtgatcgctcgctaag

SEQ ID NO: 41119 - DNA, 38 bp, Artificial Sequence
  primer
gtaaaacgacggccagtaccacattccacatcaaatgg

SEQ ID NO: 41120 - DNA, 43 bp, Artificial Sequence
  primer
gtaaaacgacggccagtgttaaagttcacttctgtgttggttt

SEQ ID NO: 41121 - DNA, 40 bp, Artificial Sequence
  primer
gtaaaacgacggccagttgcttcttgaagagttcgtatcc

SEQ ID NO: 41122 - DNA, 38 bp, Artificial Sequence
  primer
gtaaaacgacggccagtgttgtctcctgcacacagtcc

SEQ ID NO: 41123 - DNA, 21 bp, Artificial Sequence
  primer
cttagggtaggagtgggaccg

SEQ ID NO: 41124 - DNA, 22 bp, Artificial Sequence
  primer
tgatttgctaacacattgctcc

SEQ ID NO: 41125 - DNA, 38 bp, Artificial Sequence
  primer
gtaaaacgacggccagtctgtgtatccagcaggcactc

SEQ ID NO: 41126 - DNA, 21 bp, Artificial Sequence
  primer
tactaggaagcccggtgtcag

SEQ ID NO: 41127 - DNA, 21 bp, Artificial Sequence
  primer
gcaggtatagcccatggtgag

SEQ ID NO: 41128 - DNA, 38 bp, Artificial Sequence
  primer
gtaaaacgacggccagtagtggaggaactcctgaatgc

SEQ ID NO: 41129 - DNA, 38 bp, Artificial Sequence
  primer
gtaaaacgacggccagtccagaagttcctggctttgac

SEQ ID NO: 41130 - DNA, 20 bp, Artificial Sequence
  primer
tctgtctctgcctccacctc

SEQ ID NO: 41131 - DNA, 38 bp, Artificial Sequence
  primer
gtaaaacgacggccagtctttgtggaaccaggaaggac

SEQ ID NO: 41132 - DNA, 38 bp, Artificial Sequence
  primer
gtaaaacgacggccagtacagatgcagtgtcttctggg

SEQ ID NO: 41133 - DNA, 39 bp, Artificial Sequence
  primer
gtaaaacgacggccagttgagcattgggacataacacag

SEQ ID NO: 41134 - DNA, 21 bp, Artificial Sequence
  primer
gggctccagagtcagaaacac

SEQ ID NO: 41135 - DNA, 38 bp, Artificial Sequence
  primer
gtaaaacgacggccagtgatgaaacaggacattgcagg

SEQ ID NO: 41136 - DNA, 39 bp, Artificial Sequence
  primer
gtaaaacgacggccagttgccactctttctttctgttgc

SEQ ID NO: 41137 - DNA, 38 bp, Artificial Sequence
  primer
gtaaaacgacggccagtggtggagttctagggtttccc

SEQ ID NO: 41138 - DNA, 21 bp, Artificial Sequence
  primer
ggacctacccataaaggtccc

SEQ ID NO: 41139 - DNA, 38 bp, Artificial Sequence
  primer
gtaaaacgacggccagtgcagggctttatgtcatttgc

SEQ ID NO: 41140 - DNA, 21 bp, Artificial Sequence
  primer
ctgcctttaataaaccagggc

SEQ ID NO: 41141 - DNA, 21 bp, Artificial Sequence
  primer
agaccactgactccctcaccc

SEQ ID NO: 41142 - DNA, 39 bp, Artificial Sequence
  primer
gtaaaacgacggccagtttgcaaactggaaatgtttgtg

SEQ ID NO: 41143 - DNA, 37 bp, Artificial Sequence
  primer
gtaaaacgacggccagtctgtctttcgttgtccctgg

SEQ ID NO: 41144 - DNA, 38 bp, Artificial Sequence
  primer
gtaaaacgacggccagtacaggcaaacgacttgtcatc

SEQ ID NO: 41145 - DNA, 38 bp, Artificial Sequence
  primer
gtaaaacgacggccagttagcttccctctgccatcttc

SEQ ID NO: 41146 - DNA, 20 bp, Artificial Sequence
  primer
tgaatccatcagaacccagg

SEQ ID NO: 41147 - DNA, 38 bp, Artificial Sequence
  primer
gtaaaacgacggccagtagggactcaagagcaaacagg

SEQ ID NO: 41148 - DNA, 21 bp, Artificial Sequence
  primer
tttagggccagtcttcgtagg

SEQ ID NO: 41149 - DNA, 37 bp, Artificial Sequence
  primer
gtaaaacgacggccagtatgatggcaatcagtgaggg

SEQ ID NO: 41150 - DNA, 21 bp, Artificial Sequence
  primer
gttcaacttcagcctgtcagc

SEQ ID NO: 41151 - DNA, 38 bp, Artificial Sequence
  primer
gtaaaacgacggccagtctttggttgagcctaagaccc

SEQ ID NO: 41152 - DNA, 22 bp, Artificial Sequence
  primer
tctgtggctaattaaagtcggg

SEQ ID NO: 41153 - DNA, 38 bp, Artificial Sequence
  primer
gtaaaacgacggccagtggcagaacagaggatggtcac

SEQ ID NO: 41154 - DNA, 38 bp, Artificial Sequence
  primer
gtaaaacgacggccagtgactgtgccactgcactaacc

SEQ ID NO: 41155 - DNA, 21 bp, Artificial Sequence
  primer
cctggaatgtggaaggaattg

SEQ ID NO: 41156 - DNA, 38 bp, Artificial Sequence
  primer
gtaaaacgacggccagtttgttccagacccgttgtatg

SEQ ID NO: 41157 - DNA, 37 bp, Artificial Sequence
  primer
gtaaaacgacggccagtggaggacaaacagaggctgg

SEQ ID NO: 41158 - DNA, 37 bp, Artificial Sequence
  primer
gtaaaacgacggccagtggcagaaagggaaagcagag

SEQ ID NO: 41159 - DNA, 38 bp, Artificial Sequence
  primer
gtaaaacgacggccagtcagccagtagagacctagccc

SEQ ID NO: 41160 - DNA, 21 bp, Artificial Sequence
  primer
ctgcaaggtgaagagagttgg

SEQ ID NO: 41161 - DNA, 38 bp, Artificial Sequence
  primer
gtaaaacgacggccagtcccacagtggatctgtgtgtc

SEQ ID NO: 41162 - DNA, 38 bp, Artificial Sequence
  primer
gtaaaacgacggccagtacatattgaatgttgcccgtg

SEQ ID NO: 41163 - DNA, 37 bp, Artificial Sequence
  primer
gtaaaacgacggccagtcaggagctgctttcatgagg

SEQ ID NO: 41164 - DNA, 20 bp, Artificial Sequence
  primer
ggacttgctttgtgacagcc

SEQ ID NO: 41165 - DNA, 21 bp, Artificial Sequence
  primer
ttcaccactatgctttctgcc

SEQ ID NO: 41166 - DNA, 38 bp, Artificial Sequence
  primer
gtaaaacgacggccagtactggtgggtagaaccaggtg

SEQ ID NO: 41167 - DNA, 37 bp, Artificial Sequence
  primer
gtaaaacgacggccagtcttaaggccactgatggcac

SEQ ID NO: 41168 - DNA, 21 bp, Artificial Sequence
  primer
gacttggctaaacttgccctg

SEQ ID NO: 41169 - DNA, 38 bp, Artificial Sequence
  primer
gtaaaacgacggccagtatctcacctggaagtgggttc

SEQ ID NO: 41170 - DNA, 38 bp, Artificial Sequence
  primer
gtaaaacgacggccagtcacaggatctaagcccacctc

SEQ ID NO: 41171 - DNA, 38 bp, Artificial Sequence
  primer
gtaaaacgacggccagtctgtggatgcagagagaggag

SEQ ID NO: 41172 - DNA, 20 bp, Artificial Sequence
  primer
gatgtggcagtggcaaagac

SEQ ID NO: 41173 - DNA, 23 bp, Artificial Sequence
  primer
tttgagctacagcttctttgcac

SEQ ID NO: 41174 - DNA, 38 bp, Artificial Sequence
  primer
gtaaaacgacggccagtttcatttaccaaacctgcctg

SEQ ID NO: 41175 - DNA, 22 bp, Artificial Sequence
  primer
cacaacccatattctggtcagg

SEQ ID NO: 41176 - DNA, 38 bp, Artificial Sequence
  primer
gtaaaacgacggccagtactcagaccaagctccactcc

SEQ ID NO: 41177 - DNA, 38 bp, Artificial Sequence
  primer
gtaaaacgacggccagtaagcctagcatggattgtgtg

SEQ ID NO: 41178 - DNA, 22 bp, Artificial Sequence
  primer
cccttagtcccatcccagtatc

SEQ ID NO: 41179 - DNA, 39 bp, Artificial Sequence
  primer
gtaaaacgacggccagtccactctgggcagttatcagtc

SEQ ID NO: 41180 - DNA, 21 bp, Artificial Sequence
  primer
atgcagggagtgatagggatg

SEQ ID NO: 41181 - DNA, 38 bp, Artificial Sequence
  primer
gtaaaacgacggccagtgatatcaatgatggtgacggg

SEQ ID NO: 41182 - DNA, 21 bp, Artificial Sequence
  primer
gaagggagcagtgcaaagaac

SEQ ID NO: 41183 - DNA, 38 bp, Artificial Sequence
  primer
gtaaaacgacggccagttttcccagagtgagatgaggc

SEQ ID NO: 41184 - DNA, 38 bp, Artificial Sequence
  primer
gtaaaacgacggccagttttaaccaggcggagaatcag

SEQ ID NO: 41185 - DNA, 38 bp, Artificial Sequence
  primer
gtaaaacgacggccagttagggtggaggattagggagg

SEQ ID NO: 41186 - DNA, 21 bp, Artificial Sequence
  primer
tcaaagcagtctacctcctgg

SEQ ID NO: 41187 - DNA, 21 bp, Artificial Sequence
  primer
gggatcagtcatcaggctacc

SEQ ID NO: 41188 - DNA, 38 bp, Artificial Sequence
  primer
gtaaaacgacggccagttcagcctacacaaacccacac

SEQ ID NO: 41189 - DNA, 38 bp, Artificial Sequence
  primer
gtaaaacgacggccagtgcagagaacaaaccctgtgtg

SEQ ID NO: 41190 - DNA, 39 bp, Artificial Sequence
  primer
gtaaaacgacggccagtttcccaagagtgtatagtcggg

SEQ ID NO: 41191 - DNA, 20 bp, Artificial Sequence
  primer
aggtaccgtgcaggaaggag

SEQ ID NO: 41192 - DNA, 38 bp, Artificial Sequence
  primer
gtaaaacgacggccagtcaacagcaacaactccactgc

SEQ ID NO: 41193 - DNA, 38 bp, Artificial Sequence
  primer
gtaaaacgacggccagtcccagaaacaccattcactcc

SEQ ID NO: 41194 - DNA, 39 bp, Artificial Sequence
  primer
gtaaaacgacggccagtttggtcttggaaatgcaataga

SEQ ID NO: 41195 - DNA, 21 bp, Artificial Sequence
  primer
ggtgttggctggatagcattc

SEQ ID NO: 41196 - DNA, 24 bp, Artificial Sequence
  primer
agttcctttcagtgactcttctcc

SEQ ID NO: 41197 - DNA, 45 bp, Artificial Sequence
  primer
gtaaaacgacggccagtcaaacatattgacttgctttacttacaa

SEQ ID NO: 41198 - DNA, 38 bp, Artificial Sequence
  primer
gtaaaacgacggccagtattggaacagcatgtgtttgg

SEQ ID NO: 41199 - DNA, 22 bp, Artificial Sequence
  primer
tgcctcttcatgttgattatcc

SEQ ID NO: 41200 - DNA, 42 bp, Artificial Sequence
  primer
gtaaaacgacggccagtttctttatcttgcataagtccatgc

SEQ ID NO: 41201 - DNA, 26 bp, Artificial Sequence
  primer
tttaacaaatgcttaaatgacagtga

SEQ ID NO: 41202 - DNA, 39 bp, Artificial Sequence
  primer
gtaaaacgacggccagttgacctattggatattgccagc

SEQ ID NO: 41203 - DNA, 38 bp, Artificial Sequence
  primer
gtaaaacgacggccagttatcgagcttgtgaatcccag

SEQ ID NO: 41204 - DNA, 23 bp, Artificial Sequence
  primer
tgtgtgtgtgcagagagacaaag

SEQ ID NO: 41205 - DNA, 26 bp, Artificial Sequence
  primer
gcaaagaaagtattgagaaacacatc

SEQ ID NO: 41206 - DNA, 43 bp, Artificial Sequence
  primer
gtaaaacgacggccagttccacaacaaagagcatatatctacc

SEQ ID NO: 41207 - DNA, 21 bp, Artificial Sequence
  primer
caggcaaacaggtaaggtcag

SEQ ID NO: 41208 - DNA, 27 bp, Artificial Sequence
  primer
gcagtttattacctgacatgctaaatg

SEQ ID NO: 41209 - DNA, 22 bp, Artificial Sequence
  primer
agcagtccaaagcattatttcc

SEQ ID NO: 41210 - DNA, 43 bp, Artificial Sequence
  primer
gtaaaacgacggccagtaaatcattgcttgtaattgtttgaag

SEQ ID NO: 41211 - DNA, 21 bp, Artificial Sequence
  primer
aatgcgactgctcaattcaag

SEQ ID NO: 41212 - DNA, 43 bp, Artificial Sequence
  primer
gtaaaacgacggccagtaaagtcctggctaatagttagtttga

SEQ ID NO: 41213 - DNA, 22 bp, Artificial Sequence
  primer
agaaacgtatgtgtgccatttg

SEQ ID NO: 41214 - DNA, 39 bp, Artificial Sequence
  primer
gtaaaacgacggccagtcccatatgttatttgaggaggg

SEQ ID NO: 41215 - DNA, 38 bp, Artificial Sequence
  primer
gtaaaacgacggccagtttgccctttggaaatgtactg

SEQ ID NO: 41216 - DNA, 39 bp, Artificial Sequence
  primer
gtaaaacgacggccagtggtctgcatggttgttgtatga

SEQ ID NO: 41217 - DNA, 30 bp, Artificial Sequence
  primer
tttgtgctctaacttgagactctattattt

SEQ ID NO: 41218 - DNA, 39 bp, Artificial Sequence
  primer
gtaaaacgacggccagtaaaggcataatgcacatttgtt

SEQ ID NO: 41219 - DNA, 44 bp, Artificial Sequence
  primer
gtaaaacgacggccagtggagaaagtgtttattgtatagcattt

SEQ ID NO: 41220 - DNA, 39 bp, Artificial Sequence
  primer
gtaaaacgacggccagtaatgctgtatccaagcatcaag

SEQ ID NO: 41221 - DNA, 23 bp, Artificial Sequence
  primer
tttcctctgcatacaatgtcaac

SEQ ID NO: 41222 - DNA, 38 bp, Artificial Sequence
  primer
gtaaaacgacggccagttgcagaacccatgtattacgg

SEQ ID NO: 41223 - DNA, 26 bp, Artificial Sequence
  primer
ttatacaccttaaattccattagcca

SEQ ID NO: 41224 - DNA, 21 bp, Artificial Sequence
  primer
aaccaattggcacctatcctc

SEQ ID NO: 41225 - DNA, 42 bp, Artificial Sequence
  primer
gtaaaacgacggccagtcccaaaggaaatatattggtagttg

SEQ ID NO: 41226 - DNA, 46 bp, Artificial Sequence
  primer
gtaaaacgacggccagtattcaaattgttaattcaagttctgataa

SEQ ID NO: 41227 - DNA, 38 bp, Artificial Sequence
  primer
gtaaaacgacggccagttatgccattcaaaggtcatcc

SEQ ID NO: 41228 - DNA, 40 bp, Artificial Sequence
  primer
gtaaaacgacggccagtgaagggtcacaattatgtggttc

SEQ ID NO: 41229 - DNA, 21 bp, Artificial Sequence
  primer
tcaggtggtctgtcttcttgg

SEQ ID NO: 41230 - DNA, 38 bp, Artificial Sequence
  primer
gtaaaacgacggccagtgctagcttaatgactggtgcc

SEQ ID NO: 41231 - DNA, 45 bp, Artificial Sequence
  primer
gtaaaacgacggccagtaatcacctttcttactttaatcatgcta

SEQ ID NO: 41232 - DNA, 30 bp, Artificial Sequence
  primer
ttaattcctagtgtatagtgagtgaacaga

SEQ ID NO: 41233 - DNA, 40 bp, Artificial Sequence
  primer
gtaaaacgacggccagttgcctcttgacttaaatgcaaac

SEQ ID NO: 41234 - DNA, 23 bp, Artificial Sequence
  primer
tcaactgcaagtagcatcacatc

SEQ ID NO: 41235 - DNA, 42 bp, Artificial Sequence
  primer
gtaaaacgacggccagtaaggcataaatgtgtttcataatgc

SEQ ID NO: 41236 - DNA, 39 bp, Artificial Sequence
  primer
gtaaaacgacggccagtcattggttagcttcctgcatct

SEQ ID NO: 41237 - DNA, 22 bp, Artificial Sequence
  primer
tccaaattgtgatcatgcaaag

SEQ ID NO: 41238 - DNA, 21 bp, Artificial Sequence
  primer
ttcagtcctgatgggtcaatg

SEQ ID NO: 41239 - DNA, 21 bp, Artificial Sequence
  primer
cagaaagtggtgcatcttcca

SEQ ID NO: 41240 - DNA, 39 bp, Artificial Sequence
  primer
gtaaaacgacggccagtttggtggtgaagcaatttaacc

SEQ ID NO: 41241 - DNA, 26 bp, Artificial Sequence
  primer
tttaagcactagtcgctgtataggtg

SEQ ID NO: 41242 - DNA, 42 bp, Artificial Sequence
  primer
gtaaaacgacggccagtttctgagattgtttcagaggaattg

SEQ ID NO: 41243 - DNA, 43 bp, Artificial Sequence
  primer
gtaaaacgacggccagtgcaagagtaagtgaattaggtcagtg

SEQ ID NO: 41244 - DNA, 39 bp, Artificial Sequence
  primer
gtaaaacgacggccagtcaaatgccaatttcctttgtaa

SEQ ID NO: 41245 - DNA, 38 bp, Artificial Sequence
  primer
gtaaaacgacggccagtaaggtttgctcatgttccaca

SEQ ID NO: 41246 - DNA, 26 bp, Artificial Sequence
  primer
tcttctttctactttgtttgaaatga

SEQ ID NO: 41247 - DNA, 38 bp, Artificial Sequence
  primer
gtaaaacgacggccagtttggaatctggttgtttgaat

SEQ ID NO: 41248 - DNA, 40 bp, Artificial Sequence
  primer
gtaaaacgacggccagttctggaggctttagatgtttcag

SEQ ID NO: 41249 - DNA, 38 bp, Artificial Sequence
  primer
gtaaaacgacggccagtctaccaggcccttggactaac

SEQ ID NO: 41250 - DNA, 21 bp, Artificial Sequence
  primer
ttgcatcccagtaattaagcg

SEQ ID NO: 41251 - DNA, 41 bp, Artificial Sequence
  primer
gtaaaacgacggccagtgccatatgcttactactcctctcc

SEQ ID NO: 41252 - DNA, 38 bp, Artificial Sequence
  primer
gtaaaacgacggccagtccaggaatgactcaggaacac

SEQ ID NO: 41253 - DNA, 24 bp, Artificial Sequence
  primer
caatattcaaattgattgtcacca

SEQ ID NO: 41254 - DNA, 23 bp, Artificial Sequence
  primer
cctagatcctttgtaccaaaccc

SEQ ID NO: 41255 - DNA, 22 bp, Artificial Sequence
  primer
tcactcaagctctgtttgttgc

SEQ ID NO: 41256 - DNA, 21 bp, Artificial Sequence
  primer
ccacaaatggtggattaggaa

SEQ ID NO: 41257 - DNA, 22 bp, Artificial Sequence
  primer
gagatgttgtgatgaacggaac

SEQ ID NO: 41258 - DNA, 27 bp, Artificial Sequence
  primer
cacattcaacattattgtgtattagca

SEQ ID NO: 41259 - DNA, 20 bp, Artificial Sequence
  primer
taagccatccttgacttgcc

SEQ ID NO: 41260 - DNA, 42 bp, Artificial Sequence
  primer
gtaaaacgacggccagtttgtgtatttattaaggctgggaaa

SEQ ID NO: 41261 - DNA, 26 bp, Artificial Sequence
  primer
caaacatatgtgaaatgagttgaagg

SEQ ID NO: 41262 - DNA, 43 bp, Artificial Sequence
  primer
gtaaaacgacggccagtcgatgtacattatgtttgagctgtag

SEQ ID NO: 41263 - DNA, 38 bp, Artificial Sequence
  primer
gtaaaacgacggccagtagcgcacacacctttagtttg

SEQ ID NO: 41264 - DNA, 22 bp, Artificial Sequence
  primer
ttacagctcctcaaatcagcct

SEQ ID NO: 41265 - DNA, 40 bp, Artificial Sequence
  primer
gtaaaacgacggccagtcccagagaaacttggtctctgac

SEQ ID NO: 41266 - DNA, 38 bp, Artificial Sequence
  primer
gtaaaacgacggccagtgaggacggcacactgacttag

SEQ ID NO: 41267 - DNA, 23 bp, Artificial Sequence
  primer
tctcctttccgtgacgtatgtag

SEQ ID NO: 41268 - DNA, 40 bp, Artificial Sequence
  primer
gtaaaacgacggccagtcagcactaatgaattctgctgag

SEQ ID NO: 41269 - DNA, 42 bp, Artificial Sequence
  primer
gtaaaacgacggccagttttccactcatgtatgtcttgtttc

SEQ ID NO: 41270 - DNA, 23 bp, Artificial Sequence
  primer
agagcaggtgctcaaactttatg

SEQ ID NO: 41271 - DNA, 21 bp, Artificial Sequence
  primer
atgcagattcatttggctcag

SEQ ID NO: 41272 - DNA, 38 bp, Artificial Sequence
  primer
gtaaaacgacggccagtttcaccatgatgacatggaac

SEQ ID NO: 41273 - DNA, 38 bp, Artificial Sequence
  primer
gtaaaacgacggccagttacccttgggaaagagcattg

SEQ ID NO: 41274 - DNA, 39 bp, Artificial Sequence
  primer
gtaaaacgacggccagtgaaggtacccagcaaatgtttc

SEQ ID NO: 41275 - DNA, 42 bp, Artificial Sequence
  primer
gtaaaacgacggccagttctggtgcaatgtaagataaatgtg

SEQ ID NO: 41276 - DNA, 38 bp, Artificial Sequence
  primer
gtaaaacgacggccagtggcatcttggaaatgaatgag

SEQ ID NO: 41277 - DNA, 41 bp, Artificial Sequence
  primer
gtaaaacgacggccagtttctaattgcattgccatatcttc

SEQ ID NO: 41278 - DNA, 42 bp, Artificial Sequence; identical to SEQ ID NO: 41269
  primer

SEQ ID NO: 41279 - DNA, 38 bp, Artificial Sequence
  primer
gtaaaacgacggccagtagcattcggagcaatgtagtg

SEQ ID NO: 41280 - DNA, 22 bp, Artificial Sequence
  primer
aatagctggcaatgaagtttgg

SEQ ID NO: 41281 - DNA, 21 bp, Artificial Sequence
  primer
aaggaacaatccaatgcatcc

SEQ ID NO: 41282 - DNA, 38 bp, Artificial Sequence
  primer
gtaaaacgacggccagtagggaatgagcatggtggtag

SEQ ID NO: 41283 - DNA, 23 bp, Artificial Sequence
  primer
actgcattcatctgactttcttt

SEQ ID NO: 41284 - DNA, 21 bp, Artificial Sequence
  primer
atttcactttggcctgtggag

SEQ ID NO: 41285 - DNA, 38 bp, Artificial Sequence
  primer
gtaaaacgacggccagttccattcgttgaacctatccc

SEQ ID NO: 41286 - DNA, 23 bp, Artificial Sequence
  primer
cacaagccttacttcacatctgg

SEQ ID NO: 41287 - DNA, 30 bp, Artificial Sequence
  primer
cattgtattcaagtcactcctaaatttcta

SEQ ID NO: 41288 - DNA, 23 bp, Artificial Sequence
  primer
tccataggcctcatagatcactc

SEQ ID NO: 41289 - DNA, 21 bp, Artificial Sequence
  primer
tattgctgctgggttccatac

SEQ ID NO: 41290 - DNA, 21 bp, Artificial Sequence
  primer
caaattcctcagcggcaatac

SEQ ID NO: 41291 - DNA, 38 bp, Artificial Sequence
  primer
gtaaaacgacggccagtttctctaatgcctcggtgttg

SEQ ID NO: 41292 - DNA, 38 bp, Artificial Sequence
  primer
gtaaaacgacggccagtagccttgcctagtgtaggagc

SEQ ID NO: 41293 - DNA, 38 bp, Artificial Sequence
  primer
gtaaaacgacggccagtcgagagctttctctttccagc

SEQ ID NO: 41294 - DNA, 24 bp, Artificial Sequence
  primer
ttgggccttgtagttaattagtgg

SEQ ID NO: 41295 - DNA, 22 bp, Artificial Sequence
  primer
tttctttagcgctgtctttgtg

SEQ ID NO: 41296 - DNA, 21 bp, Artificial Sequence
  primer
tgaaatctgcaaacgacaagg

SEQ ID NO: 41297 - DNA, 38 bp, Artificial Sequence
  primer
gtaaaacgacggccagttttgggaacatttcttctggg

SEQ ID NO: 41298 - DNA, 24 bp, Artificial Sequence
  primer
ttcctattagactcaccctttccc

SEQ ID NO: 41299 - DNA, 21 bp, Artificial Sequence
  primer
gaggagaccaagccatcattt

SEQ ID NO: 41300 - DNA, 41 bp, Artificial Sequence
  primer
gtaaaacgacggccagtttcgttgtgtaaagaaatgctgtc

SEQ ID NO: 41301 - DNA, 21 bp, Artificial Sequence
  primer
attattggctcagttccaccc

SEQ ID NO: 41302 - DNA, 38 bp, Artificial Sequence
  primer
gtaaaacgacggccagtcagcctggaaccttgagaaac

SEQ ID NO: 41303 - DNA, 38 bp, Artificial Sequence
  primer
gtaaaacgacggccagtggagacgtttatctgggcatc

SEQ ID NO: 41304 - DNA, 21 bp, Artificial Sequence
  primer
acatgcactggtatggtcagg

SEQ ID NO: 41305 - DNA, 21 bp, Artificial Sequence
  primer
gatatgccagcatcaatgcac

SEQ ID NO: 41306 - DNA, 21 bp, Artificial Sequence
  primer
acaggaaagcgatggtgaaag

SEQ ID NO: 41307 - DNA, 38 bp, Artificial Sequence
  primer
gtaaaacgacggccagtaacacatccctcacttggtcc

SEQ ID NO: 41308 - DNA, 38 bp, Artificial Sequence
  primer
gtaaaacgacggccagtttcaggattgtcaccatgacc

SEQ ID NO: 41309 - DNA, 38 bp, Artificial Sequence
  primer
gtaaaacgacggccagtgcagccactgatgtagtgtcc

SEQ ID NO: 41310 - DNA, 21 bp, Artificial Sequence
  primer
agtgatctgggcatgtgtgtc

SEQ ID NO: 41311 - DNA, 37 bp, Artificial Sequence
  primer
gtaaaacgacggccagtgaggtagacagcgacgttgg

SEQ ID NO: 41312 - DNA, 37 bp, Artificial Sequence
  primer
gtaaaacgacggccagtgtcccagtgccctttggtag

SEQ ID NO: 41313 - DNA, 20 bp, Artificial Sequence
  primer
ctggccacagcctctcatag

SEQ ID NO: 41314 - DNA, 38 bp, Artificial Sequence
  primer
gtaaaacgacggccagtgcaccgtcactgtggtatctg

SEQ ID NO: 41315 - DNA, 37 bp, Artificial Sequence
  primer
gtaaaacgacggccagtggtctgtggacctggttgag

SEQ ID NO: 41316 - DNA, 38 bp, Artificial Sequence
  primer
gtaaaacgacggccagtctgcagaatgtggtcttcgag

SEQ ID NO: 41317 - DNA, 20 bp, Artificial Sequence
  primer
acgccagatctcagaaatgc

SEQ ID NO: 41318 - DNA, 38 bp, Artificial Sequence
  primer
gtaaaacgacggccagtctgcacatcgagagcaagttc

SEQ ID NO: 41319 - DNA, 21 bp, Artificial Sequence
  primer
ttatccttcatggtcgaaggc

SEQ ID NO: 41320 - DNA, 21 bp, Artificial Sequence
  primer
attgtgaggagcatgacccag

SEQ ID NO: 41321 - DNA, 38 bp, Artificial Sequence
  primer
gtaaaacgacggccagtttcttgcctctcacagattgg

SEQ ID NO: 41322 - DNA, 37 bp, Artificial Sequence
  primer
gtaaaacgacggccagtaggctggagcagaaggtttc

SEQ ID NO: 41323 - DNA, 36 bp, Artificial Sequence
  primer
gtaaaacgacggccagtagcagggactcaggcagtg

SEQ ID NO: 41324 - DNA, 21 bp, Artificial Sequence
  primer
actggaatcacacaggccttc

SEQ ID NO: 41325 - DNA, 39 bp, Artificial Sequence
  primer
gtaaaacgacggccagttcctacgggaacaaataaatgg

SEQ ID NO: 41326 - DNA, 39 bp, Artificial Sequence
  primer
gtaaaacgacggccagtcctttctcatgaccctgtaagc

SEQ ID NO: 41327 - DNA, 38 bp, Artificial Sequence
  primer
gtaaaacgacggccagtaacattgggtgatcttagccc

SEQ ID NO: 41328 - DNA, 40 bp, Artificial Sequence
  primer
gtaaaacgacggccagttgttgtgctcagtttgagtttcc

SEQ ID NO: 41329 - DNA, 40 bp, Artificial Sequence
  primer
gtaaaacgacggccagtaaccttggtctggctaaagaaac

SEQ ID NO: 41330 - DNA, 21 bp, Artificial Sequence
  primer
ggcaaaggaagtacacatcgg

SEQ ID NO: 41331 - DNA, 23 bp, Artificial Sequence
  primer
aatcaagaccaacaaatactgcg

SEQ ID NO: 41332 - DNA, 36 bp, Artificial Sequence
  primer
gtaaaacgacggccagtctttgtggcccaatgcttc

SEQ ID NO: 41333 - DNA, 39 bp, Artificial Sequence
  primer
gtaaaacgacggccagtttgaaagtgctcttggtagctg

SEQ ID NO: 41334 - DNA, 21 bp, Artificial Sequence
  primer
caaaccattacttccttgccc

SEQ ID NO: 41335 - DNA, 38 bp, Artificial Sequence
  primer
gtaaaacgacggccagttcaggtttccagagacttggg

SEQ ID NO: 41336 - DNA, 38 bp, Artificial Sequence
  primer
gtaaaacgacggccagtagtggtgtcatttggagggtg

SEQ ID NO: 41337 - DNA, 20 bp, Artificial Sequence
  primer
gtgctgatggtctctgtccc

SEQ ID NO: 41338 - DNA, 37 bp, Artificial Sequence
  primer
gtaaaacgacggccagtctggtgactcgctcttgtgc

SEQ ID NO: 41339 - DNA, 36 bp, Artificial Sequence
  primer
gtaaaacgacggccagtaagacggtgctgatgatcg

SEQ ID NO: 41340 - DNA, 20 bp, Artificial Sequence
  primer
cgagaccaagaagcacatcc

SEQ ID NO: 41341 - DNA, 39 bp, Artificial Sequence
  primer
gtaaaacgacggccagtggccacatgttcatgtacttcc

SEQ ID NO: 41342 - DNA, 21 bp, Artificial Sequence
  primer
cgagaacttcccaggtaaggg

SEQ ID NO: 41343 - DNA, 21 bp, Artificial Sequence
  primer
actatgagtacgactgggccg

SEQ ID NO: 41344 - DNA, 35 bp, Artificial Sequence
  primer
gtaaaacgacggccagtctgctccctcacccacag

SEQ ID NO: 41345 - DNA, 38 bp, Artificial Sequence
  primer
gtaaaacgacggccagtgaaaccaagtaaggctctggg

SEQ ID NO: 41346 - DNA, 38 bp, Artificial Sequence
  primer
gtaaaacgacggccagtatgggatgaacatgctccagt

SEQ ID NO: 41347 - DNA, 24 bp, Artificial Sequence
  primer
ttccaagaaagtcagaatctttcc

SEQ ID NO: 41348 - DNA, 25 bp, Artificial Sequence
  primer
tcttagacaaagatgcctggtagac

SEQ ID NO: 41349 - DNA, 37 bp, Artificial Sequence
  primer
gtaaaacgacggccagtaggttgggaggtttggtcag

SEQ ID NO: 41350 - DNA, 40 bp, Artificial Sequence
  primer
gtaaaacgacggccagtttcattctgtcttgcctttatca

SEQ ID NO: 41351 - DNA, 44 bp, Artificial Sequence
  primer
gtaaaacgacggccagtcataatgaaagaacaaactctccattc

SEQ ID NO: 41352 - DNA, 38 bp, Artificial Sequence
  primer
gtaaaacgacggccagttgattacaggctaccgtgtgc

SEQ ID NO: 41353 - DNA, 40 bp, Artificial Sequence
  primer
gtaaaacgacggccagttggttgttaaactaaacctccca

SEQ ID NO: 41354 - DNA, 27 bp, Artificial Sequence
  primer
tgatgcctttacttaaagccttagttt

SEQ ID NO: 41355 - DNA, 41 bp, Artificial Sequence
  primer
gtaaaacgacggccagtgcaccatgattcagaatagtaagg

SEQ ID NO: 41356 - DNA, 21 bp, Artificial Sequence
  primer
ccagagggaaggagacagaag

SEQ ID NO: 41357 - DNA, 41 bp, Artificial Sequence
  primer
gtaaaacgacggccagttgtttatcttgcactagcctgttg

SEQ ID NO: 41358 - DNA, 36 bp, Artificial Sequence
  primer
gtaaaacgacggccagtcccagctgcttctgaacac

SEQ ID NO: 41359 - DNA, 18 bp, Artificial Sequence
  primer
atggtgtgaacccgggag

SEQ ID NO: 41360 - DNA, 21 bp, Artificial Sequence
  primer
tacctgcagaatacctggcac

SEQ ID NO: 41361 - DNA, 38 bp, Artificial Sequence
  primer
gtaaaacgacggccagtaatgacctaagtgcggtgatg

SEQ ID NO: 41362 - DNA, 39 bp, Artificial Sequence
  primer
gtaaaacgacggccagtgaacaacggtaaatgagccaag

SEQ ID NO: 41363 - DNA, 38 bp, Artificial Sequence
  primer
gtaaaacgacggccagttctgaagcattgctgtggaag

SEQ ID NO: 41364 - DNA, 41 bp, Artificial Sequence
  primer
gtaaaacgacggccagtttcagtaaagagtgacgtgtctgg

SEQ ID NO: 41365 - DNA, 19 bp, Artificial Sequence
  primer
tgtggtgagccaagattgc

SEQ ID NO: 41366 - DNA, 38 bp, Artificial Sequence
  primer
gtaaaacgacggccagtacctgtagacatgatgacccg

SEQ ID NO: 41367 - DNA, 37 bp, Artificial Sequence
  primer
gtaaaacgacggccagtttgtctgggctgttagccac

SEQ ID NO: 41368 - DNA, 38 bp, Artificial Sequence
  primer
gtaaaacgacggccagtattgcaaagaatgaagctggc

SEQ ID NO: 41369 - DNA, 38 bp, Artificial Sequence
  primer
gtaaaacgacggccagtgttgccacttgcttaatcgtg

SEQ ID NO: 41370 - DNA, 39 bp, Artificial Sequence; identical to SEQ ID NO: 41362
  primer

SEQ ID NO: 41371 - DNA, 21 bp, Artificial Sequence
  primer
gacgtgtacagtgggcatagg

SEQ ID NO: 41372 - DNA, 44 bp, Artificial Sequence
  primer
gtaaaacgacggccagttgtacaagatagcgtactatccatctg

SEQ ID NO: 41373 - DNA, 38 bp, Artificial Sequence
  primer
gtaaaacgacggccagtcctgatgagtgaatccctgtg

SEQ ID NO: 41374 - DNA, 38 bp, Artificial Sequence
  primer
gtaaaacgacggccagtagcttagagaatggcctgcac

SEQ ID NO: 41375 - DNA, 38 bp, Artificial Sequence
  primer
gtaaaacgacggccagtagtgtgcagagagagcaaggg

SEQ ID NO: 41376 - DNA, 21 bp, Artificial Sequence
  primer
acctaatgtgatgtggccttg

SEQ ID NO: 41377 - DNA, 36 bp, Artificial Sequence
  primer
gtaaaacgacggccagtgaacacgcccaatctcgtc

SEQ ID NO: 41378 - DNA, 38 bp, Artificial Sequence
  primer
gtaaaacgacggccagtttctgattccttggtgcagtg

SEQ ID NO: 41379 - DNA, 38 bp, Artificial Sequence
  primer
gtaaaacgacggccagtgcaccattgtgtttcaggatg

SEQ ID NO: 41380 - DNA, 21 bp, Artificial Sequence
  primer
gaattccgtgatttccgtctc

SEQ ID NO: 41381 - DNA, 38 bp, Artificial Sequence
  primer
gtaaaacgacggccagtggttgctttaagaaagggtgg

SEQ ID NO: 41382 - DNA, 38 bp, Artificial Sequence
  primer
gtaaaacgacggccagtacttctgctgagttgggagtg

SEQ ID NO: 41383 - DNA, 38 bp, Artificial Sequence
  primer
gtaaaacgacggccagtgctaggcaaactgaatagccc

SEQ ID NO: 41384 - DNA, 38 bp, Artificial Sequence
  primer
gtaaaacgacggccagtgcctgcctaattggaagaaag

SEQ ID NO: 41385 - DNA, 38 bp, Artificial Sequence
  primer
gtaaaacgacggccagtctcaacacattggagcctgag

SEQ ID NO: 41386 - DNA, 38 bp, Artificial Sequence
  primer
gtaaaacgacggccagtagctgagaagttgggaaccac

SEQ ID NO: 41387 - DNA, 38 bp, Artificial Sequence
  primer
gtaaaacgacggccagtgtaatggctgcattggatgag

SEQ ID NO: 41388 - DNA, 20 bp, Artificial Sequence
  primer
gtggagcagaatgggatgtc

SEQ ID NO: 41389 - DNA, 39 bp, Artificial Sequence
  primer
gtaaaacgacggccagtgcagtcatagcaactccagagc

SEQ ID NO: 41390 - DNA, 22 bp, Artificial Sequence
  primer
cccaccatatttatccaacagg

SEQ ID NO: 41391 - DNA, 39 bp, Artificial Sequence
  primer
gtaaaacgacggccagtgagcacttaacaaacactgggc

SEQ ID NO: 41392 - DNA, 21 bp, Artificial Sequence
  primer
gaggctacaaccatcgatttg

SEQ ID NO: 41393 - DNA, 38 bp, Artificial Sequence
  primer
gtaaaacgacggccagtcattccaacagagttccctcc

SEQ ID NO: 41394 - DNA, 40 bp, Artificial Sequence
  primer
gtaaaacgacggccagtgaaacaccattggtaactgcaag

SEQ ID NO: 41395 - DNA, 22 bp, Artificial Sequence
  primer
gagagcaccttgatctttgacc

SEQ ID NO: 41396 - DNA, 23 bp, Artificial Sequence
  primer
tgggaagagagacaaactagtgg

SEQ ID NO: 41397 - DNA, 39 bp, Artificial Sequence
  primer
gtaaaacgacggccagttttccatcacagcatcgtacag

SEQ ID NO: 41398 - DNA, 24 bp, Artificial Sequence
  primer
gaagtcttctctgggatgaaactc

SEQ ID NO: 41399 - DNA, 23 bp, Artificial Sequence
  primer
aaagttaagtgcagagccaacag

SEQ ID NO: 41400 - DNA, 40 bp, Artificial Sequence
  primer
gtaaaacgacggccagtggcccatggtactttaagtgttg

SEQ ID NO: 41401 - DNA, 39 bp, Artificial Sequence
  primer
gtaaaacgacggccagtttcactgaagatggagcagatg

SEQ ID NO: 41402 - DNA, 38 bp, Artificial Sequence
  primer
gtaaaacgacggccagtcctatcacaagcactgaaggc

SEQ ID NO: 41403 - DNA, 38 bp, Artificial Sequence
  primer
gtaaaacgacggccagttcattgatcagactcgccttg

SEQ ID NO: 41404 - DNA, 21 bp, Artificial Sequence
  primer
ccaccaggtgctgtaactgag

SEQ ID NO: 41405 - DNA, 38 bp, Artificial Sequence
  primer
gtaaaacgacggccagtggtgtgaccagccttgctatc

SEQ ID NO: 41406 - DNA, 23 bp, Artificial Sequence
  primer
acctgaattccctgacataattg

SEQ ID NO: 41407 - DNA, 38 bp, Artificial Sequence
  primer
gtaaaacgacggccagtgtggccagtttgaaagtgttg

SEQ ID NO: 41408 - DNA, 38 bp, Artificial Sequence
  primer
gtaaaacgacggccagtcggaattgtctactgctgtgc

SEQ ID NO: 41409 - DNA, 21 bp, Artificial Sequence
  primer
cctttgcaagggctacagaag

SEQ ID NO: 41410 - DNA, 21 bp, Artificial Sequence
  primer
gagctctcagggagttcttcg

SEQ ID NO: 41411 - DNA, 20 bp, Artificial Sequence
  primer
aggaaggaggaggagggaac

SEQ ID NO: 41412 - DNA, 21 bp, Artificial Sequence
  primer
caccaacacagtctgaaaggg

SEQ ID NO: 41413 - DNA, 21 bp, Artificial Sequence
  primer
cccaaacatccagggaaatag

SEQ ID NO: 41414 - DNA, 21 bp, Artificial Sequence
  primer
ggtaatgatggaaggctctgg

SEQ ID NO: 41415 - DNA, 21 bp, Artificial Sequence
  primer
agcagctctgttgttccagtg

SEQ ID NO: 41416 - DNA, 38 bp, Artificial Sequence
  primer
gtaaaacgacggccagtaccaacagcagaagtggaagg

SEQ ID NO: 41417 - DNA, 20 bp, Artificial Sequence
  primer
atccagatgcaaatggcttg

SEQ ID NO: 41418 - DNA, 40 bp, Artificial Sequence
  primer
gtaaaacgacggccagtgagctcttattctctggactggg

SEQ ID NO: 41419 - DNA, 23 bp, Artificial Sequence
  primer
tggaccactcgtatctcaaacag

SEQ ID NO: 41420 - DNA, 21 bp, Artificial Sequence
  primer
gtgggcagaagaaatccagac

SEQ ID NO: 41421 - DNA, 38 bp, Artificial Sequence
  primer
gtaaaacgacggccagttcccaacagtttcagtgatgc

SEQ ID NO: 41422 - DNA, 21 bp, Artificial Sequence
  primer
tctatgaggcagctgtcaacc

SEQ ID NO: 41423 - DNA, 38 bp, Artificial Sequence
  primer
gtaaaacgacggccagtgccaatttgaaaggactcagg

SEQ ID NO: 41424 - DNA, 21 bp, Artificial Sequence
  primer
cagtgaagcctctggacacac

SEQ ID NO: 41425 - DNA, 38 bp, Artificial Sequence
  primer
gtaaaacgacggccagtaaccgatggtcaagtttctgg

SEQ ID NO: 41426 - DNA, 38 bp, Artificial Sequence
  primer
gtaaaacgacggccagtcgtgattgaatcccagaaatg

SEQ ID NO: 41427 - DNA, 40 bp, Artificial Sequence
  primer
gtaaaacgacggccagtggcacggacatacttatgctaac

SEQ ID NO: 41428 - DNA, 38 bp, Artificial Sequence
  primer
gtaaaacgacggccagtattgcacagatactggcttgg

SEQ ID NO: 41429 - DNA, 20 bp, Artificial Sequence
  primer
atgcttcacagggtttgcac

SEQ ID NO: 41430 - DNA, 41 bp, Artificial Sequence
  primer
gtaaaacgacggccagttgtgatataataccgtcgttgctc

SEQ ID NO: 41431 - DNA, 21 bp, Artificial Sequence
  primer
gattcaaagtaggcccagagc

SEQ ID NO: 41432 - DNA, 21 bp, Artificial Sequence
  primer
ctgcatgaaccgtaagtggtc

SEQ ID NO: 41433 - DNA, 20 bp, Artificial Sequence
  primer
ctttgctggctccttctgtg

SEQ ID NO: 41434 - DNA, 21 bp, Artificial Sequence
  primer
ggccctaggttcaaattctgg

SEQ ID NO: 41435 - DNA, 40 bp, Artificial Sequence
  primer
gtaaaacgacggccagtttctgcaagaggtaggtctgttc

SEQ ID NO: 41436 - DNA, 38 bp, Artificial Sequence
  primer
gtaaaacgacggccagtggcagggagatgaagactagc

SEQ ID NO: 41437 - DNA, 21 bp, Artificial Sequence
  primer
gtccaggtcggaactatttgg

SEQ ID NO: 41438 - DNA, 38 bp, Artificial Sequence
  primer
gtaaaacgacggccagtagccagttgactctgaccctg

SEQ ID NO: 41439 - DNA, 21 bp, Artificial Sequence
  primer
agtctcaacagaccctcagcc

SEQ ID NO: 41440 - DNA, 21 bp, Artificial Sequence
  primer
tcagaatgagggaggaagctc

SEQ ID NO: 41441 - DNA, 21 bp, Artificial Sequence
  primer
agagtggatgctaccacaccc

SEQ ID NO: 41442 - DNA, 20 bp, Artificial Sequence
  primer
gagactgccactgagccaac

SEQ ID NO: 41443 - DNA, 21 bp, Artificial Sequence
  primer
agccttgggttgctacagatg

SEQ ID NO: 41444 - DNA, 20 bp, Artificial Sequence
  primer
atacaagcattgtgacgccc

SEQ ID NO: 41445 - DNA, 37 bp, Artificial Sequence
  primer
gtaaaacgacggccagtgggtcttgattccaggaagg

SEQ ID NO: 41446 - DNA, 21 bp, Artificial Sequence
  primer
acttaggtccaggatggatgg

SEQ ID NO: 41447 - DNA, 19 bp, Artificial Sequence
  primer
gcagtgaccttggattggg

SEQ ID NO: 41448 - DNA, 21 bp, Artificial Sequence
  primer
tccctcttcatttccaccttc

SEQ ID NO: 41449 - DNA, 38 bp, Artificial Sequence
  primer
gtaaaacgacggccagtgaatccctgtgagtttgaggg

SEQ ID NO: 41450 - DNA, 19 bp, Artificial Sequence
  primer
aggcaggtgcctgtaatcc

SEQ ID NO: 41451 - DNA, 38 bp, Artificial Sequence
  primer
gtaaaacgacggccagtactttctctcccaaggacacc

SEQ ID NO: 41452 - DNA, 21 bp, Artificial Sequence
  primer
ggccctttaagaaggttgagg

SEQ ID NO: 41453 - DNA, 20 bp, Artificial Sequence
  primer
aaggtgagcctgtgccttct

SEQ ID NO: 41454 - DNA, 38 bp, Artificial Sequence
  primer
gtaaaacgacggccagtgggaaattgatggatccaaag

SEQ ID NO: 41455 - DNA, 37 bp, Artificial Sequence
  primer
gtaaaacgacggccagtcactcaggacgaaggaaccc

SEQ ID NO: 41456 - DNA, 21 bp, Artificial Sequence
  primer
gaagacctcagtgtcaatggc

SEQ ID NO: 41457 - DNA, 21 bp, Artificial Sequence
  primer
atgaggacgatgcctatggac

SEQ ID NO: 41458 - DNA, 39 bp, Artificial Sequence
  primer
gtaaaacgacggccagttttcacccagctgctgactatc

SEQ ID NO: 41459 - DNA, 36 bp, Artificial Sequence
  primer
gtaaaacgacggccagtcctcctggacgtggtgaac

SEQ ID NO: 41460 - DNA, 18 bp, Artificial Sequence
  primer
agcacagggttgcgactg

SEQ ID NO: 41461 - DNA, 21 bp, Artificial Sequence
  primer
ttatgaggtggttcaggctcc

SEQ ID NO: 41462 - DNA, 21 bp, Artificial Sequence
  primer
gtcctcaccaatgtcctcctc

SEQ ID NO: 41463 - DNA, 21 bp, Artificial Sequence
  primer
ggaagaggcgagtactgttcg

SEQ ID NO: 41464 - DNA, 21 bp, Artificial Sequence
  primer
tgaggtccactaccacgtcac

SEQ ID NO: 41465 - DNA, 38 bp, Artificial Sequence
  primer
gtaaaacgacggccagtggcttcaaggaactgtgattg

SEQ ID NO: 41466 - DNA, 39 bp, Artificial Sequence
  primer
gtaaaacgacggccagtctgtgagtccttgtgacctctg

SEQ ID NO: 41467 - DNA, 38 bp, Artificial Sequence
  primer
gtaaaacgacggccagtccacctgcagacatcgtattc

SEQ ID NO: 41468 - DNA, 37 bp, Artificial Sequence
  primer
gtaaaacgacggccagtgtctcctcctgcacccaaag

SEQ ID NO: 41469 - DNA, 35 bp, Artificial Sequence
  primer
gtaaaacgacggccagtaggactggagccctggtg

SEQ ID NO: 41470 - DNA, 20 bp, Artificial Sequence
  primer
acacagaggtgggtgctgag

SEQ ID NO: 41471 - DNA, 21 bp, Artificial Sequence
  primer
ccagaagcaagtgctcctctc

SEQ ID NO: 41472 - DNA, 21 bp, Artificial Sequence
  primer
agttagtgagggagacagcgg

SEQ ID NO: 41473 - DNA, 20 bp, Artificial Sequence
  primer
gagggtccattcactctccc

SEQ ID NO: 41474 - DNA, 38 bp, Artificial Sequence
  primer
gtaaaacgacggccagtctggatgcctccaatctcttg

SEQ ID NO: 41475 - DNA, 38 bp, Artificial Sequence
  primer
gtaaaacgacggccagtctgcagggcagctagtgtatg

SEQ ID NO: 41476 - DNA, 38 bp, Artificial Sequence
  primer
gtaaaacgacggccagtgattgagtacgaggtccagcg

SEQ ID NO: 41477 - DNA, 21 bp, Artificial Sequence
  primer
gctgtggacatcctaccatcc

SEQ ID NO: 41478 - DNA, 38 bp, Artificial Sequence
  primer
gtaaaacgacggccagtgtcaatgcatcagccgtagtg

SEQ ID NO: 41479 - DNA, 20 bp, Artificial Sequence
  primer
ggtggagcagttcactcagc

SEQ ID NO: 41480 - DNA, 38 bp, Artificial Sequence
  primer
gtaaaacgacggccagtttgccactgagccttacaatg

SEQ ID NO: 41481 - DNA, 36 bp, Artificial Sequence
  primer
gtaaaacgacggccagtggttgaccaggtctaggcg

SEQ ID NO: 41482 - DNA, 19 bp, Artificial Sequence
  primer
aagatgaggcgtcgtggac

SEQ ID NO: 41483 - DNA, 19 bp, Artificial Sequence
  primer
gcccagcttctgaactccc

SEQ ID NO: 41484 - DNA, 38 bp, Artificial Sequence
  primer
gtaaaacgacggccagtgaacctcagagaaccaccctg

SEQ ID NO: 41485 - DNA, 38 bp, Artificial Sequence
  primer
gtaaaacgacggccagtggaacaggctgtggagatagg

SEQ ID NO: 41486 - DNA, 39 bp, Artificial Sequence
  primer
gtaaaacgacggccagttgatccagaagctgagacattg

SEQ ID NO: 41487 - DNA, 21 bp, Artificial Sequence
  primer
tcagtgatgcttccttcaacc

SEQ ID NO: 41488 - DNA, 38 bp, Artificial Sequence
  primer
gtaaaacgacggccagtaacttgactcctcctacgccc

SEQ ID NO: 41489 - DNA, 21 bp, Artificial Sequence
  primer
attgccttggcaaagattacc

SEQ ID NO: 41490 - DNA, 39 bp, Artificial Sequence
  primer
gtaaaacgacggccagtgggtaagagcaaacggatcaac

SEQ ID NO: 41491 - DNA, 41 bp, Artificial Sequence
  primer
gtaaaacgacggccagtcactatgttctattgaggtgtggg

SEQ ID NO: 41492 - DNA, 42 bp, Artificial Sequence
  primer
gtaaaacgacggccagtttgaatcagacttgttattatgccc

SEQ ID NO: 41493 - DNA, 43 bp, Artificial Sequence
  primer
gtaaaacgacggccagtcaatgaatactctgttaacaaatggg

SEQ ID NO: 41494 - DNA, 39 bp, Artificial Sequence
  primer
gtaaaacgacggccagttccctaatgctatcaaccaagg

SEQ ID NO: 41495 - DNA, 38 bp, Artificial Sequence
  primer
gtaaaacgacggccagttctgaaacctttcgagtgtgg

SEQ ID NO: 41496 - DNA, 39 bp, Artificial Sequence
  primer
gtaaaacgacggccagttgggttaccacatcacatcaaa

SEQ ID NO: 41497 - DNA, 21 bp, Artificial Sequence
  primer
gacaagatgagaggaaagcca

SEQ ID NO: 41498 - DNA, 42 bp, Artificial Sequence
  primer
gtaaaacgacggccagtggaattgaatattgaaaggacagag

SEQ ID NO: 41499 - DNA, 21 bp, Artificial Sequence
  primer
gacagccctttctgtgactgg

SEQ ID NO: 41500 - DNA, 39 bp, Artificial Sequence
  primer
gtaaaacgacggccagttgcagttgacattattggttgc

SEQ ID NO: 41501 - DNA, 37 bp, Artificial Sequence
  primer
gtaaaacgacggccagtccatccatctgcaaccactg

SEQ ID NO: 41502 - DNA, 40 bp, Artificial Sequence
  primer
gtaaaacgacggccagtagttacaagttaaccggtcaggc

SEQ ID NO: 41503 - DNA, 38 bp, Artificial Sequence
  primer
gtaaaacgacggccagtgttgtgggctcattccttacc

SEQ ID NO: 41504 - DNA, 38 bp, Artificial Sequence
  primer
gtaaaacgacggccagtggaggattgataagtttgggc

SEQ ID NO: 41505 - DNA, 27 bp, Artificial Sequence
  primer
ggaatgagtcttctaactacttcaggg

SEQ ID NO: 41506 - DNA, 20 bp, Artificial Sequence
  primer
gcaacaagagcaagaccctg

SEQ ID NO: 41507 - DNA, 39 bp, Artificial Sequence
  primer
gtaaaacgacggccagtggaagggatacatggtgttgtg

SEQ ID NO: 41508 - DNA, 26 bp, Artificial Sequence
  primer
tcctaattaccaaattaataggcacc

SEQ ID NO: 41509 - DNA, 42 bp, Artificial Sequence
  primer
gtaaaacgacggccagtagatgtaaactaccaacaccgattc

SEQ ID NO: 41510 - DNA, 24 bp, Artificial Sequence
  primer
tttcagtggtggttagatgcttag

SEQ ID NO: 41511 - DNA, 27 bp, Artificial Sequence
  primer
tttgtactgacttaacatggttcataa

SEQ ID NO: 41512 - DNA, 38 bp, Artificial Sequence
  primer
gtaaaacgacggccagtcgagaacttggatcacttccc

SEQ ID NO: 41513 - DNA, 25 bp, Artificial Sequence
  primer
agcccttagaaggatctagtctgtt

SEQ ID NO: 41514 - DNA, 37 bp, Artificial Sequence
  primer
gtaaaacgacggccagttttgcaaatctgattggtgc

SEQ ID NO: 41515 - DNA, 22 bp, Artificial Sequence
  primer
ggctgtgtcaggtacagtttca

SEQ ID NO: 41516 - DNA, 21 bp, Artificial Sequence
  primer
gcaacagagcaagactccatc

SEQ ID NO: 41517 - DNA, 37 bp, Artificial Sequence
  primer
gtaaaacgacggccagtaaggctggcattccagatag

SEQ ID NO: 41518 - DNA, 43 bp, Artificial Sequence
  primer
gtaaaacgacggccagtactcttagtgtctcattaaccagcag

SEQ ID NO: 41519 - DNA, 46 bp, Artificial Sequence
  primer
gtaaaacgacggccagttccatagtactttgaaaggctaataattc

SEQ ID NO: 41520 - DNA, 21 bp, Artificial Sequence
  primer
tagaggcatgggcatgattac

SEQ ID NO: 41521 - DNA, 24 bp, Artificial Sequence
  primer
tctaggcattggcttagagataca

SEQ ID NO: 41522 - DNA, 21 bp, Artificial Sequence
  primer
ttaagtgcctgctgggatagg

SEQ ID NO: 41523 - DNA, 38 bp, Artificial Sequence
  primer
gtaaaacgacggccagttgaatgattggagcaagatgg

SEQ ID NO: 41524 - DNA, 22 bp, Artificial Sequence
  primer
gcccagaaggaaatattgatgg

SEQ ID NO: 41525 - DNA, 21 bp, Artificial Sequence
  primer
aaaggcaggaaggagctaagg

SEQ ID NO: 41526 - DNA, 20 bp, Artificial Sequence
  primer
cctccataggcatgagccac

SEQ ID NO: 41527 - DNA, 45 bp, Artificial Sequence
  primer
gtaaaacgacggccagtaatgaatttattagcaaactgttcattc

SEQ ID NO: 41528 - DNA, 24 bp, Artificial Sequence
  primer
tggaactggaatttaactcaaagc

SEQ ID NO: 41529 - DNA, 26 bp, Artificial Sequence
  primer
gcagacaacttatgttaaagaacacc

SEQ ID NO: 41530 - DNA, 27 bp, Artificial Sequence
  primer
accaacatgtttgatcttatgtaattg

SEQ ID NO: 41531 - DNA, 20 bp, Artificial Sequence
  primer
gcaaggacacttccatcgtg

SEQ ID NO: 41532 - DNA, 25 bp, Artificial Sequence
  primer
aaattgtctctctgagcagtttcac

SEQ ID NO: 41533 - DNA, 21 bp, Artificial Sequence
  primer
gccacagcacctgtcctagag

SEQ ID NO: 41534 - DNA, 21 bp, Artificial Sequence
  primer
aacatccactgcttgttctgg

SEQ ID NO: 41535 - DNA, 38 bp, Artificial Sequence
  primer
gtaaaacgacggccagttagaatggatgcagggctatg

SEQ ID NO: 41536 - DNA, 38 bp, Artificial Sequence
  primer
gtaaaacgacggccagtcagtgtggaaacttgtgcctc

SEQ ID NO: 41537 - DNA, 38 bp, Artificial Sequence
  primer
gtaaaacgacggccagtaggctcttggtttagctctgg

SEQ ID NO: 41538 - DNA, 20 bp, Artificial Sequence
  primer
acaggtgataggcaccatgc

SEQ ID NO: 41539 - DNA, 38 bp, Artificial Sequence
  primer
gtaaaacgacggccagtttggactacaagagacctgcg

SEQ ID NO: 41540 - DNA, 21 bp, Artificial Sequence
  primer
gatctggctgttgcatttctg

SEQ ID NO: 41541 - DNA, 38 bp, Artificial Sequence
  primer
gtaaaacgacggccagttatgcaaagaggccagagagc

SEQ ID NO: 41542 - DNA, 38 bp, Artificial Sequence
  primer
gtaaaacgacggccagttagcctttgtgactttggcag

SEQ ID NO: 41543 - DNA, 38 bp, Artificial Sequence
  primer
gtaaaacgacggccagtgttatgtcaaagggagtgggc

SEQ ID NO: 41544 - DNA, 21 bp, Artificial Sequence
  primer
agtggaccttccttccctagc

SEQ ID NO: 41545 - DNA, 37 bp, Artificial Sequence
  primer
gtaaaacgacggccagtcctgggcttaaatagccctc

SEQ ID NO: 41546 - DNA, 38 bp, Artificial Sequence
  primer
gtaaaacgacggccagtaccatttgtaggccatgtgtc

SEQ ID NO: 41547 - DNA, 21 bp, Artificial Sequence
  primer
gcagtgtagcggttaagtccc

SEQ ID NO: 41548 - DNA, 39 bp, Artificial Sequence
  primer
gtaaaacgacggccagtgagccacttcttgccatacatc

SEQ ID NO: 41549 - DNA, 38 bp, Artificial Sequence
  primer
gtaaaacgacggccagtgtgtggacttgtctttgcagc

SEQ ID NO: 41550 - DNA, 38 bp, Artificial Sequence
  primer
gtaaaacgacggccagtagtctgtctgggtgatcctgg

SEQ ID NO: 41551 - DNA, 18 bp, Artificial Sequence
  primer
gcaattgtgggttggctg

SEQ ID NO: 41552 - DNA, 38 bp, Artificial Sequence
  primer
gtaaaacgacggccagtgtcctttgttcgctctgttcc

SEQ ID NO: 41553 - DNA, 38 bp, Artificial Sequence
  primer
gtaaaacgacggccagttccttcagtagctggaggtgc

SEQ ID NO: 41554 - DNA, 37 bp, Artificial Sequence
  primer
gtaaaacgacggccagtcttgtgcccaagcatttcag

SEQ ID NO: 41555 - DNA, 38 bp, Artificial Sequence
  primer
gtaaaacgacggccagttctcattctgccacacctagc

SEQ ID NO: 41556 - DNA, 38 bp, Artificial Sequence
  primer
gtaaaacgacggccagtgcacagatgacgatgagatgg

SEQ ID NO: 41557 - DNA, 21 bp, Artificial Sequence
  primer
gccctgaacagataaagcagg

SEQ ID NO: 41558 - DNA, 37 bp, Artificial Sequence
  primer
gtaaaacgacggccagtgatccgcctacctcagcttc

SEQ ID NO: 41559 - DNA, 44 bp, Artificial Sequence
  primer
gtaaaacgacggccagttcaagcagatcaaagagtttatatgag

SEQ ID NO: 41560 - DNA, 20 bp, Artificial Sequence
  primer
acatgctgaacagcttggtg

SEQ ID NO: 41561 - DNA, 38 bp, Artificial Sequence
  primer
gtaaaacgacggccagttctctgatttctccggtttcc

SEQ ID NO: 41562 - DNA, 38 bp, Artificial Sequence
  primer
gtaaaacgacggccagtggtcttcagaccactgcactc

SEQ ID NO: 41563 - DNA, 38 bp, Artificial Sequence
  primer
gtaaaacgacggccagtagggcagatactctggtcagg

SEQ ID NO: 41564 - DNA, 38 bp, Artificial Sequence
  primer
gtaaaacgacggccagtgagacacacggaagtgaggtc

SEQ ID NO: 41565 - DNA, 38 bp, Artificial Sequence
  primer
gtaaaacgacggccagtctgagaagtgctggctaaggc

SEQ ID NO: 41566 - DNA, 21 bp, Artificial Sequence
  primer
gtgctcagacagaaagccctg

SEQ ID NO: 41567 - DNA, 38 bp, Artificial Sequence
  primer
gtaaaacgacggccagtgagaagtttcactcccgaccc

SEQ ID NO: 41568 - DNA, 37 bp, Artificial Sequence
  primer
gtaaaacgacggccagtaggaagagacgtggctccag

SEQ ID NO: 41569 - DNA, 19 bp, Artificial Sequence
  primer
ccgggacttcctgtacgtg

SEQ ID NO: 41570 - DNA, 40 bp, Artificial Sequence
  primer
gtaaaacgacggccagttgaaagttctgtcccttaccttg

SEQ ID NO: 41571 - DNA, 21 bp, Artificial Sequence
  primer
cggaagggttacatccaagac

SEQ ID NO: 41572 - DNA, 38 bp, Artificial Sequence
  primer
gtaaaacgacggccagtaccgtcctacaggtgatggag

SEQ ID NO: 41573 - DNA, 20 bp, Artificial Sequence
  primer
attctcgttcctctcatcgg

SEQ ID NO: 41574 - DNA, 21 bp, Artificial Sequence
  primer
ctgatcccaatgaagggagag

SEQ ID NO: 41575 - DNA, 38 bp, Artificial Sequence
  primer
gtaaaacgacggccagttgacccaaaggtaacaaacgg

SEQ ID NO: 41576 - DNA, 21 bp, Artificial Sequence
  primer
aaagaggaggaggagtcaggg

SEQ ID NO: 41577 - DNA, 21 bp, Artificial Sequence
  primer
ttgtgtgccttgtgttgacat

SEQ ID NO: 41578 - DNA, 20 bp, Artificial Sequence
  primer
ctcacccaggctctgacatc

SEQ ID NO: 41579 - DNA, 39 bp, Artificial Sequence
  primer
gtaaaacgacggccagtgcaggtagggtcagtgtgattc

SEQ ID NO: 41580 - DNA, 39 bp, Artificial Sequence
  primer
gtaaaacgacggccagttccatcttcgtgtcttacatcc

SEQ ID NO: 41581 - DNA, 38 bp, Artificial Sequence
  primer
gtaaaacgacggccagtaatagaggagagaggagcccg

SEQ ID NO: 41582 - DNA, 37 bp, Artificial Sequence
  primer
gtaaaacgacggccagtataaatgcacagctgcctgc

SEQ ID NO: 41583 - DNA, 21 bp, Artificial Sequence
  primer
gtgccttgtgttgacatgtgg

SEQ ID NO: 41584 - DNA, 21 bp, Artificial Sequence
  primer
atctcatgcctgggtgacttc

SEQ ID NO: 41585 - DNA, 39 bp, Artificial Sequence
  primer
gtaaaacgacggccagtcagcgggtcctctctatctagc

SEQ ID NO: 41586 - DNA, 37 bp, Artificial Sequence
  primer
gtaaaacgacggccagtgacccggtcacagtgaagtg

SEQ ID NO: 41587 - DNA, 38 bp, Artificial Sequence
  primer
gtaaaacgacggccagtgataagggcccagtgtttcac

SEQ ID NO: 41588 - DNA, 38 bp, Artificial Sequence
  primer
gtaaaacgacggccagtgccaaagcaggataaatgcac

SEQ ID NO: 41589 - DNA, 21 bp, Artificial Sequence
  primer
atgtttaagagcgggcatgag

SEQ ID NO: 41590 - DNA, 21 bp, Artificial Sequence
  primer
agtgtctcacctccatcctcc

SEQ ID NO: 41591 - DNA, 36 bp, Artificial Sequence
  primer
gtaaaacgacggccagtcagctagcttctggcctgg

SEQ ID NO: 41592 - DNA, 37 bp, Artificial Sequence
  primer
gtaaaacgacggccagtaggagaaggtggcttgtgtg

SEQ ID NO: 41593 - DNA, 38 bp, Artificial Sequence
  primer
gtaaaacgacggccagtgggcagtgtctcatctccaac

SEQ ID NO: 41594 - DNA, 35 bp, Artificial Sequence
  primer
gtaaaacgacggccagtctgggctccctgaacctc

SEQ ID NO: 41595 - DNA, 18 bp, Artificial Sequence
  primer
tcagcctccaggcctctc

SEQ ID NO: 41596 - DNA, 38 bp, Artificial Sequence
  primer
gtaaaacgacggccagtcagtgattgtccctctcttgg

SEQ ID NO: 41597 - DNA, 36 bp, Artificial Sequence
  primer
gtaaaacgacggccagtctgcctgagaaggattggc

SEQ ID NO: 41598 - DNA, 38 bp, Artificial Sequence
  primer
gtaaaacgacggccagtagaactgagcatcacagaggc

SEQ ID NO: 41599 - DNA, 36 bp, Artificial Sequence
  primer
gtaaaacgacggccagtgcccacttcccttctcctc

SEQ ID NO: 41600 - DNA, 38 bp, Artificial Sequence
  primer
gtaaaacgacggccagtagagaacgggaacacagcaac

SEQ ID NO: 41601 - DNA, 38 bp, Artificial Sequence
  primer
gtaaaacgacggccagtgattcttgaacccacagcagc

SEQ ID NO: 41602 - DNA, 21 bp, Artificial Sequence
  primer
tagccttccgctaaagctctg

SEQ ID NO: 41603 - DNA, 21 bp, Artificial Sequence
  primer
gacccatctgtcagcacacac

SEQ ID NO: 41604 - DNA, 38 bp, Artificial Sequence
  primer
gtaaaacgacggccagtcccagcaggtgaatttaaagg

SEQ ID NO: 41605 - DNA, 38 bp, Artificial Sequence
  primer
gtaaaacgacggccagtgggcctctcctactcaaatgg

SEQ ID NO: 41606 - DNA, 36 bp, Artificial Sequence
  primer
gtaaaacgacggccagtttaagggctgggtctgtgc

SEQ ID NO: 41607 - DNA, 22 bp, Artificial Sequence
  primer
cacaaatgacatcttcaccagc

SEQ ID NO: 41608 - DNA, 21 bp, Artificial Sequence
  primer
gctcaaatctccagaacagcc

SEQ ID NO: 41609 - DNA, 38 bp, Artificial Sequence
  primer
gtaaaacgacggccagtgaagcaagaagacttgcctgg

SEQ ID NO: 41610 - DNA, 21 bp, Artificial Sequence
  primer
ggttcccagatgggtacattg

SEQ ID NO: 41611 - DNA, 21 bp, Artificial Sequence
  primer
gacctgtggctctctcacttg

SEQ ID NO: 41612 - DNA, 36 bp, Artificial Sequence
  primer
gtaaaacgacggccagtcctacttgggctgaggagc

SEQ ID NO: 41613 - DNA, 21 bp, Artificial Sequence
  primer
agagccagtgtcagaatcgtg

SEQ ID NO: 41614 - DNA, 21 bp, Artificial Sequence
  primer
caaggaaacaagtgtgggatg

SEQ ID NO: 41615 - DNA, 38 bp, Artificial Sequence
  primer
gtaaaacgacggccagttagagcctgtacccttcaccg

SEQ ID NO: 41616 - DNA, 21 bp, Artificial Sequence
  primer
ggtgagcatctttccagtttg

SEQ ID NO: 41617 - DNA, 39 bp, Artificial Sequence
  primer
gtaaaacgacggccagtttgctacagttgtggattgtgc

SEQ ID NO: 41618 - DNA, 22 bp, Artificial Sequence
  primer
tgcatgaatgtgtcattgtctg

SEQ ID NO: 41619 - DNA, 21 bp, Artificial Sequence
  primer
tgtctctgtcccaacaggaag

SEQ ID NO: 41620 - DNA, 22 bp, Artificial Sequence
  primer
caaggtgtatcactgcaacagg

SEQ ID NO: 41621 - DNA, 22 bp, Artificial Sequence
  primer
ggagtgagaatatagccctccg

SEQ ID NO: 41622 - DNA, 38 bp, Artificial Sequence
  primer
gtaaaacgacggccagtacaatggaattgggattggag

SEQ ID NO: 41623 - DNA, 20 bp, Artificial Sequence
  primer
agcatggcaatgttagcagg

SEQ ID NO: 41624 - DNA, 21 bp, Artificial Sequence
  primer
tcagctggttcttacagcagc

SEQ ID NO: 41625 - DNA, 18 bp, Artificial Sequence
  primer
ctcttgcctgccatgacc

SEQ ID NO: 41626 - DNA, 38 bp, Artificial Sequence
  primer
gtaaaacgacggccagtgaaatggtcgggtaaaccttg

SEQ ID NO: 41627 - DNA, 21 bp, Artificial Sequence
  primer
ccgtgttccatataaccaggc

SEQ ID NO: 41628 - DNA, 22 bp, Artificial Sequence
  primer
ttcctgccaagagtttggtaac

SEQ ID NO: 41629 - DNA, 21 bp, Artificial Sequence
  primer
ttgagctgcaagaggattctg

SEQ ID NO: 41630 - DNA, 42 bp, Artificial Sequence
  primer
gtaaaacgacggccagtcatcagctctttgttggatgtttac

SEQ ID NO: 41631 - DNA, 44 bp, Artificial Sequence
  primer
gtaaaacgacggccagtgaagagatttctatctttcttggattg

SEQ ID NO: 41632 - DNA, 21 bp, Artificial Sequence
  primer
aaaccctgccttctgctattg

SEQ ID NO: 41633 - DNA, 19 bp, Artificial Sequence
  primer
tggacagaagctggtggtg

SEQ ID NO: 41634 - DNA, 38 bp, Artificial Sequence
  primer
gtaaaacgacggccagtgaaccatgaaggatcagggac

SEQ ID NO: 41635 - DNA, 21 bp, Artificial Sequence
  primer
tggttctgttgtcagtttccg

SEQ ID NO: 41636 - DNA, 38 bp, Artificial Sequence
  primer
gtaaaacgacggccagtccacaactggcttatgcactg

SEQ ID NO: 41637 - DNA, 21 bp, Artificial Sequence
  primer
tgatgcagactcctatccagg

SEQ ID NO: 41638 - DNA, 21 bp, Artificial Sequence
  primer
gtggagggactttgctttcag

SEQ ID NO: 41639 - DNA, 39 bp, Artificial Sequence
  primer
gtaaaacgacggccagttggtagagattctcgagcgatg

SEQ ID NO: 41640 - DNA, 38 bp, Artificial Sequence
  primer
gtaaaacgacggccagtgcaagaggattggagatgagg

SEQ ID NO: 41641 - DNA, 38 bp, Artificial Sequence
  primer
gtaaaacgacggccagtaagttaatgcggaagccacac

SEQ ID NO: 41642 - DNA, 24 bp, Artificial Sequence
  primer
tcggttctaggaaacacacttctc

SEQ ID NO: 41643 - DNA, 38 bp, Artificial Sequence
  primer
gtaaaacgacggccagttcgagaggcacaggtttagtg

SEQ ID NO: 41644 - DNA, 40 bp, Artificial Sequence
  primer
gtaaaacgacggccagtggatgaatttgcaaagttggtta

SEQ ID NO: 41645 - DNA, 42 bp, Artificial Sequence
  primer
gtaaaacgacggccagtaaattcataaagggagctgaatttg

SEQ ID NO: 41646 - DNA, 21 bp, Artificial Sequence
  primer
gcaggtcttgaattcctggtc

SEQ ID NO: 41647 - DNA, 39 bp, Artificial Sequence
  primer
gtaaaacgacggccagtcaagcatatgactttgcactgg

SEQ ID NO: 41648 - DNA, 22 bp, Artificial Sequence
  primer
tgggtggattacatcaatttcc

SEQ ID NO: 41649 - DNA, 21 bp, Artificial Sequence
  primer
tcctccttgatcttggaaatg

SEQ ID NO: 41650 - DNA, 40 bp, Artificial Sequence
  primer
gtaaaacgacggccagtgcatcttgaacagtcttccaaac

SEQ ID NO: 41651 - DNA, 40 bp, Artificial Sequence
  primer
gtaaaacgacggccagttgaggagcctaatttggttatga

SEQ ID NO: 41652 - DNA, 29 bp, Artificial Sequence
  primer
aatcatttagagtacttgcatggttattt

SEQ ID NO: 41653 - DNA, 38 bp, Artificial Sequence
  primer
gtaaaacgacggccagttagcctttggattccttggag

SEQ ID NO: 41654 - DNA, 23 bp, Artificial Sequence
  primer
ccactgaattgtaaagggtgaat

SEQ ID NO: 41655 - DNA, 22 bp, Artificial Sequence
  primer
ttatggagcatcatccaaatcc

SEQ ID NO: 41656 - DNA, 21 bp, Artificial Sequence
  primer
caccaagagccagatcaaatc

SEQ ID NO: 41657 - DNA, 24 bp, Artificial Sequence
  primer
aaataagatgaagcaaatatggca

SEQ ID NO: 41658 - DNA, 21 bp, Artificial Sequence
  primer
gtcctgcctggcaacactaag

SEQ ID NO: 41659 - DNA, 38 bp, Artificial Sequence
  primer
gtaaaacgacggccagtacaaagcagcagacatggaag

SEQ ID NO: 41660 - DNA, 39 bp, Artificial Sequence
  primer
gtaaaacgacggccagttggtagatactggctctgtggg

SEQ ID NO: 41661 - DNA, 38 bp, Artificial Sequence
  primer
gtaaaacgacggccagtaacatgcactatcaggcttgg

SEQ ID NO: 41662 - DNA, 38 bp, Artificial Sequence
  primer
gtaaaacgacggccagtgagaatgagtgaactgcagcc

SEQ ID NO: 41663 - DNA, 37 bp, Artificial Sequence
  primer
gtaaaacgacggccagtgccctgggagctttactctc

SEQ ID NO: 41664 - DNA, 37 bp, Artificial Sequence
  primer
gtaaaacgacggccagtctacccttgactgtgggcag

SEQ ID NO: 41665 - DNA, 35 bp, Artificial Sequence
  primer
gtaaaacgacggccagtgggcggagggttgaaatc

SEQ ID NO: 41666 - DNA, 18 bp, Artificial Sequence
  primer
gagagtcaggccgaaggg

SEQ ID NO: 41667 - DNA, 37 bp, Artificial Sequence
  primer
gtaaaacgacggccagtaagcttggctgtgagccttc

SEQ ID NO: 41668 - DNA, 38 bp, Artificial Sequence
  primer
gtaaaacgacggccagtcggtacagtagtctgcgcttg

SEQ ID NO: 41669 - DNA, 38 bp, Artificial Sequence
  primer
gtaaaacgacggccagttttactgtggtgggacttggg

SEQ ID NO: 41670 - DNA, 39 bp, Artificial Sequence
  primer
gtaaaacgacggccagttttgaggaacctccaaagtgtt

SEQ ID NO: 41671 - DNA, 41 bp, Artificial Sequence
  primer
gtaaaacgacggccagtgctcaacttctcagtttgatttcc

SEQ ID NO: 41672 - DNA, 21 bp, Artificial Sequence
  primer
ctcttgaggctcattctttgc

SEQ ID NO: 41673 - DNA, 18 bp, Artificial Sequence
  primer
cctctctgcctccgcatc

SEQ ID NO: 41674 - DNA, 21 bp, Artificial Sequence
  primer
tcagcttgaggtgcaacagag

SEQ ID NO: 41675 - DNA, 41 bp, Artificial Sequence
  primer
gtaaaacgacggccagtgcagaaagtattcgtgtttcctct

SEQ ID NO: 41676 - DNA, 37 bp, Artificial Sequence
  primer
gtaaaacgacggccagtgtgttctccgccgtttattg

SEQ ID NO: 41677 - DNA, 38 bp, Artificial Sequence
  primer
gtaaaacgacggccagtctcaaggatatgaggtgcctg

SEQ ID NO: 41678 - DNA, 36 bp, Artificial Sequence
  primer
gtaaaacgacggccagtggtgttagtctggcagccc

SEQ ID NO: 41679 - DNA, 18 bp, Artificial Sequence
  primer
gctgagatcgcgtcattg

SEQ ID NO: 41680 - DNA, 21 bp, Artificial Sequence
  primer
taggagtcggctttatgtggg

SEQ ID NO: 41681 - DNA, 38 bp, Artificial Sequence
  primer
gtaaaacgacggccagtgtggaaatggattctgtctgc

SEQ ID NO: 41682 - DNA, 38 bp, Artificial Sequence
  primer
gtaaaacgacggccagtcagaactttgctgaccactgc

SEQ ID NO: 41683 - DNA, 41 bp, Artificial Sequence
  primer
gtaaaacgacggccagttgagcttcacttatggagctaaag

SEQ ID NO: 41684 - DNA, 20 bp, Artificial Sequence
  primer
ctacaccatgctgcctctgc

SEQ ID NO: 41685 - DNA, 25 bp, Artificial Sequence
  primer
aagtagctacataatgccttcttgg

SEQ ID NO: 41686 - DNA, 42 bp, Artificial Sequence
  primer
gtaaaacgacggccagtgctcttgtgttgttatttatgtgga

SEQ ID NO: 41687 - DNA, 38 bp, Artificial Sequence
  primer
gtaaaacgacggccagttccaaggccattctgctttat

SEQ ID NO: 41688 - DNA, 21 bp, Artificial Sequence
  primer
aagacggaagctgcattatgg

SEQ ID NO: 41689 - DNA, 24 bp, Artificial Sequence
  primer
gcatttaggtaaacagaatccctt

SEQ ID NO: 41690 - DNA, 40 bp, Artificial Sequence
  primer
gtaaaacgacggccagttcatttgacaggaatcaccagtt

SEQ ID NO: 41691 - DNA, 40 bp, Artificial Sequence
  primer
gtaaaacgacggccagtttcatgaagtagagcattctggg

SEQ ID NO: 41692 - DNA, 40 bp, Artificial Sequence
  primer
gtaaaacgacggccagttgcctactcttcagagatgcttg

SEQ ID NO: 41693 - DNA, 19 bp, Artificial Sequence
  primer
aaacagccgaaggtcatgg

SEQ ID NO: 41694 - DNA, 39 bp, Artificial Sequence
  primer
gtaaaacgacggccagtgtgaagagcagcttgtagttgg

SEQ ID NO: 41695 - DNA, 39 bp, Artificial Sequence
  primer
gtaaaacgacggccagtgatggtaattgtcgaaatggga

SEQ ID NO: 41696 - DNA, 29 bp, Artificial Sequence
  primer
ggaatcatagcaatttactttctacactg

SEQ ID NO: 41697 - DNA, 41 bp, Artificial Sequence
  primer
gtaaaacgacggccagttgttgtcaaccaagaagatgatga

SEQ ID NO: 41698 - DNA, 38 bp, Artificial Sequence
  primer
gtaaaacgacggccagtggacctcaagctgttcttgtg

SEQ ID NO: 41699 - DNA, 41 bp, Artificial Sequence
  primer
gtaaaacgacggccagtcatggaatgctttctgtctagatg

SEQ ID NO: 41700 - DNA, 25 bp, Artificial Sequence
  primer
aaacttaatgatttattagggcaca

SEQ ID NO: 41701 - DNA, 36 bp, Artificial Sequence; identical to SEQ ID NO: 41678
  primer

SEQ ID NO: 41702 - DNA, 37 bp, Artificial Sequence
  primer
gtaaaacgacggccagtctgggaaccaggagaccaac

SEQ ID NO: 41703 - DNA, 38 bp, Artificial Sequence
  primer
gtaaaacgacggccagtggcacacacgagttgtctttc

SEQ ID NO: 41704 - DNA, 38 bp, Artificial Sequence
  primer
gtaaaacgacggccagtccttcatgtagcctctcccag

SEQ ID NO: 41705 - DNA, 37 bp, Artificial Sequence
  primer
gtaaaacgacggccagttccttgggaagcttcaaacc

SEQ ID NO: 41706 - DNA, 38 bp, Artificial Sequence
  primer
gtaaaacgacggccagtatccttggcagatggtcaaac

SEQ ID NO: 41707 - DNA, 38 bp, Artificial Sequence
  primer
gtaaaacgacggccagtgtccatacagggcagatcctc

SEQ ID NO: 41708 - DNA, 19 bp, Artificial Sequence
  primer
ctcttgagctcagccagcc

SEQ ID NO: 41709 - DNA, 37 bp, Artificial Sequence
  primer
gtaaaacgacggccagtgctgagagggaggagcacac

SEQ ID NO: 41710 - DNA, 38 bp, Artificial Sequence
  primer
gtaaaacgacggccagtgatccttaccctgactgctgg

SEQ ID NO: 41711 - DNA, 21 bp, Artificial Sequence
  primer
ccagtgagctgttgtcctgtg

SEQ ID NO: 41712 - DNA, 37 bp, Artificial Sequence
  primer
gtaaaacgacggccagtctgccctgagtgatgagtgg

SEQ ID NO: 41713 - DNA, 38 bp, Artificial Sequence
  primer
gtaaaacgacggccagttcaggttcaagggtgataggg

SEQ ID NO: 41714 - DNA, 38 bp, Artificial Sequence
  primer
gtaaaacgacggccagtctgctagacgataaggtgggc

SEQ ID NO: 41715 - DNA, 38 bp, Artificial Sequence
  primer
gtaaaacgacggccagtagctcagaagcaatggaggtg

SEQ ID NO: 41716 - DNA, 37 bp, Artificial Sequence
  primer
gtaaaacgacggccagtcttccctcaaactgcagcac

SEQ ID NO: 41717 - DNA, 21 bp, Artificial Sequence
  primer
caagagctcccttgtgctgag

SEQ ID NO: 41718 - DNA, 21 bp, Artificial Sequence
  primer
ttgggcctttggatgttctac

SEQ ID NO: 41719 - DNA, 20 bp, Artificial Sequence
  primer
catgtcactgggctcctgtc

SEQ ID NO: 41720 - DNA, 21 bp, Artificial Sequence
  primer
gacctctctggctatcgttgg

SEQ ID NO: 41721 - DNA, 21 bp, Artificial Sequence
  primer
ggagaagctccctgacgtatg

SEQ ID NO: 41722 - DNA, 21 bp, Artificial Sequence
  primer
ggccgtttataactcagtggc

SEQ ID NO: 41723 - DNA, 20 bp, Artificial Sequence
  primer
aggtcttcagcgacatcagc

SEQ ID NO: 41724 - DNA, 38 bp, Artificial Sequence
  primer
gtaaaacgacggccagtttacgaagctgacctgtccac

SEQ ID NO: 41725 - DNA, 21 bp, Artificial Sequence
  primer
cggatatcaagtctgtcgcac

SEQ ID NO: 41726 - DNA, 21 bp, Artificial Sequence
  primer
atggtgacttggcttctctgg

SEQ ID NO: 41727 - DNA, 21 bp, Artificial Sequence
  primer
agcctactccacggcatacac

SEQ ID NO: 41728 - DNA, 38 bp, Artificial Sequence
  primer
gtaaaacgacggccagttaacttcacccacctgtagcg

SEQ ID NO: 41729 - DNA, 38 bp, Artificial Sequence
  primer
gtaaaacgacggccagtcactgccaccatagtgtttgg

SEQ ID NO: 41730 - DNA, 24 bp, Artificial Sequence
  primer
cttcagttaagggcttagtcttcc

SEQ ID NO: 41731 - DNA, 23 bp, Artificial Sequence
  primer
tgtgtgtcaaaccctacattcat

SEQ ID NO: 41732 - DNA, 42 bp, Artificial Sequence
  primer
gtaaaacgacggccagtgaataggaaagtgttatgccctaaa

SEQ ID NO: 41733 - DNA, 22 bp, Artificial Sequence
  primer
tgcctaattcattcaccaaagg

SEQ ID NO: 41734 - DNA, 38 bp, Artificial Sequence
  primer
gtaaaacgacggccagtgaggtggtccaggatgtcaac

SEQ ID NO: 41735 - DNA, 21 bp, Artificial Sequence
  primer
agtgtctaaagagggccttgc

SEQ ID NO: 41736 - DNA, 38 bp, Artificial Sequence
  primer
gtaaaacgacggccagtggtcgttatgtgggtaccgtt

SEQ ID NO: 41737 - DNA, 38 bp, Artificial Sequence
  primer
gtaaaacgacggccagttgtgccacacattgaactctg

SEQ ID NO: 41738 - DNA, 40 bp, Artificial Sequence
  primer
gtaaaacgacggccagttttgtgcctaacctactgtgctc

SEQ ID NO: 41739 - DNA, 38 bp, Artificial Sequence
  primer
gtaaaacgacggccagtagcctcagccttcctaagacc

SEQ ID NO: 41740 - DNA, 19 bp, Artificial Sequence
  primer
atggcatgaacctgggaag

SEQ ID NO: 41741 - DNA, 38 bp, Artificial Sequence
  primer
gtaaaacgacggccagtgggtgagaaatacctgttggc

SEQ ID NO: 41742 - DNA, 38 bp, Artificial Sequence
  primer
gtaaaacgacggccagtaacccagccttatccatttcc

SEQ ID NO: 41743 - DNA, 20 bp, Artificial Sequence
  primer
ttgaatctgggaggcagaga

SEQ ID NO: 41744 - DNA, 36 bp, Artificial Sequence
  primer
gtaaaacgacggccagtatcccgttcgctgtcagtc

SEQ ID NO: 41745 - DNA, 21 bp, Artificial Sequence
  primer
ccttgtttcaactccaaagcc

SEQ ID NO: 41746 - DNA, 38 bp, Artificial Sequence
  primer
gtaaaacgacggccagtgcgagaagtacatcctgaccc

SEQ ID NO: 41747 - DNA, 38 bp, Artificial Sequence
  primer
gtaaaacgacggccagttgcataatcttccactttggc

SEQ ID NO: 41748 - DNA, 38 bp, Artificial Sequence
  primer
gtaaaacgacggccagtagttgaaaggacgatgtgctg

SEQ ID NO: 41749 - DNA, 43 bp, Artificial Sequence
  primer
gtaaaacgacggccagtaagaatgtgaatccacctgtttctac

SEQ ID NO: 41750 - DNA, 39 bp, Artificial Sequence
  primer
gtaaaacgacggccagttgagtgaaatatgctctggtgc

SEQ ID NO: 41751 - DNA, 21 bp, Artificial Sequence
  primer
ggttgataaaggaggcttggg

SEQ ID NO: 41752 - DNA, 21 bp, Artificial Sequence
  primer
aggaactagcatgttccagcg

SEQ ID NO: 41753 - DNA, 21 bp, Artificial Sequence
  primer
ctgagagtgaatgctgccttg

SEQ ID NO: 41754 - DNA, 21 bp, Artificial Sequence
  primer
ctagcgaggtgtgtggaattg

SEQ ID NO: 41755 - DNA, 22 bp, Artificial Sequence
  primer
ccctgactgaaggcagtagttg

SEQ ID NO: 41756 - DNA, 38 bp, Artificial Sequence
  primer
gtaaaacgacggccagtaccgagaggaactacagcgtc

SEQ ID NO: 41757 - DNA, 20 bp, Artificial Sequence
  primer
gggtgatgtcacctgcctac

SEQ ID NO: 41758 - DNA, 38 bp, Artificial Sequence
  primer
gtaaaacgacggccagttaagatagcagcgtgtgtccg

SEQ ID NO: 41759 - DNA, 37 bp, Artificial Sequence
  primer
gtaaaacgacggccagtaattgtggtcacaagcgagg

SEQ ID NO: 41760 - DNA, 38 bp, Artificial Sequence
  primer
gtaaaacgacggccagttgtgttctcaggatgcctgtc

SEQ ID NO: 41761 - DNA, 38 bp, Artificial Sequence
  primer
gtaaaacgacggccagttcatcatgttgtgtgtctgcc

SEQ ID NO: 41762 - DNA, 38 bp, Artificial Sequence
  primer
gtaaaacgacggccagtactgttacgcttggcaagatg

SEQ ID NO: 41763 - DNA, 38 bp, Artificial Sequence
  primer
gtaaaacgacggccagtctggtctagagggtggtggac

SEQ ID NO: 41764 - DNA, 20 bp, Artificial Sequence
  primer
ccagacgagagggacatctg

SEQ ID NO: 41765 - DNA, 19 bp, Artificial Sequence
  primer
gacaaggagcctgagctgg

SEQ ID NO: 41766 - DNA, 35 bp, Artificial Sequence
  primer
gtaaaacgacggccagtaggaggaggaggacacgg

SEQ ID NO: 41767 - DNA, 36 bp, Artificial Sequence
  primer
gtaaaacgacggccagtagtcaggtgaaggccctgg

SEQ ID NO: 41768 - DNA, 37 bp, Artificial Sequence
  primer
gtaaaacgacggccagtggacagctgttggttcatgc

SEQ ID NO: 41769 - DNA, 21 bp, Artificial Sequence
  primer
ttcatacgtgttccctgttgg

SEQ ID NO: 41770 - DNA, 38 bp, Artificial Sequence
  primer
gtaaaacgacggccagtaagcagagtgctacctccagc

SEQ ID NO: 41771 - DNA, 38 bp, Artificial Sequence
  primer
gtaaaacgacggccagtcctgtgtgtgtccttgaccag

SEQ ID NO: 41772 - DNA, 38 bp, Artificial Sequence
  primer
gtaaaacgacggccagtagagaattgtgccgtcttgtg

SEQ ID NO: 41773 - DNA, 21 bp, Artificial Sequence
  primer
ttgtaacaaagtttcctccgc

SEQ ID NO: 41774 - DNA, 21 bp, Artificial Sequence
  primer
cttcgtgtgtctggatgaagg

SEQ ID NO: 41775 - DNA, 38 bp, Artificial Sequence
  primer
gtaaaacgacggccagtgttcctctggagacggctagg

SEQ ID NO: 41776 - DNA, 21 bp, Artificial Sequence
  primer
gacaagatctgcgtggtcatc

SEQ ID NO: 41777 - DNA, 21 bp, Artificial Sequence
  primer
gacctcgtgaggtaggactgg

SEQ ID NO: 41778 - DNA, 38 bp, Artificial Sequence
  primer
gtaaaacgacggccagtgtgctgttcactgctagcctc

SEQ ID NO: 41779 - DNA, 21 bp, Artificial Sequence
  primer
cgagtgcttcgcacagataag

SEQ ID NO: 41780 - DNA, 21 bp, Artificial Sequence
  primer
ggatgtgaacagctgtggaag

SEQ ID NO: 41781 - DNA, 21 bp, Artificial Sequence
  primer
tgggcatggtagtatctgtgg

SEQ ID NO: 41782 - DNA, 38 bp, Artificial Sequence
  primer
gtaaaacgacggccagttgtggaaaggaagctctagcc

SEQ ID NO: 41783 - DNA, 38 bp, Artificial Sequence
  primer
gtaaaacgacggccagtttaagtggtgcctatcctggg

SEQ ID NO: 41784 - DNA, 38 bp, Artificial Sequence
  primer
gtaaaacgacggccagttggaggtgctaaggagtaggg

SEQ ID NO: 41785 - DNA, 38 bp, Artificial Sequence
  primer
gtaaaacgacggccagttccttgctgctgtgtaactgg

SEQ ID NO: 41786 - DNA, 21 bp, Artificial Sequence
  primer
gaagaaccaggagtgggtgtg

SEQ ID NO: 41787 - DNA, 22 bp, Artificial Sequence
  primer
tcgcctgcttcttacatattcc

SEQ ID NO: 41788 - DNA, 21 bp, Artificial Sequence
  primer
aggagcctcatgccttaactg

SEQ ID NO: 41789 - DNA, 18 bp, Artificial Sequence
  primer
gttcatggtgacgaggcg

SEQ ID NO: 41790 - DNA, 21 bp, Artificial Sequence
  primer
ccctcatcttctcctgctgag

SEQ ID NO: 41791 - DNA, 38 bp, Artificial Sequence
  primer
gtaaaacgacggccagtcccattatacgcttgaccagg

SEQ ID NO: 41792 - DNA, 21 bp, Artificial Sequence
  primer
catgcttcatcatcctcctcc

SEQ ID NO: 41793 - DNA, 38 bp, Artificial Sequence
  primer
gtaaaacgacggccagtgcaattcttcctacagtgggc

SEQ ID NO: 41794 - DNA, 22 bp, Artificial Sequence
  primer
aacgtaatctggatcttgctgc

SEQ ID NO: 41795 - DNA, 38 bp, Artificial Sequence
  primer
gtaaaacgacggccagtacccggttaggttaggagcag

SEQ ID NO: 41796 - DNA, 38 bp, Artificial Sequence
  primer
gtaaaacgacggccagtggagctcctggttagcaagtg

SEQ ID NO: 41797 - DNA, 38 bp, Artificial Sequence
  primer
gtaaaacgacggccagttaaactgcagaggtcaccacc

SEQ ID NO: 41798 - DNA, 21 bp, Artificial Sequence
  primer
gatctgaagcctgggtctgtc

SEQ ID NO: 41799 - DNA, 21 bp, Artificial Sequence
  primer
gagacacgaagcagcagtgag

SEQ ID NO: 41800 - DNA, 21 bp, Artificial Sequence
  primer
gttgccctaacaccctgtctg

SEQ ID NO: 41801 - DNA, 38 bp, Artificial Sequence
  primer
gtaaaacgacggccagttggtggttgaatgaaaccttg

SEQ ID NO: 41802 - DNA, 38 bp, Artificial Sequence
  primer
gtaaaacgacggccagtccgaggaagtaggaaccacag

SEQ ID NO: 41803 - DNA, 21 bp, Artificial Sequence
  primer
actacaggcatgtgaaccacg

SEQ ID NO: 41804 - DNA, 38 bp, Artificial Sequence
  primer
gtaaaacgacggccagtaagtctccgttgtgagctgag

SEQ ID NO: 41805 - DNA, 38 bp, Artificial Sequence
  primer
gtaaaacgacggccagtgaggtgggagatcttcaaagg

SEQ ID NO: 41806 - DNA, 38 bp, Artificial Sequence
  primer
gtaaaacgacggccagtccacacacccactttctgttg

SEQ ID NO: 41807 - DNA, 21 bp, Artificial Sequence
  primer
gagacttcttggaggacaggg

SEQ ID NO: 41808 - DNA, 38 bp, Artificial Sequence
  primer
gtaaaacgacggccagtcggaagtaagttcaaggctgg

SEQ ID NO: 41809 - DNA, 37 bp, Artificial Sequence
  primer
gtaaaacgacggccagtgaatgagatgcaggctgagg

SEQ ID NO: 41810 - DNA, 21 bp, Artificial Sequence
  primer
gggtaggatgaaatgtttggg

SEQ ID NO: 41811 - DNA, 21 bp, Artificial Sequence
  primer
ttccttcagttggaatgggac

SEQ ID NO: 41812 - DNA, 38 bp, Artificial Sequence
  primer
gtaaaacgacggccagtgggtccagtttagggaggaag

SEQ ID NO: 41813 - DNA, 35 bp, Artificial Sequence
  primer
gtaaaacgacggccagtccagagagcgggttggag

SEQ ID NO: 41814 - DNA, 21 bp, Artificial Sequence
  primer
gttagctggccatagtggtgg

SEQ ID NO: 41815 - DNA, 38 bp, Artificial Sequence
  primer
gtaaaacgacggccagtctcaaatggtggtgtgaggac

SEQ ID NO: 41816 - DNA, 37 bp, Artificial Sequence
  primer
gtaaaacgacggccagtattggaggtgccagcatagc

SEQ ID NO: 41817 - DNA, 35 bp, Artificial Sequence
  primer
gtaaaacgacggccagtagtgcgactccaccctcc

SEQ ID NO: 41818 - DNA, 18 bp, Artificial Sequence
  primer
cctctgcagccgggtaag

SEQ ID NO: 41819 - DNA, 38 bp, Artificial Sequence
  primer
gtaaaacgacggccagtgacgctctggatgtgagagtg

SEQ ID NO: 41820 - DNA, 21 bp, Artificial Sequence
  primer
ggagggagtcctaactgtgcc

SEQ ID NO: 41821 - DNA, 21 bp, Artificial Sequence
  primer
acagagggttgaagaaagcca

SEQ ID NO: 41822 - DNA, 39 bp, Artificial Sequence
  primer
gtaaaacgacggccagttgataccacactcaggcatttc

SEQ ID NO: 41823 - DNA, 22 bp, Artificial Sequence
  primer
tgcccttatggtactgttctga

SEQ ID NO: 41824 - DNA, 36 bp, Artificial Sequence
  primer
gtaaaacgacggccagtgacctcgtgatccacccac

SEQ ID NO: 41825 - DNA, 21 bp, Artificial Sequence
  primer
agtccacgagggaagagaagg

SEQ ID NO: 41826 - DNA, 21 bp, Artificial Sequence
  primer
cgcctgatccttctgtctctc

SEQ ID NO: 41827 - DNA, 24 bp, Artificial Sequence
  primer
tttgtttgacttcagagcatcttg

SEQ ID NO: 41828 - DNA, 38 bp, Artificial Sequence
  primer
gtaaaacgacggccagtcaactcagcagtgatggcttc

SEQ ID NO: 41829 - DNA, 38 bp, Artificial Sequence
  primer
gtaaaacgacggccagtccttggtgactgagagttcca

SEQ ID NO: 41830 - DNA, 40 bp, Artificial Sequence
  primer
gtaaaacgacggccagtaacatcatcatccatgtgtttcc

SEQ ID NO: 41831 - DNA, 39 bp, Artificial Sequence
  primer
gtaaaacgacggccagtttgcaaataggcaggtaatgaa

SEQ ID NO: 41832 - DNA, 25 bp, Artificial Sequence
  primer
ttgctactgtccagttgaataaagg

SEQ ID NO: 41833 - DNA, 43 bp, Artificial Sequence
  primer
gtaaaacgacggccagtttacacctagcttctgagagtcactg

SEQ ID NO: 41834 - DNA, 21 bp, Artificial Sequence
  primer
tgtgagcatggcataatcctc

SEQ ID NO: 41835 - DNA, 35 bp, Artificial Sequence; identical to SEQ ID NO: 9148
  primer

SEQ ID NO: 41836 - DNA, 41 bp, Artificial Sequence
  primer
gtaaaacgacggccagttgttgagggtaattgcagtttatg

SEQ ID NO: 41837 - DNA, 21 bp, Artificial Sequence
  primer
tgtgtctgctttatcttgggc

SEQ ID NO: 41838 - DNA, 21 bp, Artificial Sequence
  primer
cctattacgggatggaagctc

SEQ ID NO: 41839 - DNA, 38 bp, Artificial Sequence
  primer
gtaaaacgacggccagtgattcttgactccaagggctc

SEQ ID NO: 41840 - DNA, 37 bp, Artificial Sequence
  primer
gtaaaacgacggccagtctggcctcaagtaatctgcc

SEQ ID NO: 41841 - DNA, 41 bp, Artificial Sequence
  primer
gtaaaacgacggccagtttgaaacctgtaagaacactgctt

SEQ ID NO: 41842 - DNA, 18 bp, Artificial Sequence
  primer
tccagactcgggagggtc

SEQ ID NO: 41843 - DNA, 38 bp, Artificial Sequence
  primer
gtaaaacgacggccagttagtgatccctccttcctccc

SEQ ID NO: 41844 - DNA, 21 bp, Artificial Sequence
  primer
cctttggtacggcattcaaac

SEQ ID NO: 41845 - DNA, 38 bp, Artificial Sequence
  primer
gtaaaacgacggccagtgacttggagttgcagggtagg

SEQ ID NO: 41846 - DNA, 19 bp, Artificial Sequence
  primer
ccatcctgggcaacaagag

SEQ ID NO: 41847 - DNA, 38 bp, Artificial Sequence
  primer
gtaaaacgacggccagttccaggaacaaaccctatctg

SEQ ID NO: 41848 - DNA, 21 bp, Artificial Sequence
  primer
gtacctgaatgctcgcagctc

SEQ ID NO: 41849 - DNA, 38 bp, Artificial Sequence
  primer
gtaaaacgacggccagtgtgcttcaagatggtgactgc

SEQ ID NO: 41850 - DNA, 38 bp, Artificial Sequence
  primer
gtaaaacgacggccagtcctacaagggtgtcctgatgg

SEQ ID NO: 41851 - DNA, 39 bp, Artificial Sequence
  primer
gtaaaacgacggccagttcatgtaagtcaggagggaagg

SEQ ID NO: 41852 - DNA, 38 bp, Artificial Sequence
  primer
gtaaaacgacggccagtaagcctcgatgtttgcttctg

SEQ ID NO: 41853 - DNA, 38 bp, Artificial Sequence
  primer
gtaaaacgacggccagtacctggttggcctttagtgag

SEQ ID NO: 41854 - DNA, 21 bp, Artificial Sequence
  primer
tcttgctgctcatctttctcc

SEQ ID NO: 41855 - DNA, 38 bp, Artificial Sequence
  primer
gtaaaacgacggccagtctggaaactggtgggagaatg

SEQ ID NO: 41856 - DNA, 37 bp, Artificial Sequence
  primer
gtaaaacgacggccagtacctgatgctcagagcccac

SEQ ID NO: 41857 - DNA, 21 bp, Artificial Sequence
  primer
ggcctttgcctcctactactg

SEQ ID NO: 41858 - DNA, 21 bp, Artificial Sequence
  primer
gtggactcaggagacctggac

SEQ ID NO: 41859 - DNA, 21 bp, Artificial Sequence
  primer
tgtctcaaatgctgcttctgg

SEQ ID NO: 41860 - DNA, 37 bp, Artificial Sequence
  primer
gtaaaacgacggccagtggaatgccttcttcctgctc

SEQ ID NO: 41861 - DNA, 38 bp, Artificial Sequence
  primer
gtaaaacgacggccagttctgatcgttggtagtgtggg

SEQ ID NO: 41862 - DNA, 38 bp, Artificial Sequence
  primer
gtaaaacgacggccagtgtcccagcataggatggactc

SEQ ID NO: 41863 - DNA, 21 bp, Artificial Sequence
  primer
accctctgaggcttctctgtg

SEQ ID NO: 41864 - DNA, 21 bp, Artificial Sequence
  primer
ttcaagtgccttctgtgtgtg

SEQ ID NO: 41865 - DNA, 21 bp, Artificial Sequence
  primer
gggatgaagctagaaggcaga

SEQ ID NO: 41866 - DNA, 21 bp, Artificial Sequence
  primer
ccaaacctattggtgggctac

SEQ ID NO: 41867 - DNA, 40 bp, Artificial Sequence
  primer
gtaaaacgacggccagtttctcctatcttccattcaaggc

SEQ ID NO: 41868 - DNA, 21 bp, Artificial Sequence
  primer
gactcaacagcgatgccctac

SEQ ID NO: 41869 - DNA, 38 bp, Artificial Sequence
  primer
gtaaaacgacggccagtcagatgatccctgaaattccc

SEQ ID NO: 41870 - DNA, 37 bp, Artificial Sequence
  primer
gtaaaacgacggccagtgtacaggtgcttggctctgc

SEQ ID NO: 41871 - DNA, 38 bp, Artificial Sequence
  primer
gtaaaacgacggccagtcatgggctaagtggacctttc

SEQ ID NO: 41872 - DNA, 38 bp, Artificial Sequence
  primer
gtaaaacgacggccagtttgagaggctgttggtgtcag

SEQ ID NO: 41873 - DNA, 36 bp, Artificial Sequence
  primer
gtaaaacgacggccagtgccaagtggtgaggacctg

SEQ ID NO: 41874 - DNA, 24 bp, Artificial Sequence
  primer
gctatgaaagaaaggtgagtaggg

SEQ ID NO: 41875 - DNA, 21 bp, Artificial Sequence
  primer
tttgggaatgccctcttgtag

SEQ ID NO: 41876 - DNA, 43 bp, Artificial Sequence
  primer
gtaaaacgacggccagtgggaattgtatgttaatgttcagtgg

SEQ ID NO: 41877 - DNA, 25 bp, Artificial Sequence
  primer
gcctcttgatatatagtgccaagtc

SEQ ID NO: 41878 - DNA, 38 bp, Artificial Sequence
  primer
gtaaaacgacggccagtcgagagctaagtttgggttgc

SEQ ID NO: 41879 - DNA, 40 bp, Artificial Sequence
  primer
gtaaaacgacggccagttgccttctttgtgattgactctc

SEQ ID NO: 41880 - DNA, 38 bp, Artificial Sequence
  primer
gtaaaacgacggccagtcagtaggccatcttctgtggg

SEQ ID NO: 41881 - DNA, 38 bp, Artificial Sequence
  primer
gtaaaacgacggccagttgttgacatgagcacaaatgg

SEQ ID NO: 41882 - DNA, 38 bp, Artificial Sequence
  primer
gtaaaacgacggccagttgcagcaagtctaccgtaagc

SEQ ID NO: 41883 - DNA, 21 bp, Artificial Sequence
  primer
cagaatggtcagaggtagggc

SEQ ID NO: 41884 - DNA, 39 bp, Artificial Sequence
  primer
gtaaaacgacggccagtggatagagcatgtggtgtgatg

SEQ ID NO: 41885 - DNA, 39 bp, Artificial Sequence
  primer
gtaaaacgacggccagtggcaccaagcaaacaataaatg

SEQ ID NO: 41886 - DNA, 38 bp, Artificial Sequence
  primer
gtaaaacgacggccagttagctgagtgattcagggagg

SEQ ID NO: 41887 - DNA, 38 bp, Artificial Sequence
  primer
gtaaaacgacggccagtgctcgagacaaatgctgagtg

SEQ ID NO: 41888 - DNA, 38 bp, Artificial Sequence
  primer
gtaaaacgacggccagttatgccacagattgcctgttg

SEQ ID NO: 41889 - DNA, 38 bp, Artificial Sequence
  primer
gtaaaacgacggccagtgacagactttacccggtgagc

SEQ ID NO: 41890 - DNA, 21 bp, Artificial Sequence
  primer
aacctttcagaaacagccgtg

SEQ ID NO: 41891 - DNA, 35 bp, Artificial Sequence
  primer
gtaaaacgacggccagtcacagcccacctgtgtcc

SEQ ID NO: 41892 - DNA, 38 bp, Artificial Sequence
  primer
gtaaaacgacggccagtggaccagagaggctatcttcc

SEQ ID NO: 41893 - DNA, 39 bp, Artificial Sequence
  primer
gtaaaacgacggccagtggaggctaagtgatgtgcattc

SEQ ID NO: 41894 - DNA, 37 bp, Artificial Sequence
  primer
gtaaaacgacggccagtggtggcagaaataccacctg

SEQ ID NO: 41895 - DNA, 38 bp, Artificial Sequence
  primer
gtaaaacgacggccagttttgggtgcaaattccatttc

SEQ ID NO: 41896 - DNA, 39 bp, Artificial Sequence
  primer
gtaaaacgacggccagtctgtgactccaaactgtgttgc

SEQ ID NO: 41897 - DNA, 20 bp, Artificial Sequence
  primer
accagtttctcctccttggg

SEQ ID NO: 41898 - DNA, 21 bp, Artificial Sequence
  primer
actgctaagcgtctggaggag

SEQ ID NO: 41899 - DNA, 26 bp, Artificial Sequence
  primer
tttcctttaataatgtaagcactggg

SEQ ID NO: 41900 - DNA, 38 bp, Artificial Sequence
  primer
gtaaaacgacggccagtgacatctgccagagaaggtcc

SEQ ID NO: 41901 - DNA, 21 bp, Artificial Sequence
  primer
ggtctttgaccggcttattcc

SEQ ID NO: 41902 - DNA, 21 bp, Artificial Sequence
  primer
tgcattgagatgtgtccaagg

SEQ ID NO: 41903 - DNA, 20 bp, Artificial Sequence
  primer
cgcccaagagctggaataag

SEQ ID NO: 41904 - DNA, 38 bp, Artificial Sequence
  primer
gtaaaacgacggccagtttgcaatgaagtgtgtggatg

SEQ ID NO: 41905 - DNA, 38 bp, Artificial Sequence
  primer
gtaaaacgacggccagtctcataagcctttgcagggtc

SEQ ID NO: 41906 - DNA, 39 bp, Artificial Sequence
  primer
gtaaaacgacggccagtgactcctggacaaaggatatgg

SEQ ID NO: 41907 - DNA, 42 bp, Artificial Sequence
  primer
gtaaaacgacggccagttctaaactacagtctgtggcctttc

SEQ ID NO: 41908 - DNA, 43 bp, Artificial Sequence
  primer
gtaaaacgacggccagtcagcaatactatttatttgcacaagg

SEQ ID NO: 41909 - DNA, 39 bp, Artificial Sequence
  primer
gtaaaacgacggccagtggttgatatcaggaagaggtgc

SEQ ID NO: 41910 - DNA, 35 bp, Artificial Sequence
  primer
gtaaaacgacggccagttttcaactgcacggtggg

SEQ ID NO: 41911 - DNA, 21 bp, Artificial Sequence
  primer
ttgagcacaactttcttgcag

SEQ ID NO: 41912 - DNA, 22 bp, Artificial Sequence
  primer
gaggctcattatcgactcttcg

SEQ ID NO: 41913 - DNA, 26 bp, Artificial Sequence
  primer
gggacctttacttattaactgtgtca

SEQ ID NO: 41914 - DNA, 38 bp, Artificial Sequence
  primer
gtaaaacgacggccagtattatgtgtgaaccagccgag

SEQ ID NO: 41915 - DNA, 24 bp, Artificial Sequence
  primer
cacactgaatacaacctaactccg

SEQ ID NO: 41916 - DNA, 26 bp, Artificial Sequence
  primer
ttgagaggaaaggaaatattgctaga

SEQ ID NO: 41917 - DNA, 43 bp, Artificial Sequence
  primer
gtaaaacgacggccagtttcttgttcagtataagtgttgctgc

SEQ ID NO: 41918 - DNA, 21 bp, Artificial Sequence
  primer
catagtggtgaagtgtgggct

SEQ ID NO: 41919 - DNA, 24 bp, Artificial Sequence
  primer
catttccaatgtgcactctatctg

SEQ ID NO: 41920 - DNA, 23 bp, Artificial Sequence
  primer
tgcctttaattgtctttgattcg

SEQ ID NO: 41921 - DNA, 37 bp, Artificial Sequence
  primer
gtaaaacgacggccagttttaaggtactgccgcgttg

SEQ ID NO: 41922 - DNA, 47 bp, Artificial Sequence
  primer
gtaaaacgacggccagtcaccaagttctacagtgttattctaaatgt

SEQ ID NO: 41923 - DNA, 21 bp, Artificial Sequence
  primer
caatagccgttctttgggatg

SEQ ID NO: 41924 - DNA, 39 bp, Artificial Sequence
  primer
gtaaaacgacggccagtggtacctgccatgtgaatactg

SEQ ID NO: 41925 - DNA, 37 bp, Artificial Sequence
  primer
gtaaaacgacggccagttcctcagcctcctgagtagc

SEQ ID NO: 41926 - DNA, 18 bp, Artificial Sequence
  primer
gggacatacggtgacggg

SEQ ID NO: 41927 - DNA, 21 bp, Artificial Sequence
  primer
gctggttgtctctgttgaagc

SEQ ID NO: 41928 - DNA, 22 bp, Artificial Sequence
  primer
tttctcctcattgtgccttacc

SEQ ID NO: 41929 - DNA, 21 bp, Artificial Sequence
  primer
tctatctggctcctcctcctc

SEQ ID NO: 41930 - DNA, 21 bp, Artificial Sequence
  primer
gtttctggctctctagccctt

SEQ ID NO: 41931 - DNA, 36 bp, Artificial Sequence
  primer
gtaaaacgacggccagtagctgagtgagccagggac

SEQ ID NO: 41932 - DNA, 40 bp, Artificial Sequence
  primer
gtaaaacgacggccagtgggcactgttagaaattacagcc

SEQ ID NO: 41933 - DNA, 27 bp, Artificial Sequence
  primer
cctttcaatataatccataggttcaca

SEQ ID NO: 41934 - DNA, 20 bp, Artificial Sequence
  primer
ctgatgtggtgcttggtcac

SEQ ID NO: 41935 - DNA, 38 bp, Artificial Sequence
  primer
gtaaaacgacggccagtgtaaccaccttgccatgattg

SEQ ID NO: 41936 - DNA, 37 bp, Artificial Sequence
  primer
gtaaaacgacggccagtcatattgcccaacatggagc

SEQ ID NO: 41937 - DNA, 21 bp, Artificial Sequence
  primer
ccttaatgttgggagaggtgg

SEQ ID NO: 41938 - DNA, 39 bp, Artificial Sequence
  primer
gtaaaacgacggccagttctctggctccagatttcaaac

SEQ ID NO: 41939 - DNA, 37 bp, Artificial Sequence
  primer
gtaaaacgacggccagtgccagacaagcctgactctg

SEQ ID NO: 41940 - DNA, 43 bp, Artificial Sequence
  primer
gtaaaacgacggccagttgaaattaacataaggtttacttggg

SEQ ID NO: 41941 - DNA, 38 bp, Artificial Sequence
  primer
gtaaaacgacggccagtcttgtgcattcctggtactgg

SEQ ID NO: 41942 - DNA, 38 bp, Artificial Sequence
  primer
gtaaaacgacggccagtggagctggtggtggtattatg

SEQ ID NO: 41943 - DNA, 35 bp, Artificial Sequence
  primer
gtaaaacgacggccagtctgcacctgtgtcctggg

SEQ ID NO: 41944 - DNA, 24 bp, Artificial Sequence
  primer
aaactgctgaagaaggtgaggtag

SEQ ID NO: 41945 - DNA, 21 bp, Artificial Sequence
  primer
agaccatgaggtctgcgtttc

SEQ ID NO: 41946 - DNA, 26 bp, Artificial Sequence
  primer
aaatatttcaatgggtcatatcacag

SEQ ID NO: 41947 - DNA, 23 bp, Artificial Sequence
  primer
ccttactgaaagtcagaatgcag

SEQ ID NO: 41948 - DNA, 38 bp, Artificial Sequence
  primer
gtaaaacgacggccagtacgaggaccaggtaagcaatg

SEQ ID NO: 41949 - DNA, 21 bp, Artificial Sequence
  primer
ggccatctttaagtctggagg

SEQ ID NO: 41950 - DNA, 21 bp, Artificial Sequence
  primer
gcaagctggctgaaattcttg

SEQ ID NO: 41951 - DNA, 38 bp, Artificial Sequence
  primer
gtaaaacgacggccagtcagaaggacacctcctaaggc

SEQ ID NO: 41952 - DNA, 38 bp, Artificial Sequence
  primer
gtaaaacgacggccagtgtaaactggtgccatgggaat

SEQ ID NO: 41953 - DNA, 38 bp, Artificial Sequence
  primer
gtaaaacgacggccagtaggaagtatggctgcgatagg

SEQ ID NO: 41954 - DNA, 38 bp, Artificial Sequence
  primer
gtaaaacgacggccagttggaatccttcttccttcctg

SEQ ID NO: 41955 - DNA, 21 bp, Artificial Sequence
  primer
aattgggaatgtttgcaccac

SEQ ID NO: 41956 - DNA, 39 bp, Artificial Sequence
  primer
gtaaaacgacggccagtaaggaaccaaagcctttagcag

SEQ ID NO: 41957 - DNA, 20 bp, Artificial Sequence
  primer
gcctggcagcacataatagg

SEQ ID NO: 41958 - DNA, 21 bp, Artificial Sequence
  primer
ctttggatgccctaacctcag

SEQ ID NO: 41959 - DNA, 38 bp, Artificial Sequence
  primer
gtaaaacgacggccagttagcaggtgtcattgtcccag

SEQ ID NO: 41960 - DNA, 21 bp, Artificial Sequence
  primer
accaagtttaaggagggtggg

SEQ ID NO: 41961 - DNA, 37 bp, Artificial Sequence
  primer
gtaaaacgacggccagtctccttgcttgtcctgttcg

SEQ ID NO: 41962 - DNA, 37 bp, Artificial Sequence
  primer
gtaaaacgacggccagtactttacggcagtgtggctg

SEQ ID NO: 41963 - DNA, 20 bp, Artificial Sequence
  primer
caagagatctgcctgccttg

SEQ ID NO: 41964 - DNA, 38 bp, Artificial Sequence
  primer
gtaaaacgacggccagtccagaaaggtcaatggcagag

SEQ ID NO: 41965 - DNA, 38 bp, Artificial Sequence
  primer
gtaaaacgacggccagtgattgttgctgtttgctcctc

SEQ ID NO: 41966 - DNA, 21 bp, Artificial Sequence
  primer
aagcaattgatgaggaaacgg

SEQ ID NO: 41967 - DNA, 21 bp, Artificial Sequence
  primer
gataatgggatgggagagcac

SEQ ID NO: 41968 - DNA, 38 bp, Artificial Sequence
  primer
gtaaaacgacggccagtagcatctggctgggagtaatg

SEQ ID NO: 41969 - DNA, 21 bp, Artificial Sequence
  primer
tggtctcttgagagcagaggc

SEQ ID NO: 41970 - DNA, 21 bp, Artificial Sequence
  primer
taggagccaggcttgtttcag

SEQ ID NO: 41971 - DNA, 39 bp, Artificial Sequence
  primer
gtaaaacgacggccagttttaggaattgttggatggagg

SEQ ID NO: 41972 - DNA, 20 bp, Artificial Sequence
  primer
gtgtacggcagcaaataccc

SEQ ID NO: 41973 - DNA, 38 bp, Artificial Sequence
  primer
gtaaaacgacggccagtaaccagacgaggcttgaagag

SEQ ID NO: 41974 - DNA, 21 bp, Artificial Sequence
  primer
tctcatccgctgtaaggagtg

SEQ ID NO: 41975 - DNA, 21 bp, Artificial Sequence
  primer
aggctttaagcttgcctcctg

SEQ ID NO: 41976 - DNA, 21 bp, Artificial Sequence
  primer
tctcactcagggaaagaaggg

SEQ ID NO: 41977 - DNA, 38 bp, Artificial Sequence
  primer
gtaaaacgacggccagtctgggaaaggtatgaagcgac

SEQ ID NO: 41978 - DNA, 38 bp, Artificial Sequence
  primer
gtaaaacgacggccagtttaccctttcccggtagtgtg

SEQ ID NO: 41979 - DNA, 21 bp, Artificial Sequence
  primer
ggactccaggccacacatatc

SEQ ID NO: 41980 - DNA, 38 bp, Artificial Sequence
  primer
gtaaaacgacggccagtccctgtctccaggtttaccac

SEQ ID NO: 41981 - DNA, 36 bp, Artificial Sequence
  primer
gtaaaacgacggccagtcagggcaacagtgcaagac

SEQ ID NO: 41982 - DNA, 37 bp, Artificial Sequence
  primer
gtaaaacgacggccagtctatgggaccagacgggttg

SEQ ID NO: 41983 - DNA, 37 bp, Artificial Sequence
  primer
gtaaaacgacggccagtttgcagatgagggtaatggg

SEQ ID NO: 41984 - DNA, 39 bp, Artificial Sequence
  primer
gtaaaacgacggccagtgaagacatgattggtgaggagg

SEQ ID NO: 41985 - DNA, 38 bp, Artificial Sequence
  primer
gtaaaacgacggccagttatgtttcttggtgagggtcg

SEQ ID NO: 41986 - DNA, 22 bp, Artificial Sequence
  primer
ggaatcttgtaggtgttgaggg

SEQ ID NO: 41987 - DNA, 21 bp, Artificial Sequence
  primer
atttcaagaagcctggagcac

SEQ ID NO: 41988 - DNA, 20 bp, Artificial Sequence
  primer
ctggaacaagttgccctcac

SEQ ID NO: 41989 - DNA, 21 bp, Artificial Sequence
  primer
ggagaggaggcaagaaggaag

SEQ ID NO: 41990 - DNA, 21 bp, Artificial Sequence
  primer
gactcctgccatcctagaagc

SEQ ID NO: 41991 - DNA, 41 bp, Artificial Sequence
  primer
gtaaaacgacggccagttggacagcacctacacttgatatg

SEQ ID NO: 41992 - DNA, 35 bp, Artificial Sequence
  primer
gtaaaacgacggccagtaggcaggagccactgtgc

SEQ ID NO: 41993 - DNA, 42 bp, Artificial Sequence
  primer
gtaaaacgacggccagttcctagtttgtctcactgtctaggg

SEQ ID NO: 41994 - DNA, 21 bp, Artificial Sequence
  primer
caagctcagttcccaacagtg

SEQ ID NO: 41995 - DNA, 21 bp, Artificial Sequence
  primer
cagagtttccctagctctggc

SEQ ID NO: 41996 - DNA, 21 bp, Artificial Sequence
  primer
atgcagctggtgatctgattc

SEQ ID NO: 41997 - DNA, 35 bp, Artificial Sequence
  primer
gtaaaacgacggccagtcagttgggcaaggtcagg

SEQ ID NO: 41998 - DNA, 25 bp, Artificial Sequence
  primer
cttggtctttctcagcagcttatag

SEQ ID NO: 41999 - DNA, 38 bp, Artificial Sequence
  primer
gtaaaacgacggccagtcacaagcctgtctaaccttcg

SEQ ID NO: 42000 - DNA, 21 bp, Artificial Sequence
  primer
gggccactgttactaccctaa

SEQ ID NO: 42001 - DNA, 22 bp, Artificial Sequence
  primer
gctgaccttggctttaatgttg

SEQ ID NO: 42002 - DNA, 36 bp, Artificial Sequence
  primer
gtaaaacgacggccagtgatggctggaatcatgtgc

SEQ ID NO: 42003 - DNA, 35 bp, Artificial Sequence
  primer
gtaaaacgacggccagtcggtgtgcctctgctctc

SEQ ID NO: 42004 - DNA, 38 bp, Artificial Sequence
  primer
gtaaaacgacggccagtgtgcttctccctcgctaagtg

SEQ ID NO: 42005 - DNA, 21 bp, Artificial Sequence
  primer
caagtcctacagcaccagctc

SEQ ID NO: 42006 - DNA, 38 bp, Artificial Sequence
  primer
gtaaaacgacggccagttggtttcctgggaatttcaac

SEQ ID NO: 42007 - DNA, 26 bp, Artificial Sequence
  primer
ttgaatgtattggttcaaatatgatg

SEQ ID NO: 42008 - DNA, 23 bp, Artificial Sequence
  primer
ttcatacacgagctaaccatgtg

SEQ ID NO: 42009 - DNA, 38 bp, Artificial Sequence
  primer
gtaaaacgacggccagttgccttaattcagtttggtgc

SEQ ID NO: 42010 - DNA, 21 bp, Artificial Sequence
  primer
tttcatccttcctgccagttc

SEQ ID NO: 42011 - DNA, 21 bp, Artificial Sequence
  primer
caaactatgagagcagctggg

SEQ ID NO: 42012 - DNA, 38 bp, Artificial Sequence
  primer
gtaaaacgacggccagttttccaggtggaagaatggag

SEQ ID NO: 42013 - DNA, 38 bp, Artificial Sequence
  primer
gtaaaacgacggccagtgtttgaggaaggcaaagttgg

SEQ ID NO: 42014 - DNA, 23 bp, Artificial Sequence
  primer
tgcatgtctaacgtattcaaccc

SEQ ID NO: 42015 - DNA, 39 bp, Artificial Sequence
  primer
gtaaaacgacggccagtcatacccacctctgccactatc

SEQ ID NO: 42016 - DNA, 38 bp, Artificial Sequence
  primer
gtaaaacgacggccagttacggttgctgtcttaggtgg

SEQ ID NO: 42017 - DNA, 21 bp, Artificial Sequence
  primer
gagcgcagaacttcaagaacc

SEQ ID NO: 42018 - DNA, 38 bp, Artificial Sequence
  primer
gtaaaacgacggccagtaggaccctgactgtgtggaag

SEQ ID NO: 42019 - DNA, 40 bp, Artificial Sequence
  primer
gtaaaacgacggccagtgggcaagaacttgcttcaataac

SEQ ID NO: 42020 - DNA, 38 bp, Artificial Sequence
  primer
gtaaaacgacggccagtctttgaaggagagttgggtgc

SEQ ID NO: 42021 - DNA, 21 bp, Artificial Sequence
  primer
caggtggcagtcctttatgag

SEQ ID NO: 42022 - DNA, 38 bp, Artificial Sequence
  primer
gtaaaacgacggccagttcacagaatagggctcgtcag

SEQ ID NO: 42023 - DNA, 38 bp, Artificial Sequence
  primer
gtaaaacgacggccagtttaagacaggaaggcctacgg

SEQ ID NO: 42024 - DNA, 38 bp, Artificial Sequence
  primer
gtaaaacgacggccagttaagctcttggaaggtgaggc

SEQ ID NO: 42025 - DNA, 38 bp, Artificial Sequence
  primer
gtaaaacgacggccagtcactccaatcagaccgggtag

SEQ ID NO: 42026 - DNA, 18 bp, Artificial Sequence
  primer
cctcgccagtccttaccc

SEQ ID NO: 42027 - DNA, 38 bp, Artificial Sequence
  primer
gtaaaacgacggccagtcttgcctgccctacatctctg

SEQ ID NO: 42028 - DNA, 20 bp, Artificial Sequence
  primer
ctctctaagcccgccctatc

SEQ ID NO: 42029 - DNA, 37 bp, Artificial Sequence
  primer
gtaaaacgacggccagtagtgggaggaatgagaaccg

SEQ ID NO: 42030 - DNA, 37 bp, Artificial Sequence
  primer
gtaaaacgacggccagttcgtagctggaggctttgtg

SEQ ID NO: 42031 - DNA, 38 bp, Artificial Sequence
  primer
gtaaaacgacggccagttttgaacccagatgagtttgg

SEQ ID NO: 42032 - DNA, 36 bp, Artificial Sequence
  primer
gtaaaacgacggccagttcaggattgcagttgtgcc

SEQ ID NO: 42033 - DNA, 39 bp, Artificial Sequence
  primer
gtaaaacgacggccagtttgctactctctccaggcaaag

SEQ ID NO: 42034 - DNA, 21 bp, Artificial Sequence
  primer
taacctttgggaaggatgagc

SEQ ID NO: 42035 - DNA, 21 bp, Artificial Sequence
  primer
gtgagggccgatactgcttac

SEQ ID NO: 42036 - DNA, 38 bp, Artificial Sequence
  primer
gtaaaacgacggccagttatggattatgtgcctggtgc

SEQ ID NO: 42037 - DNA, 21 bp, Artificial Sequence
  primer
ataagcataagccaccttgcc

SEQ ID NO: 42038 - DNA, 21 bp, Artificial Sequence
  primer
gggattataggattatgggcg

SEQ ID NO: 42039 - DNA, 42 bp, Artificial Sequence
  primer
gtaaaacgacggccagtcactttaaagccagaatcaagaaag

SEQ ID NO: 42040 - DNA, 37 bp, Artificial Sequence
  primer
gtaaaacgacggccagtcttggtaatggcccgttagg

SEQ ID NO: 42041 - DNA, 20 bp, Artificial Sequence
  primer
acacaaaggccattgcagag

SEQ ID NO: 42042 - DNA, 37 bp, Artificial Sequence
  primer
gtaaaacgacggccagtagctatgatcgcaccactgc

SEQ ID NO: 42043 - DNA, 21 bp, Artificial Sequence
  primer
aggttacaaatgccaactggg

SEQ ID NO: 42044 - DNA, 37 bp, Artificial Sequence
  primer
gtaaaacgacggccagtaagacctggctgtgtggatg

SEQ ID NO: 42045 - DNA, 38 bp, Artificial Sequence
  primer
gtaaaacgacggccagtatttgaggtgaggattccagc

SEQ ID NO: 42046 - DNA, 22 bp, Artificial Sequence
  primer
tttagggcctatggaaacaaac

SEQ ID NO: 42047 - DNA, 38 bp, Artificial Sequence
  primer
gtaaaacgacggccagtctttgtgattcctgccatgtg

SEQ ID NO: 42048 - DNA, 21 bp, Artificial Sequence
  primer
cagcctgggtgacagtaagac

SEQ ID NO: 42049 - DNA, 45 bp, Artificial Sequence
  primer
gtaaaacgacggccagttggtgatagaatatggcttacaaataca

SEQ ID NO: 42050 - DNA, 38 bp, Artificial Sequence
  primer
gtaaaacgacggccagtacttgccaggtgactttcagg

SEQ ID NO: 42051 - DNA, 21 bp, Artificial Sequence
  primer
ccatacccagccacaatttag

SEQ ID NO: 42052 - DNA, 38 bp, Artificial Sequence
  primer
gtaaaacgacggccagtgtgtcctgcatttgaaagtgg

SEQ ID NO: 42053 - DNA, 39 bp, Artificial Sequence
  primer
gtaaaacgacggccagtgacgtctcgatgtttcgagttc

SEQ ID NO: 42054 - DNA, 40 bp, Artificial Sequence
  primer
gtaaaacgacggccagtaaataaactgccagtctctgctg

SEQ ID NO: 42055 - DNA, 38 bp, Artificial Sequence
  primer
gtaaaacgacggccagtgtgccttggagtaagagcagc

SEQ ID NO: 42056 - DNA, 21 bp, Artificial Sequence
  primer
agtgcccagtacagtgtttgc

SEQ ID NO: 42057 - DNA, 21 bp, Artificial Sequence
  primer
tgcacgaatggctgaatacac

SEQ ID NO: 42058 - DNA, 38 bp, Artificial Sequence
  primer
gtaaaacgacggccagtaggcagagtcttgctctctgg

SEQ ID NO: 42059 - DNA, 21 bp, Artificial Sequence
  primer
gctctctgggagtctgcattc

SEQ ID NO: 42060 - DNA, 40 bp, Artificial Sequence
  primer
gtaaaacgacggccagtaaacgtaaagcttgaaatttggg

SEQ ID NO: 42061 - DNA, 38 bp, Artificial Sequence
  primer
gtaaaacgacggccagtcagatctgctggattctgtgg

SEQ ID NO: 42062 - DNA, 39 bp, Artificial Sequence
  primer
gtaaaacgacggccagtactgatgaaggacctggtatgg

SEQ ID NO: 42063 - DNA, 38 bp, Artificial Sequence
  primer
gtaaaacgacggccagtaattccacgaaggaatggatg

SEQ ID NO: 42064 - DNA, 21 bp, Artificial Sequence
  primer
gactgacctcttcctgtggtg

SEQ ID NO: 42065 - DNA, 38 bp, Artificial Sequence
  primer
gtaaaacgacggccagtggccttatcagagcaggtttc

SEQ ID NO: 42066 - DNA, 38 bp, Artificial Sequence
  primer
gtaaaacgacggccagttagagacctgggtggcttacc

SEQ ID NO: 42067 - DNA, 21 bp, Artificial Sequence
  primer
gtgtagggctgggaggtacag

SEQ ID NO: 42068 - DNA, 38 bp, Artificial Sequence
  primer
gtaaaacgacggccagtagctccctctctatcccactg

SEQ ID NO: 42069 - DNA, 37 bp, Artificial Sequence
  primer
gtaaaacgacggccagtctgactcccaactcacagcc

SEQ ID NO: 42070 - DNA, 36 bp, Artificial Sequence
  primer
gtaaaacgacggccagtaggcatctgctccctgaag

SEQ ID NO: 42071 - DNA, 38 bp, Artificial Sequence
  primer
gtaaaacgacggccagtactaaggctgagaagccaacc

SEQ ID NO: 42072 - DNA, 20 bp, Artificial Sequence
  primer
gttccaagacccatttgcac

SEQ ID NO: 42073 - DNA, 38 bp, Artificial Sequence
  primer
gtaaaacgacggccagtaagtctaggtctcggtcaggg

SEQ ID NO: 42074 - DNA, 21 bp, Artificial Sequence
  primer
gggtagtgctgtaccctctcg

SEQ ID NO: 42075 - DNA, 20 bp, Artificial Sequence
  primer
gagaatgcagtgttgggctc

SEQ ID NO: 42076 - DNA, 20 bp, Artificial Sequence
  primer
ccactgcaatgtcaggtgag

SEQ ID NO: 42077 - DNA, 21 bp, Artificial Sequence
  primer
aacgaggaattcaggacatgc

SEQ ID NO: 42078 - DNA, 38 bp, Artificial Sequence
  primer
gtaaaacgacggccagtaaacgaggctctgactgaagg

SEQ ID NO: 42079 - DNA, 21 bp, Artificial Sequence
  primer
actccatgatctgtgcaggtg

SEQ ID NO: 42080 - DNA, 21 bp, Artificial Sequence
  primer
tccttaagagttctccgcctg

SEQ ID NO: 42081 - DNA, 21 bp, Artificial Sequence
  primer
ctctgattgtcagcaaatggg

SEQ ID NO: 42082 - DNA, 38 bp, Artificial Sequence
  primer
gtaaaacgacggccagtttaccaaggacacctgtctgc

SEQ ID NO: 42083 - DNA, 38 bp, Artificial Sequence
  primer
gtaaaacgacggccagtttgcctacaaggtctgaggtg

SEQ ID NO: 42084 - DNA, 38 bp, Artificial Sequence
  primer
gtaaaacgacggccagtcttgggtagcacacagtggtc

SEQ ID NO: 42085 - DNA, 38 bp, Artificial Sequence
  primer
gtaaaacgacggccagtaccatcatggctttatttgcc

SEQ ID NO: 42086 - DNA, 38 bp, Artificial Sequence
  primer
gtaaaacgacggccagtcaccagaaatcagtgactggc

SEQ ID NO: 42087 - DNA, 20 bp, Artificial Sequence
  primer
gaagctgtttctccttcccg

SEQ ID NO: 42088 - DNA, 38 bp, Artificial Sequence
  primer
gtaaaacgacggccagtcagaagccttgtggtgttgag

SEQ ID NO: 42089 - DNA, 20 bp, Artificial Sequence
  primer
ccggcgtagctatttcaagg

SEQ ID NO: 42090 - DNA, 21 bp, Artificial Sequence
  primer
caagatggagcctctggtttc

SEQ ID NO: 42091 - DNA, 38 bp, Artificial Sequence
  primer
gtaaaacgacggccagtatgagagccatggaaatggac

SEQ ID NO: 42092 - DNA, 37 bp, Artificial Sequence
  primer
gtaaaacgacggccagtgcacagagtgtgaatgcctg

SEQ ID NO: 42093 - DNA, 37 bp, Artificial Sequence
  primer
gtaaaacgacggccagtaaacaggtgctctgggtctg

SEQ ID NO: 42094 - DNA, 24 bp, Artificial Sequence
  primer
aagtcccatgtactaatgtttgcc

SEQ ID NO: 42095 - DNA, 21 bp, Artificial Sequence
  primer
aaactcttcacacggctttgg

SEQ ID NO: 42096 - DNA, 38 bp, Artificial Sequence
  primer
gtaaaacgacggccagtcggcttcccataccttattgc

SEQ ID NO: 42097 - DNA, 24 bp, Artificial Sequence
  primer
gagctgactaatcatgctgttctg

SEQ ID NO: 42098 - DNA, 18 bp, Artificial Sequence
  primer
gagcggcgggaactgtag

SEQ ID NO: 42099 - DNA, 38 bp, Artificial Sequence
  primer
gtaaaacgacggccagtaatgggttgccattcactgac

SEQ ID NO: 42100 - DNA, 20 bp, Artificial Sequence
  primer
aagtacccgtgggcattagg

SEQ ID NO: 42101 - DNA, 21 bp, Artificial Sequence
  primer
ctgtggtcttgctctcagcag

SEQ ID NO: 42102 - DNA, 37 bp, Artificial Sequence
  primer
gtaaaacgacggccagtttgtagcctcatgctcaggg

SEQ ID NO: 42103 - DNA, 21 bp, Artificial Sequence
  primer
ctctccctgattgccacattc

SEQ ID NO: 42104 - DNA, 20 bp, Artificial Sequence
  primer
ctcttccctggagggcttac

SEQ ID NO: 42105 - DNA, 36 bp, Artificial Sequence
  primer
gtaaaacgacggccagtacaggcacttccctcatgg

SEQ ID NO: 42106 - DNA, 38 bp, Artificial Sequence
  primer
gtaaaacgacggccagtcagaggactacacgctcaagg

SEQ ID NO: 42107 - DNA, 20 bp, Artificial Sequence
  primer
atcattgatgtgctccaggc

SEQ ID NO: 42108 - DNA, 21 bp, Artificial Sequence
  primer
agggacatatgaagcaggagg

SEQ ID NO: 42109 - DNA, 21 bp, Artificial Sequence
  primer
tgggcaggtctgagagttagg

SEQ ID NO: 42110 - DNA, 21 bp, Artificial Sequence
  primer
ctgatcccacctgtatcctgc

SEQ ID NO: 42111 - DNA, 38 bp, Artificial Sequence
  primer
gtaaaacgacggccagtcagaggcttggtttgatttcc

SEQ ID NO: 42112 - DNA, 37 bp, Artificial Sequence
  primer
gtaaaacgacggccagtagctgagggaagagaccctg

SEQ ID NO: 42113 - DNA, 38 bp, Artificial Sequence
  primer
gtaaaacgacggccagtaggaaagttgggaaggagagg

SEQ ID NO: 42114 - DNA, 21 bp, Artificial Sequence
  primer
caagaagcaaagggtcctagc

SEQ ID NO: 42115 - DNA, 37 bp, Artificial Sequence
  primer
gtaaaacgacggccagtgagaagtgagtgcctgcctg

SEQ ID NO: 42116 - DNA, 21 bp, Artificial Sequence
  primer
agggacatatgaagcaggagg

SEQ ID NO: 42117 - DNA, 35 bp, Artificial Sequence
  primer
gtaaaacgacggccagttggagggaggactcaggc

SEQ ID NO: 42118 - DNA, 21 bp, Artificial Sequence
  primer
ttgacctaacattgggatggg

SEQ ID NO: 42119 - DNA, 38 bp, Artificial Sequence
  primer
gtaaaacgacggccagtgctggaaaccaagatgctatg

SEQ ID NO: 42120 - DNA, 38 bp, Artificial Sequence
  primer
gtaaaacgacggccagttcatttccctgttgaatgagg

SEQ ID NO: 42121 - DNA, 38 bp, Artificial Sequence
  primer
gtaaaacgacggccagtgttgatcagacctcccactcc

SEQ ID NO: 42122 - DNA, 38 bp, Artificial Sequence
  primer
gtaaaacgacggccagtccaggaagagacaggaccttg

SEQ ID NO: 42123 - DNA, 38 bp, Artificial Sequence
  primer
gtaaaacgacggccagtagtcaaagaccaggttggacc

SEQ ID NO: 42124 - DNA, 38 bp, Artificial Sequence
  primer
gtaaaacgacggccagttgctctccctctctgaacagg

SEQ ID NO: 42125 - DNA, 38 bp, Artificial Sequence
  primer
gtaaaacgacggccagtgtggacgaggaatgtgaaacc

SEQ ID NO: 42126 - DNA, 21 bp, Artificial Sequence
  primer
aacgagcagagtgagtgaggg

SEQ ID NO: 42127 - DNA, 21 bp, Artificial Sequence
  primer
aacgagcagagtgagtgaggg

SEQ ID NO: 42128 - DNA, 38 bp, Artificial Sequence
  primer
gtaaaacgacggccagtagggtgcaaagtgattaaggc

SEQ ID NO: 42129 - DNA, 38 bp, Artificial Sequence
  primer
gtaaaacgacggccagtgggtgagaaggtgagtcttgc

SEQ ID NO: 42130 - DNA, 21 bp, Artificial Sequence
  primer
gtgctgggttcctatttctgc

SEQ ID NO: 42131 - DNA, 38 bp, Artificial Sequence
  primer
gtaaaacgacggccagtctttctggagccaccaatctg

SEQ ID NO: 42132 - DNA, 38 bp, Artificial Sequence
  primer
gtaaaacgacggccagttaccaccctgtcatccctagc

SEQ ID NO: 42133 - DNA, 38 bp, Artificial Sequence
  primer
gtaaaacgacggccagtatgggatgtgtactgcaccag

SEQ ID NO: 42134 - DNA, 38 bp, Artificial Sequence
  primer
gtaaaacgacggccagtccgatcttccatctcacacac

SEQ ID NO: 42135 - DNA, 36 bp, Artificial Sequence
  primer
gtaaaacgacggccagtctcccagttgacgctctgg

SEQ ID NO: 42136 - DNA, 21 bp, Artificial Sequence
  primer
gacccagtaggcataaccacc

SEQ ID NO: 42137 - DNA, 38 bp, Artificial Sequence
  primer
gtaaaacgacggccagtgcccattaacacagatttggc

SEQ ID NO: 42138 - DNA, 21 bp, Artificial Sequence
  primer
cagcactgtaagggctgattg

SEQ ID NO: 42139 - DNA, 40 bp, Artificial Sequence
  primer
gtaaaacgacggccagtgagagctgcagcctttcttattc

SEQ ID NO: 42140 - DNA, 38 bp, Artificial Sequence
  primer
gtaaaacgacggccagtgaacagggcttggtaaactgc

SEQ ID NO: 42141 - DNA, 38 bp, Artificial Sequence
  primer
gtaaaacgacggccagtacatacagcaactgtccctgc

SEQ ID NO: 42142 - DNA, 21 bp, Artificial Sequence
  primer
tgagtcttatcccaaggctgg

SEQ ID NO: 42143 - DNA, 21 bp, Artificial Sequence
  primer
tgctaccagaccctaagctcc

SEQ ID NO: 42144 - DNA, 21 bp, Artificial Sequence
  primer
gacagacccagccagagacag

SEQ ID NO: 42145 - DNA, 38 bp, Artificial Sequence
  primer
gtaaaacgacggccagtctctaaagcgctcaaagaggc

SEQ ID NO: 42146 - DNA, 21 bp, Artificial Sequence
  primer
tgaagtcagctcttggtgagc

SEQ ID NO: 42147 - DNA, 39 bp, Artificial Sequence
  primer
gtaaaacgacggccagttccttggaaccagatgtaccag

SEQ ID NO: 42148 - DNA, 23 bp, Artificial Sequence
  primer
caggctcttaattccatggttag

SEQ ID NO: 42149 - DNA, 39 bp, Artificial Sequence
  primer
gtaaaacgacggccagttggcaagtatagcttcagctcc

SEQ ID NO: 42150 - DNA, 21 bp, Artificial Sequence
  primer
catggaatttcttcaggcagg

SEQ ID NO: 42151 - DNA, 21 bp, Artificial Sequence
  primer
tgcctctgttagttcactggc

SEQ ID NO: 42152 - DNA, 21 bp, Artificial Sequence
  primer
gtggtaaaccctcctgacacg

SEQ ID NO: 42153 - DNA, 22 bp, Artificial Sequence
  primer
ttgtgtaccatcagtacctcgc

SEQ ID NO: 42154 - DNA, 39 bp, Artificial Sequence
  primer
gtaaaacgacggccagtttccacagtccttgggtaaatg

SEQ ID NO: 42155 - DNA, 38 bp, Artificial Sequence
  primer
gtaaaacgacggccagttgtctgcagattcacttggtg

SEQ ID NO: 42156 - DNA, 38 bp, Artificial Sequence
  primer
gtaaaacgacggccagtgctctgtgcttcctctcttcg

SEQ ID NO: 42157 - DNA, 23 bp, Artificial Sequence
  primer
cagatgtgtgagctgttgtcaaa

SEQ ID NO: 42158 - DNA, 23 bp, Artificial Sequence
  primer
ggaaatactaagctgcacactgc

SEQ ID NO: 42159 - DNA, 21 bp, Artificial Sequence
  primer
tccctggccttcttattgttg

SEQ ID NO: 42160 - DNA, 21 bp, Artificial Sequence
  primer
tggcacagtgtttaagttggg

SEQ ID NO: 42161 - DNA, 38 bp, Artificial Sequence
  primer
gtaaaacgacggccagttttcagcctcttccacagtcc

SEQ ID NO: 42162 - DNA, 38 bp, Artificial Sequence
  primer
gtaaaacgacggccagttctccattgtgtcttggcttg

SEQ ID NO: 42163 - DNA, 38 bp, Artificial Sequence
  primer
gtaaaacgacggccagtgtggcaaggattgctgaactc

SEQ ID NO: 42164 - DNA, 19 bp, Artificial Sequence
  primer
ctcccaaagtgtggcgatg

SEQ ID NO: 42165 - DNA, 22 bp, Artificial Sequence
  primer
aaattgctgagtgtttcggttc

SEQ ID NO: 42166 - DNA, 38 bp, Artificial Sequence
  primer
gtaaaacgacggccagtgagggtggtagggtgggttac

SEQ ID NO: 42167 - DNA, 39 bp, Artificial Sequence
  primer
gtaaaacgacggccagtcacatgggaagcactgtttaag

SEQ ID NO: 42168 - DNA, 38 bp, Artificial Sequence
  primer
gtaaaacgacggccagtaaagggtcaatctcagcatcg

SEQ ID NO: 42169 - DNA, 44 bp, Artificial Sequence
  primer
gtaaaacgacggccagtgtagtctgaaggaaatcaagctttaac

SEQ ID NO: 42170 - DNA, 22 bp, Artificial Sequence
  primer
cctcccaaagaatctcaaggat

SEQ ID NO: 42171 - DNA, 40 bp, Artificial Sequence
  primer
gtaaaacgacggccagttctggaagccttacttgatttga

SEQ ID NO: 42172 - DNA, 38 bp, Artificial Sequence
  primer
gtaaaacgacggccagttccacatgatgaaggtgtgtg

SEQ ID NO: 42173 - DNA, 22 bp, Artificial Sequence
  primer
cctttgtaactgcaaccaaacc

SEQ ID NO: 42174 - DNA, 43 bp, Artificial Sequence
  primer
gtaaaacgacggccagtgctactatccttagcaagaatccaac

SEQ ID NO: 42175 - DNA, 26 bp, Artificial Sequence
  primer
cattgacaagctgtgataagcattac

SEQ ID NO: 42176 - DNA, 23 bp, Artificial Sequence
  primer
tccctttgatagactttgcattg

SEQ ID NO: 42177 - DNA, 21 bp, Artificial Sequence
  primer
cctgagaatcggaggttgaag

SEQ ID NO: 42178 - DNA, 39 bp, Artificial Sequence
  primer
gtaaaacgacggccagtaggtatgtaggagccaatacgc

SEQ ID NO: 42179 - DNA, 21 bp, Artificial Sequence
  primer
cgttgtccagtttgggttatg

SEQ ID NO: 42180 - DNA, 38 bp, Artificial Sequence
  primer
gtaaaacgacggccagtttgcaaaggaaggagccttag

SEQ ID NO: 42181 - DNA, 35 bp, Artificial Sequence
  primer
gtaaaacgacggccagtgagccaccatgcctggac

SEQ ID NO: 42182 - DNA, 39 bp, Artificial Sequence
  primer
gtaaaacgacggccagtttgagttacctgaaatccctgg

SEQ ID NO: 42183 - DNA, 37 bp, Artificial Sequence
  primer
gtaaaacgacggccagtgaaggcctgagcaacttgtg

SEQ ID NO: 42184 - DNA, 36 bp, Artificial Sequence
  primer
gtaaaacgacggccagtcctagcccagtccttgcac

SEQ ID NO: 42185 - DNA, 38 bp, Artificial Sequence
  primer
gtaaaacgacggccagtgctacaggaaaggagccagtg

SEQ ID NO: 42186 - DNA, 37 bp, Artificial Sequence
  primer
gtaaaacgacggccagtcaacagctggagtgggagag

SEQ ID NO: 42187 - DNA, 38 bp, Artificial Sequence
  primer
gtaaaacgacggccagttacctttcagctgtgactggc

SEQ ID NO: 42188 - DNA, 38 bp, Artificial Sequence
  primer
gtaaaacgacggccagtggcaacatagagaccctgtgg

SEQ ID NO: 42189 - DNA, 37 bp, Artificial Sequence
  primer
gtaaaacgacggccagtctgggacgcgttcataactg

SEQ ID NO: 42190 - DNA, 19 bp, Artificial Sequence
  primer
cagacacgctgggctactg

SEQ ID NO: 42191 - DNA, 38 bp, Artificial Sequence
  primer
gtaaaacgacggccagtaccgtgaccatcaacatgaag

SEQ ID NO: 42192 - DNA, 21 bp, Artificial Sequence
  primer
ggatcctgaagaactcctggg

SEQ ID NO: 42193 - DNA, 17 bp, Artificial Sequence
  primer
gggatccagagcgggag

SEQ ID NO: 42194 - DNA, 21 bp, Artificial Sequence
  primer
gagcctcctagtgtgaggtgg

SEQ ID NO: 42195 - DNA, 38 bp, Artificial Sequence
  primer
gtaaaacgacggccagttcagcagggagaaggagacac

SEQ ID NO: 42196 - DNA, 38 bp, Artificial Sequence
  primer
gtaaaacgacggccagttagctgctgagtggtaggctg

SEQ ID NO: 42197 - DNA, 40 bp, Artificial Sequence
  primer
gtaaaacgacggccagtgcccagccatatcagattatttc

SEQ ID NO: 42198 - DNA, 20 bp, Artificial Sequence
  primer
agatggaggcagaaagcagg

SEQ ID NO: 42199 - DNA, 38 bp, Artificial Sequence
  primer
gtaaaacgacggccagttcctgggttgcctagaatctc

SEQ ID NO: 42200 - DNA, 38 bp, Artificial Sequence
  primer
gtaaaacgacggccagtcagcctttgctttcctctttc

SEQ ID NO: 42201 - DNA, 38 bp, Artificial Sequence
  primer
gtaaaacgacggccagtgggagagaatcggtgaacatc

SEQ ID NO: 42202 - DNA, 38 bp, Artificial Sequence
  primer
gtaaaacgacggccagttaaggtttccctgcactgacc

SEQ ID NO: 42203 - DNA, 21 bp, Artificial Sequence
  primer
gcttaggaacccagaggtcac

SEQ ID NO: 42204 - DNA, 21 bp, Artificial Sequence
  primer
gtcacctgtatggagcagtgg

SEQ ID NO: 42205 - DNA, 23 bp, Artificial Sequence
  primer
acctctggttaccactgtttgtg

SEQ ID NO: 42206 - DNA, 38 bp, Artificial Sequence
  primer
gtaaaacgacggccagtattaccaaagatccggaaggg

SEQ ID NO: 42207 - DNA, 38 bp, Artificial Sequence
  primer
gtaaaacgacggccagtctgcttctcactgcctgtgtc

SEQ ID NO: 42208 - DNA, 37 bp, Artificial Sequence
  primer
gtaaaacgacggccagtgaagagtgctctgggctgtg

SEQ ID NO: 42209 - DNA, 21 bp, Artificial Sequence
  primer
agctgcaagaacctttccctc

SEQ ID NO: 42210 - DNA, 38 bp, Artificial Sequence
  primer
gtaaaacgacggccagtgggatctgagacttggtgctc

SEQ ID NO: 42211 - DNA, 21 bp, Artificial Sequence
  primer
gactgagaattagatggcccg

SEQ ID NO: 42212 - DNA, 21 bp, Artificial Sequence
  primer
cagaggaagggagggtttcag

SEQ ID NO: 42213 - DNA, 36 bp, Artificial Sequence
  primer
gtaaaacgacggccagtacaaatcctggccttggtg

SEQ ID NO: 42214 - DNA, 36 bp, Artificial Sequence
  primer
gtaaaacgacggccagtacagcagcgggttaagtgc

SEQ ID NO: 42215 - DNA, 21 bp, Artificial Sequence
  primer
caaggcgtaaattgtctgctg

SEQ ID NO: 42216 - DNA, 22 bp, Artificial Sequence
  primer
aagccattactcacagcagttg

SEQ ID NO: 42217 - DNA, 21 bp, Artificial Sequence
  primer
agaagcttcagctacaagccc

SEQ ID NO: 42218 - DNA, 21 bp, Artificial Sequence
  primer
ctggtcaaagagtgcaagcag

SEQ ID NO: 42219 - DNA, 21 bp, Artificial Sequence
  primer
gcatgccagacagacctagtg

SEQ ID NO: 42220 - DNA, 38 bp, Artificial Sequence
  primer
gtaaaacgacggccagtcaggtctaaacccacgaatcc

SEQ ID NO: 42221 - DNA, 21 bp, Artificial Sequence
  primer
tatagacagcagcagggcctc

SEQ ID NO: 42222 - DNA, 18 bp, Artificial Sequence
  primer
caggctgtgccgtttcag

SEQ ID NO: 42223 - DNA, 40 bp, Artificial Sequence
  primer
gtaaaacgacggccagttgtgtaattcagaaaggaatggg

SEQ ID NO: 42224 - DNA, 38 bp, Artificial Sequence
  primer
gtaaaacgacggccagttctgagatgaactgtgcaggg

SEQ ID NO: 42225 - DNA, 38 bp, Artificial Sequence
  primer
gtaaaacgacggccagtagggaagtgtcataaagcagg

SEQ ID NO: 42226 - DNA, 38 bp, Artificial Sequence
  primer
gtaaaacgacggccagttccatgcccaagaacatttag

SEQ ID NO: 42227 - DNA, 23 bp, Artificial Sequence
  primer
tgtgattgttataggcaactggc

SEQ ID NO: 42228 - DNA, 21 bp, Artificial Sequence
  primer
cgtgcttccaaagaaactgaa

SEQ ID NO: 42229 - DNA, 21 bp, Artificial Sequence
  primer
tgttccgtacatgcctttgac

SEQ ID NO: 42230 - DNA, 38 bp, Artificial Sequence
  primer
gtaaaacgacggccagtcacaacagaaaggcacattgg

SEQ ID NO: 42231 - DNA, 21 bp, Artificial Sequence
  primer
agtaccctttgcccatgtttc

SEQ ID NO: 42232 - DNA, 21 bp, Artificial Sequence
  primer
tacatcagcttgcactctgcc

SEQ ID NO: 42233 - DNA, 24 bp, Artificial Sequence
  primer
cattcccattataccacatctttg

SEQ ID NO: 42234 - DNA, 37 bp, Artificial Sequence
  primer
gtaaaacgacggccagtaagggaccatgctgagaagc

SEQ ID NO: 42235 - DNA, 20 bp, Artificial Sequence
  primer
tatccctccttcagccatcc

SEQ ID NO: 42236 - DNA, 38 bp, Artificial Sequence
  primer
gtaaaacgacggccagtctgtcctttcacggaattgtg

SEQ ID NO: 42237 - DNA, 40 bp, Artificial Sequence
  primer
gtaaaacgacggccagtcgtatctttgagaaacggaaatg

SEQ ID NO: 42238 - DNA, 37 bp, Artificial Sequence
  primer
gtaaaacgacggccagttgactttcccacagtgcctc

SEQ ID NO: 42239 - DNA, 22 bp, Artificial Sequence
  primer
aaatcctgtggaaatttcttgc

SEQ ID NO: 42240 - DNA, 38 bp, Artificial Sequence
  primer
gtaaaacgacggccagtttctccaccatttagctgtgc

SEQ ID NO: 42241 - DNA, 38 bp, Artificial Sequence
  primer
gtaaaacgacggccagtacatttgctcaaagaggaggc

SEQ ID NO: 42242 - DNA, 35 bp, Artificial Sequence
  primer
gtaaaacgacggccagtgtcgggcacgttaaggga

SEQ ID NO: 42243 - DNA, 38 bp, Artificial Sequence
  primer
gtaaaacgacggccagtaaagtacacctgcctggtttg

SEQ ID NO: 42244 - DNA, 23 bp, Artificial Sequence
  primer
aaagtgaagatgtatttggcctg

SEQ ID NO: 42245 - DNA, 39 bp, Artificial Sequence
  primer
gtaaaacgacggccagtccagtgtttattacgcatggtg

SEQ ID NO: 42246 - DNA, 21 bp, Artificial Sequence
  primer
gtccctagcagagggcattag

SEQ ID NO: 42247 - DNA, 38 bp, Artificial Sequence
  primer
gtaaaacgacggccagttaatcccacgtgcacggtaac

SEQ ID NO: 42248 - DNA, 39 bp, Artificial Sequence
  primer
gtaaaacgacggccagtcgtatcatgtgaatgttcgctc

SEQ ID NO: 42249 - DNA, 38 bp, Artificial Sequence
  primer
gtaaaacgacggccagtgtaaatttgcattgctggctg

SEQ ID NO: 42250 - DNA, 39 bp, Artificial Sequence
  primer
gtaaaacgacggccagtggcttgatgaaatgttcaaagg

SEQ ID NO: 42251 - DNA, 38 bp, Artificial Sequence
  primer
gtaaaacgacggccagtatttgcccactttgttgtcag

SEQ ID NO: 42252 - DNA, 39 bp, Artificial Sequence
  primer
gtaaaacgacggccagtgaatcctagacaggctttgtcc

SEQ ID NO: 42253 - DNA, 38 bp, Artificial Sequence
  primer
gtaaaacgacggccagtacacagactggatgttggtgg

SEQ ID NO: 42254 - DNA, 24 bp, Artificial Sequence
  primer
ggcactacattcctattatttggg

SEQ ID NO: 42255 - DNA, 39 bp, Artificial Sequence
  primer
gtaaaacgacggccagttttatcagcagcagggttacag

SEQ ID NO: 42256 - DNA, 37 bp, Artificial Sequence
  primer
gtaaaacgacggccagtaatgctgcctaggaagtggg

SEQ ID NO: 42257 - DNA, 38 bp, Artificial Sequence
  primer
gtaaaacgacggccagtcaaagtttggcttcttacgcc

SEQ ID NO: 42258 - DNA, 38 bp, Artificial Sequence
  primer
gtaaaacgacggccagtggagacacactttgctgaacc

SEQ ID NO: 42259 - DNA, 26 bp, Artificial Sequence
  primer
ttctttaagccactacagagatgtcc

SEQ ID NO: 42260 - DNA, 21 bp, Artificial Sequence
  primer
tcatctccaagtaacgccacc

SEQ ID NO: 42261 - DNA, 42 bp, Artificial Sequence
  primer
gtaaaacgacggccagtctgtttatcaagtcggtaaggaaac

SEQ ID NO: 42262 - DNA, 38 bp, Artificial Sequence
  primer
gtaaaacgacggccagttgaggagtgactgctaaagga

SEQ ID NO: 42263 - DNA, 42 bp, Artificial Sequence
  primer
gtaaaacgacggccagttctttgaagaggttattatcagagc

SEQ ID NO: 42264 - DNA, 21 bp, Artificial Sequence
  primer
tcatgaacgggacaatctttc

SEQ ID NO: 42265 - DNA, 22 bp, Artificial Sequence
  primer
cacattccagaatggcttattg

SEQ ID NO: 42266 - DNA, 39 bp, Artificial Sequence
  primer
gtaaaacgacggccagtaactgctaatgtttgcaatccc

SEQ ID NO: 42267 - DNA, 21 bp, Artificial Sequence
  primer
tggcaccagtttaatgcagac

SEQ ID NO: 42268 - DNA, 39 bp, Artificial Sequence
  primer
gtaaaacgacggccagttttcttcctcacttcttctgga

SEQ ID NO: 42269 - DNA, 22 bp, Artificial Sequence
  primer
tgtgtgtgtgtctctgtgtgtg

SEQ ID NO: 42270 - DNA, 38 bp, Artificial Sequence
  primer
gtaaaacgacggccagtgtactcaacccacctcagcag

SEQ ID NO: 42271 - DNA, 38 bp, Artificial Sequence
  primer
gtaaaacgacggccagtctttcggtgagttgaatttgg

SEQ ID NO: 42272 - DNA, 21 bp, Artificial Sequence
  primer
aatcatagaacccaaggagcc

SEQ ID NO: 42273 - DNA, 22 bp, Artificial Sequence
  primer
gcatcgactaactgattcaagc

SEQ ID NO: 42274 - DNA, 38 bp, Artificial Sequence
  primer
gtaaaacgacggccagtgacagttcgtggaatacaggc

SEQ ID NO: 42275 - DNA, 20 bp, Artificial Sequence
  primer
tggagaactttcttggcgtg

SEQ ID NO: 42276 - DNA, 21 bp, Artificial Sequence
  primer
ggtatccatcccttcaagcat

SEQ ID NO: 42277 - DNA, 38 bp, Artificial Sequence
  primer
gtaaaacgacggccagtccctgaatgaagtggttctcc

SEQ ID NO: 42278 - DNA, 37 bp, Artificial Sequence
  primer
gtaaaacgacggccagtggcccttggtcttcagtttg

SEQ ID NO: 42279 - DNA, 19 bp, Artificial Sequence
  primer
acctagcatgtgatccggg

SEQ ID NO: 42280 - DNA, 21 bp, Artificial Sequence
  primer
ggaagtgatagcccagaaacc

SEQ ID NO: 42281 - DNA, 21 bp, Artificial Sequence
  primer
tctgcaacaaagatgcaaatg

SEQ ID NO: 42282 - DNA, 39 bp, Artificial Sequence
  primer
gtaaaacgacggccagtccgaatcagtgggttacatacg

SEQ ID NO: 42283 - DNA, 38 bp, Artificial Sequence
  primer
gtaaaacgacggccagttggctaagctgcaaatgattg

SEQ ID NO: 42284 - DNA, 21 bp, Artificial Sequence
  primer
aatcatttcctgcactctggc

SEQ ID NO: 42285 - DNA, 21 bp, Artificial Sequence
  primer
ggtcttgctgctaccctttct

SEQ ID NO: 42286 - DNA, 38 bp, Artificial Sequence
  primer
gtaaaacgacggccagtaaagatgatttgtggccattg

SEQ ID NO: 42287 - DNA, 39 bp, Artificial Sequence
  primer
gtaaaacgacggccagtgtgacatggcttatgctgattc

SEQ ID NO: 42288 - DNA, 39 bp, Artificial Sequence
  primer
gtaaaacgacggccagttttcaaatgtgctggtgaaatg

SEQ ID NO: 42289 - DNA, 41 bp, Artificial Sequence
  primer
gtaaaacgacggccagttctttgtacacacaggacaccttg

SEQ ID NO: 42290 - DNA, 21 bp, Artificial Sequence
  primer
tggactatcacccatggaagg

SEQ ID NO: 42291 - DNA, 38 bp, Artificial Sequence
  primer
gtaaaacgacggccagtctgggctggaaatatcacctc

SEQ ID NO: 42292 - DNA, 42 bp, Artificial Sequence
  primer
gtaaaacgacggccagtgttcctgtattgtttatctcttccg

SEQ ID NO: 42293 - DNA, 42 bp, Artificial Sequence
  primer
gtaaaacgacggccagtacaaatattgtgcaatgtctgctac

SEQ ID NO: 42294 - DNA, 21 bp, Artificial Sequence
  primer
accatgcctggccttactatg

SEQ ID NO: 42295 - DNA, 24 bp, Artificial Sequence
  primer
ttccaagagaaccttcaataagga

SEQ ID NO: 42296 - DNA, 21 bp, Artificial Sequence
  primer
tatggagagagcttgctgtgc

SEQ ID NO: 42297 - DNA, 20 bp, Artificial Sequence
  primer
aaatcaccacccagctatgc

SEQ ID NO: 42298 - DNA, 38 bp, Artificial Sequence
  primer
gtaaaacgacggccagtatgcctctttccttcatggac

SEQ ID NO: 42299 - DNA, 39 bp, Artificial Sequence
  primer
gtaaaacgacggccagtagcaattgcatgagtcatcatc

SEQ ID NO: 42300 - DNA, 23 bp, Artificial Sequence
  primer
ccctcttgctgtctttcatcttc

SEQ ID NO: 42301 - DNA, 39 bp, Artificial Sequence
  primer
gtaaaacgacggccagttttgcaagagctaaagctacaa

SEQ ID NO: 42302 - DNA, 36 bp, Artificial Sequence
  primer
gtaaaacgacggccagtcccaggagggaatgatctg

SEQ ID NO: 42303 - DNA, 21 bp, Artificial Sequence
  primer
gcaacttcgcgtccaatttag

SEQ ID NO: 42304 - DNA, 38 bp, Artificial Sequence
  primer
gtaaaacgacggccagtcagaattgcaaagattgcctg

SEQ ID NO: 42305 - DNA, 37 bp, Artificial Sequence
  primer
gtaaaacgacggccagtccaacagcagagctggtttc

SEQ ID NO: 42306 - DNA, 22 bp, Artificial Sequence
  primer
caaaggtaaacgaagaagctgg

SEQ ID NO: 42307 - DNA, 38 bp, Artificial Sequence
  primer
gtaaaacgacggccagtttccgaccaatgtcatcattc

SEQ ID NO: 42308 - DNA, 39 bp, Artificial Sequence
  primer
gtaaaacgacggccagtgggatttctgcctccattattc

SEQ ID NO: 42309 - DNA, 23 bp, Artificial Sequence
  primer
aaagcatttgcattcattctttg

SEQ ID NO: 42310 - DNA, 35 bp, Artificial Sequence
  primer
gtaaaacgacggccagtcaagtaagcggctgacgg

SEQ ID NO: 42311 - DNA, 38 bp, Artificial Sequence
  primer
gtaaaacgacggccagtattatacctgccctcccacac

SEQ ID NO: 42312 - DNA, 37 bp, Artificial Sequence
  primer
gtaaaacgacggccagtctttgttctggaggcagtgg

SEQ ID NO: 42313 - DNA, 21 bp, Artificial Sequence
  primer
agagggatgtggacgtttgtg

SEQ ID NO: 42314 - DNA, 38 bp, Artificial Sequence
  primer
gtaaaacgacggccagttgtgctcatgtgtgattctgg

SEQ ID NO: 42315 - DNA, 38 bp, Artificial Sequence
  primer
gtaaaacgacggccagttgctttaaactcccttctggc

SEQ ID NO: 42316 - DNA, 21 bp, Artificial Sequence
  primer
ccaggatgtagcctcttgctc

SEQ ID NO: 42317 - DNA, 21 bp, Artificial Sequence
  primer
gagatgtaagctgggcgagag

SEQ ID NO: 42318 - DNA, 38 bp, Artificial Sequence
  primer
gtaaaacgacggccagtagagtcgggtcagctctcttg

SEQ ID NO: 42319 - DNA, 21 bp, Artificial Sequence
  primer
aacagagagggcagcatcaac

SEQ ID NO: 42320 - DNA, 21 bp, Artificial Sequence
  primer
tgggaaaccatagctctgagg

SEQ ID NO: 42321 - DNA, 38 bp, Artificial Sequence
  primer
gtaaaacgacggccagttcgatatggaggctttcactg

SEQ ID NO: 42322 - DNA, 38 bp, Artificial Sequence
  primer
gtaaaacgacggccagtagtgattcataatcccgctcc

SEQ ID NO: 42323 - DNA, 19 bp, Artificial Sequence
  primer
gtaccgatgagggacccag

SEQ ID NO: 42324 - DNA, 21 bp, Artificial Sequence
  primer
tgctggtagagggaaaggaag

SEQ ID NO: 42325 - DNA, 37 bp, Artificial Sequence
  primer
gtaaaacgacggccagtcagaagtgagtctgggctgg

SEQ ID NO: 42326 - DNA, 20 bp, Artificial Sequence
  primer
ccatggtgagggagaaccag

SEQ ID NO: 42327 - DNA, 38 bp, Artificial Sequence
  primer
gtaaaacgacggccagttgatctgtcagtggaggaagg

SEQ ID NO: 42328 - DNA, 23 bp, Artificial Sequence
  primer
gggagcagttcagagattacctg

SEQ ID NO: 42329 - DNA, 38 bp, Artificial Sequence; identical to SEQ ID NO: 34356
  primer

SEQ ID NO: 42330 - DNA, 38 bp, Artificial Sequence
  primer
gtaaaacgacggccagtataccagcacatgattccctg

SEQ ID NO: 42331 - DNA, 21 bp, Artificial Sequence
  primer
gaggagaatcatttggcagtg

SEQ ID NO: 42332 - DNA, 38 bp, Artificial Sequence
  primer
gtaaaacgacggccagtttatcccagatgcagaaccag

SEQ ID NO: 42333 - DNA, 38 bp, Artificial Sequence
  primer
gtaaaacgacggccagtggagccctgtaatgttgtttg

SEQ ID NO: 42334 - DNA, 39 bp, Artificial Sequence
  primer
gtaaaacgacggccagttggccattatttgtctctgtcc

SEQ ID NO: 42335 - DNA, 40 bp, Artificial Sequence
  primer
gtaaaacgacggccagtttctcagggagaaactaagaggg

SEQ ID NO: 42336 - DNA, 36 bp, Artificial Sequence
  primer
gtaaaacgacggccagtaagatcactggtgcagggc

SEQ ID NO: 42337 - DNA, 21 bp, Artificial Sequence
  primer
ttgggatttgagatgaagcac

SEQ ID NO: 42338 - DNA, 39 bp, Artificial Sequence; identical to SEQ ID NO: 42334
  primer

SEQ ID NO: 42339 - DNA, 37 bp, Artificial Sequence
  primer
gtaaaacgacggccagttcttcctgtccctcatcgtg

SEQ ID NO: 42340 - DNA, 23 bp, Artificial Sequence
  primer
ttcctgtcagtgtaattgtgtgc

SEQ ID NO: 42341 - DNA, 38 bp, Artificial Sequence
  primer
gtaaaacgacggccagtgttagtgagcagcgactgtgg

SEQ ID NO: 42342 - DNA, 20 bp, Artificial Sequence
  primer
tcttcttcctcctccttccg

SEQ ID NO: 42343 - DNA, 38 bp, Artificial Sequence
  primer
gtaaaacgacggccagtttgtttgttcgccacagtctc

SEQ ID NO: 42344 - DNA, 39 bp, Artificial Sequence
  primer
gtaaaacgacggccagtgacttcaaagggtttgattccc

SEQ ID NO: 42345 - DNA, 20 bp, Artificial Sequence
  primer
ggacacgtgcttggtctcac

SEQ ID NO: 42346 - DNA, 38 bp, Artificial Sequence
  primer
gtaaaacgacggccagtttggtttaacaagcgtccaac

SEQ ID NO: 42347 - DNA, 38 bp, Artificial Sequence
  primer
gtaaaacgacggccagtctccaggctagtgcagaaagg

SEQ ID NO: 42348 - DNA, 21 bp, Artificial Sequence
  primer
gtagggagtagcaaccaaccc

SEQ ID NO: 42349 - DNA, 38 bp, Artificial Sequence
  primer
gtaaaacgacggccagttgtcctgacgatttgatgagc

SEQ ID NO: 42350 - DNA, 21 bp, Artificial Sequence
  primer
cagaaggatttccagtctcgg

SEQ ID NO: 42351 - DNA, 23 bp, Artificial Sequence
  primer
ttcctgtcagtgtaattgtgtgc

SEQ ID NO: 42352 - DNA, 21 bp, Artificial Sequence
  primer
aaaggcactccagcacttgac

SEQ ID NO: 42353 - DNA, 20 bp, Artificial Sequence
  primer
actcacgatcagttccgcag

SEQ ID NO: 42354 - DNA, 21 bp, Artificial Sequence
  primer
gcgaggagagaatgtgacaag

SEQ ID NO: 42355 - DNA, 40 bp, Artificial Sequence
  primer
gtaaaacgacggccagttgctgtgaataaatttggaatgg

SEQ ID NO: 42356 - DNA, 40 bp, Artificial Sequence
  primer
gtaaaacgacggccagttttggttgatatattgggaatgc

SEQ ID NO: 42357 - DNA, 27 bp, Artificial Sequence
  primer
gttccagtttaatttgagatgaaagaa

SEQ ID NO: 42358 - DNA, 21 bp, Artificial Sequence
  primer
ctgacaaatgtctgtgcttgg

SEQ ID NO: 42359 - DNA, 21 bp, Artificial Sequence
  primer
gtggctgtgaatgtttaaggg

SEQ ID NO: 42360 - DNA, 38 bp, Artificial Sequence
  primer
gtaaaacgacggccagttcctgccatttcacatttacc

SEQ ID NO: 42361 - DNA, 36 bp, Artificial Sequence
  primer
gtaaaacgacggccagtacagggtcgcactgtgttg

SEQ ID NO: 42362 - DNA, 30 bp, Artificial Sequence
  primer
gcttagtcttaagttagtggtttctcacag

SEQ ID NO: 42363 - DNA, 22 bp, Artificial Sequence
  primer
gtcctatgtgtttcaacgatgg

SEQ ID NO: 42364 - DNA, 38 bp, Artificial Sequence
  primer
gtaaaacgacggccagtgataaggtaggtgcgtgaggg

SEQ ID NO: 42365 - DNA, 38 bp, Artificial Sequence
  primer
gtaaaacgacggccagttgaagctgcattctggctaag

SEQ ID NO: 42366 - DNA, 19 bp, Artificial Sequence
  primer
cggtgacagtcagctctgc

SEQ ID NO: 42367 - DNA, 21 bp, Artificial Sequence
  primer
tgtgcaacatagagttgtggg

SEQ ID NO: 42368 - DNA, 21 bp, Artificial Sequence
  primer
agcagaattccgaggtggaag

SEQ ID NO: 42369 - DNA, 39 bp, Artificial Sequence
  primer
gtaaaacgacggccagttgggctttacttagaaacgctg

SEQ ID NO: 42370 - DNA, 24 bp, Artificial Sequence
  primer
aataagttcttcaaacttgggctg

SEQ ID NO: 42371 - DNA, 37 bp, Artificial Sequence
  primer
gtaaaacgacggccagtatggactgtgaggttgcctg

SEQ ID NO: 42372 - DNA, 39 bp, Artificial Sequence
  primer
gtaaaacgacggccagttcgaagctattggtaggtttgc

SEQ ID NO: 42373 - DNA, 38 bp, Artificial Sequence
  primer
gtaaaacgacggccagtaagcagggcacttcttaaagg

SEQ ID NO: 42374 - DNA, 38 bp, Artificial Sequence
  primer
gtaaaacgacggccagttcacctgcaggatgtttgttg

SEQ ID NO: 42375 - DNA, 20 bp, Artificial Sequence
  primer
ctccgtgcatgaaggcttag

SEQ ID NO: 42376 - DNA, 21 bp, Artificial Sequence
  primer
tccgtctcaaagcaaacaaac

SEQ ID NO: 42377 - DNA, 42 bp, Artificial Sequence
  primer
gtaaaacgacggccagttttaatgccaaacaaggtaaatctc

SEQ ID NO: 42378 - DNA, 40 bp, Artificial Sequence
  primer
gtaaaacgacggccagtttgaagactcacatctttcccag

SEQ ID NO: 42379 - DNA, 38 bp, Artificial Sequence
  primer
gtaaaacgacggccagttaagggcttgcagagaaaggt

SEQ ID NO: 42380 - DNA, 21 bp, Artificial Sequence
  primer
acgttacccactgtacctggc

SEQ ID NO: 42381 - DNA, 43 bp, Artificial Sequence
  primer
gtaaaacgacggccagttgattagaccaatagaataaggagcc

SEQ ID NO: 42382 - DNA, 39 bp, Artificial Sequence
  primer
gtaaaacgacggccagtcccttaaaggtaaacagcctcc

SEQ ID NO: 42383 - DNA, 38 bp, Artificial Sequence
  primer
gtaaaacgacggccagtttgccatgtttaattcagcca

SEQ ID NO: 42384 - DNA, 36 bp, Artificial Sequence
  primer
gtaaaacgacggccagttctgggtgctctgcacttg

SEQ ID NO: 42385 - DNA, 40 bp, Artificial Sequence
  primer
gtaaaacgacggccagttgagaagtgtgcatgtgtgaaac

SEQ ID NO: 42386 - DNA, 27 bp, Artificial Sequence
  primer
tggatgtacagattatggcttatattg

SEQ ID NO: 42387 - DNA, 21 bp, Artificial Sequence
  primer
ttgtatcaccactttgcctcc

SEQ ID NO: 42388 - DNA, 39 bp, Artificial Sequence
  primer
gtaaaacgacggccagtcacgagcttcatcacagtgttc

SEQ ID NO: 42389 - DNA, 23 bp, Artificial Sequence
  primer
tgatcaaagacctagcaataccg

SEQ ID NO: 42390 - DNA, 21 bp, Artificial Sequence
  primer
ttggtttggaatgaaatgtgc

SEQ ID NO: 42391 - DNA, 21 bp, Artificial Sequence
  primer
accacaggaacgtgctttctc

SEQ ID NO: 42392 - DNA, 41 bp, Artificial Sequence
  primer
gtaaaacgacggccagtgactaccttgttaacagcagtggc

SEQ ID NO: 42393 - DNA, 43 bp, Artificial Sequence
  primer
gtaaaacgacggccagtggtcattaatttagcagaattgcttg

SEQ ID NO: 42394 - DNA, 21 bp, Artificial Sequence
  primer
caggacgacagagtgaaaccc

SEQ ID NO: 42395 - DNA, 38 bp, Artificial Sequence
  primer
gtaaaacgacggccagtgcccatttgttgaaacctcag

SEQ ID NO: 42396 - DNA, 37 bp, Artificial Sequence
  primer
gtaaaacgacggccagtcccgccttaaatgtgacacc

SEQ ID NO: 42397 - DNA, 21 bp, Artificial Sequence
  primer
tctgctccaggtaagattgga

SEQ ID NO: 42398 - DNA, 21 bp, Artificial Sequence
  primer
actggagggttgggaaatacc

SEQ ID NO: 42399 - DNA, 38 bp, Artificial Sequence
  primer
gtaaaacgacggccagtctggaaagttgcacattgctt

SEQ ID NO: 42400 - DNA, 38 bp, Artificial Sequence
  primer
gtaaaacgacggccagtgagtggcctattggagattgg

SEQ ID NO: 42401 - DNA, 28 bp, Artificial Sequence
  primer
ttataaacactgtagaaacccagctaaa

SEQ ID NO: 42402 - DNA, 21 bp, Artificial Sequence
  primer
tagcgtgaacagagattcgtg

SEQ ID NO: 42403 - DNA, 21 bp, Artificial Sequence
  primer
tctttggttcgtttgcattgt

SEQ ID NO: 42404 - DNA, 21 bp, Artificial Sequence
  primer
ccaattcagtggtagccctct

SEQ ID NO: 42405 - DNA, 38 bp, Artificial Sequence
  primer
gtaaaacgacggccagttgataaccacaggcacagagc

SEQ ID NO: 42406 - DNA, 39 bp, Artificial Sequence
  primer
gtaaaacgacggccagtgacatggagctaactgctttgg

SEQ ID NO: 42407 - DNA, 25 bp, Artificial Sequence
  primer
gaaagttgaaactgaacttgattcc

SEQ ID NO: 42408 - DNA, 38 bp, Artificial Sequence
  primer
gtaaaacgacggccagtggatgacaaagtgagaccctg

SEQ ID NO: 42409 - DNA, 38 bp, Artificial Sequence
  primer
gtaaaacgacggccagtttgaatcaccctttcctctcg

SEQ ID NO: 42410 - DNA, 42 bp, Artificial Sequence
  primer
gtaaaacgacggccagtgtgtatattcagaggctgaaattgg

SEQ ID NO: 42411 - DNA, 23 bp, Artificial Sequence
  primer
tccactttagcattcacattctg

SEQ ID NO: 42412 - DNA, 38 bp, Artificial Sequence
  primer
gtaaaacgacggccagtccaacgagaagtgccctaaac

SEQ ID NO: 42413 - DNA, 21 bp, Artificial Sequence
  primer
tgcactgctgagctaagatcg

SEQ ID NO: 42414 - DNA, 22 bp, Artificial Sequence
  primer
gatggaaatcacataccaaggg

SEQ ID NO: 42415 - DNA, 38 bp, Artificial Sequence
  primer
gtaaaacgacggccagtagcatagctggagattcaccc

SEQ ID NO: 42416 - DNA, 40 bp, Artificial Sequence
  primer
gtaaaacgacggccagtcgtcagaaactgggatgtgttag

SEQ ID NO: 42417 - DNA, 22 bp, Artificial Sequence
  primer
tctccctccctgttaatctgtg

SEQ ID NO: 42418 - DNA, 38 bp, Artificial Sequence
  primer
gtaaaacgacggccagtcattagcaacaggagtcgtcg

SEQ ID NO: 42419 - DNA, 38 bp, Artificial Sequence
  primer
gtaaaacgacggccagtcttctggtgcacgctgtattc

SEQ ID NO: 42420 - DNA, 35 bp, Artificial Sequence
  primer
gtaaaacgacggccagtgtgagggcctgcctcaaa

SEQ ID NO: 42421 - DNA, 24 bp, Artificial Sequence
  primer
cagaatgttcctgtacaatgttgc

SEQ ID NO: 42422 - DNA, 18 bp, Artificial Sequence
  primer
ctgaggcagagaatggcg

SEQ ID NO: 42423 - DNA, 24 bp, Artificial Sequence
  primer
caaagctcaagcatggtaagtatg

SEQ ID NO: 42424 - DNA, 38 bp, Artificial Sequence
  primer
gtaaaacgacggccagtcctagtgaggcattgggtttc

SEQ ID NO: 42425 - DNA, 38 bp, Artificial Sequence
  primer
gtaaaacgacggccagtaaactctgtgcattgaatggg

SEQ ID NO: 42426 - DNA, 20 bp, Artificial Sequence
  primer
gcaggagaatggcatgattc

SEQ ID NO: 42427 - DNA, 39 bp, Artificial Sequence
  primer
gtaaaacgacggccagtaaactgcagagtgcatagctcc

SEQ ID NO: 42428 - DNA, 21 bp, Artificial Sequence
  primer
actctagcccaggcaactgag

SEQ ID NO: 42429 - DNA, 22 bp, Artificial Sequence
  primer
tgaccataaactcacatggacg

SEQ ID NO: 42430 - DNA, 38 bp, Artificial Sequence
  primer
gtaaaacgacggccagtgggttagcaaggaaggatgtg

SEQ ID NO: 42431 - DNA, 20 bp, Artificial Sequence
  primer
acgcacgcaggcatataaac

SEQ ID NO: 42432 - DNA, 21 bp, Artificial Sequence
  primer
ccctggagtttgtagggtttg

SEQ ID NO: 42433 - DNA, 47 bp, Artificial Sequence
  primer
gtaaaacgacggccagtaatacagtggttactttaatgattaggtgt

SEQ ID NO: 42434 - DNA, 38 bp, Artificial Sequence
  primer
gtaaaacgacggccagtatgagaaagtttgccacccac

SEQ ID NO: 42435 - DNA, 24 bp, Artificial Sequence
  primer
ggtgcataatcaagtgccatttag

SEQ ID NO: 42436 - DNA, 21 bp, Artificial Sequence
  primer
tggcgcaggaagaattatatg

SEQ ID NO: 42437 - DNA, 39 bp, Artificial Sequence
  primer
gtaaaacgacggccagtgagccctaattagcatgggaac

SEQ ID NO: 42438 - DNA, 39 bp, Artificial Sequence
  primer
gtaaaacgacggccagtaaacccaatcatcatgcttctc

SEQ ID NO: 42439 - DNA, 21 bp, Artificial Sequence
  primer
cttcccaacattgtgatgctc

SEQ ID NO: 42440 - DNA, 23 bp, Artificial Sequence
  primer
ttgcctgtcagttcctttatgtc

SEQ ID NO: 42441 - DNA, 40 bp, Artificial Sequence
  primer
gtaaaacgacggccagtgatggttgggtttaattcaaagg

SEQ ID NO: 42442 - DNA, 22 bp, Artificial Sequence
  primer
ggcaacatagcaagattccatc

SEQ ID NO: 42443 - DNA, 21 bp, Artificial Sequence
  primer
tctggagtcagaacacttggg

SEQ ID NO: 42444 - DNA, 39 bp, Artificial Sequence
  primer
gtaaaacgacggccagtaagacttcgaaatgtctggcac

SEQ ID NO: 42445 - DNA, 43 bp, Artificial Sequence
  primer
gtaaaacgacggccagtaaagagtttgactctgaattaatggg

SEQ ID NO: 42446 - DNA, 22 bp, Artificial Sequence
  primer
ggtcatgtgatccttgtatgcc

SEQ ID NO: 42447 - DNA, 38 bp, Artificial Sequence
  primer
gtaaaacgacggccagtatttgatttggtggttgggag

SEQ ID NO: 42448 - DNA, 38 bp, Artificial Sequence
  primer
gtaaaacgacggccagtagtggctttgctggataatgc

SEQ ID NO: 42449 - DNA, 39 bp, Artificial Sequence
  primer
gtaaaacgacggccagttggagtggaagctagattgagg

SEQ ID NO: 42450 - DNA, 23 bp, Artificial Sequence
  primer
aagcaataacaatgtcatgtccc

SEQ ID NO: 42451 - DNA, 40 bp, Artificial Sequence
  primer
gtaaaacgacggccagtaaggagattaaattcatgagccg

SEQ ID NO: 42452 - DNA, 21 bp, Artificial Sequence
  primer
gaagctccggtgaccatgtag

SEQ ID NO: 42453 - DNA, 22 bp, Artificial Sequence
  primer
ttgagcccttcatttctctagc

SEQ ID NO: 42454 - DNA, 38 bp, Artificial Sequence
  primer
gtaaaacgacggccagtatggcccatggaaactgtact

SEQ ID NO: 42455 - DNA, 21 bp, Artificial Sequence
  primer
gctgctgtgaacattcgtgta

SEQ ID NO: 42456 - DNA, 21 bp, Artificial Sequence
  primer
caaattgttgggactacaggc

SEQ ID NO: 42457 - DNA, 41 bp, Artificial Sequence
  primer
gtaaaacgacggccagtgttctcttgagcattgttaccttg

SEQ ID NO: 42458 - DNA, 40 bp, Artificial Sequence
  primer
gtaaaacgacggccagttttatagaacacaagcaccctcg

SEQ ID NO: 42459 - DNA, 24 bp, Artificial Sequence
  primer
agcatatccatcttcaataatcct

SEQ ID NO: 42460 - DNA, 40 bp, Artificial Sequence
  primer
gtaaaacgacggccagttcctaatggcattgtatccacag

SEQ ID NO: 42461 - DNA, 18 bp, Artificial Sequence
  primer
agccgagaaggtgccact

SEQ ID NO: 42462 - DNA, 38 bp, Artificial Sequence
  primer
gtaaaacgacggccagttctgtttggccagatatacca

SEQ ID NO: 42463 - DNA, 22 bp, Artificial Sequence
  primer
gaaattcgcttgtgaatcattg

SEQ ID NO: 42464 - DNA, 39 bp, Artificial Sequence
  primer
gtaaaacgacggccagttctgacttgtgacaattggtgg

SEQ ID NO: 42465 - DNA, 35 bp, Artificial Sequence
  primer
gtaaaacgacggccagtaatgcgcaaagcagggac

SEQ ID NO: 42466 - DNA, 38 bp, Artificial Sequence
  primer
gtaaaacgacggccagtccgtggagacagctatcaaag

SEQ ID NO: 42467 - DNA, 39 bp, Artificial Sequence
  primer
gtaaaacgacggccagttggatactggaagacagcaacc

SEQ ID NO: 42468 - DNA, 43 bp, Artificial Sequence
  primer
gtaaaacgacggccagttgattatgtgggagaattgatcttag

SEQ ID NO: 42469 - DNA, 40 bp, Artificial Sequence
  primer
gtaaaacgacggccagtttagctagtcactttcatggcaa

SEQ ID NO: 42470 - DNA, 40 bp, Artificial Sequence
  primer
gtaaaacgacggccagtttgggtagatgttggatagagga

SEQ ID NO: 42471 - DNA, 21 bp, Artificial Sequence
  primer
cccactgttccatatcaaccc

SEQ ID NO: 42472 - DNA, 21 bp, Artificial Sequence
  primer
cctgagtaccagatccgttgg

SEQ ID NO: 42473 - DNA, 39 bp, Artificial Sequence
  primer
gtaaaacgacggccagtgttctttctcattgtgtggtgg

SEQ ID NO: 42474 - DNA, 38 bp, Artificial Sequence
  primer
gtaaaacgacggccagtctttcgagggcattcagctac

SEQ ID NO: 42475 - DNA, 21 bp, Artificial Sequence
  primer
gtatcccacagtcccaggaag

SEQ ID NO: 42476 - DNA, 36 bp, Artificial Sequence
  primer
gtaaaacgacggccagtagtactgggccacagccag

SEQ ID NO: 42477 - DNA, 38 bp, Artificial Sequence
  primer
gtaaaacgacggccagtctctgagcagaggaatggtgg

SEQ ID NO: 42478 - DNA, 38 bp, Artificial Sequence
  primer
gtaaaacgacggccagtatggagggtatgtgtgcagag

SEQ ID NO: 42479 - DNA, 27 bp, Artificial Sequence
  primer
ttacaatgacattcagagattagatcc

SEQ ID NO: 42480 - DNA, 38 bp, Artificial Sequence
  primer
gtaaaacgacggccagtgaggtgagagcatggtgacag

SEQ ID NO: 42481 - DNA, 39 bp, Artificial Sequence
  primer
gtaaaacgacggccagtccctagcacccagtacacagag

SEQ ID NO: 42482 - DNA, 21 bp, Artificial Sequence
  primer
atggtctctccttcatccgtg

SEQ ID NO: 42483 - DNA, 38 bp, Artificial Sequence
  primer
gtaaaacgacggccagtcccacacctatgtctgtttcc

SEQ ID NO: 42484 - DNA, 38 bp, Artificial Sequence
  primer
gtaaaacgacggccagtacacgtgtgctttcctgtgac

SEQ ID NO: 42485 - DNA, 21 bp, Artificial Sequence
  primer
gcatgaggacagctttgtcag

SEQ ID NO: 42486 - DNA, 21 bp, Artificial Sequence
  primer
aggcagatcttaagccagagg

SEQ ID NO: 42487 - DNA, 38 bp, Artificial Sequence
  primer
gtaaaacgacggccagtgcagtcttaggaagggtggac

SEQ ID NO: 42488 - DNA, 38 bp, Artificial Sequence
  primer
gtaaaacgacggccagttgtatcattccgtccagttgc

SEQ ID NO: 42489 - DNA, 38 bp, Artificial Sequence
  primer
gtaaaacgacggccagttcacctccatccatgaacatc

SEQ ID NO: 42490 - DNA, 21 bp, Artificial Sequence
  primer
cagaaacagaagccacgactg

SEQ ID NO: 42491 - DNA, 38 bp, Artificial Sequence
  primer
gtaaaacgacggccagttactttccagaccctcatccc

SEQ ID NO: 42492 - DNA, 38 bp, Artificial Sequence
  primer
gtaaaacgacggccagtgcctggaagtctgggatagag

SEQ ID NO: 42493 - DNA, 38 bp, Artificial Sequence
  primer
gtaaaacgacggccagtagtgccttggaagggataagc

SEQ ID NO: 42494 - DNA, 38 bp, Artificial Sequence
  primer
gtaaaacgacggccagtgataaacagagcgtgaccagc

SEQ ID NO: 42495 - DNA, 21 bp, Artificial Sequence
  primer
ttgactccctctgcttcttcc

SEQ ID NO: 42496 - DNA, 38 bp, Artificial Sequence
  primer
gtaaaacgacggccagtgaggtatgcacttagggccag

SEQ ID NO: 42497 - DNA, 37 bp, Artificial Sequence
  primer
gtaaaacgacggccagtgagtggaagctcaagcaagg

SEQ ID NO: 42498 - DNA, 21 bp, Artificial Sequence
  primer
agctgttgacgcgcttcttag

SEQ ID NO: 42499 - DNA, 21 bp, Artificial Sequence
  primer
agctggaatgtgatgatgagg

SEQ ID NO: 42500 - DNA, 21 bp, Artificial Sequence
  primer
gagtaacacaatgtgggctgc

SEQ ID NO: 42501 - DNA, 23 bp, Artificial Sequence
  primer
gagccatctttgtctggtaaatg

SEQ ID NO: 42502 - DNA, 21 bp, Artificial Sequence
  primer
atttggtgataagccacgacc

SEQ ID NO: 42503 - DNA, 39 bp, Artificial Sequence
  primer
gtaaaacgacggccagtggcctttgtaagccagtacaag

SEQ ID NO: 42504 - DNA, 26 bp, Artificial Sequence
  primer
ttctattctcactgccttattatccc

SEQ ID NO: 42505 - DNA, 39 bp, Artificial Sequence
  primer
gtaaaacgacggccagttcaatgagaaattcagtttggg

SEQ ID NO: 42506 - DNA, 38 bp, Artificial Sequence
  primer
gtaaaacgacggccagttccagcatacttgacctaccc

SEQ ID NO: 42507 - DNA, 35 bp, Artificial Sequence
  primer
gtaaaacgacggccagtgtgccgtgaggaggagtc

SEQ ID NO: 42508 - DNA, 21 bp, Artificial Sequence
  primer
caaatgcaaataggaccctcc

SEQ ID NO: 42509 - DNA, 38 bp, Artificial Sequence
  primer
gtaaaacgacggccagtaggccttaaccaatgtttccc

SEQ ID NO: 42510 - DNA, 37 bp, Artificial Sequence
  primer
gtaaaacgacggccagtcaagcatctcccttgctacg

SEQ ID NO: 42511 - DNA, 37 bp, Artificial Sequence
  primer
gtaaaacgacggccagtactctgagcctgtgtaccgc

SEQ ID NO: 42512 - DNA, 21 bp, Artificial Sequence
  primer
aaacacaccgatcctaccagg

SEQ ID NO: 42513 - DNA, 38 bp, Artificial Sequence
  primer
gtaaaacgacggccagtcttctacgccagttaccaccc

SEQ ID NO: 42514 - DNA, 39 bp, Artificial Sequence
  primer
gtaaaacgacggccagttcctcacagaaatctttgcctc

SEQ ID NO: 42515 - DNA, 21 bp, Artificial Sequence
  primer
tgctggacagcattgactcac

SEQ ID NO: 42516 - DNA, 20 bp, Artificial Sequence
  primer
ggattcctttgctcctagcg

SEQ ID NO: 42517 - DNA, 38 bp, Artificial Sequence
  primer
gtaaaacgacggccagtctcagttgccagcacaggtag

SEQ ID NO: 42518 - DNA, 38 bp, Artificial Sequence
  primer
gtaaaacgacggccagtcagcatccctacacactttgc

SEQ ID NO: 42519 - DNA, 35 bp, Artificial Sequence
  primer
gtaaaacgacggccagtaacctgggcagaggttgc

SEQ ID NO: 42520 - DNA, 38 bp, Artificial Sequence
  primer
gtaaaacgacggccagtaatcagatcgagagctgggtg

SEQ ID NO: 42521 - DNA, 38 bp, Artificial Sequence
  primer
gtaaaacgacggccagtgggaatagccagcactctcac

SEQ ID NO: 42522 - DNA, 38 bp, Artificial Sequence
  primer
gtaaaacgacggccagtctcatgtcacgtgtccaggtc

SEQ ID NO: 42523 - DNA, 21 bp, Artificial Sequence
  primer
gacaccatgtggcttctaccc

SEQ ID NO: 42524 - DNA, 21 bp, Artificial Sequence
  primer
agagtcaggcaggtcaaggag

SEQ ID NO: 42525 - DNA, 38 bp, Artificial Sequence
  primer
gtaaaacgacggccagtctgagatctagggctccctcc

SEQ ID NO: 42526 - DNA, 21 bp, Artificial Sequence
  primer
tgagtagactgtgcacccagg

SEQ ID NO: 42527 - DNA, 19 bp, Artificial Sequence
  primer
cttcctgtcccttccctcc

SEQ ID NO: 42528 - DNA, 38 bp, Artificial Sequence
  primer
gtaaaacgacggccagtgatcatctgcagaagcagtgg

SEQ ID NO: 42529 - DNA, 20 bp, Artificial Sequence
  primer
cttagccctccatcacagcc

SEQ ID NO: 42530 - DNA, 19 bp, Artificial Sequence
  primer
gttctcgaaagcagagccc

SEQ ID NO: 42531 - DNA, 38 bp, Artificial Sequence
  primer
gtaaaacgacggccagtccttgtcacgctaggagtttg

SEQ ID NO: 42532 - DNA, 38 bp, Artificial Sequence
  primer
gtaaaacgacggccagtctgtttgcccttccttgtagg

SEQ ID NO: 42533 - DNA, 21 bp, Artificial Sequence
  primer
gcagtccttctactccaaggc

SEQ ID NO: 42534 - DNA, 38 bp, Artificial Sequence
  primer
gtaaaacgacggccagtcacacagcccatatcgtcaac

SEQ ID NO: 42535 - DNA, 37 bp, Artificial Sequence
  primer
gtaaaacgacggccagtcactcacagcaaacacaggc

SEQ ID NO: 42536 - DNA, 21 bp, Artificial Sequence
  primer
tataccaaaggccaccaggtc

SEQ ID NO: 42537 - DNA, 37 bp, Artificial Sequence
  primer
gtaaaacgacggccagtcccaagcttctgtccacctc

SEQ ID NO: 42538 - DNA, 21 bp, Artificial Sequence
  primer
ccctcgtcgtcagagtactgg

SEQ ID NO: 42539 - DNA, 38 bp, Artificial Sequence
  primer
gtaaaacgacggccagttcagaagtcagccctagacgc

SEQ ID NO: 42540 - DNA, 37 bp, Artificial Sequence
  primer
gtaaaacgacggccagtgaaacctttcacctgctccc

SEQ ID NO: 42541 - DNA, 40 bp, Artificial Sequence
  primer
gtaaaacgacggccagtgataaggaacgtagatggtcgtg

SEQ ID NO: 42542 - DNA, 21 bp, Artificial Sequence
  primer
ccctgagcctttaaactcctg

SEQ ID NO: 42543 - DNA, 38 bp, Artificial Sequence
  primer
gtaaaacgacggccagttctatgcaaagtcctgcaagc

SEQ ID NO: 42544 - DNA, 35 bp, Artificial Sequence
  primer
gtaaaacgacggccagtggtgggtggtgactctgg

SEQ ID NO: 42545 - DNA, 37 bp, Artificial Sequence
  primer
gtaaaacgacggccagtgccgcttgttgtcttgtagg

SEQ ID NO: 42546 - DNA, 37 bp, Artificial Sequence
  primer
gtaaaacgacggccagtagcccaagtctcagggagag

SEQ ID NO: 42547 - DNA, 20 bp, Artificial Sequence
  primer
agtccagcccggatattgag

SEQ ID NO: 42548 - DNA, 21 bp, Artificial Sequence
  primer
ttgtgccaggagtcaatatcc

SEQ ID NO: 42549 - DNA, 20 bp, Artificial Sequence
  primer
acgtttcccagtctggtgtg

SEQ ID NO: 42550 - DNA, 22 bp, Artificial Sequence
  primer
gatcattctatggcactccagc

SEQ ID NO: 42551 - DNA, 21 bp, Artificial Sequence
  primer
ctacttcctgtaagccagcgg

SEQ ID NO: 42552 - DNA, 21 bp, Artificial Sequence
  primer
ggtttacagaaagcggctctg

SEQ ID NO: 42553 - DNA, 21 bp, Artificial Sequence
  primer
cttgcagaaagacagaggtgc

SEQ ID NO: 42554 - DNA, 38 bp, Artificial Sequence
  primer
gtaaaacgacggccagtaagatctccctcactacccga

SEQ ID NO: 42555 - DNA, 21 bp, Artificial Sequence
  primer
gcttggaggtggagttcagag

SEQ ID NO: 42556 - DNA, 38 bp, Artificial Sequence
  primer
gtaaaacgacggccagtctgaaacagtgcagggagaag

SEQ ID NO: 42557 - DNA, 37 bp, Artificial Sequence
  primer
gtaaaacgacggccagtattctgcttgggattcaggg

SEQ ID NO: 42558 - DNA, 38 bp, Artificial Sequence
  primer
gtaaaacgacggccagtaggccatagaagtgggtcctg

SEQ ID NO: 42559 - DNA, 38 bp, Artificial Sequence
  primer
gtaaaacgacggccagtacatcgccacctgttaatgag

SEQ ID NO: 42560 - DNA, 38 bp, Artificial Sequence
  primer
gtaaaacgacggccagtgtaagtgtccctgccaccatc

SEQ ID NO: 42561 - DNA, 37 bp, Artificial Sequence
  primer
gtaaaacgacggccagttggtctctgtctcgctctcc

SEQ ID NO: 42562 - DNA, 38 bp, Artificial Sequence
  primer
gtaaaacgacggccagtagacccatcagaggacgattc

SEQ ID NO: 42563 - DNA, 20 bp, Artificial Sequence
  primer
tccatcaaggattcactggg

SEQ ID NO: 42564 - DNA, 20 bp, Artificial Sequence
  primer
gctgctgaaacacaacatcg

SEQ ID NO: 42565 - DNA, 21 bp, Artificial Sequence
  primer
tcttctgggaggaggagacag

SEQ ID NO: 42566 - DNA, 21 bp, Artificial Sequence
  primer
gtgtttgcattgcattatccg

SEQ ID NO: 42567 - DNA, 19 bp, Artificial Sequence
  primer
gccatcaagagcatcctgg

SEQ ID NO: 42568 - DNA, 37 bp, Artificial Sequence
  primer
gtaaaacgacggccagtcttggtgaagcaggaggagg

SEQ ID NO: 42569 - DNA, 20 bp, Artificial Sequence
  primer
ctacttcgaccaccactggg

SEQ ID NO: 42570 - DNA, 21 bp, Artificial Sequence
  primer
cagcctggtacaagtcccaac

SEQ ID NO: 42571 - DNA, 19 bp, Artificial Sequence
  primer
agcctcccgaaagtggatg

SEQ ID NO: 42572 - DNA, 38 bp, Artificial Sequence
  primer
gtaaaacgacggccagttggcctattccatgtctctcc

SEQ ID NO: 42573 - DNA, 18 bp, Artificial Sequence
  primer
catggaactcctgctggc

SEQ ID NO: 42574 - DNA, 38 bp, Artificial Sequence
  primer
gtaaaacgacggccagtatgccatgtatgcagatggag

SEQ ID NO: 42575 - DNA, 21 bp, Artificial Sequence
  primer
cagatggaggaggatgctgag

SEQ ID NO: 42576 - DNA, 21 bp, Artificial Sequence
  primer
ctggaggtgtcactgaactcg

SEQ ID NO: 42577 - DNA, 21 bp, Artificial Sequence
  primer
aaaccagtcacacagctgctc

SEQ ID NO: 42578 - DNA, 38 bp, Artificial Sequence
  primer
gtaaaacgacggccagttaccatccacaattagctgcc

SEQ ID NO: 42579 - DNA, 37 bp, Artificial Sequence
  primer
gtaaaacgacggccagttgagcaattgactgctctgc

SEQ ID NO: 42580 - DNA, 41 bp, Artificial Sequence
  primer
gtaaaacgacggccagtgatgtgttaagctcaatgcacaac

SEQ ID NO: 42581 - DNA, 25 bp, Artificial Sequence
  primer
tcttcgtaaacctgagataccattg

SEQ ID NO: 42582 - DNA, 23 bp, Artificial Sequence
  primer
ggtgaatcaattgcttggctatc

SEQ ID NO: 42583 - DNA, 40 bp, Artificial Sequence
  primer
gtaaaacgacggccagtgacatgaaagctgttacctcgtg

SEQ ID NO: 42584 - DNA, 21 bp, Artificial Sequence
  primer
tctcacccaggaatcaggtct

SEQ ID NO: 42585 - DNA, 27 bp, Artificial Sequence
  primer
tgataatggttcctctatattgtgttg

SEQ ID NO: 42586 - DNA, 38 bp, Artificial Sequence
  primer
gtaaaacgacggccagttgagagaggcttctgtccctc

SEQ ID NO: 42587 - DNA, 21 bp, Artificial Sequence
  primer
tttacgtgcactgaaccttgc

SEQ ID NO: 42588 - DNA, 21 bp, Artificial Sequence
  primer
gaatttgacagccaaagagcc

SEQ ID NO: 42589 - DNA, 39 bp, Artificial Sequence
  primer
gtaaaacgacggccagtgctgttccacatttaggattgc

SEQ ID NO: 42590 - DNA, 38 bp, Artificial Sequence
  primer
gtaaaacgacggccagtgggacataggagagtcatggg

SEQ ID NO: 42591 - DNA, 22 bp, Artificial Sequence
  primer
tcaatgtgcagttccttctgtc

SEQ ID NO: 42592 - DNA, 21 bp, Artificial Sequence
  primer
gactggcgatgatgaactgag

SEQ ID NO: 42593 - DNA, 36 bp, Artificial Sequence
  primer
gtaaaacgacggccagtgatgggctggttgctgttc

SEQ ID NO: 42594 - DNA, 38 bp, Artificial Sequence
  primer
gtaaaacgacggccagttcccttgtatgtgagtggtcg

SEQ ID NO: 42595 - DNA, 38 bp, Artificial Sequence
  primer
gtaaaacgacggccagttagtgaggagcacaggctcag

SEQ ID NO: 42596 - DNA, 37 bp, Artificial Sequence
  primer
gtaaaacgacggccagtgcctacaccctcaggctcac

SEQ ID NO: 42597 - DNA, 38 bp, Artificial Sequence
  primer
gtaaaacgacggccagtgcctgaggatattctgtgctg

SEQ ID NO: 42598 - DNA, 20 bp, Artificial Sequence
  primer
aggatagacgccactgggag

SEQ ID NO: 42599 - DNA, 38 bp, Artificial Sequence
  primer
gtaaaacgacggccagtgcatacctcctttgggtgatg

SEQ ID NO: 42600 - DNA, 21 bp, Artificial Sequence
  primer
tccaaagtccctgctcttatt

SEQ ID NO: 42601 - DNA, 42 bp, Artificial Sequence
  primer
gtaaaacgacggccagtcagggttatgactattaactgggtc

SEQ ID NO: 42602 - DNA, 24 bp, Artificial Sequence
  primer
tgtggcttacatataggcactgaa

SEQ ID NO: 42603 - DNA, 37 bp, Artificial Sequence
  primer
gtaaaacgacggccagtgcaagtcaactgagccgttc

SEQ ID NO: 42604 - DNA, 21 bp, Artificial Sequence
  primer
aagctgcatccacgaaagaag

SEQ ID NO: 42605 - DNA, 39 bp, Artificial Sequence
  primer
gtaaaacgacggccagtctgaatgctttgttgaggtcag

SEQ ID NO: 42606 - DNA, 40 bp, Artificial Sequence
  primer
gtaaaacgacggccagtgatgaaggctacatgagtgttgg

SEQ ID NO: 42607 - DNA, 21 bp, Artificial Sequence
  primer
ccacaacgttatgtggaaacg

SEQ ID NO: 42608 - DNA, 38 bp, Artificial Sequence
  primer
gtaaaacgacggccagtatggaaactggcagactaggg

SEQ ID NO: 42609 - DNA, 30 bp, Artificial Sequence
  primer
agaacttacagatacagatttaggatacca

SEQ ID NO: 42610 - DNA, 25 bp, Artificial Sequence
  primer
tttgcctaatcttaatcgttgtctg

SEQ ID NO: 42611 - DNA, 27 bp, Artificial Sequence
  primer
cattgcagagttcagatattactgttt

SEQ ID NO: 42612 - DNA, 22 bp, Artificial Sequence
  primer
ggattgccatgtaaagttgagc

SEQ ID NO: 42613 - DNA, 38 bp, Artificial Sequence
  primer
gtaaaacgacggccagttgaactatctggctgaaaggc

SEQ ID NO: 42614 - DNA, 38 bp, Artificial Sequence
  primer
gtaaaacgacggccagttgcttgaacattgtcatggag

SEQ ID NO: 42615 - DNA, 20 bp, Artificial Sequence
  primer
gacgcgcttggatttctttc

SEQ ID NO: 42616 - DNA, 21 bp, Artificial Sequence
  primer
taaacaccagcaaagggaagg

SEQ ID NO: 42617 - DNA, 20 bp, Artificial Sequence
  primer
cctagccctggacagagacc

SEQ ID NO: 42618 - DNA, 21 bp, Artificial Sequence
  primer
tgtcccagggttgtatgagtg

SEQ ID NO: 42619 - DNA, 37 bp, Artificial Sequence
  primer
gtaaaacgacggccagtacactggctcccttcctctc

SEQ ID NO: 42620 - DNA, 38 bp, Artificial Sequence
  primer
gtaaaacgacggccagtgcatagagaagtttggcaggg

SEQ ID NO: 42621 - DNA, 21 bp, Artificial Sequence
  primer
agacgctaagtgggaggacag

SEQ ID NO: 42622 - DNA, 19 bp, Artificial Sequence
  primer
cgtgactggttcctcaggg

SEQ ID NO: 42623 - DNA, 19 bp, Artificial Sequence
  primer
tctgggctgaggcaaagac

SEQ ID NO: 42624 - DNA, 21 bp, Artificial Sequence
  primer
aggagaatgctccgtctgaag

SEQ ID NO: 42625 - DNA, 38 bp, Artificial Sequence
  primer
gtaaaacgacggccagtaacaagatggcaagtgggaag

SEQ ID NO: 42626 - DNA, 21 bp, Artificial Sequence
  primer
cttcaccatggatcagttccc

SEQ ID NO: 42627 - DNA, 38 bp, Artificial Sequence
  primer
gtaaaacgacggccagtccatgtgcaaattcactaccg

SEQ ID NO: 42628 - DNA, 38 bp, Artificial Sequence
  primer
gtaaaacgacggccagtgaaccacaagaaagccaaagc

SEQ ID NO: 42629 - DNA, 38 bp, Artificial Sequence
  primer
gtaaaacgacggccagtaaaggacatttatccgcctcc

SEQ ID NO: 42630 - DNA, 38 bp, Artificial Sequence
  primer
gtaaaacgacggccagtaagacaagctgacaggtgtgg

SEQ ID NO: 42631 - DNA, 38 bp, Artificial Sequence
  primer
gtaaaacgacggccagtcttccaggaaagctctggttc

SEQ ID NO: 42632 - DNA, 21 bp, Artificial Sequence
  primer
ttcagcgtctatgtcctgcac

SEQ ID NO: 42633 - DNA, 20 bp, Artificial Sequence
  primer
agaagtccctgctgatgctg

SEQ ID NO: 42634 - DNA, 21 bp, Artificial Sequence
  primer
agagtgaggtgacatcctccg

SEQ ID NO: 42635 - DNA, 21 bp, Artificial Sequence
  primer
aataacaggcagctttgtggg

SEQ ID NO: 42636 - DNA, 21 bp, Artificial Sequence
  primer
atctggctgaccatcctcttc

SEQ ID NO: 42637 - DNA, 21 bp, Artificial Sequence
  primer
atcttgacttggaggagcagc

SEQ ID NO: 42638 - DNA, 21 bp, Artificial Sequence
  primer
agggcattgaggatgaaacag

SEQ ID NO: 42639 - DNA, 38 bp, Artificial Sequence
  primer
gtaaaacgacggccagtagaaggatcagcatagcggac

SEQ ID NO: 42640 - DNA, 38 bp, Artificial Sequence
  primer
gtaaaacgacggccagtcactgcagagacagtgaaggc

SEQ ID NO: 42641 - DNA, 18 bp, Artificial Sequence
  primer
tgacgcgagttcacctgc

SEQ ID NO: 42642 - DNA, 21 bp, Artificial Sequence
  primer
gagtttggactccattcctcg

SEQ ID NO: 42643 - DNA, 21 bp, Artificial Sequence
  primer
gtagcagcaggtgtatccagg

SEQ ID NO: 42644 - DNA, 38 bp, Artificial Sequence
  primer
gtaaaacgacggccagtttctgaacccagaaccaactg

SEQ ID NO: 42645 - DNA, 21 bp, Artificial Sequence
  primer
ttctggaaacatctgtgtggc

SEQ ID NO: 42646 - DNA, 28 bp, Artificial Sequence
  primer
aatgcttggaatagattatacagttcag

SEQ ID NO: 42647 - DNA, 41 bp, Artificial Sequence
  primer
gtaaaacgacggccagttcttatccatgattcatagcttgc

SEQ ID NO: 42648 - DNA, 20 bp, Artificial Sequence
  primer
atctcggagagccacagagc

SEQ ID NO: 42649 - DNA, 20 bp, Artificial Sequence
  primer
gctgctcctgctcctggtag

SEQ ID NO: 42650 - DNA, 38 bp, Artificial Sequence
  primer
gtaaaacgacggccagtaccgaagtcatgtaagtcccg

SEQ ID NO: 42651 - DNA, 38 bp, Artificial Sequence
  primer
gtaaaacgacggccagtcacagcacagctgtcataggc

SEQ ID NO: 42652 - DNA, 39 bp, Artificial Sequence
  primer
gtaaaacgacggccagttggctttgcagataaatatggc

SEQ ID NO: 42653 - DNA, 38 bp, Artificial Sequence
  primer
gtaaaacgacggccagttgatgtgatccattcctcctc

SEQ ID NO: 42654 - DNA, 40 bp, Artificial Sequence
  primer
gtaaaacgacggccagtaaatgtctgacttcagaactgcg

SEQ ID NO: 42655 - DNA, 21 bp, Artificial Sequence
  primer
tttaaatgctgaggcaccatc

SEQ ID NO: 42656 - DNA, 21 bp, Artificial Sequence
  primer
caaagagggaaattcctgtgc

SEQ ID NO: 42657 - DNA, 39 bp, Artificial Sequence
  primer
gtaaaacgacggccagtcgttcaccaccagctataaacc

SEQ ID NO: 42658 - DNA, 38 bp, Artificial Sequence
  primer
gtaaaacgacggccagttgaagatgacaatggtgcagg

SEQ ID NO: 42659 - DNA, 21 bp, Artificial Sequence
  primer
ccttggttgtaacagcttccc

SEQ ID NO: 42660 - DNA, 38 bp, Artificial Sequence
  primer
gtaaaacgacggccagtgcactttcactctccgtcagc

SEQ ID NO: 42661 - DNA, 21 bp, Artificial Sequence
  primer
agtgatgccgtctcttgatcc

SEQ ID NO: 42662 - DNA, 37 bp, Artificial Sequence
  primer
gtaaaacgacggccagtatggaacttcctgcactgcc

SEQ ID NO: 42663 - DNA, 39 bp, Artificial Sequence
  primer
gtaaaacgacggccagtgctgatgatgcagctgacctac

SEQ ID NO: 42664 - DNA, 21 bp, Artificial Sequence
  primer
catatgggtggaagcactgac

SEQ ID NO: 42665 - DNA, 38 bp, Artificial Sequence
  primer
gtaaaacgacggccagttattccagatcccaaactgcc

SEQ ID NO: 42666 - DNA, 38 bp, Artificial Sequence
  primer
gtaaaacgacggccagtcccggtatctccagaggaaag

SEQ ID NO: 42667 - DNA, 21 bp, Artificial Sequence
  primer
gtgagtcaccgagtggttctg

SEQ ID NO: 42668 - DNA, 20 bp, Artificial Sequence
  primer
cgtctcgtcttgtcctgtcc

SEQ ID NO: 42669 - DNA, 38 bp, Artificial Sequence
  primer
gtaaaacgacggccagtaggaagccacagtctctcagg

SEQ ID NO: 42670 - DNA, 38 bp, Artificial Sequence
  primer
gtaaaacgacggccagtgaaggatccctcccacttctc

SEQ ID NO: 42671 - DNA, 19 bp, Artificial Sequence
  primer
agtactgagcgcacggtcg

SEQ ID NO: 42672 - DNA, 36 bp, Artificial Sequence
  primer
gtaaaacgacggccagtattggatgccagggaacag

SEQ ID NO: 42673 - DNA, 21 bp, Artificial Sequence
  primer
gactccgtctcacctactggg

SEQ ID NO: 42674 - DNA, 37 bp, Artificial Sequence
  primer
gtaaaacgacggccagtgtatcagccttgacccttgc

SEQ ID NO: 42675 - DNA, 21 bp, Artificial Sequence
  primer
gcatttacttcctaccagccc

SEQ ID NO: 42676 - DNA, 21 bp, Artificial Sequence
  primer
gacaaagagctcactcgtccc

SEQ ID NO: 42677 - DNA, 38 bp, Artificial Sequence
  primer
gtaaaacgacggccagtggccaggtcatagtgttgatg

SEQ ID NO: 42678 - DNA, 21 bp, Artificial Sequence
  primer
ttacgcaagacagtcagaccc

SEQ ID NO: 42679 - DNA, 18 bp, Artificial Sequence
  primer
ctgctcctgctcctggtg

SEQ ID NO: 42680 - DNA, 21 bp, Artificial Sequence
  primer
cgaagtcatgtaagtctcgcc

SEQ ID NO: 42681 - DNA, 38 bp, Artificial Sequence
  primer
gtaaaacgacggccagtagcatcccaagcctagaggtc

SEQ ID NO: 42682 - DNA, 38 bp, Artificial Sequence
  primer
gtaaaacgacggccagtgctttccagtctcaaccatgc

SEQ ID NO: 42683 - DNA, 18 bp, Artificial Sequence
  primer
ctgctcctgctcctggtg

SEQ ID NO: 42684 - DNA, 21 bp, Artificial Sequence
  primer
accgaagtcatgtaagtcccg

SEQ ID NO: 42685 - DNA, 21 bp, Artificial Sequence
  primer
tccacagccacttctttcttg

SEQ ID NO: 42686 - DNA, 37 bp, Artificial Sequence
  primer
gtaaaacgacggccagtctccggatcctccaatcttc

SEQ ID NO: 42687 - DNA, 20 bp, Artificial Sequence
  primer
ggtccttcgagctccttgtg

SEQ ID NO: 42688 - DNA, 38 bp, Artificial Sequence
  primer
gtaaaacgacggccagtaccttggcaagagagaaatcc

SEQ ID NO: 42689 - DNA, 39 bp, Artificial Sequence
  primer
gtaaaacgacggccagtaccaaacatcataaacgctgag

SEQ ID NO: 42690 - DNA, 21 bp, Artificial Sequence
  primer
catcccaaagcttgagtttcc

SEQ ID NO: 42691 - DNA, 21 bp, Artificial Sequence
  primer
cttgaccactatgagcctccc

SEQ ID NO: 42692 - DNA, 38 bp, Artificial Sequence
  primer
gtaaaacgacggccagtttctcctgtgttgctgtgtcc

SEQ ID NO: 42693 - DNA, 40 bp, Artificial Sequence
  primer
gtaaaacgacggccagtcatgcctgaacaattacacagag

SEQ ID NO: 42694 - DNA, 21 bp, Artificial Sequence
  primer
gcagaaattcccttggatctg

SEQ ID NO: 42695 - DNA, 38 bp, Artificial Sequence
  primer
gtaaaacgacggccagtaacgcctttggactcagagag

SEQ ID NO: 42696 - DNA, 39 bp, Artificial Sequence
  primer
gtaaaacgacggccagtcaaccagtgactcatcttgtcc

SEQ ID NO: 42697 - DNA, 20 bp, Artificial Sequence
  primer
gacagccagtttgaaggctg

SEQ ID NO: 42698 - DNA, 38 bp, Artificial Sequence
  primer
gtaaaacgacggccagtaggtaactccctggaagaggc

SEQ ID NO: 42699 - DNA, 38 bp, Artificial Sequence
  primer
gtaaaacgacggccagtagtttcctgccaggcctttac

SEQ ID NO: 42700 - DNA, 38 bp, Artificial Sequence
  primer
gtaaaacgacggccagtaaacgagagtgactcgtgctg

SEQ ID NO: 42701 - DNA, 38 bp, Artificial Sequence
  primer
gtaaaacgacggccagtagctttgaccgctacctgaac

SEQ ID NO: 42702 - DNA, 38 bp, Artificial Sequence
  primer
gtaaaacgacggccagtccactgccaatacaacttccc

SEQ ID NO: 42703 - DNA, 21 bp, Artificial Sequence
  primer
cgctgctctatgcctttgtag

SEQ ID NO: 42704 - DNA, 38 bp, Artificial Sequence
  primer
gtaaaacgacggccagtcttgtgcccttagcccactac

SEQ ID NO: 42705 - DNA, 38 bp, Artificial Sequence
  primer
gtaaaacgacggccagtctgagaagcatgacggacaag

SEQ ID NO: 42706 - DNA, 38 bp, Artificial Sequence
  primer
gtaaaacgacggccagtctcctgctgactattcccgac

SEQ ID NO: 42707 - DNA, 37 bp, Artificial Sequence
  primer
gtaaaacgacggccagtacttcagtttgttggctgcg

SEQ ID NO: 42708 - DNA, 38 bp, Artificial Sequence; identical to SEQ ID NO: 42704
  primer

SEQ ID NO: 42709 - DNA, 38 bp, Artificial Sequence; identical to SEQ ID NO: 42705
  primer

SEQ ID NO: 42710 - DNA, 38 bp, Artificial Sequence; identical to SEQ ID NO: 42706
  primer

SEQ ID NO: 42711 - DNA, 37 bp, Artificial Sequence
  primer
gtaaaacgacggccagtatcccagtgggtgggtttag

SEQ ID NO: 42712 - DNA, 38 bp, Artificial Sequence
  primer
gtaaaacgacggccagtagtttcaatgacagcagccag

SEQ ID NO: 42713 - DNA, 38 bp, Artificial Sequence
  primer
gtaaaacgacggccagttctacacgtccatgctcatcc

SEQ ID NO: 42714 - DNA, 21 bp, Artificial Sequence
  primer
atctgggtgatatccctgctg

SEQ ID NO: 42715 - DNA, 21 bp, Artificial Sequence
  primer
tatgccatgaccagctttcac

SEQ ID NO: 42716 - DNA, 40 bp, Artificial Sequence
  primer
gtaaaacgacggccagtgacgcctactgagagaactcaaa

SEQ ID NO: 42717 - DNA, 38 bp, Artificial Sequence
  primer
gtaaaacgacggccagtcgtattgaaggctgctctctg

SEQ ID NO: 42718 - DNA, 21 bp, Artificial Sequence
  primer
gctacctgaaggacgtgttcg

SEQ ID NO: 42719 - DNA, 21 bp, Artificial Sequence
  primer
cctggctgttcctctctcttg

SEQ ID NO: 42720 - DNA, 37 bp, Artificial Sequence
  primer
gtaaaacgacggccagtacgtgggaagtctcacatgc

SEQ ID NO: 42721 - DNA, 42 bp, Artificial Sequence
  primer
gtaaaacgacggccagtctatgatgttccattgcttgtaaac

SEQ ID NO: 42722 - DNA, 38 bp, Artificial Sequence
  primer
gtaaaacgacggccagttcagagcacgggaattgttag

SEQ ID NO: 42723 - DNA, 38 bp, Artificial Sequence
  primer
gtaaaacgacggccagtagagaagggtggcagtgtagc

SEQ ID NO: 42724 - DNA, 38 bp, Artificial Sequence
  primer
gtaaaacgacggccagtattgcagcagcttctcttgtg

SEQ ID NO: 42725 - DNA, 38 bp, Artificial Sequence
  primer
gtaaaacgacggccagtgtgagcagggtgctgtaactg

SEQ ID NO: 42726 - DNA, 38 bp, Artificial Sequence
  primer
gtaaaacgacggccagtcaggtaaatggcaatttgtgg

SEQ ID NO: 42727 - DNA, 21 bp, Artificial Sequence
  primer
caaggattggatgtgcatttg

SEQ ID NO: 42728 - DNA, 21 bp, Artificial Sequence
  primer
taagctctgctaccgacaggc

SEQ ID NO: 42729 - DNA, 38 bp, Artificial Sequence
  primer
gtaaaacgacggccagtatggctgagctggcttaattt

SEQ ID NO: 42730 - DNA, 38 bp, Artificial Sequence
  primer
gtaaaacgacggccagtagtgactagagcccatcctcg

SEQ ID NO: 42731 - DNA, 18 bp, Artificial Sequence
  primer
cagcagcagcagcacttg

SEQ ID NO: 42732 - DNA, 35 bp, Artificial Sequence
  primer
gtaaaacgacggccagtgccttgggtgcctactcc

SEQ ID NO: 42733 - DNA, 20 bp, Artificial Sequence
  primer
taccagacggattgggtgtg

SEQ ID NO: 42734 - DNA, 22 bp, Artificial Sequence
  primer
gttgctaaacctcctgaccttc

SEQ ID NO: 42735 - DNA, 35 bp, Artificial Sequence
  primer
gtaaaacgacggccagtccctttcatggcctggag

SEQ ID NO: 42736 - DNA, 40 bp, Artificial Sequence
  primer
gtaaaacgacggccagtccaaatgtgaattccatatctcc

SEQ ID NO: 42737 - DNA, 21 bp, Artificial Sequence
  primer
tccctgcctaatcttgtctgc

SEQ ID NO: 42738 - DNA, 38 bp, Artificial Sequence
  primer
gtaaaacgacggccagtggttctcagcatggcacatag

SEQ ID NO: 42739 - DNA, 38 bp, Artificial Sequence
  primer
gtaaaacgacggccagtgtcacaacttctgagggagcc

SEQ ID NO: 42740 - DNA, 21 bp, Artificial Sequence
  primer
gggtccagaacaggcatctta

SEQ ID NO: 42741 - DNA, 24 bp, Artificial Sequence
  primer
tttagtaggccacagaggctacag

SEQ ID NO: 42742 - DNA, 37 bp, Artificial Sequence
  primer
gtaaaacgacggccagtagcctgtcaatgtcctgtgg

SEQ ID NO: 42743 - DNA, 40 bp, Artificial Sequence
  primer
gtaaaacgacggccagtgccaagtactggctcatgatagg

SEQ ID NO: 42744 - DNA, 38 bp, Artificial Sequence
  primer
gtaaaacgacggccagttggaagaatcagcatgacagg

SEQ ID NO: 42745 - DNA, 38 bp, Artificial Sequence
  primer
gtaaaacgacggccagtacctagagtgctccatcctgg

SEQ ID NO: 42746 - DNA, 37 bp, Artificial Sequence
  primer
gtaaaacgacggccagtaagtaatccgcccgactcag

SEQ ID NO: 42747 - DNA, 20 bp, Artificial Sequence
  primer
gggcatctgactgaagaggg

SEQ ID NO: 42748 - DNA, 38 bp, Artificial Sequence
  primer
gtaaaacgacggccagtaaccagcttgaggtcttctgg

SEQ ID NO: 42749 - DNA, 21 bp, Artificial Sequence
  primer
ggccagcacttcattgtcttc

SEQ ID NO: 42750 - DNA, 38 bp, Artificial Sequence
  primer
gtaaaacgacggccagtccaattctcccacaactttgc

SEQ ID NO: 42751 - DNA, 39 bp, Artificial Sequence
  primer
gtaaaacgacggccagtcgagtgtacgcagttaccacac

SEQ ID NO: 42752 - DNA, 23 bp, Artificial Sequence
  primer
tttattgctctacgaaattggaa

SEQ ID NO: 42753 - DNA, 41 bp, Artificial Sequence
  primer
gtaaaacgacggccagtggttgaatttacagctcagtttgg

SEQ ID NO: 42754 - DNA, 38 bp, Artificial Sequence
  primer
gtaaaacgacggccagtagcattctgagagcatatccg

SEQ ID NO: 42755 - DNA, 41 bp, Artificial Sequence
  primer
gtaaaacgacggccagtgagaaattgaagtcttaggaaccg

SEQ ID NO: 42756 - DNA, 21 bp, Artificial Sequence
  primer
tctagcatatcaccaccagcg

SEQ ID NO: 42757 - DNA, 40 bp, Artificial Sequence
  primer
gtaaaacgacggccagttttcctttgtgtgtgaatgtctg

SEQ ID NO: 42758 - DNA, 24 bp, Artificial Sequence
  primer
tttatatggataagtcggctaggg

SEQ ID NO: 42759 - DNA, 40 bp, Artificial Sequence
  primer
gtaaaacgacggccagtttcctgaaggatagtttcacctg

SEQ ID NO: 42760 - DNA, 20 bp, Artificial Sequence
  primer
ccagtgggcagaggttgtag

SEQ ID NO: 42761 - DNA, 39 bp, Artificial Sequence
  primer
gtaaaacgacggccagttctgcatttgccttatttgaag

SEQ ID NO: 42762 - DNA, 24 bp, Artificial Sequence
  primer
cctcattgggtggaatttctaaac

SEQ ID NO: 42763 - DNA, 35 bp, Artificial Sequence
  primer
gtaaaacgacggccagtacctggtgggcctggtag

SEQ ID NO: 42764 - DNA, 24 bp, Artificial Sequence
  primer
tttaacctctcaaattcttgagcc

SEQ ID NO: 42765 - DNA, 43 bp, Artificial Sequence
  primer
gtaaaacgacggccagtcagtcgcagtagtagaatgaaagttg

SEQ ID NO: 42766 - DNA, 38 bp, Artificial Sequence
  primer
gtaaaacgacggccagttagcacatgccatagtcctgg

SEQ ID NO: 42767 - DNA, 38 bp, Artificial Sequence
  primer
gtaaaacgacggccagtccctttcctattcctctgtgg

SEQ ID NO: 42768 - DNA, 21 bp, Artificial Sequence
  primer
caatcctgtgtttgaaagccc

SEQ ID NO: 42769 - DNA, 21 bp, Artificial Sequence
  primer
cctatccagcggtactcatcc

SEQ ID NO: 42770 - DNA, 38 bp, Artificial Sequence
  primer
gtaaaacgacggccagtaatgagagcagggcttgaaac

SEQ ID NO: 42771 - DNA, 18 bp, Artificial Sequence
  primer
tcatgattcgctggcctc

SEQ ID NO: 42772 - DNA, 38 bp, Artificial Sequence
  primer
gtaaaacgacggccagtcaaacatgccaccagtagacc

SEQ ID NO: 42773 - DNA, 39 bp, Artificial Sequence
  primer
gtaaaacgacggccagtctgggtaaagtatgttggtccc

SEQ ID NO: 42774 - DNA, 21 bp, Artificial Sequence
  primer
tctgtttgtcgaaatgtgtgg

SEQ ID NO: 42775 - DNA, 21 bp, Artificial Sequence
  primer
ttgtatgatgtgccttggtca

SEQ ID NO: 42776 - DNA, 38 bp, Artificial Sequence
  primer
gtaaaacgacggccagtctggctgtgcagtaaatttgg

SEQ ID NO: 42777 - DNA, 22 bp, Artificial Sequence
  primer
tgagctacccaatttgcattag

SEQ ID NO: 42778 - DNA, 23 bp, Artificial Sequence
  primer
ccattatgagctagctttccttg

SEQ ID NO: 42779 - DNA, 44 bp, Artificial Sequence
  primer
gtaaaacgacggccagtggagttgagcatttaagttagaatcaa

SEQ ID NO: 42780 - DNA, 38 bp, Artificial Sequence
  primer
gtaaaacgacggccagtgaaattggctaggaggctgtc

SEQ ID NO: 42781 - DNA, 38 bp, Artificial Sequence
  primer
gtaaaacgacggccagtatgcactatgggaaaggcttg

SEQ ID NO: 42782 - DNA, 38 bp, Artificial Sequence
  primer
gtaaaacgacggccagtgtctgtgagaagaaaggcacg

SEQ ID NO: 42783 - DNA, 21 bp, Artificial Sequence
  primer
tcagggccttctgtccttaac

SEQ ID NO: 42784 - DNA, 24 bp, Artificial Sequence
  primer
tctgatttgaaagaactcagagcc

SEQ ID NO: 42785 - DNA, 21 bp, Artificial Sequence
  primer
ttactcttgtttgggcttggg

SEQ ID NO: 42786 - DNA, 41 bp, Artificial Sequence
  primer
gtaaaacgacggccagtgatttgagaaccactaaagcttcc

SEQ ID NO: 42787 - DNA, 43 bp, Artificial Sequence
  primer
gtaaaacgacggccagtcattagcaggatgagtacaaggtaac

SEQ ID NO: 42788 - DNA, 21 bp, Artificial Sequence
  primer
cgcattgctaacctccaactt

SEQ ID NO: 42789 - DNA, 39 bp, Artificial Sequence
  primer
gtaaaacgacggccagtccctgctttgtgttcttaatcc

SEQ ID NO: 42790 - DNA, 19 bp, Artificial Sequence
  primer
acccaaccacccactcatc

SEQ ID NO: 42791 - DNA, 38 bp, Artificial Sequence
  primer
gtaaaacgacggccagtgggatgccttcactgaaactc

SEQ ID NO: 42792 - DNA, 38 bp, Artificial Sequence
  primer
gtaaaacgacggccagtgatctctcaagcagtccagcc

SEQ ID NO: 42793 - DNA, 20 bp, Artificial Sequence
  primer
ttacaggcacgagtcactgc

SEQ ID NO: 42794 - DNA, 38 bp, Artificial Sequence
  primer
gtaaaacgacggccagtagtttggtagccctcttgagc

SEQ ID NO: 42795 - DNA, 38 bp, Artificial Sequence
  primer
gtaaaacgacggccagtctgccctgagaaccataaagg

SEQ ID NO: 42796 - DNA, 38 bp, Artificial Sequence
  primer
gtaaaacgacggccagtaagtccctctcctggccttag

SEQ ID NO: 42797 - DNA, 21 bp, Artificial Sequence
  primer
agccctggtcatcagagtgag

SEQ ID NO: 42798 - DNA, 21 bp, Artificial Sequence
  primer
gtcctaagggaagcctagtcg

SEQ ID NO: 42799 - DNA, 43 bp, Artificial Sequence
  primer
gtaaaacgacggccagtttcctccagtatttattaggaaatgg

SEQ ID NO: 42800 - DNA, 21 bp, Artificial Sequence
  primer
gatgaggattcctgttctgcc

SEQ ID NO: 42801 - DNA, 25 bp, Artificial Sequence
  primer
ggtagtgaatacataggaaagctgg

SEQ ID NO: 42802 - DNA, 40 bp, Artificial Sequence
  primer
gtaaaacgacggccagtgcaaatctctttaaccttcctgc

SEQ ID NO: 42803 - DNA, 21 bp, Artificial Sequence
  primer
tggcttaccaggagagcaaag

SEQ ID NO: 42804 - DNA, 45 bp, Artificial Sequence
  primer
gtaaaacgacggccagttggtgctttgtgttatatgatttagaga

SEQ ID NO: 42805 - DNA, 38 bp, Artificial Sequence
  primer
gtaaaacgacggccagtggtactggacagaggtcgagg

SEQ ID NO: 42806 - DNA, 38 bp, Artificial Sequence
  primer
gtaaaacgacggccagtcgctgctgtcttcccagtatc

SEQ ID NO: 42807 - DNA, 40 bp, Artificial Sequence
  primer
gtaaaacgacggccagttggatgaatgggtttgatagttg

SEQ ID NO: 42808 - DNA, 21 bp, Artificial Sequence
  primer
ggtttgcctcatctgttctgc

SEQ ID NO: 42809 - DNA, 37 bp, Artificial Sequence
  primer
gtaaaacgacggccagtttacaggcatgcacaaccac

SEQ ID NO: 42810 - DNA, 38 bp, Artificial Sequence
  primer
gtaaaacgacggccagtcatatgccataccctccaagc

SEQ ID NO: 42811 - DNA, 21 bp, Artificial Sequence
  primer
tggccatgagattgtatttgc

SEQ ID NO: 42812 - DNA, 40 bp, Artificial Sequence
  primer
gtaaaacgacggccagtcacaaacaatcacctagcatgag

SEQ ID NO: 42813 - DNA, 21 bp, Artificial Sequence
  primer
cacatctgactactgcagggc

SEQ ID NO: 42814 - DNA, 35 bp, Artificial Sequence
  primer
gtaaaacgacggccagtatgtgccaccacacctgg

SEQ ID NO: 42815 - DNA, 21 bp, Artificial Sequence
  primer
tgaactgtgattgtgccattg

SEQ ID NO: 42816 - DNA, 38 bp, Artificial Sequence
  primer
gtaaaacgacggccagttgcgtttctgtgaagctgaag

SEQ ID NO: 42817 - DNA, 37 bp, Artificial Sequence
  primer
gtaaaacgacggccagtctggctctgaacctgtttcc

SEQ ID NO: 42818 - DNA, 37 bp, Artificial Sequence
  primer
gtaaaacgacggccagtgaacacagtggaagggcctc

SEQ ID NO: 42819 - DNA, 38 bp, Artificial Sequence
  primer
gtaaaacgacggccagtaaagagaaacctgggaggctg

SEQ ID NO: 42820 - DNA, 36 bp, Artificial Sequence
  primer
gtaaaacgacggccagtccctgtcttcctgtccctg

SEQ ID NO: 42821 - DNA, 21 bp, Artificial Sequence
  primer
ccatttgcatttaacagccag

SEQ ID NO: 42822 - DNA, 38 bp, Artificial Sequence
  primer
gtaaaacgacggccagtcgtgctcgctcacagaactac

SEQ ID NO: 42823 - DNA, 38 bp, Artificial Sequence
  primer
gtaaaacgacggccagtgaactgtaggcatcctccctg

SEQ ID NO: 42824 - DNA, 36 bp, Artificial Sequence
  primer
gtaaaacgacggccagtagcctaggcccaagtctcc

SEQ ID NO: 42825 - DNA, 38 bp, Artificial Sequence
  primer
gtaaaacgacggccagtgactgaacgtgagaacgcaag

SEQ ID NO: 42826 - DNA, 38 bp, Artificial Sequence
  primer
gtaaaacgacggccagtccatggatcttctcttgtccc

SEQ ID NO: 42827 - DNA, 21 bp, Artificial Sequence
  primer
gccagaattgagttccagagg

SEQ ID NO: 42828 - DNA, 37 bp, Artificial Sequence
  primer
gtaaaacgacggccagtcttagtgggaaggctggagg

SEQ ID NO: 42829 - DNA, 38 bp, Artificial Sequence
  primer
gtaaaacgacggccagtcatagtcacagtctggccacc

SEQ ID NO: 42830 - DNA, 21 bp, Artificial Sequence
  primer
aggccactcaggtgtcagatg

SEQ ID NO: 42831 - DNA, 37 bp, Artificial Sequence
  primer
gtaaaacgacggccagtccagcgtggagctgttagag

SEQ ID NO: 42832 - DNA, 21 bp, Artificial Sequence
  primer
agtacagcagagcgtgagcag

SEQ ID NO: 42833 - DNA, 38 bp, Artificial Sequence
  primer
gtaaaacgacggccagtttgcagagaggtaagcagtgg

SEQ ID NO: 42834 - DNA, 21 bp, Artificial Sequence
  primer
agctggtaaggcctgtgtgag

SEQ ID NO: 42835 - DNA, 38 bp, Artificial Sequence
  primer
gtaaaacgacggccagtcacacacaatccatcccagtc

SEQ ID NO: 42836 - DNA, 38 bp, Artificial Sequence
  primer
gtaaaacgacggccagtggctttgtttcatggaggatg

SEQ ID NO: 42837 - DNA, 38 bp, Artificial Sequence
  primer
gtaaaacgacggccagtccttcttagggcatggagatg

SEQ ID NO: 42838 - DNA, 21 bp, Artificial Sequence
  primer
tttgggtagagggaacaccac

SEQ ID NO: 42839 - DNA, 18 bp, Artificial Sequence
  primer
gtacttcccaggctccgc

SEQ ID NO: 42840 - DNA, 37 bp, Artificial Sequence
  primer
gtaaaacgacggccagtagagcgcaagtgtcctgttc

SEQ ID NO: 42841 - DNA, 37 bp, Artificial Sequence
  primer
gtaaaacgacggccagtttggccaaggtttagctgtg

SEQ ID NO: 42842 - DNA, 38 bp, Artificial Sequence
  primer
gtaaaacgacggccagtggtacatgccagattatgccc

SEQ ID NO: 42843 - DNA, 26 bp, Artificial Sequence
  primer
ttaatatggatccagttcattgtgtt

SEQ ID NO: 42844 - DNA, 38 bp, Artificial Sequence
  primer
gtaaaacgacggccagtgcacgtgagtaggagccagtc

SEQ ID NO: 42845 - DNA, 36 bp, Artificial Sequence
  primer
gtaaaacgacggccagtgcgactgcggacaggttag

SEQ ID NO: 42846 - DNA, 40 bp, Artificial Sequence
  primer
gtaaaacgacggccagtcatctgtacctctatccactccc

SEQ ID NO: 42847 - DNA, 22 bp, Artificial Sequence
  primer
gcagcacgtcagtctcataaac

SEQ ID NO: 42848 - DNA, 22 bp, Artificial Sequence
  primer
ttgcctgtttaaagctactggg

SEQ ID NO: 42849 - DNA, 21 bp, Artificial Sequence
  primer
cgtatgcatctgcagcacttt

SEQ ID NO: 42850 - DNA, 37 bp, Artificial Sequence
  primer
gtaaaacgacggccagtgccagtggctcacttattgg

SEQ ID NO: 42851 - DNA, 21 bp, Artificial Sequence
  primer
tgacagacggaagcaggagac

SEQ ID NO: 42852 - DNA, 21 bp, Artificial Sequence
  primer
ctctcctctgcctttctggag

SEQ ID NO: 42853 - DNA, 36 bp, Artificial Sequence
  primer
gtaaaacgacggccagtcatgagcttgaagggctgg

SEQ ID NO: 42854 - DNA, 20 bp, Artificial Sequence
  primer
ctgtgttgtcacatgggcag

SEQ ID NO: 42855 - DNA, 38 bp, Artificial Sequence
  primer
gtaaaacgacggccagtgaaccaatggagtgatccagg

SEQ ID NO: 42856 - DNA, 23 bp, Artificial Sequence
  primer
gggtaattaaagtggaaagctcc

SEQ ID NO: 42857 - DNA, 23 bp, Artificial Sequence
  primer
aacccaaactgagtgtgaagaag

SEQ ID NO: 42858 - DNA, 23 bp, Artificial Sequence
  primer
aagacctgcaagcactttatttg

SEQ ID NO: 42859 - DNA, 38 bp, Artificial Sequence
  primer
gtaaaacgacggccagtagatagggcatagcctggcac

SEQ ID NO: 42860 - DNA, 25 bp, Artificial Sequence
  primer
gcatatgttgtttgcaattgtctta

SEQ ID NO: 42861 - DNA, 39 bp, Artificial Sequence
  primer
gtaaaacgacggccagtcaacgtactcgcaatagttccc

SEQ ID NO: 42862 - DNA, 23 bp, Artificial Sequence
  primer
tcagctctgctgaacatattgaa

SEQ ID NO: 42863 - DNA, 21 bp, Artificial Sequence
  primer
agcttggaagcattgaaattg

SEQ ID NO: 42864 - DNA, 43 bp, Artificial Sequence
  primer
gtaaaacgacggccagtttcttgatacatattagttggatggg

SEQ ID NO: 42865 - DNA, 21 bp, Artificial Sequence
  primer
tatccttccagacgtgggttg

SEQ ID NO: 42866 - DNA, 21 bp, Artificial Sequence
  primer
cagtccagccagttcatcaag

SEQ ID NO: 42867 - DNA, 38 bp, Artificial Sequence
  primer
gtaaaacgacggccagtgaaccagttgggattcaaagg

SEQ ID NO: 42868 - DNA, 21 bp, Artificial Sequence
  primer
tgctgaggatgaatatgccag

SEQ ID NO: 42869 - DNA, 40 bp, Artificial Sequence
  primer
gtaaaacgacggccagtagtgtgtgaaatctttggtgttg

SEQ ID NO: 42870 - DNA, 38 bp, Artificial Sequence
  primer
gtaaaacgacggccagtatcgtagcacatctcaccctg

SEQ ID NO: 42871 - DNA, 42 bp, Artificial Sequence
  primer
gtaaaacgacggccagttttatgcagcattcattcattattt

SEQ ID NO: 42872 - DNA, 22 bp, Artificial Sequence
  primer
tttcctttgaatgcattgtttg

SEQ ID NO: 42873 - DNA, 21 bp, Artificial Sequence
  primer
aaaggtagagggaggtggctc

SEQ ID NO: 42874 - DNA, 20 bp, Artificial Sequence
  primer
gggtctttccaagaagggag

SEQ ID NO: 42875 - DNA, 21 bp, Artificial Sequence
  primer
aggataattcaccatgggagg

SEQ ID NO: 42876 - DNA, 38 bp, Artificial Sequence
  primer
gtaaaacgacggccagttgctacctctttgtttgcctg

SEQ ID NO: 42877 - DNA, 38 bp, Artificial Sequence
  primer
gtaaaacgacggccagttgccagtattgcagagagcag

SEQ ID NO: 42878 - DNA, 41 bp, Artificial Sequence
  primer
gtaaaacgacggccagtttggtaagtctgatttcattgctg

SEQ ID NO: 42879 - DNA, 24 bp, Artificial Sequence
  primer
caatagcagttcacattgttaggc

SEQ ID NO: 42880 - DNA, 24 bp, Artificial Sequence
  primer
cagctagtctgtggcttcaatatc

SEQ ID NO: 42881 - DNA, 24 bp, Artificial Sequence
  primer
tctagaagtgatctggcattcatc

SEQ ID NO: 42882 - DNA, 24 bp, Artificial Sequence
  primer
ggcaaagatcactgaaagactgtt

SEQ ID NO: 42883 - DNA, 46 bp, Artificial Sequence
  primer
gtaaaacgacggccagtaaggtttacataaagattgactttcagtg

SEQ ID NO: 42884 - DNA, 22 bp, Artificial Sequence
  primer
gacctcaagttatctgcccatc

SEQ ID NO: 42885 - DNA, 21 bp, Artificial Sequence
  primer
tcattgctacctcacctgaaa

SEQ ID NO: 42886 - DNA, 21 bp, Artificial Sequence
  primer
catccatttatgttgcatggg

SEQ ID NO: 42887 - DNA, 38 bp, Artificial Sequence
  primer
gtaaaacgacggccagtagcaggaagtgagtccctgag

SEQ ID NO: 42888 - DNA, 38 bp, Artificial Sequence
  primer
gtaaaacgacggccagtgggttatgcagatggtgagtg

SEQ ID NO: 42889 - DNA, 39 bp, Artificial Sequence
  primer
gtaaaacgacggccagttcatctcaagtcaatggtccac

SEQ ID NO: 42890 - DNA, 38 bp, Artificial Sequence
  primer
gtaaaacgacggccagtgatgcatgcttcacactttcc

SEQ ID NO: 42891 - DNA, 18 bp, Artificial Sequence
  primer
cgtttcccaggtgctgct

SEQ ID NO: 42892 - DNA, 22 bp, Artificial Sequence
  primer
gccgaagaggatgaggaaatac

SEQ ID NO: 42893 - DNA, 20 bp, Artificial Sequence
  primer
cacttgtgcatgtgtcccag

SEQ ID NO: 42894 - DNA, 25 bp, Artificial Sequence
  primer
tttgaaacatttcattattcgtgag

SEQ ID NO: 42895 - DNA, 38 bp, Artificial Sequence
  primer
gtaaaacgacggccagtacttcagggtgctttctgagc

SEQ ID NO: 42896 - DNA, 37 bp, Artificial Sequence
  primer
gtaaaacgacggccagttactcttgggctaggcaggc

SEQ ID NO: 42897 - DNA, 38 bp, Artificial Sequence
  primer
gtaaaacgacggccagtgcttctagagggacctttggg

SEQ ID NO: 42898 - DNA, 21 bp, Artificial Sequence
  primer
ggatatcaggtctcagggctc

SEQ ID NO: 42899 - DNA, 37 bp, Artificial Sequence
  primer
gtaaaacgacggccagtctccagacgaacccagtttg

SEQ ID NO: 42900 - DNA, 39 bp, Artificial Sequence
  primer
gtaaaacgacggccagtcagagctttggtgagagacagc

SEQ ID NO: 42901 - DNA, 39 bp, Artificial Sequence
  primer
gtaaaacgacggccagttggtgatagagtggaaacatgc

SEQ ID NO: 42902 - DNA, 39 bp, Artificial Sequence
  primer
gtaaaacgacggccagttgcacatttcctgttcattagc

SEQ ID NO: 42903 - DNA, 38 bp, Artificial Sequence
  primer
gtaaaacgacggccagtagtttccagacatggctgatg

SEQ ID NO: 42904 - DNA, 37 bp, Artificial Sequence
  primer
gtaaaacgacggccagtgacgaagccagaagagccac

SEQ ID NO: 42905 - DNA, 38 bp, Artificial Sequence
  primer
gtaaaacgacggccagttgtcaccgagttcttcaatgg

SEQ ID NO: 42906 - DNA, 38 bp, Artificial Sequence
  primer
gtaaaacgacggccagtaccttgtcgggtagcactctc

SEQ ID NO: 42907 - DNA, 38 bp, Artificial Sequence
  primer
gtaaaacgacggccagtacagtgttccctgatccgaag

SEQ ID NO: 42908 - DNA, 38 bp, Artificial Sequence
  primer
gtaaaacgacggccagtgtcatttgatagaccatgcgg

SEQ ID NO: 42909 - DNA, 38 bp, Artificial Sequence
  primer
gtaaaacgacggccagtgacactcagggcagtgacaag

SEQ ID NO: 42910 - DNA, 41 bp, Artificial Sequence
  primer
gtaaaacgacggccagttttaacccaggtgcagaatcttac

SEQ ID NO: 42911 - DNA, 38 bp, Artificial Sequence
  primer
gtaaaacgacggccagtaagcttggacttccttcctcc

SEQ ID NO: 42912 - DNA, 38 bp, Artificial Sequence
  primer
gtaaaacgacggccagtctctgggctgtgggtattgtg

SEQ ID NO: 42913 - DNA, 37 bp, Artificial Sequence
  primer
gtaaaacgacggccagtcctccagcttctgctgtgac

SEQ ID NO: 42914 - DNA, 38 bp, Artificial Sequence
  primer
gtaaaacgacggccagttgccattcagcctataagtgg

SEQ ID NO: 42915 - DNA, 21 bp, Artificial Sequence
  primer
acccttgggatttctaggcag

SEQ ID NO: 42916 - DNA, 21 bp, Artificial Sequence
  primer
acagtgtcagtggaggccaag

SEQ ID NO: 42917 - DNA, 38 bp, Artificial Sequence
  primer
gtaaaacgacggccagtaggtttgagcttggtcctcac

SEQ ID NO: 42918 - DNA, 20 bp, Artificial Sequence
  primer
aggtgcccagaaggagagac

SEQ ID NO: 42919 - DNA, 37 bp, Artificial Sequence
  primer
gtaaaacgacggccagtagaacacgttctccagcgac

SEQ ID NO: 42920 - DNA, 21 bp, Artificial Sequence
  primer
ggaggacgaggacttctaggc

SEQ ID NO: 42921 - DNA, 21 bp, Artificial Sequence
  primer
tgcctttgttccaggaatagc

SEQ ID NO: 42922 - DNA, 38 bp, Artificial Sequence
  primer
gtaaaacgacggccagtcaataggagtacgctgcctgg

SEQ ID NO: 42923 - DNA, 38 bp, Artificial Sequence
  primer
gtaaaacgacggccagtgaccacggtggagttgtaatg

SEQ ID NO: 42924 - DNA, 38 bp, Artificial Sequence
  primer
gtaaaacgacggccagtaaaccggacatcaactgcttc

SEQ ID NO: 42925 - DNA, 21 bp, Artificial Sequence
  primer
agggagcgaagaggaagaaag

SEQ ID NO: 42926 - DNA, 21 bp, Artificial Sequence
  primer
tggatgtgtaaagtggttccg

SEQ ID NO: 42927 - DNA, 38 bp, Artificial Sequence
  primer
gtaaaacgacggccagttggtcatgcatgttggtacag

SEQ ID NO: 42928 - DNA, 21 bp, Artificial Sequence
  primer
gtacttcccttcctcggtgag

SEQ ID NO: 42929 - DNA, 38 bp, Artificial Sequence
  primer
gtaaaacgacggccagtgacagagggtatggaaggctg

SEQ ID NO: 42930 - DNA, 38 bp, Artificial Sequence
  primer
gtaaaacgacggccagttagaatggagcaagggtctgg

SEQ ID NO: 42931 - DNA, 21 bp, Artificial Sequence
  primer
actacccactcacccatccac

SEQ ID NO: 42932 - DNA, 37 bp, Artificial Sequence
  primer
gtaaaacgacggccagtgaggccatcattctacgtgc

SEQ ID NO: 42933 - DNA, 39 bp, Artificial Sequence
  primer
gtaaaacgacggccagtgccttattgttccttccattcc

SEQ ID NO: 42934 - DNA, 21 bp, Artificial Sequence
  primer
gcattgaagggtaagtgaggg

SEQ ID NO: 42935 - DNA, 20 bp, Artificial Sequence
  primer
gttccctgaaccctccattc

SEQ ID NO: 42936 - DNA, 38 bp, Artificial Sequence
  primer
gtaaaacgacggccagtatgtggtaggtttccatgtcg

SEQ ID NO: 42937 - DNA, 19 bp, Artificial Sequence
  primer
accgaaacgactcccagag

SEQ ID NO: 42938 - DNA, 21 bp, Artificial Sequence
  primer
ctgaacactgcagacctttgg

SEQ ID NO: 42939 - DNA, 21 bp, Artificial Sequence
  primer
cctatacgtgtttcaggctgc

SEQ ID NO: 42940 - DNA, 38 bp, Artificial Sequence
  primer
gtaaaacgacggccagtcggaacaagagcggtatcatc

SEQ ID NO: 42941 - DNA, 38 bp, Artificial Sequence
  primer
gtaaaacgacggccagtagcaaccctacctcaaagcac

SEQ ID NO: 42942 - DNA, 21 bp, Artificial Sequence
  primer
caggcctcttcattatgaccc

SEQ ID NO: 42943 - DNA, 36 bp, Artificial Sequence
  primer
gtaaaacgacggccagtgaacgtctttgctccaggc

SEQ ID NO: 42944 - DNA, 38 bp, Artificial Sequence
  primer
gtaaaacgacggccagtagcagtgcatccagattctcc

SEQ ID NO: 42945 - DNA, 21 bp, Artificial Sequence
  primer
gagtccttaacctgcaatggg

SEQ ID NO: 42946 - DNA, 21 bp, Artificial Sequence
  primer
aagacacccaagtccttcctg

SEQ ID NO: 42947 - DNA, 38 bp, Artificial Sequence
  primer
gtaaaacgacggccagttttggtcccaaagagttgagg

SEQ ID NO: 42948 - DNA, 39 bp, Artificial Sequence
  primer
gtaaaacgacggccagtttagaaactgcttggctcttgg

SEQ ID NO: 42949 - DNA, 21 bp, Artificial Sequence
  primer
cctttggtgctatcccacatc

SEQ ID NO: 42950 - DNA, 21 bp, Artificial Sequence
  primer
ttgcagtccagggtgctatac

SEQ ID NO: 42951 - DNA, 21 bp, Artificial Sequence
  primer
actcttccatgcttcactggg

SEQ ID NO: 42952 - DNA, 21 bp, Artificial Sequence
  primer
agcaagcaagatggctacctc

SEQ ID NO: 42953 - DNA, 38 bp, Artificial Sequence
  primer
gtaaaacgacggccagtgatcctcccatcttgtcctcc

SEQ ID NO: 42954 - DNA, 21 bp, Artificial Sequence
  primer
caacaaaccagtaaatggccc

SEQ ID NO: 42955 - DNA, 38 bp, Artificial Sequence
  primer
gtaaaacgacggccagtaagaattcggcaagacattgg

SEQ ID NO: 42956 - DNA, 21 bp, Artificial Sequence
  primer
ccatagaggccctgactcaac

SEQ ID NO: 42957 - DNA, 38 bp, Artificial Sequence
  primer
gtaaaacgacggccagtaacaaagttcatgcaacacgg

SEQ ID NO: 42958 - DNA, 21 bp, Artificial Sequence
  primer
caatgatttgcatcagttgcc

SEQ ID NO: 42959 - DNA, 19 bp, Artificial Sequence
  primer
aatgatcggcagaagtggg

SEQ ID NO: 42960 - DNA, 21 bp, Artificial Sequence
  primer
atggaaaccactggctcaaac

SEQ ID NO: 42961 - DNA, 39 bp, Artificial Sequence
  primer
gtaaaacgacggccagtggtacagttaacggtgaatgcc

SEQ ID NO: 42962 - DNA, 21 bp, Artificial Sequence
  primer
accaaatacggtttcagcagg

SEQ ID NO: 42963 - DNA, 21 bp, Artificial Sequence
  primer
aaatttcatgggctgttgtcc

SEQ ID NO: 42964 - DNA, 38 bp, Artificial Sequence
  primer
gtaaaacgacggccagtaagatgttcaaagccaaagcc

SEQ ID NO: 42965 - DNA, 21 bp, Artificial Sequence
  primer
ggaggattgcttgaagctagg

SEQ ID NO: 42966 - DNA, 21 bp, Artificial Sequence
  primer
cggttctttaggcatccatcc

SEQ ID NO: 42967 - DNA, 21 bp, Artificial Sequence
  primer
ttgtgcattaaccaccatcag

SEQ ID NO: 42968 - DNA, 38 bp, Artificial Sequence
  primer
gtaaaacgacggccagtgtgctttctcctgaatgttgc

SEQ ID NO: 42969 - DNA, 38 bp, Artificial Sequence
  primer
gtaaaacgacggccagtaggcaacaacacgaaggtagg

SEQ ID NO: 42970 - DNA, 20 bp, Artificial Sequence
  primer
caaccaacacaacatcagcg

SEQ ID NO: 42971 - DNA, 21 bp, Artificial Sequence
  primer
agtgaaagaggcatctccagg

SEQ ID NO: 42972 - DNA, 38 bp, Artificial Sequence
  primer
gtaaaacgacggccagttcctcacctctcctcaagacc

SEQ ID NO: 42973 - DNA, 27 bp, Artificial Sequence
  primer
caagattaagtttgaggctaaagaagc

SEQ ID NO: 42974 - DNA, 38 bp, Artificial Sequence
  primer
gtaaaacgacggccagtactcctgacctcaggtgatcc

SEQ ID NO: 42975 - DNA, 23 bp, Artificial Sequence
  primer
ccgttggctgtttcaaacttaac

SEQ ID NO: 42976 - DNA, 36 bp, Artificial Sequence
  primer
gtaaaacgacggccagtgtcggaggcccttctactg

SEQ ID NO: 42977 - DNA, 22 bp, Artificial Sequence
  primer
ttggttaaataaattctggccg

SEQ ID NO: 42978 - DNA, 37 bp, Artificial Sequence
  primer
gtaaaacgacggccagtagctgtcatgggtgctgttc

SEQ ID NO: 42979 - DNA, 38 bp, Artificial Sequence
  primer
gtaaaacgacggccagttagatgcctagcgtgtgcaag

SEQ ID NO: 42980 - DNA, 37 bp, Artificial Sequence
  primer
gtaaaacgacggccagttttagcaaatccacgttgcc

SEQ ID NO: 42981 - DNA, 18 bp, Artificial Sequence
  primer
ctgtgcgcatcttgaggg

SEQ ID NO: 42982 - DNA, 21 bp, Artificial Sequence
  primer
cgtcagctcacatcacctctc

SEQ ID NO: 42983 - DNA, 37 bp, Artificial Sequence
  primer
gtaaaacgacggccagtccctcgagctgggactaaag

SEQ ID NO: 42984 - DNA, 38 bp, Artificial Sequence
  primer
gtaaaacgacggccagttgtgctgaggaggaaggaaac

SEQ ID NO: 42985 - DNA, 38 bp, Artificial Sequence
  primer
gtaaaacgacggccagtttaaggcccaggatacaaagg

SEQ ID NO: 42986 - DNA, 21 bp, Artificial Sequence
  primer
atacaaatgaaggtgggctgg

SEQ ID NO: 42987 - DNA, 38 bp, Artificial Sequence
  primer
gtaaaacgacggccagttagttcctgtgcccgattagg

SEQ ID NO: 42988 - DNA, 21 bp, Artificial Sequence
  primer
tcaagtgctgattcccaaatg

SEQ ID NO: 42989 - DNA, 21 bp, Artificial Sequence
  primer
agaccctagccatcctctgtg

SEQ ID NO: 42990 - DNA, 21 bp, Artificial Sequence
  primer
tattggaagagggtggcattc

SEQ ID NO: 42991 - DNA, 38 bp, Artificial Sequence
  primer
gtaaaacgacggccagtaggccaggaagagaggatagg

SEQ ID NO: 42992 - DNA, 21 bp, Artificial Sequence
  primer
agactcactggcagctaaggg

SEQ ID NO: 42993 - DNA, 21 bp, Artificial Sequence
  primer
taccatgctacttctgggctg

SEQ ID NO: 42994 - DNA, 38 bp, Artificial Sequence
  primer
gtaaaacgacggccagtttgctaggaaccgtctcaagg

SEQ ID NO: 42995 - DNA, 39 bp, Artificial Sequence
  primer
gtaaaacgacggccagtccacacaatgtcaatttgttcc

SEQ ID NO: 42996 - DNA, 38 bp, Artificial Sequence
  primer
gtaaaacgacggccagtcccagggaattcactatcacc

SEQ ID NO: 42997 - DNA, 22 bp, Artificial Sequence
  primer
tgcatgaaagatgaagttctgg

SEQ ID NO: 42998 - DNA, 26 bp, Artificial Sequence
  primer
ccataatccctaactcagaaataacc

SEQ ID NO: 42999 - DNA, 38 bp, Artificial Sequence
  primer
gtaaaacgacggccagtccttcaccactcacccttctg

SEQ ID NO: 43000 - DNA, 38 bp, Artificial Sequence
  primer
gtaaaacgacggccagtgacctgaggtgctctgttcac

SEQ ID NO: 43001 - DNA, 21 bp, Artificial Sequence
  primer
agtaagtggatgatggctggg

SEQ ID NO: 43002 - DNA, 38 bp, Artificial Sequence
  primer
gtaaaacgacggccagtctcagtcctttattcctgggc

SEQ ID NO: 43003 - DNA, 38 bp, Artificial Sequence
  primer
gtaaaacgacggccagtagcttcatcttcagggattgc

SEQ ID NO: 43004 - DNA, 38 bp, Artificial Sequence
  primer
gtaaaacgacggccagtggctctattcccactttgtgc

SEQ ID NO: 43005 - DNA, 38 bp, Artificial Sequence
  primer
gtaaaacgacggccagtgtatgaagcttgctgcaggtc

SEQ ID NO: 43006 - DNA, 38 bp, Artificial Sequence
  primer
gtaaaacgacggccagttgctgaccggtgtagtcagtc

SEQ ID NO: 43007 - DNA, 38 bp, Artificial Sequence
  primer
gtaaaacgacggccagtgtagagcagcttgtcacctcc

SEQ ID NO: 43008 - DNA, 20 bp, Artificial Sequence
  primer
accctacagatgcgggtctc

SEQ ID NO: 43009 - DNA, 21 bp, Artificial Sequence
  primer
acaggctctgctcttcaccag

SEQ ID NO: 43010 - DNA, 19 bp, Artificial Sequence
  primer
ctgggctccagtgatcctc

SEQ ID NO: 43011 - DNA, 20 bp, Artificial Sequence
  primer
tgcttgtgggtaaaccaagg

SEQ ID NO: 43012 - DNA, 38 bp, Artificial Sequence
  primer
gtaaaacgacggccagtcagtctgccttgtcctgagac

SEQ ID NO: 43013 - DNA, 37 bp, Artificial Sequence
  primer
gtaaaacgacggccagtcagacttgagcctgtcccag

SEQ ID NO: 43014 - DNA, 38 bp, Artificial Sequence
  primer
gtaaaacgacggccagttttagccagagaactgggtgc

SEQ ID NO: 43015 - DNA, 38 bp, Artificial Sequence
  primer
gtaaaacgacggccagtgtgccctagcatttcctgttc

SEQ ID NO: 43016 - DNA, 37 bp, Artificial Sequence
  primer
gtaaaacgacggccagtttgtgaaagaagagccaggg

SEQ ID NO: 43017 - DNA, 22 bp, Artificial Sequence
  primer
tcaccctctgttagtgacatcg

SEQ ID NO: 43018 - DNA, 20 bp, Artificial Sequence
  primer
tgatgggatgtagggagacg

SEQ ID NO: 43019 - DNA, 40 bp, Artificial Sequence
  primer
gtaaaacgacggccagttttcatttcctcattggaagaag

SEQ ID NO: 43020 - DNA, 22 bp, Artificial Sequence
  primer
gggaagtcctgacccttatctg

SEQ ID NO: 43021 - DNA, 38 bp, Artificial Sequence
  primer
gtaaaacgacggccagtcctcatgctaagaaccttggg

SEQ ID NO: 43022 - DNA, 38 bp, Artificial Sequence
  primer
gtaaaacgacggccagtatgatacagtttgcagggtgg

SEQ ID NO: 43023 - DNA, 38 bp, Artificial Sequence
  primer
gtaaaacgacggccagttgtcccagaaacccagcttac

SEQ ID NO: 43024 - DNA, 23 bp, Artificial Sequence
  primer
tctgtctgtgagggatgattagg

SEQ ID NO: 43025 - DNA, 20 bp, Artificial Sequence
  primer
gggcctacatcagagcactt

SEQ ID NO: 43026 - DNA, 41 bp, Artificial Sequence
  primer
gtaaaacgacggccagtgcctacaaagattaacttggcttc

SEQ ID NO: 43027 - DNA, 41 bp, Artificial Sequence
  primer
gtaaaacgacggccagtccctaaagcagagatctaagtggg

SEQ ID NO: 43028 - DNA, 38 bp, Artificial Sequence
  primer
gtaaaacgacggccagtcaacgttggcactaagtttgg

SEQ ID NO: 43029 - DNA, 21 bp, Artificial Sequence
  primer
tgtgaaatgtccagagccttc

SEQ ID NO: 43030 - DNA, 38 bp, Artificial Sequence
  primer
gtaaaacgacggccagtgggtgccttggttagaatagc

SEQ ID NO: 43031 - DNA, 21 bp, Artificial Sequence
  primer
aacgggaaattcacctacctg

SEQ ID NO: 43032 - DNA, 35 bp, Artificial Sequence
  primer
gtaaaacgacggccagtcactacccagagggctgc

SEQ ID NO: 43033 - DNA, 38 bp, Artificial Sequence
  primer
gtaaaacgacggccagtaaagggagtgtccagtgtgtc

SEQ ID NO: 43034 - DNA, 38 bp, Artificial Sequence
  primer
gtaaaacgacggccagtctggagcgaggaaacttcatt

SEQ ID NO: 43035 - DNA, 27 bp, Artificial Sequence
  primer
tttgagcagataaattcaagactgttt

SEQ ID NO: 43036 - DNA, 19 bp, Artificial Sequence
  primer
gccagtttccacgacaacc

SEQ ID NO: 43037 - DNA, 38 bp, Artificial Sequence
  primer
gtaaaacgacggccagtgagagcgaatcacggtctagg

SEQ ID NO: 43038 - DNA, 21 bp, Artificial Sequence
  primer
ctctcttccttggaccacacc

SEQ ID NO: 43039 - DNA, 38 bp, Artificial Sequence
  primer
gtaaaacgacggccagttgtgctacacggaggatgaag

SEQ ID NO: 43040 - DNA, 21 bp, Artificial Sequence
  primer
ctgacctcagctacatcgtgc

SEQ ID NO: 43041 - DNA, 21 bp, Artificial Sequence
  primer
tatgtccggtggagggtactg

SEQ ID NO: 43042 - DNA, 37 bp, Artificial Sequence
  primer
gtaaaacgacggccagtggtatcagagaagggctggg

SEQ ID NO: 43043 - DNA, 40 bp, Artificial Sequence
  primer
gtaaaacgacggccagtgcaatggattggtaattaagtgg

SEQ ID NO: 43044 - DNA, 38 bp, Artificial Sequence
  primer
gtaaaacgacggccagtggatactcttacacagccgcc

SEQ ID NO: 43045 - DNA, 38 bp, Artificial Sequence
  primer
gtaaaacgacggccagtcctgagagagacacgcaactc

SEQ ID NO: 43046 - DNA, 38 bp, Artificial Sequence
  primer
gtaaaacgacggccagtttatgtgttgttccagcccag

SEQ ID NO: 43047 - DNA, 38 bp, Artificial Sequence
  primer
gtaaaacgacggccagtaggatagtttgtggcgctttg

SEQ ID NO: 43048 - DNA, 38 bp, Artificial Sequence
  primer
gtaaaacgacggccagtactagctctagaagcccagcg

SEQ ID NO: 43049 - DNA, 38 bp, Artificial Sequence
  primer
gtaaaacgacggccagtattgtaaacacttcggcctgg

SEQ ID NO: 43050 - DNA, 21 bp, Artificial Sequence
  primer
acccacatttctgcagatgac

SEQ ID NO: 43051 - DNA, 38 bp, Artificial Sequence
  primer
gtaaaacgacggccagtcacaggtaaggctggtgtttg

SEQ ID NO: 43052 - DNA, 38 bp, Artificial Sequence
  primer
gtaaaacgacggccagtgcatttcaagcaccagacaag

SEQ ID NO: 43053 - DNA, 21 bp, Artificial Sequence
  primer
gaggtagcattcaagccgaag

SEQ ID NO: 43054 - DNA, 37 bp, Artificial Sequence
  primer
gtaaaacgacggccagtaagccatttgtgtggctctg

SEQ ID NO: 43055 - DNA, 36 bp, Artificial Sequence
  primer
gtaaaacgacggccagtgggtggattctcatggtgg

SEQ ID NO: 43056 - DNA, 38 bp, Artificial Sequence
  primer
gtaaaacgacggccagtaatgcagcaaaggtttgaagg

SEQ ID NO: 43057 - DNA, 38 bp, Artificial Sequence
  primer
gtaaaacgacggccagtttccattgactatggctttgg

SEQ ID NO: 43058 - DNA, 38 bp, Artificial Sequence
  primer
gtaaaacgacggccagtggtgaggagatggtgtgattg

SEQ ID NO: 43059 - DNA, 38 bp, Artificial Sequence
  primer
gtaaaacgacggccagtggagcagtccttctctcatgg

SEQ ID NO: 43060 - DNA, 20 bp, Artificial Sequence
  primer
agcccttgtgtcatctctgc

SEQ ID NO: 43061 - DNA, 38 bp, Artificial Sequence
  primer
gtaaaacgacggccagttcacaggaggactggtgtttg

SEQ ID NO: 43062 - DNA, 35 bp, Artificial Sequence
  primer
gtaaaacgacggccagtcactactgcgctccagcc

SEQ ID NO: 43063 - DNA, 21 bp, Artificial Sequence
  primer
ggcaggaaggtgagtatctgg

SEQ ID NO: 43064 - DNA, 21 bp, Artificial Sequence
  primer
ttgacagaccagcttctccag

SEQ ID NO: 43065 - DNA, 38 bp, Artificial Sequence
  primer
gtaaaacgacggccagttgtcacctgtcagagcctacg

SEQ ID NO: 43066 - DNA, 20 bp, Artificial Sequence
  primer
gctacctgaggattgcgttg

SEQ ID NO: 43067 - DNA, 20 bp, Artificial Sequence
  primer
ctcacctgagcctgtgtgtg

SEQ ID NO: 43068 - DNA, 38 bp, Artificial Sequence
  primer
gtaaaacgacggccagttgctggttaccgagctctttg

SEQ ID NO: 43069 - DNA, 37 bp, Artificial Sequence
  primer
gtaaaacgacggccagtcttgatggcggtgtcagaac

SEQ ID NO: 43070 - DNA, 21 bp, Artificial Sequence
  primer
aatggacaggacagacggaag

SEQ ID NO: 43071 - DNA, 20 bp, Artificial Sequence
  primer
aaattggttctgccggtttg

SEQ ID NO: 43072 - DNA, 37 bp, Artificial Sequence
  primer
gtaaaacgacggccagtcagcagagcaagaccctgtc

SEQ ID NO: 43073 - DNA, 38 bp, Artificial Sequence
  primer
gtaaaacgacggccagttaatgcagatggcttggtcac

SEQ ID NO: 43074 - DNA, 38 bp, Artificial Sequence
  primer
gtaaaacgacggccagtatgtgtgtcaattccgtttgc

SEQ ID NO: 43075 - DNA, 38 bp, Artificial Sequence
  primer
gtaaaacgacggccagttattctcccaaaggatgctgg

SEQ ID NO: 43076 - DNA, 38 bp, Artificial Sequence
  primer
gtaaaacgacggccagtgagagcttgcgttgtttgttg

SEQ ID NO: 43077 - DNA, 36 bp, Artificial Sequence
  primer
gtaaaacgacggccagtgtgatgtccatgctgtggg

SEQ ID NO: 43078 - DNA, 21 bp, Artificial Sequence
  primer
ggacaacagagcaagaccctg

SEQ ID NO: 43079 - DNA, 37 bp, Artificial Sequence
  primer
gtaaaacgacggccagtctagaggagcctggaccctg

SEQ ID NO: 43080 - DNA, 21 bp, Artificial Sequence
  primer
tgttgcctgggatattcagag

SEQ ID NO: 43081 - DNA, 36 bp, Artificial Sequence
  primer
gtaaaacgacggccagtctgtagggcttctgcaggg

SEQ ID NO: 43082 - DNA, 23 bp, Artificial Sequence
  primer
tgtgtctctacagggtgtgtgtg

SEQ ID NO: 43083 - DNA, 21 bp, Artificial Sequence
  primer
catcggaagcagaaactaggg

SEQ ID NO: 43084 - DNA, 38 bp, Artificial Sequence
  primer
gtaaaacgacggccagtggacttagcaggctttcttgc

SEQ ID NO: 43085 - DNA, 38 bp, Artificial Sequence
  primer
gtaaaacgacggccagtcacttccctgcagtgttcttg

SEQ ID NO: 43086 - DNA, 37 bp, Artificial Sequence
  primer
gtaaaacgacggccagttgcatggatccaccacattc

SEQ ID NO: 43087 - DNA, 37 bp, Artificial Sequence
  primer
gtaaaacgacggccagtagggcggtgatgggtagtag

SEQ ID NO: 43088 - DNA, 37 bp, Artificial Sequence
  primer
gtaaaacgacggccagtacgggccctagaaacacaag

SEQ ID NO: 43089 - DNA, 24 bp, Artificial Sequence
  primer
tctcaaaccttaaactggtgcttc

SEQ ID NO: 43090 - DNA, 20 bp, Artificial Sequence
  primer
acaaccactgcctctcaagc

SEQ ID NO: 43091 - DNA, 21 bp, Artificial Sequence
  primer
tggaggctcaaggaacgtaag

SEQ ID NO: 43092 - DNA, 38 bp, Artificial Sequence
  primer
gtaaaacgacggccagttgcctgactgctgtctttcag

SEQ ID NO: 43093 - DNA, 38 bp, Artificial Sequence
  primer
gtaaaacgacggccagtgtggctcaacttctgtgttgc

SEQ ID NO: 43094 - DNA, 20 bp, Artificial Sequence
  primer
ctcaatggacaggctggttg

SEQ ID NO: 43095 - DNA, 21 bp, Artificial Sequence
  primer
gtcacttgcgtgaacagaagc

SEQ ID NO: 43096 - DNA, 39 bp, Artificial Sequence
  primer
gtaaaacgacggccagtgcactcctgttatctgtgtccc

SEQ ID NO: 43097 - DNA, 38 bp, Artificial Sequence
  primer
gtaaaacgacggccagtgaacatctgccaggactccac

SEQ ID NO: 43098 - DNA, 38 bp, Artificial Sequence
  primer
gtaaaacgacggccagtaagcccaagacaacgagagag

SEQ ID NO: 43099 - DNA, 38 bp, Artificial Sequence
  primer
gtaaaacgacggccagtgtaagagggatgcgtggtttg

SEQ ID NO: 43100 - DNA, 38 bp, Artificial Sequence
  primer
gtaaaacgacggccagtgcccaaggtcacagtgagtag

SEQ ID NO: 43101 - DNA, 38 bp, Artificial Sequence
  primer
gtaaaacgacggccagtagcagttccacacactccatc

SEQ ID NO: 43102 - DNA, 38 bp, Artificial Sequence
  primer
gtaaaacgacggccagtctggtgaaccaatttcaggtg

SEQ ID NO: 43103 - DNA, 38 bp, Artificial Sequence
  primer
gtaaaacgacggccagtgtactcctggcccaagatgag

SEQ ID NO: 43104 - DNA, 37 bp, Artificial Sequence
  primer
gtaaaacgacggccagtggaccctggacctcagtgac

SEQ ID NO: 43105 - DNA, 21 bp, Artificial Sequence
  primer
atataccctgcacacacgcac

SEQ ID NO: 43106 - DNA, 37 bp, Artificial Sequence
  primer
gtaaaacgacggccagtactgcggtccacttcttcag

SEQ ID NO: 43107 - DNA, 21 bp, Artificial Sequence
  primer
cgttaggaatgatcctctcgg

SEQ ID NO: 43108 - DNA, 38 bp, Artificial Sequence
  primer
gtaaaacgacggccagtagaacttgggtctcacggttg

SEQ ID NO: 43109 - DNA, 37 bp, Artificial Sequence
  primer
gtaaaacgacggccagtgacctggaacctgggcttac

SEQ ID NO: 43110 - DNA, 38 bp, Artificial Sequence
  primer
gtaaaacgacggccagtacagccgaggtgagtacactg

SEQ ID NO: 43111 - DNA, 20 bp, Artificial Sequence
  primer
acacacgaagactgccttgc

SEQ ID NO: 43112 - DNA, 40 bp, Artificial Sequence
  primer
gtaaaacgacggccagtcaagtgctcttggcttctttatg

SEQ ID NO: 43113 - DNA, 21 bp, Artificial Sequence
  primer
tgttggttgcaggtactggag

SEQ ID NO: 43114 - DNA, 25 bp, Artificial Sequence
  primer
tgcaaacattaccaaataaatgaag

SEQ ID NO: 43115 - DNA, 23 bp, Artificial Sequence
  primer
aaggatgaaatctcaaacttccc

SEQ ID NO: 43116 - DNA, 21 bp, Artificial Sequence
  primer
cgaggtggattctaaagcagc

SEQ ID NO: 43117 - DNA, 21 bp, Artificial Sequence
  primer
gatgcagagaagggcaaagac

SEQ ID NO: 43118 - DNA, 38 bp, Artificial Sequence
  primer
gtaaaacgacggccagtcaaagaagggcaaggattcag

SEQ ID NO: 43119 - DNA, 22 bp, Artificial Sequence
  primer
tgggactgccactgaatttatc

SEQ ID NO: 43120 - DNA, 39 bp, Artificial Sequence
  primer
gtaaaacgacggccagttcaagaatgcagcgttacagac

SEQ ID NO: 43121 - DNA, 38 bp, Artificial Sequence
  primer
gtaaaacgacggccagttgaaatccctagagtgaaccc

SEQ ID NO: 43122 - DNA, 39 bp, Artificial Sequence
  primer
gtaaaacgacggccagttttggaggattctttatggaaa

SEQ ID NO: 43123 - DNA, 38 bp, Artificial Sequence
  primer
gtaaaacgacggccagtgaagatttgatggagtgcagc

SEQ ID NO: 43124 - DNA, 22 bp, Artificial Sequence
  primer
tcctgtttccctcctatcttga

SEQ ID NO: 43125 - DNA, 21 bp, Artificial Sequence
  primer
tcacgtatacgatacccgctg

SEQ ID NO: 43126 - DNA, 38 bp, Artificial Sequence
  primer
gtaaaacgacggccagttttagttgcagaagaccctgc

SEQ ID NO: 43127 - DNA, 36 bp, Artificial Sequence
  primer
gtaaaacgacggccagtgcgaagagggagtggtgag

SEQ ID NO: 43128 - DNA, 41 bp, Artificial Sequence
  primer
gtaaaacgacggccagtgcagttaaccaaagcctactttcc

SEQ ID NO: 43129 - DNA, 39 bp, Artificial Sequence
  primer
gtaaaacgacggccagtgaaccatgggtatcttcacagg

SEQ ID NO: 43130 - DNA, 18 bp, Artificial Sequence
  primer
ccactgcacactccagcc

SEQ ID NO: 43131 - DNA, 41 bp, Artificial Sequence
  primer
gtaaaacgacggccagtcattatgtgcaatgtgttacaccc

SEQ ID NO: 43132 - DNA, 22 bp, Artificial Sequence
  primer
tgttctcaaatactgctgggac

SEQ ID NO: 43133 - DNA, 21 bp, Artificial Sequence
  primer
gtcacgtgtggatcctgtttc

SEQ ID NO: 43134 - DNA, 21 bp, Artificial Sequence
  primer
tgaagccatgaacattgtcct

SEQ ID NO: 43135 - DNA, 39 bp, Artificial Sequence
  primer
gtaaaacgacggccagttccgggatttaaatgattctcc

SEQ ID NO: 43136 - DNA, 39 bp, Artificial Sequence
  primer
gtaaaacgacggccagttcaagggttaaaggaggctttc

SEQ ID NO: 43137 - DNA, 21 bp, Artificial Sequence
  primer
taggttaaatcgggtgttgcc

SEQ ID NO: 43138 - DNA, 37 bp, Artificial Sequence; identical to SEQ ID NO: 20043
  primer

SEQ ID NO: 43139 - DNA, 21 bp, Artificial Sequence
  primer
tcccaaccctagactctgtgc

SEQ ID NO: 43140 - DNA, 38 bp, Artificial Sequence
  primer
gtaaaacgacggccagtgcacaaacagtcatctggacc

SEQ ID NO: 43141 - DNA, 21 bp, Artificial Sequence
  primer
ccagaacctgtcattgcattc

SEQ ID NO: 43142 - DNA, 21 bp, Artificial Sequence
  primer
gaagggatggatgggataagc

SEQ ID NO: 43143 - DNA, 37 bp, Artificial Sequence
  primer
gtaaaacgacggccagtaggctctgaagaggcagagg

SEQ ID NO: 43144 - DNA, 39 bp, Artificial Sequence
  primer
gtaaaacgacggccagtcccacctgctatgttgctgtag

SEQ ID NO: 43145 - DNA, 38 bp, Artificial Sequence
  primer
gtaaaacgacggccagtgcctctcttgttcctactggg

SEQ ID NO: 43146 - DNA, 21 bp, Artificial Sequence
  primer
gccattctggagttattggtg

SEQ ID NO: 43147 - DNA, 22 bp, Artificial Sequence
  primer
tcatgaatctactctcctcgcc

SEQ ID NO: 43148 - DNA, 38 bp, Artificial Sequence
  primer
gtaaaacgacggccagtctacatccagccagcactcag

SEQ ID NO: 43149 - DNA, 38 bp, Artificial Sequence
  primer
gtaaaacgacggccagtcaaggaacaccagagggagag

SEQ ID NO: 43150 - DNA, 38 bp, Artificial Sequence
  primer
gtaaaacgacggccagttggacaactggaaatccaagc

SEQ ID NO: 43151 - DNA, 21 bp, Artificial Sequence
  primer
ctggccgagaagaagatgttg

SEQ ID NO: 43152 - DNA, 38 bp, Artificial Sequence
  primer
gtaaaacgacggccagtaagtccctgagtccgtcactg

SEQ ID NO: 43153 - DNA, 22 bp, Artificial Sequence
  primer
tggagtgaggaagaacttggac

SEQ ID NO: 43154 - DNA, 21 bp, Artificial Sequence
  primer
gtgacagagccagacccaatc

SEQ ID NO: 43155 - DNA, 38 bp, Artificial Sequence
  primer
gtaaaacgacggccagttggcaaattgctagagtgtgg

SEQ ID NO: 43156 - DNA, 21 bp, Artificial Sequence
  primer
tcctgcctagagttgagacgc

SEQ ID NO: 43157 - DNA, 38 bp, Artificial Sequence
  primer
gtaaaacgacggccagtccctagaggcttggtctttgg

SEQ ID NO: 43158 - DNA, 21 bp, Artificial Sequence
  primer
actcctttcctccctgactcc

SEQ ID NO: 43159 - DNA, 36 bp, Artificial Sequence
  primer
gtaaaacgacggccagtcccagggctacagtcatcc

SEQ ID NO: 43160 - DNA, 38 bp, Artificial Sequence
  primer
gtaaaacgacggccagtcagctgtgctgagcctgtatc

SEQ ID NO: 43161 - DNA, 37 bp, Artificial Sequence
  primer
gtaaaacgacggccagtctgtgactcagcttcctggg

SEQ ID NO: 43162 - DNA, 37 bp, Artificial Sequence
  primer
gtaaaacgacggccagtgaggtgagggtggaggagtc

SEQ ID NO: 43163 - DNA, 21 bp, Artificial Sequence
  primer
ctttcaccacagactgccctc

SEQ ID NO: 43164 - DNA, 37 bp, Artificial Sequence
  primer
gtaaaacgacggccagtgtcttggagactgggatggg

SEQ ID NO: 43165 - DNA, 22 bp, Artificial Sequence
  primer
ggagaaagaaatagagccaggg

SEQ ID NO: 43166 - DNA, 37 bp, Artificial Sequence
  primer
gtaaaacgacggccagtagtgggagtggtggtgagag

SEQ ID NO: 43167 - DNA, 38 bp, Artificial Sequence
  primer
gtaaaacgacggccagtctcaaatcacactccacaggc

SEQ ID NO: 43168 - DNA, 36 bp, Artificial Sequence
  primer
gtaaaacgacggccagtatccctctcgaaggcaagg

SEQ ID NO: 43169 - DNA, 38 bp, Artificial Sequence
  primer
gtaaaacgacggccagtggagacactttggattgggac

SEQ ID NO: 43170 - DNA, 38 bp, Artificial Sequence
  primer
gtaaaacgacggccagtaaacaggcagcttctaccagg

SEQ ID NO: 43171 - DNA, 36 bp, Artificial Sequence
  primer
gtaaaacgacggccagtggactgaagggagtgtggg

SEQ ID NO: 43172 - DNA, 38 bp, Artificial Sequence
  primer
gtaaaacgacggccagtgatgagagcagggagacttgg

SEQ ID NO: 43173 - DNA, 21 bp, Artificial Sequence
  primer
aagtcttgggctctgtcgttc

SEQ ID NO: 43174 - DNA, 21 bp, Artificial Sequence
  primer
gaagcacttcctacgacctgg

SEQ ID NO: 43175 - DNA, 21 bp, Artificial Sequence
  primer
agctcagacttggtgcttcag

SEQ ID NO: 43176 - DNA, 38 bp, Artificial Sequence
  primer
gtaaaacgacggccagtctctgcaactttgagggtctg

SEQ ID NO: 43177 - DNA, 38 bp, Artificial Sequence
  primer
gtaaaacgacggccagtcccatgacgtgatatgtttcc

SEQ ID NO: 43178 - DNA, 38 bp, Artificial Sequence
  primer
gtaaaacgacggccagtagggtggacaggagacacttt

SEQ ID NO: 43179 - DNA, 38 bp, Artificial Sequence
  primer
gtaaaacgacggccagtctgcagctcgaacacaaacag

SEQ ID NO: 43180 - DNA, 39 bp, Artificial Sequence
  primer
gtaaaacgacggccagtctacaccatagaaggtgtgggc

SEQ ID NO: 43181 - DNA, 38 bp, Artificial Sequence
  primer
gtaaaacgacggccagtgatgagagcagggagatttgg

SEQ ID NO: 43182 - DNA, 21 bp, Artificial Sequence
  primer
ccctgaagaagtcagggaatc

SEQ ID NO: 43183 - DNA, 21 bp, Artificial Sequence
  primer
cctctggaatccctcttcaac

SEQ ID NO: 43184 - DNA, 38 bp, Artificial Sequence
  primer
gtaaaacgacggccagtgtggtgagctcagacttggtg

SEQ ID NO: 43185 - DNA, 38 bp, Artificial Sequence
  primer
gtaaaacgacggccagtgctggtcagaagtgggatagg

SEQ ID NO: 43186 - DNA, 21 bp, Artificial Sequence
  primer
cctccttgtgccctagagttg

SEQ ID NO: 43187 - DNA, 21 bp, Artificial Sequence
  primer
agcagggaccagaggtgtaag

SEQ ID NO: 43188 - DNA, 20 bp, Artificial Sequence
  primer
ggccatctgctatctgtccc

SEQ ID NO: 43189 - DNA, 21 bp, Artificial Sequence
  primer
gataaacccgttctgtgtccc

SEQ ID NO: 43190 - DNA, 21 bp, Artificial Sequence
  primer
gggacagaagtatggcaggag

SEQ ID NO: 43191 - DNA, 22 bp, Artificial Sequence
  primer
ggattcttctctaagcccttgc

SEQ ID NO: 43192 - DNA, 38 bp, Artificial Sequence
  primer
gtaaaacgacggccagttttgatctggcagaagctgag

SEQ ID NO: 43193 - DNA, 36 bp, Artificial Sequence
  primer
gtaaaacgacggccagtcctcaaccagggcagaacc

SEQ ID NO: 43194 - DNA, 37 bp, Artificial Sequence
  primer
gtaaaacgacggccagtccctctgaagcaacaggagc

SEQ ID NO: 43195 - DNA, 38 bp, Artificial Sequence
  primer
gtaaaacgacggccagttgaagagcctcatgttaagcg

SEQ ID NO: 43196 - DNA, 38 bp, Artificial Sequence
  primer
gtaaaacgacggccagtaatcatgcacattgcatttgg

SEQ ID NO: 43197 - DNA, 22 bp, Artificial Sequence
  primer
ccctatctccttccgttcattc

SEQ ID NO: 43198 - DNA, 23 bp, Artificial Sequence
  primer
gaatcttgctgagcttagaaccc

SEQ ID NO: 43199 - DNA, 21 bp, Artificial Sequence
  primer
tcacaggcttgatttcgctac

SEQ ID NO: 43200 - DNA, 21 bp, Artificial Sequence
  primer
cggcctaatcgttcatctttc

SEQ ID NO: 43201 - DNA, 20 bp, Artificial Sequence
  primer
tttcaaccaagagcaaacgg

SEQ ID NO: 43202 - DNA, 37 bp, Artificial Sequence
  primer
gtaaaacgacggccagtgatggagggcattgtagctg

SEQ ID NO: 43203 - DNA, 21 bp, Artificial Sequence
  primer
gggctgaatgaagaaggactg

SEQ ID NO: 43204 - DNA, 20 bp, Artificial Sequence
  primer
acctggcactgtcaaggatg

SEQ ID NO: 43205 - DNA, 21 bp, Artificial Sequence
  primer
ctgataagcacgttgcaggag

SEQ ID NO: 43206 - DNA, 38 bp, Artificial Sequence
  primer
gtaaaacgacggccagtgcagagagaagctgggacaac

SEQ ID NO: 43207 - DNA, 38 bp, Artificial Sequence
  primer
gtaaaacgacggccagtacagcctgattgagcactgtc

SEQ ID NO: 43208 - DNA, 21 bp, Artificial Sequence
  primer
tggagcctcatgtatttggtg

SEQ ID NO: 43209 - DNA, 38 bp, Artificial Sequence
  primer
gtaaaacgacggccagttagggttagtgggagggacac

SEQ ID NO: 43210 - DNA, 38 bp, Artificial Sequence
  primer
gtaaaacgacggccagtctgcttgcctgtcctctatcc

SEQ ID NO: 43211 - DNA, 38 bp, Artificial Sequence
  primer
gtaaaacgacggccagtgtctccatctcaaccctcagc

SEQ ID NO: 43212 - DNA, 38 bp, Artificial Sequence
  primer
gtaaaacgacggccagtttgtcccagtctgttcccttc

SEQ ID NO: 43213 - DNA, 38 bp, Artificial Sequence
  primer
gtaaaacgacggccagtcctgacctctacacctccacc

SEQ ID NO: 43214 - DNA, 21 bp, Artificial Sequence
  primer
acccttacaatcaggtggtgg

SEQ ID NO: 43215 - DNA, 38 bp, Artificial Sequence
  primer
gtaaaacgacggccagtgtacccagccaccaggtacag

SEQ ID NO: 43216 - DNA, 38 bp, Artificial Sequence
  primer
gtaaaacgacggccagtagacccagcctctgtcttcag

SEQ ID NO: 43217 - DNA, 21 bp, Artificial Sequence
  primer
ctgttatgtgcctgctgtgtg

SEQ ID NO: 43218 - DNA, 38 bp, Artificial Sequence
  primer
gtaaaacgacggccagtgctccagagaacagccaagtg

SEQ ID NO: 43219 - DNA, 21 bp, Artificial Sequence
  primer
ccttcattgctttcaaagtgc

SEQ ID NO: 43220 - DNA, 37 bp, Artificial Sequence
  primer
gtaaaacgacggccagttctccagagagtcagctccg

SEQ ID NO: 43221 - DNA, 38 bp, Artificial Sequence
  primer
gtaaaacgacggccagtagtgtcacgccttctcctctc

SEQ ID NO: 43222 - DNA, 35 bp, Artificial Sequence
  primer
gtaaaacgacggccagtactgtgcatgtgggccag

SEQ ID NO: 43223 - DNA, 37 bp, Artificial Sequence
  primer
gtaaaacgacggccagtcccatagtggtgctgaatgg

SEQ ID NO: 43224 - DNA, 38 bp, Artificial Sequence
  primer
gtaaaacgacggccagtgtcatgagtgccgtgtgtttc

SEQ ID NO: 43225 - DNA, 38 bp, Artificial Sequence
  primer
gtaaaacgacggccagtcaggcagaattggatcaggtc

SEQ ID NO: 43226 - DNA, 38 bp, Artificial Sequence
  primer
gtaaaacgacggccagtccttcctttatgaagccatgc

SEQ ID NO: 43227 - DNA, 38 bp, Artificial Sequence
  primer
gtaaaacgacggccagtatccattgctctttcctctgg

SEQ ID NO: 43228 - DNA, 22 bp, Artificial Sequence
  primer
ttaaggtcctgcagatgtgttg

SEQ ID NO: 43229 - DNA, 24 bp, Artificial Sequence
  primer
ggagctttcttatttggtttgaag

SEQ ID NO: 43230 - DNA, 37 bp, Artificial Sequence
  primer
gtaaaacgacggccagtacagttgccatgctttcagc

SEQ ID NO: 43231 - DNA, 42 bp, Artificial Sequence
  primer
gtaaaacgacggccagtacctgaatgttgactttggttacag

SEQ ID NO: 43232 - DNA, 21 bp, Artificial Sequence
  primer
ctagcctaggtgacagagccg

SEQ ID NO: 43233 - DNA, 21 bp, Artificial Sequence
  primer
tcttgacctaggtggttggtg

SEQ ID NO: 43234 - DNA, 24 bp, Artificial Sequence
  primer
aaagcagtgtggtatttaggttgg

SEQ ID NO: 43235 - DNA, 21 bp, Artificial Sequence
  primer
cactatgtctgttggagggca

SEQ ID NO: 43236 - DNA, 38 bp, Artificial Sequence
  primer
gtaaaacgacggccagttcaagttgggaatgtttgagc

SEQ ID NO: 43237 - DNA, 21 bp, Artificial Sequence
  primer
ggaggccttcctcattgtaag

SEQ ID NO: 43238 - DNA, 20 bp, Artificial Sequence
  primer
gagccttgattgcaccattg

SEQ ID NO: 43239 - DNA, 38 bp, Artificial Sequence
  primer
gtaaaacgacggccagttgatgagaatgggcaatctgt

SEQ ID NO: 43240 - DNA, 38 bp, Artificial Sequence
  primer
gtaaaacgacggccagtgtctacacagcaggagggatg

SEQ ID NO: 43241 - DNA, 38 bp, Artificial Sequence
  primer
gtaaaacgacggccagtgcaaggtgagaggctgatctc

SEQ ID NO: 43242 - DNA, 20 bp, Artificial Sequence
  primer
caggtccctggaagctcttg

SEQ ID NO: 43243 - DNA, 38 bp, Artificial Sequence
  primer
gtaaaacgacggccagtgttctgtgaggtaaggctggg

SEQ ID NO: 43244 - DNA, 38 bp, Artificial Sequence
  primer
gtaaaacgacggccagtcacctgcagcatcatctgtta

SEQ ID NO: 43245 - DNA, 38 bp, Artificial Sequence
  primer
gtaaaacgacggccagttggcaggacgacaacttaatg

SEQ ID NO: 43246 - DNA, 37 bp, Artificial Sequence
  primer
gtaaaacgacggccagtagagggatcacatcgtggag

SEQ ID NO: 43247 - DNA, 38 bp, Artificial Sequence
  primer
gtaaaacgacggccagtcgactgcaggaggagctagac

SEQ ID NO: 43248 - DNA, 38 bp, Artificial Sequence
  primer
gtaaaacgacggccagtctcccactagcacctcgtacc

SEQ ID NO: 43249 - DNA, 21 bp, Artificial Sequence
  primer
gactctctcctccctcttccg

SEQ ID NO: 43250 - DNA, 39 bp, Artificial Sequence
  primer
gtaaaacgacggccagtttggcatgattctcagtgtttg

SEQ ID NO: 43251 - DNA, 40 bp, Artificial Sequence
  primer
gtaaaacgacggccagttgaatatgcgatgtagcaagacc

SEQ ID NO: 43252 - DNA, 39 bp, Artificial Sequence
  primer
gtaaaacgacggccagttcaatattcttggactgttgcc

SEQ ID NO: 43253 - DNA, 21 bp, Artificial Sequence
  primer
ggtgtccttgtaattccagcc

SEQ ID NO: 43254 - DNA, 21 bp, Artificial Sequence
  primer
tgcaagaaggagtttggactg

SEQ ID NO: 43255 - DNA, 21 bp, Artificial Sequence
  primer
cagaataaggtggtgggcatc

SEQ ID NO: 43256 - DNA, 21 bp, Artificial Sequence
  primer
tttgagtatgcacttgggcag

SEQ ID NO: 43257 - DNA, 37 bp, Artificial Sequence
  primer
gtaaaacgacggccagttaagcactcagcgcatgttg

SEQ ID NO: 43258 - DNA, 21 bp, Artificial Sequence
  primer
tcaactgcatttggctctttg

SEQ ID NO: 43259 - DNA, 21 bp, Artificial Sequence
  primer
cccaatccgcaattaaagatg

SEQ ID NO: 43260 - DNA, 20 bp, Artificial Sequence
  primer
catgctattgcggctaggag

SEQ ID NO: 43261 - DNA, 37 bp, Artificial Sequence
  primer
gtaaaacgacggccagtggagagtgccatgtgtctgg

SEQ ID NO: 43262 - DNA, 20 bp, Artificial Sequence
  primer
aggaaatgacccgcaatctc

SEQ ID NO: 43263 - DNA, 38 bp, Artificial Sequence
  primer
gtaaaacgacggccagttccagctgaactaaagggacg

SEQ ID NO: 43264 - DNA, 38 bp, Artificial Sequence
  primer
gtaaaacgacggccagtaagccctgtttacgtctgctg

SEQ ID NO: 43265 - DNA, 39 bp, Artificial Sequence
  primer
gtaaaacgacggccagttctctttctacctctcccttgc

SEQ ID NO: 43266 - DNA, 20 bp, Artificial Sequence
  primer
catgctattgcggctaggag

SEQ ID NO: 43267 - DNA, 36 bp, Artificial Sequence
  primer
gtaaaacgacggccagttctgtttcggctggaggtg

SEQ ID NO: 43268 - DNA, 18 bp, Artificial Sequence
  primer
aacctgcgtgctcgtctg

SEQ ID NO: 43269 - DNA, 21 bp, Artificial Sequence
  primer
cattgttcaggcagagtgagg

SEQ ID NO: 43270 - DNA, 37 bp, Artificial Sequence
  primer
gtaaaacgacggccagtgtaggaggaggctggagtcg

SEQ ID NO: 43271 - DNA, 37 bp, Artificial Sequence
  primer
gtaaaacgacggccagtcacagatgacctgggcacac

SEQ ID NO: 43272 - DNA, 38 bp, Artificial Sequence
  primer
gtaaaacgacggccagtctttcagtccgatgggagaag

SEQ ID NO: 43273 - DNA, 21 bp, Artificial Sequence
  primer
atgtatagcatccgggacacc

SEQ ID NO: 43274 - DNA, 38 bp, Artificial Sequence
  primer
gtaaaacgacggccagtttataaatctcgggctttgcc

SEQ ID NO: 43275 - DNA, 37 bp, Artificial Sequence
  primer
gtaaaacgacggccagtagctggaaggtctgggtcag

SEQ ID NO: 43276 - DNA, 21 bp, Artificial Sequence
  primer
aactggccttctggctactcc

SEQ ID NO: 43277 - DNA, 37 bp, Artificial Sequence
  primer
gtaaaacgacggccagtcagagccagtgctgagaagg

SEQ ID NO: 43278 - DNA, 21 bp, Artificial Sequence
  primer
cgcaatagtaaatttgggtgc

SEQ ID NO: 43279 - DNA, 20 bp, Artificial Sequence
  primer
agggtggagggtcagttcag

SEQ ID NO: 43280 - DNA, 20 bp, Artificial Sequence
  primer
ggtctagctggcctttgctc

SEQ ID NO: 43281 - DNA, 38 bp, Artificial Sequence
  primer
gtaaaacgacggccagtcagacccttcctcacctcatc

SEQ ID NO: 43282 - DNA, 38 bp, Artificial Sequence
  primer
gtaaaacgacggccagtggtggacttcagggtgagaag

SEQ ID NO: 43283 - DNA, 37 bp, Artificial Sequence
  primer
gtaaaacgacggccagtagaggttgtgctccctctcc

SEQ ID NO: 43284 - DNA, 38 bp, Artificial Sequence
  primer
gtaaaacgacggccagttcatgctaccagttgtcggag

SEQ ID NO: 43285 - DNA, 38 bp, Artificial Sequence
  primer
gtaaaacgacggccagttggcaaattcatttctcccac

SEQ ID NO: 43286 - DNA, 38 bp, Artificial Sequence
  primer
gtaaaacgacggccagttctgaagtgaagacaggtggg

SEQ ID NO: 43287 - DNA, 38 bp, Artificial Sequence
  primer
gtaaaacgacggccagtccacaaactcccggatcatag

SEQ ID NO: 43288 - DNA, 21 bp, Artificial Sequence
  primer
acagggtaggagtgtgcagag

SEQ ID NO: 43289 - DNA, 38 bp, Artificial Sequence
  primer
gtaaaacgacggccagtaagggagttgtgaagtcagcc

SEQ ID NO: 43290 - DNA, 38 bp, Artificial Sequence
  primer
gtaaaacgacggccagtagaagctccctattcccaagc

SEQ ID NO: 43291 - DNA, 20 bp, Artificial Sequence
  primer
ctccttcactgcagccagtc

SEQ ID NO: 43292 - DNA, 21 bp, Artificial Sequence
  primer
gttcggactggaaggtgagtc

SEQ ID NO: 43293 - DNA, 38 bp, Artificial Sequence
  primer
gtaaaacgacggccagttttgcatttggtaaggcacag

SEQ ID NO: 43294 - DNA, 21 bp, Artificial Sequence
  primer
cttggcttagcaccctgtagc

SEQ ID NO: 43295 - DNA, 38 bp, Artificial Sequence
  primer
gtaaaacgacggccagtaagaggaaatgccaaggaagg

SEQ ID NO: 43296 - DNA, 37 bp, Artificial Sequence
  primer
gtaaaacgacggccagtgacctgcctttgtccctgtc

SEQ ID NO: 43297 - DNA, 22 bp, Artificial Sequence
  primer
gccctttaccaattggattacc

SEQ ID NO: 43298 - DNA, 21 bp, Artificial Sequence
  primer
atcaaccaaagtccatccctc

SEQ ID NO: 43299 - DNA, 38 bp, Artificial Sequence
  primer
gtaaaacgacggccagtcagctccctgactgtgagaac

SEQ ID NO: 43300 - DNA, 19 bp, Artificial Sequence
  primer
cctctctgctccacccttg

SEQ ID NO: 43301 - DNA, 38 bp, Artificial Sequence
  primer
gtaaaacgacggccagtgcctcctggaattctgactct

SEQ ID NO: 43302 - DNA, 21 bp, Artificial Sequence
  primer
ctccgttccttccttgctatg

SEQ ID NO: 43303 - DNA, 21 bp, Artificial Sequence
  primer
ctctttccacctttggtctgg

SEQ ID NO: 43304 - DNA, 38 bp, Artificial Sequence
  primer
gtaaaacgacggccagtacctccgtgtcataggtggag

SEQ ID NO: 43305 - DNA, 21 bp, Artificial Sequence
  primer
aaagctcctccctcagaggtc

SEQ ID NO: 43306 - DNA, 38 bp, Artificial Sequence
  primer
gtaaaacgacggccagtctcctccctagagagtgcagc

SEQ ID NO: 43307 - DNA, 21 bp, Artificial Sequence
  primer
taatcagccaaagtccatccc

SEQ ID NO: 43308 - DNA, 21 bp, Artificial Sequence
  primer
acaggatcttgggatgtccag

SEQ ID NO: 43309 - DNA, 38 bp, Artificial Sequence
  primer
gtaaaacgacggccagtctactccctctctcctccacc

SEQ ID NO: 43310 - DNA, 21 bp, Artificial Sequence
  primer
tgcctcctggaattctgactc

SEQ ID NO: 43311 - DNA, 21 bp, Artificial Sequence
  primer
aacaaatcccattcccatcag

SEQ ID NO: 43312 - DNA, 21 bp, Artificial Sequence
  primer
tttccacctttggtctgaacc

SEQ ID NO: 43313 - DNA, 38 bp, Artificial Sequence
  primer
gtaaaacgacggccagtcataggcggagccatatcatc

SEQ ID NO: 43314 - DNA, 21 bp, Artificial Sequence
  primer
cctgcctagaaggacatggac

SEQ ID NO: 43315 - DNA, 38 bp, Artificial Sequence
  primer
gtaaaacgacggccagtatattccacccttcctccctg

SEQ ID NO: 43316 - DNA, 21 bp, Artificial Sequence
  primer
tagccaaagtccatccctctt

SEQ ID NO: 43317 - DNA, 38 bp, Artificial Sequence
  primer
gtaaaacgacggccagtattgaccagtgtggaccagag

SEQ ID NO: 43318 - DNA, 37 bp, Artificial Sequence
  primer
gtaaaacgacggccagtgcactggcactgaatccatc

SEQ ID NO: 43319 - DNA, 38 bp, Artificial Sequence
  primer
gtaaaacgacggccagtctgggaatttggctcaacaag

SEQ ID NO: 43320 - DNA, 21 bp, Artificial Sequence
  primer
aacaaatcccattcccatcag

SEQ ID NO: 43321 - DNA, 21 bp, Artificial Sequence
  primer
tggaacctagagcgagtctgg

SEQ ID NO: 43322 - DNA, 37 bp, Artificial Sequence
  primer
gtaaaacgacggccagtaatggccgatgtctgttctg

SEQ ID NO: 43323 - DNA, 20 bp, Artificial Sequence
  primer
acctgcgtagcaagacatgg

SEQ ID NO: 43324 - DNA, 38 bp, Artificial Sequence
  primer
gtaaaacgacggccagttcaggccataatattccaccc

SEQ ID NO: 43325 - DNA, 38 bp, Artificial Sequence
  primer
gtaaaacgacggccagtatgctcctggatgatgatgaa

SEQ ID NO: 43326 - DNA, 38 bp, Artificial Sequence
  primer
gtaaaacgacggccagttaacccttaattgctgggtcc

SEQ ID NO: 43327 - DNA, 38 bp, Artificial Sequence
  primer
gtaaaacgacggccagtatgggaggaagaaggactcag

SEQ ID NO: 43328 - DNA, 38 bp, Artificial Sequence
  primer
gtaaaacgacggccagttgatggcagacaatcacacag

SEQ ID NO: 43329 - DNA, 19 bp, Artificial Sequence
  primer
ggttcccatggagggattg

SEQ ID NO: 43330 - DNA, 21 bp, Artificial Sequence
  primer
tacgcggttggatgtgtagag

SEQ ID NO: 43331 - DNA, 20 bp, Artificial Sequence
  primer
aatccacccacctcaacctc

SEQ ID NO: 43332 - DNA, 20 bp, Artificial Sequence
  primer
aaggtaagaccggctggaac

SEQ ID NO: 43333 - DNA, 21 bp, Artificial Sequence
  primer
tttgtgtctgggcttagggac

SEQ ID NO: 43334 - DNA, 21 bp, Artificial Sequence
  primer
tcttcagtgagccaatgttca

SEQ ID NO: 43335 - DNA, 21 bp, Artificial Sequence
  primer
acttgcttggcacattgaagg

SEQ ID NO: 43336 - DNA, 38 bp, Artificial Sequence
  primer
gtaaaacgacggccagtacagaacttgacctgtccacg

SEQ ID NO: 43337 - DNA, 42 bp, Artificial Sequence
  primer
gtaaaacgacggccagtttattaaacaagctagggtggaatg

SEQ ID NO: 43338 - DNA, 43 bp, Artificial Sequence
  primer
gtaaaacgacggccagttttgtacgtataatcaaatgctcctc

SEQ ID NO: 43339 - DNA, 21 bp, Artificial Sequence
  primer
tttacattctctgccacaccg

SEQ ID NO: 43340 - DNA, 39 bp, Artificial Sequence
  primer
gtaaaacgacggccagttgcttcttgtaacctgaattgc

SEQ ID NO: 43341 - DNA, 38 bp, Artificial Sequence
  primer
gtaaaacgacggccagtgacttcagcaaagtcactgcc

SEQ ID NO: 43342 - DNA, 36 bp, Artificial Sequence
  primer
gtaaaacgacggccagtttctgccttcgatccatcc

SEQ ID NO: 43343 - DNA, 38 bp, Artificial Sequence
  primer
gtaaaacgacggccagtccatcaaagaggcacacacac

SEQ ID NO: 43344 - DNA, 21 bp, Artificial Sequence
  primer
tgtctgaccattgccttgaac

SEQ ID NO: 43345 - DNA, 38 bp, Artificial Sequence
  primer
gtaaaacgacggccagtgtgcctgtttcagcatctgtc

SEQ ID NO: 43346 - DNA, 42 bp, Artificial Sequence
  primer
gtaaaacgacggccagtcagctaggctgtaattgttaattcg

SEQ ID NO: 43347 - DNA, 38 bp, Artificial Sequence
  primer
gtaaaacgacggccagtcaaccagagcttggcatattg

SEQ ID NO: 43348 - DNA, 21 bp, Artificial Sequence
  primer
tctctcaccgctcctattcaa

SEQ ID NO: 43349 - DNA, 22 bp, Artificial Sequence
  primer
ttgtgcatctgtagcagtcctc

SEQ ID NO: 43350 - DNA, 39 bp, Artificial Sequence
  primer
gtaaaacgacggccagttttggaatggtgtttcatcatc

SEQ ID NO: 43351 - DNA, 38 bp, Artificial Sequence
  primer
gtaaaacgacggccagtccctcctatgattcaccgaac

SEQ ID NO: 43352 - DNA, 21 bp, Artificial Sequence
  primer
ttctatccatgggccaaagtc

SEQ ID NO: 43353 - DNA, 23 bp, Artificial Sequence
  primer
tggcagctataacaatcaccatc

SEQ ID NO: 43354 - DNA, 21 bp, Artificial Sequence
  primer
agcttagcctatctgcatggc

SEQ ID NO: 43355 - DNA, 24 bp, Artificial Sequence
  primer
aatgtgtttatttcatccatgctg

SEQ ID NO: 43356 - DNA, 21 bp, Artificial Sequence
  primer
aatttcaatcagggcttggtg

SEQ ID NO: 43357 - DNA, 22 bp, Artificial Sequence
  primer
tttctgccataccacacagttg

SEQ ID NO: 43358 - DNA, 21 bp, Artificial Sequence
  primer
tggctggttgtacttctggac

SEQ ID NO: 43359 - DNA, 38 bp, Artificial Sequence
  primer
gtaaaacgacggccagtgttatggcgctacgtgatgtc

SEQ ID NO: 43360 - DNA, 40 bp, Artificial Sequence
  primer
gtaaaacgacggccagttgcaagtcacaaatgactgtttg

SEQ ID NO: 43361 - DNA, 35 bp, Artificial Sequence
  primer
gtaaaacgacggccagttggcctcacatccctcac

SEQ ID NO: 43362 - DNA, 38 bp, Artificial Sequence
  primer
gtaaaacgacggccagtagaggcacacaccgaattagc

SEQ ID NO: 43363 - DNA, 38 bp, Artificial Sequence
  primer
gtaaaacgacggccagttatttgaagcctgtgtggctg

SEQ ID NO: 43364 - DNA, 38 bp, Artificial Sequence
  primer
gtaaaacgacggccagtagacttacagagctcctcggg

SEQ ID NO: 43365 - DNA, 40 bp, Artificial Sequence
  primer
gtaaaacgacggccagtccagctaggttgtaatggtcaac

SEQ ID NO: 43366 - DNA, 42 bp, Artificial Sequence
  primer
gtaaaacgacggccagttttacaaccagagcttggtatatgg

SEQ ID NO: 43367 - DNA, 20 bp, Artificial Sequence
  primer
tgggcaagttggtctacagc

SEQ ID NO: 43368 - DNA, 43 bp, Artificial Sequence
  primer
gtaaaacgacggccagttggataccttcatgattcatataccc

SEQ ID NO: 43369 - DNA, 38 bp, Artificial Sequence
  primer
gtaaaacgacggccagtctggaaatggtactgcccttc

SEQ ID NO: 43370 - DNA, 23 bp, Artificial Sequence
  primer
ttgtgccagttacagagacagtg

SEQ ID NO: 43371 - DNA, 21 bp, Artificial Sequence
  primer
tttataagggaagggtcacgc

SEQ ID NO: 43372 - DNA, 21 bp, Artificial Sequence
  primer
ccacctgctcactcctggtag

SEQ ID NO: 43373 - DNA, 20 bp, Artificial Sequence
  primer
gagcatagggttggagtggg

SEQ ID NO: 43374 - DNA, 36 bp, Artificial Sequence
  primer
gtaaaacgacggccagtgaagtcgctggagcagtgg

SEQ ID NO: 43375 - DNA, 38 bp, Artificial Sequence
  primer
gtaaaacgacggccagtaggtcagtggtaaggacaggc

SEQ ID NO: 43376 - DNA, 38 bp, Artificial Sequence
  primer
gtaaaacgacggccagtctgacaggtgcagaattggag

SEQ ID NO: 43377 - DNA, 38 bp, Artificial Sequence
  primer
gtaaaacgacggccagtccaacataggaggcaagaagg

SEQ ID NO: 43378 - DNA, 21 bp, Artificial Sequence
  primer
ttgacagagtccagctgtgtg

SEQ ID NO: 43379 - DNA, 37 bp, Artificial Sequence
  primer
gtaaaacgacggccagtcttcctgcctttctcagcag

SEQ ID NO: 43380 - DNA, 38 bp, Artificial Sequence
  primer
gtaaaacgacggccagtacgagtagcaagagggcattg

SEQ ID NO: 43381 - DNA, 38 bp, Artificial Sequence
  primer
gtaaaacgacggccagtctagagcaacagcaatacccg

SEQ ID NO: 43382 - DNA, 38 bp, Artificial Sequence
  primer
gtaaaacgacggccagtacacctgtaaatcctgccctg

SEQ ID NO: 43383 - DNA, 21 bp, Artificial Sequence
  primer
gtgaacctcagtgggtgactg

SEQ ID NO: 43384 - DNA, 21 bp, Artificial Sequence
  primer
gccacaaattcaggtttggag

SEQ ID NO: 43385 - DNA, 37 bp, Artificial Sequence
  primer
gtaaaacgacggccagtactgggagagcctcttggac

SEQ ID NO: 43386 - DNA, 38 bp, Artificial Sequence
  primer
gtaaaacgacggccagtaatagatgggtggatgatggg

SEQ ID NO: 43387 - DNA, 23 bp, Artificial Sequence
  primer
gggctttcatcttcatttagacc

SEQ ID NO: 43388 - DNA, 36 bp, Artificial Sequence
  primer
gtaaaacgacggccagtagtcctgccttgtgatggc

SEQ ID NO: 43389 - DNA, 38 bp, Artificial Sequence
  primer
gtaaaacgacggccagtagggcctagggaaggtaagtc

SEQ ID NO: 43390 - DNA, 21 bp, Artificial Sequence
  primer
cccaagacatgctgacttctc

SEQ ID NO: 43391 - DNA, 38 bp, Artificial Sequence
  primer
gtaaaacgacggccagtccagcaaataccatgaaaggg

SEQ ID NO: 43392 - DNA, 21 bp, Artificial Sequence
  primer
taagacacgttgccatggttg

SEQ ID NO: 43393 - DNA, 21 bp, Artificial Sequence
  primer
ccctgcctacctaatccacac

SEQ ID NO: 43394 - DNA, 39 bp, Artificial Sequence
  primer
gtaaaacgacggccagtccagggaaagaaagttaaaccc

SEQ ID NO: 43395 - DNA, 21 bp, Artificial Sequence
  primer
acctcttatcagcctggttgc

SEQ ID NO: 43396 - DNA, 21 bp, Artificial Sequence
  primer
gcccaatacaatggaaaggag

SEQ ID NO: 43397 - DNA, 22 bp, Artificial Sequence
  primer
ttacatgggtgaatctgtgacg

SEQ ID NO: 43398 - DNA, 18 bp, Artificial Sequence
  primer
catcttcgcagggtgctg

SEQ ID NO: 43399 - DNA, 20 bp, Artificial Sequence
  primer
cagacacacgcactcctctc

SEQ ID NO: 43400 - DNA, 38 bp, Artificial Sequence
  primer
gtaaaacgacggccagtcattcccatatcatttgctgg

SEQ ID NO: 43401 - DNA, 45 bp, Artificial Sequence
  primer
gtaaaacgacggccagttgtcttatgccatgtaaagtagactctc

SEQ ID NO: 43402 - DNA, 22 bp, Artificial Sequence
  primer
gacggaaagagaagatggtttc

SEQ ID NO: 43403 - DNA, 20 bp, Artificial Sequence
  primer
ccttctgaagaggccaaagg

SEQ ID NO: 43404 - DNA, 39 bp, Artificial Sequence
  primer
gtaaaacgacggccagtcttgcaacctggtcactaattg

SEQ ID NO: 43405 - DNA, 38 bp, Artificial Sequence
  primer
gtaaaacgacggccagtaaagagaagggtcctgggttg

SEQ ID NO: 43406 - DNA, 21 bp, Artificial Sequence
  primer
taagctgctggccataacacc

SEQ ID NO: 43407 - DNA, 19 bp, Artificial Sequence
  primer
gagtatggcagggctggag

SEQ ID NO: 43408 - DNA, 38 bp, Artificial Sequence
  primer
gtaaaacgacggccagtaagagccgcacttaccacttg

SEQ ID NO: 43409 - DNA, 21 bp, Artificial Sequence
  primer
gaacaggacccaaccatgtag

SEQ ID NO: 43410 - DNA, 38 bp, Artificial Sequence
  primer
gtaaaacgacggccagtactcaattccagatatggccg

SEQ ID NO: 43411 - DNA, 21 bp, Artificial Sequence
  primer
aactagctgccagtgcctcag

SEQ ID NO: 43412 - DNA, 39 bp, Artificial Sequence
  primer
gtaaaacgacggccagttgcttgctgaagtgtcaatttc

SEQ ID NO: 43413 - DNA, 19 bp, Artificial Sequence
  primer
tggagcatgagttcccgac

SEQ ID NO: 43414 - DNA, 37 bp, Artificial Sequence
  primer
gtaaaacgacggccagtggtggctcctcaagtgacag

SEQ ID NO: 43415 - DNA, 21 bp, Artificial Sequence
  primer
agaggttgcagtgagacgaga

SEQ ID NO: 43416 - DNA, 21 bp, Artificial Sequence
  primer
ctgcctccctgtctctctctg

SEQ ID NO: 43417 - DNA, 37 bp, Artificial Sequence
  primer
gtaaaacgacggccagtgtcaggtgagtgggtgggac

SEQ ID NO: 43418 - DNA, 22 bp, Artificial Sequence
  primer
ctttaacttgtgtttccgaccc

SEQ ID NO: 43419 - DNA, 38 bp, Artificial Sequence
  primer
gtaaaacgacggccagttacagctatgcaagcagatgg

SEQ ID NO: 43420 - DNA, 38 bp, Artificial Sequence
  primer
gtaaaacgacggccagttgtactccacactcgaggacc

SEQ ID NO: 43421 - DNA, 20 bp, Artificial Sequence
  primer
cttctgcaccctgggcttac

SEQ ID NO: 43422 - DNA, 20 bp, Artificial Sequence
  primer
agagcagagcaggacactgg

SEQ ID NO: 43423 - DNA, 21 bp, Artificial Sequence
  primer
gattgatccctcggtcatagg

SEQ ID NO: 43424 - DNA, 38 bp, Artificial Sequence
  primer
gtaaaacgacggccagtacagaatgcactccgtggtag

SEQ ID NO: 43425 - DNA, 22 bp, Artificial Sequence
  primer
ggagcccaagattattgaggag

SEQ ID NO: 43426 - DNA, 22 bp, Artificial Sequence
  primer
ccttccctttggaccatttaag

SEQ ID NO: 43427 - DNA, 39 bp, Artificial Sequence
  primer
gtaaaacgacggccagtggtgatggaaagtatgcagagg

SEQ ID NO: 43428 - DNA, 21 bp, Artificial Sequence
  primer
cctcacagtttggtctcagcc

SEQ ID NO: 43429 - DNA, 21 bp, Artificial Sequence
  primer
tatgctgtgggaggctatgtg

SEQ ID NO: 43430 - DNA, 37 bp, Artificial Sequence
  primer
gtaaaacgacggccagttgctgctcttgctgttcctg

SEQ ID NO: 43431 - DNA, 38 bp, Artificial Sequence
  primer
gtaaaacgacggccagtctttatggcatctaggcgtgc

SEQ ID NO: 43432 - DNA, 20 bp, Artificial Sequence
  primer
gtcagcctgctcacttcctg

SEQ ID NO: 43433 - DNA, 38 bp, Artificial Sequence
  primer
gtaaaacgacggccagtagctggatggctacagaggtg

SEQ ID NO: 43434 - DNA, 37 bp, Artificial Sequence
  primer
gtaaaacgacggccagtcagcacatccacccagagtc

SEQ ID NO: 43435 - DNA, 38 bp, Artificial Sequence
  primer
gtaaaacgacggccagtgtctccttgtctgtgaaacgg

SEQ ID NO: 43436 - DNA, 35 bp, Artificial Sequence
  primer
gtaaaacgacggccagtgagacggctccttctgcc

SEQ ID NO: 43437 - DNA, 21 bp, Artificial Sequence
  primer
ctggaatgaaacttcccaacc

SEQ ID NO: 43438 - DNA, 37 bp, Artificial Sequence
  primer
gtaaaacgacggccagtagtcccgacaggttccgtag

SEQ ID NO: 43439 - DNA, 41 bp, Artificial Sequence
  primer
gtaaaacgacggccagtacttcagcattaggattcttgagg

SEQ ID NO: 43440 - DNA, 21 bp, Artificial Sequence
  primer
ggactttggctgtagtccctg

SEQ ID NO: 43441 - DNA, 21 bp, Artificial Sequence
  primer
ccttgctttgtatcctttgcc

SEQ ID NO: 43442 - DNA, 23 bp, Artificial Sequence
  primer
tttgtggactaatcattccgaag

SEQ ID NO: 43443 - DNA, 37 bp, Artificial Sequence
  primer
gtaaaacgacggccagtacctgggaatggcagaaatg

SEQ ID NO: 43444 - DNA, 42 bp, Artificial Sequence
  primer
gtaaaacgacggccagtaaatttaaatctggcttcttggaga

SEQ ID NO: 43445 - DNA, 43 bp, Artificial Sequence
  primer
gtaaaacgacggccagtaaagaggcaattaatgactaaacctg

SEQ ID NO: 43446 - DNA, 43 bp, Artificial Sequence
  primer
gtaaaacgacggccagtttcaccacaatataattgtagcatca

SEQ ID NO: 43447 - DNA, 39 bp, Artificial Sequence
  primer
gtaaaacgacggccagttgcaaggattagctgtacaagg

SEQ ID NO: 43448 - DNA, 38 bp, Artificial Sequence
  primer
gtaaaacgacggccagtaatttaatcatcccgctaccc

SEQ ID NO: 43449 - DNA, 38 bp, Artificial Sequence
  primer
gtaaaacgacggccagttgcctgaatggaaggctaaag

SEQ ID NO: 43450 - DNA, 21 bp, Artificial Sequence
  primer
gaaagctccatgcacatagcc

SEQ ID NO: 43451 - DNA, 38 bp, Artificial Sequence
  primer
gtaaaacgacggccagttcttgagcattccagttcctc

SEQ ID NO: 43452 - DNA, 38 bp, Artificial Sequence
  primer
gtaaaacgacggccagttctgatttcattggcttcgac

SEQ ID NO: 43453 - DNA, 21 bp, Artificial Sequence
  primer
ggatcaaagtctggcttcctg

SEQ ID NO: 43454 - DNA, 37 bp, Artificial Sequence
  primer
gtaaaacgacggccagtgcccatcacccagtagacag

SEQ ID NO: 43455 - DNA, 39 bp, Artificial Sequence
  primer
gtaaaacgacggccagttgtcacttactgctccatgctg

SEQ ID NO: 43456 - DNA, 38 bp, Artificial Sequence
  primer
gtaaaacgacggccagtttgactggacatgtgggtttc

SEQ ID NO: 43457 - DNA, 38 bp, Artificial Sequence
  primer
gtaaaacgacggccagtggcttccagttgagaaccttg

SEQ ID NO: 43458 - DNA, 38 bp, Artificial Sequence
  primer
gtaaaacgacggccagtttcactggtgattcaggcaac

SEQ ID NO: 43459 - DNA, 39 bp, Artificial Sequence
  primer
gtaaaacgacggccagtgggatttgagggcttcacttag

SEQ ID NO: 43460 - DNA, 39 bp, Artificial Sequence
  primer
gtaaaacgacggccagtaaatgcttcgatcctttaccag

SEQ ID NO: 43461 - DNA, 38 bp, Artificial Sequence
  primer
gtaaaacgacggccagtagcaggatttcaatgaccagc

SEQ ID NO: 43462 - DNA, 23 bp, Artificial Sequence
  primer
gatgatgaatgctctcactgtcc

SEQ ID NO: 43463 - DNA, 21 bp, Artificial Sequence
  primer
cctctgggcagagaaacaaag

SEQ ID NO: 43464 - DNA, 38 bp, Artificial Sequence
  primer
gtaaaacgacggccagttcccttgaacattccagttcc

SEQ ID NO: 43465 - DNA, 38 bp, Artificial Sequence
  primer
gtaaaacgacggccagtgccagtaaatggtagcaagcc

SEQ ID NO: 43466 - DNA, 38 bp, Artificial Sequence
  primer
gtaaaacgacggccagtattctttggtgtggttccagc

SEQ ID NO: 43467 - DNA, 38 bp, Artificial Sequence
  primer
gtaaaacgacggccagtagcctgccacccagtagatag

SEQ ID NO: 43468 - DNA, 38 bp, Artificial Sequence
  primer
gtaaaacgacggccagtatttactgttccatgctgggc

SEQ ID NO: 43469 - DNA, 38 bp, Artificial Sequence
  primer
gtaaaacgacggccagtctggcatagcacttcttgctg

SEQ ID NO: 43470 - DNA, 39 bp, Artificial Sequence
  primer
gtaaaacgacggccagtgcaaaggtcatacaggaaatgg

SEQ ID NO: 43471 - DNA, 38 bp, Artificial Sequence
  primer
gtaaaacgacggccagtctcaggcaacacccattacac

SEQ ID NO: 43472 - DNA, 21 bp, Artificial Sequence
  primer
ttagggatttgggagcttcac

SEQ ID NO: 43473 - DNA, 38 bp, Artificial Sequence
  primer
gtaaaacgacggccagtagcacatcactgggtatggag

SEQ ID NO: 43474 - DNA, 37 bp, Artificial Sequence
  primer
gtaaaacgacggccagtaccacaccctgcataacgtg

SEQ ID NO: 43475 - DNA, 21 bp, Artificial Sequence
  primer
tgcaaagcattacccttgatg

SEQ ID NO: 43476 - DNA, 37 bp, Artificial Sequence; identical to SEQ ID NO: 43474
  primer

SEQ ID NO: 43477 - DNA, 21 bp, Artificial Sequence
  primer
gaacaatctcaagcctggcac

SEQ ID NO: 43478 - DNA, 38 bp, Artificial Sequence
  primer
gtaaaacgacggccagtagctatagccctgcctccttc

SEQ ID NO: 43479 - DNA, 38 bp, Artificial Sequence
  primer
gtaaaacgacggccagttccctctcttgaccattccag

SEQ ID NO: 43480 - DNA, 38 bp, Artificial Sequence
  primer
gtaaaacgacggccagttgatttcattggacgcaactg

SEQ ID NO: 43481 - DNA, 38 bp, Artificial Sequence
  primer
gtaaaacgacggccagtgatcaaagtctggcttcctgg

SEQ ID NO: 43482 - DNA, 22 bp, Artificial Sequence
  primer
gagcatcttgaatatggcttgc

SEQ ID NO: 43483 - DNA, 38 bp, Artificial Sequence
  primer
gtaaaacgacggccagtcatgctggagaaagccatatc

SEQ ID NO: 43484 - DNA, 38 bp, Artificial Sequence
  primer
gtaaaacgacggccagtgatatgtgggtttcttgctgc

SEQ ID NO: 43485 - DNA, 21 bp, Artificial Sequence
  primer
aaggaatgggttccagttgag

SEQ ID NO: 43486 - DNA, 38 bp, Artificial Sequence
  primer
gtaaaacgacggccagttgagggagggaagtcaagaag

SEQ ID NO: 43487 - DNA, 21 bp, Artificial Sequence
  primer
cccagtgtgactttgaattgc

SEQ ID NO: 43488 - DNA, 44 bp, Artificial Sequence
  primer
gtaaaacgacggccagtttcacgaatactatgatcatttaccag

SEQ ID NO: 43489 - DNA, 39 bp, Artificial Sequence
  primer
gtaaaacgacggccagttgtactactggttgggaggtgg

SEQ ID NO: 43490 - DNA, 21 bp, Artificial Sequence
  primer
taaacgatggatggtgagtgc

SEQ ID NO: 43491 - DNA, 21 bp, Artificial Sequence
  primer
actgaatcactgctgtgcagg

SEQ ID NO: 43492 - DNA, 38 bp, Artificial Sequence
  primer
gtaaaacgacggccagtgcctgatcattccagttcctc

SEQ ID NO: 43493 - DNA, 39 bp, Artificial Sequence
  primer
gtaaaacgacggccagtttcctctaactgccagcaagtc

SEQ ID NO: 43494 - DNA, 38 bp, Artificial Sequence
  primer
gtaaaacgacggccagtggatcaaagtctggcttcctg

SEQ ID NO: 43495 - DNA, 38 bp, Artificial Sequence
  primer
gtaaaacgacggccagtgagcatctgtcatagggcctg

SEQ ID NO: 43496 - DNA, 38 bp, Artificial Sequence
  primer
gtaaaacgacggccagtcacttattgttccatgccagg

SEQ ID NO: 43497 - DNA, 37 bp, Artificial Sequence
  primer
gtaaaacgacggccagtatgtggatttcctgctgcac

SEQ ID NO: 43498 - DNA, 21 bp, Artificial Sequence
  primer
agaaggaatggcttccagttg

SEQ ID NO: 43499 - DNA, 38 bp, Artificial Sequence
  primer
gtaaaacgacggccagtctcagaagggaggttgaggac

SEQ ID NO: 43500 - DNA, 21 bp, Artificial Sequence
  primer
cccagtgagactctgaattgc

SEQ ID NO: 43501 - DNA, 38 bp, Artificial Sequence
  primer
gtaaaacgacggccagttgaatgctacaatcctttgcc

SEQ ID NO: 43502 - DNA, 38 bp, Artificial Sequence
  primer
gtaaaacgacggccagtggtgggccctaagtaagaaac

SEQ ID NO: 43503 - DNA, 22 bp, Artificial Sequence
  primer
tctcaggtcaaacctcacacag

SEQ ID NO: 43504 - DNA, 35 bp, Artificial Sequence
  primer
gtaaaacgacggccagtcgctgacagctgagtcgg

SEQ ID NO: 43505 - DNA, 37 bp, Artificial Sequence
  primer
gtaaaacgacggccagtctcctgtctgtgaagtgggc

SEQ ID NO: 43506 - DNA, 38 bp, Artificial Sequence
  primer
gtaaaacgacggccagtttggtagcatgcattgagcac

SEQ ID NO: 43507 - DNA, 21 bp, Artificial Sequence
  primer
agatagggacgattgtgtggg

SEQ ID NO: 43508 - DNA, 38 bp, Artificial Sequence
  primer
gtaaaacgacggccagttccaataccgtttcctcatcc

SEQ ID NO: 43509 - DNA, 37 bp, Artificial Sequence
  primer
gtaaaacgacggccagtgaggccagaaagactgggag

SEQ ID NO: 43510 - DNA, 38 bp, Artificial Sequence
  primer
gtaaaacgacggccagtcccagagtccaggtgtctagc

SEQ ID NO: 43511 - DNA, 38 bp, Artificial Sequence
  primer
gtaaaacgacggccagtatcttgatccagtctccctgg

SEQ ID NO: 43512 - DNA, 38 bp, Artificial Sequence
  primer
gtaaaacgacggccagtagattctgaaaggtgcaaggg

SEQ ID NO: 43513 - DNA, 38 bp, Artificial Sequence
  primer
gtaaaacgacggccagtcatagaggcaggcacaaactg

SEQ ID NO: 43514 - DNA, 37 bp, Artificial Sequence
  primer
gtaaaacgacggccagtcttcacgcttccttccagtg

SEQ ID NO: 43515 - DNA, 37 bp, Artificial Sequence
  primer
gtaaaacgacggccagtgtgagggtatgcactcagcc

SEQ ID NO: 43516 - DNA, 38 bp, Artificial Sequence
  primer
gtaaaacgacggccagtctgctctgagtagccctgttg

SEQ ID NO: 43517 - DNA, 22 bp, Artificial Sequence
  primer
ggctcaaagtctgtgttcatcc

SEQ ID NO: 43518 - DNA, 38 bp, Artificial Sequence
  primer
gtaaaacgacggccagttgacatttgctgctcattcac

SEQ ID NO: 43519 - DNA, 21 bp, Artificial Sequence
  primer
acaatcctccctggatttgag

SEQ ID NO: 43520 - DNA, 38 bp, Artificial Sequence
  primer
gtaaaacgacggccagtgggagagagcaagaatctgga

SEQ ID NO: 43521 - DNA, 38 bp, Artificial Sequence
  primer
gtaaaacgacggccagtgaagtggatgggagtcaagtg

SEQ ID NO: 43522 - DNA, 21 bp, Artificial Sequence
  primer
tgacgtggcttcttctggata

SEQ ID NO: 43523 - DNA, 40 bp, Artificial Sequence
  primer
gtaaaacgacggccagtccaagatatctgcatgctacagg

SEQ ID NO: 43524 - DNA, 38 bp, Artificial Sequence
  primer
gtaaaacgacggccagtaaggccaaaggataatagggc

SEQ ID NO: 43525 - DNA, 38 bp, Artificial Sequence
  primer
gtaaaacgacggccagttgtgtaggagaggcctgagtc

SEQ ID NO: 43526 - DNA, 37 bp, Artificial Sequence
  primer
gtaaaacgacggccagtaggagatccacagcctcctg

SEQ ID NO: 43527 - DNA, 21 bp, Artificial Sequence
  primer
gcagaatcatcccagtcaaag

SEQ ID NO: 43528 - DNA, 21 bp, Artificial Sequence
  primer
ccaacccagaggtatgtggtc

SEQ ID NO: 43529 - DNA, 38 bp, Artificial Sequence
  primer
gtaaaacgacggccagtagtgtccatgggctgtatgtg

SEQ ID NO: 43530 - DNA, 21 bp, Artificial Sequence
  primer
ccatgacttaagcacaggtgg

SEQ ID NO: 43531 - DNA, 38 bp, Artificial Sequence
  primer
gtaaaacgacggccagttctaaatccctaacccgtgct

SEQ ID NO: 43532 - DNA, 38 bp, Artificial Sequence
  primer
gtaaaacgacggccagtaactgccaactgacagacacc

SEQ ID NO: 43533 - DNA, 38 bp, Artificial Sequence
  primer
gtaaaacgacggccagtcaaattgtcaccagtcatccc

SEQ ID NO: 43534 - DNA, 21 bp, Artificial Sequence
  primer
ccaaccaagatatctgcaagc

SEQ ID NO: 43535 - DNA, 38 bp, Artificial Sequence; identical to SEQ ID NO: 43524
  primer

SEQ ID NO: 43536 - DNA, 38 bp, Artificial Sequence
  primer
gtaaaacgacggccagttttctggacatcctcctcttg

SEQ ID NO: 43537 - DNA, 21 bp, Artificial Sequence
  primer
tcctggatcctctatgctctg

SEQ ID NO: 43538 - DNA, 21 bp, Artificial Sequence
  primer
tccaatgacccttggagaata

SEQ ID NO: 43539 - DNA, 21 bp, Artificial Sequence
  primer
tgcaaatgatcggtcttctct

SEQ ID NO: 43540 - DNA, 38 bp, Artificial Sequence
  primer
gtaaaacgacggccagtgaagtgtccgtgggctgtaag

SEQ ID NO: 43541 - DNA, 37 bp, Artificial Sequence
  primer
gtaaaacgacggccagtgttgctgtctccgccttatg

SEQ ID NO: 43542 - DNA, 38 bp, Artificial Sequence
  primer
gtaaaacgacggccagttaggagaagagggtgcaggag

SEQ ID NO: 43543 - DNA, 37 bp, Artificial Sequence
  primer
gtaaaacgacggccagtggcttcctgagaacaaaggg

SEQ ID NO: 43544 - DNA, 21 bp, Artificial Sequence
  primer
gggatggagtcgtgtaggatg

SEQ ID NO: 43545 - DNA, 38 bp, Artificial Sequence
  primer
gtaaaacgacggccagttggtggtggaggataggctac

SEQ ID NO: 43546 - DNA, 38 bp, Artificial Sequence
  primer
gtaaaacgacggccagtcctggaatggagtttctctgg

SEQ ID NO: 43547 - DNA, 39 bp, Artificial Sequence
  primer
gtaaaacgacggccagtcacaaggctcacctctaggaag

SEQ ID NO: 43548 - DNA, 38 bp, Artificial Sequence
  primer
gtaaaacgacggccagtcctcccagagaccttcatttg

SEQ ID NO: 43549 - DNA, 21 bp, Artificial Sequence
  primer
agtgttcacaccatgtcaggc

SEQ ID NO: 43550 - DNA, 38 bp, Artificial Sequence
  primer
gtaaaacgacggccagtggattacaggaactgggcatc

SEQ ID NO: 43551 - DNA, 37 bp, Artificial Sequence
  primer
gtaaaacgacggccagtcgaccctgaggtaccctttc

SEQ ID NO: 43552 - DNA, 21 bp, Artificial Sequence
  primer
gcccaggtcaaccaatctatc

SEQ ID NO: 43553 - DNA, 37 bp, Artificial Sequence
  primer
gtaaaacgacggccagtcttccctgatctgcctccag

SEQ ID NO: 43554 - DNA, 37 bp, Artificial Sequence
  primer
gtaaaacgacggccagtatctgggcatctcttggctc

SEQ ID NO: 43555 - DNA, 21 bp, Artificial Sequence
  primer
cttggccttcttcctgctatg

SEQ ID NO: 43556 - DNA, 38 bp, Artificial Sequence
  primer
gtaaaacgacggccagttggctgggtgagtaattgagg

SEQ ID NO: 43557 - DNA, 21 bp, Artificial Sequence
  primer
atcttgatgtttgggtctggg

SEQ ID NO: 43558 - DNA, 21 bp, Artificial Sequence
  primer
actcaatttcctgatgggcag

SEQ ID NO: 43559 - DNA, 21 bp, Artificial Sequence
  primer
ggaaggaggatggatcttcag

SEQ ID NO: 43560 - DNA, 38 bp, Artificial Sequence
  primer
gtaaaacgacggccagtcagagtttgggtgctctcctc

SEQ ID NO: 43561 - DNA, 38 bp, Artificial Sequence
  primer
gtaaaacgacggccagtctcgcttggaaacagagaagc

SEQ ID NO: 43562 - DNA, 20 bp, Artificial Sequence
  primer
aaaggtgctcacagcctcag

SEQ ID NO: 43563 - DNA, 22 bp, Artificial Sequence
  primer
cacctctcctcaatggagacac

SEQ ID NO: 43564 - DNA, 38 bp, Artificial Sequence
  primer
gtaaaacgacggccagtccaggttctaagcatgatggg

SEQ ID NO: 43565 - DNA, 38 bp, Artificial Sequence
  primer
gtaaaacgacggccagtctcagccctcgtttactcacc

SEQ ID NO: 43566 - DNA, 37 bp, Artificial Sequence
  primer
gtaaaacgacggccagttgactggctatctgggcatc

SEQ ID NO: 43567 - DNA, 38 bp, Artificial Sequence
  primer
gtaaaacgacggccagtctatcctcccttcgtcctttg

SEQ ID NO: 43568 - DNA, 39 bp, Artificial Sequence
  primer
gtaaaacgacggccagtcattgcacccaaggataatctc

SEQ ID NO: 43569 - DNA, 21 bp, Artificial Sequence
  primer
taacagtttctgctcgcatcc

SEQ ID NO: 43570 - DNA, 38 bp, Artificial Sequence
  primer
gtaaaacgacggccagttctcatgactgatacccacca

SEQ ID NO: 43571 - DNA, 21 bp, Artificial Sequence
  primer
gacgtgcagagtgcatttgag

SEQ ID NO: 43572 - DNA, 38 bp, Artificial Sequence
  primer
gtaaaacgacggccagtaccctggatcactccattctg

SEQ ID NO: 43573 - DNA, 35 bp, Artificial Sequence
  primer
gtaaaacgacggccagtttaccgctggcttctggg

SEQ ID NO: 43574 - DNA, 37 bp, Artificial Sequence
  primer
gtaaaacgacggccagtacccaggacattgttctccc

SEQ ID NO: 43575 - DNA, 21 bp, Artificial Sequence
  primer
ttccaaggttcctagtggagg

SEQ ID NO: 43576 - DNA, 20 bp, Artificial Sequence
  primer
agtcccaggcacgcttagtc

SEQ ID NO: 43577 - DNA, 37 bp, Artificial Sequence
  primer
gtaaaacgacggccagtgtccctgcctctccactgtc

SEQ ID NO: 43578 - DNA, 37 bp, Artificial Sequence
  primer
gtaaaacgacggccagttgaccaactacctgggcatc

SEQ ID NO: 43579 - DNA, 38 bp, Artificial Sequence
  primer
gtaaaacgacggccagttgtagcctggtctggtcttcc

SEQ ID NO: 43580 - DNA, 38 bp, Artificial Sequence
  primer
gtaaaacgacggccagtgggagaagtgcaaacctcttg

SEQ ID NO: 43581 - DNA, 38 bp, Artificial Sequence
  primer
gtaaaacgacggccagttcccaatcttgggtcttcatc

SEQ ID NO: 43582 - DNA, 38 bp, Artificial Sequence
  primer
gtaaaacgacggccagttaggaggtagatcctggctgc

SEQ ID NO: 43583 - DNA, 21 bp, Artificial Sequence
  primer
gggtctaggagtgcaagatgg

SEQ ID NO: 43584 - DNA, 21 bp, Artificial Sequence
  primer
caatgcatgggtgctgtctac

SEQ ID NO: 43585 - DNA, 38 bp, Artificial Sequence
  primer
gtaaaacgacggccagtatccatcagtttcccaggatt

SEQ ID NO: 43586 - DNA, 38 bp, Artificial Sequence
  primer
gtaaaacgacggccagttgctcccttgataaggattgg

SEQ ID NO: 43587 - DNA, 21 bp, Artificial Sequence
  primer
ccaacatcacctccctcaaag

SEQ ID NO: 43588 - DNA, 38 bp, Artificial Sequence
  primer
gtaaaacgacggccagtcctcaaactgctctaggtggg

SEQ ID NO: 43589 - DNA, 38 bp, Artificial Sequence
  primer
gtaaaacgacggccagtctctgcctctctccactgtcc

SEQ ID NO: 43590 - DNA, 21 bp, Artificial Sequence
  primer
aattctcagggagagggcttc

SEQ ID NO: 43591 - DNA, 21 bp, Artificial Sequence
  primer
ttggagggaagaagtgcaaac

SEQ ID NO: 43592 - DNA, 38 bp, Artificial Sequence
  primer
gtaaaacgacggccagttaggtgaacagggttgggaac

SEQ ID NO: 43593 - DNA, 38 bp, Artificial Sequence; identical to SEQ ID NO: 43581
  primer

SEQ ID NO: 43594 - DNA, 36 bp, Artificial Sequence
  primer
gtaaaacgacggccagttcctagctgctggtgggag

SEQ ID NO: 43595 - DNA, 21 bp, Artificial Sequence
  primer
gcttgggtttctcgaaagagg

SEQ ID NO: 43596 - DNA, 21 bp, Artificial Sequence
  primer
tttatgtttgagggtgagggc

SEQ ID NO: 43597 - DNA, 21 bp, Artificial Sequence
  primer
tgctgttccatgggtctattt

SEQ ID NO: 43598 - DNA, 21 bp, Artificial Sequence
  primer
tgtttccttagggacgacctg

SEQ ID NO: 43599 - DNA, 21 bp, Artificial Sequence
  primer
cctccaagacacacaccactg

SEQ ID NO: 43600 - DNA, 38 bp, Artificial Sequence; identical to SEQ ID NO: 43588
  primer

SEQ ID NO: 43601 - DNA, 38 bp, Artificial Sequence
  primer
gtaaaacgacggccagttttacccatcattggtcctgg

SEQ ID NO: 43602 - DNA, 38 bp, Artificial Sequence
  primer
gtaaaacgacggccagtttgactggatatctgggcatc

SEQ ID NO: 43603 - DNA, 21 bp, Artificial Sequence
  primer
agtgttgttgcagcctagtcc

SEQ ID NO: 43604 - DNA, 38 bp, Artificial Sequence
  primer
gtaaaacgacggccagtccctggctgggtaagtaactg

SEQ ID NO: 43605 - DNA, 38 bp, Artificial Sequence
  primer
gtaaaacgacggccagtactctcacccaagcgtagtcc

SEQ ID NO: 43606 - DNA, 21 bp, Artificial Sequence
  primer
gaatgtggtcctgggattctg

SEQ ID NO: 43607 - DNA, 38 bp, Artificial Sequence
  primer
gtaaaacgacggccagtctgggaagaacaaacaggagg

SEQ ID NO: 43608 - DNA, 38 bp, Artificial Sequence
  primer
gtaaaacgacggccagtctgagagcctcaatgtatggg

SEQ ID NO: 43609 - DNA, 21 bp, Artificial Sequence
  primer
aggactgagggtcagagggag

SEQ ID NO: 43610 - DNA, 38 bp, Artificial Sequence
  primer
gtaaaacgacggccagttgtttccttagggacgacctg

SEQ ID NO: 43611 - DNA, 21 bp, Artificial Sequence
  primer
tcaacatcttcgcaatccatc

SEQ ID NO: 43612 - DNA, 37 bp, Artificial Sequence
  primer
gtaaaacgacggccagttgtctgcccaaggtgatctg

SEQ ID NO: 43613 - DNA, 19 bp, Artificial Sequence
  primer
tttccggtctttcgctttc

SEQ ID NO: 43614 - DNA, 38 bp, Artificial Sequence
  primer
gtaaaacgacggccagtacaggcagttcacacatgctc

SEQ ID NO: 43615 - DNA, 38 bp, Artificial Sequence
  primer
gtaaaacgacggccagttgaatgtctttgaggcacagg

SEQ ID NO: 43616 - DNA, 24 bp, Artificial Sequence
  primer
cctgtagatgaagctgtttcagga

SEQ ID NO: 43617 - DNA, 38 bp, Artificial Sequence
  primer
gtaaaacgacggccagttggaccgtacaagagaagagg

SEQ ID NO: 43618 - DNA, 38 bp, Artificial Sequence
  primer
gtaaaacgacggccagtgacaatcatcgtcattcccac

SEQ ID NO: 43619 - DNA, 39 bp, Artificial Sequence
  primer
gtaaaacgacggccagtttcacaagagcctatgttgtcg

SEQ ID NO: 43620 - DNA, 38 bp, Artificial Sequence
  primer
gtaaaacgacggccagttgcagtcacagtgcagtcatc

SEQ ID NO: 43621 - DNA, 38 bp, Artificial Sequence
  primer
gtaaaacgacggccagtcatgccttgatccacctgttc

SEQ ID NO: 43622 - DNA, 38 bp, Artificial Sequence
  primer
gtaaaacgacggccagtttctgttcctttatttgcccg

SEQ ID NO: 43623 - DNA, 38 bp, Artificial Sequence
  primer
gtaaaacgacggccagtcgcttcctatgacaggacctc

SEQ ID NO: 43624 - DNA, 19 bp, Artificial Sequence
  primer
tcttcccgcgagtcagaag

SEQ ID NO: 43625 - DNA, 22 bp, Artificial Sequence
  primer
ggtcctgaactcagcttgtgtc

SEQ ID NO: 43626 - DNA, 38 bp, Artificial Sequence
  primer
gtaaaacgacggccagtaaccgtcaccaacttgaactg

SEQ ID NO: 43627 - DNA, 37 bp, Artificial Sequence
  primer
gtaaaacgacggccagtgttactccacgctgcctgtg

SEQ ID NO: 43628 - DNA, 38 bp, Artificial Sequence
  primer
gtaaaacgacggccagttgtgatctttggttcctgctg

SEQ ID NO: 43629 - DNA, 38 bp, Artificial Sequence
  primer
gtaaaacgacggccagtaacaggtcagtggtgggagag

SEQ ID NO: 43630 - DNA, 39 bp, Artificial Sequence
  primer
gtaaaacgacggccagtgaaatcaggcaagatttgaagc

SEQ ID NO: 43631 - DNA, 38 bp, Artificial Sequence
  primer
gtaaaacgacggccagttctcctttatgctttgggcag

SEQ ID NO: 43632 - DNA, 21 bp, Artificial Sequence
  primer
agctcatcctgaggcagagag

SEQ ID NO: 43633 - DNA, 38 bp, Artificial Sequence
  primer
gtaaaacgacggccagtgtggaaagctaaggtgccaac

SEQ ID NO: 43634 - DNA, 21 bp, Artificial Sequence
  primer
atcggtgctaggtggtaggtg

SEQ ID NO: 43635 - DNA, 22 bp, Artificial Sequence
  primer
aaagtttcaatggcatttggtg

SEQ ID NO: 43636 - DNA, 37 bp, Artificial Sequence
  primer
gtaaaacgacggccagtccctccctgaatatggcatt

SEQ ID NO: 43637 - DNA, 38 bp, Artificial Sequence
  primer
gtaaaacgacggccagttgccttcaacagatgtgaacc

SEQ ID NO: 43638 - DNA, 38 bp, Artificial Sequence
  primer
gtaaaacgacggccagttcactgcgtgcctagtctttc

SEQ ID NO: 43639 - DNA, 38 bp, Artificial Sequence
  primer
gtaaaacgacggccagttcaaacccagcaagctctaaa

SEQ ID NO: 43640 - DNA, 37 bp, Artificial Sequence
  primer
gtaaaacgacggccagtagaaattgggaaagatgggc

SEQ ID NO: 43641 - DNA, 22 bp, Artificial Sequence
  primer
ttaccaactcaggaacattggg

SEQ ID NO: 43642 - DNA, 22 bp, Artificial Sequence
  primer
ttctacattgcctggtgttctg

SEQ ID NO: 43643 - DNA, 38 bp, Artificial Sequence
  primer
gtaaaacgacggccagtcatctgaagtcctcctttggg

SEQ ID NO: 43644 - DNA, 19 bp, Artificial Sequence
  primer
caccagagcctgttgtggg

SEQ ID NO: 43645 - DNA, 22 bp, Artificial Sequence
  primer
tcagattgtctggatgatttgc

SEQ ID NO: 43646 - DNA, 21 bp, Artificial Sequence
  primer
tgagcacctgtaatccagcag

SEQ ID NO: 43647 - DNA, 38 bp, Artificial Sequence
  primer
gtaaaacgacggccagtatctgccagcttctctcgttc

SEQ ID NO: 43648 - DNA, 38 bp, Artificial Sequence
  primer
gtaaaacgacggccagtttggtcatgaaacgaaactgg

SEQ ID NO: 43649 - DNA, 21 bp, Artificial Sequence
  primer
caaaggaaggaggagtatggc

SEQ ID NO: 43650 - DNA, 39 bp, Artificial Sequence
  primer
gtaaaacgacggccagtaaatgtaaatgcccaaagggtt

SEQ ID NO: 43651 - DNA, 21 bp, Artificial Sequence
  primer
cagggtgcttcacattgtttg

SEQ ID NO: 43652 - DNA, 38 bp, Artificial Sequence
  primer
gtaaaacgacggccagtctttatgctcggtcctggttc

SEQ ID NO: 43653 - DNA, 42 bp, Artificial Sequence
  primer
gtaaaacgacggccagttgacactttatttaaaggttgaggc

SEQ ID NO: 43654 - DNA, 21 bp, Artificial Sequence
  primer
caccatggacagtggtagagc

SEQ ID NO: 43655 - DNA, 22 bp, Artificial Sequence
  primer
tcaaggagcatctgagtatccc

SEQ ID NO: 43656 - DNA, 42 bp, Artificial Sequence
  primer
gtaaaacgacggccagtttatctgtacatttgctgttcatct

SEQ ID NO: 43657 - DNA, 36 bp, Artificial Sequence
  primer
gtaaaacgacggccagttttcagtggcatccttccc

SEQ ID NO: 43658 - DNA, 40 bp, Artificial Sequence
  primer
gtaaaacgacggccagtcaaagtttgaagtcagtgggaaa

SEQ ID NO: 43659 - DNA, 38 bp, Artificial Sequence
  primer
gtaaaacgacggccagtaagccaatttcccgtgtttac

SEQ ID NO: 43660 - DNA, 21 bp, Artificial Sequence
  primer
accgagtgatgtttgaagctg

SEQ ID NO: 43661 - DNA, 21 bp, Artificial Sequence
  primer
tgtccacctttgatgatctgg

SEQ ID NO: 43662 - DNA, 38 bp, Artificial Sequence
  primer
gtaaaacgacggccagtgggaaaggcctatttgtttgc

SEQ ID NO: 43663 - DNA, 21 bp, Artificial Sequence
  primer
gcttcccataccctgttcatc

SEQ ID NO: 43664 - DNA, 39 bp, Artificial Sequence
  primer
gtaaaacgacggccagttctttggagcttccaggtttag

SEQ ID NO: 43665 - DNA, 20 bp, Artificial Sequence
  primer
agaccacggtgacattcctg

SEQ ID NO: 43666 - DNA, 21 bp, Artificial Sequence
  primer
gcaatccatgcagtcaccttc

SEQ ID NO: 43667 - DNA, 39 bp, Artificial Sequence
  primer
gtaaaacgacggccagttccaccatctttcaaaggaaac

SEQ ID NO: 43668 - DNA, 41 bp, Artificial Sequence
  primer
gtaaaacgacggccagtgagaaagcatttagcatcagtcag

SEQ ID NO: 43669 - DNA, 39 bp, Artificial Sequence
  primer
gtaaaacgacggccagtgaatgatgagcttcacctctgc

SEQ ID NO: 43670 - DNA, 38 bp, Artificial Sequence
  primer
gtaaaacgacggccagttggctgggtctgtgtcctaac

SEQ ID NO: 43671 - DNA, 22 bp, Artificial Sequence
  primer
ccctcttggtgctcaatgtatg

SEQ ID NO: 43672 - DNA, 38 bp, Artificial Sequence
  primer
gtaaaacgacggccagtcaggcagagagagctagcaac

SEQ ID NO: 43673 - DNA, 38 bp, Artificial Sequence
  primer
gtaaaacgacggccagtgctggaagcttctctctgagc

SEQ ID NO: 43674 - DNA, 21 bp, Artificial Sequence
  primer
gtcattgctggatacctgtgc

SEQ ID NO: 43675 - DNA, 38 bp, Artificial Sequence
  primer
gtaaaacgacggccagtttggataccgttcagtgcaag

SEQ ID NO: 43676 - DNA, 38 bp, Artificial Sequence
  primer
gtaaaacgacggccagttttgtctactccctgctgtgg

SEQ ID NO: 43677 - DNA, 21 bp, Artificial Sequence
  primer
agcagtcctttgccttcaaac

SEQ ID NO: 43678 - DNA, 21 bp, Artificial Sequence
  primer
gtgggcaggagtatctgttcc

SEQ ID NO: 43679 - DNA, 19 bp, Artificial Sequence
  primer
gggacctcgagcgaaagac

SEQ ID NO: 43680 - DNA, 36 bp, Artificial Sequence
  primer
gtaaaacgacggccagtcgtcgatagggtcggagac

SEQ ID NO: 43681 - DNA, 21 bp, Artificial Sequence
  primer
atgcaattcagtgtgtctggg

SEQ ID NO: 43682 - DNA, 20 bp, Artificial Sequence
  primer
gtgcacatgtattgatggcg

SEQ ID NO: 43683 - DNA, 40 bp, Artificial Sequence
  primer
gtaaaacgacggccagtttgtagaaatgagtgcttgagcc

SEQ ID NO: 43684 - DNA, 21 bp, Artificial Sequence
  primer
ggacgtgtagactgttgcctg

SEQ ID NO: 43685 - DNA, 37 bp, Artificial Sequence
  primer
gtaaaacgacggccagttggatcctgggttgaaagtg

SEQ ID NO: 43686 - DNA, 38 bp, Artificial Sequence
  primer
gtaaaacgacggccagtagacttcggtttgggtttcag

SEQ ID NO: 43687 - DNA, 37 bp, Artificial Sequence
  primer
gtaaaacgacggccagtaaacatgggtgggaaaggac

SEQ ID NO: 43688 - DNA, 38 bp, Artificial Sequence
  primer
gtaaaacgacggccagttaggcacaaagcagacattcg

SEQ ID NO: 43689 - DNA, 20 bp, Artificial Sequence
  primer
ttcacaaaggcatttggctc

SEQ ID NO: 43690 - DNA, 23 bp, Artificial Sequence
  primer
attgtttgttggctttatcatcc

SEQ ID NO: 43691 - DNA, 24 bp, Artificial Sequence
  primer
aaactaaaccctgtgattctgtcc

SEQ ID NO: 43692 - DNA, 21 bp, Artificial Sequence
  primer
aagcgtcagcttcaaccaaac

SEQ ID NO: 43693 - DNA, 38 bp, Artificial Sequence
  primer
gtaaaacgacggccagttttatgtccttgcaaccatcc

SEQ ID NO: 43694 - DNA, 21 bp, Artificial Sequence
  primer
ctggccatttcagatctcctg

SEQ ID NO: 43695 - DNA, 21 bp, Artificial Sequence
  primer
atctgctgatcattcgggttc

SEQ ID NO: 43696 - DNA, 38 bp, Artificial Sequence
  primer
gtaaaacgacggccagtgctttcgtgtctgagaggatt

SEQ ID NO: 43697 - DNA, 37 bp, Artificial Sequence
  primer
gtaaaacgacggccagtgtgcatgtcgtagcatcagg

SEQ ID NO: 43698 - DNA, 21 bp, Artificial Sequence
  primer
tatgcagctcagtccctgttc

SEQ ID NO: 43699 - DNA, 38 bp, Artificial Sequence
  primer
gtaaaacgacggccagtaaccaagagccctacagttgc

SEQ ID NO: 43700 - DNA, 19 bp, Artificial Sequence
  primer
aaggctccctaggcaatgg

SEQ ID NO: 43701 - DNA, 38 bp, Artificial Sequence
  primer
gtaaaacgacggccagtccactaaagggtggtcattgg

SEQ ID NO: 43702 - DNA, 21 bp, Artificial Sequence
  primer
ggtcaacggtgctagaagagg

SEQ ID NO: 43703 - DNA, 38 bp, Artificial Sequence
  primer
gtaaaacgacggccagtatctagcccagtggcttcaac

SEQ ID NO: 43704 - DNA, 21 bp, Artificial Sequence
  primer
cacctcacagtagtcgttgcc

SEQ ID NO: 43705 - DNA, 38 bp, Artificial Sequence
  primer
gtaaaacgacggccagttgacaggttaccctgggtttg

SEQ ID NO: 43706 - DNA, 21 bp, Artificial Sequence
  primer
cacagtcctatccttgggcag

SEQ ID NO: 43707 - DNA, 38 bp, Artificial Sequence
  primer
gtaaaacgacggccagtttgtggtctactgtgggaagc

SEQ ID NO: 43708 - DNA, 21 bp, Artificial Sequence
  primer
attgagctgtgctcaccattc

SEQ ID NO: 43709 - DNA, 21 bp, Artificial Sequence
  primer
tctttccttctctgctggtgc

SEQ ID NO: 43710 - DNA, 19 bp, Artificial Sequence
  primer
ctctgtagccttcggcctc

SEQ ID NO: 43711 - DNA, 38 bp, Artificial Sequence
  primer
gtaaaacgacggccagtgttgcctttaccgtaagtggg

SEQ ID NO: 43712 - DNA, 21 bp, Artificial Sequence
  primer
ggaagccgactctctgtgatg

SEQ ID NO: 43713 - DNA, 38 bp, Artificial Sequence
  primer
gtaaaacgacggccagtagaacgggttcctccatgttc

SEQ ID NO: 43714 - DNA, 38 bp, Artificial Sequence
  primer
gtaaaacgacggccagtgtcctccagcgtctgtctgtc

SEQ ID NO: 43715 - DNA, 20 bp, Artificial Sequence
  primer
tcccatcagagcgtgtaacc

SEQ ID NO: 43716 - DNA, 38 bp, Artificial Sequence
  primer
gtaaaacgacggccagtgatcttcctggaggagctgac

SEQ ID NO: 43717 - DNA, 38 bp, Artificial Sequence
  primer
gtaaaacgacggccagtcgagggatgaatctgtctcag

SEQ ID NO: 43718 - DNA, 38 bp, Artificial Sequence
  primer
gtaaaacgacggccagttctccattcctggatgtttgg

SEQ ID NO: 43719 - DNA, 38 bp, Artificial Sequence
  primer
gtaaaacgacggccagtagtgctatctgggtctcaggg

SEQ ID NO: 43720 - DNA, 38 bp, Artificial Sequence
  primer
gtaaaacgacggccagtatccggaagtgagtgtgtgag

SEQ ID NO: 43721 - DNA, 38 bp, Artificial Sequence
  primer
gtaaaacgacggccagtacacattgtcaggaggtggtg

SEQ ID NO: 43722 - DNA, 39 bp, Artificial Sequence
  primer
gtaaaacgacggccagttcagcctgagttggagtaagtg

SEQ ID NO: 43723 - DNA, 37 bp, Artificial Sequence
  primer
gtaaaacgacggccagtagaaggcctcactcccagac

SEQ ID NO: 43724 - DNA, 21 bp, Artificial Sequence
  primer
tcaaatcctggcaataaaggc

SEQ ID NO: 43725 - DNA, 20 bp, Artificial Sequence
  primer
tttgggccacaattacgaac

SEQ ID NO: 43726 - DNA, 37 bp, Artificial Sequence
  primer
gtaaaacgacggccagtgccagcctcaacacattctc

SEQ ID NO: 43727 - DNA, 22 bp, Artificial Sequence
  primer
gccaagaaagggttgattaagg

SEQ ID NO: 43728 - DNA, 26 bp, Artificial Sequence
  primer
gaggaaagtattggaataaataaggc

SEQ ID NO: 43729 - DNA, 42 bp, Artificial Sequence
  primer
gtaaaacgacggccagttttagggaattgccatttctagttt

SEQ ID NO: 43730 - DNA, 24 bp, Artificial Sequence
  primer
tggaatcctattcctgaaagtgag

SEQ ID NO: 43731 - DNA, 39 bp, Artificial Sequence
  primer
gtaaaacgacggccagtggtccatttgtgtgagtagctg

SEQ ID NO: 43732 - DNA, 40 bp, Artificial Sequence
  primer
gtaaaacgacggccagttgatagtcactcattcattcggg

SEQ ID NO: 43733 - DNA, 38 bp, Artificial Sequence
  primer
gtaaaacgacggccagtaccttgctatgctgggtaggg

SEQ ID NO: 43734 - DNA, 21 bp, Artificial Sequence
  primer
gacctggcagaattggaagtg

SEQ ID NO: 43735 - DNA, 22 bp, Artificial Sequence
  primer
catctctgagtgctgcttagcc

SEQ ID NO: 43736 - DNA, 35 bp, Artificial Sequence
  primer
gtaaaacgacggccagtcgggtcttgcttgtggtg

SEQ ID NO: 43737 - DNA, 38 bp, Artificial Sequence
  primer
gtaaaacgacggccagtaatatgggagttcccagaccc

SEQ ID NO: 43738 - DNA, 21 bp, Artificial Sequence
  primer
cttgtgcctagctgcccttac

SEQ ID NO: 43739 - DNA, 38 bp, Artificial Sequence
  primer
gtaaaacgacggccagtctgccaactggagacacactg

SEQ ID NO: 43740 - DNA, 19 bp, Artificial Sequence
  primer
ccgtccatgctgatgtttg

SEQ ID NO: 43741 - DNA, 18 bp, Artificial Sequence
  primer
caggacgtccggaacagg

SEQ ID NO: 43742 - DNA, 21 bp, Artificial Sequence
  primer
accgcttcctctactgctacg

SEQ ID NO: 43743 - DNA, 21 bp, Artificial Sequence
  primer
tttaagttcctgtttgtgcgg

SEQ ID NO: 43744 - DNA, 21 bp, Artificial Sequence
  primer
agcacacggagctctttcttg

SEQ ID NO: 43745 - DNA, 22 bp, Artificial Sequence
  primer
ggacatgctttcttcttgatgg

SEQ ID NO: 43746 - DNA, 21 bp, Artificial Sequence
  primer
tctggaagtcggatgtgtttc

SEQ ID NO: 43747 - DNA, 37 bp, Artificial Sequence
  primer
gtaaaacgacggccagttgggcaacgtcatctctacg

SEQ ID NO: 43748 - DNA, 25 bp, Artificial Sequence
  primer
tggcactttaggaactaaatctttc

SEQ ID NO: 43749 - DNA, 19 bp, Artificial Sequence
  primer
cgtgagctgagatcatgcc

SEQ ID NO: 43750 - DNA, 21 bp, Artificial Sequence
  primer
ggtgcaggagtggtaagaacc

SEQ ID NO: 43751 - DNA, 22 bp, Artificial Sequence
  primer
gcctactgtatgctaggcatcg

SEQ ID NO: 43752 - DNA, 38 bp, Artificial Sequence
  primer
gtaaaacgacggccagtccacatggactttagggcaac

SEQ ID NO: 43753 - DNA, 21 bp, Artificial Sequence
  primer
taactttgggaagcattggtg

SEQ ID NO: 43754 - DNA, 39 bp, Artificial Sequence
  primer
gtaaaacgacggccagttggtcttaaatgggtttcaagc

SEQ ID NO: 43755 - DNA, 38 bp, Artificial Sequence
  primer
gtaaaacgacggccagttctctgccatcatcctcagtc

SEQ ID NO: 43756 - DNA, 27 bp, Artificial Sequence
  primer
gccaagttacagactcttaaatcattc

SEQ ID NO: 43757 - DNA, 38 bp, Artificial Sequence
  primer
gtaaaacgacggccagttgtttgaaacccgtcactttg

SEQ ID NO: 43758 - DNA, 22 bp, Artificial Sequence
  primer
gtgctcttcatggtattcagcc

SEQ ID NO: 43759 - DNA, 21 bp, Artificial Sequence
  primer
ccttgcccatgtgtatacgag

SEQ ID NO: 43760 - DNA, 22 bp, Artificial Sequence
  primer
gagcattacaaagccctgaaag

SEQ ID NO: 43761 - DNA, 21 bp, Artificial Sequence
  primer
gaaaggtgccaggaatgaatc

SEQ ID NO: 43762 - DNA, 39 bp, Artificial Sequence
  primer
gtaaaacgacggccagtggtgcttctaggtacctccacc

SEQ ID NO: 43763 - DNA, 39 bp, Artificial Sequence
  primer
gtaaaacgacggccagtttgaaagtgctcttggtaaccc

SEQ ID NO: 43764 - DNA, 38 bp, Artificial Sequence
  primer
gtaaaacgacggccagttccctgccttacatgatcctc

SEQ ID NO: 43765 - DNA, 38 bp, Artificial Sequence
  primer
gtaaaacgacggccagtaataggatggacttccaagcg

SEQ ID NO: 43766 - DNA, 40 bp, Artificial Sequence
  primer
gtaaaacgacggccagttgtgaaatatgagacgaggtgtg

SEQ ID NO: 43767 - DNA, 38 bp, Artificial Sequence
  primer
gtaaaacgacggccagtgactcaatctgggctttggtc

SEQ ID NO: 43768 - DNA, 38 bp, Artificial Sequence
  primer
gtaaaacgacggccagttgagcatagcttggtgtctgg

SEQ ID NO: 43769 - DNA, 37 bp, Artificial Sequence
  primer
gtaaaacgacggccagtcctgaccaccctgtgttctc

SEQ ID NO: 43770 - DNA, 38 bp, Artificial Sequence
  primer
gtaaaacgacggccagtatctttgatgctcttcgggag

SEQ ID NO: 43771 - DNA, 38 bp, Artificial Sequence
  primer
gtaaaacgacggccagtctctgctgacacggaatgaag

SEQ ID NO: 43772 - DNA, 38 bp, Artificial Sequence
  primer
gtaaaacgacggccagtcagtaaaccattccctgaggc

SEQ ID NO: 43773 - DNA, 21 bp, Artificial Sequence
  primer
aaggtgcatggtggtacacag

SEQ ID NO: 43774 - DNA, 38 bp, Artificial Sequence
  primer
gtaaaacgacggccagtctaggtagtggaggcgacagg

SEQ ID NO: 43775 - DNA, 38 bp, Artificial Sequence
  primer
gtaaaacgacggccagtagcagctccaggtgagttagc

SEQ ID NO: 43776 - DNA, 21 bp, Artificial Sequence
  primer
tacaaacagcggcttctttcc

SEQ ID NO: 43777 - DNA, 21 bp, Artificial Sequence
  primer
atagtggatggaagcagggtc

SEQ ID NO: 43778 - DNA, 38 bp, Artificial Sequence
  primer
gtaaaacgacggccagtttaccataggtggagaagggc

SEQ ID NO: 43779 - DNA, 37 bp, Artificial Sequence
  primer
gtaaaacgacggccagtcccacctggagggtagaaag

SEQ ID NO: 43780 - DNA, 21 bp, Artificial Sequence
  primer
cataactccatgcccttccag

SEQ ID NO: 43781 - DNA, 38 bp, Artificial Sequence
  primer
gtaaaacgacggccagtgaaggagaggaatcatggtgg

SEQ ID NO: 43782 - DNA, 39 bp, Artificial Sequence
  primer
gtaaaacgacggccagtttctgaaggtctgaaatcctgg

SEQ ID NO: 43783 - DNA, 37 bp, Artificial Sequence
  primer
gtaaaacgacggccagtggattggtaggaggtggctc

SEQ ID NO: 43784 - DNA, 39 bp, Artificial Sequence
  primer
gtaaaacgacggccagtaagtcctgttagggaatgaggg

SEQ ID NO: 43785 - DNA, 21 bp, Artificial Sequence
  primer
agcttctcacaccctgtaccc

SEQ ID NO: 43786 - DNA, 38 bp, Artificial Sequence
  primer
gtaaaacgacggccagtttgagaggagactggagctgg

SEQ ID NO: 43787 - DNA, 38 bp, Artificial Sequence
  primer
gtaaaacgacggccagtagttgaaggcatttgacagcc

SEQ ID NO: 43788 - DNA, 21 bp, Artificial Sequence
  primer
ggcctctatctcaccctaccc

SEQ ID NO: 43789 - DNA, 38 bp, Artificial Sequence
  primer
gtaaaacgacggccagttagaatgcaggcttcaccttg

SEQ ID NO: 43790 - DNA, 38 bp, Artificial Sequence
  primer
gtaaaacgacggccagttcttccaaagggctcaatgtc

SEQ ID NO: 43791 - DNA, 38 bp, Artificial Sequence
  primer
gtaaaacgacggccagtctggctagaacccagctaacc

SEQ ID NO: 43792 - DNA, 21 bp, Artificial Sequence
  primer
accatggcctaggagttagcc

SEQ ID NO: 43793 - DNA, 40 bp, Artificial Sequence
  primer
gtaaaacgacggccagtttctcttggagaagagtcctcaa

SEQ ID NO: 43794 - DNA, 38 bp, Artificial Sequence
  primer
gtaaaacgacggccagtagacagcggatcttggaattg

SEQ ID NO: 43795 - DNA, 21 bp, Artificial Sequence
  primer
ggaaagcagtgtgcatgattg

SEQ ID NO: 43796 - DNA, 21 bp, Artificial Sequence
  primer
cctccatttctcaaggacagg

SEQ ID NO: 43797 - DNA, 24 bp, Artificial Sequence
  primer
cctagatgcaatttgctaaaccag

SEQ ID NO: 43798 - DNA, 21 bp, Artificial Sequence
  primer
ctgttgttaacagtgcgggtg

SEQ ID NO: 43799 - DNA, 39 bp, Artificial Sequence
  primer
gtaaaacgacggccagtcactgctgaaatactgaccagc

SEQ ID NO: 43800 - DNA, 38 bp, Artificial Sequence
  primer
gtaaaacgacggccagtttgcagttgaagtctggttgc

SEQ ID NO: 43801 - DNA, 38 bp, Artificial Sequence
  primer
gtaaaacgacggccagtaatgacccatcaggattacgg

SEQ ID NO: 43802 - DNA, 38 bp, Artificial Sequence
  primer
gtaaaacgacggccagtaagtggcttgaactgtggacc

SEQ ID NO: 43803 - DNA, 38 bp, Artificial Sequence
  primer
gtaaaacgacggccagttcagagaggatttccctgacc

SEQ ID NO: 43804 - DNA, 38 bp, Artificial Sequence
  primer
gtaaaacgacggccagtggtctctttcctgccactcag

SEQ ID NO: 43805 - DNA, 38 bp, Artificial Sequence
  primer
gtaaaacgacggccagtgattcctgaggtttctttggg

SEQ ID NO: 43806 - DNA, 21 bp, Artificial Sequence
  primer
agcatcctctaaatgccgttg

SEQ ID NO: 43807 - DNA, 38 bp, Artificial Sequence
  primer
gtaaaacgacggccagtatttgagacttctccatcggg

SEQ ID NO: 43808 - DNA, 41 bp, Artificial Sequence
  primer
gtaaaacgacggccagttccatacacagttgattgtggaac

SEQ ID NO: 43809 - DNA, 38 bp, Artificial Sequence
  primer
gtaaaacgacggccagtaaagtgccgaatcctctcatc

SEQ ID NO: 43810 - DNA, 36 bp, Artificial Sequence
  primer
gtaaaacgacggccagttgtctgaggcttcggtgtg

SEQ ID NO: 43811 - DNA, 21 bp, Artificial Sequence
  primer
agccagcagagggtagtaagg

SEQ ID NO: 43812 - DNA, 38 bp, Artificial Sequence
  primer
gtaaaacgacggccagttcttgccttatgcctgtgaac

SEQ ID NO: 43813 - DNA, 37 bp, Artificial Sequence
  primer
gtaaaacgacggccagtctcgccacctcgcttattac

SEQ ID NO: 43814 - DNA, 24 bp, Artificial Sequence
  primer
tgtggacaagatagatttgctttg

SEQ ID NO: 43815 - DNA, 21 bp, Artificial Sequence
  primer
cttaacaaacggcatcacctc

SEQ ID NO: 43816 - DNA, 38 bp, Artificial Sequence
  primer
gtaaaacgacggccagtgccaatctcaacttctttccc

SEQ ID NO: 43817 - DNA, 21 bp, Artificial Sequence
  primer
cgtccgttgtaggaatctgtg

SEQ ID NO: 43818 - DNA, 38 bp, Artificial Sequence
  primer
gtaaaacgacggccagtaggctttccagagagttgtgc

SEQ ID NO: 43819 - DNA, 21 bp, Artificial Sequence
  primer
agtccagctgtttcaggttgg

SEQ ID NO: 43820 - DNA, 21 bp, Artificial Sequence
  primer
ccttcactgccttagacccac

SEQ ID NO: 43821 - DNA, 21 bp, Artificial Sequence
  primer
tatgcatggctttctcttccg

SEQ ID NO: 43822 - DNA, 21 bp, Artificial Sequence
  primer
gattggcctatgacctaagcg

SEQ ID NO: 43823 - DNA, 38 bp, Artificial Sequence
  primer
gtaaaacgacggccagttcctgaagctgtgatgcagac

SEQ ID NO: 43824 - DNA, 37 bp, Artificial Sequence
  primer
gtaaaacgacggccagtgcctaccttctcttgccagc

SEQ ID NO: 43825 - DNA, 21 bp, Artificial Sequence
  primer
gctctgagcactgtatctgcc

SEQ ID NO: 43826 - DNA, 20 bp, Artificial Sequence
  primer
agtctctgtgacagccctgc

SEQ ID NO: 43827 - DNA, 38 bp, Artificial Sequence; identical to SEQ ID NO: 43823
  primer

SEQ ID NO: 43828 - DNA, 38 bp, Artificial Sequence
  primer
gtaaaacgacggccagtctccagttaagttgcttgccc

SEQ ID NO: 43829 - DNA, 21 bp, Artificial Sequence
  primer
gaagtacctgtgcgagctgtg

SEQ ID NO: 43830 - DNA, 21 bp, Artificial Sequence
  primer
ctaggtctggaatcctagggc

SEQ ID NO: 43831 - DNA, 37 bp, Artificial Sequence
  primer
gtaaaacgacggccagtctaggtagggagtgggccag

SEQ ID NO: 43832 - DNA, 37 bp, Artificial Sequence
  primer
gtaaaacgacggccagtatgcaggttcctgctctgtg

SEQ ID NO: 43833 - DNA, 19 bp, Artificial Sequence
  primer
cagtggagggagttcctgg

SEQ ID NO: 43834 - DNA, 21 bp, Artificial Sequence
  primer
tagatttaccgattcctgggc

SEQ ID NO: 43835 - DNA, 21 bp, Artificial Sequence
  primer
tggctgcactcacagttcttc

SEQ ID NO: 43836 - DNA, 36 bp, Artificial Sequence
  primer
gtaaaacgacggccagtgccagacaccaaccacacc

SEQ ID NO: 43837 - DNA, 21 bp, Artificial Sequence
  primer
ccttccagaaccctgtgtacc

SEQ ID NO: 43838 - DNA, 38 bp, Artificial Sequence
  primer
gtaaaacgacggccagtagttgcttgtccttgtggctc

SEQ ID NO: 43839 - DNA, 21 bp, Artificial Sequence
  primer
ctccttgctatgtgaagtggg

SEQ ID NO: 43840 - DNA, 38 bp, Artificial Sequence
  primer
gtaaaacgacggccagtgtgatgggcttgttctcacac

SEQ ID NO: 43841 - DNA, 18 bp, Artificial Sequence
  primer
cccgatgcttgtcgtagg

SEQ ID NO: 43842 - DNA, 37 bp, Artificial Sequence
  primer
gtaaaacgacggccagttttcctctcgcttctcctcc

SEQ ID NO: 43843 - DNA, 36 bp, Artificial Sequence
  primer
gtaaaacgacggccagtacagtcacctctaccggcg

SEQ ID NO: 43844 - DNA, 21 bp, Artificial Sequence
  primer
ggaaacccgtgtactcaaccc

SEQ ID NO: 43845 - DNA, 37 bp, Artificial Sequence
  primer
gtaaaacgacggccagtaaagcaaccgtccttgaaac

SEQ ID NO: 43846 - DNA, 43 bp, Artificial Sequence
  primer
gtaaaacgacggccagtatgttggttatagcaagtacaggaac

SEQ ID NO: 43847 - DNA, 38 bp, Artificial Sequence
  primer
gtaaaacgacggccagttagctgtaagcctggtttccc

SEQ ID NO: 43848 - DNA, 21 bp, Artificial Sequence
  primer
attgacattcgccattactgc

SEQ ID NO: 43849 - DNA, 40 bp, Artificial Sequence
  primer
gtaaaacgacggccagtttgacttattggaaccttgtgtg

SEQ ID NO: 43850 - DNA, 38 bp, Artificial Sequence
  primer
gtaaaacgacggccagttctggaaaccactagggaagc

SEQ ID NO: 43851 - DNA, 22 bp, Artificial Sequence
  primer
gatcactgggttctttgctttg

SEQ ID NO: 43852 - DNA, 22 bp, Artificial Sequence
  primer
agaccatttggaaattagcagc

SEQ ID NO: 43853 - DNA, 23 bp, Artificial Sequence
  primer
ttgcttactgttcaaatcttccg

SEQ ID NO: 43854 - DNA, 39 bp, Artificial Sequence
  primer
gtaaaacgacggccagtttctgagtgctctggaactgat

SEQ ID NO: 43855 - DNA, 21 bp, Artificial Sequence
  primer
gggatctagaggagtcagggc

SEQ ID NO: 43856 - DNA, 21 bp, Artificial Sequence
  primer
gagacagagtgaccatggctg

SEQ ID NO: 43857 - DNA, 39 bp, Artificial Sequence
  primer
gtaaaacgacggccagtaaagccttgcttaattggaagc

SEQ ID NO: 43858 - DNA, 40 bp, Artificial Sequence
  primer
gtaaaacgacggccagtgcggaaagtaaagaattggtctc

SEQ ID NO: 43859 - DNA, 38 bp, Artificial Sequence
  primer
gtaaaacgacggccagtggatcatccatagctcaagcc

SEQ ID NO: 43860 - DNA, 38 bp, Artificial Sequence
  primer
gtaaaacgacggccagtcccagaggcagcttacatctc

SEQ ID NO: 43861 - DNA, 41 bp, Artificial Sequence
  primer
gtaaaacgacggccagtttaatggcacaaggagacactaag

SEQ ID NO: 43862 - DNA, 24 bp, Artificial Sequence
  primer
tcaaatgtagagactcaaccaaca

SEQ ID NO: 43863 - DNA, 39 bp, Artificial Sequence
  primer
gtaaaacgacggccagtttgaaattagaggcagctggag

SEQ ID NO: 43864 - DNA, 37 bp, Artificial Sequence
  primer
gtaaaacgacggccagtcctccgtggagactctgttg

SEQ ID NO: 43865 - DNA, 25 bp, Artificial Sequence
  primer
gaacgctaatcatatgtcaagtgaa

SEQ ID NO: 43866 - DNA, 40 bp, Artificial Sequence
  primer
gtaaaacgacggccagtggaccaaagtactggcttactgg

SEQ ID NO: 43867 - DNA, 19 bp, Artificial Sequence
  primer
ccggtgctgtggaaagaag

SEQ ID NO: 43868 - DNA, 35 bp, Artificial Sequence
  primer
gtaaaacgacggccagtggcttctagccaccgtcc

SEQ ID NO: 43869 - DNA, 41 bp, Artificial Sequence
  primer
gtaaaacgacggccagttgaactcttcagatgggtaatttg

SEQ ID NO: 43870 - DNA, 21 bp, Artificial Sequence
  primer
cctagttatgggctctttgcc

SEQ ID NO: 43871 - DNA, 38 bp, Artificial Sequence
  primer
gtaaaacgacggccagtcaaagagtcaagctggtgctg

SEQ ID NO: 43872 - DNA, 21 bp, Artificial Sequence
  primer
cagacagttccttaccgtccc

SEQ ID NO: 43873 - DNA, 38 bp, Artificial Sequence
  primer
gtaaaacgacggccagtgtggtcgaaagaatcaaaggc

SEQ ID NO: 43874 - DNA, 38 bp, Artificial Sequence
  primer
gtaaaacgacggccagtctggtcaaggcccagtttatc

SEQ ID NO: 43875 - DNA, 21 bp, Artificial Sequence
  primer
aagtgtcgcttcccagatgac

SEQ ID NO: 43876 - DNA, 21 bp, Artificial Sequence
  primer
gtggccaaacctaagcacaag

SEQ ID NO: 43877 - DNA, 21 bp, Artificial Sequence
  primer
caccagcgactctgaagaaag

SEQ ID NO: 43878 - DNA, 21 bp, Artificial Sequence
  primer
ctggagtacagacggtggagg

SEQ ID NO: 43879 - DNA, 21 bp, Artificial Sequence
  primer
agaagtcccatggacaaggtg

SEQ ID NO: 43880 - DNA, 20 bp, Artificial Sequence
  primer
cgtcactgctcacctcagtg

SEQ ID NO: 43881 - DNA, 19 bp, Artificial Sequence
  primer
agcgagggagagtccagtg

SEQ ID NO: 43882 - DNA, 36 bp, Artificial Sequence
  primer
gtaaaacgacggccagtgcggagttaggtcacgagg

SEQ ID NO: 43883 - DNA, 23 bp, Artificial Sequence
  primer
cgggtatgtctgtgttcattagc

SEQ ID NO: 43884 - DNA, 20 bp, Artificial Sequence
  primer
cagctctgggaccaagtcac

SEQ ID NO: 43885 - DNA, 38 bp, Artificial Sequence
  primer
gtaaaacgacggccagtttgggtgagatatttgcctcc

SEQ ID NO: 43886 - DNA, 20 bp, Artificial Sequence
  primer
cccagacctccagtgtgttc

SEQ ID NO: 43887 - DNA, 21 bp, Artificial Sequence
  primer
caaagcaaaggattgacctcc

SEQ ID NO: 43888 - DNA, 38 bp, Artificial Sequence
  primer
gtaaaacgacggccagtcatgctacacccacacctgtc

SEQ ID NO: 43889 - DNA, 38 bp, Artificial Sequence
  primer
gtaaaacgacggccagtagcctactcgggtgtcagaag

SEQ ID NO: 43890 - DNA, 38 bp, Artificial Sequence
  primer
gtaaaacgacggccagtctttgaggtgaagatcccgtc

SEQ ID NO: 43891 - DNA, 38 bp, Artificial Sequence
  primer
gtaaaacgacggccagtaggttcaaggccaagtttgtg

SEQ ID NO: 43892 - DNA, 38 bp, Artificial Sequence
  primer
gtaaaacgacggccagtcctgactttaaggccacaagc

SEQ ID NO: 43893 - DNA, 38 bp, Artificial Sequence
  primer
gtaaaacgacggccagttcattgccatgatctgctacc

SEQ ID NO: 43894 - DNA, 21 bp, Artificial Sequence
  primer
gactgccgggtacctagaaag

SEQ ID NO: 43895 - DNA, 21 bp, Artificial Sequence
  primer
ctgtgtctgaaggagctggtg

SEQ ID NO: 43896 - DNA, 38 bp, Artificial Sequence
  primer
gtaaaacgacggccagtcaagaggctctatggcattgg

SEQ ID NO: 43897 - DNA, 38 bp, Artificial Sequence
  primer
gtaaaacgacggccagtccaggttgagaaggatgaacc

SEQ ID NO: 43898 - DNA, 21 bp, Artificial Sequence
  primer
tgggaggaacaccaacctaag

SEQ ID NO: 43899 - DNA, 38 bp, Artificial Sequence
  primer
gtaaaacgacggccagtgaaaccctggctatgttctgg

SEQ ID NO: 43900 - DNA, 22 bp, Artificial Sequence
  primer
caccatcaagtttgagatgctg

SEQ ID NO: 43901 - DNA, 38 bp, Artificial Sequence
  primer
gtaaaacgacggccagtggtgagtgtccctcctggtag

SEQ ID NO: 43902 - DNA, 38 bp, Artificial Sequence
  primer
gtaaaacgacggccagttggtgaggcatagacaaccag

SEQ ID NO: 43903 - DNA, 38 bp, Artificial Sequence
  primer
gtaaaacgacggccagttacaaccgggtacacatcctg

SEQ ID NO: 43904 - DNA, 38 bp, Artificial Sequence
  primer
gtaaaacgacggccagtcaggttcagaaggctcagatg

SEQ ID NO: 43905 - DNA, 21 bp, Artificial Sequence
  primer
acaggtgattatcctcgccac

SEQ ID NO: 43906 - DNA, 37 bp, Artificial Sequence
  primer
gtaaaacgacggccagtcaatggcgctaaggatgatg

SEQ ID NO: 43907 - DNA, 20 bp, Artificial Sequence
  primer
agctcctgatcatgccacag

SEQ ID NO: 43908 - DNA, 38 bp, Artificial Sequence
  primer
gtaaaacgacggccagttgatccacccatctcagcttc

SEQ ID NO: 43909 - DNA, 21 bp, Artificial Sequence
  primer
gaacaacattgctcccacctc

SEQ ID NO: 43910 - DNA, 38 bp, Artificial Sequence
  primer
gtaaaacgacggccagtaaggttgtttgggaaaggtcc

SEQ ID NO: 43911 - DNA, 22 bp, Artificial Sequence
  primer
cccactgttcatcagggagtag

SEQ ID NO: 43912 - DNA, 38 bp, Artificial Sequence
  primer
gtaaaacgacggccagtgggccatagtgtcatgagagg

SEQ ID NO: 43913 - DNA, 38 bp, Artificial Sequence
  primer
gtaaaacgacggccagtgcagaggtgacaaggttgatg

SEQ ID NO: 43914 - DNA, 21 bp, Artificial Sequence
  primer
gtggtggtggtgatgagattc

SEQ ID NO: 43915 - DNA, 21 bp, Artificial Sequence
  primer
gagtcttccagggcagaagag

SEQ ID NO: 43916 - DNA, 38 bp, Artificial Sequence
  primer
gtaaaacgacggccagtgttggtccaggatttggaaag

SEQ ID NO: 43917 - DNA, 23 bp, Artificial Sequence
  primer
tgctccattgatgttgcttattc

SEQ ID NO: 43918 - DNA, 21 bp, Artificial Sequence
  primer
tcctacaatcgctccacagtc

SEQ ID NO: 43919 - DNA, 38 bp, Artificial Sequence
  primer
gtaaaacgacggccagtaggtgatgacacttgactccg

SEQ ID NO: 43920 - DNA, 36 bp, Artificial Sequence
  primer
gtaaaacgacggccagtcacacctgagctcactcgc

SEQ ID NO: 43921 - DNA, 21 bp, Artificial Sequence
  primer
gagcaaccagaacctttccag

SEQ ID NO: 43922 - DNA, 21 bp, Artificial Sequence
  primer
acatacacatcgtctgccacc

SEQ ID NO: 43923 - DNA, 38 bp, Artificial Sequence
  primer
gtaaaacgacggccagtacacaattgctatccttccgc

SEQ ID NO: 43924 - DNA, 37 bp, Artificial Sequence
  primer
gtaaaacgacggccagtaggtacctttgcttccaggg

SEQ ID NO: 43925 - DNA, 38 bp, Artificial Sequence
  primer
gtaaaacgacggccagtagcccttgtgtctgaaagttg

SEQ ID NO: 43926 - DNA, 21 bp, Artificial Sequence
  primer
ggttgctgcttaaagtttgcc

SEQ ID NO: 43927 - DNA, 21 bp, Artificial Sequence
  primer
aactgatggagttgaggcttg

SEQ ID NO: 43928 - DNA, 22 bp, Artificial Sequence
  primer
tttcatgggttcactagccttt

SEQ ID NO: 43929 - DNA, 20 bp, Artificial Sequence
  primer
cagcttgggcaacaagagag

SEQ ID NO: 43930 - DNA, 21 bp, Artificial Sequence
  primer
taagatcgcaccattgcactc

SEQ ID NO: 43931 - DNA, 21 bp, Artificial Sequence
  primer
ggtcttggttgccactttagg

SEQ ID NO: 43932 - DNA, 19 bp, Artificial Sequence
  primer
aggcgtatcgcctgaagtc

SEQ ID NO: 43933 - DNA, 20 bp, Artificial Sequence
  primer
ggtgacagagcaagaccctg

SEQ ID NO: 43934 - DNA, 22 bp, Artificial Sequence
  primer
gcctgggttacagagaaagaag

SEQ ID NO: 43935 - DNA, 21 bp, Artificial Sequence
  primer
gtcctctgggagaagtggttg

SEQ ID NO: 43936 - DNA, 19 bp, Artificial Sequence
  primer
aaattaggctctggtggcg

SEQ ID NO: 43937 - DNA, 24 bp, Artificial Sequence
  primer
tctggaataaccaatttagttgcc

SEQ ID NO: 43938 - DNA, 38 bp, Artificial Sequence
  primer
gtaaaacgacggccagtgtagagcacgagtagccagcc

SEQ ID NO: 43939 - DNA, 21 bp, Artificial Sequence
  primer
agagagctccatgctggtttg

SEQ ID NO: 43940 - DNA, 21 bp, Artificial Sequence
  primer
taacaaagggtgctcctctcc

SEQ ID NO: 43941 - DNA, 37 bp, Artificial Sequence
  primer
gtaaaacgacggccagtaccatgccacatcctcactc

SEQ ID NO: 43942 - DNA, 20 bp, Artificial Sequence
  primer
gtctgaagtttgagcgcacc

SEQ ID NO: 43943 - DNA, 21 bp, Artificial Sequence
  primer
tcttccaaccaccctttcttc

SEQ ID NO: 43944 - DNA, 38 bp, Artificial Sequence
  primer
gtaaaacgacggccagtgttcctggttgttgcatgaag

SEQ ID NO: 43945 - DNA, 21 bp, Artificial Sequence
  primer
tccttggtgttgtttgctttc

SEQ ID NO: 43946 - DNA, 38 bp, Artificial Sequence
  primer
gtaaaacgacggccagttgctcctgacagttaaagccc

SEQ ID NO: 43947 - DNA, 21 bp, Artificial Sequence
  primer
tttccacagtatctgcttggc

SEQ ID NO: 43948 - DNA, 21 bp, Artificial Sequence
  primer
ccagtgtccatggatgatacg

SEQ ID NO: 43949 - DNA, 21 bp, Artificial Sequence
  primer
tagcaatgaacacgatctcgc

SEQ ID NO: 43950 - DNA, 21 bp, Artificial Sequence
  primer
ccatgactgtatggatttggg

SEQ ID NO: 43951 - DNA, 37 bp, Artificial Sequence
  primer
gtaaaacgacggccagtaacagcaatcatcgtttggg

SEQ ID NO: 43952 - DNA, 38 bp, Artificial Sequence
  primer
gtaaaacgacggccagttttgtcatcacacaggaaggg

SEQ ID NO: 43953 - DNA, 20 bp, Artificial Sequence
  primer
gtaggccttgggttctggtc

SEQ ID NO: 43954 - DNA, 21 bp, Artificial Sequence
  primer
ttgacagggactctcaccttg

SEQ ID NO: 43955 - DNA, 38 bp, Artificial Sequence
  primer
gtaaaacgacggccagttatgtaaagctccgcatcctc

SEQ ID NO: 43956 - DNA, 21 bp, Artificial Sequence
  primer
ttgtgtctccggaatgtcatc

SEQ ID NO: 43957 - DNA, 21 bp, Artificial Sequence
  primer
tgcttctcacacctgctatgc

SEQ ID NO: 43958 - DNA, 38 bp, Artificial Sequence
  primer
gtaaaacgacggccagtgggcaacaagagtgaaactcc

SEQ ID NO: 43959 - DNA, 38 bp, Artificial Sequence
  primer
gtaaaacgacggccagtcagacacactcagcctgaagc

SEQ ID NO: 43960 - DNA, 38 bp, Artificial Sequence
  primer
gtaaaacgacggccagtcctacttcgaatccgtggaac

SEQ ID NO: 43961 - DNA, 21 bp, Artificial Sequence
  primer
gcacttgtacctggagagtcg

SEQ ID NO: 43962 - DNA, 38 bp, Artificial Sequence
  primer
gtaaaacgacggccagtgcaaggacaccagaactttcc

SEQ ID NO: 43963 - DNA, 21 bp, Artificial Sequence
  primer
gtgtcctttccactgtggctc

SEQ ID NO: 43964 - DNA, 39 bp, Artificial Sequence
  primer
gtaaaacgacggccagtgggtcactccttagagcatctg

SEQ ID NO: 43965 - DNA, 38 bp, Artificial Sequence
  primer
gtaaaacgacggccagtgaagttgctgtccgtggagac

SEQ ID NO: 43966 - DNA, 21 bp, Artificial Sequence
  primer
tcaagacagacaacctgcacc

SEQ ID NO: 43967 - DNA, 21 bp, Artificial Sequence
  primer
ctgaccgtgaagcattacctg

SEQ ID NO: 43968 - DNA, 21 bp, Artificial Sequence
  primer
tcacgacgtctactcacaggc

SEQ ID NO: 43969 - DNA, 21 bp, Artificial Sequence
  primer
ccttctcgccatgaacttagg

SEQ ID NO: 43970 - DNA, 38 bp, Artificial Sequence
  primer
gtaaaacgacggccagtttgcagccaattacgtttagg

SEQ ID NO: 43971 - DNA, 38 bp, Artificial Sequence
  primer
gtaaaacgacggccagttgacctggtagctgacagtgg

SEQ ID NO: 43972 - DNA, 21 bp, Artificial Sequence
  primer
ggattctgccatacaaggtcc

SEQ ID NO: 43973 - DNA, 20 bp, Artificial Sequence
  primer
aagaacaccaagtcccaccc

SEQ ID NO: 43974 - DNA, 38 bp, Artificial Sequence
  primer
gtaaaacgacggccagtcatggcaactcctttcctcag

SEQ ID NO: 43975 - DNA, 38 bp, Artificial Sequence
  primer
gtaaaacgacggccagtttagatccatgagggtgtccc

SEQ ID NO: 43976 - DNA, 35 bp, Artificial Sequence
  primer
gtaaaacgacggccagtgagccttccagctccctg

SEQ ID NO: 43977 - DNA, 38 bp, Artificial Sequence
  primer
gtaaaacgacggccagtcatctctgcatcctccattcc

SEQ ID NO: 43978 - DNA, 21 bp, Artificial Sequence
  primer
gtagctgttgccctgactgtg

SEQ ID NO: 43979 - DNA, 22 bp, Artificial Sequence
  primer
tctggagaacttcaggaagcag

SEQ ID NO: 43980 - DNA, 20 bp, Artificial Sequence
  primer
cttgtagtcccgtggtccag

SEQ ID NO: 43981 - DNA, 37 bp, Artificial Sequence
  primer
gtaaaacgacggccagtaggtcctatctccaggctgc

SEQ ID NO: 43982 - DNA, 21 bp, Artificial Sequence
  primer
gcgctaaggaattgctctctg

SEQ ID NO: 43983 - DNA, 20 bp, Artificial Sequence
  primer
cttcgagaacaagacggacg

SEQ ID NO: 43984 - DNA, 18 bp, Artificial Sequence
  primer
aagagcctggaaggcacc

SEQ ID NO: 43985 - DNA, 36 bp, Artificial Sequence
  primer
gtaaaacgacggccagtccatgcctgtgtcttgagc

SEQ ID NO: 43986 - DNA, 21 bp, Artificial Sequence
  primer
gtgagtgtaccacctgctccc

SEQ ID NO: 43987 - DNA, 38 bp, Artificial Sequence
  primer
gtaaaacgacggccagtcgttgcaggaaggttctaagg

SEQ ID NO: 43988 - DNA, 38 bp, Artificial Sequence
  primer
gtaaaacgacggccagtttgttcagcttctgtggttgg

SEQ ID NO: 43989 - DNA, 21 bp, Artificial Sequence
  primer
tgaacctcagttcacactggc

SEQ ID NO: 43990 - DNA, 21 bp, Artificial Sequence
  primer
gccatctacgaggagaaggag

SEQ ID NO: 43991 - DNA, 21 bp, Artificial Sequence
  primer
accaagtttcacttccttgcc

SEQ ID NO: 43992 - DNA, 38 bp, Artificial Sequence
  primer
gtaaaacgacggccagtagagctgggtctctgggctac

SEQ ID NO: 43993 - DNA, 43 bp, Artificial Sequence
  primer
gtaaaacgacggccagtatgctaacatctgagatcatatttcc

SEQ ID NO: 43994 - DNA, 38 bp, Artificial Sequence
  primer
gtaaaacgacggccagtaagactttccaatccagccac

SEQ ID NO: 43995 - DNA, 38 bp, Artificial Sequence
  primer
gtaaaacgacggccagtggagctacagaatgatgccag

SEQ ID NO: 43996 - DNA, 27 bp, Artificial Sequence
  primer
catctggttcaaatattacattcctgt

SEQ ID NO: 43997 - DNA, 19 bp, Artificial Sequence
  primer
ggacttcccttggtagggc

SEQ ID NO: 43998 - DNA, 26 bp, Artificial Sequence
  primer
caaggtacttacctgcatcctttatc

SEQ ID NO: 43999 - DNA, 39 bp, Artificial Sequence
  primer
gtaaaacgacggccagtggtctgacagaggaaagctgac

SEQ ID NO: 44000 - DNA, 27 bp, Artificial Sequence
  primer
ttagcaatcactttacaatatgtgtcc

SEQ ID NO: 44001 - DNA, 36 bp, Artificial Sequence
  primer
gtaaaacgacggccagtgatctttctggagccgcac

SEQ ID NO: 44002 - DNA, 23 bp, Artificial Sequence
  primer
tccatctaggagtggtgatcttc

SEQ ID NO: 44003 - DNA, 37 bp, Artificial Sequence
  primer
gtaaaacgacggccagtaggcaaattgcacatggaac

SEQ ID NO: 44004 - DNA, 21 bp, Artificial Sequence
  primer
tttgtctgtggaagccaaatg

SEQ ID NO: 44005 - DNA, 39 bp, Artificial Sequence
  primer
gtaaaacgacggccagttcagctttactgctgaaacacc

SEQ ID NO: 44006 - DNA, 25 bp, Artificial Sequence
  primer
ctgtatcatcttgtttgatttcagc

SEQ ID NO: 44007 - DNA, 21 bp, Artificial Sequence
  primer
ctaacttctctctggccgcac

SEQ ID NO: 44008 - DNA, 39 bp, Artificial Sequence
  primer
gtaaaacgacggccagtttaggtttccacagtgcctagc

SEQ ID NO: 44009 - DNA, 42 bp, Artificial Sequence
  primer
gtaaaacgacggccagtgactgtgatttagccacaattcttc

SEQ ID NO: 44010 - DNA, 38 bp, Artificial Sequence
  primer
gtaaaacgacggccagttccttccagccctgtaatatg

SEQ ID NO: 44011 - DNA, 41 bp, Artificial Sequence
  primer
gtaaaacgacggccagtgtatattgccacagtgacctcttg

SEQ ID NO: 44012 - DNA, 38 bp, Artificial Sequence
  primer
gtaaaacgacggccagttagacaactgcgtgttctggc

SEQ ID NO: 44013 - DNA, 21 bp, Artificial Sequence
  primer
ctaagcaacagagcaagaccc

SEQ ID NO: 44014 - DNA, 25 bp, Artificial Sequence
  primer
gagaacaagattgcattgttaattg

SEQ ID NO: 44015 - DNA, 42 bp, Artificial Sequence
  primer
gtaaaacgacggccagtgctttacatcatggaattggtaaac

SEQ ID NO: 44016 - DNA, 41 bp, Artificial Sequence
  primer
gtaaaacgacggccagttttagactccataccactcaagga

SEQ ID NO: 44017 - DNA, 21 bp, Artificial Sequence
  primer
ttcagatggcctcaggaagac

SEQ ID NO: 44018 - DNA, 20 bp, Artificial Sequence
  primer
gagcagttcctgaccattgc

SEQ ID NO: 44019 - DNA, 20 bp, Artificial Sequence
  primer
atgaccacgatgacacctcc

SEQ ID NO: 44020 - DNA, 28 bp, Artificial Sequence
  primer
aaccaattgtcttattaatgtgttgaaa

SEQ ID NO: 44021 - DNA, 23 bp, Artificial Sequence
  primer
tgtggccttggtactataaatgg

SEQ ID NO: 44022 - DNA, 21 bp, Artificial Sequence
  primer
ttcagatggcctcaggaagac

SEQ ID NO: 44023 - DNA, 39 bp, Artificial Sequence
  primer
gtaaaacgacggccagtccaaagctgtaaacctcactgg

SEQ ID NO: 44024 - DNA, 21 bp, Artificial Sequence
  primer
gggctggatgttactgaaacc

SEQ ID NO: 44025 - DNA, 38 bp, Artificial Sequence
  primer
gtaaaacgacggccagtcagaggaagcagtagttcggg

SEQ ID NO: 44026 - DNA, 21 bp, Artificial Sequence
  primer
cattcctctataaccggcagc

SEQ ID NO: 44027 - DNA, 38 bp, Artificial Sequence
  primer
gtaaaacgacggccagttaaccctcccacacacctctc

SEQ ID NO: 44028 - DNA, 21 bp, Artificial Sequence
  primer
gtaagctgatccgcctctttg

SEQ ID NO: 44029 - DNA, 38 bp, Artificial Sequence
  primer
gtaaaacgacggccagtatgtcaggtatgaggcggatg

SEQ ID NO: 44030 - DNA, 38 bp, Artificial Sequence
  primer
gtaaaacgacggccagtgagtccaggttgactgatggg

SEQ ID NO: 44031 - DNA, 38 bp, Artificial Sequence
  primer
gtaaaacgacggccagtcaagggaacattctcctcacc

SEQ ID NO: 44032 - DNA, 21 bp, Artificial Sequence
  primer
caaaggacgcatagtgtcacc

SEQ ID NO: 44033 - DNA, 21 bp, Artificial Sequence
  primer
gtctgctgggagagactggac

SEQ ID NO: 44034 - DNA, 38 bp, Artificial Sequence
  primer
gtaaaacgacggccagtgtgccacatcctgtctcttcc

SEQ ID NO: 44035 - DNA, 38 bp, Artificial Sequence
  primer
gtaaaacgacggccagtttgctgtgagctttgtatgcc

SEQ ID NO: 44036 - DNA, 21 bp, Artificial Sequence
  primer
aggacctcaagtgtgtgttgg

SEQ ID NO: 44037 - DNA, 38 bp, Artificial Sequence
  primer
gtaaaacgacggccagtattgcaggaggatacagggtg

SEQ ID NO: 44038 - DNA, 38 bp, Artificial Sequence
  primer
gtaaaacgacggccagtttgtggagtgttctgctctgg

SEQ ID NO: 44039 - DNA, 37 bp, Artificial Sequence
  primer
gtaaaacgacggccagtctgtgcgagagtttgggttc

SEQ ID NO: 44040 - DNA, 38 bp, Artificial Sequence
  primer
gtaaaacgacggccagtcttagctgaaacccaaggtcg

SEQ ID NO: 44041 - DNA, 39 bp, Artificial Sequence
  primer
gtaaaacgacggccagtttacccgagggtgtgtctaaag

SEQ ID NO: 44042 - DNA, 38 bp, Artificial Sequence
  primer
gtaaaacgacggccagtacaggctctaagcacaggagg

SEQ ID NO: 44043 - DNA, 20 bp, Artificial Sequence
  primer
agaggaagagagggtgaggg

SEQ ID NO: 44044 - DNA, 38 bp, Artificial Sequence
  primer
gtaaaacgacggccagtctgtggtccattctgtggatg

SEQ ID NO: 44045 - DNA, 36 bp, Artificial Sequence
  primer
gtaaaacgacggccagtgtggactcaaggcaggctc

SEQ ID NO: 44046 - DNA, 21 bp, Artificial Sequence
  primer
gttcttgacccactcaccacc

SEQ ID NO: 44047 - DNA, 21 bp, Artificial Sequence
  primer
gacacggaagtagctccgaac

SEQ ID NO: 44048 - DNA, 21 bp, Artificial Sequence
  primer
ctacccgatatgacctgcctc

SEQ ID NO: 44049 - DNA, 20 bp, Artificial Sequence
  primer
attgaaggccagtggaaagg

SEQ ID NO: 44050 - DNA, 38 bp, Artificial Sequence
  primer
gtaaaacgacggccagtctcatcctaacaggcctctgc

SEQ ID NO: 44051 - DNA, 35 bp, Artificial Sequence
  primer
gtaaaacgacggccagtaggagccacctccctgag

SEQ ID NO: 44052 - DNA, 21 bp, Artificial Sequence
  primer
acaagggcgagactctctcaa

SEQ ID NO: 44053 - DNA, 39 bp, Artificial Sequence
  primer
gtaaaacgacggccagtaaagagctactggtcatttggg

SEQ ID NO: 44054 - DNA, 30 bp, Artificial Sequence
  primer
ttagatagtaagttaaattcaggttcatgg

SEQ ID NO: 44055 - DNA, 21 bp, Artificial Sequence
  primer
ttcacttgatgcctcttgaca

SEQ ID NO: 44056 - DNA, 35 bp, Artificial Sequence
  primer
gtaaaacgacggccagtgccctgcaatcaggaaac

SEQ ID NO: 44057 - DNA, 41 bp, Artificial Sequence
  primer
gtaaaacgacggccagttgcatttagaattctgcattgttg

SEQ ID NO: 44058 - DNA, 23 bp, Artificial Sequence
  primer
tggaagtaacaagaacatcaggg

SEQ ID NO: 44059 - DNA, 44 bp, Artificial Sequence
  primer
gtaaaacgacggccagtgaatttcaacacaacctacattgaaac

SEQ ID NO: 44060 - DNA, 19 bp, Artificial Sequence
  primer
caggaatcctcctgccttg

SEQ ID NO: 44061 - DNA, 23 bp, Artificial Sequence
  primer
ccagtgttcaagaatgcttctca

SEQ ID NO: 44062 - DNA, 21 bp, Artificial Sequence
  primer
ggcccagatttccatagattc

SEQ ID NO: 44063 - DNA, 21 bp, Artificial Sequence
  primer
taaggagagatgcctggatgg

SEQ ID NO: 44064 - DNA, 36 bp, Artificial Sequence
  primer
gtaaaacgacggccagtaggtcccatccctgtcctc

SEQ ID NO: 44065 - DNA, 38 bp, Artificial Sequence
  primer
gtaaaacgacggccagttgaccattgactcaaaccagg

SEQ ID NO: 44066 - DNA, 21 bp, Artificial Sequence
  primer
cacagggagaaatgtagcagc

SEQ ID NO: 44067 - DNA, 21 bp, Artificial Sequence
  primer
caggcctggtttattggaaag

SEQ ID NO: 44068 - DNA, 38 bp, Artificial Sequence
  primer
gtaaaacgacggccagtttgtcactgctccatccagtc

SEQ ID NO: 44069 - DNA, 21 bp, Artificial Sequence
  primer
gggctacaagctgtatcgagg

SEQ ID NO: 44070 - DNA, 38 bp, Artificial Sequence
  primer
gtaaaacgacggccagttacgtccacaccaccttcatc

SEQ ID NO: 44071 - DNA, 38 bp, Artificial Sequence
  primer
gtaaaacgacggccagtctcggctacctaccctactgc

SEQ ID NO: 44072 - DNA, 38 bp, Artificial Sequence
  primer
gtaaaacgacggccagtcgtgcaggtgtttgggtatag

SEQ ID NO: 44073 - DNA, 21 bp, Artificial Sequence
  primer
gccacctcaacaccttaactg

SEQ ID NO: 44074 - DNA, 43 bp, Artificial Sequence
  primer
gtaaaacgacggccagtgcacacaacctagtattacaagcaag

SEQ ID NO: 44075 - DNA, 21 bp, Artificial Sequence
  primer
aagctagacctttccacctgc

SEQ ID NO: 44076 - DNA, 21 bp, Artificial Sequence
  primer
gagatcctggacctttcagtg

SEQ ID NO: 44077 - DNA, 42 bp, Artificial Sequence
  primer
gtaaaacgacggccagtcatggagtcagaatatgttgaaaga

SEQ ID NO: 44078 - DNA, 22 bp, Artificial Sequence
  primer
tttgctactcacaaatgaggca

SEQ ID NO: 44079 - DNA, 38 bp, Artificial Sequence
  primer
gtaaaacgacggccagtttactggctggagatgacctg

SEQ ID NO: 44080 - DNA, 20 bp, Artificial Sequence
  primer
aacaccggctacatgctcag

SEQ ID NO: 44081 - DNA, 21 bp, Artificial Sequence
  primer
agccagtgttggctgtttatg

SEQ ID NO: 44082 - DNA, 21 bp, Artificial Sequence
  primer
gctacagcatgcactttgacc

SEQ ID NO: 44083 - DNA, 38 bp, Artificial Sequence
  primer
gtaaaacgacggccagtcaaatgtgattacccgtgctg

SEQ ID NO: 44084 - DNA, 38 bp, Artificial Sequence
  primer
gtaaaacgacggccagtcagatcagctggcaatgaatg

SEQ ID NO: 44085 - DNA, 38 bp, Artificial Sequence
  primer
gtaaaacgacggccagtagagtgaggtgtgtcacctgg

SEQ ID NO: 44086 - DNA, 38 bp, Artificial Sequence
  primer
gtaaaacgacggccagtaattgtctggatcatccctcc

SEQ ID NO: 44087 - DNA, 21 bp, Artificial Sequence
  primer
ggaagcatcgctctaatcctg

SEQ ID NO: 44088 - DNA, 38 bp, Artificial Sequence
  primer
gtaaaacgacggccagttagggataatctgtccgcagg

SEQ ID NO: 44089 - DNA, 21 bp, Artificial Sequence
  primer
aagtgttccagggaagcaaac

SEQ ID NO: 44090 - DNA, 21 bp, Artificial Sequence
  primer
ctggccagaagccacacttag

SEQ ID NO: 44091 - DNA, 38 bp, Artificial Sequence
  primer
gtaaaacgacggccagtaatctgctgggctccttgtag

SEQ ID NO: 44092 - DNA, 21 bp, Artificial Sequence
  primer
tcactcactgcctgtctctcc

SEQ ID NO: 44093 - DNA, 37 bp, Artificial Sequence
  primer
gtaaaacgacggccagtgacaggactcgagttgcagg

SEQ ID NO: 44094 - DNA, 38 bp, Artificial Sequence
  primer
gtaaaacgacggccagtgtttgagggcaagaatccaag

SEQ ID NO: 44095 - DNA, 37 bp, Artificial Sequence
  primer
gtaaaacgacggccagtgattggaggagcgaggagac

SEQ ID NO: 44096 - DNA, 21 bp, Artificial Sequence
  primer
gctgaatctttctagctgccc

SEQ ID NO: 44097 - DNA, 38 bp, Artificial Sequence
  primer
gtaaaacgacggccagtgcatttatggcaagaaggttg

SEQ ID NO: 44098 - DNA, 37 bp, Artificial Sequence
  primer
gtaaaacgacggccagttatggagcattcacttcggg

SEQ ID NO: 44099 - DNA, 38 bp, Artificial Sequence
  primer
gtaaaacgacggccagtgtcctacccactccatgtccc

SEQ ID NO: 44100 - DNA, 38 bp, Artificial Sequence
  primer
gtaaaacgacggccagtctaaggtggcggagttcttcc

SEQ ID NO: 44101 - DNA, 38 bp, Artificial Sequence
  primer
gtaaaacgacggccagtctctcaccctttaggtgtcgg

SEQ ID NO: 44102 - DNA, 38 bp, Artificial Sequence
  primer
gtaaaacgacggccagtgcaggtctgagtccctcactg

SEQ ID NO: 44103 - DNA, 38 bp, Artificial Sequence
  primer
gtaaaacgacggccagtggcttgcagaaggaagaagag

SEQ ID NO: 44104 - DNA, 19 bp, Artificial Sequence
  primer
gtggtagggcgagaacctg

SEQ ID NO: 44105 - DNA, 38 bp, Artificial Sequence
  primer
gtaaaacgacggccagtagaagtcagagtcggaggtgg

SEQ ID NO: 44106 - DNA, 38 bp, Artificial Sequence
  primer
gtaaaacgacggccagtagcttacagggtctggagctg

SEQ ID NO: 44107 - DNA, 38 bp, Artificial Sequence
  primer
gtaaaacgacggccagtggctccctcactccttagtgg

SEQ ID NO: 44108 - DNA, 21 bp, Artificial Sequence
  primer
accagcctcattgacctatgg

SEQ ID NO: 44109 - DNA, 38 bp, Artificial Sequence
  primer
gtaaaacgacggccagttgatggaatcattggttgctg

SEQ ID NO: 44110 - DNA, 38 bp, Artificial Sequence
  primer
gtaaaacgacggccagtgctggatttgagtgtgggtag

SEQ ID NO: 44111 - DNA, 38 bp, Artificial Sequence
  primer
gtaaaacgacggccagtgcagatgggaacaggttcttc

SEQ ID NO: 44112 - DNA, 35 bp, Artificial Sequence
  primer
gtaaaacgacggccagtcaagtgcatccgagcgag

SEQ ID NO: 44113 - DNA, 36 bp, Artificial Sequence
  primer
gtaaaacgacggccagtcgcctctgcatgagacttg

SEQ ID NO: 44114 - DNA, 21 bp, Artificial Sequence
  primer
ctgtgggtcctgaatcttgtg

SEQ ID NO: 44115 - DNA, 21 bp, Artificial Sequence
  primer
cactttggacaagtctctgcc

SEQ ID NO: 44116 - DNA, 36 bp, Artificial Sequence
  primer
gtaaaacgacggccagtgctatcaggagcagggtgg

SEQ ID NO: 44117 - DNA, 36 bp, Artificial Sequence
  primer
gtaaaacgacggccagtcttgtcggctgtcaaaggg

SEQ ID NO: 44118 - DNA, 21 bp, Artificial Sequence
  primer
gcctagtgggtcagagcaaag

SEQ ID NO: 44119 - DNA, 38 bp, Artificial Sequence
  primer
gtaaaacgacggccagtaggtgagaagccctggtttag

SEQ ID NO: 44120 - DNA, 38 bp, Artificial Sequence
  primer
gtaaaacgacggccagttgggacacagggtagatgttg

SEQ ID NO: 44121 - DNA, 38 bp, Artificial Sequence
  primer
gtaaaacgacggccagttcctgattccagtcctgtgtg

SEQ ID NO: 44122 - DNA, 21 bp, Artificial Sequence
  primer
cctgtgctgtcgcaagtttag

SEQ ID NO: 44123 - DNA, 38 bp, Artificial Sequence
  primer
gtaaaacgacggccagtaggctaatgatcgactggctc

SEQ ID NO: 44124 - DNA, 36 bp, Artificial Sequence; identical to SEQ ID NO: 44116
  primer

SEQ ID NO: 44125 - DNA, 21 bp, Artificial Sequence
  primer
ggtggcagtagagaggaaagc

SEQ ID NO: 44126 - DNA, 21 bp, Artificial Sequence
  primer
atattgggctgcgctgtctac

SEQ ID NO: 44127 - DNA, 19 bp, Artificial Sequence
  primer
cagctgctgccatctcaag

SEQ ID NO: 44128 - DNA, 20 bp, Artificial Sequence
  primer
ctgcgtactcccagcttgac

SEQ ID NO: 44129 - DNA, 38 bp, Artificial Sequence
  primer
gtaaaacgacggccagtgtggcagggatatttctgagg

SEQ ID NO: 44130 - DNA, 38 bp, Artificial Sequence
  primer
gtaaaacgacggccagtagacactcgtccaaaccactg

SEQ ID NO: 44131 - DNA, 21 bp, Artificial Sequence
  primer
ctttctgggtctctctcccac

SEQ ID NO: 44132 - DNA, 38 bp, Artificial Sequence
  primer
gtaaaacgacggccagtctctctcccactctgcgtctc

SEQ ID NO: 44133 - DNA, 38 bp, Artificial Sequence
  primer
gtaaaacgacggccagttacgtagacctggacgccttc

SEQ ID NO: 44134 - DNA, 21 bp, Artificial Sequence
  primer
cagaaggactttccatgtggc

SEQ ID NO: 44135 - DNA, 21 bp, Artificial Sequence
  primer
gagacctggtgtggtttaggc

SEQ ID NO: 44136 - DNA, 38 bp, Artificial Sequence
  primer
gtaaaacgacggccagttattaaagttggcgggagctg

SEQ ID NO: 44137 - DNA, 18 bp, Artificial Sequence
  primer
cacattggccaggttggt

SEQ ID NO: 44138 - DNA, 38 bp, Artificial Sequence
  primer
gtaaaacgacggccagttggaatggtttattcagtcgg

SEQ ID NO: 44139 - DNA, 42 bp, Artificial Sequence
  primer
gtaaaacgacggccagtttggagacctgtgtatatgtctttg

SEQ ID NO: 44140 - DNA, 38 bp, Artificial Sequence
  primer
gtaaaacgacggccagttggtggtagagagaagggagg

SEQ ID NO: 44141 - DNA, 41 bp, Artificial Sequence
  primer
gtaaaacgacggccagttcatcctattccgtgtatgaagaa

SEQ ID NO: 44142 - DNA, 23 bp, Artificial Sequence
  primer
tcaggtaagaagagtgaagtggc

SEQ ID NO: 44143 - DNA, 39 bp, Artificial Sequence
  primer
gtaaaacgacggccagtttatccttgcacctgaagtctg

SEQ ID NO: 44144 - DNA, 42 bp, Artificial Sequence
  primer
gtaaaacgacggccagtagtgcaacagaagaaggtatgaaag

SEQ ID NO: 44145 - DNA, 38 bp, Artificial Sequence
  primer
gtaaaacgacggccagttgatcctagcaagccacagac

SEQ ID NO: 44146 - DNA, 38 bp, Artificial Sequence
  primer
gtaaaacgacggccagtagtggcatgaatacaccatcg

SEQ ID NO: 44147 - DNA, 20 bp, Artificial Sequence
  primer
tcttccctccctattggtcg

SEQ ID NO: 44148 - DNA, 42 bp, Artificial Sequence
  primer
gtaaaacgacggccagtggaagtccaatgacttaagcatacc

SEQ ID NO: 44149 - DNA, 20 bp, Artificial Sequence
  primer
ttctgcctctgcctgagaac

SEQ ID NO: 44150 - DNA, 39 bp, Artificial Sequence
  primer
gtaaaacgacggccagtcagcatggcatttacatcctta

SEQ ID NO: 44151 - DNA, 26 bp, Artificial Sequence
  primer
ctacccataccattaggatagttgtg

SEQ ID NO: 44152 - DNA, 22 bp, Artificial Sequence
  primer
tgtcagttgatcaaattccatt

SEQ ID NO: 44153 - DNA, 21 bp, Artificial Sequence
  primer
ccactgagtgtcatgatgcag

SEQ ID NO: 44154 - DNA, 38 bp, Artificial Sequence
  primer
gtaaaacgacggccagtatggcctgaaggtaacattgg

SEQ ID NO: 44155 - DNA, 21 bp, Artificial Sequence
  primer
gatggcagtgaaggttgatcc

SEQ ID NO: 44156 - DNA, 21 bp, Artificial Sequence
  primer
ccagaaattgggctctgtgag

SEQ ID NO: 44157 - DNA, 21 bp, Artificial Sequence
  primer
gggtttgcctgatcttacacc

SEQ ID NO: 44158 - DNA, 38 bp, Artificial Sequence
  primer
gtaaaacgacggccagtagcccaagagagaggacactg

SEQ ID NO: 44159 - DNA, 21 bp, Artificial Sequence
  primer
agtgcctaggatggagattgg

SEQ ID NO: 44160 - DNA, 21 bp, Artificial Sequence
  primer
taggttcgtggcctattctcc

SEQ ID NO: 44161 - DNA, 38 bp, Artificial Sequence
  primer
gtaaaacgacggccagtgagagggagtgagtacacggg

SEQ ID NO: 44162 - DNA, 19 bp, Artificial Sequence
  primer
gagaggacacagcccgaag

SEQ ID NO: 44163 - DNA, 38 bp, Artificial Sequence
  primer
gtaaaacgacggccagttctgcttctcccttcttctcg

SEQ ID NO: 44164 - DNA, 38 bp, Artificial Sequence
  primer
gtaaaacgacggccagttaatatcgttccaagtccgcc

SEQ ID NO: 44165 - DNA, 21 bp, Artificial Sequence
  primer
ttcctgatcgagaatttgctg

SEQ ID NO: 44166 - DNA, 23 bp, Artificial Sequence
  primer
tggtgtttcatagtctctttgcg

SEQ ID NO: 44167 - DNA, 41 bp, Artificial Sequence
  primer
gtaaaacgacggccagtcatttggccatagtacaaagtagg

SEQ ID NO: 44168 - DNA, 45 bp, Artificial Sequence
  primer
gtaaaacgacggccagtgaagggatagtagaagcaattacagttt

SEQ ID NO: 44169 - DNA, 20 bp, Artificial Sequence
  primer
ggtctcttgaggcttcctgc

SEQ ID NO: 44170 - DNA, 21 bp, Artificial Sequence
  primer
gttgttcaagggccaactgtg

SEQ ID NO: 44171 - DNA, 23 bp, Artificial Sequence
  primer
aaaccctgttaacctcaaaggac

SEQ ID NO: 44172 - DNA, 38 bp, Artificial Sequence
  primer
gtaaaacgacggccagttaaccacctccgagctttacg

SEQ ID NO: 44173 - DNA, 19 bp, Artificial Sequence
  primer
ggcggagtttggcagtaag

SEQ ID NO: 44174 - DNA, 25 bp, Artificial Sequence
  primer
cagtgcttgctacctaatagactca

SEQ ID NO: 44175 - DNA, 19 bp, Artificial Sequence
  primer
agcctgggtgacaagagca

SEQ ID NO: 44176 - DNA, 38 bp, Artificial Sequence
  primer
gtaaaacgacggccagtcagagtttccgccagagaata

SEQ ID NO: 44177 - DNA, 44 bp, Artificial Sequence
  primer
gtaaaacgacggccagtgcacataatataaccaaatttgagacc

SEQ ID NO: 44178 - DNA, 21 bp, Artificial Sequence
  primer
gagcaggaccctgtccctaac

SEQ ID NO: 44179 - DNA, 24 bp, Artificial Sequence
  primer
ttaatcacacttccattgtttgaa

SEQ ID NO: 44180 - DNA, 37 bp, Artificial Sequence
  primer
gtaaaacgacggccagtggaagctgccctgttgattc

SEQ ID NO: 44181 - DNA, 21 bp, Artificial Sequence
  primer
ccagctggtgggaagtagatg

SEQ ID NO: 44182 - DNA, 20 bp, Artificial Sequence
  primer
cccaaagctgttcctcagtg

SEQ ID NO: 44183 - DNA, 38 bp, Artificial Sequence
  primer
gtaaaacgacggccagtatcaaatcctccctagcatgg

SEQ ID NO: 44184 - DNA, 21 bp, Artificial Sequence
  primer
atacaatgtcagcaagggtgg

SEQ ID NO: 44185 - DNA, 21 bp, Artificial Sequence
  primer
cacttggtcagtccatcaacg

SEQ ID NO: 44186 - DNA, 41 bp, Artificial Sequence
  primer
gtaaaacgacggccagtaaatgcatctctcttgacccttac

SEQ ID NO: 44187 - DNA, 38 bp, Artificial Sequence
  primer
gtaaaacgacggccagttccattcttcctgtcctttgg

SEQ ID NO: 44188 - DNA, 23 bp, Artificial Sequence
  primer
atatccattcttgcataattgcc

SEQ ID NO: 44189 - DNA, 39 bp, Artificial Sequence
  primer
gtaaaacgacggccagttgaactctgtttaggtggtggg

SEQ ID NO: 44190 - DNA, 37 bp, Artificial Sequence
  primer
gtaaaacgacggccagtgaagggctccagtgcctaag

SEQ ID NO: 44191 - DNA, 39 bp, Artificial Sequence
  primer
gtaaaacgacggccagtccacaggtaagtggagttgatg

SEQ ID NO: 44192 - DNA, 38 bp, Artificial Sequence
  primer
gtaaaacgacggccagttggaaatgaatgagaccttgg

SEQ ID NO: 44193 - DNA, 39 bp, Artificial Sequence
  primer
gtaaaacgacggccagtaatgaagaacagcttggtctgg

SEQ ID NO: 44194 - DNA, 21 bp, Artificial Sequence
  primer
gctccctgagagtggtgactg

SEQ ID NO: 44195 - DNA, 37 bp, Artificial Sequence
  primer
gtaaaacgacggccagtgaacgcgacttcctcctcta

SEQ ID NO: 44196 - DNA, 24 bp, Artificial Sequence
  primer
ttgtattggactctcaatcctcag

SEQ ID NO: 44197 - DNA, 23 bp, Artificial Sequence
  primer
aattatcagtctgagcgtcaagc

SEQ ID NO: 44198 - DNA, 44 bp, Artificial Sequence
  primer
gtaaaacgacggccagtaaggaactcattaaatactggagacag

SEQ ID NO: 44199 - DNA, 42 bp, Artificial Sequence
  primer
gtaaaacgacggccagtaagcaagatattatatggagggcag

SEQ ID NO: 44200 - DNA, 38 bp, Artificial Sequence
  primer
gtaaaacgacggccagtggccattggaaggctttattc

SEQ ID NO: 44201 - DNA, 38 bp, Artificial Sequence
  primer
gtaaaacgacggccagtgtgggcctaagtttcctgttc

SEQ ID NO: 44202 - DNA, 22 bp, Artificial Sequence
  primer
gagtgaaatgcaagtctggacc

SEQ ID NO: 44203 - DNA, 38 bp, Artificial Sequence
  primer
gtaaaacgacggccagtggcctgtgagatgatctgagg

SEQ ID NO: 44204 - DNA, 38 bp, Artificial Sequence
  primer
gtaaaacgacggccagtcaaccgacatagaatccttgc

SEQ ID NO: 44205 - DNA, 21 bp, Artificial Sequence
  primer
cagggcaagccagtgagttac

SEQ ID NO: 44206 - DNA, 38 bp, Artificial Sequence
  primer
gtaaaacgacggccagtctttcccaaactttagccagg

SEQ ID NO: 44207 - DNA, 20 bp, Artificial Sequence
  primer
ttcaggatgactgcatgagc

SEQ ID NO: 44208 - DNA, 38 bp, Artificial Sequence
  primer
gtaaaacgacggccagtacacacctgaggaggacattg

SEQ ID NO: 44209 - DNA, 38 bp, Artificial Sequence
  primer
gtaaaacgacggccagtggacactgagggacagaggac

SEQ ID NO: 44210 - DNA, 37 bp, Artificial Sequence
  primer
gtaaaacgacggccagtgagggctgcctcttgttctc

SEQ ID NO: 44211 - DNA, 21 bp, Artificial Sequence
  primer
tcagaacatcactgtgaaccc

SEQ ID NO: 44212 - DNA, 40 bp, Artificial Sequence
  primer
gtaaaacgacggccagtgccagcttggtatattattctgc

SEQ ID NO: 44213 - DNA, 38 bp, Artificial Sequence
  primer
gtaaaacgacggccagtcactttgacagtgccattgag

SEQ ID NO: 44214 - DNA, 38 bp, Artificial Sequence
  primer
gtaaaacgacggccagtgtggtgggtctttgagggtag

SEQ ID NO: 44215 - DNA, 44 bp, Artificial Sequence
  primer
gtaaaacgacggccagttgatttctcaggaagtagagtgtcttg

SEQ ID NO: 44216 - DNA, 24 bp, Artificial Sequence
  primer
cagaagttgtcctgcttagaaatg

SEQ ID NO: 44217 - DNA, 38 bp, Artificial Sequence
  primer
gtaaaacgacggccagtatatgcccaagaaacacttgc

SEQ ID NO: 44218 - DNA, 38 bp, Artificial Sequence
  primer
gtaaaacgacggccagtttcgagctgtgcatttcaagt

SEQ ID NO: 44219 - DNA, 42 bp, Artificial Sequence
  primer
gtaaaacgacggccagtcagatgtaatttaaggcctagagca

SEQ ID NO: 44220 - DNA, 22 bp, Artificial Sequence
  primer
ggcatatttgtgcctttattgc

SEQ ID NO: 44221 - DNA, 39 bp, Artificial Sequence
  primer
gtaaaacgacggccagttggatttatggtgcaactttcc

SEQ ID NO: 44222 - DNA, 38 bp, Artificial Sequence
  primer
gtaaaacgacggccagttacagttaccaccacatgccc

SEQ ID NO: 44223 - DNA, 20 bp, Artificial Sequence
  primer
ataccaaggcctgtcatggg

SEQ ID NO: 44224 - DNA, 21 bp, Artificial Sequence
  primer
accatgtactgcttggtgctg

SEQ ID NO: 44225 - DNA, 38 bp, Artificial Sequence
  primer
gtaaaacgacggccagtagctgccaccctaaattatgc

SEQ ID NO: 44226 - DNA, 21 bp, Artificial Sequence
  primer
caccagggcaggaagtttatc

SEQ ID NO: 44227 - DNA, 21 bp, Artificial Sequence
  primer
ttgctgctgattctgtcagtg

SEQ ID NO: 44228 - DNA, 37 bp, Artificial Sequence
  primer
gtaaaacgacggccagtttcaaagccctcagcttttg

SEQ ID NO: 44229 - DNA, 38 bp, Artificial Sequence
  primer
gtaaaacgacggccagttgtgaagagcaaatgagacga

SEQ ID NO: 44230 - DNA, 25 bp, Artificial Sequence
  primer
ggagtttacaaatttcattggcatc

SEQ ID NO: 44231 - DNA, 22 bp, Artificial Sequence
  primer
tggtggaggtcatttaaagctc

SEQ ID NO: 44232 - DNA, 39 bp, Artificial Sequence
  primer
gtaaaacgacggccagtgcaactgtttaactgcatttgg

SEQ ID NO: 44233 - DNA, 18 bp, Artificial Sequence
  primer
ccctcatggcctctcctc

SEQ ID NO: 44234 - DNA, 38 bp, Artificial Sequence
  primer
gtaaaacgacggccagtaataggttggctctgccttcc

SEQ ID NO: 44235 - DNA, 40 bp, Artificial Sequence
  primer
gtaaaacgacggccagtttggttcacctcactactcttgc

SEQ ID NO: 44236 - DNA, 21 bp, Artificial Sequence
  primer
gaagcgattctaaagcttcca

SEQ ID NO: 44237 - DNA, 40 bp, Artificial Sequence
  primer
gtaaaacgacggccagtcaattcactgattgcacagaatg

SEQ ID NO: 44238 - DNA, 21 bp, Artificial Sequence
  primer
gtggtgtttggtatcactgcc

SEQ ID NO: 44239 - DNA, 39 bp, Artificial Sequence
  primer
gtaaaacgacggccagtttgggttacttctttgaccctg

SEQ ID NO: 44240 - DNA, 23 bp, Artificial Sequence
  primer
caaacaatgtaaagcatgtccac

SEQ ID NO: 44241 - DNA, 38 bp, Artificial Sequence
  primer
gtaaaacgacggccagtttgcttaaatggtgttctgcc

SEQ ID NO: 44242 - DNA, 38 bp, Artificial Sequence
  primer
gtaaaacgacggccagtctaccacccactgccactttc

SEQ ID NO: 44243 - DNA, 22 bp, Artificial Sequence
  primer
gccatgcatttaactcattgtg

SEQ ID NO: 44244 - DNA, 39 bp, Artificial Sequence
  primer
gtaaaacgacggccagtgctctactcctctgctgtttgg

SEQ ID NO: 44245 - DNA, 21 bp, Artificial Sequence
  primer
tgtgagcccacttgaaatacc

SEQ ID NO: 44246 - DNA, 37 bp, Artificial Sequence
  primer
gtaaaacgacggccagtaaacctgggtgtttggaagc

SEQ ID NO: 44247 - DNA, 43 bp, Artificial Sequence
  primer
gtaaaacgacggccagtagaaataaacatgtaagtttgggtcc

SEQ ID NO: 44248 - DNA, 21 bp, Artificial Sequence
  primer
gagttgtcaggctttcttggg

SEQ ID NO: 44249 - DNA, 22 bp, Artificial Sequence
  primer
gcccagaacattaggaactttg

SEQ ID NO: 44250 - DNA, 38 bp, Artificial Sequence
  primer
gtaaaacgacggccagtggtttcacagggctcattctg

SEQ ID NO: 44251 - DNA, 23 bp, Artificial Sequence
  primer
ttaatgtacgctctcccactttc

SEQ ID NO: 44252 - DNA, 21 bp, Artificial Sequence
  primer
aagtgggattggtggagagag

SEQ ID NO: 44253 - DNA, 38 bp, Artificial Sequence
  primer
gtaaaacgacggccagtgaatggatgcagggactgttc

SEQ ID NO: 44254 - DNA, 20 bp, Artificial Sequence
  primer
aaacgagcccactcattgtg

SEQ ID NO: 44255 - DNA, 38 bp, Artificial Sequence
  primer
gtaaaacgacggccagtttgtcacaggtggagatggag

SEQ ID NO: 44256 - DNA, 38 bp, Artificial Sequence
  primer
gtaaaacgacggccagtgcttgggaacttctttcttgc

SEQ ID NO: 44257 - DNA, 25 bp, Artificial Sequence
  primer
gagggtttgagaactgtttatgatg

SEQ ID NO: 44258 - DNA, 41 bp, Artificial Sequence
  primer
gtaaaacgacggccagtgagcttcctttgtacttgttgagg

SEQ ID NO: 44259 - DNA, 24 bp, Artificial Sequence
  primer
cccagtgtcatgaagatttacctc

SEQ ID NO: 44260 - DNA, 20 bp, Artificial Sequence
  primer
ttgcttgaaaccaggaggtg

SEQ ID NO: 44261 - DNA, 38 bp, Artificial Sequence
  primer
gtaaaacgacggccagttggcacatagtagcttcccag

SEQ ID NO: 44262 - DNA, 39 bp, Artificial Sequence
  primer
gtaaaacgacggccagtgggttgtcggaagtgagtttag

SEQ ID NO: 44263 - DNA, 39 bp, Artificial Sequence
  primer
gtaaaacgacggccagtgatggtagaagccagattgcag

SEQ ID NO: 44264 - DNA, 24 bp, Artificial Sequence
  primer
cacctacacttacgcttgttgaga

SEQ ID NO: 44265 - DNA, 21 bp, Artificial Sequence
  primer
gaagactggttcccattggtc

SEQ ID NO: 44266 - DNA, 38 bp, Artificial Sequence
  primer
gtaaaacgacggccagtctcctgagattagaggcctgg

SEQ ID NO: 44267 - DNA, 38 bp, Artificial Sequence
  primer
gtaaaacgacggccagtgagctatcctcaagccagacc

SEQ ID NO: 44268 - DNA, 38 bp, Artificial Sequence
  primer
gtaaaacgacggccagtaccaaccttcccatgacagag

SEQ ID NO: 44269 - DNA, 38 bp, Artificial Sequence
  primer
gtaaaacgacggccagtcctccatccctctgacttctg

SEQ ID NO: 44270 - DNA, 39 bp, Artificial Sequence
  primer
gtaaaacgacggccagttgcccagcctctatttgtaatc

SEQ ID NO: 44271 - DNA, 41 bp, Artificial Sequence
  primer
gtaaaacgacggccagttgtgtagcacatagcacacaactc

SEQ ID NO: 44272 - DNA, 46 bp, Artificial Sequence
  primer
gtaaaacgacggccagtggaacaatctttagtgcttatatctgttt

SEQ ID NO: 44273 - DNA, 44 bp, Artificial Sequence
  primer
gtaaaacgacggccagtttagatatgcttcatgctgtgacttac

SEQ ID NO: 44274 - DNA, 22 bp, Artificial Sequence
  primer
gggagggaagtatgatgtgtcc

SEQ ID NO: 44275 - DNA, 23 bp, Artificial Sequence
  primer
cacatgcaagtacaatgtagcaa

SEQ ID NO: 44276 - DNA, 41 bp, Artificial Sequence
  primer
gtaaaacgacggccagtttgtctcctcttccattactctgg

SEQ ID NO: 44277 - DNA, 35 bp, Artificial Sequence
  primer
gtaaaacgacggccagtcgtttcaggaggcgatcc

SEQ ID NO: 44278 - DNA, 21 bp, Artificial Sequence
  primer
ctggttggtgacactgcaaac

SEQ ID NO: 44279 - DNA, 20 bp, Artificial Sequence
  primer
aggcacaggaagtctcaggc

SEQ ID NO: 44280 - DNA, 37 bp, Artificial Sequence
  primer
gtaaaacgacggccagtaaattggcttggtggtttcc

SEQ ID NO: 44281 - DNA, 23 bp, Artificial Sequence
  primer
tggaatctgataactttgaggca

SEQ ID NO: 44282 - DNA, 41 bp, Artificial Sequence
  primer
gtaaaacgacggccagttttgtgaaattgggaaagtatgtg

SEQ ID NO: 44283 - DNA, 38 bp, Artificial Sequence
  primer
gtaaaacgacggccagtccaggacaatacacctccctg

SEQ ID NO: 44284 - DNA, 40 bp, Artificial Sequence
  primer
gtaaaacgacggccagtaagcatttgattgtaattccagc

SEQ ID NO: 44285 - DNA, 38 bp, Artificial Sequence
  primer
gtaaaacgacggccagttggcatgtggtaggtactcag

SEQ ID NO: 44286 - DNA, 24 bp, Artificial Sequence
  primer
aaacagtatgtccactgggtaatg

SEQ ID NO: 44287 - DNA, 21 bp, Artificial Sequence
  primer
actgctgatccctcctctgtc

SEQ ID NO: 44288 - DNA, 38 bp, Artificial Sequence
  primer
gtaaaacgacggccagtttgcagattgatgaggagcag

SEQ ID NO: 44289 - DNA, 21 bp, Artificial Sequence
  primer
gttacagtgcgagtggctgac

SEQ ID NO: 44290 - DNA, 39 bp, Artificial Sequence
  primer
gtaaaacgacggccagtacctgagctggtagttactggg

SEQ ID NO: 44291 - DNA, 21 bp, Artificial Sequence
  primer
ctttcaatcagagccgctacc

SEQ ID NO: 44292 - DNA, 21 bp, Artificial Sequence
  primer
ctcgcatctctgtgtcagacc

SEQ ID NO: 44293 - DNA, 21 bp, Artificial Sequence
  primer
ttgagggttacagccacagac

SEQ ID NO: 44294 - DNA, 38 bp, Artificial Sequence
  primer
gtaaaacgacggccagtgtccgccatccagagacttag

SEQ ID NO: 44295 - DNA, 38 bp, Artificial Sequence
  primer
gtaaaacgacggccagtagtcagtagaccaagggcagg

SEQ ID NO: 44296 - DNA, 21 bp, Artificial Sequence
  primer
ccacctcctccataacctttc

SEQ ID NO: 44297 - DNA, 38 bp, Artificial Sequence
  primer
gtaaaacgacggccagttaggaatgtcacctcagtgcg

SEQ ID NO: 44298 - DNA, 38 bp, Artificial Sequence
  primer
gtaaaacgacggccagtgatgcggtatcaggactgttg

SEQ ID NO: 44299 - DNA, 38 bp, Artificial Sequence
  primer
gtaaaacgacggccagtacaggccatgtacggcttatg

SEQ ID NO: 44300 - DNA, 38 bp, Artificial Sequence
  primer
gtaaaacgacggccagtggaactcaggtcctgcaagtg

SEQ ID NO: 44301 - DNA, 38 bp, Artificial Sequence
  primer
gtaaaacgacggccagtcccaaacaccagcttcttagg

SEQ ID NO: 44302 - DNA, 38 bp, Artificial Sequence
  primer
gtaaaacgacggccagtctcctggattgggtgtgagag

SEQ ID NO: 44303 - DNA, 21 bp, Artificial Sequence
  primer
ggagagaggagaattggtggg

SEQ ID NO: 44304 - DNA, 38 bp, Artificial Sequence
  primer
gtaaaacgacggccagtatcctttggctccactagcag

SEQ ID NO: 44305 - DNA, 21 bp, Artificial Sequence
  primer
tgggtgcactcacctacacac

SEQ ID NO: 44306 - DNA, 19 bp, Artificial Sequence
  primer
cgcagcgctgtacactttc

SEQ ID NO: 44307 - DNA, 37 bp, Artificial Sequence
  primer
gtaaaacgacggccagtctggaccgagagaccactcc

SEQ ID NO: 44308 - DNA, 38 bp, Artificial Sequence
  primer
gtaaaacgacggccagtagttaggtctgggagtgaggg

SEQ ID NO: 44309 - DNA, 21 bp, Artificial Sequence
  primer
aggagtacagcgtcctcttgc

SEQ ID NO: 44310 - DNA, 21 bp, Artificial Sequence
  primer
atgtgtgcctgagaggtatgg

SEQ ID NO: 44311 - DNA, 40 bp, Artificial Sequence
  primer
gtaaaacgacggccagtgaccacacacaaatgataccagc

SEQ ID NO: 44312 - DNA, 38 bp, Artificial Sequence
  primer
gtaaaacgacggccagtccttgcttctggagagtttgg

SEQ ID NO: 44313 - DNA, 20 bp, Artificial Sequence
  primer
tctgtgagtgcagtggatgg

SEQ ID NO: 44314 - DNA, 21 bp, Artificial Sequence
  primer
ccctaagcaccacagtgtctg

SEQ ID NO: 44315 - DNA, 39 bp, Artificial Sequence
  primer
gtaaaacgacggccagtcagccatttcttccagattcag

SEQ ID NO: 44316 - DNA, 21 bp, Artificial Sequence
  primer
agggctgtccttgagtaaggg

SEQ ID NO: 44317 - DNA, 38 bp, Artificial Sequence
  primer
gtaaaacgacggccagttatgtggccttccttcctgag

SEQ ID NO: 44318 - DNA, 38 bp, Artificial Sequence
  primer
gtaaaacgacggccagtttgaactcatctggtcccttg

SEQ ID NO: 44319 - DNA, 21 bp, Artificial Sequence
  primer
taaagtgggtggcataaaggg

SEQ ID NO: 44320 - DNA, 21 bp, Artificial Sequence
  primer
caaggaaccaagctccagaac

SEQ ID NO: 44321 - DNA, 38 bp, Artificial Sequence
  primer
gtaaaacgacggccagtgatctctggcctagggaggac

SEQ ID NO: 44322 - DNA, 21 bp, Artificial Sequence
  primer
tttcccttccgttctcatctc

SEQ ID NO: 44323 - DNA, 37 bp, Artificial Sequence
  primer
gtaaaacgacggccagtcctggtgttgcttgaacctc

SEQ ID NO: 44324 - DNA, 21 bp, Artificial Sequence
  primer
ctgaggacacacctgttggag

SEQ ID NO: 44325 - DNA, 38 bp, Artificial Sequence
  primer
gtaaaacgacggccagtgcaccagtgacaattgaggtc

SEQ ID NO: 44326 - DNA, 20 bp, Artificial Sequence
  primer
cagcctctgtcactgtgtcg

SEQ ID NO: 44327 - DNA, 21 bp, Artificial Sequence
  primer
gcctggttctgtattcccttg

SEQ ID NO: 44328 - DNA, 38 bp, Artificial Sequence
  primer
gtaaaacgacggccagtagctgaggctggaggtgatag

SEQ ID NO: 44329 - DNA, 21 bp, Artificial Sequence
  primer
tgactcactgcagaaactggg

SEQ ID NO: 44330 - DNA, 21 bp, Artificial Sequence
  primer
ggtctgagtgacacatcctgc

SEQ ID NO: 44331 - DNA, 38 bp, Artificial Sequence
  primer
gtaaaacgacggccagtctggccagtgtcttcacagag

SEQ ID NO: 44332 - DNA, 38 bp, Artificial Sequence
  primer
gtaaaacgacggccagtacctgtagcacaaggaaaggg

SEQ ID NO: 44333 - DNA, 21 bp, Artificial Sequence
  primer
acattgcctcctcctcttctg

SEQ ID NO: 44334 - DNA, 39 bp, Artificial Sequence
  primer
gtaaaacgacggccagtaggctttgtgaatagctatggg

SEQ ID NO: 44335 - DNA, 21 bp, Artificial Sequence
  primer
atatcaatgcaccaccacagc

SEQ ID NO: 44336 - DNA, 40 bp, Artificial Sequence
  primer
gtaaaacgacggccagttcaagactattgtagggccattg

SEQ ID NO: 44337 - DNA, 38 bp, Artificial Sequence
  primer
gtaaaacgacggccagtcaagagtgctacgtgtcctgg

SEQ ID NO: 44338 - DNA, 21 bp, Artificial Sequence
  primer
atcaaagcagccacatcattc

SEQ ID NO: 44339 - DNA, 38 bp, Artificial Sequence
  primer
gtaaaacgacggccagtatcctgtggcccagttaacac

SEQ ID NO: 44340 - DNA, 38 bp, Artificial Sequence
  primer
gtaaaacgacggccagttctgagtttccaagtgggtcc

SEQ ID NO: 44341 - DNA, 21 bp, Artificial Sequence
  primer
gaacggactcatccggtactc

SEQ ID NO: 44342 - DNA, 36 bp, Artificial Sequence
  primer
gtaaaacgacggccagttatttgcggcgacagtttg

SEQ ID NO: 44343 - DNA, 44 bp, Artificial Sequence
  primer
gtaaaacgacggccagtcatatctatactgcaaatacatacccg

SEQ ID NO: 44344 - DNA, 21 bp, Artificial Sequence
  primer
tccttctggaaatggttctgg

SEQ ID NO: 44345 - DNA, 43 bp, Artificial Sequence
  primer
gtaaaacgacggccagtttcattcatttaaaggtccactgata

SEQ ID NO: 44346 - DNA, 24 bp, Artificial Sequence
  primer
gaattcaaagcaaacaaatcttcc

SEQ ID NO: 44347 - DNA, 21 bp, Artificial Sequence
  primer
gtgatcccactatccaaaggg

SEQ ID NO: 44348 - DNA, 39 bp, Artificial Sequence
  primer
gtaaaacgacggccagtcctttccctgagtagcacagtc

SEQ ID NO: 44349 - DNA, 20 bp, Artificial Sequence
  primer
cattgaatcccacaaccctg

SEQ ID NO: 44350 - DNA, 44 bp, Artificial Sequence
  primer
gtaaaacgacggccagtacatttaaagatgatttaatgcagttc

SEQ ID NO: 44351 - DNA, 40 bp, Artificial Sequence
  primer
gtaaaacgacggccagtaaattctaagcattcactgtggg

SEQ ID NO: 44352 - DNA, 40 bp, Artificial Sequence
  primer
gtaaaacgacggccagtgctacctggttagcctgacattg

SEQ ID NO: 44353 - DNA, 38 bp, Artificial Sequence
  primer
gtaaaacgacggccagtcggctgcaaattagtgaaagc

SEQ ID NO: 44354 - DNA, 39 bp, Artificial Sequence
  primer
gtaaaacgacggccagtcaggagaactctcaaccactcg

SEQ ID NO: 44355 - DNA, 21 bp, Artificial Sequence
  primer
ttcttgtgctttcagctgtgg

SEQ ID NO: 44356 - DNA, 21 bp, Artificial Sequence
  primer
cgcctacaaaccagacaactg

SEQ ID NO: 44357 - DNA, 21 bp, Artificial Sequence
  primer
gggatctggctcattgaagac

SEQ ID NO: 44358 - DNA, 38 bp, Artificial Sequence
  primer
gtaaaacgacggccagtcagtgcgagactctgtctcaa

SEQ ID NO: 44359 - DNA, 41 bp, Artificial Sequence
  primer
gtaaaacgacggccagttgtttgacaagctgtgattctttc

SEQ ID NO: 44360 - DNA, 21 bp, Artificial Sequence
  primer
agcttgctggatttggttctc

SEQ ID NO: 44361 - DNA, 24 bp, Artificial Sequence
  primer
caagaaagagcaaatcatattgga

SEQ ID NO: 44362 - DNA, 38 bp, Artificial Sequence
  primer
gtaaaacgacggccagttgacctcatgttctgtccctg

SEQ ID NO: 44363 - DNA, 38 bp, Artificial Sequence
  primer
gtaaaacgacggccagtacattggatagtcaactgccg

SEQ ID NO: 44364 - DNA, 21 bp, Artificial Sequence
  primer
gcctaagtgaggatgctctgg

SEQ ID NO: 44365 - DNA, 38 bp, Artificial Sequence
  primer
gtaaaacgacggccagtgggagtcacatcactgtggtc

SEQ ID NO: 44366 - DNA, 21 bp, Artificial Sequence
  primer
gctggtccgtatggagaattg

SEQ ID NO: 44367 - DNA, 38 bp, Artificial Sequence
  primer
gtaaaacgacggccagtgtctgggtggatattgaaggg

SEQ ID NO: 44368 - DNA, 21 bp, Artificial Sequence
  primer
ccaagtttgcatcttgcactg

SEQ ID NO: 44369 - DNA, 38 bp, Artificial Sequence
  primer
gtaaaacgacggccagtctgacgactgcagtaacgagg

SEQ ID NO: 44370 - DNA, 21 bp, Artificial Sequence
  primer
actgatgtgatggtgactgcc

SEQ ID NO: 44371 - DNA, 38 bp, Artificial Sequence
  primer
gtaaaacgacggccagttcaggaagtaaggtgtgcagc

SEQ ID NO: 44372 - DNA, 20 bp, Artificial Sequence
  primer
aagaatgccggcagtaaacc

SEQ ID NO: 44373 - DNA, 19 bp, Artificial Sequence
  primer
ggtaggtggaggcgttgac

SEQ ID NO: 44374 - DNA, 35 bp, Artificial Sequence
  primer
gtaaaacgacggccagtgtcaagatggcgctggtg

SEQ ID NO: 44375 - DNA, 20 bp, Artificial Sequence
  primer
catggcttagttgagggtgc

SEQ ID NO: 44376 - DNA, 20 bp, Artificial Sequence
  primer
ggaagtacagggaagccagg

SEQ ID NO: 44377 - DNA, 38 bp, Artificial Sequence
  primer
gtaaaacgacggccagtccgaagaactaatgaccctcg

SEQ ID NO: 44378 - DNA, 38 bp, Artificial Sequence
  primer
gtaaaacgacggccagtctgacctgtgactaccgcatc

SEQ ID NO: 44379 - DNA, 19 bp, Artificial Sequence
  primer
agccaagatcccaccattg

SEQ ID NO: 44380 - DNA, 20 bp, Artificial Sequence
  primer
tgagctcactagctgacccg

SEQ ID NO: 44381 - DNA, 38 bp, Artificial Sequence
  primer
gtaaaacgacggccagttgcttaatgaaattgggcagg

SEQ ID NO: 44382 - DNA, 43 bp, Artificial Sequence
  primer
gtaaaacgacggccagtggaaagagtatgagaaagggaactta

SEQ ID NO: 44383 - DNA, 21 bp, Artificial Sequence
  primer
atgtgccactggatttaggag

SEQ ID NO: 44384 - DNA, 20 bp, Artificial Sequence
  primer
tggcttagagccaccaagtg

SEQ ID NO: 44385 - DNA, 26 bp, Artificial Sequence
  primer
gagaatcatatgttacagtacccagc

SEQ ID NO: 44386 - DNA, 40 bp, Artificial Sequence
  primer
gtaaaacgacggccagttctttggaaagtaaatgcaatgg

SEQ ID NO: 44387 - DNA, 21 bp, Artificial Sequence
  primer
agattcccattgagttggtgg

SEQ ID NO: 44388 - DNA, 21 bp, Artificial Sequence
  primer
agagccgcagaagctaaagag

SEQ ID NO: 44389 - DNA, 22 bp, Artificial Sequence
  primer
caagtgtcctgatggtcttctg

SEQ ID NO: 44390 - DNA, 39 bp, Artificial Sequence
  primer
gtaaaacgacggccagtgccttgaggaaagatggtcttc

SEQ ID NO: 44391 - DNA, 22 bp, Artificial Sequence
  primer
cagcctcgaagaagatgatgac

SEQ ID NO: 44392 - DNA, 38 bp, Artificial Sequence
  primer
gtaaaacgacggccagttgagccagaatttcactcagc

SEQ ID NO: 44393 - DNA, 22 bp, Artificial Sequence
  primer
tgcaagacatccttctaccaag

SEQ ID NO: 44394 - DNA, 25 bp, Artificial Sequence
  primer
ttaaatccagttccaagtcctaatc

SEQ ID NO: 44395 - DNA, 23 bp, Artificial Sequence
  primer
tgagagtcagctttctgtggaac

SEQ ID NO: 44396 - DNA, 41 bp, Artificial Sequence
  primer
gtaaaacgacggccagtaaagaggatagagggttcattcag

SEQ ID NO: 44397 - DNA, 38 bp, Artificial Sequence
  primer
gtaaaacgacggccagtaaattcttcctggcattgtgg

SEQ ID NO: 44398 - DNA, 38 bp, Artificial Sequence
  primer
gtaaaacgacggccagttgctatgtcattgtggtcagc

SEQ ID NO: 44399 - DNA, 22 bp, Artificial Sequence
  primer
caggcagtgagataacttgtgg

SEQ ID NO: 44400 - DNA, 22 bp, Artificial Sequence
  primer
ttctcacaattcattccacaca

SEQ ID NO: 44401 - DNA, 38 bp, Artificial Sequence
  primer
gtaaaacgacggccagtccatgcctgtgccagtataac

SEQ ID NO: 44402 - DNA, 40 bp, Artificial Sequence
  primer
gtaaaacgacggccagttttcagaactaaagcactgaggg

SEQ ID NO: 44403 - DNA, 36 bp, Artificial Sequence
  primer
gtaaaacgacggccagttctctggccctgttcttgc

SEQ ID NO: 44404 - DNA, 37 bp, Artificial Sequence
  primer
gtaaaacgacggccagtgtggctcaggatttggtcag

SEQ ID NO: 44405 - DNA, 21 bp, Artificial Sequence
  primer
caaacgcctgtctattgttgg

SEQ ID NO: 44406 - DNA, 21 bp, Artificial Sequence
  primer
tttcatggtgcctgaaacttg

SEQ ID NO: 44407 - DNA, 21 bp, Artificial Sequence
  primer
tgttcacagtggaggagaagg

SEQ ID NO: 44408 - DNA, 38 bp, Artificial Sequence
  primer
gtaaaacgacggccagttctggctgttagaaaggaggc

SEQ ID NO: 44409 - DNA, 21 bp, Artificial Sequence
  primer
tcaagaagcagttgttcccag

SEQ ID NO: 44410 - DNA, 21 bp, Artificial Sequence
  primer
ccgtattaccaaatctgcctc

SEQ ID NO: 44411 - DNA, 22 bp, Artificial Sequence
  primer
aatggatatgtttgcaggaagc

SEQ ID NO: 44412 - DNA, 21 bp, Artificial Sequence
  primer
cacaaacccatgatcccagat

SEQ ID NO: 44413 - DNA, 38 bp, Artificial Sequence
  primer
gtaaaacgacggccagtccgtaggtgtgagtacctggg

SEQ ID NO: 44414 - DNA, 21 bp, Artificial Sequence
  primer
gttgacatgctggcggaatac

SEQ ID NO: 44415 - DNA, 22 bp, Artificial Sequence
  primer
ttgcttgtcttcacattgatgg

SEQ ID NO: 44416 - DNA, 22 bp, Artificial Sequence
  primer
ttcctgatttagggtgatttcg

SEQ ID NO: 44417 - DNA, 22 bp, Artificial Sequence
  primer
cagtgttcaggagatctttggg

SEQ ID NO: 44418 - DNA, 23 bp, Artificial Sequence
  primer
gtgtgatttcccttatggtcaag

SEQ ID NO: 44419 - DNA, 21 bp, Artificial Sequence
  primer
agtggcctccctattctttgc

SEQ ID NO: 44420 - DNA, 38 bp, Artificial Sequence
  primer
gtaaaacgacggccagttaggaatcccagcttcactgc

SEQ ID NO: 44421 - DNA, 21 bp, Artificial Sequence
  primer
gaacaaggaagtcaaggctgg

SEQ ID NO: 44422 - DNA, 39 bp, Artificial Sequence
  primer
gtaaaacgacggccagtgaaacgacacacagattaggca

SEQ ID NO: 44423 - DNA, 37 bp, Artificial Sequence
  primer
gtaaaacgacggccagtgccacaccctaatgcaacac

SEQ ID NO: 44424 - DNA, 38 bp, Artificial Sequence
  primer
gtaaaacgacggccagtaatggaatgaacaaacatgcc

SEQ ID NO: 44425 - DNA, 40 bp, Artificial Sequence
  primer
gtaaaacgacggccagtaggttgcttgctgaaacagatac

SEQ ID NO: 44426 - DNA, 21 bp, Artificial Sequence
  primer
agcaagggcttccactacttc

SEQ ID NO: 44427 - DNA, 21 bp, Artificial Sequence
  primer
agaggttggagaaagcactcc

SEQ ID NO: 44428 - DNA, 22 bp, Artificial Sequence
  primer
ggtgacaaagcaagattccatc

SEQ ID NO: 44429 - DNA, 38 bp, Artificial Sequence
  primer
gtaaaacgacggccagtccacacggagctaaggaagac

SEQ ID NO: 44430 - DNA, 38 bp, Artificial Sequence
  primer
gtaaaacgacggccagtgcaacccacatacagaactcg

SEQ ID NO: 44431 - DNA, 38 bp, Artificial Sequence
  primer
gtaaaacgacggccagtctctaccctccagggaggaac

SEQ ID NO: 44432 - DNA, 21 bp, Artificial Sequence
  primer
actcacaccttgccctgtacc

SEQ ID NO: 44433 - DNA, 37 bp, Artificial Sequence
  primer
gtaaaacgacggccagtgtagaggcggaagttgaggg

SEQ ID NO: 44434 - DNA, 23 bp, Artificial Sequence
  primer
tggaatgagagggagactttacc

SEQ ID NO: 44435 - DNA, 23 bp, Artificial Sequence
  primer
tcgtcagaggaggagtatgatct

SEQ ID NO: 44436 - DNA, 25 bp, Artificial Sequence
  primer
tgagggtctgatggtacatttagtg

SEQ ID NO: 44437 - DNA, 41 bp, Artificial Sequence
  primer
gtaaaacgacggccagtgtgtatccttggaagatgaacacc

SEQ ID NO: 44438 - DNA, 27 bp, Artificial Sequence
  primer
catgttatttacattggagtacagagc

SEQ ID NO: 44439 - DNA, 21 bp, Artificial Sequence
  primer
aaatttccatccaccaacctg

SEQ ID NO: 44440 - DNA, 21 bp, Artificial Sequence
  primer
tcctaccatttccctttgagc

SEQ ID NO: 44441 - DNA, 38 bp, Artificial Sequence
  primer
gtaaaacgacggccagtgttgagccctgttctcagtcc

SEQ ID NO: 44442 - DNA, 38 bp, Artificial Sequence
  primer
gtaaaacgacggccagtcctgtcagactcttcccttgg

SEQ ID NO: 44443 - DNA, 38 bp, Artificial Sequence
  primer
gtaaaacgacggccagttatgcctgtttccacatggtc

SEQ ID NO: 44444 - DNA, 21 bp, Artificial Sequence
  primer
catgattgtctctgggtggtg

SEQ ID NO: 44445 - DNA, 38 bp, Artificial Sequence
  primer
gtaaaacgacggccagtattagtgaggccttgcgtctg

SEQ ID NO: 44446 - DNA, 21 bp, Artificial Sequence
  primer
catgttgggtatatttggccc

SEQ ID NO: 44447 - DNA, 21 bp, Artificial Sequence
  primer
atgatgccagtggtgaagaag

SEQ ID NO: 44448 - DNA, 19 bp, Artificial Sequence
  primer
cactgtgcctggcttgatg

SEQ ID NO: 44449 - DNA, 36 bp, Artificial Sequence
  primer
gtaaaacgacggccagtacttggcccacagatttgc

SEQ ID NO: 44450 - DNA, 38 bp, Artificial Sequence
  primer
gtaaaacgacggccagtcctggaggctggtgttgttag

SEQ ID NO: 44451 - DNA, 21 bp, Artificial Sequence
  primer
ctaccaaggtggttcccaatc

SEQ ID NO: 44452 - DNA, 38 bp, Artificial Sequence
  primer
gtaaaacgacggccagtatgtcaggaaactgtggagcc

SEQ ID NO: 44453 - DNA, 38 bp, Artificial Sequence
  primer
gtaaaacgacggccagtcaacattggaacttctcgtgg

SEQ ID NO: 44454 - DNA, 21 bp, Artificial Sequence
  primer
agcagagctcccacttctgtc

SEQ ID NO: 44455 - DNA, 21 bp, Artificial Sequence
  primer
gcttagaccacccgtatctgc

SEQ ID NO: 44456 - DNA, 21 bp, Artificial Sequence
  primer
gctgctgtgcatactgaccat

SEQ ID NO: 44457 - DNA, 21 bp, Artificial Sequence
  primer
gagtcctagtgccgtaccgtc

SEQ ID NO: 44458 - DNA, 37 bp, Artificial Sequence
  primer
gtaaaacgacggccagttggtgggtcaggtatgaagc

SEQ ID NO: 44459 - DNA, 26 bp, Artificial Sequence
  primer
gctacacttaaatgagggaagatttg

SEQ ID NO: 44460 - DNA, 38 bp, Artificial Sequence
  primer
gtaaaacgacggccagtgctttcacactggtggtgatg

SEQ ID NO: 44461 - DNA, 38 bp, Artificial Sequence
  primer
gtaaaacgacggccagtgcatttctgtaccagcctgtc

SEQ ID NO: 44462 - DNA, 37 bp, Artificial Sequence
  primer
gtaaaacgacggccagtatgaccagcttgctcgtttg

SEQ ID NO: 44463 - DNA, 38 bp, Artificial Sequence
  primer
gtaaaacgacggccagtatggccattccctttatcagg

SEQ ID NO: 44464 - DNA, 38 bp, Artificial Sequence
  primer
gtaaaacgacggccagttctgggtgatgaggataaagc

SEQ ID NO: 44465 - DNA, 23 bp, Artificial Sequence
  primer
aaatttgggtaggagaagctttg

SEQ ID NO: 44466 - DNA, 21 bp, Artificial Sequence
  primer
tggtgagagaatgggatgatg

SEQ ID NO: 44467 - DNA, 22 bp, Artificial Sequence
  primer
tgcagttgaccaccagtttatg

SEQ ID NO: 44468 - DNA, 36 bp, Artificial Sequence
  primer
gtaaaacgacggccagtgagttagcagcccagccag

SEQ ID NO: 44469 - DNA, 38 bp, Artificial Sequence
  primer
gtaaaacgacggccagtgacttcagggaaggaaatccc

SEQ ID NO: 44470 - DNA, 20 bp, Artificial Sequence
  primer
cctcagggaatcaaagccag

SEQ ID NO: 44471 - DNA, 19 bp, Artificial Sequence
  primer
gggaagtcccttctggacc

SEQ ID NO: 44472 - DNA, 38 bp, Artificial Sequence
  primer
gtaaaacgacggccagtgcttacgtgagaactccaggg

SEQ ID NO: 44473 - DNA, 36 bp, Artificial Sequence
  primer
gtaaaacgacggccagtggaggagggtctaggtggg

SEQ ID NO: 44474 - DNA, 21 bp, Artificial Sequence
  primer
aacctctgtgattcttgtggg

SEQ ID NO: 44475 - DNA, 38 bp, Artificial Sequence
  primer
gtaaaacgacggccagtctttgcctttgtgtaagcacc

SEQ ID NO: 44476 - DNA, 44 bp, Artificial Sequence
  primer
gtaaaacgacggccagtttctgaaattcatgtcattactattgc

SEQ ID NO: 44477 - DNA, 21 bp, Artificial Sequence
  primer
atcagcctttgccttgtatgc

SEQ ID NO: 44478 - DNA, 21 bp, Artificial Sequence
  primer
ttgccatagctggtctcaaac

SEQ ID NO: 44479 - DNA, 38 bp, Artificial Sequence
  primer
gtaaaacgacggccagtgagcttcccatatccctaccc

SEQ ID NO: 44480 - DNA, 38 bp, Artificial Sequence
  primer
gtaaaacgacggccagtaaagcaacagtcaggttggtg

SEQ ID NO: 44481 - DNA, 18 bp, Artificial Sequence
  primer
acgtgaaaggcaagtgcg

SEQ ID NO: 44482 - DNA, 22 bp, Artificial Sequence
  primer
ttaaaggttcagtgtggttggg

SEQ ID NO: 44483 - DNA, 38 bp, Artificial Sequence
  primer
gtaaaacgacggccagttttattccctgcttccacagc

SEQ ID NO: 44484 - DNA, 19 bp, Artificial Sequence
  primer
ctgctcatcagcaaccagc

SEQ ID NO: 44485 - DNA, 38 bp, Artificial Sequence
  primer
gtaaaacgacggccagtgactggacactgtctgcaagc

SEQ ID NO: 44486 - DNA, 22 bp, Artificial Sequence
  primer
tgtgtttctcttggtatggtgc

SEQ ID NO: 44487 - DNA, 21 bp, Artificial Sequence
  primer
ttctgtgtctctgggttcagg

SEQ ID NO: 44488 - DNA, 37 bp, Artificial Sequence
  primer
gtaaaacgacggccagtcatcttggctgaggcatttc

SEQ ID NO: 44489 - DNA, 38 bp, Artificial Sequence
  primer
gtaaaacgacggccagtgaagctgccctgtactcttgg

SEQ ID NO: 44490 - DNA, 21 bp, Artificial Sequence
  primer
cacccacttaaagttgcctcc

SEQ ID NO: 44491 - DNA, 38 bp, Artificial Sequence
  primer
gtaaaacgacggccagtgcgtctaacctgtgtaagccc

SEQ ID NO: 44492 - DNA, 21 bp, Artificial Sequence
  primer
gaggctgagactgcattgttg

SEQ ID NO: 44493 - DNA, 38 bp, Artificial Sequence
  primer
gtaaaacgacggccagtaggaattctgggttcctgaag

SEQ ID NO: 44494 - DNA, 37 bp, Artificial Sequence
  primer
gtaaaacgacggccagtttctgtctccttcccttgcc

SEQ ID NO: 44495 - DNA, 38 bp, Artificial Sequence
  primer
gtaaaacgacggccagtctttcttgtgttctttgcgcc

SEQ ID NO: 44496 - DNA, 38 bp, Artificial Sequence
  primer
gtaaaacgacggccagtgagctggagcctggaacatac

SEQ ID NO: 44497 - DNA, 39 bp, Artificial Sequence
  primer
gtaaaacgacggccagtcctcaaggctgagattgaagag

SEQ ID NO: 44498 - DNA, 38 bp, Artificial Sequence
  primer
gtaaaacgacggccagtgtagggtcttcagtgcttgcc

SEQ ID NO: 44499 - DNA, 21 bp, Artificial Sequence
  primer
ctggaagttgtgaggcaacag

SEQ ID NO: 44500 - DNA, 37 bp, Artificial Sequence
  primer
gtaaaacgacggccagtgatctcgacctcatgatccg

SEQ ID NO: 44501 - DNA, 38 bp, Artificial Sequence
  primer
gtaaaacgacggccagtcaggtacatgcccactgtttg

SEQ ID NO: 44502 - DNA, 38 bp, Artificial Sequence
  primer
gtaaaacgacggccagtatctactggagcaaggcatgg

SEQ ID NO: 44503 - DNA, 38 bp, Artificial Sequence
  primer
gtaaaacgacggccagtgctttctctcccatgtgtgtc

SEQ ID NO: 44504 - DNA, 21 bp, Artificial Sequence
  primer
gtgactcctgactccctcacc

SEQ ID NO: 44505 - DNA, 21 bp, Artificial Sequence
  primer
ggcctggtttgctcttagatg

SEQ ID NO: 44506 - DNA, 38 bp, Artificial Sequence
  primer
gtaaaacgacggccagtccaaagccatatcagggaaac

SEQ ID NO: 44507 - DNA, 21 bp, Artificial Sequence
  primer
ctgcatgagtgtggaggtagg

SEQ ID NO: 44508 - DNA, 20 bp, Artificial Sequence
  primer
gggaagggaaggaaactgag

SEQ ID NO: 44509 - DNA, 38 bp, Artificial Sequence
  primer
gtaaaacgacggccagtgatggctgggtagaaggtgtg

SEQ ID NO: 44510 - DNA, 21 bp, Artificial Sequence
  primer
gagcaccatcctgcctagaag

SEQ ID NO: 44511 - DNA, 38 bp, Artificial Sequence
  primer
gtaaaacgacggccagtcaagacggcttgggagttaag

SEQ ID NO: 44512 - DNA, 38 bp, Artificial Sequence
  primer
gtaaaacgacggccagtcagggctattccaaggacctc

SEQ ID NO: 44513 - DNA, 21 bp, Artificial Sequence
  primer
cattgtaccctgtcttgtggc

SEQ ID NO: 44514 - DNA, 21 bp, Artificial Sequence
  primer
gggaagagtaggaatggagcc

SEQ ID NO: 44515 - DNA, 37 bp, Artificial Sequence
  primer
gtaaaacgacggccagtagatctctgccatgaggctg

SEQ ID NO: 44516 - DNA, 21 bp, Artificial Sequence
  primer
tcttcccagcagtgttctttg

SEQ ID NO: 44517 - DNA, 21 bp, Artificial Sequence
  primer
agttgggccttacaggatgag

SEQ ID NO: 44518 - DNA, 38 bp, Artificial Sequence
  primer
gtaaaacgacggccagttctcagaagccctagtcaccc

SEQ ID NO: 44519 - DNA, 38 bp, Artificial Sequence
  primer
gtaaaacgacggccagtgagacttcctgctcatctgcc

SEQ ID NO: 44520 - DNA, 38 bp, Artificial Sequence
  primer
gtaaaacgacggccagtcaccgtttactgtcaggtccc

SEQ ID NO: 44521 - DNA, 38 bp, Artificial Sequence
  primer
gtaaaacgacggccagtgtagggcccagtcacctaatg

SEQ ID NO: 44522 - DNA, 38 bp, Artificial Sequence
  primer
gtaaaacgacggccagtccctcacagtcacctgagacc

SEQ ID NO: 44523 - DNA, 38 bp, Artificial Sequence
  primer
gtaaaacgacggccagtcagccctctagctgtcctcag

SEQ ID NO: 44524 - DNA, 21 bp, Artificial Sequence
  primer
atcccagtgacctccagctac

SEQ ID NO: 44525 - DNA, 39 bp, Artificial Sequence
  primer
gtaaaacgacggccagttggcagagaagtggcttagatg

SEQ ID NO: 44526 - DNA, 38 bp, Artificial Sequence
  primer
gtaaaacgacggccagtaggcagagtagagcaggatcg

SEQ ID NO: 44527 - DNA, 38 bp, Artificial Sequence
  primer
gtaaaacgacggccagtcagggatcagctagtgggttc

SEQ ID NO: 44528 - DNA, 21 bp, Artificial Sequence
  primer
gatagttgggtttgggtttgc

SEQ ID NO: 44529 - DNA, 38 bp, Artificial Sequence
  primer
gtaaaacgacggccagtatgcttgtcccaacttccatc

SEQ ID NO: 44530 - DNA, 38 bp, Artificial Sequence
  primer
gtaaaacgacggccagtctctgcccacttgatcctttc

SEQ ID NO: 44531 - DNA, 37 bp, Artificial Sequence
  primer
gtaaaacgacggccagtcagctgccaggagtgctaag

SEQ ID NO: 44532 - DNA, 22 bp, Artificial Sequence
  primer
gaattccttcaggtcctcatcc

SEQ ID NO: 44533 - DNA, 38 bp, Artificial Sequence
  primer
gtaaaacgacggccagtgaggagtaacttccggcactg

SEQ ID NO: 44534 - DNA, 38 bp, Artificial Sequence
  primer
gtaaaacgacggccagttaaggattcctggaaggtggg

SEQ ID NO: 44535 - DNA, 38 bp, Artificial Sequence
  primer
gtaaaacgacggccagtgtggagagatagggaagtggg

SEQ ID NO: 44536 - DNA, 39 bp, Artificial Sequence
  primer
gtaaaacgacggccagtggatggaaatgtgcacctagag

SEQ ID NO: 44537 - DNA, 21 bp, Artificial Sequence
  primer
agtaagactggagtgggcagg

SEQ ID NO: 44538 - DNA, 38 bp, Artificial Sequence
  primer
gtaaaacgacggccagtaagtgctcccatagccatttg

SEQ ID NO: 44539 - DNA, 21 bp, Artificial Sequence
  primer
taatgggtgctgtccctaagc

SEQ ID NO: 44540 - DNA, 37 bp, Artificial Sequence
  primer
gtaaaacgacggccagtttccatccgtctttggactg

SEQ ID NO: 44541 - DNA, 38 bp, Artificial Sequence
  primer
gtaaaacgacggccagtggacgaggtgggaaacctaac

SEQ ID NO: 44542 - DNA, 41 bp, Artificial Sequence
  primer
gtaaaacgacggccagtaggtgactgaagaagaataaaccc

SEQ ID NO: 44543 - DNA, 23 bp, Artificial Sequence
  primer
ttaaagcaaagttggtaagaggc

SEQ ID NO: 44544 - DNA, 36 bp, Artificial Sequence
  primer
gtaaaacgacggccagtcagtggctgtgcattggtg

SEQ ID NO: 44545 - DNA, 20 bp, Artificial Sequence
  primer
attgcccatttcttcccatc

SEQ ID NO: 44546 - DNA, 39 bp, Artificial Sequence
  primer
gtaaaacgacggccagttccctgagcttctcatgctatc

SEQ ID NO: 44547 - DNA, 42 bp, Artificial Sequence
  primer
gtaaaacgacggccagttcatagactgaggataatcaggtgg

SEQ ID NO: 44548 - DNA, 45 bp, Artificial Sequence
  primer
gtaaaacgacggccagtaacagctgtaatagaggtaattgtttga

SEQ ID NO: 44549 - DNA, 40 bp, Artificial Sequence
  primer
gtaaaacgacggccagtttctcgtaaatgctgtccttctg

SEQ ID NO: 44550 - DNA, 25 bp, Artificial Sequence
  primer
gggcagtttcaactagaaatatacg

SEQ ID NO: 44551 - DNA, 21 bp, Artificial Sequence
  primer
gccctttcagtggaatctgtc

SEQ ID NO: 44552 - DNA, 38 bp, Artificial Sequence
  primer
gtaaaacgacggccagttgaaacttgctgtgtgcttcc

SEQ ID NO: 44553 - DNA, 23 bp, Artificial Sequence
  primer
gtgtgctgaaggaaagaataagg

SEQ ID NO: 44554 - DNA, 38 bp, Artificial Sequence
  primer
gtaaaacgacggccagtctacccatctctatgcagggc

SEQ ID NO: 44555 - DNA, 38 bp, Artificial Sequence
  primer
gtaaaacgacggccagtcaatgtcacggtagctcctcc

SEQ ID NO: 44556 - DNA, 38 bp, Artificial Sequence
  primer
gtaaaacgacggccagtctcagtcaccttccacccttc

SEQ ID NO: 44557 - DNA, 18 bp, Artificial Sequence
  primer
ggtgccactgtaccagcc

SEQ ID NO: 44558 - DNA, 38 bp, Artificial Sequence
  primer
gtaaaacgacggccagtaagagttctggcaagggtgag

SEQ ID NO: 44559 - DNA, 21 bp, Artificial Sequence
  primer
actgcctgcctctgtgttgtc

SEQ ID NO: 44560 - DNA, 21 bp, Artificial Sequence
  primer
cctgagctcaaatcatcctcc

SEQ ID NO: 44561 - DNA, 21 bp, Artificial Sequence
  primer
gcaggtaaatttctggctgtg

SEQ ID NO: 44562 - DNA, 38 bp, Artificial Sequence
  primer
gtaaaacgacggccagtactcaaataattgggcatggg

SEQ ID NO: 44563 - DNA, 21 bp, Artificial Sequence
  primer
ttccagtgtattgcttggcac

SEQ ID NO: 44564 - DNA, 21 bp, Artificial Sequence
  primer
actcttgggtgagattgccac

SEQ ID NO: 44565 - DNA, 21 bp, Artificial Sequence
  primer
aattgaagatcgctaggccac

SEQ ID NO: 44566 - DNA, 21 bp, Artificial Sequence
  primer
tgtggacctcaagtcatttgg

SEQ ID NO: 44567 - DNA, 38 bp, Artificial Sequence
  primer
gtaaaacgacggccagtgttaaagtgcaggcgttaggc

SEQ ID NO: 44568 - DNA, 38 bp, Artificial Sequence
  primer
gtaaaacgacggccagtatgtattggaaacacgcttgc

SEQ ID NO: 44569 - DNA, 38 bp, Artificial Sequence
  primer
gtaaaacgacggccagtatcacttagagccttaggccg

SEQ ID NO: 44570 - DNA, 21 bp, Artificial Sequence
  primer
gagtcctgccattctgagttg

SEQ ID NO: 44571 - DNA, 21 bp, Artificial Sequence
  primer
gcacaaagacactggctgttc

SEQ ID NO: 44572 - DNA, 38 bp, Artificial Sequence
  primer
gtaaaacgacggccagtcaatattcctgcaggtcaggg

SEQ ID NO: 44573 - DNA, 21 bp, Artificial Sequence
  primer
acgctcaggtctctgaggttc

SEQ ID NO: 44574 - DNA, 21 bp, Artificial Sequence
  primer
aggaattgcacctaaggttgg

SEQ ID NO: 44575 - DNA, 38 bp, Artificial Sequence
  primer
gtaaaacgacggccagtgatgatggcctagatgggaag

SEQ ID NO: 44576 - DNA, 38 bp, Artificial Sequence
  primer
gtaaaacgacggccagtgatggttattgcggtttccag

SEQ ID NO: 44577 - DNA, 22 bp, Artificial Sequence
  primer
ccaaatcacttggttgtctgtg

SEQ ID NO: 44578 - DNA, 21 bp, Artificial Sequence
  primer
tggtacaagggtacctccctg

SEQ ID NO: 44579 - DNA, 38 bp, Artificial Sequence; identical to SEQ ID NO: 44576
  primer

SEQ ID NO: 44580 - DNA, 38 bp, Artificial Sequence; identical to SEQ ID NO: 44572
  primer

SEQ ID NO: 44581 - DNA, 21 bp, Artificial Sequence
  primer
acgctcaggtctctgaggttc

SEQ ID NO: 44582 - DNA, 38 bp, Artificial Sequence
  primer
gtaaaacgacggccagtgatttcaagcacggaagatgg

SEQ ID NO: 44583 - DNA, 36 bp, Artificial Sequence
  primer
gtaaaacgacggccagtacatggagctgttcctcgc

SEQ ID NO: 44584 - DNA, 21 bp, Artificial Sequence
  primer
actcctttacttgtccggctg

SEQ ID NO: 44585 - DNA, 36 bp, Artificial Sequence
  primer
gtaaaacgacggccagtacaggtgagcctgtgaggg

SEQ ID NO: 44586 - DNA, 38 bp, Artificial Sequence
  primer
gtaaaacgacggccagttcggcctctagatcctttgag

SEQ ID NO: 44587 - DNA, 38 bp, Artificial Sequence
  primer
gtaaaacgacggccagtatcgtgaatgtctccagccag

SEQ ID NO: 44588 - DNA, 36 bp, Artificial Sequence
  primer
gtaaaacgacggccagtttcgtaggctccaccaagg

SEQ ID NO: 44589 - DNA, 21 bp, Artificial Sequence
  primer
gcaagtttgctggtgagtcag

SEQ ID NO: 44590 - DNA, 20 bp, Artificial Sequence
  primer
gtatcgttcccggaggtagc

SEQ ID NO: 44591 - DNA, 38 bp, Artificial Sequence
  primer
gtaaaacgacggccagttatggtttctctccggctcag

SEQ ID NO: 44592 - DNA, 21 bp, Artificial Sequence
  primer
ctcccttgcataatcctcctg

SEQ ID NO: 44593 - DNA, 23 bp, Artificial Sequence
  primer
ttctacccttccttactgggatg

SEQ ID NO: 44594 - DNA, 36 bp, Artificial Sequence
  primer
gtaaaacgacggccagtagcagccagtgaggagacc

SEQ ID NO: 44595 - DNA, 39 bp, Artificial Sequence
  primer
gtaaaacgacggccagtttcaaatacctcatggtcaggg

SEQ ID NO: 44596 - DNA, 38 bp, Artificial Sequence
  primer
gtaaaacgacggccagttggaaagatggagagaggagg

SEQ ID NO: 44597 - DNA, 21 bp, Artificial Sequence
  primer
ctccttctgcaccacattcag

SEQ ID NO: 44598 - DNA, 39 bp, Artificial Sequence
  primer
gtaaaacgacggccagttgtgcacgagagcttgatttag

SEQ ID NO: 44599 - DNA, 24 bp, Artificial Sequence
  primer
tggtaagagagaactgtgtgatgc

SEQ ID NO: 44600 - DNA, 38 bp, Artificial Sequence
  primer
gtaaaacgacggccagttattcaaggtccctgtcagcc

SEQ ID NO: 44601 - DNA, 38 bp, Artificial Sequence
  primer
gtaaaacgacggccagttaccacactgccttccttctg

SEQ ID NO: 44602 - DNA, 38 bp, Artificial Sequence
  primer
gtaaaacgacggccagtgcatgtgtgtggttgagactg

SEQ ID NO: 44603 - DNA, 22 bp, Artificial Sequence
  primer
tctgtttcttctcccagacagg

SEQ ID NO: 44604 - DNA, 38 bp, Artificial Sequence
  primer
gtaaaacgacggccagtaggcagaaggaactggatgtc

SEQ ID NO: 44605 - DNA, 38 bp, Artificial Sequence
  primer
gtaaaacgacggccagtgtagagtttgggagactcggc

SEQ ID NO: 44606 - DNA, 38 bp, Artificial Sequence
  primer
gtaaaacgacggccagtgcagagagcagcctatgtttg

SEQ ID NO: 44607 - DNA, 38 bp, Artificial Sequence
  primer
gtaaaacgacggccagtcagcccttagtggtggttgag

SEQ ID NO: 44608 - DNA, 38 bp, Artificial Sequence
  primer
gtaaaacgacggccagtcttctctagaagcctgggtgg

SEQ ID NO: 44609 - DNA, 36 bp, Artificial Sequence
  primer
gtaaaacgacggccagtcctgcaacgtgtctctggg

SEQ ID NO: 44610 - DNA, 38 bp, Artificial Sequence
  primer
gtaaaacgacggccagtggagtagctggagggagttgg

SEQ ID NO: 44611 - DNA, 40 bp, Artificial Sequence
  primer
gtaaaacgacggccagttttggtgtgcttaaagactggac

SEQ ID NO: 44612 - DNA, 35 bp, Artificial Sequence
  primer
gtaaaacgacggccagttctgcacaagtggtgccc

SEQ ID NO: 44613 - DNA, 21 bp, Artificial Sequence
  primer
tgggtagtggtggcttattcc

SEQ ID NO: 44614 - DNA, 38 bp, Artificial Sequence
  primer
gtaaaacgacggccagtgaccttaaagtttgccttggg

SEQ ID NO: 44615 - DNA, 38 bp, Artificial Sequence
  primer
gtaaaacgacggccagtggagtggtccagtagggtttg

SEQ ID NO: 44616 - DNA, 38 bp, Artificial Sequence
  primer
gtaaaacgacggccagtctgaattatggctgcagttgg

SEQ ID NO: 44617 - DNA, 38 bp, Artificial Sequence
  primer
gtaaaacgacggccagttctggaatcatcccttggaac

SEQ ID NO: 44618 - DNA, 38 bp, Artificial Sequence
  primer
gtaaaacgacggccagttctgcatcctcaaacctagcc

SEQ ID NO: 44619 - DNA, 37 bp, Artificial Sequence
  primer
gtaaaacgacggccagtctgccttcccaagtgttgag

SEQ ID NO: 44620 - DNA, 22 bp, Artificial Sequence
  primer
cgtgagactgatgacactttgg

SEQ ID NO: 44621 - DNA, 38 bp, Artificial Sequence
  primer
gtaaaacgacggccagttaccacctttccactcctgtg

SEQ ID NO: 44622 - DNA, 21 bp, Artificial Sequence
  primer
taggcagggccctctactatc

SEQ ID NO: 44623 - DNA, 38 bp, Artificial Sequence
  primer
gtaaaacgacggccagtgctcgtatcttgaagttgccc

SEQ ID NO: 44624 - DNA, 21 bp, Artificial Sequence
  primer
ttcttagtcccagggttctgc

SEQ ID NO: 44625 - DNA, 38 bp, Artificial Sequence
  primer
gtaaaacgacggccagtagctggtgtaatcctgccttg

SEQ ID NO: 44626 - DNA, 38 bp, Artificial Sequence
  primer
gtaaaacgacggccagtaacccagacccttctttccag

SEQ ID NO: 44627 - DNA, 21 bp, Artificial Sequence
  primer
gggtcccttcacaatgatgtc

SEQ ID NO: 44628 - DNA, 21 bp, Artificial Sequence
  primer
ttgtcactgcctaagccacag

SEQ ID NO: 44629 - DNA, 38 bp, Artificial Sequence
  primer
gtaaaacgacggccagtgcaagaatttgtaccacaggg

SEQ ID NO: 44630 - DNA, 21 bp, Artificial Sequence
  primer
gatgaagggtcgaagagttgg

SEQ ID NO: 44631 - DNA, 39 bp, Artificial Sequence
  primer
gtaaaacgacggccagtccatgctatatcttctgcaggg

SEQ ID NO: 44632 - DNA, 38 bp, Artificial Sequence
  primer
gtaaaacgacggccagtcacctctttagactggctccc

SEQ ID NO: 44633 - DNA, 21 bp, Artificial Sequence
  primer
ctgataccagcattctgaggg

SEQ ID NO: 44634 - DNA, 39 bp, Artificial Sequence
  primer
gtaaaacgacggccagttgtggtcttattcaaaggtggg

SEQ ID NO: 44635 - DNA, 38 bp, Artificial Sequence
  primer
gtaaaacgacggccagtgtggagtcttgtgcctccttc

SEQ ID NO: 44636 - DNA, 37 bp, Artificial Sequence
  primer
gtaaaacgacggccagtgcttagctcggctacctgtg

SEQ ID NO: 44637 - DNA, 38 bp, Artificial Sequence
  primer
gtaaaacgacggccagtattaaccgtgccgaatgaaac

SEQ ID NO: 44638 - DNA, 22 bp, Artificial Sequence
  primer
ggacttggatctagggctcatc

SEQ ID NO: 44639 - DNA, 22 bp, Artificial Sequence
  primer
ccctgtagagagcgtcctagtg

SEQ ID NO: 44640 - DNA, 21 bp, Artificial Sequence
  primer
tccacggcaagacagttattc

SEQ ID NO: 44641 - DNA, 38 bp, Artificial Sequence
  primer
gtaaaacgacggccagtgtggtcacaggagacaacgtg

SEQ ID NO: 44642 - DNA, 22 bp, Artificial Sequence
  primer
ccagattcacctcttcctttcc

SEQ ID NO: 44643 - DNA, 38 bp, Artificial Sequence
  primer
gtaaaacgacggccagttgcactcagcccaaagaatac

SEQ ID NO: 44644 - DNA, 38 bp, Artificial Sequence
  primer
gtaaaacgacggccagtggcttgggtcctcaaataatg

SEQ ID NO: 44645 - DNA, 37 bp, Artificial Sequence
  primer
gtaaaacgacggccagttagccaggatggtctcggtc

SEQ ID NO: 44646 - DNA, 36 bp, Artificial Sequence
  primer
gtaaaacgacggccagtagtcactgcccaggtgtcc

SEQ ID NO: 44647 - DNA, 21 bp, Artificial Sequence
  primer
tcacctaactctgggtctggc

SEQ ID NO: 44648 - DNA, 38 bp, Artificial Sequence
  primer
gtaaaacgacggccagtttcaggcctttgaatcacatc

SEQ ID NO: 44649 - DNA, 38 bp, Artificial Sequence
  primer
gtaaaacgacggccagtcagctgaagtggtggtctcag

SEQ ID NO: 44650 - DNA, 37 bp, Artificial Sequence
  primer
gtaaaacgacggccagtgtttgcaatgttggctgctc

SEQ ID NO: 44651 - DNA, 21 bp, Artificial Sequence
  primer
agacattcattgggatctcgg

SEQ ID NO: 44652 - DNA, 38 bp, Artificial Sequence
  primer
gtaaaacgacggccagttactgttggcatgctctaccc

SEQ ID NO: 44653 - DNA, 35 bp, Artificial Sequence
  primer
gtaaaacgacggccagtcctgggcaaccctacctg

SEQ ID NO: 44654 - DNA, 37 bp, Artificial Sequence
  primer
gtaaaacgacggccagtcaggcagagtggtgttcagg

SEQ ID NO: 44655 - DNA, 19 bp, Artificial Sequence
  primer
tttgggcatcctgttctcg

SEQ ID NO: 44656 - DNA, 35 bp, Artificial Sequence
  primer
gtaaaacgacggccagtaataggcgagccggtgag

SEQ ID NO: 44657 - DNA, 38 bp, Artificial Sequence
  primer
gtaaaacgacggccagtgaaacagctggtcagtgaacg

SEQ ID NO: 44658 - DNA, 21 bp, Artificial Sequence
  primer
ctgatgtacggtagggttgcc

SEQ ID NO: 44659 - DNA, 38 bp, Artificial Sequence
  primer
gtaaaacgacggccagttttctggacagccactctgtg

SEQ ID NO: 44660 - DNA, 19 bp, Artificial Sequence
  primer
ggcttggagtttgaagggc

SEQ ID NO: 44661 - DNA, 22 bp, Artificial Sequence
  primer
ttgctgttgctttggtactcag

SEQ ID NO: 44662 - DNA, 22 bp, Artificial Sequence
  primer
tcgtagtgatcggtgttcaaag

SEQ ID NO: 44663 - DNA, 37 bp, Artificial Sequence
  primer
gtaaaacgacggccagttcaacagagcctggtgtgtg

SEQ ID NO: 44664 - DNA, 21 bp, Artificial Sequence
  primer
acagtgagctgtgattgtggc

SEQ ID NO: 44665 - DNA, 25 bp, Artificial Sequence
  primer
gaacctacatagacacatcgtcacc

SEQ ID NO: 44666 - DNA, 39 bp, Artificial Sequence
  primer
gtaaaacgacggccagttggtaacttgtgcagattcagg

SEQ ID NO: 44667 - DNA, 22 bp, Artificial Sequence
  primer
tgggactgcaactgtaatttcc

SEQ ID NO: 44668 - DNA, 26 bp, Artificial Sequence
  primer
tgcatgttgcattattcactaatttc

SEQ ID NO: 44669 - DNA, 38 bp, Artificial Sequence
  primer
gtaaaacgacggccagttcccttagacccagaccagtg

SEQ ID NO: 44670 - DNA, 39 bp, Artificial Sequence
  primer
gtaaaacgacggccagttgtgtgaattaccttccacctg

SEQ ID NO: 44671 - DNA, 39 bp, Artificial Sequence
  primer
gtaaaacgacggccagtggccttatgaacagcatacctg

SEQ ID NO: 44672 - DNA, 21 bp, Artificial Sequence
  primer
gtcactgaacctcttggagcc

SEQ ID NO: 44673 - DNA, 24 bp, Artificial Sequence
  primer
tctcaccttccttcaagtttgatt

SEQ ID NO: 44674 - DNA, 40 bp, Artificial Sequence
  primer
gtaaaacgacggccagtttagcttcctctgtagttggcac

SEQ ID NO: 44675 - DNA, 38 bp, Artificial Sequence
  primer
gtaaaacgacggccagtttgtagaccagatggacggtg

SEQ ID NO: 44676 - DNA, 25 bp, Artificial Sequence
  primer
ttctgtctctgttggagtaatttgg

SEQ ID NO: 44677 - DNA, 20 bp, Artificial Sequence
  primer
tgggtggccatgtctaaatc

SEQ ID NO: 44678 - DNA, 41 bp, Artificial Sequence
  primer
gtaaaacgacggccagtcaaatttgactcagttgtcagcac

SEQ ID NO: 44679 - DNA, 38 bp, Artificial Sequence
  primer
gtaaaacgacggccagttagtaagcgtgtgttgcatgg

SEQ ID NO: 44680 - DNA, 38 bp, Artificial Sequence
  primer
gtaaaacgacggccagttaaggtgggatttgctcagtg

SEQ ID NO: 44681 - DNA, 21 bp, Artificial Sequence
  primer
agctcagagagccacaggaac

SEQ ID NO: 44682 - DNA, 21 bp, Artificial Sequence
  primer
tggagttagccatatccagcc

SEQ ID NO: 44683 - DNA, 38 bp, Artificial Sequence
  primer
gtaaaacgacggccagtacaggccaaacccatgtattc

SEQ ID NO: 44684 - DNA, 18 bp, Artificial Sequence
  primer
ggtggtgggcacctgtaa

SEQ ID NO: 44685 - DNA, 38 bp, Artificial Sequence
  primer
gtaaaacgacggccagttttccgattctctgcaatctg

SEQ ID NO: 44686 - DNA, 21 bp, Artificial Sequence
  primer
tccctagacaaagccaccatc

SEQ ID NO: 44687 - DNA, 21 bp, Artificial Sequence
  primer
ggtgaggaaatcaaggctcag

SEQ ID NO: 44688 - DNA, 38 bp, Artificial Sequence
  primer
gtaaaacgacggccagtagaagggtaagcctgggattc

SEQ ID NO: 44689 - DNA, 18 bp, Artificial Sequence
  primer
ctcgctctgagaggacgc

SEQ ID NO: 44690 - DNA, 21 bp, Artificial Sequence
  primer
aggcttgtctcccagaaacag

SEQ ID NO: 44691 - DNA, 38 bp, Artificial Sequence
  primer
gtaaaacgacggccagtacaaccgagaagaacctggtg

SEQ ID NO: 44692 - DNA, 23 bp, Artificial Sequence
  primer
tctctctaatgtccttgctgtcc

SEQ ID NO: 44693 - DNA, 38 bp, Artificial Sequence
  primer
gtaaaacgacggccagtagaaaggaaatgccaccactg

SEQ ID NO: 44694 - DNA, 38 bp, Artificial Sequence
  primer
gtaaaacgacggccagttgacatcttcgtgaggacacc

SEQ ID NO: 44695 - DNA, 38 bp, Artificial Sequence
  primer
gtaaaacgacggccagtagaaacggttacggaatccag

SEQ ID NO: 44696 - DNA, 24 bp, Artificial Sequence
  primer
cccgttataaactgaaactcaagg

SEQ ID NO: 44697 - DNA, 20 bp, Artificial Sequence
  primer
tgtcgcattgtgtggaaatg

SEQ ID NO: 44698 - DNA, 21 bp, Artificial Sequence
  primer
ttctccagcctgatagatggc

SEQ ID NO: 44699 - DNA, 38 bp, Artificial Sequence
  primer
gtaaaacgacggccagtagcctcagggaaacaaggaac

SEQ ID NO: 44700 - DNA, 21 bp, Artificial Sequence
  primer
tctgtcaagtctgaaggccac

SEQ ID NO: 44701 - DNA, 20 bp, Artificial Sequence
  primer
tgaaggcagacatttggagg

SEQ ID NO: 44702 - DNA, 40 bp, Artificial Sequence
  primer
gtaaaacgacggccagtttgaaattcctcttgctatgcag

SEQ ID NO: 44703 - DNA, 21 bp, Artificial Sequence
  primer
gctcatgctcagaactgcttg

SEQ ID NO: 44704 - DNA, 38 bp, Artificial Sequence
  primer
gtaaaacgacggccagtataggcatgccgcttcttatc

SEQ ID NO: 44705 - DNA, 38 bp, Artificial Sequence
  primer
gtaaaacgacggccagtcatggccttagacaaagggag

SEQ ID NO: 44706 - DNA, 38 bp, Artificial Sequence
  primer
gtaaaacgacggccagttacacgatttcaccggtgttg

SEQ ID NO: 44707 - DNA, 21 bp, Artificial Sequence
  primer
ggactgtctgcctttcctgtg

SEQ ID NO: 44708 - DNA, 21 bp, Artificial Sequence
  primer
aaattgtcctggatgtcaggc

SEQ ID NO: 44709 - DNA, 20 bp, Artificial Sequence
  primer
gcacacttcagtgggtccag

SEQ ID NO: 44710 - DNA, 38 bp, Artificial Sequence
  primer
gtaaaacgacggccagtccagcagagttggtgtcagtg

SEQ ID NO: 44711 - DNA, 38 bp, Artificial Sequence
  primer
gtaaaacgacggccagtgtgtctatcttccacatgccg

SEQ ID NO: 44712 - DNA, 21 bp, Artificial Sequence
  primer
aactggcaaggaaatagcagc

SEQ ID NO: 44713 - DNA, 38 bp, Artificial Sequence
  primer
gtaaaacgacggccagtaccacctcacacactctgagc

SEQ ID NO: 44714 - DNA, 21 bp, Artificial Sequence
  primer
catccaagtcagaaggttccc

SEQ ID NO: 44715 - DNA, 37 bp, Artificial Sequence
  primer
gtaaaacgacggccagtagggtgcttgagctctctgc

SEQ ID NO: 44716 - DNA, 38 bp, Artificial Sequence
  primer
gtaaaacgacggccagtagagctccttacacgggagag

SEQ ID NO: 44717 - DNA, 18 bp, Artificial Sequence
  primer
agctgaggagcggagagc

SEQ ID NO: 44718 - DNA, 21 bp, Artificial Sequence
  primer
aatgtatttgtttggagggcg

SEQ ID NO: 44719 - DNA, 38 bp, Artificial Sequence
  primer
gtaaaacgacggccagtcttggtaagtgagcctcctgg

SEQ ID NO: 44720 - DNA, 38 bp, Artificial Sequence
  primer
gtaaaacgacggccagtcttcactgtacaccgaatccc

SEQ ID NO: 44721 - DNA, 21 bp, Artificial Sequence
  primer
gccttagctctgagaaatggg

SEQ ID NO: 44722 - DNA, 37 bp, Artificial Sequence
  primer
gtaaaacgacggccagtctttgctcatgcatccttgg

SEQ ID NO: 44723 - DNA, 38 bp, Artificial Sequence
  primer
gtaaaacgacggccagttgggatgtgtcttcctgtctg

SEQ ID NO: 44724 - DNA, 38 bp, Artificial Sequence
  primer
gtaaaacgacggccagttgatccttacggcagcttctc

SEQ ID NO: 44725 - DNA, 38 bp, Artificial Sequence
  primer
gtaaaacgacggccagttaagttgggtctcacccttgg

SEQ ID NO: 44726 - DNA, 38 bp, Artificial Sequence
  primer
gtaaaacgacggccagtagggagagaaggaagacccac

SEQ ID NO: 44727 - DNA, 21 bp, Artificial Sequence
  primer
gggagtgaggctgtgtttctc

SEQ ID NO: 44728 - DNA, 38 bp, Artificial Sequence
  primer
gtaaaacgacggccagtcacttcacatccttgaggtgc

SEQ ID NO: 44729 - DNA, 21 bp, Artificial Sequence
  primer
agtccgacttgtcagggacac

SEQ ID NO: 44730 - DNA, 38 bp, Artificial Sequence
  primer
gtaaaacgacggccagtacaaccggacgtaccactttc

SEQ ID NO: 44731 - DNA, 38 bp, Artificial Sequence
  primer
gtaaaacgacggccagtgacctcacaaagctgctcatc

SEQ ID NO: 44732 - DNA, 35 bp, Artificial Sequence
  primer
gtaaaacgacggccagtaggtagcgggtggtcagg

SEQ ID NO: 44733 - DNA, 38 bp, Artificial Sequence
  primer
gtaaaacgacggccagtagctgtatctcctgtgggagg

SEQ ID NO: 44734 - DNA, 22 bp, Artificial Sequence
  primer
tcaagagggaaatactgggttg

SEQ ID NO: 44735 - DNA, 38 bp, Artificial Sequence
  primer
gtaaaacgacggccagttctgtctggctcctcacactc

SEQ ID NO: 44736 - DNA, 38 bp, Artificial Sequence
  primer
gtaaaacgacggccagtccagaggcccgtcttaatctc

SEQ ID NO: 44737 - DNA, 38 bp, Artificial Sequence
  primer
gtaaaacgacggccagtcacaaggagtgtgaggagctg

SEQ ID NO: 44738 - DNA, 20 bp, Artificial Sequence
  primer
aaggaaagagccagattggg

SEQ ID NO: 44739 - DNA, 38 bp, Artificial Sequence
  primer
gtaaaacgacggccagtagagactgctttgaggttggg

SEQ ID NO: 44740 - DNA, 21 bp, Artificial Sequence
  primer
tctgttcctgagccctttctc

SEQ ID NO: 44741 - DNA, 38 bp, Artificial Sequence
  primer
gtaaaacgacggccagtagtggcttcacttcctcaagc

SEQ ID NO: 44742 - DNA, 21 bp, Artificial Sequence
  primer
tagaaacttcgggtggagagg

SEQ ID NO: 44743 - DNA, 21 bp, Artificial Sequence
  primer
aactatgacttcagctccgcc

SEQ ID NO: 44744 - DNA, 21 bp, Artificial Sequence
  primer
caccgctatgaggtagtgacg

SEQ ID NO: 44745 - DNA, 39 bp, Artificial Sequence
  primer
gtaaaacgacggccagtagctgtggtcacactactgcac

SEQ ID NO: 44746 - DNA, 24 bp, Artificial Sequence
  primer
ccctatccattacttgcttcacat

SEQ ID NO: 44747 - DNA, 21 bp, Artificial Sequence
  primer
ttctggctttggtgttgtgtc

SEQ ID NO: 44748 - DNA, 23 bp, Artificial Sequence
  primer
tggacaaagctataagcaaatgg

SEQ ID NO: 44749 - DNA, 38 bp, Artificial Sequence
  primer
gtaaaacgacggccagtatccattagagccaaagctgg

SEQ ID NO: 44750 - DNA, 43 bp, Artificial Sequence
  primer
gtaaaacgacggccagtaacctaggtatatttgatcggtaatg

SEQ ID NO: 44751 - DNA, 20 bp, Artificial Sequence
  primer
gtgagggatagtgggccatc

SEQ ID NO: 44752 - DNA, 37 bp, Artificial Sequence
  primer
gtaaaacgacggccagtgcagagcccatctggataac

SEQ ID NO: 44753 - DNA, 23 bp, Artificial Sequence
  primer
tcggaggtttacttaacatgcag

SEQ ID NO: 44754 - DNA, 39 bp, Artificial Sequence
  primer
gtaaaacgacggccagttggctataattatgggtggtgc

SEQ ID NO: 44755 - DNA, 43 bp, Artificial Sequence
  primer
gtaaaacgacggccagtagaatcctgtactactgaggctcttt

SEQ ID NO: 44756 - DNA, 20 bp, Artificial Sequence
  primer
cgtgtgtgtgtgcgaacagt

SEQ ID NO: 44757 - DNA, 44 bp, Artificial Sequence
  primer
gtaaaacgacggccagttgtttggtgtttagtcaagtaggaact

SEQ ID NO: 44758 - DNA, 39 bp, Artificial Sequence
  primer
gtaaaacgacggccagttgggcgacagagtaagacaaac

SEQ ID NO: 44759 - DNA, 41 bp, Artificial Sequence
  primer
gtaaaacgacggccagttgtgtggtttgaaagacatgattc

SEQ ID NO: 44760 - DNA, 21 bp, Artificial Sequence
  primer
ctcccaaagtgctgggattac

SEQ ID NO: 44761 - DNA, 41 bp, Artificial Sequence
  primer
gtaaaacgacggccagtaattacatgatttgttgcatccag

SEQ ID NO: 44762 - DNA, 24 bp, Artificial Sequence
  primer
ggcttcattacacatgttcctttg

SEQ ID NO: 44763 - DNA, 22 bp, Artificial Sequence
  primer
tggaaagaaagactccttgctg

SEQ ID NO: 44764 - DNA, 40 bp, Artificial Sequence
  primer
gtaaaacgacggccagtaatttcttaagcactgagctccc

SEQ ID NO: 44765 - DNA, 37 bp, Artificial Sequence
  primer
gtaaaacgacggccagtgtgcctaggccttgttcctc

SEQ ID NO: 44766 - DNA, 38 bp, Artificial Sequence
  primer
gtaaaacgacggccagtgttggacttgaactcttgggc

SEQ ID NO: 44767 - DNA, 39 bp, Artificial Sequence
  primer
gtaaaacgacggccagtgcattgggcaggtaactaattc

SEQ ID NO: 44768 - DNA, 21 bp, Artificial Sequence
  primer
ggctacagtgagccatgattg

SEQ ID NO: 44769 - DNA, 20 bp, Artificial Sequence
  primer
gcaaagggcatcattcactc

SEQ ID NO: 44770 - DNA, 21 bp, Artificial Sequence
  primer
gattgagaggaggaagatggg

SEQ ID NO: 44771 - DNA, 38 bp, Artificial Sequence
  primer
gtaaaacgacggccagtaggtcaccttccaaaccactg

SEQ ID NO: 44772 - DNA, 38 bp, Artificial Sequence
  primer
gtaaaacgacggccagttttggaacacaacgtgctacc

SEQ ID NO: 44773 - DNA, 21 bp, Artificial Sequence
  primer
catgctgatcaccgtgtactg

SEQ ID NO: 44774 - DNA, 21 bp, Artificial Sequence
  primer
ccagcctcgtgtagacttcag

SEQ ID NO: 44775 - DNA, 21 bp, Artificial Sequence
  primer
aaggccttgagagagcaagag

SEQ ID NO: 44776 - DNA, 38 bp, Artificial Sequence
  primer
gtaaaacgacggccagttttggacaagtgacgatgctc

SEQ ID NO: 44777 - DNA, 38 bp, Artificial Sequence
  primer
gtaaaacgacggccagtaaagtgaatgggcatcctttg

SEQ ID NO: 44778 - DNA, 38 bp, Artificial Sequence
  primer
gtaaaacgacggccagtgtgactcactgagcgtgtgtg

SEQ ID NO: 44779 - DNA, 38 bp, Artificial Sequence
  primer
gtaaaacgacggccagtttgaaaggagggtgacatctg

SEQ ID NO: 44780 - DNA, 39 bp, Artificial Sequence
  primer
gtaaaacgacggccagttgagcaagtgttctgctgtttc

SEQ ID NO: 44781 - DNA, 21 bp, Artificial Sequence
  primer
agctttaggcatcctctctgc

SEQ ID NO: 44782 - DNA, 21 bp, Artificial Sequence
  primer
tttggaaatgatctcttgccc

SEQ ID NO: 44783 - DNA, 38 bp, Artificial Sequence
  primer
gtaaaacgacggccagtgcagggcacttgctaggtaga

SEQ ID NO: 44784 - DNA, 38 bp, Artificial Sequence
  primer
gtaaaacgacggccagtcaggattatgccattgcactc

SEQ ID NO: 44785 - DNA, 37 bp, Artificial Sequence
  primer
gtaaaacgacggccagtctggccatttgtgattggag

SEQ ID NO: 44786 - DNA, 38 bp, Artificial Sequence
  primer
gtaaaacgacggccagttgtgagagaatggaagcaacc

SEQ ID NO: 44787 - DNA, 38 bp, Artificial Sequence
  primer
gtaaaacgacggccagtttgccaacttgtggcatagac

SEQ ID NO: 44788 - DNA, 21 bp, Artificial Sequence
  primer
cacctcctggaaatgaagagg

SEQ ID NO: 44789 - DNA, 38 bp, Artificial Sequence
  primer
gtaaaacgacggccagtgagtgtcccttctgtgtgtgg

SEQ ID NO: 44790 - DNA, 21 bp, Artificial Sequence
  primer
taaggtgagtgaggcggaaac

SEQ ID NO: 44791 - DNA, 21 bp, Artificial Sequence
  primer
ttcctgtgtgctctcctttcc

SEQ ID NO: 44792 - DNA, 38 bp, Artificial Sequence
  primer
gtaaaacgacggccagtaaatccgtctcttctcgcctc

SEQ ID NO: 44793 - DNA, 21 bp, Artificial Sequence
  primer
atgttgttcctgaacccaacc

SEQ ID NO: 44794 - DNA, 20 bp, Artificial Sequence
  primer
ctgaacccaacctcaacgag

SEQ ID NO: 44795 - DNA, 39 bp, Artificial Sequence
  primer
gtaaaacgacggccagtgcagaagtccaagctattggtg

SEQ ID NO: 44796 - DNA, 37 bp, Artificial Sequence
  primer
gtaaaacgacggccagtccaagtggtctccagtgctc

SEQ ID NO: 44797 - DNA, 38 bp, Artificial Sequence
  primer
gtaaaacgacggccagtacaaactgctcacctgggttc

SEQ ID NO: 44798 - DNA, 19 bp, Artificial Sequence
  primer
cccaagctacgaggctcac

SEQ ID NO: 44799 - DNA, 20 bp, Artificial Sequence
  primer
ctggatcctcggatctaccg

SEQ ID NO: 44800 - DNA, 21 bp, Artificial Sequence
  primer
gatctggtttcccaaatgctg

SEQ ID NO: 44801 - DNA, 37 bp, Artificial Sequence
  primer
gtaaaacgacggccagtggaaggcgtctttgtcattg

SEQ ID NO: 44802 - DNA, 19 bp, Artificial Sequence
  primer
gaagtaaacctgcgggacg

SEQ ID NO: 44803 - DNA, 21 bp, Artificial Sequence
  primer
tgacaggttgaggtcacttgc

SEQ ID NO: 44804 - DNA, 43 bp, Artificial Sequence
  primer
gtaaaacgacggccagtcacaagaaacaccaataggctaagtc

SEQ ID NO: 44805 - DNA, 20 bp, Artificial Sequence
  primer
taatgttcctccctgcctcc

SEQ ID NO: 44806 - DNA, 21 bp, Artificial Sequence
  primer
acctgggtgatggagtgagac

SEQ ID NO: 44807 - DNA, 21 bp, Artificial Sequence
  primer
ctagaatttggcctgactggg

SEQ ID NO: 44808 - DNA, 38 bp, Artificial Sequence
  primer
gtaaaacgacggccagtactcggcgaatagaagacctg

SEQ ID NO: 44809 - DNA, 21 bp, Artificial Sequence
  primer
agagattctttcccgatgctg

SEQ ID NO: 44810 - DNA, 38 bp, Artificial Sequence
  primer
gtaaaacgacggccagtagggttcaaggaatccacctc

SEQ ID NO: 44811 - DNA, 20 bp, Artificial Sequence
  primer
gtacagcatcgagggcattg

SEQ ID NO: 44812 - DNA, 38 bp, Artificial Sequence
  primer
gtaaaacgacggccagtctctgtgagtgatcgtggctg

SEQ ID NO: 44813 - DNA, 20 bp, Artificial Sequence
  primer
cacaaggaagccaaggacac

SEQ ID NO: 44814 - DNA, 37 bp, Artificial Sequence
  primer
gtaaaacgacggccagtaaagccaagagggtgtgagg

SEQ ID NO: 44815 - DNA, 38 bp, Artificial Sequence
  primer
gtaaaacgacggccagtttcattcctgggaagaactgg

SEQ ID NO: 44816 - DNA, 40 bp, Artificial Sequence
  primer
gtaaaacgacggccagtgaaggaaatgactagttggtggg

SEQ ID NO: 44817 - DNA, 37 bp, Artificial Sequence
  primer
gtaaaacgacggccagtatggtggacatgagtggtcc

SEQ ID NO: 44818 - DNA, 38 bp, Artificial Sequence
  primer
gtaaaacgacggccagtggtgggaattaagtgcagctc

SEQ ID NO: 44819 - DNA, 37 bp, Artificial Sequence
  primer
gtaaaacgacggccagtgagtttgtccgcattgatcc

SEQ ID NO: 44820 - DNA, 38 bp, Artificial Sequence
  primer
gtaaaacgacggccagtaagcacaggtgacagcttctg

SEQ ID NO: 44821 - DNA, 38 bp, Artificial Sequence
  primer
gtaaaacgacggccagttgattaacttacgcaccaccc

SEQ ID NO: 44822 - DNA, 21 bp, Artificial Sequence
  primer
ttactgctgctgctcttggtg

SEQ ID NO: 44823 - DNA, 38 bp, Artificial Sequence
  primer
gtaaaacgacggccagtgcacacctggcacacttgtag

SEQ ID NO: 44824 - DNA, 21 bp, Artificial Sequence
  primer
gacagagccagaggtctcagc

SEQ ID NO: 44825 - DNA, 38 bp, Artificial Sequence
  primer
gtaaaacgacggccagtcaagaagggacctgaaacctg

SEQ ID NO: 44826 - DNA, 37 bp, Artificial Sequence
  primer
gtaaaacgacggccagtgagcagaatgcctggatgtc

SEQ ID NO: 44827 - DNA, 21 bp, Artificial Sequence
  primer
caggctatgcaggtgagtgag

SEQ ID NO: 44828 - DNA, 38 bp, Artificial Sequence
  primer
gtaaaacgacggccagttagggttaacacccaccacag

SEQ ID NO: 44829 - DNA, 38 bp, Artificial Sequence
  primer
gtaaaacgacggccagtaacttcagcagcttgggtgag

SEQ ID NO: 44830 - DNA, 36 bp, Artificial Sequence
  primer
gtaaaacgacggccagtaacgcagggatggacacag

SEQ ID NO: 44831 - DNA, 38 bp, Artificial Sequence
  primer
gtaaaacgacggccagtagtctctcactcaaccgggag

SEQ ID NO: 44832 - DNA, 39 bp, Artificial Sequence
  primer
gtaaaacgacggccagtagccaggaaccttagtcatttg

SEQ ID NO: 44833 - DNA, 21 bp, Artificial Sequence
  primer
gggatttacatgtacgctggg

SEQ ID NO: 44834 - DNA, 38 bp, Artificial Sequence
  primer
gtaaaacgacggccagtgagtgggctctctctcctctc

SEQ ID NO: 44835 - DNA, 37 bp, Artificial Sequence
  primer
gtaaaacgacggccagtggaggagagtggagagcctg

SEQ ID NO: 44836 - DNA, 37 bp, Artificial Sequence
  primer
gtaaaacgacggccagtgggcagagttgtcatcttgg

SEQ ID NO: 44837 - DNA, 42 bp, Artificial Sequence
  primer
gtaaaacgacggccagtgagaattgtactcattcatgttggc

SEQ ID NO: 44838 - DNA, 21 bp, Artificial Sequence
  primer
tgtatttggagtcagggccag

SEQ ID NO: 44839 - DNA, 39 bp, Artificial Sequence
  primer
gtaaaacgacggccagtgcttgcctgtgaaccagtaaac

SEQ ID NO: 44840 - DNA, 21 bp, Artificial Sequence
  primer
tgcccttgtaaatgtgtgacc

SEQ ID NO: 44841 - DNA, 38 bp, Artificial Sequence
  primer
gtaaaacgacggccagtacgctgtgcaagcttataccc

SEQ ID NO: 44842 - DNA, 21 bp, Artificial Sequence
  primer
aaatctggagtgaagatgccg

SEQ ID NO: 44843 - DNA, 38 bp, Artificial Sequence
  primer
gtaaaacgacggccagtctactgagttggctggcactg

SEQ ID NO: 44844 - DNA, 22 bp, Artificial Sequence
  primer
ggtacagccctttgaatcactg

SEQ ID NO: 44845 - DNA, 21 bp, Artificial Sequence
  primer
ccatgtttccagttcagtccc

SEQ ID NO: 44846 - DNA, 39 bp, Artificial Sequence
  primer
gtaaaacgacggccagtaaccagactgcattcctagcac

SEQ ID NO: 44847 - DNA, 38 bp, Artificial Sequence
  primer
gtaaaacgacggccagtccctcctctcagagttccttc

SEQ ID NO: 44848 - DNA, 35 bp, Artificial Sequence
  primer
gtaaaacgacggccagtcaggaaatgcccagcaag

SEQ ID NO: 44849 - DNA, 21 bp, Artificial Sequence
  primer
caaagggaaacaagatttggc

SEQ ID NO: 44850 - DNA, 21 bp, Artificial Sequence
  primer
aaacgcaagggattcatcaag

SEQ ID NO: 44851 - DNA, 21 bp, Artificial Sequence
  primer
atactccatgcacatcttggc

SEQ ID NO: 44852 - DNA, 22 bp, Artificial Sequence
  primer
ccatgatgcaaagatacttccc

SEQ ID NO: 44853 - DNA, 37 bp, Artificial Sequence
  primer
gtaaaacgacggccagtaatgagaagccaggttgctg

SEQ ID NO: 44854 - DNA, 21 bp, Artificial Sequence
  primer
aagctctgactttccgtgctc

SEQ ID NO: 44855 - DNA, 38 bp, Artificial Sequence
  primer
gtaaaacgacggccagttattgggatgagcaggtttgc

SEQ ID NO: 44856 - DNA, 19 bp, Artificial Sequence
  primer
gccctaggtcccagaggtc

SEQ ID NO: 44857 - DNA, 38 bp, Artificial Sequence
  primer
gtaaaacgacggccagtcaacagtgccacgctcagtag

SEQ ID NO: 44858 - DNA, 23 bp, Artificial Sequence
  primer
ctaaatgtacctgggagaggatg

SEQ ID NO: 44859 - DNA, 38 bp, Artificial Sequence
  primer
gtaaaacgacggccagtcctggatatctggaggcactg

SEQ ID NO: 44860 - DNA, 21 bp, Artificial Sequence
  primer
tttgtgatgttagctgcgtcc

SEQ ID NO: 44861 - DNA, 20 bp, Artificial Sequence
  primer
aagtgaaccacccacgtcag

SEQ ID NO: 44862 - DNA, 21 bp, Artificial Sequence
  primer
tctggaacattgcaacaaatg

SEQ ID NO: 44863 - DNA, 21 bp, Artificial Sequence
  primer
atctgggaaggtgtttgatgg

SEQ ID NO: 44864 - DNA, 22 bp, Artificial Sequence
  primer
cctgtgggtttatgaaatggac

SEQ ID NO: 44865 - DNA, 38 bp, Artificial Sequence
  primer
gtaaaacgacggccagtttcgtctggtgagctgaaatc

SEQ ID NO: 44866 - DNA, 21 bp, Artificial Sequence
  primer
gaggcatgaatgcaggtaagc

SEQ ID NO: 44867 - DNA, 37 bp, Artificial Sequence
  primer
gtaaaacgacggccagtttgctgtggttgtaagctgc

SEQ ID NO: 44868 - DNA, 44 bp, Artificial Sequence
  primer
gtaaaacgacggccagtggtttattctgtttgactgtcttctct

SEQ ID NO: 44869 - DNA, 23 bp, Artificial Sequence
  primer
aaatggatgcagatcaaacaatg

SEQ ID NO: 44870 - DNA, 25 bp, Artificial Sequence
  primer
tcagttgaacatatggcattatctg

SEQ ID NO: 44871 - DNA, 27 bp, Artificial Sequence
  primer
ttgaaggatatatgttagaagctgttg

SEQ ID NO: 44872 - DNA, 22 bp, Artificial Sequence
  primer
gacagtgagggaactgaacctc

SEQ ID NO: 44873 - DNA, 24 bp, Artificial Sequence
  primer
ttcttcactgtgattagatttgcc

SEQ ID NO: 44874 - DNA, 21 bp, Artificial Sequence
  primer
gggtacggttatgggtgttta

SEQ ID NO: 44875 - DNA, 22 bp, Artificial Sequence
  primer
ccatggtttatagcaagttggg

SEQ ID NO: 44876 - DNA, 24 bp, Artificial Sequence
  primer
ggtctcatttagtggaaggatagc

SEQ ID NO: 44877 - DNA, 39 bp, Artificial Sequence
  primer
gtaaaacgacggccagtgaattgatatccacggtgttcc

SEQ ID NO: 44878 - DNA, 39 bp, Artificial Sequence
  primer
gtaaaacgacggccagtgaattggcagagtaggaagagc

SEQ ID NO: 44879 - DNA, 22 bp, Artificial Sequence
  primer
tctagtgccttgaggacagaaa

SEQ ID NO: 44880 - DNA, 21 bp, Artificial Sequence
  primer
taccaagcattctggcctttc

SEQ ID NO: 44881 - DNA, 21 bp, Artificial Sequence
  primer
ttgggacagctgttagtgagg

SEQ ID NO: 44882 - DNA, 19 bp, Artificial Sequence
  primer
gctggttccgtgagtctgg

SEQ ID NO: 44883 - DNA, 21 bp, Artificial Sequence
  primer
caaggatgagctgggcaatac

SEQ ID NO: 44884 - DNA, 37 bp, Artificial Sequence
  primer
gtaaaacgacggccagtgaggtacgaggcattagggc

SEQ ID NO: 44885 - DNA, 38 bp, Artificial Sequence
  primer
gtaaaacgacggccagttggaagatccctttgatttgg

SEQ ID NO: 44886 - DNA, 38 bp, Artificial Sequence
  primer
gtaaaacgacggccagtaaatgttgtgatgaaatgccc

SEQ ID NO: 44887 - DNA, 38 bp, Artificial Sequence
  primer
gtaaaacgacggccagtgatccaatccaggatacccat

SEQ ID NO: 44888 - DNA, 24 bp, Artificial Sequence
  primer
tgttgaatttgtttcctaagggac

SEQ ID NO: 44889 - DNA, 38 bp, Artificial Sequence
  primer
gtaaaacgacggccagtttgggtatcacattgctctgc

SEQ ID NO: 44890 - DNA, 38 bp, Artificial Sequence
  primer
gtaaaacgacggccagttttgtccgacacaaagcaatc

SEQ ID NO: 44891 - DNA, 41 bp, Artificial Sequence
  primer
gtaaaacgacggccagttttccatgtttacctatgcatcac

SEQ ID NO: 44892 - DNA, 21 bp, Artificial Sequence
  primer
gcatgggatgtttggagaaag

SEQ ID NO: 44893 - DNA, 21 bp, Artificial Sequence
  primer
tgggttaggttggcttgaaac

SEQ ID NO: 44894 - DNA, 38 bp, Artificial Sequence
  primer
gtaaaacgacggccagtatcttgtttctggtccagtgc

SEQ ID NO: 44895 - DNA, 39 bp, Artificial Sequence
  primer
gtaaaacgacggccagtaaggtctcttggtcttgctgtg

SEQ ID NO: 44896 - DNA, 22 bp, Artificial Sequence
  primer
gaaacaacccaccaaagaattg

SEQ ID NO: 44897 - DNA, 43 bp, Artificial Sequence
  primer
gtaaaacgacggccagttcaaataatgttattcctggacagtg

SEQ ID NO: 44898 - DNA, 26 bp, Artificial Sequence
  primer
ttctatggcttgaagttgattagaag

SEQ ID NO: 44899 - DNA, 39 bp, Artificial Sequence
  primer
gtaaaacgacggccagtcatgaatacttgtgccaatccc

SEQ ID NO: 44900 - DNA, 40 bp, Artificial Sequence
  primer
gtaaaacgacggccagtcaattagagggatatccattggg

SEQ ID NO: 44901 - DNA, 21 bp, Artificial Sequence
  primer
gatgttgccatggtttccttc

SEQ ID NO: 44902 - DNA, 21 bp, Artificial Sequence
  primer
atgctccagatttcaagccac

SEQ ID NO: 44903 - DNA, 38 bp, Artificial Sequence
  primer
gtaaaacgacggccagtcagccagaccttctttcaagc

SEQ ID NO: 44904 - DNA, 38 bp, Artificial Sequence
  primer
gtaaaacgacggccagttgggaaaggacctgatcattg

SEQ ID NO: 44905 - DNA, 20 bp, Artificial Sequence
  primer
cgtggtgtgctttgtctctg

SEQ ID NO: 44906 - DNA, 20 bp, Artificial Sequence
  primer
agtttctgagcgagcagcac

SEQ ID NO: 44907 - DNA, 21 bp, Artificial Sequence
  primer
tagatgcctgacatgggacat

SEQ ID NO: 44908 - DNA, 38 bp, Artificial Sequence
  primer
gtaaaacgacggccagtcaggtccacgtgtgttggtag

SEQ ID NO: 44909 - DNA, 21 bp, Artificial Sequence
  primer
gtgttccgatgagaccacagt

SEQ ID NO: 44910 - DNA, 38 bp, Artificial Sequence
  primer
gtaaaacgacggccagtcacatcaggagctcagtgtca

SEQ ID NO: 44911 - DNA, 37 bp, Artificial Sequence
  primer
gtaaaacgacggccagtagggccagcatcttctaggt

SEQ ID NO: 44912 - DNA, 38 bp, Artificial Sequence
  primer
gtaaaacgacggccagttgctctctgggaaaggatttg

SEQ ID NO: 44913 - DNA, 21 bp, Artificial Sequence
  primer
aagcacgtgagtcagacatgg

SEQ ID NO: 44914 - DNA, 38 bp, Artificial Sequence
  primer
gtaaaacgacggccagttgagccacttccgagcttaac

SEQ ID NO: 44915 - DNA, 21 bp, Artificial Sequence
  primer
ctcggagaggagatgacaagg

SEQ ID NO: 44916 - DNA, 21 bp, Artificial Sequence
  primer
cttcgtctccactctccttgg

SEQ ID NO: 44917 - DNA, 21 bp, Artificial Sequence
  primer
acccagctctttggattcact

SEQ ID NO: 44918 - DNA, 38 bp, Artificial Sequence
  primer
gtaaaacgacggccagtatggagaggacagtgtggtcc

SEQ ID NO: 44919 - DNA, 21 bp, Artificial Sequence
  primer
tttgttagtttgccatcagcc

SEQ ID NO: 44920 - DNA, 20 bp, Artificial Sequence
  primer
gttcctgtgctggatgatgg

SEQ ID NO: 44921 - DNA, 38 bp, Artificial Sequence
  primer
gtaaaacgacggccagtcttcccacttgtgaggacagt

SEQ ID NO: 44922 - DNA, 21 bp, Artificial Sequence
  primer
caggaacctaagagcgcacac

SEQ ID NO: 44923 - DNA, 21 bp, Artificial Sequence
  primer
atcacagtcggagaggctgag

SEQ ID NO: 44924 - DNA, 21 bp, Artificial Sequence
  primer
agtgtcacagagggtgacagg

SEQ ID NO: 44925 - DNA, 21 bp, Artificial Sequence
  primer
tggagaaagggagaacaggaa

SEQ ID NO: 44926 - DNA, 36 bp, Artificial Sequence
  primer
gtaaaacgacggccagtcagcgtagtgctcctggac

SEQ ID NO: 44927 - DNA, 38 bp, Artificial Sequence
  primer
gtaaaacgacggccagtccacatctgtcggagggtaac

SEQ ID NO: 44928 - DNA, 20 bp, Artificial Sequence
  primer
agtttctgagcgagcagcac

SEQ ID NO: 44929 - DNA, 21 bp, Artificial Sequence
  primer
gtacgcagcgttaagttggag

SEQ ID NO: 44930 - DNA, 40 bp, Artificial Sequence
  primer
gtaaaacgacggccagtttggaggtaggctggtagtatcc

SEQ ID NO: 44931 - DNA, 25 bp, Artificial Sequence
  primer
cttacaaagtaagtaggagccttgc

SEQ ID NO: 44932 - DNA, 21 bp, Artificial Sequence
  primer
ctttggagagatgaagctggg

SEQ ID NO: 44933 - DNA, 21 bp, Artificial Sequence
  primer
gacgttggcggtatgtatgag

SEQ ID NO: 44934 - DNA, 24 bp, Artificial Sequence
  primer
ggataccagtatcattccaaatgc

SEQ ID NO: 44935 - DNA, 38 bp, Artificial Sequence
  primer
gtaaaacgacggccagtcccaaagtgctagaacacagc

SEQ ID NO: 44936 - DNA, 21 bp, Artificial Sequence
  primer
ccaaatcagggtgtgtaaagc

SEQ ID NO: 44937 - DNA, 21 bp, Artificial Sequence
  primer
agccttgggagttgatattgc

SEQ ID NO: 44938 - DNA, 38 bp, Artificial Sequence
  primer
gtaaaacgacggccagtaatgcctatccatgcagtttg

SEQ ID NO: 44939 - DNA, 24 bp, Artificial Sequence
  primer
tcatttgggaaataactttaaggg

SEQ ID NO: 44940 - DNA, 20 bp, Artificial Sequence
  primer
gtgcttcccacctgttgttg

SEQ ID NO: 44941 - DNA, 38 bp, Artificial Sequence
  primer
gtaaaacgacggccagtctcagaggattatgtgcaccg

SEQ ID NO: 44942 - DNA, 21 bp, Artificial Sequence
  primer
ggcttcctgactcaaggtttc

SEQ ID NO: 44943 - DNA, 21 bp, Artificial Sequence
  primer
gagactctgcaagctatcggg

SEQ ID NO: 44944 - DNA, 21 bp, Artificial Sequence
  primer
tttggtcgccaaagatatcac

SEQ ID NO: 44945 - DNA, 38 bp, Artificial Sequence
  primer
gtaaaacgacggccagtcaggaagccatggaagttctc

SEQ ID NO: 44946 - DNA, 21 bp, Artificial Sequence
  primer
ccaagtctgtctgtaccctgg

SEQ ID NO: 44947 - DNA, 26 bp, Artificial Sequence
  primer
tggagaaacttgaaagatatagggtc

SEQ ID NO: 44948 - DNA, 38 bp, Artificial Sequence
  primer
gtaaaacgacggccagtccgtagtgcctaaggtgtgtg

SEQ ID NO: 44949 - DNA, 21 bp, Artificial Sequence
  primer
tggtaagcgttcatctgcttg

SEQ ID NO: 44950 - DNA, 38 bp, Artificial Sequence
  primer
gtaaaacgacggccagtatgggatcaacatcattgtgg

SEQ ID NO: 44951 - DNA, 43 bp, Artificial Sequence
  primer
gtaaaacgacggccagttgtagaaacatcatatctcccatttc

SEQ ID NO: 44952 - DNA, 21 bp, Artificial Sequence
  primer
gctgtaggtgaggcatgacag

SEQ ID NO: 44953 - DNA, 38 bp, Artificial Sequence
  primer
gtaaaacgacggccagttaggacataggccaagggatg

SEQ ID NO: 44954 - DNA, 21 bp, Artificial Sequence
  primer
accgtgggactacaccatctc

SEQ ID NO: 44955 - DNA, 38 bp, Artificial Sequence
  primer
gtaaaacgacggccagtaactttcccatcaacattggg

SEQ ID NO: 44956 - DNA, 38 bp, Artificial Sequence
  primer
gtaaaacgacggccagtagttatcaccactctgtgccc

SEQ ID NO: 44957 - DNA, 38 bp, Artificial Sequence
  primer
gtaaaacgacggccagttgcataggcttatgttcccac

SEQ ID NO: 44958 - DNA, 21 bp, Artificial Sequence
  primer
cagaatcgacagcctcaagtg

SEQ ID NO: 44959 - DNA, 38 bp, Artificial Sequence
  primer
gtaaaacgacggccagtaacaacccaatgaattggtcc

SEQ ID NO: 44960 - DNA, 36 bp, Artificial Sequence
  primer
gtaaaacgacggccagtttatcagcggctcggtttc

SEQ ID NO: 44961 - DNA, 42 bp, Artificial Sequence
  primer
gtaaaacgacggccagtcgtaccttgaatttgaatgttcagt

SEQ ID NO: 44962 - DNA, 21 bp, Artificial Sequence
  primer
ggcaatagatcgagactctgc

SEQ ID NO: 44963 - DNA, 21 bp, Artificial Sequence
  primer
agtgccctgttcttgtgaagc

SEQ ID NO: 44964 - DNA, 21 bp, Artificial Sequence
  primer
tcagctggaggagtggctaag

SEQ ID NO: 44965 - DNA, 18 bp, Artificial Sequence
  primer
ggcaggtgcctgtaatcc

SEQ ID NO: 44966 - DNA, 20 bp, Artificial Sequence
  primer
ccttcctgggcatctagacc

SEQ ID NO: 44967 - DNA, 38 bp, Artificial Sequence
  primer
gtaaaacgacggccagtcctaactggatttagcagggc

SEQ ID NO: 44968 - DNA, 38 bp, Artificial Sequence
  primer
gtaaaacgacggccagtcatgctccattgtatggatgg

SEQ ID NO: 44969 - DNA, 37 bp, Artificial Sequence
  primer
gtaaaacgacggccagtgggctctgactgttgctgtc

SEQ ID NO: 44970 - DNA, 38 bp, Artificial Sequence
  primer
gtaaaacgacggccagtgaactgacgtcacctgtgctc

SEQ ID NO: 44971 - DNA, 39 bp, Artificial Sequence
  primer
gtaaaacgacggccagtcaaaccgactccctgaatactg

SEQ ID NO: 44972 - DNA, 18 bp, Artificial Sequence
  primer
gcagtgagccaaggttgc

SEQ ID NO: 44973 - DNA, 38 bp, Artificial Sequence
  primer
gtaaaacgacggccagtggtgctagtgtggagagggag

SEQ ID NO: 44974 - DNA, 21 bp, Artificial Sequence
  primer
gcttggtttgatttggtttgg

SEQ ID NO: 44975 - DNA, 39 bp, Artificial Sequence
  primer
gtaaaacgacggccagtgggaaatatgcctttcattcag

SEQ ID NO: 44976 - DNA, 38 bp, Artificial Sequence
  primer
gtaaaacgacggccagtttccctgtgctattcaagtgc

SEQ ID NO: 44977 - DNA, 22 bp, Artificial Sequence
  primer
cccacttcacagcagaagagac

SEQ ID NO: 44978 - DNA, 22 bp, Artificial Sequence
  primer
aaggagacctagggactcttcc

SEQ ID NO: 44979 - DNA, 21 bp, Artificial Sequence
  primer
ccctgagtgacagcaagactg

SEQ ID NO: 44980 - DNA, 38 bp, Artificial Sequence
  primer
gtaaaacgacggccagtcaaagttggtacgcattgacc

SEQ ID NO: 44981 - DNA, 37 bp, Artificial Sequence; identical to SEQ ID NO: 44969
  primer

SEQ ID NO: 44982 - DNA, 36 bp, Artificial Sequence
  primer
gtaaaacgacggccagtcgtgttagtgtcttcgcgg

SEQ ID NO: 44983 - DNA, 21 bp, Artificial Sequence
  primer
gttcagggactaggcgtgttc

SEQ ID NO: 44984 - DNA, 21 bp, Artificial Sequence
  primer
ccctgtggataccaagggata

SEQ ID NO: 44985 - DNA, 22 bp, Artificial Sequence
  primer
ggaaattcagcagaacaacctg

SEQ ID NO: 44986 - DNA, 37 bp, Artificial Sequence
  primer
gtaaaacgacggccagtaagaaggcagcttccaggag

SEQ ID NO: 44987 - DNA, 21 bp, Artificial Sequence
  primer
atatgctggagctttcccttg

SEQ ID NO: 44988 - DNA, 38 bp, Artificial Sequence
  primer
gtaaaacgacggccagtgaactgttcagcagaattcca

SEQ ID NO: 44989 - DNA, 42 bp, Artificial Sequence
  primer
gtaaaacgacggccagtaaagtgttaagactgggtgttatgc

SEQ ID NO: 44990 - DNA, 41 bp, Artificial Sequence
  primer
gtaaaacgacggccagtcctctgctcctcagtattcagttc

SEQ ID NO: 44991 - DNA, 21 bp, Artificial Sequence
  primer
gacatacatgcatcggattgg

SEQ ID NO: 44992 - DNA, 38 bp, Artificial Sequence
  primer
gtaaaacgacggccagtagatgggagaattgttgcagg

SEQ ID NO: 44993 - DNA, 38 bp, Artificial Sequence
  primer
gtaaaacgacggccagtgatcccattccttctggtctg

SEQ ID NO: 44994 - DNA, 38 bp, Artificial Sequence
  primer
gtaaaacgacggccagtaactccaccaacagtcagcac

SEQ ID NO: 44995 - DNA, 21 bp, Artificial Sequence
  primer
ctgaatctacgcctgtggatg

SEQ ID NO: 44996 - DNA, 37 bp, Artificial Sequence
  primer
gtaaaacgacggccagtaagtgccttgctacgggaag

SEQ ID NO: 44997 - DNA, 22 bp, Artificial Sequence
  primer
aagtacaaatgtcgaaatgccc

SEQ ID NO: 44998 - DNA, 21 bp, Artificial Sequence
  primer
gcagagccttctgaagttgac

SEQ ID NO: 44999 - DNA, 44 bp, Artificial Sequence
  primer
gtaaaacgacggccagtttagaagaattgctttaggatagcttg

SEQ ID NO: 45000 - DNA, 39 bp, Artificial Sequence
  primer
gtaaaacgacggccagtttaattctgcaggaccagaagc

SEQ ID NO: 45001 - DNA, 39 bp, Artificial Sequence
  primer
gtaaaacgacggccagttcatcatcagcgttagaccttg

SEQ ID NO: 45002 - DNA, 25 bp, Artificial Sequence
  primer
gattaggagtgccatgagtatcttt

SEQ ID NO: 45003 - DNA, 39 bp, Artificial Sequence
  primer
gtaaaacgacggccagttggtgaacattgatggactgtg

SEQ ID NO: 45004 - DNA, 39 bp, Artificial Sequence
  primer
gtaaaacgacggccagtggcttgagtagttgtttccagg

SEQ ID NO: 45005 - DNA, 41 bp, Artificial Sequence
  primer
gtaaaacgacggccagttttacaggcctaactgatgaagag

SEQ ID NO: 45006 - DNA, 21 bp, Artificial Sequence
  primer
tgctaagggaccttctccctc

SEQ ID NO: 45007 - DNA, 43 bp, Artificial Sequence
  primer
gtaaaacgacggccagtgggtttgattaatagtttagccatgt

SEQ ID NO: 45008 - DNA, 22 bp, Artificial Sequence
  primer
caccgtggtgaacttcttgttt

SEQ ID NO: 45009 - DNA, 20 bp, Artificial Sequence
  primer
gctcagcttccctaaatggc

SEQ ID NO: 45010 - DNA, 22 bp, Artificial Sequence
  primer
tgttccttgtctttctgcagtg

SEQ ID NO: 45011 - DNA, 21 bp, Artificial Sequence
  primer
tttctttgaagaagtggcaaa

SEQ ID NO: 45012 - DNA, 21 bp, Artificial Sequence
  primer
ctgagctccaccgttctcatc

SEQ ID NO: 45013 - DNA, 38 bp, Artificial Sequence
  primer
gtaaaacgacggccagtaactttctcagggctgcagtg

SEQ ID NO: 45014 - DNA, 38 bp, Artificial Sequence
  primer
gtaaaacgacggccagtgccagtcttgttgagtcatgg

SEQ ID NO: 45015 - DNA, 21 bp, Artificial Sequence
  primer
ggatgaagaggatgaacatgg

SEQ ID NO: 45016 - DNA, 38 bp, Artificial Sequence
  primer
gtaaaacgacggccagtagtccataaccgagtccaagg

SEQ ID NO: 45017 - DNA, 37 bp, Artificial Sequence
  primer
gtaaaacgacggccagtgtctggattccctccattcc

SEQ ID NO: 45018 - DNA, 21 bp, Artificial Sequence
  primer
gaactgcatgccattaaggtg

SEQ ID NO: 45019 - DNA, 21 bp, Artificial Sequence
  primer
gaccctgtctgggaagaactg

SEQ ID NO: 45020 - DNA, 38 bp, Artificial Sequence
  primer
gtaaaacgacggccagtgagtgatcaaggctagggtgg

SEQ ID NO: 45021 - DNA, 38 bp, Artificial Sequence
  primer
gtaaaacgacggccagtacttggcatccttccattgtg

SEQ ID NO: 45022 - DNA, 38 bp, Artificial Sequence
  primer
gtaaaacgacggccagttttgtcttgctctggcttgtg

SEQ ID NO: 45023 - DNA, 38 bp, Artificial Sequence
  primer
gtaaaacgacggccagtattggaggtctgtcacccaag

SEQ ID NO: 45024 - DNA, 38 bp, Artificial Sequence
  primer
gtaaaacgacggccagtctttagtctgggctgacctgc

SEQ ID NO: 45025 - DNA, 38 bp, Artificial Sequence
  primer
gtaaaacgacggccagttagatgagggttgggcatttc

SEQ ID NO: 45026 - DNA, 21 bp, Artificial Sequence
  primer
catctgtgtcccattcctctg

SEQ ID NO: 45027 - DNA, 38 bp, Artificial Sequence
  primer
gtaaaacgacggccagtgctgtattcctgcctttggag

SEQ ID NO: 45028 - DNA, 21 bp, Artificial Sequence
  primer
gcaaagctgtctgttctgtgg

SEQ ID NO: 45029 - DNA, 21 bp, Artificial Sequence
  primer
ctcttctcaaaggaagcaccc

SEQ ID NO: 45030 - DNA, 21 bp, Artificial Sequence
  primer
gaaggacctgtttgttcccag

SEQ ID NO: 45031 - DNA, 38 bp, Artificial Sequence
  primer
gtaaaacgacggccagtgtagagtggaggagctttggg

SEQ ID NO: 45032 - DNA, 21 bp, Artificial Sequence
  primer
aagtaacaccgaagcaccacc

SEQ ID NO: 45033 - DNA, 38 bp, Artificial Sequence
  primer
gtaaaacgacggccagttgcctgtgtcagccatgtaag

SEQ ID NO: 45034 - DNA, 38 bp, Artificial Sequence
  primer
gtaaaacgacggccagttgagccttaggtgacatggtg

SEQ ID NO: 45035 - DNA, 38 bp, Artificial Sequence
  primer
gtaaaacgacggccagtacaacccaaagagacaaacgc

SEQ ID NO: 45036 - DNA, 21 bp, Artificial Sequence
  primer
ggaagttaatctctccgagcc

SEQ ID NO: 45037 - DNA, 38 bp, Artificial Sequence
  primer
gtaaaacgacggccagtaggtaggagggtctggtttgg

SEQ ID NO: 45038 - DNA, 20 bp, Artificial Sequence
  primer
cctgggcagcagagtgatac

SEQ ID NO: 45039 - DNA, 39 bp, Artificial Sequence
  primer
gtaaaacgacggccagtttcactgtgttacccatcaagg

SEQ ID NO: 45040 - DNA, 22 bp, Artificial Sequence
  primer
ttagtggtccagctctacaggc

SEQ ID NO: 45041 - DNA, 38 bp, Artificial Sequence
  primer
gtaaaacgacggccagtctctccctatgatgctggcac

SEQ ID NO: 45042 - DNA, 22 bp, Artificial Sequence
  primer
aatttcctttctgtgcctctcc

SEQ ID NO: 45043 - DNA, 38 bp, Artificial Sequence
  primer
gtaaaacgacggccagtatattgcactgccctgaactg

SEQ ID NO: 45044 - DNA, 21 bp, Artificial Sequence
  primer
ggagatacagctggtcattgc

SEQ ID NO: 45045 - DNA, 38 bp, Artificial Sequence
  primer
gtaaaacgacggccagtggtgtcacaagcacagctagg

SEQ ID NO: 45046 - DNA, 38 bp, Artificial Sequence
  primer
gtaaaacgacggccagtaaataggaattcccttggcag

SEQ ID NO: 45047 - DNA, 37 bp, Artificial Sequence
  primer
gtaaaacgacggccagtggcacccttccttccttatg

SEQ ID NO: 45048 - DNA, 40 bp, Artificial Sequence
  primer
gtaaaacgacggccagtggagtttcctctcaactatcggg

SEQ ID NO: 45049 - DNA, 36 bp, Artificial Sequence
  primer
gtaaaacgacggccagtggagcgatctgtgtgtggg

SEQ ID NO: 45050 - DNA, 23 bp, Artificial Sequence
  primer
cgtcagattataacggctctgtg

SEQ ID NO: 45051 - DNA, 21 bp, Artificial Sequence
  primer
cctaatccctctttctcaggg

SEQ ID NO: 45052 - DNA, 41 bp, Artificial Sequence
  primer
gtaaaacgacggccagtcaagtgataggagagttgatgcag

SEQ ID NO: 45053 - DNA, 21 bp, Artificial Sequence
  primer
aatgggattgttggttggttg

SEQ ID NO: 45054 - DNA, 25 bp, Artificial Sequence
  primer
cagacatagtgttctgccatttaag

SEQ ID NO: 45055 - DNA, 40 bp, Artificial Sequence
  primer
gtaaaacgacggccagtttactagcaagacggaggaactg

SEQ ID NO: 45056 - DNA, 38 bp, Artificial Sequence
  primer
gtaaaacgacggccagtttggcaggtaagctgaacaac

SEQ ID NO: 45057 - DNA, 24 bp, Artificial Sequence
  primer
aggaaacgtctttgacttgacttc

SEQ ID NO: 45058 - DNA, 37 bp, Artificial Sequence
  primer
gtaaaacgacggccagtgcctttcatcccactgacaa

SEQ ID NO: 45059 - DNA, 28 bp, Artificial Sequence
  primer
tttacccaatacttgacataaactatgc

SEQ ID NO: 45060 - DNA, 40 bp, Artificial Sequence
  primer
gtaaaacgacggccagttcttatttccaaacctatgctgc

SEQ ID NO: 45061 - DNA, 21 bp, Artificial Sequence
  primer
cgcagtggttataattgcacc

SEQ ID NO: 45062 - DNA, 38 bp, Artificial Sequence
  primer
gtaaaacgacggccagtttggaattgacactggttgtg

SEQ ID NO: 45063 - DNA, 40 bp, Artificial Sequence
  primer
gtaaaacgacggccagtttgaaatctaccgtatctttggc

SEQ ID NO: 45064 - DNA, 22 bp, Artificial Sequence
  primer
tgcagaccaactttcatcagac

SEQ ID NO: 45065 - DNA, 21 bp, Artificial Sequence
  primer
aaccaatgacctcactgttgg

SEQ ID NO: 45066 - DNA, 40 bp, Artificial Sequence
  primer
gtaaaacgacggccagtacaaagcagggtttgattagttg

SEQ ID NO: 45067 - DNA, 21 bp, Artificial Sequence
  primer
ctctttcccattgtttagccc

SEQ ID NO: 45068 - DNA, 37 bp, Artificial Sequence
  primer
gtaaaacgacggccagtcagaaagaggaggccaggag

SEQ ID NO: 45069 - DNA, 21 bp, Artificial Sequence
  primer
aaaggcgctgtggagttattc

SEQ ID NO: 45070 - DNA, 30 bp, Artificial Sequence
  primer
aggttaaagagtggttaatttcttagagtt

SEQ ID NO: 45071 - DNA, 38 bp, Artificial Sequence
  primer
gtaaaacgacggccagtatttcgttccctggtcatttc

SEQ ID NO: 45072 - DNA, 38 bp, Artificial Sequence
  primer
gtaaaacgacggccagttggtcaaatcatccatcttgg

SEQ ID NO: 45073 - DNA, 39 bp, Artificial Sequence
  primer
gtaaaacgacggccagttgttgcttaaggtcatcattgg

SEQ ID NO: 45074 - DNA, 21 bp, Artificial Sequence
  primer
gggtgggtgttgggttagaag

SEQ ID NO: 45075 - DNA, 21 bp, Artificial Sequence
  primer
agccattggtggttcctagag

SEQ ID NO: 45076 - DNA, 40 bp, Artificial Sequence
  primer
gtaaaacgacggccagtgctgctatggaatgttacaatgg

SEQ ID NO: 45077 - DNA, 26 bp, Artificial Sequence
  primer
ttgcagatgaaagaggaatatgtaac

SEQ ID NO: 45078 - DNA, 38 bp, Artificial Sequence
  primer
gtaaaacgacggccagttccaccctcctcaaatactgc

SEQ ID NO: 45079 - DNA, 37 bp, Artificial Sequence; identical to SEQ ID NO: 9716
  primer

SEQ ID NO: 45080 - DNA, 21 bp, Artificial Sequence
  primer
acctcaggtgatctacccacc

SEQ ID NO: 45081 - DNA, 20 bp, Artificial Sequence
  primer
cggagagcttcctatcgctc

SEQ ID NO: 45082 - DNA, 38 bp, Artificial Sequence
  primer
gtaaaacgacggccagtgtgaaacaaggttgacgatgg

SEQ ID NO: 45083 - DNA, 21 bp, Artificial Sequence
  primer
agaaaggacaggtgagcttgg

SEQ ID NO: 45084 - DNA, 20 bp, Artificial Sequence
  primer
gtggaacgaatgattggtgg

SEQ ID NO: 45085 - DNA, 37 bp, Artificial Sequence
  primer
gtaaaacgacggccagttgagcctgaccatgtgattt

SEQ ID NO: 45086 - DNA, 20 bp, Artificial Sequence
  primer
gtggctggtgctcagtcaac

SEQ ID NO: 45087 - DNA, 19 bp, Artificial Sequence
  primer
aatcccgtgtccctcactg

SEQ ID NO: 45088 - DNA, 19 bp, Artificial Sequence
  primer
gagggacttctctgtggcg

SEQ ID NO: 45089 - DNA, 38 bp, Artificial Sequence
  primer
gtaaaacgacggccagtagggacagtgcctgtctatcc

SEQ ID NO: 45090 - DNA, 36 bp, Artificial Sequence
  primer
gtaaaacgacggccagtgctcaggctcttgtggagc

SEQ ID NO: 45091 - DNA, 22 bp, Artificial Sequence
  primer
cggtgagcagacactatcttcc

SEQ ID NO: 45092 - DNA, 38 bp, Artificial Sequence
  primer
gtaaaacgacggccagtcaatcctcccacctcaatctc

SEQ ID NO: 45093 - DNA, 38 bp, Artificial Sequence
  primer
gtaaaacgacggccagtgcccttctgaaatgtttctcc

SEQ ID NO: 45094 - DNA, 20 bp, Artificial Sequence
  primer
tactgcactcggccaagaag

SEQ ID NO: 45095 - DNA, 21 bp, Artificial Sequence
  primer
agatgacagtgagtggcctcc

SEQ ID NO: 45096 - DNA, 37 bp, Artificial Sequence
  primer
gtaaaacgacggccagtcaccagctgctacttggagg

SEQ ID NO: 45097 - DNA, 22 bp, Artificial Sequence
  primer
aaggcttagaacttagggcctg

SEQ ID NO: 45098 - DNA, 38 bp, Artificial Sequence
  primer
gtaaaacgacggccagttgtcatcttctctcacagccc

SEQ ID NO: 45099 - DNA, 37 bp, Artificial Sequence
  primer
gtaaaacgacggccagtacacaccgtactgagcctcg

SEQ ID NO: 45100 - DNA, 19 bp, Artificial Sequence
  primer
gctctacagcggcagttgg

SEQ ID NO: 45101 - DNA, 38 bp, Artificial Sequence
  primer
gtaaaacgacggccagtcctctcaaggctggaagagtc

SEQ ID NO: 45102 - DNA, 38 bp, Artificial Sequence
  primer
gtaaaacgacggccagtagcctggactcccttcctatc

SEQ ID NO: 45103 - DNA, 21 bp, Artificial Sequence
  primer
cacatttcccgaaggtgtagg

SEQ ID NO: 45104 - DNA, 21 bp, Artificial Sequence
  primer
cacatcctcaagcatcgtgac

SEQ ID NO: 45105 - DNA, 38 bp, Artificial Sequence
  primer
gtaaaacgacggccagtacccagacaggctttagttcc

SEQ ID NO: 45106 - DNA, 20 bp, Artificial Sequence
  primer
cgcttctcagaggcattcag

SEQ ID NO: 45107 - DNA, 38 bp, Artificial Sequence
  primer
gtaaaacgacggccagtgggagagatgcaattctgtgg

SEQ ID NO: 45108 - DNA, 39 bp, Artificial Sequence
  primer
gtaaaacgacggccagtccagaactccacaggtatgtcc

SEQ ID NO: 45109 - DNA, 38 bp, Artificial Sequence
  primer
gtaaaacgacggccagtaagtagagagcaccacctggg

SEQ ID NO: 45110 - DNA, 21 bp, Artificial Sequence
  primer
cagttgccagatgaatccaag

SEQ ID NO: 45111 - DNA, 23 bp, Artificial Sequence
  primer
gcctgtttcctttacatcctttg

SEQ ID NO: 45112 - DNA, 20 bp, Artificial Sequence
  primer
agaccacatcagtgggcaac

SEQ ID NO: 45113 - DNA, 21 bp, Artificial Sequence
  primer
ttgtctttaccctctttgccc

SEQ ID NO: 45114 - DNA, 37 bp, Artificial Sequence
  primer
gtaaaacgacggccagtaacatgggtgtagcaatgcc

SEQ ID NO: 45115 - DNA, 21 bp, Artificial Sequence
  primer
catgatttcaggctatggcac

SEQ ID NO: 45116 - DNA, 22 bp, Artificial Sequence
  primer
ccttgttgcaacttctgtagcc

SEQ ID NO: 45117 - DNA, 21 bp, Artificial Sequence
  primer
tacatgggtgggtgctgtatg

SEQ ID NO: 45118 - DNA, 39 bp, Artificial Sequence
  primer
gtaaaacgacggccagtgtcacctttatttccaaatggg

SEQ ID NO: 45119 - DNA, 21 bp, Artificial Sequence
  primer
tcttcctctttcctggcaaac

SEQ ID NO: 45120 - DNA, 38 bp, Artificial Sequence
  primer
gtaaaacgacggccagtgaatgtgcatgtactgtgggc

SEQ ID NO: 45121 - DNA, 38 bp, Artificial Sequence
  primer
gtaaaacgacggccagtattcttgggatacctggaggc

SEQ ID NO: 45122 - DNA, 25 bp, Artificial Sequence
  primer
gtccctttaatatcatagaggtccc

SEQ ID NO: 45123 - DNA, 21 bp, Artificial Sequence
  primer
ttgttggccctaggtggttac

SEQ ID NO: 45124 - DNA, 38 bp, Artificial Sequence
  primer
gtaaaacgacggccagtgaagataaccattaggccggg

SEQ ID NO: 45125 - DNA, 38 bp, Artificial Sequence
  primer
gtaaaacgacggccagtagctgctatcagcctctttcc

SEQ ID NO: 45126 - DNA, 38 bp, Artificial Sequence
  primer
gtaaaacgacggccagtagggatgagcaagaaggagtc

SEQ ID NO: 45127 - DNA, 20 bp, Artificial Sequence
  primer
ggctcactcatggaaggagg

SEQ ID NO: 45128 - DNA, 37 bp, Artificial Sequence
  primer
gtaaaacgacggccagtgactcggcctcttctgattg

SEQ ID NO: 45129 - DNA, 21 bp, Artificial Sequence
  primer
gggagggtatagggagtgagg

SEQ ID NO: 45130 - DNA, 18 bp, Artificial Sequence
  primer
ccctgaggcctcctgttc

SEQ ID NO: 45131 - DNA, 21 bp, Artificial Sequence
  primer
taagtggattgcagctcctcc

SEQ ID NO: 45132 - DNA, 21 bp, Artificial Sequence
  primer
gagtcaagcttggtccacacc

SEQ ID NO: 45133 - DNA, 21 bp, Artificial Sequence
  primer
ttgatctcttggatgtgctgg

SEQ ID NO: 45134 - DNA, 38 bp, Artificial Sequence
  primer
gtaaaacgacggccagttcttcgtcaagtcagtgcagc

SEQ ID NO: 45135 - DNA, 38 bp, Artificial Sequence
  primer
gtaaaacgacggccagtctgaggactcggacacctacc

SEQ ID NO: 45136 - DNA, 38 bp, Artificial Sequence
  primer
gtaaaacgacggccagttacagtaagtgccttgggcag

SEQ ID NO: 45137 - DNA, 19 bp, Artificial Sequence
  primer
attgcggtgtgagagggag

SEQ ID NO: 45138 - DNA, 38 bp, Artificial Sequence
  primer
gtaaaacgacggccagttagcaaatgctagagggcagg

SEQ ID NO: 45139 - DNA, 21 bp, Artificial Sequence
  primer
aatcagattggaaggctggag

SEQ ID NO: 45140 - DNA, 22 bp, Artificial Sequence
  primer
cagtggaggctttcaaattcag

SEQ ID NO: 45141 - DNA, 42 bp, Artificial Sequence
  primer
gtaaaacgacggccagtgattgttgacatccttatggttagc

SEQ ID NO: 45142 - DNA, 38 bp, Artificial Sequence
  primer
gtaaaacgacggccagtaaccactcccaccaagtgaac

SEQ ID NO: 45143 - DNA, 38 bp, Artificial Sequence
  primer
gtaaaacgacggccagtagctgttggttggttgtttcc

SEQ ID NO: 45144 - DNA, 22 bp, Artificial Sequence
  primer
cttagaggtggagcagagaagc

SEQ ID NO: 45145 - DNA, 38 bp, Artificial Sequence
  primer
gtaaaacgacggccagtgaactttgtaggtggccattg

SEQ ID NO: 45146 - DNA, 23 bp, Artificial Sequence
  primer
gttggcagtacagatctacgagg

SEQ ID NO: 45147 - DNA, 21 bp, Artificial Sequence
  primer
tatgcagtgtgaggcaccatc

SEQ ID NO: 45148 - DNA, 22 bp, Artificial Sequence
  primer
tccgccacactatgatgtttag

SEQ ID NO: 45149 - DNA, 21 bp, Artificial Sequence
  primer
aaacatgctgtgttgaaagcc

SEQ ID NO: 45150 - DNA, 38 bp, Artificial Sequence
  primer
gtaaaacgacggccagtatggagaccgttctcagaggg

SEQ ID NO: 45151 - DNA, 21 bp, Artificial Sequence
  primer
tgcaggaaagaacttgctagg

SEQ ID NO: 45152 - DNA, 38 bp, Artificial Sequence
  primer
gtaaaacgacggccagtgaatgggtgacactctgttgg

SEQ ID NO: 45153 - DNA, 38 bp, Artificial Sequence
  primer
gtaaaacgacggccagtggcaaattacgtaagggaagg

SEQ ID NO: 45154 - DNA, 21 bp, Artificial Sequence
  primer
gggtatcagcacctagttggg

SEQ ID NO: 45155 - DNA, 42 bp, Artificial Sequence
  primer
gtaaaacgacggccagtcagtgttaaagtgaagatgtcttgg

SEQ ID NO: 45156 - DNA, 38 bp, Artificial Sequence
  primer
gtaaaacgacggccagttttactgggctgtttgtcacc

SEQ ID NO: 45157 - DNA, 38 bp, Artificial Sequence
  primer
gtaaaacgacggccagttggaagtctctttacgccaga

SEQ ID NO: 45158 - DNA, 44 bp, Artificial Sequence
  primer
gtaaaacgacggccagtcaattgtgtatcgcttatcttagaagg

SEQ ID NO: 45159 - DNA, 25 bp, Artificial Sequence
  primer
tgatttgtatagggaatcgactctg

SEQ ID NO: 45160 - DNA, 23 bp, Artificial Sequence
  primer
gacttgattctcaaagcaagcag

SEQ ID NO: 45161 - DNA, 46 bp, Artificial Sequence
  primer
gtaaaacgacggccagttgtagagaattcctttgcacaatacttag

SEQ ID NO: 45162 - DNA, 39 bp, Artificial Sequence
  primer
gtaaaacgacggccagtgagatggatgggttaaaggacc

SEQ ID NO: 45163 - DNA, 39 bp, Artificial Sequence
  primer
gtaaaacgacggccagtttctctttgaagacaagcaacg

SEQ ID NO: 45164 - DNA, 21 bp, Artificial Sequence
  primer
cacagccttacatcttgaccg

SEQ ID NO: 45165 - DNA, 40 bp, Artificial Sequence
  primer
gtaaaacgacggccagtgtaagcagtgggaagttccatag

SEQ ID NO: 45166 - DNA, 23 bp, Artificial Sequence
  primer
aacagaacttggaaagtagctcg

SEQ ID NO: 45167 - DNA, 40 bp, Artificial Sequence
  primer
gtaaaacgacggccagtcatgaggattagctttccatagg

SEQ ID NO: 45168 - DNA, 18 bp, Artificial Sequence
  primer
gtgagccactgcacccag

SEQ ID NO: 45169 - DNA, 35 bp, Artificial Sequence
  primer
gtaaaacgacggccagtctacaggcgtccgccaac

SEQ ID NO: 45170 - DNA, 43 bp, Artificial Sequence
  primer
gtaaaacgacggccagtctacaggaattcagtggatattatgg

SEQ ID NO: 45171 - DNA, 38 bp, Artificial Sequence
  primer
gtaaaacgacggccagttatgtaccaggcttggctgtg

SEQ ID NO: 45172 - DNA, 38 bp, Artificial Sequence
  primer
gtaaaacgacggccagtcagccaaatgctgctattcat

SEQ ID NO: 45173 - DNA, 22 bp, Artificial Sequence
  primer
tcggataaccatttagcacagc

SEQ ID NO: 45174 - DNA, 21 bp, Artificial Sequence
  primer
tttcctcatttgacaggagcc

SEQ ID NO: 45175 - DNA, 38 bp, Artificial Sequence
  primer
gtaaaacgacggccagtgaactccgaggtcgttcctac

SEQ ID NO: 45176 - DNA, 21 bp, Artificial Sequence
  primer
aacggaaggtaggagagaggc

SEQ ID NO: 45177 - DNA, 36 bp, Artificial Sequence
  primer
gtaaaacgacggccagtaccgacggcttgatctgag

SEQ ID NO: 45178 - DNA, 38 bp, Artificial Sequence
  primer
gtaaaacgacggccagtaaagagaaggctgaaggtggg

SEQ ID NO: 45179 - DNA, 21 bp, Artificial Sequence
  primer
tggactgagtcttctcctccc

SEQ ID NO: 45180 - DNA, 38 bp, Artificial Sequence
  primer
gtaaaacgacggccagtctgtacagtctgcagttgccc

SEQ ID NO: 45181 - DNA, 21 bp, Artificial Sequence
  primer
acactgggtacaaatcctggc

SEQ ID NO: 45182 - DNA, 37 bp, Artificial Sequence
  primer
gtaaaacgacggccagtagtgtggactgtggacctgg

SEQ ID NO: 45183 - DNA, 38 bp, Artificial Sequence
  primer
gtaaaacgacggccagtgtaagataggctggcctggag

SEQ ID NO: 45184 - DNA, 21 bp, Artificial Sequence
  primer
gtggtgggaatgatgagaagg

SEQ ID NO: 45185 - DNA, 20 bp, Artificial Sequence
  primer
tgtgggctgtgtctcagttg

SEQ ID NO: 45186 - DNA, 38 bp, Artificial Sequence
  primer
gtaaaacgacggccagtgctggatctgacaagtctccc

SEQ ID NO: 45187 - DNA, 38 bp, Artificial Sequence
  primer
gtaaaacgacggccagtgaggccaagatggtgtacctg

SEQ ID NO: 45188 - DNA, 39 bp, Artificial Sequence
  primer
gtaaaacgacggccagttgctgcagtagcagtgctttac

SEQ ID NO: 45189 - DNA, 20 bp, Artificial Sequence
  primer
gtagccacagacgttgcctc

SEQ ID NO: 45190 - DNA, 38 bp, Artificial Sequence
  primer
gtaaaacgacggccagtgcgtgtggtgagtctgttacc

SEQ ID NO: 45191 - DNA, 21 bp, Artificial Sequence
  primer
gtgctggaagtcagaaacgtg

SEQ ID NO: 45192 - DNA, 35 bp, Artificial Sequence
  primer
gtaaaacgacggccagtcatggtccacctgccttg

SEQ ID NO: 45193 - DNA, 37 bp, Artificial Sequence
  primer
gtaaaacgacggccagtattagccaaagccttggagg

SEQ ID NO: 45194 - DNA, 41 bp, Artificial Sequence
  primer
gtaaaacgacggccagtgctattatggcacttgttccaatc

SEQ ID NO: 45195 - DNA, 38 bp, Artificial Sequence
  primer
gtaaaacgacggccagtgagagttcctgtgctgtgtgg

SEQ ID NO: 45196 - DNA, 38 bp, Artificial Sequence
  primer
gtaaaacgacggccagtgtgcgctaattacaggagcag

SEQ ID NO: 45197 - DNA, 21 bp, Artificial Sequence
  primer
gctggaatggctttacttgtg

SEQ ID NO: 45198 - DNA, 44 bp, Artificial Sequence
  primer
gtaaaacgacggccagtaatgctagatccaggtaagtattgttg

SEQ ID NO: 45199 - DNA, 39 bp, Artificial Sequence
  primer
gtaaaacgacggccagtcaaccagtatgcatagcaccag

SEQ ID NO: 45200 - DNA, 38 bp, Artificial Sequence
  primer
gtaaaacgacggccagtcagaacttcgtttgggttgtg

SEQ ID NO: 45201 - DNA, 36 bp, Artificial Sequence
  primer
gtaaaacgacggccagttttgccaggagtgcaactg

SEQ ID NO: 45202 - DNA, 35 bp, Artificial Sequence; identical to SEQ ID NO: 9148
  primer

SEQ ID NO: 45203 - DNA, 40 bp, Artificial Sequence
  primer
gtaaaacgacggccagtctgaataatcctgaatgccaaag

SEQ ID NO: 45204 - DNA, 38 bp, Artificial Sequence
  primer
gtaaaacgacggccagttgttcaaggtcttctcgatgc

SEQ ID NO: 45205 - DNA, 39 bp, Artificial Sequence
  primer
gtaaaacgacggccagttgtatctcagctcaccaaaccc

SEQ ID NO: 45206 - DNA, 20 bp, Artificial Sequence
  primer
ccttagcgtagtgctggctg

SEQ ID NO: 45207 - DNA, 21 bp, Artificial Sequence
  primer
tttgtagctcccacttcaagg

SEQ ID NO: 45208 - DNA, 38 bp, Artificial Sequence
  primer
gtaaaacgacggccagtcagtgccaggatagcacagag

SEQ ID NO: 45209 - DNA, 38 bp, Artificial Sequence
  primer
gtaaaacgacggccagttttggcaatactggcaacatc

SEQ ID NO: 45210 - DNA, 38 bp, Artificial Sequence
  primer
gtaaaacgacggccagtgtcaacaacacagcttcaggg

SEQ ID NO: 45211 - DNA, 21 bp, Artificial Sequence
  primer
ctcttacgacgtcacggtcag

SEQ ID NO: 45212 - DNA, 21 bp, Artificial Sequence
  primer
catagtctccacctgtctggg

SEQ ID NO: 45213 - DNA, 21 bp, Artificial Sequence
  primer
gttgagtgattgttggaaggg

SEQ ID NO: 45214 - DNA, 18 bp, Artificial Sequence
  primer
gaggcaagagaatggcgg

SEQ ID NO: 45215 - DNA, 21 bp, Artificial Sequence
  primer
gatctcttcgatgggagcaag

SEQ ID NO: 45216 - DNA, 24 bp, Artificial Sequence
  primer
cagatggactcctgcttctatttc

SEQ ID NO: 45217 - DNA, 37 bp, Artificial Sequence
  primer
gtaaaacgacggccagttacagacatgtgccaccacg

SEQ ID NO: 45218 - DNA, 36 bp, Artificial Sequence
  primer
gtaaaacgacggccagtaccacgtctggcttgttgc

SEQ ID NO: 45219 - DNA, 25 bp, Artificial Sequence
  primer
gggtgtacataattctcagaaaggg

SEQ ID NO: 45220 - DNA, 38 bp, Artificial Sequence
  primer
gtaaaacgacggccagtggaagctattggaaagccaac

SEQ ID NO: 45221 - DNA, 43 bp, Artificial Sequence
  primer
gtaaaacgacggccagttttgtctttcatgagtaacttggttc

SEQ ID NO: 45222 - DNA, 38 bp, Artificial Sequence
  primer
gtaaaacgacggccagttttgagctgatgtatgcggtc

SEQ ID NO: 45223 - DNA, 25 bp, Artificial Sequence
  primer
cagagtatgtcatccacagacaaag

SEQ ID NO: 45224 - DNA, 38 bp, Artificial Sequence
  primer
gtaaaacgacggccagtttaggacccatttgctgaacc

SEQ ID NO: 45225 - DNA, 22 bp, Artificial Sequence
  primer
agattccaaatctgtttgaccc

SEQ ID NO: 45226 - DNA, 38 bp, Artificial Sequence
  primer
gtaaaacgacggccagtaaccagctgtgcgattatctg

SEQ ID NO: 45227 - DNA, 38 bp, Artificial Sequence
  primer
gtaaaacgacggccagttgctagtgtttagcgctggtc

SEQ ID NO: 45228 - DNA, 20 bp, Artificial Sequence
  primer
gtgctgaagcagaagggttc

SEQ ID NO: 45229 - DNA, 38 bp, Artificial Sequence
  primer
gtaaaacgacggccagtttcaatgtgggacagaatccc

SEQ ID NO: 45230 - DNA, 20 bp, Artificial Sequence
  primer
atcgcaccatttcactccac

SEQ ID NO: 45231 - DNA, 27 bp, Artificial Sequence
  primer
aaaggtatgtgatctaagtctaccctg

SEQ ID NO: 45232 - DNA, 21 bp, Artificial Sequence
  primer
atggatggctggagtaattgg

SEQ ID NO: 45233 - DNA, 20 bp, Artificial Sequence
  primer
caagcctgggtgactgagac

SEQ ID NO: 45234 - DNA, 40 bp, Artificial Sequence
  primer
gtaaaacgacggccagtaagctaggagtattgcttcccac

SEQ ID NO: 45235 - DNA, 39 bp, Artificial Sequence
  primer
gtaaaacgacggccagttcccaaagtgctagttgctagg

SEQ ID NO: 45236 - DNA, 38 bp, Artificial Sequence
  primer
gtaaaacgacggccagtaacacataggacctgtctggg

SEQ ID NO: 45237 - DNA, 43 bp, Artificial Sequence
  primer
gtaaaacgacggccagtccacaacctctgctgttatacaactt

SEQ ID NO: 45238 - DNA, 39 bp, Artificial Sequence
  primer
gtaaaacgacggccagtgtggtcacgttgttgctatttc

SEQ ID NO: 45239 - DNA, 38 bp, Artificial Sequence
  primer
gtaaaacgacggccagtgggcctcatatacccattgtc

SEQ ID NO: 45240 - DNA, 38 bp, Artificial Sequence
  primer
gtaaaacgacggccagtgagattgggagactgtgggag

SEQ ID NO: 45241 - DNA, 38 bp, Artificial Sequence
  primer
gtaaaacgacggccagttcaacatcttcctagcccttg

SEQ ID NO: 45242 - DNA, 44 bp, Artificial Sequence
  primer
gtaaaacgacggccagtttgttcttcactgagtttagattcttg

SEQ ID NO: 45243 - DNA, 41 bp, Artificial Sequence
  primer
gtaaaacgacggccagttcgaggatttattaggtggatcag

SEQ ID NO: 45244 - DNA, 44 bp, Artificial Sequence
  primer
gtaaaacgacggccagttttattacattgacatacaccaccttg

SEQ ID NO: 45245 - DNA, 23 bp, Artificial Sequence
  primer
ttcccatggatctgtgtagtagg

SEQ ID NO: 45246 - DNA, 41 bp, Artificial Sequence
  primer
gtaaaacgacggccagtttcagagaataatttgtggtgtgg

SEQ ID NO: 45247 - DNA, 21 bp, Artificial Sequence
  primer
gccagcctagtctttgtcagc

SEQ ID NO: 45248 - DNA, 37 bp, Artificial Sequence
  primer
gtaaaacgacggccagttcctggacctccgtgatatg

SEQ ID NO: 45249 - DNA, 21 bp, Artificial Sequence
  primer
gtttggttggttggttggttc

SEQ ID NO: 45250 - DNA, 21 bp, Artificial Sequence
  primer
ggatctattccgcaagcctac

SEQ ID NO: 45251 - DNA, 22 bp, Artificial Sequence
  primer
caatggttgtacatgatgggtc

SEQ ID NO: 45252 - DNA, 38 bp, Artificial Sequence
  primer
gtaaaacgacggccagttactttgtgcccagcattgtg

SEQ ID NO: 45253 - DNA, 41 bp, Artificial Sequence
  primer
gtaaaacgacggccagttctaagtagaaatctggcattggc

SEQ ID NO: 45254 - DNA, 21 bp, Artificial Sequence
  primer
aaatttggtggagagctgtgg

SEQ ID NO: 45255 - DNA, 41 bp, Artificial Sequence
  primer
gtaaaacgacggccagttccttcactacctagaggatttgc

SEQ ID NO: 45256 - DNA, 39 bp, Artificial Sequence
  primer
gtaaaacgacggccagtccacctctgtgatccaataacc

SEQ ID NO: 45257 - DNA, 21 bp, Artificial Sequence
  primer
ggttaaggaatgcaaagctgg

SEQ ID NO: 45258 - DNA, 24 bp, Artificial Sequence
  primer
tcccagttacctttctatcgtgtc

SEQ ID NO: 45259 - DNA, 22 bp, Artificial Sequence
  primer
gcgaccatgtagatatgctttg

SEQ ID NO: 45260 - DNA, 39 bp, Artificial Sequence
  primer
gtaaaacgacggccagtgcacagagattgcacttaaccc

SEQ ID NO: 45261 - DNA, 21 bp, Artificial Sequence
  primer
agttgggtcttgttcctttgc

SEQ ID NO: 45262 - DNA, 38 bp, Artificial Sequence
  primer
gtaaaacgacggccagtcctttcacgtgacgaagagtg

SEQ ID NO: 45263 - DNA, 21 bp, Artificial Sequence
  primer
gttaggctggaggacaggttc

SEQ ID NO: 45264 - DNA, 39 bp, Artificial Sequence
  primer
gtaaaacgacggccagtggtacctaagtgcctctggagc

SEQ ID NO: 45265 - DNA, 43 bp, Artificial Sequence
  primer
gtaaaacgacggccagttttgctaacctgtaagagatgagaag

SEQ ID NO: 45266 - DNA, 22 bp, Artificial Sequence
  primer
tcatctcggaggagaaacagtc

SEQ ID NO: 45267 - DNA, 38 bp, Artificial Sequence
  primer
gtaaaacgacggccagtaaccctgagaccagtggaatg

SEQ ID NO: 45268 - DNA, 21 bp, Artificial Sequence
  primer
cctctaacccagtgggaacac

SEQ ID NO: 45269 - DNA, 38 bp, Artificial Sequence
  primer
gtaaaacgacggccagttgggtctgcaccagatatcac

SEQ ID NO: 45270 - DNA, 38 bp, Artificial Sequence
  primer
gtaaaacgacggccagttgcaaatgatgcggtaaagtc

SEQ ID NO: 45271 - DNA, 38 bp, Artificial Sequence
  primer
gtaaaacgacggccagtgcaatggaagcaagtccagtc

SEQ ID NO: 45272 - DNA, 38 bp, Artificial Sequence
  primer
gtaaaacgacggccagttaaggtgcaagctctcattgg

SEQ ID NO: 45273 - DNA, 20 bp, Artificial Sequence
  primer
tcaaatgatctgcccacctc

SEQ ID NO: 45274 - DNA, 21 bp, Artificial Sequence
  primer
aataggctgagggagctggag

SEQ ID NO: 45275 - DNA, 21 bp, Artificial Sequence
  primer
ggtcaaatggatatgggttcc

SEQ ID NO: 45276 - DNA, 21 bp, Artificial Sequence
  primer
agcctttgtgaacaggactgg

SEQ ID NO: 45277 - DNA, 21 bp, Artificial Sequence
  primer
gcctctagggctgaaagactg

SEQ ID NO: 45278 - DNA, 38 bp, Artificial Sequence
  primer
gtaaaacgacggccagtgtagggccttgctgagacttg

SEQ ID NO: 45279 - DNA, 36 bp, Artificial Sequence
  primer
gtaaaacgacggccagtcaccaaccagcccttcttc

SEQ ID NO: 45280 - DNA, 36 bp, Artificial Sequence
  primer
gtaaaacgacggccagtgcctgctgcctctcctttc

SEQ ID NO: 45281 - DNA, 21 bp, Artificial Sequence
  primer
gtctgacttctcatggccacc

SEQ ID NO: 45282 - DNA, 38 bp, Artificial Sequence
  primer
gtaaaacgacggccagtctgtgcagaaagaacgctttg

SEQ ID NO: 45283 - DNA, 37 bp, Artificial Sequence
  primer
gtaaaacgacggccagtgttcagcatctccaggaccc

SEQ ID NO: 45284 - DNA, 38 bp, Artificial Sequence
  primer
gtaaaacgacggccagtgacccttacctgatatggccc

SEQ ID NO: 45285 - DNA, 38 bp, Artificial Sequence
  primer
gtaaaacgacggccagtgagatcgtgagtgtcagaggc

SEQ ID NO: 45286 - DNA, 37 bp, Artificial Sequence
  primer
gtaaaacgacggccagtggaagcagctgatcctggag

SEQ ID NO: 45287 - DNA, 38 bp, Artificial Sequence
  primer
gtaaaacgacggccagtgtgtcatcggtgtccttcctc

SEQ ID NO: 45288 - DNA, 21 bp, Artificial Sequence
  primer
tttagcttgtgccaatggatg

SEQ ID NO: 45289 - DNA, 40 bp, Artificial Sequence
  primer
gtaaaacgacggccagtaatagggtgttcataggtgggtc

SEQ ID NO: 45290 - DNA, 38 bp, Artificial Sequence
  primer
gtaaaacgacggccagtttatgaagccaatttccctgg

SEQ ID NO: 45291 - DNA, 38 bp, Artificial Sequence
  primer
gtaaaacgacggccagttatggttggagtggcacagac

SEQ ID NO: 45292 - DNA, 40 bp, Artificial Sequence
  primer
gtaaaacgacggccagtgaggttagctcaccctattcagc

SEQ ID NO: 45293 - DNA, 20 bp, Artificial Sequence
  primer
tacggtggtgctcctaaggg

SEQ ID NO: 45294 - DNA, 38 bp, Artificial Sequence
  primer
gtaaaacgacggccagtgcttgatatgggctttgaacc

SEQ ID NO: 45295 - DNA, 21 bp, Artificial Sequence
  primer
aagtggattagcaggcgtttc

SEQ ID NO: 45296 - DNA, 21 bp, Artificial Sequence
  primer
aaacttggatcacgagcagtg

SEQ ID NO: 45297 - DNA, 38 bp, Artificial Sequence
  primer
gtaaaacgacggccagtgcgtgactgggttctaaatgg

SEQ ID NO: 45298 - DNA, 36 bp, Artificial Sequence
  primer
gtaaaacgacggccagttttggtctggctgttgtgg

SEQ ID NO: 45299 - DNA, 21 bp, Artificial Sequence
  primer
ttgcttcagttggtcgaagac

SEQ ID NO: 45300 - DNA, 38 bp, Artificial Sequence
  primer
gtaaaacgacggccagttttcttgacagtcgttccagg

SEQ ID NO: 45301 - DNA, 19 bp, Artificial Sequence
  primer
ccaatgggagctttggaag

SEQ ID NO: 45302 - DNA, 21 bp, Artificial Sequence
  primer
cttaaaccgagagtatccggg

SEQ ID NO: 45303 - DNA, 38 bp, Artificial Sequence
  primer
gtaaaacgacggccagtagattgagctgaactggtggg

SEQ ID NO: 45304 - DNA, 18 bp, Artificial Sequence
  primer
tgggcaacagagtgggac

SEQ ID NO: 45305 - DNA, 21 bp, Artificial Sequence
  primer
accaggtggcatgtctttagg

SEQ ID NO: 45306 - DNA, 21 bp, Artificial Sequence
  primer
tgggaacctcactgaagagac

SEQ ID NO: 45307 - DNA, 21 bp, Artificial Sequence
  primer
gacgtgcaaaggcatatttga

SEQ ID NO: 45308 - DNA, 25 bp, Artificial Sequence
  primer
ggttcagttctcttcatattgtccc

SEQ ID NO: 45309 - DNA, 38 bp, Artificial Sequence
  primer
gtaaaacgacggccagttcccaggaaggctaattcttg

SEQ ID NO: 45310 - DNA, 42 bp, Artificial Sequence
  primer
gtaaaacgacggccagtaaaggagcacagactagatgttgtt

SEQ ID NO: 45311 - DNA, 20 bp, Artificial Sequence
  primer
agaaacctgggatgaggtgg

SEQ ID NO: 45312 - DNA, 42 bp, Artificial Sequence
  primer
gtaaaacgacggccagttgcaagaaatagaaattcaacgaac

SEQ ID NO: 45313 - DNA, 20 bp, Artificial Sequence
  primer
gactgggtgacagagcaagg

SEQ ID NO: 45314 - DNA, 21 bp, Artificial Sequence
  primer
tctttcttggctctggtttgc

SEQ ID NO: 45315 - DNA, 20 bp, Artificial Sequence
  primer
aagcagccactgagtcatgc

SEQ ID NO: 45316 - DNA, 41 bp, Artificial Sequence
  primer
gtaaaacgacggccagtacgttaacagaatagatggccttt

SEQ ID NO: 45317 - DNA, 19 bp, Artificial Sequence
  primer
catctctacgcgccgtacc

SEQ ID NO: 45318 - DNA, 35 bp, Artificial Sequence
  primer
gtaaaacgacggccagtcagggaaagcgacggaag

SEQ ID NO: 45319 - DNA, 38 bp, Artificial Sequence
  primer
gtaaaacgacggccagttgaagacgacagaggtttccc

SEQ ID NO: 45320 - DNA, 20 bp, Artificial Sequence
  primer
agaggtcacaggcagggaag

SEQ ID NO: 45321 - DNA, 21 bp, Artificial Sequence
  primer
gcctagcgacctctgtgtttc

SEQ ID NO: 45322 - DNA, 37 bp, Artificial Sequence
  primer
gtaaaacgacggccagtgtggaccctagacctggagc

SEQ ID NO: 45323 - DNA, 21 bp, Artificial Sequence
  primer
gccaccatctttaaccacctg

SEQ ID NO: 45324 - DNA, 38 bp, Artificial Sequence
  primer
gtaaaacgacggccagtctctcgagctgctctctggtc

SEQ ID NO: 45325 - DNA, 38 bp, Artificial Sequence
  primer
gtaaaacgacggccagtctggtctgcggcagtctctac

SEQ ID NO: 45326 - DNA, 37 bp, Artificial Sequence
  primer
gtaaaacgacggccagtggtgagtgggataccgtgtg

SEQ ID NO: 45327 - DNA, 20 bp, Artificial Sequence
  primer
actcccgagagaactcccac

SEQ ID NO: 45328 - DNA, 20 bp, Artificial Sequence
  primer
agttcccagaaaggcctgag

SEQ ID NO: 45329 - DNA, 38 bp, Artificial Sequence
  primer
gtaaaacgacggccagtgagagaagctgtcgttccgtc

SEQ ID NO: 45330 - DNA, 38 bp, Artificial Sequence
  primer
gtaaaacgacggccagttcttgggagtttctgctgttg

SEQ ID NO: 45331 - DNA, 20 bp, Artificial Sequence
  primer
cttcctgtcctcagggttcc

SEQ ID NO: 45332 - DNA, 38 bp, Artificial Sequence
  primer
gtaaaacgacggccagtaattatgctcacgccctcttc

SEQ ID NO: 45333 - DNA, 40 bp, Artificial Sequence
  primer
gtaaaacgacggccagtgagtcattgaacagtcttgcttg

SEQ ID NO: 45334 - DNA, 37 bp, Artificial Sequence
  primer
gtaaaacgacggccagtggcatgatcacagctgtctg

SEQ ID NO: 45335 - DNA, 38 bp, Artificial Sequence
  primer
gtaaaacgacggccagttgctgctaaaggttatcccag

SEQ ID NO: 45336 - DNA, 38 bp, Artificial Sequence
  primer
gtaaaacgacggccagtggctggtagcgttatttgacc

SEQ ID NO: 45337 - DNA, 40 bp, Artificial Sequence
  primer
gtaaaacgacggccagttgggaactagtttattccacctg

SEQ ID NO: 45338 - DNA, 21 bp, Artificial Sequence
  primer
agcccaagagtttgaagttgc

SEQ ID NO: 45339 - DNA, 40 bp, Artificial Sequence
  primer
gtaaaacgacggccagtgacttcctcatgtgtccactgtc

SEQ ID NO: 45340 - DNA, 38 bp, Artificial Sequence
  primer
gtaaaacgacggccagttttaatgggtggcatttcaag

SEQ ID NO: 45341 - DNA, 21 bp, Artificial Sequence
  primer
caagaaatttggccaagaaag

SEQ ID NO: 45342 - DNA, 39 bp, Artificial Sequence
  primer
gtaaaacgacggccagtggtttcaatccacctgttcttg

SEQ ID NO: 45343 - DNA, 39 bp, Artificial Sequence
  primer
gtaaaacgacggccagtccactgatctgtcttaggaccc

SEQ ID NO: 45344 - DNA, 38 bp, Artificial Sequence
  primer
gtaaaacgacggccagttccctgtaaggttgtgcagag

SEQ ID NO: 45345 - DNA, 39 bp, Artificial Sequence
  primer
gtaaaacgacggccagtctggtggtagggttatggaaag

SEQ ID NO: 45346 - DNA, 38 bp, Artificial Sequence
  primer
gtaaaacgacggccagtacttccaaccgtatgtaggcg

SEQ ID NO: 45347 - DNA, 21 bp, Artificial Sequence
  primer
tatggttggtgtggtcattgg

SEQ ID NO: 45348 - DNA, 21 bp, Artificial Sequence
  primer
gataatgctgcatcccaaacc

SEQ ID NO: 45349 - DNA, 20 bp, Artificial Sequence
  primer
tgtaaagccaacgccaattc

SEQ ID NO: 45350 - DNA, 21 bp, Artificial Sequence
  primer
gcctgggatgctagtccttac

SEQ ID NO: 45351 - DNA, 39 bp, Artificial Sequence
  primer
gtaaaacgacggccagttggccagatactgtacgtcaac

SEQ ID NO: 45352 - DNA, 21 bp, Artificial Sequence
  primer
tcacccaacgacaaagtcatc

SEQ ID NO: 45353 - DNA, 21 bp, Artificial Sequence
  primer
tagggtacattggacggacag

SEQ ID NO: 45354 - DNA, 19 bp, Artificial Sequence
  primer
aaagctcagcggaggtcac

SEQ ID NO: 45355 - DNA, 21 bp, Artificial Sequence
  primer
gaagcatcattggcttgaatg

SEQ ID NO: 45356 - DNA, 21 bp, Artificial Sequence
  primer
tcagataaggttcaggtgccc

SEQ ID NO: 45357 - DNA, 37 bp, Artificial Sequence
  primer
gtaaaacgacggccagtaagaataggctcagggctgg

SEQ ID NO: 45358 - DNA, 20 bp, Artificial Sequence
  primer
gcttcctcctcccaatgttc

SEQ ID NO: 45359 - DNA, 21 bp, Artificial Sequence
  primer
atacctcagcactggcctttc

SEQ ID NO: 45360 - DNA, 38 bp, Artificial Sequence
  primer
gtaaaacgacggccagtatcccgacatgtgagtttgtg

SEQ ID NO: 45361 - DNA, 38 bp, Artificial Sequence
  primer
gtaaaacgacggccagtgagttagagtgaggcaagccc

SEQ ID NO: 45362 - DNA, 37 bp, Artificial Sequence
  primer
gtaaaacgacggccagtcaccagacggtgctgttctc

SEQ ID NO: 45363 - DNA, 38 bp, Artificial Sequence
  primer
gtaaaacgacggccagtataccaagctcaacgagcagc

SEQ ID NO: 45364 - DNA, 38 bp, Artificial Sequence
  primer
gtaaaacgacggccagtggtcttgtctctgcacctcag

SEQ ID NO: 45365 - DNA, 38 bp, Artificial Sequence
  primer
gtaaaacgacggccagtaaacttccctgtgcgtaggtg

SEQ ID NO: 45366 - DNA, 21 bp, Artificial Sequence
  primer
ccatttacctgtgattcaggg

SEQ ID NO: 45367 - DNA, 38 bp, Artificial Sequence
  primer
gtaaaacgacggccagtgagtccttctacaaggcaggg

SEQ ID NO: 45368 - DNA, 37 bp, Artificial Sequence
  primer
gtaaaacgacggccagtcccaccaagtggtaagggtg

SEQ ID NO: 45369 - DNA, 38 bp, Artificial Sequence
  primer
gtaaaacgacggccagttgtcacccagctaagaaatgg

SEQ ID NO: 45370 - DNA, 38 bp, Artificial Sequence
  primer
gtaaaacgacggccagtcgggaccaggaattctacatc

SEQ ID NO: 45371 - DNA, 38 bp, Artificial Sequence
  primer
gtaaaacgacggccagtatgctccaacaacctgacaag

SEQ ID NO: 45372 - DNA, 21 bp, Artificial Sequence
  primer
cagcttcagcaacagcatctc

SEQ ID NO: 45373 - DNA, 38 bp, Artificial Sequence
  primer
gtaaaacgacggccagtgaggagtctgcaagcttctgg

SEQ ID NO: 45374 - DNA, 19 bp, Artificial Sequence
  primer
ctccggaactctgctgctc

SEQ ID NO: 45375 - DNA, 21 bp, Artificial Sequence
  primer
acccactgtgaccttagctgc

SEQ ID NO: 45376 - DNA, 37 bp, Artificial Sequence
  primer
gtaaaacgacggccagtcagcctgtcctcgtgttctc

SEQ ID NO: 45377 - DNA, 21 bp, Artificial Sequence
  primer
ttcctttgtgtggtagagggc

SEQ ID NO: 45378 - DNA, 38 bp, Artificial Sequence
  primer
gtaaaacgacggccagtgttcaggtgaattggatgcag

SEQ ID NO: 45379 - DNA, 22 bp, Artificial Sequence
  primer
tttctaccctgcagcactcttc

SEQ ID NO: 45380 - DNA, 22 bp, Artificial Sequence
  primer
tttgatggcttcactttcagtc

SEQ ID NO: 45381 - DNA, 38 bp, Artificial Sequence
  primer
gtaaaacgacggccagtgttgcctgttggatgactgtg

SEQ ID NO: 45382 - DNA, 21 bp, Artificial Sequence
  primer
tgctgcagctattgctcactg

SEQ ID NO: 45383 - DNA, 38 bp, Artificial Sequence
  primer
gtaaaacgacggccagtcagcacctgtgtgtcactgtc

SEQ ID NO: 45384 - DNA, 38 bp, Artificial Sequence
  primer
gtaaaacgacggccagtctgagctgtggaggctagagg

SEQ ID NO: 45385 - DNA, 20 bp, Artificial Sequence
  primer
ggagttgggcttcagacctc

SEQ ID NO: 45386 - DNA, 38 bp, Artificial Sequence
  primer
gtaaaacgacggccagttgaatgcattaaaccctttgg

SEQ ID NO: 45387 - DNA, 21 bp, Artificial Sequence
  primer
tttgctctatttgcagaagcc

SEQ ID NO: 45388 - DNA, 38 bp, Artificial Sequence
  primer
gtaaaacgacggccagtctccaccgcctcctactagac

SEQ ID NO: 45389 - DNA, 36 bp, Artificial Sequence
  primer
gtaaaacgacggccagtggctccttcaggtacacgc

SEQ ID NO: 45390 - DNA, 38 bp, Artificial Sequence
  primer
gtaaaacgacggccagttagtgttgcagcagatgggtc

SEQ ID NO: 45391 - DNA, 22 bp, Artificial Sequence
  primer
tgaagctacacagtgttgtggg

SEQ ID NO: 45392 - DNA, 38 bp, Artificial Sequence
  primer
gtaaaacgacggccagtggtgggtgtgattcctagtgg

SEQ ID NO: 45393 - DNA, 38 bp, Artificial Sequence
  primer
gtaaaacgacggccagttttggttggtgagtaagtggc

SEQ ID NO: 45394 - DNA, 38 bp, Artificial Sequence
  primer
gtaaaacgacggccagttgatactagggatggcagagg

SEQ ID NO: 45395 - DNA, 38 bp, Artificial Sequence
  primer
gtaaaacgacggccagtggttccattgttggagagtcc

SEQ ID NO: 45396 - DNA, 38 bp, Artificial Sequence
  primer
gtaaaacgacggccagtgtaggcacactgagggacttg

SEQ ID NO: 45397 - DNA, 21 bp, Artificial Sequence
  primer
aggagaagagagtgggtgacg

SEQ ID NO: 45398 - DNA, 39 bp, Artificial Sequence
  primer
gtaaaacgacggccagtttcttctccacagagaacaggg

SEQ ID NO: 45399 - DNA, 21 bp, Artificial Sequence
  primer
gggaggttctgagaaatgcac

SEQ ID NO: 45400 - DNA, 38 bp, Artificial Sequence
  primer
gtaaaacgacggccagtaaggtgctcacattctcctgg

SEQ ID NO: 45401 - DNA, 39 bp, Artificial Sequence
  primer
gtaaaacgacggccagttttccttatctgcagcaccttc

SEQ ID NO: 45402 - DNA, 37 bp, Artificial Sequence
  primer
gtaaaacgacggccagtggaaacgaaactagcccgag

SEQ ID NO: 45403 - DNA, 38 bp, Artificial Sequence
  primer
gtaaaacgacggccagtcctatttgggaaggtctggtg

SEQ ID NO: 45404 - DNA, 43 bp, Artificial Sequence
  primer
gtaaaacgacggccagttgaattctaccaccatacattcaaac

SEQ ID NO: 45405 - DNA, 38 bp, Artificial Sequence
  primer
gtaaaacgacggccagtgatgagaaggcttggcttgac

SEQ ID NO: 45406 - DNA, 21 bp, Artificial Sequence
  primer
attacattggaggtcaacgcc

SEQ ID NO: 45407 - DNA, 39 bp, Artificial Sequence
  primer
gtaaaacgacggccagttgaggatcttcttgctggagtc

SEQ ID NO: 45408 - DNA, 21 bp, Artificial Sequence
  primer
tgctacttagggagcagcttg

SEQ ID NO: 45409 - DNA, 38 bp, Artificial Sequence
  primer
gtaaaacgacggccagtgctctgtgctaaggacttgcc

SEQ ID NO: 45410 - DNA, 37 bp, Artificial Sequence
  primer
gtaaaacgacggccagtattatgtgcctccatgtgcc

SEQ ID NO: 45411 - DNA, 21 bp, Artificial Sequence
  primer
tacaagaagcaacagggagcc

SEQ ID NO: 45412 - DNA, 18 bp, Artificial Sequence
  primer
gccaagatcgtgccattg

SEQ ID NO: 45413 - DNA, 44 bp, Artificial Sequence
  primer
gtaaaacgacggccagtttgttacataactgttagaggccattc

SEQ ID NO: 45414 - DNA, 23 bp, Artificial Sequence
  primer
agatcagctgtttgaacgatagc

SEQ ID NO: 45415 - DNA, 38 bp, Artificial Sequence
  primer
gtaaaacgacggccagtgcggtagaccaagactccatc

SEQ ID NO: 45416 - DNA, 23 bp, Artificial Sequence
  primer
gaatagatcccactgcctaggtg

SEQ ID NO: 45417 - DNA, 37 bp, Artificial Sequence
  primer
gtaaaacgacggccagtctgggaagtgggattcagtg

SEQ ID NO: 45418 - DNA, 40 bp, Artificial Sequence
  primer
gtaaaacgacggccagtttgtacgtatctgtgcctgtttc

SEQ ID NO: 45419 - DNA, 21 bp, Artificial Sequence
  primer
gtgagacccacctgttctttg

SEQ ID NO: 45420 - DNA, 42 bp, Artificial Sequence
  primer
gtaaaacgacggccagtaaaggactcatttattgagcaagac

SEQ ID NO: 45421 - DNA, 21 bp, Artificial Sequence
  primer
tggatgccttaatcccttctg

SEQ ID NO: 45422 - DNA, 18 bp, Artificial Sequence
  primer
ctgcgactacaggcgtgc

SEQ ID NO: 45423 - DNA, 39 bp, Artificial Sequence
  primer
gtaaaacgacggccagtccgaaagaggtatccttcagtg

SEQ ID NO: 45424 - DNA, 22 bp, Artificial Sequence
  primer
gcatcataaggcgcagtatttc

SEQ ID NO: 45425 - DNA, 36 bp, Artificial Sequence
  primer
gtaaaacgacggccagtttgtggtcagtgacggctg

SEQ ID NO: 45426 - DNA, 40 bp, Artificial Sequence
  primer
gtaaaacgacggccagtggatgatgccttattctttgacc

SEQ ID NO: 45427 - DNA, 22 bp, Artificial Sequence
  primer
tgaagagagttgcgtcccttac

SEQ ID NO: 45428 - DNA, 21 bp, Artificial Sequence
  primer
ttgttgacagttatgtggccc

SEQ ID NO: 45429 - DNA, 40 bp, Artificial Sequence
  primer
gtaaaacgacggccagtcgtctgggagaaataattatggg

SEQ ID NO: 45430 - DNA, 24 bp, Artificial Sequence
  primer
ttgggagcagaaagttatttatga

SEQ ID NO: 45431 - DNA, 19 bp, Artificial Sequence
  primer
ttgccactgcttgacttgc

SEQ ID NO: 45432 - DNA, 21 bp, Artificial Sequence
  primer
ggctgcacttctttgtttcag

SEQ ID NO: 45433 - DNA, 38 bp, Artificial Sequence
  primer
gtaaaacgacggccagttattggcagaaaggataggcg

SEQ ID NO: 45434 - DNA, 37 bp, Artificial Sequence
  primer
gtaaaacgacggccagtgttcctctccaggatggctg

SEQ ID NO: 45435 - DNA, 23 bp, Artificial Sequence
  primer
tttggaagtgtacctccttaccc

SEQ ID NO: 45436 - DNA, 38 bp, Artificial Sequence
  primer
gtaaaacgacggccagtgtgtatccctggatatcgggc

SEQ ID NO: 45437 - DNA, 35 bp, Artificial Sequence
  primer
gtaaaacgacggccagtctctgttcgcctcggctc

SEQ ID NO: 45438 - DNA, 38 bp, Artificial Sequence
  primer
gtaaaacgacggccagttcttcctggttacaagggcac

SEQ ID NO: 45439 - DNA, 38 bp, Artificial Sequence
  primer
gtaaaacgacggccagttcttggtgagaacagccagag

SEQ ID NO: 45440 - DNA, 37 bp, Artificial Sequence
  primer
gtaaaacgacggccagtgggaggtggtgtctgagatg

SEQ ID NO: 45441 - DNA, 38 bp, Artificial Sequence
  primer
gtaaaacgacggccagtccaagtatgtgggtgggtgag

SEQ ID NO: 45442 - DNA, 21 bp, Artificial Sequence
  primer
gcaacccaacaagactctgtc

SEQ ID NO: 45443 - DNA, 21 bp, Artificial Sequence
  primer
cttaaggaggagttgcaagcg

SEQ ID NO: 45444 - DNA, 38 bp, Artificial Sequence
  primer
gtaaaacgacggccagtccttcacatgggagggtacag

SEQ ID NO: 45445 - DNA, 38 bp, Artificial Sequence
  primer
gtaaaacgacggccagttcaacgattcaggatcaccac

SEQ ID NO: 45446 - DNA, 35 bp, Artificial Sequence
  primer
gtaaaacgacggccagtcctgacctcatgatccgc

SEQ ID NO: 45447 - DNA, 21 bp, Artificial Sequence
  primer
gtgtcaggcacctatcatccc

SEQ ID NO: 45448 - DNA, 38 bp, Artificial Sequence
  primer
gtaaaacgacggccagtagcacctccaggtgaggttac

SEQ ID NO: 45449 - DNA, 23 bp, Artificial Sequence
  primer
tctgtgctatgtagtccagctcc

SEQ ID NO: 45450 - DNA, 23 bp, Artificial Sequence
  primer
tgtaaacctggcttatcaaggaa

SEQ ID NO: 45451 - DNA, 44 bp, Artificial Sequence
  primer
gtaaaacgacggccagttgtttatttctaggaagatggatgttt

SEQ ID NO: 45452 - DNA, 40 bp, Artificial Sequence
  primer
gtaaaacgacggccagtttgtttcgtaggtagctgtggac

SEQ ID NO: 45453 - DNA, 21 bp, Artificial Sequence
  primer
tccaagtaagtgcagattggg

SEQ ID NO: 45454 - DNA, 40 bp, Artificial Sequence
  primer
gtaaaacgacggccagtgggttgtaatctctggcatgtag

SEQ ID NO: 45455 - DNA, 26 bp, Artificial Sequence
  primer
gcttgtacatatttcaggataccttt

SEQ ID NO: 45456 - DNA, 38 bp, Artificial Sequence
  primer
gtaaaacgacggccagttttgggcttgatttaaagtgc

SEQ ID NO: 45457 - DNA, 22 bp, Artificial Sequence
  primer
gaattcaacgacctgagaaagg

SEQ ID NO: 45458 - DNA, 18 bp, Artificial Sequence
  primer
ctccgggaagcaatcagg

SEQ ID NO: 45459 - DNA, 21 bp, Artificial Sequence
  primer
ctaggactacaggcacccacc

SEQ ID NO: 45460 - DNA, 38 bp, Artificial Sequence
  primer
gtaaaacgacggccagttacttccgcctgagagactcc

SEQ ID NO: 45461 - DNA, 21 bp, Artificial Sequence
  primer
caggttcccacaaacatccac

SEQ ID NO: 45462 - DNA, 38 bp, Artificial Sequence
  primer
gtaaaacgacggccagtttatcctagggcatgggtctc

SEQ ID NO: 45463 - DNA, 21 bp, Artificial Sequence
  primer
tctgtgagaagttcttccggg

SEQ ID NO: 45464 - DNA, 37 bp, Artificial Sequence
  primer
gtaaaacgacggccagttctccacttgaagctgagcc

SEQ ID NO: 45465 - DNA, 38 bp, Artificial Sequence
  primer
gtaaaacgacggccagtagatgcctctcagggaatgag

SEQ ID NO: 45466 - DNA, 21 bp, Artificial Sequence
  primer
gtgtctcatcggttctttccc

SEQ ID NO: 45467 - DNA, 37 bp, Artificial Sequence
  primer
gtaaaacgacggccagtgaggacacattgatcctggg

SEQ ID NO: 45468 - DNA, 21 bp, Artificial Sequence
  primer
tctcctgacctcatgatccac

SEQ ID NO: 45469 - DNA, 21 bp, Artificial Sequence
  primer
ttaagggaacctcctgcattc

SEQ ID NO: 45470 - DNA, 20 bp, Artificial Sequence
  primer
aacagacatcagactgcggg

SEQ ID NO: 45471 - DNA, 38 bp, Artificial Sequence
  primer
gtaaaacgacggccagtatttgggctctgactactggg

SEQ ID NO: 45472 - DNA, 20 bp, Artificial Sequence
  primer
agcaccgagaacaccttgag

SEQ ID NO: 45473 - DNA, 21 bp, Artificial Sequence
  primer
tgtgtcaggactagggtgtgg

SEQ ID NO: 45474 - DNA, 38 bp, Artificial Sequence
  primer
gtaaaacgacggccagtagaacaacaggcagggttctc

SEQ ID NO: 45475 - DNA, 20 bp, Artificial Sequence
  primer
aggacaagcagagaggtggg

SEQ ID NO: 45476 - DNA, 38 bp, Artificial Sequence
  primer
gtaaaacgacggccagtagatgaacccaagaaacccag

SEQ ID NO: 45477 - DNA, 39 bp, Artificial Sequence
  primer
gtaaaacgacggccagtgatagagcactccctggtgttg

SEQ ID NO: 45478 - DNA, 21 bp, Artificial Sequence
  primer
tcatccaagatgtcctgaagc

SEQ ID NO: 45479 - DNA, 21 bp, Artificial Sequence
  primer
aagatagccaggagggctagg

SEQ ID NO: 45480 - DNA, 38 bp, Artificial Sequence
  primer
gtaaaacgacggccagttggactcgggaaactcctaag

SEQ ID NO: 45481 - DNA, 36 bp, Artificial Sequence
  primer
gtaaaacgacggccagtcttagcaacatgcccaccc

SEQ ID NO: 45482 - DNA, 21 bp, Artificial Sequence
  primer
cttctggttctctcaccaccc

SEQ ID NO: 45483 - DNA, 21 bp, Artificial Sequence
  primer
catgaaattggaggcaaactc

SEQ ID NO: 45484 - DNA, 18 bp, Artificial Sequence
  primer
ctccagatctcccagggc

SEQ ID NO: 45485 - DNA, 38 bp, Artificial Sequence
  primer
gtaaaacgacggccagtaccaatgggcctctcttgtaa

SEQ ID NO: 45486 - DNA, 40 bp, Artificial Sequence
  primer
gtaaaacgacggccagttctcccagcaaagctataaatcc

SEQ ID NO: 45487 - DNA, 38 bp, Artificial Sequence
  primer
gtaaaacgacggccagttatgagcagcattgctctgtg

SEQ ID NO: 45488 - DNA, 39 bp, Artificial Sequence
  primer
gtaaaacgacggccagtcccagcagagctataaatccag

SEQ ID NO: 45489 - DNA, 43 bp, Artificial Sequence
  primer
gtaaaacgacggccagtgatttcttgtcacttacgacaaagac

SEQ ID NO: 45490 - DNA, 21 bp, Artificial Sequence
  primer
aacatctgtccctgagccttc

SEQ ID NO: 45491 - DNA, 21 bp, Artificial Sequence
  primer
tgtgtgaccaacactgctctg

SEQ ID NO: 45492 - DNA, 38 bp, Artificial Sequence
  primer
gtaaaacgacggccagtaaatacagtgacgctccagcc

SEQ ID NO: 45493 - DNA, 38 bp, Artificial Sequence
  primer
gtaaaacgacggccagtttcgcgagatgttctcaaatc

SEQ ID NO: 45494 - DNA, 24 bp, Artificial Sequence
  primer
tgcacccacatcatactaatgaac

SEQ ID NO: 45495 - DNA, 22 bp, Artificial Sequence
  primer
ccaaatctttgtgtgacagcag

SEQ ID NO: 45496 - DNA, 38 bp, Artificial Sequence
  primer
gtaaaacgacggccagttccaacttgcacacacatgat

SEQ ID NO: 45497 - DNA, 21 bp, Artificial Sequence
  primer
gtggcactattcaaccaagca

SEQ ID NO: 45498 - DNA, 38 bp, Artificial Sequence
  primer
gtaaaacgacggccagttttgcttcatggactttctcc

SEQ ID NO: 45499 - DNA, 23 bp, Artificial Sequence
  primer
gaggcaactacatttgtgtcctt

SEQ ID NO: 45500 - DNA, 41 bp, Artificial Sequence
  primer
gtaaaacgacggccagttgtctgtgattactcccatgtctt

SEQ ID NO: 45501 - DNA, 38 bp, Artificial Sequence
  primer
gtaaaacgacggccagtgtaatcacgccaagaaggctg

SEQ ID NO: 45502 - DNA, 21 bp, Artificial Sequence
  primer
gagttgcttgggcatgatttc

SEQ ID NO: 45503 - DNA, 38 bp, Artificial Sequence
  primer
gtaaaacgacggccagtttggagcagagataggcacac

SEQ ID NO: 45504 - DNA, 44 bp, Artificial Sequence
  primer
gtaaaacgacggccagttctaaacttgatacaatgtacacatca

SEQ ID NO: 45505 - DNA, 38 bp, Artificial Sequence
  primer
gtaaaacgacggccagtttatactgctgagtggcaggc

SEQ ID NO: 45506 - DNA, 39 bp, Artificial Sequence
  primer
gtaaaacgacggccagtcccatgaatgcctttaagtgtc

SEQ ID NO: 45507 - DNA, 38 bp, Artificial Sequence
  primer
gtaaaacgacggccagtttcactgcacagaaccctgac

SEQ ID NO: 45508 - DNA, 39 bp, Artificial Sequence
  primer
gtaaaacgacggccagtttagggcgtgttcctttaaatc

SEQ ID NO: 45509 - DNA, 21 bp, Artificial Sequence
  primer
agatatccggctggttctgtg

SEQ ID NO: 45510 - DNA, 23 bp, Artificial Sequence
  primer
ggatgcgagatatacagtcatgc

SEQ ID NO: 45511 - DNA, 38 bp, Artificial Sequence
  primer
gtaaaacgacggccagttgctacacactgtcctttggc

SEQ ID NO: 45512 - DNA, 21 bp, Artificial Sequence
  primer
ttaaaccgaacttggcaggac

SEQ ID NO: 45513 - DNA, 21 bp, Artificial Sequence
  primer
cacaacttgggttgctctcag

SEQ ID NO: 45514 - DNA, 38 bp, Artificial Sequence
  primer
gtaaaacgacggccagtgatgcttcccgacttatcaga

SEQ ID NO: 45515 - DNA, 38 bp, Artificial Sequence
  primer
gtaaaacgacggccagtcccagaatggagtcctctgtc

SEQ ID NO: 45516 - DNA, 38 bp, Artificial Sequence
  primer
gtaaaacgacggccagtcagacctcctcatttccctcc

SEQ ID NO: 45517 - DNA, 38 bp, Artificial Sequence
  primer
gtaaaacgacggccagttcagagtgtgagggctgtacc

SEQ ID NO: 45518 - DNA, 39 bp, Artificial Sequence
  primer
gtaaaacgacggccagtaagagtcaaaggcaagggaaac

SEQ ID NO: 45519 - DNA, 38 bp, Artificial Sequence
  primer
gtaaaacgacggccagtcatctgcagctcaataaagcc

SEQ ID NO: 45520 - DNA, 39 bp, Artificial Sequence
  primer
gtaaaacgacggccagttgaatctgtggcctaacttgtg

SEQ ID NO: 45521 - DNA, 21 bp, Artificial Sequence
  primer
aatggtctggtgatctgggtg

SEQ ID NO: 45522 - DNA, 40 bp, Artificial Sequence
  primer
gtaaaacgacggccagttcctgtttgtctcttacaatggc

SEQ ID NO: 45523 - DNA, 23 bp, Artificial Sequence
  primer
aatgtaggacattgcagaagacg

SEQ ID NO: 45524 - DNA, 39 bp, Artificial Sequence
  primer
gtaaaacgacggccagtcacaatatcctacatcctcccg

SEQ ID NO: 45525 - DNA, 39 bp, Artificial Sequence
  primer
gtaaaacgacggccagtcatgctaaagcaactggaaagg

SEQ ID NO: 45526 - DNA, 21 bp, Artificial Sequence
  primer
aaatttcctgtgtctgcctgc

SEQ ID NO: 45527 - DNA, 38 bp, Artificial Sequence
  primer
gtaaaacgacggccagtccctaattcctacaagcctcc

SEQ ID NO: 45528 - DNA, 21 bp, Artificial Sequence
  primer
tatggtggaacattctgggac

SEQ ID NO: 45529 - DNA, 21 bp, Artificial Sequence
  primer
ataggaggccatgacttgtgg

SEQ ID NO: 45530 - DNA, 38 bp, Artificial Sequence
  primer
gtaaaacgacggccagtgaagaggccaataaaggctgg

SEQ ID NO: 45531 - DNA, 22 bp, Artificial Sequence
  primer
tcaacattcctaaacactgggc

SEQ ID NO: 45532 - DNA, 21 bp, Artificial Sequence
  primer
gcttgagacgctgtttaatgg

SEQ ID NO: 45533 - DNA, 20 bp, Artificial Sequence
  primer
aactctgccaccatcagcac

SEQ ID NO: 45534 - DNA, 40 bp, Artificial Sequence
  primer
gtaaaacgacggccagtgctcaacctcttctctctgttcc

SEQ ID NO: 45535 - DNA, 38 bp, Artificial Sequence
  primer
gtaaaacgacggccagtatctccttggtatccggttgg

SEQ ID NO: 45536 - DNA, 21 bp, Artificial Sequence
  primer
agggctgcctacacagtgttc

SEQ ID NO: 45537 - DNA, 21 bp, Artificial Sequence
  primer
agctgaatatgctgggtcctg

SEQ ID NO: 45538 - DNA, 39 bp, Artificial Sequence
  primer
gtaaaacgacggccagtgaaccctgtgatctcctcagtc

SEQ ID NO: 45539 - DNA, 38 bp, Artificial Sequence
  primer
gtaaaacgacggccagttaacaagccatcaaccaggag

SEQ ID NO: 45540 - DNA, 38 bp, Artificial Sequence
  primer
gtaaaacgacggccagtaaaggcagtagctccaagcac

SEQ ID NO: 45541 - DNA, 21 bp, Artificial Sequence
  primer
aaagccaaacactcccatctg

SEQ ID NO: 45542 - DNA, 21 bp, Artificial Sequence
  primer
aggcgatactgacacagggtt

SEQ ID NO: 45543 - DNA, 20 bp, Artificial Sequence
  primer
gtcccagaatcgctgagagc

SEQ ID NO: 45544 - DNA, 38 bp, Artificial Sequence
  primer
gtaaaacgacggccagttccttgatgaaacctgatccc

SEQ ID NO: 45545 - DNA, 21 bp, Artificial Sequence
  primer
atcggtaccttggagctgatg

SEQ ID NO: 45546 - DNA, 38 bp, Artificial Sequence
  primer
gtaaaacgacggccagttcgacctctgttcatcaaccc

SEQ ID NO: 45547 - DNA, 21 bp, Artificial Sequence
  primer
caggtctcatggtttcccttc

SEQ ID NO: 45548 - DNA, 38 bp, Artificial Sequence
  primer
gtaaaacgacggccagtgccctaatcagagctggttcc

SEQ ID NO: 45549 - DNA, 38 bp, Artificial Sequence
  primer
gtaaaacgacggccagtgagtcctgccctctgagtctg

SEQ ID NO: 45550 - DNA, 21 bp, Artificial Sequence
  primer
tcttccttgcaccaagtaccc

SEQ ID NO: 45551 - DNA, 21 bp, Artificial Sequence
  primer
ccgcctccttcaagaagtacc

SEQ ID NO: 45552 - DNA, 21 bp, Artificial Sequence
  primer
gctgcagcccttcttctactc

SEQ ID NO: 45553 - DNA, 19 bp, Artificial Sequence
  primer
gctcaggtgtctgcgtgtg

SEQ ID NO: 45554 - DNA, 38 bp, Artificial Sequence
  primer
gtaaaacgacggccagtggaagggtagcatcattcagg

SEQ ID NO: 45555 - DNA, 36 bp, Artificial Sequence
  primer
gtaaaacgacggccagtcctgtgagtgccaggtgag

SEQ ID NO: 45556 - DNA, 27 bp, Artificial Sequence
  primer
ttgtagcttagtatcagcaaggtagtg

SEQ ID NO: 45557 - DNA, 42 bp, Artificial Sequence
  primer
gtaaaacgacggccagtttgactgttcagccagtattgtaac

SEQ ID NO: 45558 - DNA, 39 bp, Artificial Sequence
  primer
gtaaaacgacggccagttggctttccctttatattgtgg

SEQ ID NO: 45559 - DNA, 21 bp, Artificial Sequence
  primer
tattctctgcaaagctgctgg

SEQ ID NO: 45560 - DNA, 38 bp, Artificial Sequence
  primer
gtaaaacgacggccagtggaagtagagggatgggatgg

SEQ ID NO: 45561 - DNA, 40 bp, Artificial Sequence
  primer
gtaaaacgacggccagtccctttgagaatctgttgaaagc

SEQ ID NO: 45562 - DNA, 38 bp, Artificial Sequence
  primer
gtaaaacgacggccagtgatggttgtggctatttgcac

SEQ ID NO: 45563 - DNA, 21 bp, Artificial Sequence
  primer
tgtctacgaggcaaaggtgag

SEQ ID NO: 45564 - DNA, 35 bp, Artificial Sequence
  primer
gtaaaacgacggccagtcctacccatcacgcgtcc

SEQ ID NO: 45565 - DNA, 21 bp, Artificial Sequence
  primer
tgtgagtatttgccgtgaagg

SEQ ID NO: 45566 - DNA, 22 bp, Artificial Sequence
  primer
ggtattagtttgaggcccttgg

SEQ ID NO: 45567 - DNA, 37 bp, Artificial Sequence
  primer
gtaaaacgacggccagtctttgcatctctcaccctgc

SEQ ID NO: 45568 - DNA, 21 bp, Artificial Sequence
  primer
ccagccctgagagttgttgtc

SEQ ID NO: 45569 - DNA, 38 bp, Artificial Sequence
  primer
gtaaaacgacggccagttaatccctgggccagttacag

SEQ ID NO: 45570 - DNA, 21 bp, Artificial Sequence
  primer
gcatgttaccaggctccctac

SEQ ID NO: 45571 - DNA, 20 bp, Artificial Sequence
  primer
tgtaacctgcttggctccac

SEQ ID NO: 45572 - DNA, 39 bp, Artificial Sequence
  primer
gtaaaacgacggccagttgagtgcatgtgccttctttac

SEQ ID NO: 45573 - DNA, 25 bp, Artificial Sequence
  primer
tgtgatgcttctttctatttccttc

SEQ ID NO: 45574 - DNA, 38 bp, Artificial Sequence
  primer
gtaaaacgacggccagtcttaagctttggcgtcttcct

SEQ ID NO: 45575 - DNA, 39 bp, Artificial Sequence
  primer
gtaaaacgacggccagtggctggagcgagtacattaacc

SEQ ID NO: 45576 - DNA, 38 bp, Artificial Sequence
  primer
gtaaaacgacggccagtagttccacggccattaagttg

SEQ ID NO: 45577 - DNA, 21 bp, Artificial Sequence
  primer
tgtgctcatcaacatagcagc

SEQ ID NO: 45578 - DNA, 21 bp, Artificial Sequence
  primer
ttgctagattgtgtgctgtgg

SEQ ID NO: 45579 - DNA, 22 bp, Artificial Sequence
  primer
cagtctgttcccttgaaatgtg

SEQ ID NO: 45580 - DNA, 38 bp, Artificial Sequence
  primer
gtaaaacgacggccagtccaccagtctgtgacaggaag

SEQ ID NO: 45581 - DNA, 21 bp, Artificial Sequence
  primer
atgtttgaggcatacgtggtg

SEQ ID NO: 45582 - DNA, 38 bp, Artificial Sequence
  primer
gtaaaacgacggccagttgcatctggttcaatctgaca

SEQ ID NO: 45583 - DNA, 38 bp, Artificial Sequence
  primer
gtaaaacgacggccagtgtaattgctcaggctccttcc

SEQ ID NO: 45584 - DNA, 38 bp, Artificial Sequence
  primer
gtaaaacgacggccagttattgctgaaatcaaatggcg

SEQ ID NO: 45585 - DNA, 21 bp, Artificial Sequence
  primer
ctacccatgctgtttccaatg

SEQ ID NO: 45586 - DNA, 21 bp, Artificial Sequence
  primer
tgtgaacctcctaccattggg

SEQ ID NO: 45587 - DNA, 21 bp, Artificial Sequence
  primer
cagggctccatatgtagtggg

SEQ ID NO: 45588 - DNA, 18 bp, Artificial Sequence
  primer
gccaagatggcaccactg

SEQ ID NO: 45589 - DNA, 21 bp, Artificial Sequence
  primer
ggatacagtaaggtgcccagc

SEQ ID NO: 45590 - DNA, 21 bp, Artificial Sequence
  primer
ctgtaatccgggagactgagg

SEQ ID NO: 45591 - DNA, 38 bp, Artificial Sequence
  primer
gtaaaacgacggccagtgactggcagggaccagttatc

SEQ ID NO: 45592 - DNA, 38 bp, Artificial Sequence
  primer
gtaaaacgacggccagtctcgatggactgaaatcaagc

SEQ ID NO: 45593 - DNA, 38 bp, Artificial Sequence
  primer
gtaaaacgacggccagttccattccctccatcttcatc

SEQ ID NO: 45594 - DNA, 38 bp, Artificial Sequence
  primer
gtaaaacgacggccagtgccgtttatccaaatgttcag

SEQ ID NO: 45595 - DNA, 18 bp, Artificial Sequence
  primer
tgtgcttgggctggagtc

SEQ ID NO: 45596 - DNA, 38 bp, Artificial Sequence
  primer
gtaaaacgacggccagtaactaggcccagcacacattc

SEQ ID NO: 45597 - DNA, 37 bp, Artificial Sequence
  primer
gtaaaacgacggccagtcagtgacaaggaggaggtgc

SEQ ID NO: 45598 - DNA, 18 bp, Artificial Sequence
  primer
gcaggcacgagcagtgac

SEQ ID NO: 45599 - DNA, 36 bp, Artificial Sequence
  primer
gtaaaacgacggccagtattcccacagccaccactc

SEQ ID NO: 45600 - DNA, 19 bp, Artificial Sequence
  primer
cacaggtctcagcccaacc

SEQ ID NO: 45601 - DNA, 38 bp, Artificial Sequence
  primer
gtaaaacgacggccagtgtgcctcggactaaagattcc

SEQ ID NO: 45602 - DNA, 38 bp, Artificial Sequence
  primer
gtaaaacgacggccagtcagcttatctgccgaggattc

SEQ ID NO: 45603 - DNA, 42 bp, Artificial Sequence
  primer
gtaaaacgacggccagtaagagtgtttaaccaagactgttcc

SEQ ID NO: 45604 - DNA, 22 bp, Artificial Sequence
  primer
gccaaagcacaaacttaattcc

SEQ ID NO: 45605 - DNA, 43 bp, Artificial Sequence
  primer
gtaaaacgacggccagtaaccaactgattagaaagatgaaacc

SEQ ID NO: 45606 - DNA, 39 bp, Artificial Sequence
  primer
gtaaaacgacggccagtcctccaggattaacctgtttga

SEQ ID NO: 45607 - DNA, 24 bp, Artificial Sequence
  primer
caggtatttgaaatgtttctgtgg

SEQ ID NO: 45608 - DNA, 27 bp, Artificial Sequence
  primer
tgttaaatctcatataaacccgctaac

SEQ ID NO: 45609 - DNA, 22 bp, Artificial Sequence
  primer
gtggcagccgactagtattaca

SEQ ID NO: 45610 - DNA, 41 bp, Artificial Sequence
  primer
gtaaaacgacggccagtcattgttgatacattgaacattgc

SEQ ID NO: 45611 - DNA, 22 bp, Artificial Sequence
  primer
atgtgttatgctggaactgagc

SEQ ID NO: 45612 - DNA, 22 bp, Artificial Sequence
  primer
ggaggcaaagttgtttctatcc

SEQ ID NO: 45613 - DNA, 36 bp, Artificial Sequence
  primer
gtaaaacgacggccagtgtttgcctgctgattgggt

SEQ ID NO: 45614 - DNA, 38 bp, Artificial Sequence
  primer
gtaaaacgacggccagtcttctgcaccttacgcttcct

SEQ ID NO: 45615 - DNA, 22 bp, Artificial Sequence
  primer
gagcacctgttctttccattgt

SEQ ID NO: 45616 - DNA, 21 bp, Artificial Sequence
  primer
ggacgtcacccgttaaacttc

SEQ ID NO: 45617 - DNA, 21 bp, Artificial Sequence
  primer
taacactgctgcacacacagc

SEQ ID NO: 45618 - DNA, 21 bp, Artificial Sequence
  primer
caaagtggcagacacaaccac

SEQ ID NO: 45619 - DNA, 38 bp, Artificial Sequence
  primer
gtaaaacgacggccagtttcagggaccaggtattcagg

SEQ ID NO: 45620 - DNA, 21 bp, Artificial Sequence
  primer
tccagaaacccagagatccag

SEQ ID NO: 45621 - DNA, 21 bp, Artificial Sequence
  primer
ctctaacagcccttcccactc

SEQ ID NO: 45622 - DNA, 21 bp, Artificial Sequence
  primer
gggcaacatagggagactttg

SEQ ID NO: 45623 - DNA, 38 bp, Artificial Sequence
  primer
gtaaaacgacggccagtgctggtgagtagctcccattc

SEQ ID NO: 45624 - DNA, 21 bp, Artificial Sequence
  primer
gtgagtagctcccattccctg

SEQ ID NO: 45625 - DNA, 38 bp, Artificial Sequence
  primer
gtaaaacgacggccagtatccatccctgagaacgtgag

SEQ ID NO: 45626 - DNA, 38 bp, Artificial Sequence
  primer
gtaaaacgacggccagtgaaatgcagctggaagagacc

SEQ ID NO: 45627 - DNA, 21 bp, Artificial Sequence
  primer
acacctgctggactactgctg

SEQ ID NO: 45628 - DNA, 20 bp, Artificial Sequence
  primer
gtgagcgtggatctacccag

SEQ ID NO: 45629 - DNA, 38 bp, Artificial Sequence
  primer
gtaaaacgacggccagtttggagacgacctttaacgac

SEQ ID NO: 45630 - DNA, 21 bp, Artificial Sequence
  primer
cccacacaggatcagacacac

SEQ ID NO: 45631 - DNA, 38 bp, Artificial Sequence
  primer
gtaaaacgacggccagtgaggccagagatggcttctac

SEQ ID NO: 45632 - DNA, 21 bp, Artificial Sequence
  primer
agggcttctcagatcaattcg

SEQ ID NO: 45633 - DNA, 20 bp, Artificial Sequence
  primer
taactccgcaagtcaccagg

SEQ ID NO: 45634 - DNA, 22 bp, Artificial Sequence
  primer
gggtggtgaacgtatttgagac

SEQ ID NO: 45635 - DNA, 19 bp, Artificial Sequence
  primer
tgggcaacatgagtgaagc

SEQ ID NO: 45636 - DNA, 21 bp, Artificial Sequence
  primer
ccatccagacatctcacctcc

SEQ ID NO: 45637 - DNA, 38 bp, Artificial Sequence
  primer
gtaaaacgacggccagtcagcagtgttgaaagtgggag

SEQ ID NO: 45638 - DNA, 38 bp, Artificial Sequence
  primer
gtaaaacgacggccagtgacagtcttagcatgggagcc

SEQ ID NO: 45639 - DNA, 38 bp, Artificial Sequence
  primer
gtaaaacgacggccagtcaacataccaagatggcaacc

SEQ ID NO: 45640 - DNA, 21 bp, Artificial Sequence
  primer
gtctccatcccagtcctcaac

SEQ ID NO: 45641 - DNA, 38 bp, Artificial Sequence
  primer
gtaaaacgacggccagtgtggaaggtccaaggactgag

SEQ ID NO: 45642 - DNA, 21 bp, Artificial Sequence
  primer
acaggaggattatctgccgtc

SEQ ID NO: 45643 - DNA, 38 bp, Artificial Sequence
  primer
gtaaaacgacggccagttgctgaagcaggtcaagaaac

SEQ ID NO: 45644 - DNA, 21 bp, Artificial Sequence
  primer
gaggacaggaaaggttcatgc

SEQ ID NO: 45645 - DNA, 21 bp, Artificial Sequence
  primer
gtggtgcatgcctatagtccc

SEQ ID NO: 45646 - DNA, 39 bp, Artificial Sequence
  primer
gtaaaacgacggccagtcacaggagaggccaagatactg

SEQ ID NO: 45647 - DNA, 21 bp, Artificial Sequence
  primer
atttcattgtctcgtccctgg

SEQ ID NO: 45648 - DNA, 38 bp, Artificial Sequence
  primer
gtaaaacgacggccagtcatgggaagtttctcccactc

SEQ ID NO: 45649 - DNA, 38 bp, Artificial Sequence
  primer
gtaaaacgacggccagtaaagaggcaactcaacatccc

SEQ ID NO: 45650 - DNA, 21 bp, Artificial Sequence
  primer
catttcaggctctttgctcac

SEQ ID NO: 45651 - DNA, 21 bp, Artificial Sequence
  primer
ttcccaagggaagaggctaag

SEQ ID NO: 45652 - DNA, 20 bp, Artificial Sequence
  primer
cctttcctacagcctcctgc

SEQ ID NO: 45653 - DNA, 22 bp, Artificial Sequence
  primer
ggaaacatctggcacatgatag

SEQ ID NO: 45654 - DNA, 21 bp, Artificial Sequence
  primer
caggcccacttcacctagaac

SEQ ID NO: 45655 - DNA, 21 bp, Artificial Sequence
  primer
ctaccaaagctacctcctccg

SEQ ID NO: 45656 - DNA, 20 bp, Artificial Sequence
  primer
atcctgtctctgggaggagc

SEQ ID NO: 45657 - DNA, 21 bp, Artificial Sequence
  primer
tcattacctgtggctaccgtg

SEQ ID NO: 45658 - DNA, 39 bp, Artificial Sequence
  primer
gtaaaacgacggccagtccttccatgaaactggagactg

SEQ ID NO: 45659 - DNA, 38 bp, Artificial Sequence
  primer
gtaaaacgacggccagtaccaattggcttgtctcaagg

SEQ ID NO: 45660 - DNA, 38 bp, Artificial Sequence
  primer
gtaaaacgacggccagttggtagggaggaaatggacac

SEQ ID NO: 45661 - DNA, 21 bp, Artificial Sequence
  primer
cctcaagtctgaggaagaccc

SEQ ID NO: 45662 - DNA, 21 bp, Artificial Sequence
  primer
cttgatccagaggtcctgtcc

SEQ ID NO: 45663 - DNA, 21 bp, Artificial Sequence
  primer
tgtgaagaaatcagctcgtgg

SEQ ID NO: 45664 - DNA, 38 bp, Artificial Sequence
  primer
gtaaaacgacggccagtaaacgtgacccagttggaaac

SEQ ID NO: 45665 - DNA, 37 bp, Artificial Sequence
  primer
gtaaaacgacggccagttttggtgaaaggtcctggag

SEQ ID NO: 45666 - DNA, 22 bp, Artificial Sequence
  primer
agtgacagtagtgcacgtcagc

SEQ ID NO: 45667 - DNA, 20 bp, Artificial Sequence
  primer
gagttcgaggctgcagtgag

SEQ ID NO: 45668 - DNA, 36 bp, Artificial Sequence
  primer
gtaaaacgacggccagtaagcagtctgcctgccttg

SEQ ID NO: 45669 - DNA, 38 bp, Artificial Sequence
  primer
gtaaaacgacggccagtgtgttcatttacctggtgggc

SEQ ID NO: 45670 - DNA, 43 bp, Artificial Sequence
  primer
gtaaaacgacggccagttttggtaatcaagaatctttctgaag

SEQ ID NO: 45671 - DNA, 22 bp, Artificial Sequence
  primer
caatatccactgggtgtgagtg

SEQ ID NO: 45672 - DNA, 39 bp, Artificial Sequence
  primer
gtaaaacgacggccagttgtccaagagtgtcatgtgctc

SEQ ID NO: 45673 - DNA, 21 bp, Artificial Sequence
  primer
agatgatgtgacagggacacg

SEQ ID NO: 45674 - DNA, 21 bp, Artificial Sequence
  primer
cccgataactctctgctcctg

SEQ ID NO: 45675 - DNA, 21 bp, Artificial Sequence
  primer
tcttcaggtcatggagaagcc

SEQ ID NO: 45676 - DNA, 38 bp, Artificial Sequence
  primer
gtaaaacgacggccagtgcctctgtctctggtgaatcc

SEQ ID NO: 45677 - DNA, 38 bp, Artificial Sequence
  primer
gtaaaacgacggccagtaaggattgtcctgtgtgttgc

SEQ ID NO: 45678 - DNA, 38 bp, Artificial Sequence
  primer
gtaaaacgacggccagtaccaggtgacaaccaggaaag

SEQ ID NO: 45679 - DNA, 38 bp, Artificial Sequence
  primer
gtaaaacgacggccagtacctgagtaagggcaccagtc

SEQ ID NO: 45680 - DNA, 39 bp, Artificial Sequence
  primer
gtaaaacgacggccagttccatatccgctaattcagcac

SEQ ID NO: 45681 - DNA, 21 bp, Artificial Sequence
  primer
ttgcaggttatccgtgttgag

SEQ ID NO: 45682 - DNA, 21 bp, Artificial Sequence
  primer
tagacctcacctgtgcattcc

SEQ ID NO: 45683 - DNA, 37 bp, Artificial Sequence
  primer
gtaaaacgacggccagtccttccagctccttcctgag

SEQ ID NO: 45684 - DNA, 38 bp, Artificial Sequence
  primer
gtaaaacgacggccagtacacgcgtcaattctgggtag

SEQ ID NO: 45685 - DNA, 41 bp, Artificial Sequence
  primer
gtaaaacgacggccagttttgcacacaaaccacttgtattt

SEQ ID NO: 45686 - DNA, 38 bp, Artificial Sequence
  primer
gtaaaacgacggccagttcagttgatgatgcctgagaa

SEQ ID NO: 45687 - DNA, 24 bp, Artificial Sequence
  primer
agctagcagagggaaatttgttac

SEQ ID NO: 45688 - DNA, 26 bp, Artificial Sequence
  primer
tgaatcctaccaaagtattcagtgtt

SEQ ID NO: 45689 - DNA, 20 bp, Artificial Sequence
  primer
gcctctcacctggctcatag

SEQ ID NO: 45690 - DNA, 38 bp, Artificial Sequence
  primer
gtaaaacgacggccagtgggctttgactcaacttggac

SEQ ID NO: 45691 - DNA, 26 bp, Artificial Sequence
  primer
caaagtgttctgatactggtaaatgg

SEQ ID NO: 45692 - DNA, 21 bp, Artificial Sequence
  primer
agcagcaatcatgtttaacgg

SEQ ID NO: 45693 - DNA, 23 bp, Artificial Sequence
  primer
tcattcattatcaggcattaggc

SEQ ID NO: 45694 - DNA, 24 bp, Artificial Sequence
  primer
gattccaaagcaactggaatttac

SEQ ID NO: 45695 - DNA, 38 bp, Artificial Sequence
  primer
gtaaaacgacggccagtgagttgaggtagcttgggtcc

SEQ ID NO: 45696 - DNA, 21 bp, Artificial Sequence
  primer
tcagcacttgcgaaatggtag

SEQ ID NO: 45697 - DNA, 44 bp, Artificial Sequence
  primer
gtaaaacgacggccagttttaaccacttccctttatatgaacac

SEQ ID NO: 45698 - DNA, 24 bp, Artificial Sequence
  primer
tcacagcctgacaaagaaagatag

SEQ ID NO: 45699 - DNA, 43 bp, Artificial Sequence
  primer
gtaaaacgacggccagtaagcatgtgacttgtacttgtttagc

SEQ ID NO: 45700 - DNA, 35 bp, Artificial Sequence; identical to SEQ ID NO: 9148
  primer

SEQ ID NO: 45701 - DNA, 41 bp, Artificial Sequence
  primer
gtaaaacgacggccagtcactcctggcctactttgatattc

SEQ ID NO: 45702 - DNA, 39 bp, Artificial Sequence
  primer
gtaaaacgacggccagttgttgctcctaattccagttgc

SEQ ID NO: 45703 - DNA, 42 bp, Artificial Sequence
  primer
gtaaaacgacggccagttgtggttgacaaacagatatagagg

SEQ ID NO: 45704 - DNA, 39 bp, Artificial Sequence
  primer
gtaaaacgacggccagttctcaacccataaggatgttgg

SEQ ID NO: 45705 - DNA, 37 bp, Artificial Sequence
  primer
gtaaaacgacggccagtatttgcagcagcaagtggtc

SEQ ID NO: 45706 - DNA, 21 bp, Artificial Sequence
  primer
aaatcccaagaggattcaacg

SEQ ID NO: 45707 - DNA, 38 bp, Artificial Sequence
  primer
gtaaaacgacggccagtaagcattgatttacaacgggc

SEQ ID NO: 45708 - DNA, 44 bp, Artificial Sequence
  primer
gtaaaacgacggccagttgatcatctgggtagttaggtgataag

SEQ ID NO: 45709 - DNA, 24 bp, Artificial Sequence
  primer
tgagcagaattagagcacatttcc

SEQ ID NO: 45710 - DNA, 38 bp, Artificial Sequence
  primer
gtaaaacgacggccagttagcatctgaatccttctggg

SEQ ID NO: 45711 - DNA, 39 bp, Artificial Sequence
  primer
gtaaaacgacggccagtaagacgacctggaaggtaatga

SEQ ID NO: 45712 - DNA, 22 bp, Artificial Sequence
  primer
gcctaggtgacagaagttgcag

SEQ ID NO: 45713 - DNA, 42 bp, Artificial Sequence
  primer
gtaaaacgacggccagtttctactcatatgggaatcattgaa

SEQ ID NO: 45714 - DNA, 41 bp, Artificial Sequence
  primer
gtaaaacgacggccagttttctgtctcgcacatatacatcc

SEQ ID NO: 45715 - DNA, 40 bp, Artificial Sequence
  primer
gtaaaacgacggccagttctgtcagttgctgcttaatttc

SEQ ID NO: 45716 - DNA, 41 bp, Artificial Sequence
  primer
gtaaaacgacggccagtcctaggcagattcatattgtttgc

SEQ ID NO: 45717 - DNA, 38 bp, Artificial Sequence
  primer
gtaaaacgacggccagttcctagcaattccttcttggc

SEQ ID NO: 45718 - DNA, 21 bp, Artificial Sequence
  primer
gaggaacactgctcttctggg

SEQ ID NO: 45719 - DNA, 39 bp, Artificial Sequence
  primer
gtaaaacgacggccagttcatctcaaataaccatgtgcc

SEQ ID NO: 45720 - DNA, 38 bp, Artificial Sequence
  primer
gtaaaacgacggccagttgggacatatcgtggttgaat

SEQ ID NO: 45721 - DNA, 21 bp, Artificial Sequence
  primer
aatttcatgctcagctgttgg

SEQ ID NO: 45722 - DNA, 45 bp, Artificial Sequence
  primer
gtaaaacgacggccagtttgaatgaatacttggatgtgtttagta

SEQ ID NO: 45723 - DNA, 23 bp, Artificial Sequence
  primer
ttgcattgttaagatctctgtgg

SEQ ID NO: 45724 - DNA, 38 bp, Artificial Sequence
  primer
gtaaaacgacggccagtgtgcatggaacacatacatcg

SEQ ID NO: 45725 - DNA, 38 bp, Artificial Sequence
  primer
gtaaaacgacggccagtttgccattgagagtcttctgc

SEQ ID NO: 45726 - DNA, 39 bp, Artificial Sequence
  primer
gtaaaacgacggccagttttattggcccttgctcagtag

SEQ ID NO: 45727 - DNA, 40 bp, Artificial Sequence
  primer
gtaaaacgacggccagtttgaccagaaatgggaagatatg

SEQ ID NO: 45728 - DNA, 20 bp, Artificial Sequence
  primer
ccaggactttggcagttcag

SEQ ID NO: 45729 - DNA, 38 bp, Artificial Sequence
  primer
gtaaaacgacggccagtgatgttaggctctgcttgctg

SEQ ID NO: 45730 - DNA, 38 bp, Artificial Sequence
  primer
gtaaaacgacggccagtgtgaaggtggaactttgggtc

SEQ ID NO: 45731 - DNA, 21 bp, Artificial Sequence
  primer
gccctggttataacttggctg

SEQ ID NO: 45732 - DNA, 21 bp, Artificial Sequence
  primer
gtctggctgagcagaggtttc

SEQ ID NO: 45733 - DNA, 38 bp, Artificial Sequence
  primer
gtaaaacgacggccagtgaagggacctttctccacaag

SEQ ID NO: 45734 - DNA, 38 bp, Artificial Sequence
  primer
gtaaaacgacggccagtctatgctattcaaatcggcgg

SEQ ID NO: 45735 - DNA, 22 bp, Artificial Sequence
  primer
atggcacaaataagatgaatga

SEQ ID NO: 45736 - DNA, 27 bp, Artificial Sequence
  primer
gaccctaataataaccctgaattatcc

SEQ ID NO: 45737 - DNA, 21 bp, Artificial Sequence
  primer
tgatttgagggtggtagggac

SEQ ID NO: 45738 - DNA, 25 bp, Artificial Sequence
  primer
ggccatagtttgggatatatattgg

SEQ ID NO: 45739 - DNA, 42 bp, Artificial Sequence
  primer
gtaaaacgacggccagtaaatattgacttgatcctgtgtctt

SEQ ID NO: 45740 - DNA, 39 bp, Artificial Sequence
  primer
gtaaaacgacggccagttgaactgtggcagaatttgttg

SEQ ID NO: 45741 - DNA, 23 bp, Artificial Sequence
  primer
tcttaccatgctttagaggaacg

SEQ ID NO: 45742 - DNA, 25 bp, Artificial Sequence
  primer
tgctacctggaaattaccgatattc

SEQ ID NO: 45743 - DNA, 43 bp, Artificial Sequence
  primer
gtaaaacgacggccagttggtaaattaataggtgctagatccc

SEQ ID NO: 45744 - DNA, 21 bp, Artificial Sequence
  primer
gagagagggaaaggcaaggat

SEQ ID NO: 45745 - DNA, 37 bp, Artificial Sequence
  primer
gtaaaacgacggccagtgcttgggattcaaactgctg

SEQ ID NO: 45746 - DNA, 26 bp, Artificial Sequence
  primer
ttcaaggctctacctgttattaaagc

SEQ ID NO: 45747 - DNA, 44 bp, Artificial Sequence
  primer
gtaaaacgacggccagtttcagatacaccaaagtggagactatt

SEQ ID NO: 45748 - DNA, 24 bp, Artificial Sequence
  primer
aaatcccaccaccttatattgaaa

SEQ ID NO: 45749 - DNA, 36 bp, Artificial Sequence
  primer
gtaaaacgacggccagtgcaaagattgggtgcaatg

SEQ ID NO: 45750 - DNA, 38 bp, Artificial Sequence
  primer
gtaaaacgacggccagtaacactgctgacaaggaaagg

SEQ ID NO: 45751 - DNA, 39 bp, Artificial Sequence
  primer
gtaaaacgacggccagtcacgccacacatattcacagag

SEQ ID NO: 45752 - DNA, 19 bp, Artificial Sequence
  primer
tgtcatgcctggttgatgg

SEQ ID NO: 45753 - DNA, 21 bp, Artificial Sequence
  primer
ccctgtgccttagaccatttc

SEQ ID NO: 45754 - DNA, 38 bp, Artificial Sequence
  primer
gtaaaacgacggccagtactaacatggcattgctacgg

SEQ ID NO: 45755 - DNA, 24 bp, Artificial Sequence
  primer
atcaaaggaaagatggattagctc

SEQ ID NO: 45756 - DNA, 19 bp, Artificial Sequence
  primer
gcaactttccattctcgcc

SEQ ID NO: 45757 - DNA, 39 bp, Artificial Sequence
  primer
gtaaaacgacggccagttgcacaagggtttctgtgttac

SEQ ID NO: 45758 - DNA, 21 bp, Artificial Sequence
  primer
gaggaaggcatggatgtatgg

SEQ ID NO: 45759 - DNA, 21 bp, Artificial Sequence
  primer
tttaggctgttcttcatgggc

SEQ ID NO: 45760 - DNA, 42 bp, Artificial Sequence
  primer
gtaaaacgacggccagttgagtgtttgtgactgaatatgctc

SEQ ID NO: 45761 - DNA, 21 bp, Artificial Sequence
  primer
ctggtcagtctgaacctgctg

SEQ ID NO: 45762 - DNA, 38 bp, Artificial Sequence
  primer
gtaaaacgacggccagtagcctgtgcatagcttgcttc

SEQ ID NO: 45763 - DNA, 21 bp, Artificial Sequence
  primer
tgctgttatgaatgggaggac

SEQ ID NO: 45764 - DNA, 21 bp, Artificial Sequence
  primer
gcactgacagcatccaatatg

SEQ ID NO: 45765 - DNA, 39 bp, Artificial Sequence
  primer
gtaaaacgacggccagttgcaacaaatgcttgcttaatg

SEQ ID NO: 45766 - DNA, 21 bp, Artificial Sequence
  primer
cattgcttcatgactggatgg

SEQ ID NO: 45767 - DNA, 24 bp, Artificial Sequence
  primer
tgcaaacgtcagtttatttctcaa

SEQ ID NO: 45768 - DNA, 40 bp, Artificial Sequence
  primer
gtaaaacgacggccagttgggcaactaactcaggttacag

SEQ ID NO: 45769 - DNA, 38 bp, Artificial Sequence
  primer
gtaaaacgacggccagtgttaaatggagcaaagctgcc

SEQ ID NO: 45770 - DNA, 21 bp, Artificial Sequence
  primer
agttgaggttatgggtgcagg

SEQ ID NO: 45771 - DNA, 21 bp, Artificial Sequence
  primer
acggtgatgcacattacttcg

SEQ ID NO: 45772 - DNA, 21 bp, Artificial Sequence
  primer
ttaagtcagggagggaaatgg

SEQ ID NO: 45773 - DNA, 38 bp, Artificial Sequence
  primer
gtaaaacgacggccagttccaaggatttctagcccaac

SEQ ID NO: 45774 - DNA, 25 bp, Artificial Sequence
  primer
tgctctcagaaccaagtttatcaag

SEQ ID NO: 45775 - DNA, 20 bp, Artificial Sequence
  primer
gggcaacaagagggaaactc

SEQ ID NO: 45776 - DNA, 38 bp, Artificial Sequence
  primer
gtaaaacgacggccagtagagtgctgaggtttggatca

SEQ ID NO: 45777 - DNA, 20 bp, Artificial Sequence
  primer
ctggcagctacccagagaac

SEQ ID NO: 45778 - DNA, 24 bp, Artificial Sequence
  primer
ccagttgacatgatttaatttgcc

SEQ ID NO: 45779 - DNA, 39 bp, Artificial Sequence
  primer
gtaaaacgacggccagttgaaattaattggactgggttg

SEQ ID NO: 45780 - DNA, 26 bp, Artificial Sequence
  primer
aagcctattgtattcagcaaataagg

SEQ ID NO: 45781 - DNA, 18 bp, Artificial Sequence
  primer
agaatggcgtgaaccctg

SEQ ID NO: 45782 - DNA, 38 bp, Artificial Sequence
  primer
gtaaaacgacggccagttgcatggaataacagcttgtg

SEQ ID NO: 45783 - DNA, 21 bp, Artificial Sequence
  primer
tcgatttcacaagcatcatgg

SEQ ID NO: 45784 - DNA, 22 bp, Artificial Sequence
  primer
aaagaaatgaccaccatgtcaa

SEQ ID NO: 45785 - DNA, 38 bp, Artificial Sequence
  primer
gtaaaacgacggccagtgcaagcgtagcatgtcaagtg

SEQ ID NO: 45786 - DNA, 37 bp, Artificial Sequence
  primer
gtaaaacgacggccagtgtagatgctgaacgcattgg

SEQ ID NO: 45787 - DNA, 43 bp, Artificial Sequence
  primer
gtaaaacgacggccagtttgggcagtaaattattacagaagtc

SEQ ID NO: 45788 - DNA, 39 bp, Artificial Sequence
  primer
gtaaaacgacggccagtttggtgtcgagtaattctcagg

SEQ ID NO: 45789 - DNA, 26 bp, Artificial Sequence
  primer
tttgcatatatgttgataattggtcc

SEQ ID NO: 45790 - DNA, 22 bp, Artificial Sequence
  primer
ttgcagttagtgctattggctg

SEQ ID NO: 45791 - DNA, 38 bp, Artificial Sequence
  primer
gtaaaacgacggccagtcagcggttcattgtctagctg

SEQ ID NO: 45792 - DNA, 23 bp, Artificial Sequence
  primer
gcgatgtctgtctttctcttagc

SEQ ID NO: 45793 - DNA, 38 bp, Artificial Sequence
  primer
gtaaaacgacggccagttcaggattgcttcatccacag

SEQ ID NO: 45794 - DNA, 38 bp, Artificial Sequence
  primer
gtaaaacgacggccagttgatgtttacagggccatttg

SEQ ID NO: 45795 - DNA, 20 bp, Artificial Sequence
  primer
ggacgaagagtaagggaggg

SEQ ID NO: 45796 - DNA, 38 bp, Artificial Sequence
  primer
gtaaaacgacggccagtgacccacatggtgcaacttag

SEQ ID NO: 45797 - DNA, 39 bp, Artificial Sequence
  primer
gtaaaacgacggccagttgtttcactggttctgatgctg

SEQ ID NO: 45798 - DNA, 23 bp, Artificial Sequence
  primer
attataagctgcctgaaatcgtt

SEQ ID NO: 45799 - DNA, 43 bp, Artificial Sequence
  primer
gtaaaacgacggccagtgaacgatttataatattggttgaatg

SEQ ID NO: 45800 - DNA, 25 bp, Artificial Sequence
  primer
gctgtgtaagtggccatataatttc

SEQ ID NO: 45801 - DNA, 21 bp, Artificial Sequence
  primer
acagagccagggacatctttc

SEQ ID NO: 45802 - DNA, 38 bp, Artificial Sequence
  primer
gtaaaacgacggccagtttcacagcagaggaacaccag

SEQ ID NO: 45803 - DNA, 38 bp, Artificial Sequence
  primer
gtaaaacgacggccagttgctgtgtagcttggtgttcc

SEQ ID NO: 45804 - DNA, 37 bp, Artificial Sequence
  primer
gtaaaacgacggccagtacagaatggccagagtgacc

SEQ ID NO: 45805 - DNA, 38 bp, Artificial Sequence
  primer
gtaaaacgacggccagtggaagagactgtgtgttgccc

SEQ ID NO: 45806 - DNA, 39 bp, Artificial Sequence
  primer
gtaaaacgacggccagtggtaagtgggcattaccttctg

SEQ ID NO: 45807 - DNA, 21 bp, Artificial Sequence
  primer
tatcatccacctggtctttgc

SEQ ID NO: 45808 - DNA, 21 bp, Artificial Sequence
  primer
cgtgacttcaagcagttctcc

SEQ ID NO: 45809 - DNA, 21 bp, Artificial Sequence
  primer
cttgggtggcaagagtgagat

SEQ ID NO: 45810 - DNA, 41 bp, Artificial Sequence
  primer
gtaaaacgacggccagtaagttgcaagcagtttacttaggg

SEQ ID NO: 45811 - DNA, 21 bp, Artificial Sequence
  primer
agcctggtggcagagtaagac

SEQ ID NO: 45812 - DNA, 40 bp, Artificial Sequence
  primer
gtaaaacgacggccagttgtgatgcaaatctttaacccag

SEQ ID NO: 45813 - DNA, 21 bp, Artificial Sequence
  primer
gaacagcatggaggaaaccac

SEQ ID NO: 45814 - DNA, 21 bp, Artificial Sequence
  primer
aagattgtgctgctccactcc

SEQ ID NO: 45815 - DNA, 37 bp, Artificial Sequence
  primer
gtaaaacgacggccagtgatgcttgtctgtgacaggg

SEQ ID NO: 45816 - DNA, 21 bp, Artificial Sequence
  primer
tctttgttggataggcagcac

SEQ ID NO: 45817 - DNA, 18 bp, Artificial Sequence
  primer
acaggcatgacccacagc

SEQ ID NO: 45818 - DNA, 38 bp, Artificial Sequence
  primer
gtaaaacgacggccagttgagaacaaagcccatgtcag

SEQ ID NO: 45819 - DNA, 38 bp, Artificial Sequence
  primer
gtaaaacgacggccagtgttacaggctgtcttccctgg

SEQ ID NO: 45820 - DNA, 40 bp, Artificial Sequence
  primer
gtaaaacgacggccagtgcctctgtttgaaatgtatttgg

SEQ ID NO: 45821 - DNA, 21 bp, Artificial Sequence
  primer
gggtgaagtaccgcatacagg

SEQ ID NO: 45822 - DNA, 39 bp, Artificial Sequence
  primer
gtaaaacgacggccagttttgctcatttctctcactccc

SEQ ID NO: 45823 - DNA, 38 bp, Artificial Sequence
  primer
gtaaaacgacggccagttcccagtagctggaaagaagg

SEQ ID NO: 45824 - DNA, 38 bp, Artificial Sequence
  primer
gtaaaacgacggccagtgataaggattccagtggctgc

SEQ ID NO: 45825 - DNA, 38 bp, Artificial Sequence
  primer
gtaaaacgacggccagtcagcacagaatttgcacttgg

SEQ ID NO: 45826 - DNA, 36 bp, Artificial Sequence
  primer
gtaaaacgacggccagtccacacttgccatggtgac

SEQ ID NO: 45827 - DNA, 40 bp, Artificial Sequence
  primer
gtaaaacgacggccagtcaaaggagatgatgagactgtgc

SEQ ID NO: 45828 - DNA, 38 bp, Artificial Sequence
  primer
gtaaaacgacggccagtctttcttccatgaaactgccc

SEQ ID NO: 45829 - DNA, 39 bp, Artificial Sequence
  primer
gtaaaacgacggccagtgggtaaatgtcaaggatggttc

SEQ ID NO: 45830 - DNA, 22 bp, Artificial Sequence
  primer
cacacaccaactccacagagag

SEQ ID NO: 45831 - DNA, 38 bp, Artificial Sequence
  primer
gtaaaacgacggccagtaacctgtgttccttgaccctg

SEQ ID NO: 45832 - DNA, 38 bp, Artificial Sequence
  primer
gtaaaacgacggccagtagcaacagagctgtctgcatc

SEQ ID NO: 45833 - DNA, 21 bp, Artificial Sequence
  primer
tgagcagaatgggaaggattg

SEQ ID NO: 45834 - DNA, 38 bp, Artificial Sequence
  primer
gtaaaacgacggccagtacagacgtaagccaccaaacc

SEQ ID NO: 45835 - DNA, 22 bp, Artificial Sequence
  primer
gcatagggacattgctttatgg

SEQ ID NO: 45836 - DNA, 21 bp, Artificial Sequence
  primer
tcctgtcactcccttgtctcc

SEQ ID NO: 45837 - DNA, 23 bp, Artificial Sequence
  primer
tttgcctatttgctacgtttcac

SEQ ID NO: 45838 - DNA, 22 bp, Artificial Sequence
  primer
tccaggaaacttctggaatctg

SEQ ID NO: 45839 - DNA, 38 bp, Artificial Sequence
  primer
gtaaaacgacggccagttcaatatgcatgctgcctttc

SEQ ID NO: 45840 - DNA, 38 bp, Artificial Sequence
  primer
gtaaaacgacggccagtacagaagactggcccagagag

SEQ ID NO: 45841 - DNA, 38 bp, Artificial Sequence
  primer
gtaaaacgacggccagtgaaagtggtgagggtgaggac

SEQ ID NO: 45842 - DNA, 20 bp, Artificial Sequence
  primer
caagcctatggctgcagaac

SEQ ID NO: 45843 - DNA, 37 bp, Artificial Sequence
  primer
gtaaaacgacggccagtctgtgagggcagactgatcc

SEQ ID NO: 45844 - DNA, 38 bp, Artificial Sequence
  primer
gtaaaacgacggccagtcagtatggaaatcaccaagcg

SEQ ID NO: 45845 - DNA, 21 bp, Artificial Sequence
  primer
tgtggattgcatgatgaattg

SEQ ID NO: 45846 - DNA, 20 bp, Artificial Sequence
  primer
tacatgtgtggtggcacctg

SEQ ID NO: 45847 - DNA, 21 bp, Artificial Sequence
  primer
tgtcacgtggaaagaacttgg

SEQ ID NO: 45848 - DNA, 21 bp, Artificial Sequence
  primer
tgcagttgaaagcctatgtgc

SEQ ID NO: 45849 - DNA, 41 bp, Artificial Sequence
  primer
gtaaaacgacggccagttgtttgctgctatttactgtctcc

SEQ ID NO: 45850 - DNA, 21 bp, Artificial Sequence
  primer
cagggaagagagaaacggagg

SEQ ID NO: 45851 - DNA, 21 bp, Artificial Sequence
  primer
tcgtcagctggatacatttgg

SEQ ID NO: 45852 - DNA, 38 bp, Artificial Sequence
  primer
gtaaaacgacggccagtgtgctaccggtgacaagtgtg

SEQ ID NO: 45853 - DNA, 41 bp, Artificial Sequence
  primer
gtaaaacgacggccagttcagcattgatctaacacgtatgg

SEQ ID NO: 45854 - DNA, 21 bp, Artificial Sequence
  primer
tggagccacgtatgtatggag

SEQ ID NO: 45855 - DNA, 39 bp, Artificial Sequence
  primer
gtaaaacgacggccagtttgagaaagaaggtgggtgttt

SEQ ID NO: 45856 - DNA, 45 bp, Artificial Sequence
  primer
gtaaaacgacggccagtcaaatttactagcttagacctgcttaga

SEQ ID NO: 45857 - DNA, 41 bp, Artificial Sequence
  primer
gtaaaacgacggccagttttatcctgatggcttgaaatagc

SEQ ID NO: 45858 - DNA, 23 bp, Artificial Sequence
  primer
aagctgcctttatggtattcacc

SEQ ID NO: 45859 - DNA, 21 bp, Artificial Sequence
  primer
gttgcagcaaatccttctgag

SEQ ID NO: 45860 - DNA, 36 bp, Artificial Sequence
  primer
gtaaaacgacggccagtcaaccgaatggttgtgaaa

SEQ ID NO: 45861 - DNA, 39 bp, Artificial Sequence
  primer
gtaaaacgacggccagtcagcagtgcttaccatcttcag

SEQ ID NO: 45862 - DNA, 38 bp, Artificial Sequence
  primer
gtaaaacgacggccagtgttcggtacctcgtggagaag

SEQ ID NO: 45863 - DNA, 23 bp, Artificial Sequence
  primer
ctggtcttccatcaataaggttg

SEQ ID NO: 45864 - DNA, 37 bp, Artificial Sequence
  primer
gtaaaacgacggccagtctaaccacctgggttggagg

SEQ ID NO: 45865 - DNA, 25 bp, Artificial Sequence
  primer
ttgtcaagaactagaagggaatgtg

SEQ ID NO: 45866 - DNA, 22 bp, Artificial Sequence
  primer
gtgcattggtctttaaatgctg

SEQ ID NO: 45867 - DNA, 38 bp, Artificial Sequence
  primer
gtaaaacgacggccagtaaatgtgaaatgggttccacc

SEQ ID NO: 45868 - DNA, 21 bp, Artificial Sequence
  primer
ataacattgggtttcttcggg

SEQ ID NO: 45869 - DNA, 21 bp, Artificial Sequence
  primer
aagccctttcactggatgaag

SEQ ID NO: 45870 - DNA, 39 bp, Artificial Sequence
  primer
gtaaaacgacggccagtgccatcagaagtgagtagggtg

SEQ ID NO: 45871 - DNA, 38 bp, Artificial Sequence
  primer
gtaaaacgacggccagtagacacctaacagtcgcggag

SEQ ID NO: 45872 - DNA, 38 bp, Artificial Sequence
  primer
gtaaaacgacggccagtctcattgaggaggatgctttg

SEQ ID NO: 45873 - DNA, 38 bp, Artificial Sequence
  primer
gtaaaacgacggccagtttgattcagggctttattggg

SEQ ID NO: 45874 - DNA, 18 bp, Artificial Sequence
  primer
ggagctcctggcctcaag

SEQ ID NO: 45875 - DNA, 21 bp, Artificial Sequence
  primer
cctttacccaggtgaggattg

SEQ ID NO: 45876 - DNA, 23 bp, Artificial Sequence
  primer
cccttgtcagtgtatccttaccc

SEQ ID NO: 45877 - DNA, 21 bp, Artificial Sequence
  primer
gactcccagggactaaatggg

SEQ ID NO: 45878 - DNA, 20 bp, Artificial Sequence
  primer
agcaggagagggaggtgttc

SEQ ID NO: 45879 - DNA, 21 bp, Artificial Sequence
  primer
ttaggtctctacggattgcgg

SEQ ID NO: 45880 - DNA, 38 bp, Artificial Sequence
  primer
gtaaaacgacggccagtgtgaccgagagttggaaattg

SEQ ID NO: 45881 - DNA, 21 bp, Artificial Sequence
  primer
tctcaaccaccgcagtcatag

SEQ ID NO: 45882 - DNA, 21 bp, Artificial Sequence
  primer
catctggattagttcccagcc

SEQ ID NO: 45883 - DNA, 42 bp, Artificial Sequence
  primer
gtaaaacgacggccagtagaacacaatctttagttctcctgc

SEQ ID NO: 45884 - DNA, 39 bp, Artificial Sequence
  primer
gtaaaacgacggccagtggcaatttgtgttggtaggtct

SEQ ID NO: 45885 - DNA, 38 bp, Artificial Sequence
  primer
gtaaaacgacggccagtgggcctgaactgaccttgtag

SEQ ID NO: 45886 - DNA, 38 bp, Artificial Sequence
  primer
gtaaaacgacggccagtgctcccactcctccactattc

SEQ ID NO: 45887 - DNA, 37 bp, Artificial Sequence
  primer
gtaaaacgacggccagtcctgtgagtgttgagagccc

SEQ ID NO: 45888 - DNA, 21 bp, Artificial Sequence
  primer
ttcttccttccattggctgtc

SEQ ID NO: 45889 - DNA, 37 bp, Artificial Sequence
  primer
gtaaaacgacggccagtcttacaccgcagcctgtgtc

SEQ ID NO: 45890 - DNA, 38 bp, Artificial Sequence
  primer
gtaaaacgacggccagtaactctacttcaacccgcacc

SEQ ID NO: 45891 - DNA, 21 bp, Artificial Sequence
  primer
caccaacttcctcttcttcgg

SEQ ID NO: 45892 - DNA, 38 bp, Artificial Sequence
  primer
gtaaaacgacggccagtattccagggtcttgggaagtc

SEQ ID NO: 45893 - DNA, 38 bp, Artificial Sequence; identical to SEQ ID NO: 45886
  primer

SEQ ID NO: 45894 - DNA, 37 bp, Artificial Sequence
  primer
gtaaaacgacggccagtctgaggatgtgaggtcctgg

SEQ ID NO: 45895 - DNA, 38 bp, Artificial Sequence
  primer
gtaaaacgacggccagtgtcgttgtccgtacgactgtg

SEQ ID NO: 45896 - DNA, 38 bp, Artificial Sequence
  primer
gtaaaacgacggccagtacaggctaggtgtggaaatcg

SEQ ID NO: 45897 - DNA, 38 bp, Artificial Sequence
  primer
gtaaaacgacggccagtataccctttatccgtccctcg

SEQ ID NO: 45898 - DNA, 41 bp, Artificial Sequence
  primer
gtaaaacgacggccagtaacagccataaagatcagaggatg

SEQ ID NO: 45899 - DNA, 21 bp, Artificial Sequence
  primer
cagcactgtgatggaattgtg

SEQ ID NO: 45900 - DNA, 20 bp, Artificial Sequence
  primer
ctgaggatgtgaggtcctgg

SEQ ID NO: 45901 - DNA, 20 bp, Artificial Sequence
  primer
cctctgtagagtcccagccc

SEQ ID NO: 45902 - DNA, 38 bp, Artificial Sequence
  primer
gtaaaacgacggccagttcagagaaagggacttggacc

SEQ ID NO: 45903 - DNA, 38 bp, Artificial Sequence
  primer
gtaaaacgacggccagtgggatacaaatagtgccgacg

SEQ ID NO: 45904 - DNA, 20 bp, Artificial Sequence
  primer
gctgctggacttctcactgg

SEQ ID NO: 45905 - DNA, 38 bp, Artificial Sequence
  primer
gtaaaacgacggccagtctctccactccctgtctctcc

SEQ ID NO: 45906 - DNA, 38 bp, Artificial Sequence
  primer
gtaaaacgacggccagtgagaacaatttggctgccttc

SEQ ID NO: 45907 - DNA, 20 bp, Artificial Sequence
  primer
gaggctctggctgggaatag

SEQ ID NO: 45908 - DNA, 38 bp, Artificial Sequence
  primer
gtaaaacgacggccagtgtaccatccatgggaggagag

SEQ ID NO: 45909 - DNA, 21 bp, Artificial Sequence
  primer
gacctgaccatctggagttgc

SEQ ID NO: 45910 - DNA, 19 bp, Artificial Sequence
  primer
ctggaactacaggtgcccg

SEQ ID NO: 45911 - DNA, 40 bp, Artificial Sequence
  primer
gtaaaacgacggccagtaagtaacaagcctgtcttgaggg

SEQ ID NO: 45912 - DNA, 21 bp, Artificial Sequence
  primer
aggtaagtggtctgtctgggc

SEQ ID NO: 45913 - DNA, 21 bp, Artificial Sequence
  primer
gctcataccaattgttgctcc

SEQ ID NO: 45914 - DNA, 21 bp, Artificial Sequence
  primer
cccaacagctgagcatacttg

SEQ ID NO: 45915 - DNA, 37 bp, Artificial Sequence
  primer
gtaaaacgacggccagtgatcagttcaggcaaggcag

SEQ ID NO: 45916 - DNA, 21 bp, Artificial Sequence
  primer
tttgtcctgctgcacattacc

SEQ ID NO: 45917 - DNA, 21 bp, Artificial Sequence
  primer
tgtgatacacgcacgttcaag

SEQ ID NO: 45918 - DNA, 21 bp, Artificial Sequence
  primer
gggatcctttcatcaattccc

SEQ ID NO: 45919 - DNA, 20 bp, Artificial Sequence
  primer
tggtaaagccgaggtgtttg

SEQ ID NO: 45920 - DNA, 23 bp, Artificial Sequence
  primer
tgtagctggccagacttgtaatg

SEQ ID NO: 45921 - DNA, 23 bp, Artificial Sequence
  primer
cctgctgtctagatttcagttcg

SEQ ID NO: 45922 - DNA, 35 bp, Artificial Sequence
  primer
gtaaaacgacggccagtcttctgtcgggctccagg

SEQ ID NO: 45923 - DNA, 38 bp, Artificial Sequence
  primer
gtaaaacgacggccagttcgactctggtgtgagtctgg

SEQ ID NO: 45924 - DNA, 37 bp, Artificial Sequence
  primer
gtaaaacgacggccagtcccagagatgggattcttgc

SEQ ID NO: 45925 - DNA, 35 bp, Artificial Sequence
  primer
gtaaaacgacggccagtggagcagtgggtgctgag

SEQ ID NO: 45926 - DNA, 18 bp, Artificial Sequence
  primer
ctggaggacgcgtgagtg

SEQ ID NO: 45927 - DNA, 37 bp, Artificial Sequence
  primer
gtaaaacgacggccagttctcctgctgcactgagacc

SEQ ID NO: 45928 - DNA, 21 bp, Artificial Sequence
  primer
caaattaacacgggagggatg

SEQ ID NO: 45929 - DNA, 38 bp, Artificial Sequence
  primer
gtaaaacgacggccagtctgcggaacgaactacatctc

SEQ ID NO: 45930 - DNA, 43 bp, Artificial Sequence
  primer
gtaaaacgacggccagtcatacatacttgagatgcagggatag

SEQ ID NO: 45931 - DNA, 38 bp, Artificial Sequence
  primer
gtaaaacgacggccagtcctcaagaggtctgtgtgtgc

SEQ ID NO: 45932 - DNA, 18 bp, Artificial Sequence
  primer
acaccatcgcactccagc

SEQ ID NO: 45933 - DNA, 21 bp, Artificial Sequence
  primer
cccttgggaggacactatttg

SEQ ID NO: 45934 - DNA, 21 bp, Artificial Sequence
  primer
aaacggatactgcctcattgc

SEQ ID NO: 45935 - DNA, 21 bp, Artificial Sequence
  primer
cccttgggaggacactatttg

SEQ ID NO: 45936 - DNA, 38 bp, Artificial Sequence
  primer
gtaaaacgacggccagtctgggtaatgtagtttccggg

SEQ ID NO: 45937 - DNA, 37 bp, Artificial Sequence
  primer
gtaaaacgacggccagtgtttgtgaggcctgcagatg

SEQ ID NO: 45938 - DNA, 38 bp, Artificial Sequence
  primer
gtaaaacgacggccagttggtcagaggctcttcttgtg

SEQ ID NO: 45939 - DNA, 38 bp, Artificial Sequence
  primer
gtaaaacgacggccagtcccaggaggttaaggctgtag

SEQ ID NO: 45940 - DNA, 38 bp, Artificial Sequence
  primer
gtaaaacgacggccagtcatggagtgagatggatcgag

SEQ ID NO: 45941 - DNA, 18 bp, Artificial Sequence
  primer
acagagcgaggcgctgtc

SEQ ID NO: 45942 - DNA, 38 bp, Artificial Sequence
  primer
gtaaaacgacggccagttgtgaagagctgtgactgcaa

SEQ ID NO: 45943 - DNA, 41 bp, Artificial Sequence
  primer
gtaaaacgacggccagttcatgtgaactgttgtgaataggg

SEQ ID NO: 45944 - DNA, 38 bp, Artificial Sequence
  primer
gtaaaacgacggccagtgcttggaaagctaaatgaccc

SEQ ID NO: 45945 - DNA, 38 bp, Artificial Sequence
  primer
gtaaaacgacggccagtgctgtgcaagaggaaattcac

SEQ ID NO: 45946 - DNA, 38 bp, Artificial Sequence
  primer
gtaaaacgacggccagtatgtataaggcacgaggctgg

SEQ ID NO: 45947 - DNA, 38 bp, Artificial Sequence
  primer
gtaaaacgacggccagttaagatgtgccatcaaggctg

SEQ ID NO: 45948 - DNA, 38 bp, Artificial Sequence
  primer
gtaaaacgacggccagtatgactgactatgcagctggg

SEQ ID NO: 45949 - DNA, 38 bp, Artificial Sequence
  primer
gtaaaacgacggccagtgggcttgtgtgtactgtgagc

SEQ ID NO: 45950 - DNA, 21 bp, Artificial Sequence
  primer
taagttaggtgccatccaggg

SEQ ID NO: 45951 - DNA, 23 bp, Artificial Sequence
  primer
cccagaattacctacaagtgcat

SEQ ID NO: 45952 - DNA, 39 bp, Artificial Sequence
  primer
gtaaaacgacggccagtcctaggatccagccactgtacc

SEQ ID NO: 45953 - DNA, 38 bp, Artificial Sequence
  primer
gtaaaacgacggccagtggttactgtctgccaacgtgc

SEQ ID NO: 45954 - DNA, 21 bp, Artificial Sequence
  primer
ctgctcttcgaccaatacacg

SEQ ID NO: 45955 - DNA, 21 bp, Artificial Sequence
  primer
gggctagagaaggaaagggac

SEQ ID NO: 45956 - DNA, 38 bp, Artificial Sequence
  primer
gtaaaacgacggccagtgcgctcttcaaagtacgagag

SEQ ID NO: 45957 - DNA, 21 bp, Artificial Sequence
  primer
cagaggagaattgggatctgg

SEQ ID NO: 45958 - DNA, 22 bp, Artificial Sequence
  primer
tcttgaagctttgctcttcctg

SEQ ID NO: 45959 - DNA, 38 bp, Artificial Sequence
  primer
gtaaaacgacggccagtacttagacaggatggaagggc

SEQ ID NO: 45960 - DNA, 21 bp, Artificial Sequence
  primer
ggagccagacagttaaggagg

SEQ ID NO: 45961 - DNA, 38 bp, Artificial Sequence
  primer
gtaaaacgacggccagtttggtgtgctggagaacaaac

SEQ ID NO: 45962 - DNA, 21 bp, Artificial Sequence
  primer
gccaagagcagttagagtggg

SEQ ID NO: 45963 - DNA, 20 bp, Artificial Sequence
  primer
gagagaggacctccagccac

SEQ ID NO: 45964 - DNA, 21 bp, Artificial Sequence
  primer
acgatctcttcattccttccc

SEQ ID NO: 45965 - DNA, 38 bp, Artificial Sequence
  primer
gtaaaacgacggccagtcacaagtgcttggcttagtgc

SEQ ID NO: 45966 - DNA, 38 bp, Artificial Sequence
  primer
gtaaaacgacggccagtcagattgtagctgcctgcttg

SEQ ID NO: 45967 - DNA, 21 bp, Artificial Sequence
  primer
ggtgataaagtgttgcgctcc

SEQ ID NO: 45968 - DNA, 21 bp, Artificial Sequence
  primer
ggaggtgaggtttgtactggg

SEQ ID NO: 45969 - DNA, 21 bp, Artificial Sequence
  primer
tatttctcagggtttgtgggc

SEQ ID NO: 45970 - DNA, 38 bp, Artificial Sequence
  primer
gtaaaacgacggccagttcacactcagtcgagggtttg

SEQ ID NO: 45971 - DNA, 21 bp, Artificial Sequence
  primer
aatgacacatccaatccctcc

SEQ ID NO: 45972 - DNA, 38 bp, Artificial Sequence
  primer
gtaaaacgacggccagtgaaccagacaactccaaaggg

SEQ ID NO: 45973 - DNA, 21 bp, Artificial Sequence
  primer
cttgggacacccaggtaattc

SEQ ID NO: 45974 - DNA, 38 bp, Artificial Sequence
  primer
gtaaaacgacggccagtagcatttggcacagttccttc

SEQ ID NO: 45975 - DNA, 38 bp, Artificial Sequence
  primer
gtaaaacgacggccagtgtgaacttccagaggctggtg

SEQ ID NO: 45976 - DNA, 37 bp, Artificial Sequence
  primer
gtaaaacgacggccagtatgtggagagctggtgatgg

SEQ ID NO: 45977 - DNA, 21 bp, Artificial Sequence
  primer
gaccatcctagggtctcctcc

SEQ ID NO: 45978 - DNA, 38 bp, Artificial Sequence
  primer
gtaaaacgacggccagttttagagagcaccctgatccc

SEQ ID NO: 45979 - DNA, 22 bp, Artificial Sequence
  primer
aacaagccagtgaagagcagag

SEQ ID NO: 45980 - DNA, 39 bp, Artificial Sequence
  primer
gtaaaacgacggccagtagcaaacaaatgttcttccagg

SEQ ID NO: 45981 - DNA, 20 bp, Artificial Sequence
  primer
agtcaggcccaaggtaggag

SEQ ID NO: 45982 - DNA, 22 bp, Artificial Sequence
  primer
tggtcctgtaattctgtggagg

SEQ ID NO: 45983 - DNA, 21 bp, Artificial Sequence
  primer
gagagagtgcacgtgaccttg

SEQ ID NO: 45984 - DNA, 21 bp, Artificial Sequence
  primer
ctaaattgccctgatatgccc

SEQ ID NO: 45985 - DNA, 38 bp, Artificial Sequence
  primer
gtaaaacgacggccagttttcctttcagatctctgccc

SEQ ID NO: 45986 - DNA, 38 bp, Artificial Sequence
  primer
gtaaaacgacggccagtatgttaggctccttgcactcc

SEQ ID NO: 45987 - DNA, 36 bp, Artificial Sequence
  primer
gtaaaacgacggccagtgtcagcgtgtctggcattc

SEQ ID NO: 45988 - DNA, 21 bp, Artificial Sequence
  primer
gaacctcagctctgactctgc

SEQ ID NO: 45989 - DNA, 38 bp, Artificial Sequence
  primer
gtaaaacgacggccagtatgtgtgggtaggaagttggg

SEQ ID NO: 45990 - DNA, 38 bp, Artificial Sequence
  primer
gtaaaacgacggccagtgagaagagtcccacatcagcc

SEQ ID NO: 45991 - DNA, 37 bp, Artificial Sequence
  primer
gtaaaacgacggccagtgggattggattcagggacag

SEQ ID NO: 45992 - DNA, 38 bp, Artificial Sequence
  primer
gtaaaacgacggccagtaaacataggctacctgctggg

SEQ ID NO: 45993 - DNA, 21 bp, Artificial Sequence
  primer
aggcaaacagctgaccctaag

SEQ ID NO: 45994 - DNA, 21 bp, Artificial Sequence
  primer
gaggtttcccaccttggagag

SEQ ID NO: 45995 - DNA, 21 bp, Artificial Sequence
  primer
ttcagtacatggctcccagtg

SEQ ID NO: 45996 - DNA, 38 bp, Artificial Sequence
  primer
gtaaaacgacggccagttccattggccaactattggag

SEQ ID NO: 45997 - DNA, 37 bp, Artificial Sequence
  primer
gtaaaacgacggccagttgacctcatgatccacctcc

SEQ ID NO: 45998 - DNA, 21 bp, Artificial Sequence
  primer
accctgtatgaggaccctgtg

SEQ ID NO: 45999 - DNA, 19 bp, Artificial Sequence
  primer
gctatgattcctgggcctg

SEQ ID NO: 46000 - DNA, 38 bp, Artificial Sequence
  primer
gtaaaacgacggccagtgtgtcacataggcgtaggcac

SEQ ID NO: 46001 - DNA, 38 bp, Artificial Sequence
  primer
gtaaaacgacggccagttggacaggtctgtgtgaggtc

SEQ ID NO: 46002 - DNA, 21 bp, Artificial Sequence
  primer
aagtgtttccagcatgttccc

SEQ ID NO: 46003 - DNA, 38 bp, Artificial Sequence
  primer
gtaaaacgacggccagttgaacaagctgtgactggagg

SEQ ID NO: 46004 - DNA, 21 bp, Artificial Sequence
  primer
taggcaacaaagagaggctgg

SEQ ID NO: 46005 - DNA, 21 bp, Artificial Sequence
  primer
agagtgactgtgtctctgccc

SEQ ID NO: 46006 - DNA, 35 bp, Artificial Sequence
  primer
gtaaaacgacggccagtcagccgaagctctttccc

SEQ ID NO: 46007 - DNA, 37 bp, Artificial Sequence
  primer
gtaaaacgacggccagtgggaagagattgatccagcc

SEQ ID NO: 46008 - DNA, 21 bp, Artificial Sequence
  primer
ctaaagaaagcctgcattgcc

SEQ ID NO: 46009 - DNA, 37 bp, Artificial Sequence
  primer
gtaaaacgacggccagtttacaaggtgtgcctgtccc

SEQ ID NO: 46010 - DNA, 21 bp, Artificial Sequence
  primer
tgcttgaaccaggaagtcaag

SEQ ID NO: 46011 - DNA, 38 bp, Artificial Sequence
  primer
gtaaaacgacggccagtgttgatgatcctgtctgacgc

SEQ ID NO: 46012 - DNA, 21 bp, Artificial Sequence
  primer
gtagcattcacaggcccacac

SEQ ID NO: 46013 - DNA, 38 bp, Artificial Sequence
  primer
gtaaaacgacggccagtgagacactgtgtgccttgtcc

SEQ ID NO: 46014 - DNA, 18 bp, Artificial Sequence
  primer
gtgtgcactcagggacgg

SEQ ID NO: 46015 - DNA, 37 bp, Artificial Sequence
  primer
gtaaaacgacggccagtcttcaggcaggaggagtgtc

SEQ ID NO: 46016 - DNA, 38 bp, Artificial Sequence
  primer
gtaaaacgacggccagttgcgctagggactgtcataaa

SEQ ID NO: 46017 - DNA, 38 bp, Artificial Sequence
  primer
gtaaaacgacggccagtctgcgctagggactgtcataa

SEQ ID NO: 46018 - DNA, 37 bp, Artificial Sequence
  primer
gtaaaacgacggccagtctctgctgggttggtaaggc

SEQ ID NO: 46019 - DNA, 38 bp, Artificial Sequence
  primer
gtaaaacgacggccagtgatgcattggtggtgtcagag

SEQ ID NO: 46020 - DNA, 37 bp, Artificial Sequence
  primer
gtaaaacgacggccagtattccaccctgtcgtagcag

SEQ ID NO: 46021 - DNA, 37 bp, Artificial Sequence
  primer
gtaaaacgacggccagtcctctcgggactgtcgtaaa

SEQ ID NO: 46022 - DNA, 21 bp, Artificial Sequence
  primer
gacactaccagttgctgtcgg

SEQ ID NO: 46023 - DNA, 35 bp, Artificial Sequence
  primer
gtaaaacgacggccagtgaggatggaggaggctgg

SEQ ID NO: 46024 - DNA, 21 bp, Artificial Sequence
  primer
cagcaggagcatgtgtttgag

SEQ ID NO: 46025 - DNA, 21 bp, Artificial Sequence
  primer
aagctcagattccaccctgtc

SEQ ID NO: 46026 - DNA, 38 bp, Artificial Sequence
  primer
gtaaaacgacggccagtgctgagtgcattgtgatttcc

SEQ ID NO: 46027 - DNA, 21 bp, Artificial Sequence
  primer
gtgagcagtctccaccacctc

SEQ ID NO: 46028 - DNA, 21 bp, Artificial Sequence
  primer
aggtaatggacgttggctctg

SEQ ID NO: 46029 - DNA, 38 bp, Artificial Sequence
  primer
gtaaaacgacggccagtagctgcaggagtaaggacagg

SEQ ID NO: 46030 - DNA, 38 bp, Artificial Sequence
  primer
gtaaaacgacggccagttgagagcacctcctttctgtg

SEQ ID NO: 46031 - DNA, 38 bp, Artificial Sequence
  primer
gtaaaacgacggccagtcaatttcttgtgcaggaggtg

SEQ ID NO: 46032 - DNA, 37 bp, Artificial Sequence
  primer
gtaaaacgacggccagtgtgcacatccacacacatgg

SEQ ID NO: 46033 - DNA, 22 bp, Artificial Sequence
  primer
ggaaatagtgtcatgtggcctg

SEQ ID NO: 46034 - DNA, 38 bp, Artificial Sequence
  primer
gtaaaacgacggccagttggtaacaggaagctgtgtgc

SEQ ID NO: 46035 - DNA, 20 bp, Artificial Sequence
  primer
cccaggtctctgcagtcaag

SEQ ID NO: 46036 - DNA, 38 bp, Artificial Sequence
  primer
gtaaaacgacggccagtccctgtcactgaagtgctgtc

SEQ ID NO: 46037 - DNA, 38 bp, Artificial Sequence
  primer
gtaaaacgacggccagttgaggtatgaagtgctaggcg

SEQ ID NO: 46038 - DNA, 38 bp, Artificial Sequence
  primer
gtaaaacgacggccagttgtggagaattccctcctctg

SEQ ID NO: 46039 - DNA, 37 bp, Artificial Sequence
  primer
gtaaaacgacggccagttcctgtagaatgtgccctgg

SEQ ID NO: 46040 - DNA, 20 bp, Artificial Sequence
  primer
ctctctgctgctgtcagtgg

SEQ ID NO: 46041 - DNA, 38 bp, Artificial Sequence
  primer
gtaaaacgacggccagtctccctccaccttgtgtcttc

SEQ ID NO: 46042 - DNA, 38 bp, Artificial Sequence
  primer
gtaaaacgacggccagtgcctaccctctgaagaggtcc

SEQ ID NO: 46043 - DNA, 19 bp, Artificial Sequence
  primer
cctgctggatttctctggc

SEQ ID NO: 46044 - DNA, 38 bp, Artificial Sequence
  primer
gtaaaacgacggccagtccgctactcccaattcttcag

SEQ ID NO: 46045 - DNA, 21 bp, Artificial Sequence
  primer
cagtgacagagcaagaccctg

SEQ ID NO: 46046 - DNA, 21 bp, Artificial Sequence
  primer
actgagggtagagtccatgcc

SEQ ID NO: 46047 - DNA, 39 bp, Artificial Sequence
  primer
gtaaaacgacggccagtgaatgagaggtgtgaatctggg

SEQ ID NO: 46048 - DNA, 38 bp, Artificial Sequence
  primer
gtaaaacgacggccagtaccttcttccctggtgagtcc

SEQ ID NO: 46049 - DNA, 38 bp, Artificial Sequence
  primer
gtaaaacgacggccagtgacagccttgggttatgcttg

SEQ ID NO: 46050 - DNA, 38 bp, Artificial Sequence
  primer
gtaaaacgacggccagtgcctcaccctcaggtaagaag

SEQ ID NO: 46051 - DNA, 21 bp, Artificial Sequence
  primer
tgagtgatctcatgcctccac

SEQ ID NO: 46052 - DNA, 21 bp, Artificial Sequence
  primer
ccacacctcctttacaggcac

SEQ ID NO: 46053 - DNA, 21 bp, Artificial Sequence
  primer
cacgcacagagtggcatttag

SEQ ID NO: 46054 - DNA, 38 bp, Artificial Sequence
  primer
gtaaaacgacggccagtatcttggtggaatgctagccc

SEQ ID NO: 46055 - DNA, 21 bp, Artificial Sequence
  primer
ctgcctgcaacacttagaagg

SEQ ID NO: 46056 - DNA, 21 bp, Artificial Sequence
  primer
aggagggtcctacggaatgag

SEQ ID NO: 46057 - DNA, 22 bp, Artificial Sequence
  primer
ttcaaggatgttcctgatagcc

SEQ ID NO: 46058 - DNA, 38 bp, Artificial Sequence
  primer
gtaaaacgacggccagtggctctgtagaaacagggcag

SEQ ID NO: 46059 - DNA, 21 bp, Artificial Sequence
  primer
tacagtgctgagttgcaaggg

SEQ ID NO: 46060 - DNA, 38 bp, Artificial Sequence
  primer
gtaaaacgacggccagtgttaggaggttgatgcccttc

SEQ ID NO: 46061 - DNA, 38 bp, Artificial Sequence
  primer
gtaaaacgacggccagtagtttgtcatctggtggaggg

SEQ ID NO: 46062 - DNA, 38 bp, Artificial Sequence
  primer
gtaaaacgacggccagtacgaagggaaagtgtgactcc

SEQ ID NO: 46063 - DNA, 38 bp, Artificial Sequence
  primer
gtaaaacgacggccagtaaggaagactccaccagggtc

SEQ ID NO: 46064 - DNA, 38 bp, Artificial Sequence
  primer
gtaaaacgacggccagtctaggaacctagcaacccacc

SEQ ID NO: 46065 - DNA, 38 bp, Artificial Sequence
  primer
gtaaaacgacggccagtaagcatagacctctgcgcaac

SEQ ID NO: 46066 - DNA, 38 bp, Artificial Sequence
  primer
gtaaaacgacggccagtgtctctgtttctggactgggc

SEQ ID NO: 46067 - DNA, 38 bp, Artificial Sequence
  primer
gtaaaacgacggccagtggcctatggatctagggtgtg

SEQ ID NO: 46068 - DNA, 22 bp, Artificial Sequence
  primer
tttctcaaataggcactttcca

SEQ ID NO: 46069 - DNA, 23 bp, Artificial Sequence
  primer
tgtctagctgctgtaccgatctt

SEQ ID NO: 46070 - DNA, 40 bp, Artificial Sequence
  primer
gtaaaacgacggccagtacaaattaattgtttggagcagg

SEQ ID NO: 46071 - DNA, 22 bp, Artificial Sequence
  primer
tttgtaaagttgtgccctctcc

SEQ ID NO: 46072 - DNA, 38 bp, Artificial Sequence
  primer
gtaaaacgacggccagttcccaactctccacttagctg

SEQ ID NO: 46073 - DNA, 38 bp, Artificial Sequence
  primer
gtaaaacgacggccagttccagctctgaatttcattgg

SEQ ID NO: 46074 - DNA, 38 bp, Artificial Sequence
  primer
gtaaaacgacggccagtggattgattagggagcagtgg

SEQ ID NO: 46075 - DNA, 38 bp, Artificial Sequence
  primer
gtaaaacgacggccagtgtgcatgcttgctttctgaag

SEQ ID NO: 46076 - DNA, 44 bp, Artificial Sequence
  primer
gtaaaacgacggccagttgtatctcgattgaaatataatctccc

SEQ ID NO: 46077 - DNA, 39 bp, Artificial Sequence
  primer
gtaaaacgacggccagttcacaacctaacccactctgtg

SEQ ID NO: 46078 - DNA, 40 bp, Artificial Sequence
  primer
gtaaaacgacggccagtgcctgtgtttgtaaccatgaaac

SEQ ID NO: 46079 - DNA, 39 bp, Artificial Sequence
  primer
gtaaaacgacggccagtcacacacacacattgtggaaag

SEQ ID NO: 46080 - DNA, 22 bp, Artificial Sequence
  primer
tgcatattaaggatccaagcaa

SEQ ID NO: 46081 - DNA, 40 bp, Artificial Sequence
  primer
gtaaaacgacggccagttccttcatttaatgtcatcaggc

SEQ ID NO: 46082 - DNA, 21 bp, Artificial Sequence
  primer
ttcatttggtggcagaatgtg

SEQ ID NO: 46083 - DNA, 21 bp, Artificial Sequence
  primer
gccaaagccagtcattaaagg

SEQ ID NO: 46084 - DNA, 38 bp, Artificial Sequence
  primer
gtaaaacgacggccagtgtttggcacccacatttaagc

SEQ ID NO: 46085 - DNA, 23 bp, Artificial Sequence
  primer
gacaacattatggatttcaacgc

SEQ ID NO: 46086 - DNA, 22 bp, Artificial Sequence
  primer
tcagaatctgtgcttcccattt

SEQ ID NO: 46087 - DNA, 38 bp, Artificial Sequence
  primer
gtaaaacgacggccagtttaccatattgccttccctgg

SEQ ID NO: 46088 - DNA, 22 bp, Artificial Sequence
  primer
ttacacttgcggtgtttcagtc

SEQ ID NO: 46089 - DNA, 38 bp, Artificial Sequence; identical to SEQ ID NO: 46087
  primer

SEQ ID NO: 46090 - DNA, 38 bp, Artificial Sequence
  primer
gtaaaacgacggccagtgacacgaatatgtttcagccg

SEQ ID NO: 46091 - DNA, 38 bp, Artificial Sequence
  primer
gtaaaacgacggccagtgcttctgtgggtgcttgttag

SEQ ID NO: 46092 - DNA, 22 bp, Artificial Sequence
  primer
ttcggttcagtgtgaatacctg

SEQ ID NO: 46093 - DNA, 20 bp, Artificial Sequence
  primer
tcctctcagcagacctgtcc

SEQ ID NO: 46094 - DNA, 19 bp, Artificial Sequence
  primer
ctggagctggacggttctc

SEQ ID NO: 46095 - DNA, 38 bp, Artificial Sequence
  primer
gtaaaacgacggccagtaagaatgccttggctgagttc

SEQ ID NO: 46096 - DNA, 20 bp, Artificial Sequence
  primer
cagcccagctctgaaatcac

SEQ ID NO: 46097 - DNA, 38 bp, Artificial Sequence
  primer
gtaaaacgacggccagttgtcaggtgtgtgtcctttgg

SEQ ID NO: 46098 - DNA, 37 bp, Artificial Sequence
  primer
gtaaaacgacggccagtacaaagtggaccctgagtgg

SEQ ID NO: 46099 - DNA, 38 bp, Artificial Sequence
  primer
gtaaaacgacggccagtcccacattgctaacgtaaccc

SEQ ID NO: 46100 - DNA, 21 bp, Artificial Sequence
  primer
gggacagagtcaagaccaagg

SEQ ID NO: 46101 - DNA, 38 bp, Artificial Sequence
  primer
gtaaaacgacggccagtagaagtgagttgaggcttggc

SEQ ID NO: 46102 - DNA, 20 bp, Artificial Sequence
  primer
aaatcctcacctcggaccag

SEQ ID NO: 46103 - DNA, 37 bp, Artificial Sequence
  primer
gtaaaacgacggccagtggtgaaatggcctgaggttc

SEQ ID NO: 46104 - DNA, 22 bp, Artificial Sequence
  primer
ggttgtttgaggaagatcaggc

SEQ ID NO: 46105 - DNA, 21 bp, Artificial Sequence
  primer
ctttgtcccacacacttcacg

SEQ ID NO: 46106 - DNA, 38 bp, Artificial Sequence
  primer
gtaaaacgacggccagtcaccagcttcagagacacgag

SEQ ID NO: 46107 - DNA, 38 bp, Artificial Sequence
  primer
gtaaaacgacggccagtgaaatgctgagaggttgggag

SEQ ID NO: 46108 - DNA, 38 bp, Artificial Sequence
  primer
gtaaaacgacggccagtttcccagctttcacagaaatg

SEQ ID NO: 46109 - DNA, 38 bp, Artificial Sequence
  primer
gtaaaacgacggccagtgtgggaagctggtagagaagg

SEQ ID NO: 46110 - DNA, 21 bp, Artificial Sequence
  primer
acctggtaacttctcgccagc

SEQ ID NO: 46111 - DNA, 36 bp, Artificial Sequence
  primer
gtaaaacgacggccagtaggaaggtcatggtggtgc

SEQ ID NO: 46112 - DNA, 23 bp, Artificial Sequence
  primer
gggcagtaatttctaggaccatc

SEQ ID NO: 46113 - DNA, 38 bp, Artificial Sequence
  primer
gtaaaacgacggccagtcgtgttcagatgcgtattgtg

SEQ ID NO: 46114 - DNA, 38 bp, Artificial Sequence
  primer
gtaaaacgacggccagtagcccagaaccacagaggtag

SEQ ID NO: 46115 - DNA, 21 bp, Artificial Sequence
  primer
tttctggtgctctgggacttc

SEQ ID NO: 46116 - DNA, 37 bp, Artificial Sequence
  primer
gtaaaacgacggccagtcagcctctctggtggagatg

SEQ ID NO: 46117 - DNA, 36 bp, Artificial Sequence
  primer
gtaaaacgacggccagtacgtctcctgtcctggcac

SEQ ID NO: 46118 - DNA, 37 bp, Artificial Sequence
  primer
gtaaaacgacggccagtgccaggcatctgtatggttg

SEQ ID NO: 46119 - DNA, 35 bp, Artificial Sequence
  primer
gtaaaacgacggccagtgagagcggagccaccttc

SEQ ID NO: 46120 - DNA, 39 bp, Artificial Sequence
  primer
gtaaaacgacggccagttctggttaggtatcgtccttgg

SEQ ID NO: 46121 - DNA, 22 bp, Artificial Sequence
  primer
ttattgctccatttcactgtgc

SEQ ID NO: 46122 - DNA, 21 bp, Artificial Sequence
  primer
tagcaccattgttctcaaggc

SEQ ID NO: 46123 - DNA, 41 bp, Artificial Sequence
  primer
gtaaaacgacggccagtggtgcctggcatattgttaaatac

SEQ ID NO: 46124 - DNA, 21 bp, Artificial Sequence
  primer
tacatgggtgagccactatgc

SEQ ID NO: 46125 - DNA, 38 bp, Artificial Sequence
  primer
gtaaaacgacggccagttgcatgctcatatacgtgtgg

SEQ ID NO: 46126 - DNA, 38 bp, Artificial Sequence
  primer
gtaaaacgacggccagtatgcagaaagcatctccattg

SEQ ID NO: 46127 - DNA, 38 bp, Artificial Sequence
  primer
gtaaaacgacggccagtgaatggaggtgttggataggg

SEQ ID NO: 46128 - DNA, 21 bp, Artificial Sequence
  primer
ccctgagtgagaggtagggag

SEQ ID NO: 46129 - DNA, 23 bp, Artificial Sequence
  primer
tttaagttgatggtccaactgtg

SEQ ID NO: 46130 - DNA, 22 bp, Artificial Sequence
  primer
tgaaatgcataagggttaaggg

SEQ ID NO: 46131 - DNA, 38 bp, Artificial Sequence
  primer
gtaaaacgacggccagtctcctgaaaggcttacatcgc

SEQ ID NO: 46132 - DNA, 38 bp, Artificial Sequence
  primer
gtaaaacgacggccagtgcagctccaacataaacatgg

SEQ ID NO: 46133 - DNA, 21 bp, Artificial Sequence
  primer
ctttccattcctttcacctgc

SEQ ID NO: 46134 - DNA, 21 bp, Artificial Sequence
  primer
gatgtcctgtacctgcccttc

SEQ ID NO: 46135 - DNA, 38 bp, Artificial Sequence
  primer
gtaaaacgacggccagtaagttggatttctagggccac

SEQ ID NO: 46136 - DNA, 38 bp, Artificial Sequence
  primer
gtaaaacgacggccagtctgccataaccttcgtcacag

SEQ ID NO: 46137 - DNA, 38 bp, Artificial Sequence
  primer
gtaaaacgacggccagtctgcaccagcttcttctcttg

SEQ ID NO: 46138 - DNA, 39 bp, Artificial Sequence
  primer
gtaaaacgacggccagttgcaagatgaacaagacagcag

SEQ ID NO: 46139 - DNA, 38 bp, Artificial Sequence
  primer
gtaaaacgacggccagtaaggaagaacatgcaagaggc

SEQ ID NO: 46140 - DNA, 21 bp, Artificial Sequence
  primer
cacccaaagggaggtacagac

SEQ ID NO: 46141 - DNA, 37 bp, Artificial Sequence
  primer
gtaaaacgacggccagtcccagatccttctcctccag

SEQ ID NO: 46142 - DNA, 21 bp, Artificial Sequence
  primer
acacggcaatactgtcaaagc

SEQ ID NO: 46143 - DNA, 38 bp, Artificial Sequence
  primer
gtaaaacgacggccagtctcaaaggtaaagtcagcccg

SEQ ID NO: 46144 - DNA, 38 bp, Artificial Sequence
  primer
gtaaaacgacggccagtggcttcaactctcatctcacg

SEQ ID NO: 46145 - DNA, 21 bp, Artificial Sequence
  primer
taaatgaaccctcatccctgc

SEQ ID NO: 46146 - DNA, 38 bp, Artificial Sequence
  primer
gtaaaacgacggccagtcagggcagactctgactcaac

SEQ ID NO: 46147 - DNA, 21 bp, Artificial Sequence
  primer
tttcccatcagggtggtattc

SEQ ID NO: 46148 - DNA, 38 bp, Artificial Sequence
  primer
gtaaaacgacggccagtctgccctgacaactacctgtg

SEQ ID NO: 46149 - DNA, 38 bp, Artificial Sequence
  primer
gtaaaacgacggccagtagatagagtcccagggttggc

SEQ ID NO: 46150 - DNA, 21 bp, Artificial Sequence
  primer
agggttgccgtgatgtctaag

SEQ ID NO: 46151 - DNA, 21 bp, Artificial Sequence
  primer
cacacacacagagcaccttgg

SEQ ID NO: 46152 - DNA, 38 bp, Artificial Sequence
  primer
gtaaaacgacggccagttggtgggagatgaagggatac

SEQ ID NO: 46153 - DNA, 38 bp, Artificial Sequence
  primer
gtaaaacgacggccagtttcctggtgggaataaccttg

SEQ ID NO: 46154 - DNA, 38 bp, Artificial Sequence
  primer
gtaaaacgacggccagtcctttcctttctctgcgactc

SEQ ID NO: 46155 - DNA, 23 bp, Artificial Sequence
  primer
ttgtaccagttgggaattctttg

SEQ ID NO: 46156 - DNA, 38 bp, Artificial Sequence
  primer
gtaaaacgacggccagtgggtagctagggaaacggaag

SEQ ID NO: 46157 - DNA, 21 bp, Artificial Sequence
  primer
aattctttgagggcggagaac

SEQ ID NO: 46158 - DNA, 21 bp, Artificial Sequence
  primer
aaacagtgttcccagggtgtc

SEQ ID NO: 46159 - DNA, 21 bp, Artificial Sequence
  primer
aagggctaaagagcccaagtc

SEQ ID NO: 46160 - DNA, 38 bp, Artificial Sequence
  primer
gtaaaacgacggccagtatgcattccaaacagttcagc

SEQ ID NO: 46161 - DNA, 24 bp, Artificial Sequence
  primer
tgctgtgatttcctttaatcattg

SEQ ID NO: 46162 - DNA, 38 bp, Artificial Sequence
  primer
gtaaaacgacggccagtgtgaatgctatgcatgaaacg

SEQ ID NO: 46163 - DNA, 47 bp, Artificial Sequence
  primer
gtaaaacgacggccagttgattctagattatcagttccttagatgtg

SEQ ID NO: 46164 - DNA, 26 bp, Artificial Sequence
  primer
aacctatctctatttggagagctaaa

SEQ ID NO: 46165 - DNA, 21 bp, Artificial Sequence
  primer
ctttacctttcccggtttctg

SEQ ID NO: 46166 - DNA, 38 bp, Artificial Sequence
  primer
gtaaaacgacggccagtaccagagaggtgcagaaatgc

SEQ ID NO: 46167 - DNA, 37 bp, Artificial Sequence
  primer
gtaaaacgacggccagtgcgtgtgtgtgtgtgtgtgt

SEQ ID NO: 46168 - DNA, 22 bp, Artificial Sequence
  primer
aagaattccagaaaccgaaagc

SEQ ID NO: 46169 - DNA, 40 bp, Artificial Sequence
  primer
gtaaaacgacggccagtgacccagatatttgacagtttgc

SEQ ID NO: 46170 - DNA, 21 bp, Artificial Sequence
  primer
ttagctgcttccagaaccaaa

SEQ ID NO: 46171 - DNA, 37 bp, Artificial Sequence
  primer
gtaaaacgacggccagttcaatttgcctttcctgagc

SEQ ID NO: 46172 - DNA, 43 bp, Artificial Sequence
  primer
gtaaaacgacggccagtgacttcttattccctccatgtaagtc

SEQ ID NO: 46173 - DNA, 38 bp, Artificial Sequence
  primer
gtaaaacgacggccagtcctggatggactggttctttc

SEQ ID NO: 46174 - DNA, 39 bp, Artificial Sequence
  primer
gtaaaacgacggccagttgtcctgtggttgtacacatgg

SEQ ID NO: 46175 - DNA, 41 bp, Artificial Sequence
  primer
gtaaaacgacggccagttgtgtcatgaacaattactttggg

SEQ ID NO: 46176 - DNA, 21 bp, Artificial Sequence
  primer
ctgtgctccattgtccttcat

SEQ ID NO: 46177 - DNA, 26 bp, Artificial Sequence
  primer
ttaggtttattggaagtcatcttcag

SEQ ID NO: 46178 - DNA, 37 bp, Artificial Sequence
  primer
gtaaaacgacggccagttgggctaaggagggttgaag

SEQ ID NO: 46179 - DNA, 40 bp, Artificial Sequence
  primer
gtaaaacgacggccagtcatgtgttgcagtacattggaaa

SEQ ID NO: 46180 - DNA, 24 bp, Artificial Sequence
  primer
ctacctgtgccattcataattgag

SEQ ID NO: 46181 - DNA, 24 bp, Artificial Sequence
  primer
caaacaaatgtatgaaactttgcg

SEQ ID NO: 46182 - DNA, 38 bp, Artificial Sequence
  primer
gtaaaacgacggccagtggagtgaggctgttcactgtc

SEQ ID NO: 46183 - DNA, 27 bp, Artificial Sequence
  primer
ttgctatagaatttgaactcatctttg

SEQ ID NO: 46184 - DNA, 39 bp, Artificial Sequence
  primer
gtaaaacgacggccagttcggatccttgtgttgatagtg

SEQ ID NO: 46185 - DNA, 23 bp, Artificial Sequence
  primer
ttgtaccagttgggaattctttg

SEQ ID NO: 46186 - DNA, 20 bp, Artificial Sequence
  primer
gggcagagttcatgttcagc

SEQ ID NO: 46187 - DNA, 18 bp, Artificial Sequence
  primer
ggcgggagaggagaaagg

SEQ ID NO: 46188 - DNA, 38 bp, Artificial Sequence
  primer
gtaaaacgacggccagtgtggaagaggctaactcaggc

SEQ ID NO: 46189 - DNA, 21 bp, Artificial Sequence
  primer
gtccacctccatggataaagc

SEQ ID NO: 46190 - DNA, 21 bp, Artificial Sequence
  primer
tggtgagtgcagagactgttg

SEQ ID NO: 46191 - DNA, 22 bp, Artificial Sequence
  primer
tttgtgagaatgaaggaaaggg

SEQ ID NO: 46192 - DNA, 38 bp, Artificial Sequence
  primer
gtaaaacgacggccagttgaattgcttgagcagaggag

SEQ ID NO: 46193 - DNA, 38 bp, Artificial Sequence
  primer
gtaaaacgacggccagtccttctggccttattcacgtc

SEQ ID NO: 46194 - DNA, 19 bp, Artificial Sequence
  primer
cagtgtgtgcccatgtgtg

SEQ ID NO: 46195 - DNA, 21 bp, Artificial Sequence
  primer
ctgccgtcatcttctacttgg

SEQ ID NO: 46196 - DNA, 38 bp, Artificial Sequence
  primer
gtaaaacgacggccagttaagagtcagccctgggaaac

SEQ ID NO: 46197 - DNA, 18 bp, Artificial Sequence
  primer
tgatccacctgcgtcagc

SEQ ID NO: 46198 - DNA, 38 bp, Artificial Sequence
  primer
gtaaaacgacggccagtccctacctacccatgttgtcc

SEQ ID NO: 46199 - DNA, 38 bp, Artificial Sequence
  primer
gtaaaacgacggccagtgctcttggaagcctctgtttc

SEQ ID NO: 46200 - DNA, 39 bp, Artificial Sequence
  primer
gtaaaacgacggccagtaatataacggcttggctcttcc

SEQ ID NO: 46201 - DNA, 21 bp, Artificial Sequence
  primer
agcaccctccactttgagttg

SEQ ID NO: 46202 - DNA, 38 bp, Artificial Sequence
  primer
gtaaaacgacggccagtgtgatgccggtttggaactac

SEQ ID NO: 46203 - DNA, 39 bp, Artificial Sequence
  primer
gtaaaacgacggccagtggatatggaagcaaggatttgg

SEQ ID NO: 46204 - DNA, 20 bp, Artificial Sequence
  primer
agggcaaggagaaagagacc

SEQ ID NO: 46205 - DNA, 44 bp, Artificial Sequence
  primer
gtaaaacgacggccagtttgggtctaactacaaactaacacctc

SEQ ID NO: 46206 - DNA, 18 bp, Artificial Sequence
  primer
tgatccacctgccttggt

SEQ ID NO: 46207 - DNA, 21 bp, Artificial Sequence
  primer
ttgcccttattccttcaggtg

SEQ ID NO: 46208 - DNA, 40 bp, Artificial Sequence
  primer
gtaaaacgacggccagttggattgggtgttaactttctcc

SEQ ID NO: 46209 - DNA, 21 bp, Artificial Sequence
  primer
atctcagggccagtgaaacac

SEQ ID NO: 46210 - DNA, 22 bp, Artificial Sequence
  primer
tgggagttcagttgagattgag

SEQ ID NO: 46211 - DNA, 22 bp, Artificial Sequence
  primer
ccagtgctttgtgtaggaaagg

SEQ ID NO: 46212 - DNA, 21 bp, Artificial Sequence
  primer
tagcatgactgccatgtaggg

SEQ ID NO: 46213 - DNA, 39 bp, Artificial Sequence
  primer
gtaaaacgacggccagtgaggatcaccaactgatcaagc

SEQ ID NO: 46214 - DNA, 23 bp, Artificial Sequence
  primer
ttcatcttcagaaagtggaaacg

SEQ ID NO: 46215 - DNA, 38 bp, Artificial Sequence
  primer
gtaaaacgacggccagtccaatccaggtaagagttggg

SEQ ID NO: 46216 - DNA, 21 bp, Artificial Sequence
  primer
tactgtaccaaggctggaggg

SEQ ID NO: 46217 - DNA, 21 bp, Artificial Sequence
  primer
aaggctggaaacattgtggtc

SEQ ID NO: 46218 - DNA, 38 bp, Artificial Sequence
  primer
gtaaaacgacggccagtatggagattgggagtttggtg

SEQ ID NO: 46219 - DNA, 38 bp, Artificial Sequence
  primer
gtaaaacgacggccagttacagccaaagtctcagcagc

SEQ ID NO: 46220 - DNA, 22 bp, Artificial Sequence
  primer
agcaggtatccttgcgtagttc

SEQ ID NO: 46221 - DNA, 38 bp, Artificial Sequence
  primer
gtaaaacgacggccagtcttccaggcttagggactcag

SEQ ID NO: 46222 - DNA, 37 bp, Artificial Sequence
  primer
gtaaaacgacggccagtccagaacctgccacagagtc

SEQ ID NO: 46223 - DNA, 37 bp, Artificial Sequence
  primer
gtaaaacgacggccagtgccttcaggccatttctcag

SEQ ID NO: 46224 - DNA, 22 bp, Artificial Sequence
  primer
cctcaagccaaagaaatgattg

SEQ ID NO: 46225 - DNA, 38 bp, Artificial Sequence
  primer
gtaaaacgacggccagtaggagctacgagtggttctgg

SEQ ID NO: 46226 - DNA, 21 bp, Artificial Sequence
  primer
gctccaactttcagtcttccc

SEQ ID NO: 46227 - DNA, 21 bp, Artificial Sequence
  primer
aactttcagagcagctttggg

SEQ ID NO: 46228 - DNA, 38 bp, Artificial Sequence
  primer
gtaaaacgacggccagtattattccagttggcccttcc

SEQ ID NO: 46229 - DNA, 21 bp, Artificial Sequence
  primer
gggtgttcaggtgagttaggg

SEQ ID NO: 46230 - DNA, 21 bp, Artificial Sequence
  primer
gatgcttggcatgtggtagtg

SEQ ID NO: 46231 - DNA, 38 bp, Artificial Sequence
  primer
gtaaaacgacggccagtgttagcagagtgccaaagcag

SEQ ID NO: 46232 - DNA, 39 bp, Artificial Sequence
  primer
gtaaaacgacggccagtcaaagagtaccctctgggttcc

SEQ ID NO: 46233 - DNA, 21 bp, Artificial Sequence
  primer
accagagattgcttggacacc

SEQ ID NO: 46234 - DNA, 38 bp, Artificial Sequence
  primer
gtaaaacgacggccagttccagagaggcagttgagttg

SEQ ID NO: 46235 - DNA, 21 bp, Artificial Sequence
  primer
tgacttgggaagtggtgtgac

SEQ ID NO: 46236 - DNA, 21 bp, Artificial Sequence
  primer
tcaccaccactcctcattctg

SEQ ID NO: 46237 - DNA, 38 bp, Artificial Sequence
  primer
gtaaaacgacggccagtcgaatgggagtctccatcatc

SEQ ID NO: 46238 - DNA, 22 bp, Artificial Sequence
  primer
aaagtcactgagcttgaccctg

SEQ ID NO: 46239 - DNA, 37 bp, Artificial Sequence
  primer
gtaaaacgacggccagtgcagattcatcttcatgccc

SEQ ID NO: 46240 - DNA, 21 bp, Artificial Sequence
  primer
gttgccatttagcatgactcc

SEQ ID NO: 46241 - DNA, 38 bp, Artificial Sequence
  primer
gtaaaacgacggccagtgagaagacagagccctttccc

SEQ ID NO: 46242 - DNA, 38 bp, Artificial Sequence
  primer
gtaaaacgacggccagtaccaggagcctttaaacatgc

SEQ ID NO: 46243 - DNA, 38 bp, Artificial Sequence
  primer
gtaaaacgacggccagtcccataggaaacaggcatttc

SEQ ID NO: 46244 - DNA, 38 bp, Artificial Sequence
  primer
gtaaaacgacggccagtacatacccattgcccacaaac

SEQ ID NO: 46245 - DNA, 38 bp, Artificial Sequence
  primer
gtaaaacgacggccagtggtacccagggctttcacttc

SEQ ID NO: 46246 - DNA, 21 bp, Artificial Sequence
  primer
ctaccttcccacggagaagac

SEQ ID NO: 46247 - DNA, 38 bp, Artificial Sequence
  primer
gtaaaacgacggccagtcttggtcactagcagggactg

SEQ ID NO: 46248 - DNA, 21 bp, Artificial Sequence
  primer
aagcacctggcatcaagtagc

SEQ ID NO: 46249 - DNA, 21 bp, Artificial Sequence
  primer
tccctgatgattcagagatgg

SEQ ID NO: 46250 - DNA, 20 bp, Artificial Sequence
  primer
gcagtcggaagcagtgtacc

SEQ ID NO: 46251 - DNA, 20 bp, Artificial Sequence
  primer
ggtgggtatggcagtcattg

SEQ ID NO: 46252 - DNA, 36 bp, Artificial Sequence
  primer
gtaaaacgacggccagtgcaggtgaagagcgaggag

SEQ ID NO: 46253 - DNA, 38 bp, Artificial Sequence
  primer
gtaaaacgacggccagtggacacttaaaggatgcaggg

SEQ ID NO: 46254 - DNA, 21 bp, Artificial Sequence
  primer
ccaggatcacgtgagtgtacc

SEQ ID NO: 46255 - DNA, 19 bp, Artificial Sequence
  primer
gggtctttccctggacctg

SEQ ID NO: 46256 - DNA, 37 bp, Artificial Sequence
  primer
gtaaaacgacggccagttcagcaagacgcagagcttc

SEQ ID NO: 46257 - DNA, 36 bp, Artificial Sequence
  primer
gtaaaacgacggccagtgtaagtgcccgcctcattc

SEQ ID NO: 46258 - DNA, 18 bp, Artificial Sequence
  primer
ctcccaggaccgcatgtc

SEQ ID NO: 46259 - DNA, 38 bp, Artificial Sequence
  primer
gtaaaacgacggccagtcctgaagatctaccctggctg

SEQ ID NO: 46260 - DNA, 21 bp, Artificial Sequence
  primer
agctccagctcagactgtgtc

SEQ ID NO: 46261 - DNA, 36 bp, Artificial Sequence
  primer
gtaaaacgacggccagtacggtgagtagacagcccg

SEQ ID NO: 46262 - DNA, 22 bp, Artificial Sequence
  primer
tcctgttgacttaattcctggg

SEQ ID NO: 46263 - DNA, 19 bp, Artificial Sequence
  primer
gtacctccagggagctggg

SEQ ID NO: 46264 - DNA, 38 bp, Artificial Sequence
  primer
gtaaaacgacggccagttcacgtagcacctgacctttc

SEQ ID NO: 46265 - DNA, 35 bp, Artificial Sequence
  primer
gtaaaacgacggccagtcaggtgggctcagggttg

SEQ ID NO: 46266 - DNA, 21 bp, Artificial Sequence
  primer
ggaccttgaagtcctccacac

SEQ ID NO: 46267 - DNA, 35 bp, Artificial Sequence
  primer
gtaaaacgacggccagtctggctgtcctcgtggtg

SEQ ID NO: 46268 - DNA, 21 bp, Artificial Sequence
  primer
tggtccttgctcttgtctctg

SEQ ID NO: 46269 - DNA, 21 bp, Artificial Sequence
  primer
taccacctgtcaacggcatac

SEQ ID NO: 46270 - DNA, 35 bp, Artificial Sequence
  primer
gtaaaacgacggccagtcgtcgtgcacatggtgag

SEQ ID NO: 46271 - DNA, 36 bp, Artificial Sequence
  primer
gtaaaacgacggccagtacagggagcagccagacag

SEQ ID NO: 46272 - DNA, 38 bp, Artificial Sequence
  primer
gtaaaacgacggccagtcggactggagactcgaacttg

SEQ ID NO: 46273 - DNA, 21 bp, Artificial Sequence
  primer
tgcagggagcctcttagtgtc

SEQ ID NO: 46274 - DNA, 37 bp, Artificial Sequence
  primer
gtaaaacgacggccagtgctggagtgggtttgtcttg

SEQ ID NO: 46275 - DNA, 36 bp, Artificial Sequence
  primer
gtaaaacgacggccagtcacacaaagggcagctgtg

SEQ ID NO: 46276 - DNA, 38 bp, Artificial Sequence
  primer
gtaaaacgacggccagtaggactctcgtgacgatttgg

SEQ ID NO: 46277 - DNA, 21 bp, Artificial Sequence
  primer
ctgtccctctgagtctgagcc

SEQ ID NO: 46278 - DNA, 21 bp, Artificial Sequence
  primer
cagattgcttaagcccaggag

SEQ ID NO: 46279 - DNA, 38 bp, Artificial Sequence
  primer
gtaaaacgacggccagtagaagttcaccttccacagca

SEQ ID NO: 46280 - DNA, 37 bp, Artificial Sequence
  primer
gtaaaacgacggccagtgagtactgcctgcacccttg

SEQ ID NO: 46281 - DNA, 38 bp, Artificial Sequence
  primer
gtaaaacgacggccagtagagggaacaaagtcacccag

SEQ ID NO: 46282 - DNA, 37 bp, Artificial Sequence
  primer
gtaaaacgacggccagtctggttcccacagtcacacc

SEQ ID NO: 46283 - DNA, 21 bp, Artificial Sequence
  primer
gggtgcaaagatcatccagtc

SEQ ID NO: 46284 - DNA, 38 bp, Artificial Sequence
  primer
gtaaaacgacggccagtatgtaccgcaaagtgcacaac

SEQ ID NO: 46285 - DNA, 37 bp, Artificial Sequence
  primer
gtaaaacgacggccagttgggtactggcaacgacttg

SEQ ID NO: 46286 - DNA, 37 bp, Artificial Sequence
  primer
gtaaaacgacggccagtaaagcctgtgaacagatggg

SEQ ID NO: 46287 - DNA, 36 bp, Artificial Sequence
  primer
gtaaaacgacggccagtgagtctcgaggttggcagc

SEQ ID NO: 46288 - DNA, 38 bp, Artificial Sequence
  primer
gtaaaacgacggccagtagaaattcaacagccgctttc

SEQ ID NO: 46289 - DNA, 37 bp, Artificial Sequence
  primer
gtaaaacgacggccagttctctgacttcctgatgggc

SEQ ID NO: 46290 - DNA, 21 bp, Artificial Sequence
  primer
ggaatggacttgactcccaag

SEQ ID NO: 46291 - DNA, 37 bp, Artificial Sequence
  primer
gtaaaacgacggccagtaaggagcagagtctgggacc

SEQ ID NO: 46292 - DNA, 38 bp, Artificial Sequence
  primer
gtaaaacgacggccagtcttctctcggcaagtggtttg

SEQ ID NO: 46293 - DNA, 37 bp, Artificial Sequence
  primer
gtaaaacgacggccagtctcaaggaggcctgtgagtg

SEQ ID NO: 46294 - DNA, 39 bp, Artificial Sequence
  primer
gtaaaacgacggccagttgagagactccagcaggtaagg

SEQ ID NO: 46295 - DNA, 20 bp, Artificial Sequence
  primer
gacatgccagaaactgtccc

SEQ ID NO: 46296 - DNA, 21 bp, Artificial Sequence
  primer
gctcacctggtaaagtctggg

SEQ ID NO: 46297 - DNA, 38 bp, Artificial Sequence
  primer
gtaaaacgacggccagtcttggtgtgtagcaggcactc

SEQ ID NO: 46298 - DNA, 21 bp, Artificial Sequence
  primer
cagccttacacaaacacagcc

SEQ ID NO: 46299 - DNA, 38 bp, Artificial Sequence
  primer
gtaaaacgacggccagtagagacccacagaggcaactc

SEQ ID NO: 46300 - DNA, 18 bp, Artificial Sequence
  primer
acctcatgcaccgagacg

SEQ ID NO: 46301 - DNA, 37 bp, Artificial Sequence
  primer
gtaaaacgacggccagtcctgaacttcctgccctttc

SEQ ID NO: 46302 - DNA, 37 bp, Artificial Sequence
  primer
gtaaaacgacggccagtcaggccacagggaggtagag

SEQ ID NO: 46303 - DNA, 21 bp, Artificial Sequence
  primer
gagcttgtttgcacattcacc

SEQ ID NO: 46304 - DNA, 20 bp, Artificial Sequence
  primer
gagcgagtgagcagcgatac

SEQ ID NO: 46305 - DNA, 38 bp, Artificial Sequence
  primer
gtaaaacgacggccagtggcgtttgtggcagagtttag

SEQ ID NO: 46306 - DNA, 21 bp, Artificial Sequence
  primer
tggcatgtcatctccctttag

SEQ ID NO: 46307 - DNA, 23 bp, Artificial Sequence
  primer
ggtttgaacagacatggaacaag

SEQ ID NO: 46308 - DNA, 39 bp, Artificial Sequence
  primer
gtaaaacgacggccagttggcttgtaatgcccaagatag

SEQ ID NO: 46309 - DNA, 21 bp, Artificial Sequence
  primer
tgtttccggccaactttattg

SEQ ID NO: 46310 - DNA, 38 bp, Artificial Sequence
  primer
gtaaaacgacggccagtatgctatatgaccctgggctg

SEQ ID NO: 46311 - DNA, 21 bp, Artificial Sequence
  primer
tggcatgtcatctccctttag

SEQ ID NO: 46312 - DNA, 35 bp, Artificial Sequence
  primer
gtaaaacgacggccagtggttcctggtccgatccc

SEQ ID NO: 46313 - DNA, 36 bp, Artificial Sequence
  primer
gtaaaacgacggccagtatggaggcatcattcccag

SEQ ID NO: 46314 - DNA, 38 bp, Artificial Sequence
  primer
gtaaaacgacggccagtctgcagtgagtgtttgggaag

SEQ ID NO: 46315 - DNA, 21 bp, Artificial Sequence
  primer
atttctgctagcctgccaaac

SEQ ID NO: 46316 - DNA, 39 bp, Artificial Sequence
  primer
gtaaaacgacggccagtagagaatagggactctcccagg

SEQ ID NO: 46317 - DNA, 38 bp, Artificial Sequence
  primer
gtaaaacgacggccagttgcctaacctcaccagctttc

SEQ ID NO: 46318 - DNA, 21 bp, Artificial Sequence
  primer
ctgtcaagcacagaatgggac

SEQ ID NO: 46319 - DNA, 38 bp, Artificial Sequence
  primer
gtaaaacgacggccagtttcatttgggtgggtatgagc

SEQ ID NO: 46320 - DNA, 38 bp, Artificial Sequence
  primer
gtaaaacgacggccagtctgcaccatcttcttcaccag

SEQ ID NO: 46321 - DNA, 38 bp, Artificial Sequence
  primer
gtaaaacgacggccagtgaacaaggtaccgggaagatg

SEQ ID NO: 46322 - DNA, 38 bp, Artificial Sequence
  primer
gtaaaacgacggccagtacacagagcctcttagggtcc

SEQ ID NO: 46323 - DNA, 20 bp, Artificial Sequence
  primer
gcttccaggagccataagtg

SEQ ID NO: 46324 - DNA, 37 bp, Artificial Sequence
  primer
gtaaaacgacggccagtgaggcccagaaagtgaccag

SEQ ID NO: 46325 - DNA, 38 bp, Artificial Sequence
  primer
gtaaaacgacggccagtgctctcgctaagtaaggtggc

SEQ ID NO: 46326 - DNA, 38 bp, Artificial Sequence
  primer
gtaaaacgacggccagttgaggacaaggaagcccttag

SEQ ID NO: 46327 - DNA, 37 bp, Artificial Sequence
  primer
gtaaaacgacggccagtactcctggtcctctccctgg

SEQ ID NO: 46328 - DNA, 21 bp, Artificial Sequence
  primer
gctactacatcttccgggtgg

SEQ ID NO: 46329 - DNA, 38 bp, Artificial Sequence
  primer
gtaaaacgacggccagtatagctcttcgcaaaccttgg

SEQ ID NO: 46330 - DNA, 38 bp, Artificial Sequence
  primer
gtaaaacgacggccagtgtacccaattcccttcgtcag

SEQ ID NO: 46331 - DNA, 39 bp, Artificial Sequence
  primer
gtaaaacgacggccagttgttatcctagcttcacccagc

SEQ ID NO: 46332 - DNA, 21 bp, Artificial Sequence
  primer
tctgactgtcctgtctgagcc

SEQ ID NO: 46333 - DNA, 38 bp, Artificial Sequence
  primer
gtaaaacgacggccagtttctagggaaaggctggaagg

SEQ ID NO: 46334 - DNA, 23 bp, Artificial Sequence
  primer
gagggccttctgtgtagtattgg

SEQ ID NO: 46335 - DNA, 38 bp, Artificial Sequence
  primer
gtaaaacgacggccagttagtgaatgaatcagggccag

SEQ ID NO: 46336 - DNA, 38 bp, Artificial Sequence
  primer
gtaaaacgacggccagtccactgttccacttcacttgg

SEQ ID NO: 46337 - DNA, 38 bp, Artificial Sequence
  primer
gtaaaacgacggccagttacctcctccatcccagtttc

SEQ ID NO: 46338 - DNA, 38 bp, Artificial Sequence
  primer
gtaaaacgacggccagtgaactaaatgaccgctctgcc

SEQ ID NO: 46339 - DNA, 38 bp, Artificial Sequence
  primer
gtaaaacgacggccagtcccagatctctctttcccagg

SEQ ID NO: 46340 - DNA, 38 bp, Artificial Sequence
  primer
gtaaaacgacggccagtagaatggcgagaggtaacagc

SEQ ID NO: 46341 - DNA, 38 bp, Artificial Sequence
  primer
gtaaaacgacggccagtgactgggttgcagtgggtatc

SEQ ID NO: 46342 - DNA, 21 bp, Artificial Sequence
  primer
cttgccatgcaagaagtgaag

SEQ ID NO: 46343 - DNA, 21 bp, Artificial Sequence
  primer
ttagccaccaggttcaagagg

SEQ ID NO: 46344 - DNA, 36 bp, Artificial Sequence
  primer
gtaaaacgacggccagtgcatccatctgcctgaacc

SEQ ID NO: 46345 - DNA, 18 bp, Artificial Sequence
  primer
gagacatggcagggcaag

SEQ ID NO: 46346 - DNA, 38 bp, Artificial Sequence
  primer
gtaaaacgacggccagtcgtttgtcaggtgccttagag

SEQ ID NO: 46347 - DNA, 20 bp, Artificial Sequence
  primer
agcatgcagactccacacag

SEQ ID NO: 46348 - DNA, 23 bp, Artificial Sequence
  primer
gaggccatactgatgttaagtgc

SEQ ID NO: 46349 - DNA, 22 bp, Artificial Sequence
  primer
aataatatgctttggcagcacc

SEQ ID NO: 46350 - DNA, 23 bp, Artificial Sequence
  primer
tgcatttaaactgagaatcaggg

SEQ ID NO: 46351 - DNA, 21 bp, Artificial Sequence
  primer
ttggatgccgtctgtttaatg

SEQ ID NO: 46352 - DNA, 38 bp, Artificial Sequence
  primer
gtaaaacgacggccagtcaagttcggaggtgttaaccg

SEQ ID NO: 46353 - DNA, 21 bp, Artificial Sequence
  primer
actcaaggaacctccacaagg

SEQ ID NO: 46354 - DNA, 21 bp, Artificial Sequence
  primer
gcctgtggagatgcctaactg

SEQ ID NO: 46355 - DNA, 38 bp, Artificial Sequence
  primer
gtaaaacgacggccagtgaatcaaccctcctatccagg

SEQ ID NO: 46356 - DNA, 36 bp, Artificial Sequence
  primer
gtaaaacgacggccagtgggccagtcagattaacgg

SEQ ID NO: 46357 - DNA, 37 bp, Artificial Sequence
  primer
gtaaaacgacggccagtgcaataactcactggcggtc

SEQ ID NO: 46358 - DNA, 20 bp, Artificial Sequence
  primer
ctccacgcaaactgttgctc

SEQ ID NO: 46359 - DNA, 19 bp, Artificial Sequence
  primer
gctgctggtgaacgatgtc

SEQ ID NO: 46360 - DNA, 37 bp, Artificial Sequence
  primer
gtaaaacgacggccagtcatctcatctccgccaacag

SEQ ID NO: 46361 - DNA, 21 bp, Artificial Sequence
  primer
ctgtgtacctgggtgtgaagg

SEQ ID NO: 46362 - DNA, 38 bp, Artificial Sequence
  primer
gtaaaacgacggccagtttctgatgtagctgtgccagg

SEQ ID NO: 46363 - DNA, 21 bp, Artificial Sequence
  primer
cctgggtattggatggtgttc

SEQ ID NO: 46364 - DNA, 38 bp, Artificial Sequence
  primer
gtaaaacgacggccagtctggtgtagctcttgctttgg

SEQ ID NO: 46365 - DNA, 37 bp, Artificial Sequence
  primer
gtaaaacgacggccagtcacaggtggtttggtcaagg

SEQ ID NO: 46366 - DNA, 21 bp, Artificial Sequence
  primer
ttgatcgctattgtggaaacc

SEQ ID NO: 46367 - DNA, 37 bp, Artificial Sequence
  primer
gtaaaacgacggccagtgccttcgacctccagagaag

SEQ ID NO: 46368 - DNA, 38 bp, Artificial Sequence
  primer
gtaaaacgacggccagtaaggtttcccgtgtttgtgtc

SEQ ID NO: 46369 - DNA, 21 bp, Artificial Sequence
  primer
agcaatttccttcctgctctg

SEQ ID NO: 46370 - DNA, 20 bp, Artificial Sequence
  primer
tacttcctgtgctcttgcgg

SEQ ID NO: 46371 - DNA, 38 bp, Artificial Sequence
  primer
gtaaaacgacggccagtaaatctgtttctggagcccac

SEQ ID NO: 46372 - DNA, 38 bp, Artificial Sequence
  primer
gtaaaacgacggccagttcgtttaagtgagatgggcag

SEQ ID NO: 46373 - DNA, 38 bp, Artificial Sequence
  primer
gtaaaacgacggccagtcatacttgggcgagtttagcc

SEQ ID NO: 46374 - DNA, 38 bp, Artificial Sequence
  primer
gtaaaacgacggccagtagtttgaggactggctgatgc

SEQ ID NO: 46375 - DNA, 38 bp, Artificial Sequence
  primer
gtaaaacgacggccagtgctggttctttatgtgccagg

SEQ ID NO: 46376 - DNA, 22 bp, Artificial Sequence
  primer
gcgacatgatcttcttccattc

SEQ ID NO: 46377 - DNA, 21 bp, Artificial Sequence
  primer
gtgaagggcttccttcatctg

SEQ ID NO: 46378 - DNA, 21 bp, Artificial Sequence
  primer
tttacatcaacacagcccagg

SEQ ID NO: 46379 - DNA, 21 bp, Artificial Sequence
  primer
cctctcagcctgtttggctac

SEQ ID NO: 46380 - DNA, 21 bp, Artificial Sequence
  primer
acacacagtctccaggcttcc

SEQ ID NO: 46381 - DNA, 21 bp, Artificial Sequence
  primer
tcagttctcaagcccactttg

SEQ ID NO: 46382 - DNA, 38 bp, Artificial Sequence
  primer
gtaaaacgacggccagttcattgtcccttccattaccc

SEQ ID NO: 46383 - DNA, 37 bp, Artificial Sequence
  primer
gtaaaacgacggccagtcgctaacccaccctgtgtag

SEQ ID NO: 46384 - DNA, 21 bp, Artificial Sequence
  primer
tggacagttcctttgcttgtg

SEQ ID NO: 46385 - DNA, 38 bp, Artificial Sequence
  primer
gtaaaacgacggccagtctttggcctctttggtctttg

SEQ ID NO: 46386 - DNA, 37 bp, Artificial Sequence
  primer
gtaaaacgacggccagtccaaggcccaagagaaagag

SEQ ID NO: 46387 - DNA, 21 bp, Artificial Sequence
  primer
gactgctgttccctctgttcc

SEQ ID NO: 46388 - DNA, 21 bp, Artificial Sequence
  primer
tccaggatccagcctctattg

SEQ ID NO: 46389 - DNA, 20 bp, Artificial Sequence
  primer
tcagcagaaacaaggcaagg

SEQ ID NO: 46390 - DNA, 19 bp, Artificial Sequence
  primer
aggccctacttcctcggac

SEQ ID NO: 46391 - DNA, 20 bp, Artificial Sequence
  primer
cagcctgagtgacaagaggg

SEQ ID NO: 46392 - DNA, 18 bp, Artificial Sequence
  primer
cctgacctcatgatccgc

SEQ ID NO: 46393 - DNA, 38 bp, Artificial Sequence
  primer
gtaaaacgacggccagtactagaaacatgccagggagg

SEQ ID NO: 46394 - DNA, 38 bp, Artificial Sequence
  primer
gtaaaacgacggccagtgtttctcccaagaaaccaagc

SEQ ID NO: 46395 - DNA, 38 bp, Artificial Sequence
  primer
gtaaaacgacggccagtccatatggtgtccgagtcaac

SEQ ID NO: 46396 - DNA, 21 bp, Artificial Sequence
  primer
gggttcagatccaggtggtag

SEQ ID NO: 46397 - DNA, 38 bp, Artificial Sequence
  primer
gtaaaacgacggccagttctgtctggaggaaggaggag

SEQ ID NO: 46398 - DNA, 21 bp, Artificial Sequence
  primer
gtggcttccacaaggactcag

SEQ ID NO: 46399 - DNA, 38 bp, Artificial Sequence
  primer
gtaaaacgacggccagttggagcagaccttcctctctc

SEQ ID NO: 46400 - DNA, 20 bp, Artificial Sequence
  primer
ctgtgacttagcctgcctgc

SEQ ID NO: 46401 - DNA, 38 bp, Artificial Sequence
  primer
gtaaaacgacggccagttcctagctctgccgtgtattg

SEQ ID NO: 46402 - DNA, 38 bp, Artificial Sequence
  primer
gtaaaacgacggccagtgacaaagtgcctgggacagac

SEQ ID NO: 46403 - DNA, 38 bp, Artificial Sequence
  primer
gtaaaacgacggccagtaaagctgccctaggtgttctg

SEQ ID NO: 46404 - DNA, 36 bp, Artificial Sequence
  primer
gtaaaacgacggccagtgagggtgcaagtagccctg

SEQ ID NO: 46405 - DNA, 21 bp, Artificial Sequence
  primer
gcctctctcctccttattcgg

SEQ ID NO: 46406 - DNA, 38 bp, Artificial Sequence
  primer
gtaaaacgacggccagtaaatcctgaatttctggtggc

SEQ ID NO: 46407 - DNA, 19 bp, Artificial Sequence
  primer
atggtggcaggagcctgta

SEQ ID NO: 46408 - DNA, 38 bp, Artificial Sequence
  primer
gtaaaacgacggccagtctagagcatcatgtgtgtccg

SEQ ID NO: 46409 - DNA, 38 bp, Artificial Sequence
  primer
gtaaaacgacggccagtgcctcgaatctctcagacagg

SEQ ID NO: 46410 - DNA, 38 bp, Artificial Sequence
  primer
gtaaaacgacggccagtgagaaactggtgtgtggcttg

SEQ ID NO: 46411 - DNA, 38 bp, Artificial Sequence
  primer
gtaaaacgacggccagtcagtcaggcggaaggtagatg

SEQ ID NO: 46412 - DNA, 21 bp, Artificial Sequence
  primer
ggctgtggtccaggtcataat

SEQ ID NO: 46413 - DNA, 38 bp, Artificial Sequence
  primer
gtaaaacgacggccagtcccaaagtgccatgattacag

SEQ ID NO: 46414 - DNA, 38 bp, Artificial Sequence
  primer
gtaaaacgacggccagtttctccctgaacctcagttcc

SEQ ID NO: 46415 - DNA, 21 bp, Artificial Sequence
  primer
agagtgagagagagcctgggt

SEQ ID NO: 46416 - DNA, 38 bp, Artificial Sequence
  primer
gtaaaacgacggccagtgacagttccctaactctgccc

SEQ ID NO: 46417 - DNA, 39 bp, Artificial Sequence
  primer
gtaaaacgacggccagtgcaaatttaactccctgtgtcc

SEQ ID NO: 46418 - DNA, 20 bp, Artificial Sequence
  primer
gctttgatcactcaccagcc

SEQ ID NO: 46419 - DNA, 38 bp, Artificial Sequence
  primer
gtaaaacgacggccagtttaacttcagagcccatgctg

SEQ ID NO: 46420 - DNA, 19 bp, Artificial Sequence
  primer
catgagccacagctccttg

SEQ ID NO: 46421 - DNA, 38 bp, Artificial Sequence; identical to SEQ ID NO: 46414
  primer

SEQ ID NO: 46422 - DNA, 21 bp, Artificial Sequence
  primer
ctgatgacaaaggcagtggtg

SEQ ID NO: 46423 - DNA, 38 bp, Artificial Sequence
  primer
gtaaaacgacggccagtttgcctccacaaaccataacc

SEQ ID NO: 46424 - DNA, 22 bp, Artificial Sequence
  primer
gatgggactacttgcacagagg

SEQ ID NO: 46425 - DNA, 41 bp, Artificial Sequence
  primer
gtaaaacgacggccagtaagggactaagtcagatgacaagc

SEQ ID NO: 46426 - DNA, 38 bp, Artificial Sequence
  primer
gtaaaacgacggccagtagagggacggatgggttattg

SEQ ID NO: 46427 - DNA, 41 bp, Artificial Sequence
  primer
gtaaaacgacggccagttgataagggaaagagacagtggtc

SEQ ID NO: 46428 - DNA, 21 bp, Artificial Sequence
  primer
gccatcatttcccagcaatag

SEQ ID NO: 46429 - DNA, 27 bp, Artificial Sequence
  primer
accaatgttaagtaagttcagcatttc

SEQ ID NO: 46430 - DNA, 36 bp, Artificial Sequence
  primer
gtaaaacgacggccagtataagaggcctcaggcagg

SEQ ID NO: 46431 - DNA, 39 bp, Artificial Sequence
  primer
gtaaaacgacggccagtaactccttgaacaagatgcagg

SEQ ID NO: 46432 - DNA, 38 bp, Artificial Sequence
  primer
gtaaaacgacggccagtccagaggccatttagttccag

SEQ ID NO: 46433 - DNA, 20 bp, Artificial Sequence
  primer
tgaattcaagcaatctgccg

SEQ ID NO: 46434 - DNA, 24 bp, Artificial Sequence
  primer
acatcatgccttcatatttagtgg

SEQ ID NO: 46435 - DNA, 21 bp, Artificial Sequence
  primer
cccagaaatgagtttgttgcc

SEQ ID NO: 46436 - DNA, 38 bp, Artificial Sequence
  primer
gtaaaacgacggccagtttccacaggtaaattcagggc

SEQ ID NO: 46437 - DNA, 25 bp, Artificial Sequence
  primer
acactacctgtcctttactcacaca

SEQ ID NO: 46438 - DNA, 38 bp, Artificial Sequence
  primer
gtaaaacgacggccagtagacggcatttgagtcctttc

SEQ ID NO: 46439 - DNA, 39 bp, Artificial Sequence
  primer
gtaaaacgacggccagtgagaatttagcattgcagtcca

SEQ ID NO: 46440 - DNA, 21 bp, Artificial Sequence
  primer
tgatacgggagttcctccttg

SEQ ID NO: 46441 - DNA, 20 bp, Artificial Sequence
  primer
tgcccaattcaaatggaaag

SEQ ID NO: 46442 - DNA, 21 bp, Artificial Sequence
  primer
aagatttcgccactgtactgc

SEQ ID NO: 46443 - DNA, 39 bp, Artificial Sequence
  primer
gtaaaacgacggccagtcaccttattgttgctgcatttg

SEQ ID NO: 46444 - DNA, 20 bp, Artificial Sequence
  primer
aggaccatgctgaactgagg

SEQ ID NO: 46445 - DNA, 42 bp, Artificial Sequence
  primer
gtaaaacgacggccagttggtgtctgtaccatactaaagctg

SEQ ID NO: 46446 - DNA, 29 bp, Artificial Sequence
  primer
agtatctcaactcttcagttcttacacct

SEQ ID NO: 46447 - DNA, 22 bp, Artificial Sequence
  primer
tttgaacactcaggacaccatc

SEQ ID NO: 46448 - DNA, 19 bp, Artificial Sequence
  primer
caccattgtgcaaagcagg

SEQ ID NO: 46449 - DNA, 37 bp, Artificial Sequence
  primer
gtaaaacgacggccagtgcacccaaatctgtgattcc

SEQ ID NO: 46450 - DNA, 21 bp, Artificial Sequence
  primer
ccctttgcaccctagacttcc

SEQ ID NO: 46451 - DNA, 38 bp, Artificial Sequence
  primer
gtaaaacgacggccagttctgacgagtcccggatttac

SEQ ID NO: 46452 - DNA, 37 bp, Artificial Sequence
  primer
gtaaaacgacggccagtggcaatagagcaagaccctg

SEQ ID NO: 46453 - DNA, 22 bp, Artificial Sequence
  primer
ccagaattaacttgccacatga

SEQ ID NO: 46454 - DNA, 38 bp, Artificial Sequence
  primer
gtaaaacgacggccagtgccatctcacaacacacacag

SEQ ID NO: 46455 - DNA, 22 bp, Artificial Sequence
  primer
tttcaactcagcacttcttccc

SEQ ID NO: 46456 - DNA, 20 bp, Artificial Sequence
  primer
tggtgcatgcctataatccc

SEQ ID NO: 46457 - DNA, 38 bp, Artificial Sequence
  primer
gtaaaacgacggccagtatctacctgtgaggattgggc

SEQ ID NO: 46458 - DNA, 39 bp, Artificial Sequence
  primer
gtaaaacgacggccagtcccttgacagtgactctccttg

SEQ ID NO: 46459 - DNA, 43 bp, Artificial Sequence
  primer
gtaaaacgacggccagttgagtagctggtatcatagagacacg

SEQ ID NO: 46460 - DNA, 21 bp, Artificial Sequence
  primer
ctgggaaacaaagggctagtg

SEQ ID NO: 46461 - DNA, 38 bp, Artificial Sequence
  primer
gtaaaacgacggccagtcacctcccttcgataagttcg

SEQ ID NO: 46462 - DNA, 23 bp, Artificial Sequence
  primer
gaaggtgcatgtaatgaaagcag

SEQ ID NO: 46463 - DNA, 38 bp, Artificial Sequence
  primer
gtaaaacgacggccagtccagcccattgtcactacgac

SEQ ID NO: 46464 - DNA, 21 bp, Artificial Sequence
  primer
ttgcgtctattaggacatggg

SEQ ID NO: 46465 - DNA, 21 bp, Artificial Sequence
  primer
tactgcacctggcctcttctg

SEQ ID NO: 46466 - DNA, 38 bp, Artificial Sequence
  primer
gtaaaacgacggccagttccatcgtaggtgggatcata

SEQ ID NO: 46467 - DNA, 37 bp, Artificial Sequence
  primer
gtaaaacgacggccagtggagccctgtccctctaatc

SEQ ID NO: 46468 - DNA, 37 bp, Artificial Sequence
  primer
gtaaaacgacggccagtaccgtgtgggctgtagtagc

SEQ ID NO: 46469 - DNA, 38 bp, Artificial Sequence
  primer
gtaaaacgacggccagtacgctaccgttgaacattctg

SEQ ID NO: 46470 - DNA, 26 bp, Artificial Sequence
  primer
ttggtttagagagcttgtgttgttac

SEQ ID NO: 46471 - DNA, 39 bp, Artificial Sequence
  primer
gtaaaacgacggccagtaacagtagcacatttgtttggg

SEQ ID NO: 46472 - DNA, 30 bp, Artificial Sequence
  primer
tttactatagttcagccattatgtatttga

SEQ ID NO: 46473 - DNA, 39 bp, Artificial Sequence
  primer
gtaaaacgacggccagttccatgaagtgaaagaagatgg

SEQ ID NO: 46474 - DNA, 38 bp, Artificial Sequence
  primer
gtaaaacgacggccagttggcttgaaattccttgtgtc

SEQ ID NO: 46475 - DNA, 38 bp, Artificial Sequence
  primer
gtaaaacgacggccagtggaattaactgtgggctttgg

SEQ ID NO: 46476 - DNA, 38 bp, Artificial Sequence
  primer
gtaaaacgacggccagtaaatagctcaggaggcagcag

SEQ ID NO: 46477 - DNA, 39 bp, Artificial Sequence
  primer
gtaaaacgacggccagtgagtttgagtttggtccactgc

SEQ ID NO: 46478 - DNA, 36 bp, Artificial Sequence
  primer
gtaaaacgacggccagtccctgccctatgctctgtg

SEQ ID NO: 46479 - DNA, 25 bp, Artificial Sequence
  primer
aaatgttgtgggtaaatctcctttc

SEQ ID NO: 46480 - DNA, 39 bp, Artificial Sequence
  primer
gtaaaacgacggccagtcaggcagcagtttgcttatctc

SEQ ID NO: 46481 - DNA, 38 bp, Artificial Sequence
  primer
gtaaaacgacggccagtagatttgccttggttcatcag

SEQ ID NO: 46482 - DNA, 38 bp, Artificial Sequence
  primer
gtaaaacgacggccagtaaggtagctgacttgcgaagc

SEQ ID NO: 46483 - DNA, 38 bp, Artificial Sequence
  primer
gtaaaacgacggccagtggaacagagctaagtgggagg

SEQ ID NO: 46484 - DNA, 21 bp, Artificial Sequence
  primer
gggtaagtcagaagcagggtg

SEQ ID NO: 46485 - DNA, 39 bp, Artificial Sequence
  primer
gtaaaacgacggccagttgctgtacctgcaatcagagag

SEQ ID NO: 46486 - DNA, 22 bp, Artificial Sequence
  primer
tcccttgtagggattggtagag

SEQ ID NO: 46487 - DNA, 19 bp, Artificial Sequence
  primer
ctttcttgccttgccgttc

SEQ ID NO: 46488 - DNA, 37 bp, Artificial Sequence
  primer
gtaaaacgacggccagtgggagctgggagactttctg

SEQ ID NO: 46489 - DNA, 37 bp, Artificial Sequence
  primer
gtaaaacgacggccagtctttgagggccctaggtctg

SEQ ID NO: 46490 - DNA, 37 bp, Artificial Sequence
  primer
gtaaaacgacggccagtagcagaagtcttggtgctgc

SEQ ID NO: 46491 - DNA, 21 bp, Artificial Sequence
  primer
aagtgggatggctgacttctc

SEQ ID NO: 46492 - DNA, 38 bp, Artificial Sequence
  primer
gtaaaacgacggccagtatggaatggaaggttcaaagg

SEQ ID NO: 46493 - DNA, 39 bp, Artificial Sequence
  primer
gtaaaacgacggccagtgggatatcctggtgttcctgac

SEQ ID NO: 46494 - DNA, 38 bp, Artificial Sequence
  primer
gtaaaacgacggccagtcccttactgcaactgcttcac

SEQ ID NO: 46495 - DNA, 38 bp, Artificial Sequence
  primer
gtaaaacgacggccagtaaggtccaactcagaagcagg

SEQ ID NO: 46496 - DNA, 21 bp, Artificial Sequence
  primer
caagagcttaggtgattgggc

SEQ ID NO: 46497 - DNA, 21 bp, Artificial Sequence
  primer
ttggagcagctgtatgctctg

SEQ ID NO: 46498 - DNA, 38 bp, Artificial Sequence
  primer
gtaaaacgacggccagtccacatgaggaaacatccatc

SEQ ID NO: 46499 - DNA, 21 bp, Artificial Sequence
  primer
gggtgagtgggaatgagagac

SEQ ID NO: 46500 - DNA, 38 bp, Artificial Sequence
  primer
gtaaaacgacggccagtttcctgggaagttcttcatgc

SEQ ID NO: 46501 - DNA, 20 bp, Artificial Sequence
  primer
tgctttgagccatgatacgc

SEQ ID NO: 46502 - DNA, 38 bp, Artificial Sequence
  primer
gtaaaacgacggccagtaatgtgaagagctctcggctg

SEQ ID NO: 46503 - DNA, 38 bp, Artificial Sequence; identical to SEQ ID NO: 18221
  primer

SEQ ID NO: 46504 - DNA, 21 bp, Artificial Sequence
  primer
tggtcaaatgggtggtagtcc

SEQ ID NO: 46505 - DNA, 26 bp, Artificial Sequence
  primer
aaagatctctggtttccaaattctta

SEQ ID NO: 46506 - DNA, 25 bp, Artificial Sequence
  primer
tgctctaagtctaggcaaggtttac

SEQ ID NO: 46507 - DNA, 24 bp, Artificial Sequence
  primer
cactgagcaataaggaataacagc

SEQ ID NO: 46508 - DNA, 21 bp, Artificial Sequence
  primer
tgcctcaccaaacatctatgc

SEQ ID NO: 46509 - DNA, 22 bp, Artificial Sequence
  primer
ttcctgcacagattcctaacag

SEQ ID NO: 46510 - DNA, 38 bp, Artificial Sequence
  primer
gtaaaacgacggccagttgctgttctccaaagcaagag

SEQ ID NO: 46511 - DNA, 21 bp, Artificial Sequence
  primer
tttgttccctgtgaggtaagc

SEQ ID NO: 46512 - DNA, 40 bp, Artificial Sequence
  primer
gtaaaacgacggccagtcagctagtcagtcaagaagcctg

SEQ ID NO: 46513 - DNA, 22 bp, Artificial Sequence
  primer
aaatggaaaccaataaaccacg

SEQ ID NO: 46514 - DNA, 21 bp, Artificial Sequence
  primer
tggaatcagcaaatgtggaag

SEQ ID NO: 46515 - DNA, 38 bp, Artificial Sequence
  primer
gtaaaacgacggccagtacagcaagatcagcacctctg

SEQ ID NO: 46516 - DNA, 38 bp, Artificial Sequence
  primer
gtaaaacgacggccagtgggtgtctgattgttcaagcc

SEQ ID NO: 46517 - DNA, 22 bp, Artificial Sequence
  primer
tgtcaaccaagtcttcattccc

SEQ ID NO: 46518 - DNA, 20 bp, Artificial Sequence
  primer
gaatgaatgcaaataccgcc

SEQ ID NO: 46519 - DNA, 39 bp, Artificial Sequence
  primer
gtaaaacgacggccagtaatgggtctccatttgatttga

SEQ ID NO: 46520 - DNA, 26 bp, Artificial Sequence
  primer
ttctttgtgatgcatgtatatgaggt

SEQ ID NO: 46521 - DNA, 36 bp, Artificial Sequence
  primer
gtaaaacgacggccagtcgcacccagccctacttat

SEQ ID NO: 46522 - DNA, 44 bp, Artificial Sequence
  primer
gtaaaacgacggccagtaacttagttgtaagagtcaaatccagc

SEQ ID NO: 46523 - DNA, 39 bp, Artificial Sequence
  primer
gtaaaacgacggccagtgaaaggtatggcatagcactgg

SEQ ID NO: 46524 - DNA, 43 bp, Artificial Sequence
  primer
gtaaaacgacggccagtaaataacaggatagccctactttcac

SEQ ID NO: 46525 - DNA, 41 bp, Artificial Sequence
  primer
gtaaaacgacggccagtcaggcaacttaaagtgtgattgtt

SEQ ID NO: 46526 - DNA, 38 bp, Artificial Sequence
  primer
gtaaaacgacggccagtagctgctacaagcaagatccc

SEQ ID NO: 46527 - DNA, 40 bp, Artificial Sequence
  primer
gtaaaacgacggccagtcgttagccaaataatcattagca

SEQ ID NO: 46528 - DNA, 28 bp, Artificial Sequence
  primer
ttcaaagtatataactcagccttagcaa

SEQ ID NO: 46529 - DNA, 42 bp, Artificial Sequence
  primer
gtaaaacgacggccagttgctaaggcagattgtaatataggc

SEQ ID NO: 46530 - DNA, 22 bp, Artificial Sequence
  primer
ggtatggcataacctacagcaa

SEQ ID NO: 46531 - DNA, 21 bp, Artificial Sequence
  primer
tctagagtggagctggccttc

SEQ ID NO: 46532 - DNA, 21 bp, Artificial Sequence
  primer
cttcctgtgtggcgttgttag

SEQ ID NO: 46533 - DNA, 21 bp, Artificial Sequence
  primer
caacatcctcagaatccagcc

SEQ ID NO: 46534 - DNA, 21 bp, Artificial Sequence
  primer
tgtgaggtctgctgctgtgag

SEQ ID NO: 46535 - DNA, 37 bp, Artificial Sequence
  primer
gtaaaacgacggccagtggtgtagctggacacggacc

SEQ ID NO: 46536 - DNA, 21 bp, Artificial Sequence
  primer
atctgtgtgagggaatggagg

SEQ ID NO: 46537 - DNA, 21 bp, Artificial Sequence
  primer
tggtggctcattctgtctctg

SEQ ID NO: 46538 - DNA, 38 bp, Artificial Sequence
  primer
gtaaaacgacggccagtggcacaacttatgcgttggag

SEQ ID NO: 46539 - DNA, 38 bp, Artificial Sequence
  primer
gtaaaacgacggccagtggctggttgtgtgtgaatgag

SEQ ID NO: 46540 - DNA, 38 bp, Artificial Sequence
  primer
gtaaaacgacggccagttgttatcatcacccaacctcg

SEQ ID NO: 46541 - DNA, 21 bp, Artificial Sequence
  primer
caggtgcggttggaaagtaag

SEQ ID NO: 46542 - DNA, 20 bp, Artificial Sequence
  primer
gagttgatgtcaagcggctc

SEQ ID NO: 46543 - DNA, 38 bp, Artificial Sequence
  primer
gtaaaacgacggccagttggaccttgtgactgatctgg

SEQ ID NO: 46544 - DNA, 21 bp, Artificial Sequence
  primer
tttatctgcgcctgtttcatc

SEQ ID NO: 46545 - DNA, 23 bp, Artificial Sequence
  primer
gggtctcagtgttcctgatgtag

SEQ ID NO: 46546 - DNA, 38 bp, Artificial Sequence
  primer
gtaaaacgacggccagtgctttgcctaccacttgttcc

SEQ ID NO: 46547 - DNA, 38 bp, Artificial Sequence
  primer
gtaaaacgacggccagtccaggagatcggtatgtaggg

SEQ ID NO: 46548 - DNA, 38 bp, Artificial Sequence
  primer
gtaaaacgacggccagtagaggtggacaaggtcagtcc

SEQ ID NO: 46549 - DNA, 19 bp, Artificial Sequence
  primer
aaacctgctgtacgcaccc

SEQ ID NO: 46550 - DNA, 37 bp, Artificial Sequence
  primer
gtaaaacgacggccagtaatggagttcaccaggtccc

SEQ ID NO: 46551 - DNA, 37 bp, Artificial Sequence
  primer
gtaaaacgacggccagtcgaccattaacaggtgaggg

SEQ ID NO: 46552 - DNA, 36 bp, Artificial Sequence
  primer
gtaaaacgacggccagtgtccgggactcctctcagg

SEQ ID NO: 46553 - DNA, 38 bp, Artificial Sequence
  primer
gtaaaacgacggccagtcctgtttgcaatgggttactg

SEQ ID NO: 46554 - DNA, 21 bp, Artificial Sequence
  primer
cagcccactgctgatttactg

SEQ ID NO: 46555 - DNA, 23 bp, Artificial Sequence
  primer
ggttcagaatggtctttgtaggg

SEQ ID NO: 46556 - DNA, 39 bp, Artificial Sequence
  primer
gtaaaacgacggccagtgctgcaaagagaaatgatgtcc

SEQ ID NO: 46557 - DNA, 21 bp, Artificial Sequence
  primer
gcaacacagggatttctttcc

SEQ ID NO: 46558 - DNA, 38 bp, Artificial Sequence
  primer
gtaaaacgacggccagttgcgcagcatattctcttcag

SEQ ID NO: 46559 - DNA, 38 bp, Artificial Sequence
  primer
gtaaaacgacggccagtcaagcagattcttggctcatc

SEQ ID NO: 46560 - DNA, 38 bp, Artificial Sequence
  primer
gtaaaacgacggccagttcactccctggtatttggtgg

SEQ ID NO: 46561 - DNA, 38 bp, Artificial Sequence
  primer
gtaaaacgacggccagtatgccactaacagtcgtgacc

SEQ ID NO: 46562 - DNA, 21 bp, Artificial Sequence
  primer
cttaaagatggcaactgcctg

SEQ ID NO: 46563 - DNA, 41 bp, Artificial Sequence
  primer
gtaaaacgacggccagtaagtaggaaacatgagtggcaaac

SEQ ID NO: 46564 - DNA, 37 bp, Artificial Sequence
  primer
gtaaaacgacggccagtgattctccagggatgggaag

SEQ ID NO: 46565 - DNA, 21 bp, Artificial Sequence
  primer
ctcctgttgtctgcacctgag

SEQ ID NO: 46566 - DNA, 21 bp, Artificial Sequence
  primer
tgagattataggtgccagccc

SEQ ID NO: 46567 - DNA, 37 bp, Artificial Sequence
  primer
gtaaaacgacggccagttgcaagtgcccaacttagtg

SEQ ID NO: 46568 - DNA, 20 bp, Artificial Sequence
  primer
cacaggcctcaatcatctgc

SEQ ID NO: 46569 - DNA, 21 bp, Artificial Sequence
  primer
tggtaagggttctctccaagc

SEQ ID NO: 46570 - DNA, 38 bp, Artificial Sequence
  primer
gtaaaacgacggccagtacctttaagactgcagcgtcc

SEQ ID NO: 46571 - DNA, 38 bp, Artificial Sequence
  primer
gtaaaacgacggccagtgctgaaagaaccactggtgtg

SEQ ID NO: 46572 - DNA, 38 bp, Artificial Sequence
  primer
gtaaaacgacggccagtttgtcaccatgtctctcctgc

SEQ ID NO: 46573 - DNA, 24 bp, Artificial Sequence
  primer
tcccagaaatactgaactagctgc

SEQ ID NO: 46574 - DNA, 21 bp, Artificial Sequence
  primer
tagggaaggcagtcacctgtt

SEQ ID NO: 46575 - DNA, 38 bp, Artificial Sequence
  primer
gtaaaacgacggccagtgaggattggtttgcagtgagc

SEQ ID NO: 46576 - DNA, 37 bp, Artificial Sequence
  primer
gtaaaacgacggccagtcaacacgctgtgtagtgctg

SEQ ID NO: 46577 - DNA, 38 bp, Artificial Sequence
  primer
gtaaaacgacggccagtggcctcttaaattgttgcagg

SEQ ID NO: 46578 - DNA, 38 bp, Artificial Sequence
  primer
gtaaaacgacggccagtaggaggagaaagaccctggac

SEQ ID NO: 46579 - DNA, 35 bp, Artificial Sequence
  primer
gtaaaacgacggccagttttcaatttgggcagggc

SEQ ID NO: 46580 - DNA, 38 bp, Artificial Sequence
  primer
gtaaaacgacggccagtgtcttctccgttagcctgtgg

SEQ ID NO: 46581 - DNA, 38 bp, Artificial Sequence
  primer
gtaaaacgacggccagtggtctctgaaggaggaaaggg

SEQ ID NO: 46582 - DNA, 21 bp, Artificial Sequence
  primer
gagtaagtgagggtgttggcg

SEQ ID NO: 46583 - DNA, 35 bp, Artificial Sequence
  primer
gtaaaacgacggccagtcaggcatgagccacaacg

SEQ ID NO: 46584 - DNA, 37 bp, Artificial Sequence
  primer
gtaaaacgacggccagtcacgtgaccagaaagcacag

SEQ ID NO: 46585 - DNA, 37 bp, Artificial Sequence
  primer
gtaaaacgacggccagtgaagcaggagagcaggtgtc

SEQ ID NO: 46586 - DNA, 36 bp, Artificial Sequence
  primer
gtaaaacgacggccagtactagcagccctgccactg

SEQ ID NO: 46587 - DNA, 20 bp, Artificial Sequence
  primer
aggtatctgcagagcctggg

SEQ ID NO: 46588 - DNA, 21 bp, Artificial Sequence
  primer
agcactataggagcccacagg

SEQ ID NO: 46589 - DNA, 38 bp, Artificial Sequence
  primer
gtaaaacgacggccagtgatgtgtactttgaccgggtg

SEQ ID NO: 46590 - DNA, 20 bp, Artificial Sequence
  primer
atagacagggctggtgggtg

SEQ ID NO: 46591 - DNA, 20 bp, Artificial Sequence
  primer
aagcacttggctcccgtaac

SEQ ID NO: 46592 - DNA, 21 bp, Artificial Sequence
  primer
tgaaggtgggatttcaggaag

SEQ ID NO: 46593 - DNA, 37 bp, Artificial Sequence
  primer
gtaaaacgacggccagtaggccaggagagaacctgag

SEQ ID NO: 46594 - DNA, 20 bp, Artificial Sequence
  primer
agagagtgagcaccggtcag

SEQ ID NO: 46595 - DNA, 18 bp, Artificial Sequence
  primer
gtcacgtggctcagacgg

SEQ ID NO: 46596 - DNA, 22 bp, Artificial Sequence
  primer
gcacctaaccctgtcttgtttg

SEQ ID NO: 46597 - DNA, 40 bp, Artificial Sequence
  primer
gtaaaacgacggccagtttcgctcatactgagaggaacag

SEQ ID NO: 46598 - DNA, 38 bp, Artificial Sequence
  primer
gtaaaacgacggccagtacacaatacgggagcatcttg

SEQ ID NO: 46599 - DNA, 35 bp, Artificial Sequence
  primer
gtaaaacgacggccagtgattgtgccactgccctc

SEQ ID NO: 46600 - DNA, 21 bp, Artificial Sequence
  primer
tttctcacagtcctttgtggg

SEQ ID NO: 46601 - DNA, 38 bp, Artificial Sequence
  primer
gtaaaacgacggccagttacccagaagctctttgatgg

SEQ ID NO: 46602 - DNA, 21 bp, Artificial Sequence
  primer
aagctcccttacctcctcctc

SEQ ID NO: 46603 - DNA, 21 bp, Artificial Sequence
  primer
tgctactcacctgtctttggc

SEQ ID NO: 46604 - DNA, 38 bp, Artificial Sequence
  primer
gtaaaacgacggccagtactttgatgagctttgctgcc

SEQ ID NO: 46605 - DNA, 38 bp, Artificial Sequence
  primer
gtaaaacgacggccagtatgacggcactgaaattcttg

SEQ ID NO: 46606 - DNA, 39 bp, Artificial Sequence
  primer
gtaaaacgacggccagtgcctctcacagattctgcaatg

SEQ ID NO: 46607 - DNA, 43 bp, Artificial Sequence
  primer
gtaaaacgacggccagtcctagagacccttgttcaagatagag

SEQ ID NO: 46608 - DNA, 38 bp, Artificial Sequence
  primer
gtaaaacgacggccagtcaagaacagaaacatggaggc

SEQ ID NO: 46609 - DNA, 22 bp, Artificial Sequence
  primer
caaatggagtttggtgtagtgc

SEQ ID NO: 46610 - DNA, 39 bp, Artificial Sequence
  primer
gtaaaacgacggccagttgtggtgcaaggaaagtatcag

SEQ ID NO: 46611 - DNA, 38 bp, Artificial Sequence
  primer
gtaaaacgacggccagtatcctcccaccttagcctcac

SEQ ID NO: 46612 - DNA, 21 bp, Artificial Sequence
  primer
agggccagttcccatctttag

SEQ ID NO: 46613 - DNA, 21 bp, Artificial Sequence
  primer
agagggtttccaggtgtcttg

SEQ ID NO: 46614 - DNA, 22 bp, Artificial Sequence
  primer
gcttgtgacgagttcagtctgc

SEQ ID NO: 46615 - DNA, 38 bp, Artificial Sequence
  primer
gtaaaacgacggccagtccagcacttaggtcttgaggc

SEQ ID NO: 46616 - DNA, 38 bp, Artificial Sequence
  primer
gtaaaacgacggccagttttactgggaaggtgtggacc

SEQ ID NO: 46617 - DNA, 37 bp, Artificial Sequence
  primer
gtaaaacgacggccagttgcttgtgacgctaaatggc

SEQ ID NO: 46618 - DNA, 41 bp, Artificial Sequence
  primer
gtaaaacgacggccagtagaggacacctgtggataactttc

SEQ ID NO: 46619 - DNA, 39 bp, Artificial Sequence
  primer
gtaaaacgacggccagttttggatttggatgactttgaa

SEQ ID NO: 46620 - DNA, 40 bp, Artificial Sequence
  primer
gtaaaacgacggccagttctagccaatttaccctgtgatg

SEQ ID NO: 46621 - DNA, 21 bp, Artificial Sequence
  primer
cttgcaggttggtagatccag

SEQ ID NO: 46622 - DNA, 24 bp, Artificial Sequence
  primer
tgctatagaaaggcactttgaaac

SEQ ID NO: 46623 - DNA, 25 bp, Artificial Sequence
  primer
gaacttgaagtatttcccattaccc

SEQ ID NO: 46624 - DNA, 37 bp, Artificial Sequence
  primer
gtaaaacgacggccagtccttcagtggctccagtcag

SEQ ID NO: 46625 - DNA, 43 bp, Artificial Sequence
  primer
gtaaaacgacggccagttgtgtgtacagtttggtagcagtaaa

SEQ ID NO: 46626 - DNA, 23 bp, Artificial Sequence
  primer
gcattcacttgaaagcataatga

SEQ ID NO: 46627 - DNA, 43 bp, Artificial Sequence
  primer
gtaaaacgacggccagttctccgatctgtagattatgttcctc

SEQ ID NO: 46628 - DNA, 18 bp, Artificial Sequence
  primer
gaacccaggaggcagatg

SEQ ID NO: 46629 - DNA, 38 bp, Artificial Sequence
  primer
gtaaaacgacggccagtacacatgggcagtttgtcaac

SEQ ID NO: 46630 - DNA, 40 bp, Artificial Sequence
  primer
gtaaaacgacggccagtcatctgtgggagatttaatgtgg

SEQ ID NO: 46631 - DNA, 27 bp, Artificial Sequence
  primer
ttataggttaatagtgctttcgatgtg

SEQ ID NO: 46632 - DNA, 21 bp, Artificial Sequence
  primer
gatattggctacttccctgcc

SEQ ID NO: 46633 - DNA, 39 bp, Artificial Sequence
  primer
gtaaaacgacggccagtcagcccaggtaggactaagttg

SEQ ID NO: 46634 - DNA, 22 bp, Artificial Sequence
  primer
ctgaacaatatttgggcatttg

SEQ ID NO: 46635 - DNA, 40 bp, Artificial Sequence
  primer
gtaaaacgacggccagtcaaagatccatttgtcattccac

SEQ ID NO: 46636 - DNA, 38 bp, Artificial Sequence
  primer
gtaaaacgacggccagtctggaacttcagtggtggttg

SEQ ID NO: 46637 - DNA, 37 bp, Artificial Sequence
  primer
gtaaaacgacggccagttgtagtttgccaacccttgc

SEQ ID NO: 46638 - DNA, 38 bp, Artificial Sequence
  primer
gtaaaacgacggccagttggagctggatttgtaagcag

SEQ ID NO: 46639 - DNA, 38 bp, Artificial Sequence
  primer
gtaaaacgacggccagttagattccgggatttgtttgg

SEQ ID NO: 46640 - DNA, 25 bp, Artificial Sequence
  primer
gttctctgaataatgaagatggctc

SEQ ID NO: 46641 - DNA, 21 bp, Artificial Sequence
  primer
catcgcttgtgaaactccttg

SEQ ID NO: 46642 - DNA, 38 bp, Artificial Sequence
  primer
gtaaaacgacggccagtaacacaacccggaagtctcac

SEQ ID NO: 46643 - DNA, 35 bp, Artificial Sequence
  primer
gtaaaacgacggccagtgcgccaagccttgagaac

SEQ ID NO: 46644 - DNA, 21 bp, Artificial Sequence
  primer
gttgatggaagaacaccatgc

SEQ ID NO: 46645 - DNA, 37 bp, Artificial Sequence
  primer
gtaaaacgacggccagtggtatggccttggagtcctg

SEQ ID NO: 46646 - DNA, 36 bp, Artificial Sequence
  primer
gtaaaacgacggccagtctgtcagggcctctgttcc

SEQ ID NO: 46647 - DNA, 38 bp, Artificial Sequence
  primer
gtaaaacgacggccagtcaaatcttgctgtggaactgc

SEQ ID NO: 46648 - DNA, 38 bp, Artificial Sequence
  primer
gtaaaacgacggccagttctgggacttgtttcaggttg

SEQ ID NO: 46649 - DNA, 38 bp, Artificial Sequence
  primer
gtaaaacgacggccagtctcctcaagtgggagttctgg

SEQ ID NO: 46650 - DNA, 38 bp, Artificial Sequence
  primer
gtaaaacgacggccagtggcaggtcccactattgactc

SEQ ID NO: 46651 - DNA, 20 bp, Artificial Sequence
  primer
gattgacagcagcttggagg

SEQ ID NO: 46652 - DNA, 38 bp, Artificial Sequence
  primer
gtaaaacgacggccagtcccattatccctggaaccttg

SEQ ID NO: 46653 - DNA, 37 bp, Artificial Sequence
  primer
gtaaaacgacggccagtaacaacaaagggcagtgtgc

SEQ ID NO: 46654 - DNA, 38 bp, Artificial Sequence
  primer
gtaaaacgacggccagtagagaattatgtggcctgccc

SEQ ID NO: 46655 - DNA, 38 bp, Artificial Sequence
  primer
gtaaaacgacggccagtcaaagaaaggagctctggtgg

SEQ ID NO: 46656 - DNA, 21 bp, Artificial Sequence
  primer
tttgtccttgagcctccattc

SEQ ID NO: 46657 - DNA, 21 bp, Artificial Sequence
  primer
gtcaggtgaagatccagtccc

SEQ ID NO: 46658 - DNA, 21 bp, Artificial Sequence
  primer
gtgagtaaaggaggccttggg

SEQ ID NO: 46659 - DNA, 21 bp, Artificial Sequence
  primer
gtaaggccaagagatgcagag

SEQ ID NO: 46660 - DNA, 38 bp, Artificial Sequence
  primer
gtaaaacgacggccagtagcctgtcccgatgaataaag

SEQ ID NO: 46661 - DNA, 20 bp, Artificial Sequence
  primer
ccagatgaagaggacctggg

SEQ ID NO: 46662 - DNA, 38 bp, Artificial Sequence
  primer
gtaaaacgacggccagtctttctaggaggtcagggcag

SEQ ID NO: 46663 - DNA, 38 bp, Artificial Sequence
  primer
gtaaaacgacggccagtctgggttgaaagtatgcggag

SEQ ID NO: 46664 - DNA, 38 bp, Artificial Sequence
  primer
gtaaaacgacggccagtatgtacatgaaaggtgccgag

SEQ ID NO: 46665 - DNA, 20 bp, Artificial Sequence
  primer
agcgtgttctgtgagttggg

SEQ ID NO: 46666 - DNA, 21 bp, Artificial Sequence
  primer
ttgaccgctacaagcactttg

SEQ ID NO: 46667 - DNA, 36 bp, Artificial Sequence
  primer
gtaaaacgacggccagtccagctcttcaccctcctg

SEQ ID NO: 46668 - DNA, 36 bp, Artificial Sequence
  primer
gtaaaacgacggccagtgcttggcagaaggatctgg

SEQ ID NO: 46669 - DNA, 41 bp, Artificial Sequence
  primer
gtaaaacgacggccagttgggatatagtagagctgagcctt

SEQ ID NO: 46670 - DNA, 21 bp, Artificial Sequence
  primer
acttgtttggacagccaaagg

SEQ ID NO: 46671 - DNA, 38 bp, Artificial Sequence
  primer
gtaaaacgacggccagtggttgcacctgtgagtgagtg

SEQ ID NO: 46672 - DNA, 43 bp, Artificial Sequence
  primer
gtaaaacgacggccagtccgttatagatacatgcaaggtttag

SEQ ID NO: 46673 - DNA, 38 bp, Artificial Sequence
  primer
gtaaaacgacggccagtcactcgagatcgagacaggtg

SEQ ID NO: 46674 - DNA, 38 bp, Artificial Sequence
  primer
gtaaaacgacggccagtgccgatgacagaagacacttg

SEQ ID NO: 46675 - DNA, 38 bp, Artificial Sequence
  primer
gtaaaacgacggccagtcaagcgtcccttcttctgttg

SEQ ID NO: 46676 - DNA, 38 bp, Artificial Sequence
  primer
gtaaaacgacggccagtagctaccagtggccttctgtc

SEQ ID NO: 46677 - DNA, 38 bp, Artificial Sequence
  primer
gtaaaacgacggccagtgagggtagcagtccctttcac

SEQ ID NO: 46678 - DNA, 37 bp, Artificial Sequence
  primer
gtaaaacgacggccagtgtgaagtctgctctcccgtg

SEQ ID NO: 46679 - DNA, 21 bp, Artificial Sequence
  primer
tgtctcagactcttgccgaag

SEQ ID NO: 46680 - DNA, 38 bp, Artificial Sequence
  primer
gtaaaacgacggccagtgggataggaggtagcggagtc

SEQ ID NO: 46681 - DNA, 38 bp, Artificial Sequence
  primer
gtaaaacgacggccagtgatctgctaagactcggaccc

SEQ ID NO: 46682 - DNA, 21 bp, Artificial Sequence
  primer
atttgtcagctttggcttgtg

SEQ ID NO: 46683 - DNA, 37 bp, Artificial Sequence
  primer
gtaaaacgacggccagtaaagtccatggctccattcc

SEQ ID NO: 46684 - DNA, 20 bp, Artificial Sequence
  primer
ctggccaagaggacattgag

SEQ ID NO: 46685 - DNA, 38 bp, Artificial Sequence
  primer
gtaaaacgacggccagttctctaaaggaagcgagaggg

SEQ ID NO: 46686 - DNA, 38 bp, Artificial Sequence
  primer
gtaaaacgacggccagtttgcctttgtctcaggcctac

SEQ ID NO: 46687 - DNA, 38 bp, Artificial Sequence
  primer
gtaaaacgacggccagtctccctgtgggatttcatctg

SEQ ID NO: 46688 - DNA, 38 bp, Artificial Sequence
  primer
gtaaaacgacggccagtgtatcagctctggatcctcgg

SEQ ID NO: 46689 - DNA, 21 bp, Artificial Sequence
  primer
ttctcaaattgtcagggcaac

SEQ ID NO: 46690 - DNA, 38 bp, Artificial Sequence
  primer
gtaaaacgacggccagttcatttcatccatgctaaggc

SEQ ID NO: 46691 - DNA, 38 bp, Artificial Sequence
  primer
gtaaaacgacggccagtctttgtcctggtgtggttctg

SEQ ID NO: 46692 - DNA, 38 bp, Artificial Sequence
  primer
gtaaaacgacggccagttaattgtggaaccactctggg

SEQ ID NO: 46693 - DNA, 37 bp, Artificial Sequence
  primer
gtaaaacgacggccagtagaaggcggctttggtactg

SEQ ID NO: 46694 - DNA, 38 bp, Artificial Sequence
  primer
gtaaaacgacggccagttgattacatcgccagtcgaac

SEQ ID NO: 46695 - DNA, 38 bp, Artificial Sequence
  primer
gtaaaacgacggccagtacacctctacgtcatcagggc

SEQ ID NO: 46696 - DNA, 38 bp, Artificial Sequence
  primer
gtaaaacgacggccagtgaagtcatggatgatcccgtc

SEQ ID NO: 46697 - DNA, 38 bp, Artificial Sequence
  primer
gtaaaacgacggccagttccatgatgcaaacatagcag

SEQ ID NO: 46698 - DNA, 39 bp, Artificial Sequence
  primer
gtaaaacgacggccagtacccaagtgagttatttgtccc

SEQ ID NO: 46699 - DNA, 35 bp, Artificial Sequence
  primer
gtaaaacgacggccagttgtgagccactgcacctg

SEQ ID NO: 46700 - DNA, 21 bp, Artificial Sequence
  primer
atcctgaccttgtgatcctcc

SEQ ID NO: 46701 - DNA, 21 bp, Artificial Sequence
  primer
atgtggtagatggtggcttcg

SEQ ID NO: 46702 - DNA, 43 bp, Artificial Sequence
  primer
gtaaaacgacggccagttgaagtagaggagtgtgattcagaaa

SEQ ID NO: 46703 - DNA, 38 bp, Artificial Sequence
  primer
gtaaaacgacggccagttgaacttctggaggtgattgg

SEQ ID NO: 46704 - DNA, 26 bp, Artificial Sequence
  primer
caaatagattgggagaagtaatgttg

SEQ ID NO: 46705 - DNA, 38 bp, Artificial Sequence
  primer
gtaaaacgacggccagtcaggtggaagggtaaatctgg

SEQ ID NO: 46706 - DNA, 39 bp, Artificial Sequence
  primer
gtaaaacgacggccagttcattgctgaatgtaatgctcc

SEQ ID NO: 46707 - DNA, 37 bp, Artificial Sequence
  primer
gtaaaacgacggccagtcctgtgcctcctgtttgaag

SEQ ID NO: 46708 - DNA, 37 bp, Artificial Sequence
  primer
gtaaaacgacggccagtttctgactcattggccttgg

SEQ ID NO: 46709 - DNA, 21 bp, Artificial Sequence
  primer
tatccctaaactggctggctc

SEQ ID NO: 46710 - DNA, 25 bp, Artificial Sequence
  primer
gaatctcctcacattcattgtcatc

SEQ ID NO: 46711 - DNA, 22 bp, Artificial Sequence
  primer
tgcctggtaaatgttaattgcc

SEQ ID NO: 46712 - DNA, 38 bp, Artificial Sequence
  primer
gtaaaacgacggccagtggttccagcaatgcctgatag

SEQ ID NO: 46713 - DNA, 21 bp, Artificial Sequence
  primer
ggatgtgtgatggagatgtgg

SEQ ID NO: 46714 - DNA, 38 bp, Artificial Sequence
  primer
gtaaaacgacggccagtgtagattccgcaaatccaagc

SEQ ID NO: 46715 - DNA, 20 bp, Artificial Sequence
  primer
atttgcggaaacttcggaac

SEQ ID NO: 46716 - DNA, 39 bp, Artificial Sequence
  primer
gtaaaacgacggccagttctgttagacagcgactttccc

SEQ ID NO: 46717 - DNA, 21 bp, Artificial Sequence
  primer
aagtgcagattggagtgagcc

SEQ ID NO: 46718 - DNA, 24 bp, Artificial Sequence
  primer
tcccacctcttggtaataagtcag

SEQ ID NO: 46719 - DNA, 38 bp, Artificial Sequence
  primer
gtaaaacgacggccagtaatggaactgctggtgtttcc

SEQ ID NO: 46720 - DNA, 24 bp, Artificial Sequence
  primer
cacatccaagaacaggacatattg

SEQ ID NO: 46721 - DNA, 21 bp, Artificial Sequence
  primer
tgactgaaatctgccctttcc

SEQ ID NO: 46722 - DNA, 20 bp, Artificial Sequence
  primer
gaacgagcacgtgaaacagg

SEQ ID NO: 46723 - DNA, 40 bp, Artificial Sequence
  primer
gtaaaacgacggccagtcaacactcacctaattcacaggc

SEQ ID NO: 46724 - DNA, 21 bp, Artificial Sequence
  primer
gaccacaggcgaaattctcag

SEQ ID NO: 46725 - DNA, 38 bp, Artificial Sequence
  primer
gtaaaacgacggccagttgaggacaggttgtggagaag

SEQ ID NO: 46726 - DNA, 38 bp, Artificial Sequence
  primer
gtaaaacgacggccagttgtccctctacaggaggaagc

SEQ ID NO: 46727 - DNA, 27 bp, Artificial Sequence
  primer
tttgtggtttattggtagaagtagaaa

SEQ ID NO: 46728 - DNA, 21 bp, Artificial Sequence
  primer
gagataaaggttgcagtgggc

SEQ ID NO: 46729 - DNA, 38 bp, Artificial Sequence
  primer
gtaaaacgacggccagtaatttgcattcgcaaacagtg

SEQ ID NO: 46730 - DNA, 38 bp, Artificial Sequence
  primer
gtaaaacgacggccagtacttgagcctcattgctaccc

SEQ ID NO: 46731 - DNA, 38 bp, Artificial Sequence
  primer
gtaaaacgacggccagtagcggtgtatgcctgtaatcc

SEQ ID NO: 46732 - DNA, 22 bp, Artificial Sequence
  primer
aagcaagactgagcaagactgg

SEQ ID NO: 46733 - DNA, 21 bp, Artificial Sequence
  primer
atttaaatccgtgggactggg

SEQ ID NO: 46734 - DNA, 39 bp, Artificial Sequence
  primer
gtaaaacgacggccagttgggtatttccctccaataacc

SEQ ID NO: 46735 - DNA, 37 bp, Artificial Sequence
  primer
gtaaaacgacggccagtggaagtgaaagctggaaccc

SEQ ID NO: 46736 - DNA, 39 bp, Artificial Sequence
  primer
gtaaaacgacggccagtttacccttaccagatggtggtc

SEQ ID NO: 46737 - DNA, 38 bp, Artificial Sequence
  primer
gtaaaacgacggccagtccctacaggacattctttgcc

SEQ ID NO: 46738 - DNA, 26 bp, Artificial Sequence
  primer
catttcgagatagtttgtgatcaatg

SEQ ID NO: 46739 - DNA, 24 bp, Artificial Sequence
  primer
ccctcttctatttccctcacatag

SEQ ID NO: 46740 - DNA, 38 bp, Artificial Sequence
  primer
gtaaaacgacggccagtagtcagggttgaaagaggctg

SEQ ID NO: 46741 - DNA, 21 bp, Artificial Sequence
  primer
gaagaagaagcggagtcgaag

SEQ ID NO: 46742 - DNA, 21 bp, Artificial Sequence
  primer
atctgtcctttgcttgttggg

SEQ ID NO: 46743 - DNA, 38 bp, Artificial Sequence
  primer
gtaaaacgacggccagtaagaccagcctgagcatgaag

SEQ ID NO: 46744 - DNA, 21 bp, Artificial Sequence
  primer
ttgcagtgagctttgatcagg

SEQ ID NO: 46745 - DNA, 18 bp, Artificial Sequence
  primer
ctacaggtgcccaccacc

SEQ ID NO: 46746 - DNA, 27 bp, Artificial Sequence
  primer
tttatctgaatatgctacggtttatcc

SEQ ID NO: 46747 - DNA, 19 bp, Artificial Sequence
  primer
cgctgaattgagatgctgc

SEQ ID NO: 46748 - DNA, 38 bp, Artificial Sequence
  primer
gtaaaacgacggccagtgggagttacagtgggaaggaa

SEQ ID NO: 46749 - DNA, 39 bp, Artificial Sequence
  primer
gtaaaacgacggccagtgagtgactgggctgaaatcttg

SEQ ID NO: 46750 - DNA, 38 bp, Artificial Sequence
  primer
gtaaaacgacggccagtgaagctgaattctggcagttg

SEQ ID NO: 46751 - DNA, 24 bp, Artificial Sequence
  primer
caggcttgtatgtttgaaatgatg

SEQ ID NO: 46752 - DNA, 39 bp, Artificial Sequence
  primer
gtaaaacgacggccagtttgggaagatatctgggttcag

SEQ ID NO: 46753 - DNA, 39 bp, Artificial Sequence
  primer
gtaaaacgacggccagttttgccagttgttaattgtccc

SEQ ID NO: 46754 - DNA, 38 bp, Artificial Sequence
  primer
gtaaaacgacggccagtgaagttaccgccagtctcacc

SEQ ID NO: 46755 - DNA, 22 bp, Artificial Sequence
  primer
gatagagaaaggcatcccaagg

SEQ ID NO: 46756 - DNA, 39 bp, Artificial Sequence
  primer
gtaaaacgacggccagttccctagaattgctccatgttc

SEQ ID NO: 46757 - DNA, 38 bp, Artificial Sequence
  primer
gtaaaacgacggccagtggtcctggtgactactctggg

SEQ ID NO: 46758 - DNA, 21 bp, Artificial Sequence
  primer
ggcctactagggaccaggttg

SEQ ID NO: 46759 - DNA, 44 bp, Artificial Sequence
  primer
gtaaaacgacggccagtaatatcctatgtttaacccagattcag

SEQ ID NO: 46760 - DNA, 24 bp, Artificial Sequence
  primer
tttcagtagctcatgcattctctt

SEQ ID NO: 46761 - DNA, 38 bp, Artificial Sequence
  primer
gtaaaacgacggccagtgttgttcccagtggattaggg

SEQ ID NO: 46762 - DNA, 21 bp, Artificial Sequence
  primer
ctgaccacacgtgatacccac

SEQ ID NO: 46763 - DNA, 24 bp, Artificial Sequence
  primer
tttggaagaatttaaatgcaatgt

SEQ ID NO: 46764 - DNA, 38 bp, Artificial Sequence
  primer
gtaaaacgacggccagtgacttgggagacctggatttg

SEQ ID NO: 46765 - DNA, 39 bp, Artificial Sequence
  primer
gtaaaacgacggccagtggcttcttgtgtacgtaagccc

SEQ ID NO: 46766 - DNA, 22 bp, Artificial Sequence
  primer
ctctgtgtctggcatgatgttc

SEQ ID NO: 46767 - DNA, 23 bp, Artificial Sequence
  primer
ccggtaagcataaagctgtttag

SEQ ID NO: 46768 - DNA, 21 bp, Artificial Sequence
  primer
caatccaactggaatccttgg

SEQ ID NO: 46769 - DNA, 19 bp, Artificial Sequence
  primer
tcatgatcctcagcctccc

SEQ ID NO: 46770 - DNA, 20 bp, Artificial Sequence
  primer
tttaagagttggcggcaatg

SEQ ID NO: 46771 - DNA, 22 bp, Artificial Sequence
  primer
tgagccagtctcagatttcttg

SEQ ID NO: 46772 - DNA, 21 bp, Artificial Sequence
  primer
tgtggtcctttatcttggcac

SEQ ID NO: 46773 - DNA, 39 bp, Artificial Sequence
  primer
gtaaaacgacggccagttttggcatttgtgaagaatcag

SEQ ID NO: 46774 - DNA, 25 bp, Artificial Sequence
  primer
aaagaaatatactcagaaggctcca

SEQ ID NO: 46775 - DNA, 23 bp, Artificial Sequence
  primer
gctagtgccttagccagtatgtg

SEQ ID NO: 46776 - DNA, 21 bp, Artificial Sequence
  primer
caggctttcaaagagctaccc

SEQ ID NO: 46777 - DNA, 22 bp, Artificial Sequence
  primer
tttgcagtcagattgctgattc

SEQ ID NO: 46778 - DNA, 38 bp, Artificial Sequence
  primer
gtaaaacgacggccagttatccctgattaccttgctgc

SEQ ID NO: 46779 - DNA, 38 bp, Artificial Sequence
  primer
gtaaaacgacggccagtaattgttggccgtagacatgg

SEQ ID NO: 46780 - DNA, 38 bp, Artificial Sequence
  primer
gtaaaacgacggccagttcgacagtcctacctgagctg

SEQ ID NO: 46781 - DNA, 38 bp, Artificial Sequence
  primer
gtaaaacgacggccagttattccaagcctgggatgatg

SEQ ID NO: 46782 - DNA, 43 bp, Artificial Sequence
  primer
gtaaaacgacggccagtaagagtgaggaagagtcagttctctg

SEQ ID NO: 46783 - DNA, 37 bp, Artificial Sequence
  primer
gtaaaacgacggccagtgtgcatttggcttcattccc

SEQ ID NO: 46784 - DNA, 37 bp, Artificial Sequence
  primer
gtaaaacgacggccagtcggtggctatagcagtggag

SEQ ID NO: 46785 - DNA, 37 bp, Artificial Sequence
  primer
gtaaaacgacggccagtgattctcaccactgaagggc

SEQ ID NO: 46786 - DNA, 39 bp, Artificial Sequence
  primer
gtaaaacgacggccagtcatgaagtacccatctcccttc

SEQ ID NO: 46787 - DNA, 37 bp, Artificial Sequence
  primer
gtaaaacgacggccagttgtgccatgtgtgaagttga

SEQ ID NO: 46788 - DNA, 37 bp, Artificial Sequence; identical to SEQ ID NO: 46783
  primer

SEQ ID NO: 46789 - DNA, 21 bp, Artificial Sequence
  primer
aggcctggtagtgtggacaag

SEQ ID NO: 46790 - DNA, 21 bp, Artificial Sequence
  primer
acacaaaggaggaatgggatg

SEQ ID NO: 46791 - DNA, 37 bp, Artificial Sequence
  primer
gtaaaacgacggccagtagtgggttgacaagacccag

SEQ ID NO: 46792 - DNA, 38 bp, Artificial Sequence
  primer
gtaaaacgacggccagtgaagaggcacttgtctcccac

SEQ ID NO: 46793 - DNA, 21 bp, Artificial Sequence
  primer
caagcaagcaagaggacagag

SEQ ID NO: 46794 - DNA, 21 bp, Artificial Sequence
  primer
caggacagtgaagtctgtggg

SEQ ID NO: 46795 - DNA, 20 bp, Artificial Sequence
  primer
ccttcagcagcagctttgag

SEQ ID NO: 46796 - DNA, 21 bp, Artificial Sequence
  primer
gtgacagtttgctgggatcag

SEQ ID NO: 46797 - DNA, 21 bp, Artificial Sequence
  primer
gttacagcctttgccctaagc

SEQ ID NO: 46798 - DNA, 22 bp, Artificial Sequence
  primer
gctcgagtttgagtttacagcc

SEQ ID NO: 46799 - DNA, 26 bp, Artificial Sequence
  primer
caaagaaatatagtgcagtttcagcc

SEQ ID NO: 46800 - DNA, 21 bp, Artificial Sequence
  primer
gagccagtttgctgtaatggg

SEQ ID NO: 46801 - DNA, 38 bp, Artificial Sequence
  primer
gtaaaacgacggccagtagccagagctgaggtaagcag

SEQ ID NO: 46802 - DNA, 37 bp, Artificial Sequence
  primer
gtaaaacgacggccagttcagatgacagccacagcac

SEQ ID NO: 46803 - DNA, 37 bp, Artificial Sequence
  primer
gtaaaacgacggccagtctgggctcaagtgatcctcc

SEQ ID NO: 46804 - DNA, 37 bp, Artificial Sequence
  primer
gtaaaacgacggccagtgctggctaaagagcgactgg

SEQ ID NO: 46805 - DNA, 21 bp, Artificial Sequence
  primer
ctgcttgtgaaccagaggaac

SEQ ID NO: 46806 - DNA, 44 bp, Artificial Sequence
  primer
gtaaaacgacggccagtcagctgtaatagcttaaatttctaggg

SEQ ID NO: 46807 - DNA, 38 bp, Artificial Sequence
  primer
gtaaaacgacggccagtcctgggcaacgtagtaagacc

SEQ ID NO: 46808 - DNA, 20 bp, Artificial Sequence
  primer
gaagatcaaaggagccaggg

SEQ ID NO: 46809 - DNA, 21 bp, Artificial Sequence
  primer
ttctgggcaaggtgctatttc

SEQ ID NO: 46810 - DNA, 38 bp, Artificial Sequence
  primer
gtaaaacgacggccagtaacaacccgtaaacttgtccc

SEQ ID NO: 46811 - DNA, 38 bp, Artificial Sequence
  primer
gtaaaacgacggccagtgtttcctaatcggtctgtgcc

SEQ ID NO: 46812 - DNA, 38 bp, Artificial Sequence
  primer
gtaaaacgacggccagtcggatctgtactcaaaccagg

SEQ ID NO: 46813 - DNA, 21 bp, Artificial Sequence
  primer
ttccttcttgctctacagccc

SEQ ID NO: 46814 - DNA, 38 bp, Artificial Sequence
  primer
gtaaaacgacggccagtcagccagtagaatggaagtgg

SEQ ID NO: 46815 - DNA, 39 bp, Artificial Sequence
  primer
gtaaaacgacggccagtttccaggtctctcagttgtcag

SEQ ID NO: 46816 - DNA, 36 bp, Artificial Sequence
  primer
gtaaaacgacggccagtgtggccttaccgcacactc

SEQ ID NO: 46817 - DNA, 22 bp, Artificial Sequence
  primer
aggaggtagggagaattatggg

SEQ ID NO: 46818 - DNA, 38 bp, Artificial Sequence
  primer
gtaaaacgacggccagtttaggttccttccagtcccag

SEQ ID NO: 46819 - DNA, 20 bp, Artificial Sequence
  primer
tattccaccaccacctgctc

SEQ ID NO: 46820 - DNA, 38 bp, Artificial Sequence
  primer
gtaaaacgacggccagtaatcccactgcagctattctg

SEQ ID NO: 46821 - DNA, 38 bp, Artificial Sequence
  primer
gtaaaacgacggccagtccatttcacgctggacagtag

SEQ ID NO: 46822 - DNA, 38 bp, Artificial Sequence
  primer
gtaaaacgacggccagtataggtttgcaggatgggttg

SEQ ID NO: 46823 - DNA, 38 bp, Artificial Sequence
  primer
gtaaaacgacggccagtcttgagcagagtgtgggactg

SEQ ID NO: 46824 - DNA, 38 bp, Artificial Sequence
  primer
gtaaaacgacggccagtggagctgtgatcctcccatag

SEQ ID NO: 46825 - DNA, 38 bp, Artificial Sequence
  primer
gtaaaacgacggccagtgtagggcaggacaacacaagg

SEQ ID NO: 46826 - DNA, 23 bp, Artificial Sequence
  primer
ggtgttgaggctgggattattag

SEQ ID NO: 46827 - DNA, 40 bp, Artificial Sequence
  primer
gtaaaacgacggccagtcatctttgagtaattccttgggc

SEQ ID NO: 46828 - DNA, 38 bp, Artificial Sequence
  primer
gtaaaacgacggccagtgcaagggatacttgctgactg

SEQ ID NO: 46829 - DNA, 38 bp, Artificial Sequence
  primer
gtaaaacgacggccagttaaggctgagctctctttgcc

SEQ ID NO: 46830 - DNA, 21 bp, Artificial Sequence
  primer
gtcatgtctgcatggcttacg

SEQ ID NO: 46831 - DNA, 38 bp, Artificial Sequence
  primer
gtaaaacgacggccagtggcagacactctctccctcag

SEQ ID NO: 46832 - DNA, 21 bp, Artificial Sequence
  primer
tacacctttgccaaaccttca

SEQ ID NO: 46833 - DNA, 40 bp, Artificial Sequence
  primer
gtaaaacgacggccagtcaatctctaactggagcttgctg

SEQ ID NO: 46834 - DNA, 22 bp, Artificial Sequence
  primer
ggctaggtagagatgtgaaccg

SEQ ID NO: 46835 - DNA, 21 bp, Artificial Sequence
  primer
tgtagcactctgcacacattt

SEQ ID NO: 46836 - DNA, 23 bp, Artificial Sequence
  primer
gagtcaatacttgaagcagtggg

SEQ ID NO: 46837 - DNA, 37 bp, Artificial Sequence
  primer
gtaaaacgacggccagtctttggccatgaaggtcttg

SEQ ID NO: 46838 - DNA, 22 bp, Artificial Sequence
  primer
ttggaagatcattgtacgttgc

SEQ ID NO: 46839 - DNA, 38 bp, Artificial Sequence
  primer
gtaaaacgacggccagttgaaaggaccggtgctcatag

SEQ ID NO: 46840 - DNA, 43 bp, Artificial Sequence
  primer
gtaaaacgacggccagttcattatgtgtgtatgcctttagtga

SEQ ID NO: 46841 - DNA, 23 bp, Artificial Sequence
  primer
aaatgaataattgtgttctgccc

SEQ ID NO: 46842 - DNA, 21 bp, Artificial Sequence
  primer
atggtcttggacatgctcttg

SEQ ID NO: 46843 - DNA, 23 bp, Artificial Sequence
  primer
tcctaagaaagtgtagtggctgc

SEQ ID NO: 46844 - DNA, 26 bp, Artificial Sequence
  primer
tcaatttccatttaataagggttgac

SEQ ID NO: 46845 - DNA, 40 bp, Artificial Sequence
  primer
gtaaaacgacggccagttctgagtgatctgggaattcaac

SEQ ID NO: 46846 - DNA, 25 bp, Artificial Sequence
  primer
tgttaaacccttagatcttgctaaa

SEQ ID NO: 46847 - DNA, 40 bp, Artificial Sequence
  primer
gtaaaacgacggccagtccttgctgaaagttagttccttg

SEQ ID NO: 46848 - DNA, 27 bp, Artificial Sequence
  primer
aatatgccttactaatgttattccgtg

SEQ ID NO: 46849 - DNA, 42 bp, Artificial Sequence
  primer
gtaaaacgacggccagttggatagagtgagtagtccatcaaa

SEQ ID NO: 46850 - DNA, 40 bp, Artificial Sequence
  primer
gtaaaacgacggccagtccacagtcagaaatgtactgtcc

SEQ ID NO: 46851 - DNA, 44 bp, Artificial Sequence
  primer
gtaaaacgacggccagttttatgcagaaatgttacagtgttgtc

SEQ ID NO: 46852 - DNA, 41 bp, Artificial Sequence
  primer
gtaaaacgacggccagtgcaccgctactagaccacattaag

SEQ ID NO: 46853 - DNA, 24 bp, Artificial Sequence
  primer
ttcatggaactatttcccacattt

SEQ ID NO: 46854 - DNA, 43 bp, Artificial Sequence
  primer
gtaaaacgacggccagtcagccctaacaaactaatacacaagt

SEQ ID NO: 46855 - DNA, 22 bp, Artificial Sequence
  primer
tcaggctgctgtaataccttcc

SEQ ID NO: 46856 - DNA, 38 bp, Artificial Sequence
  primer
gtaaaacgacggccagttctgtggtgccagaaactgac

SEQ ID NO: 46857 - DNA, 37 bp, Artificial Sequence
  primer
gtaaaacgacggccagtaactcttgaactcagccggg

SEQ ID NO: 46858 - DNA, 21 bp, Artificial Sequence
  primer
ctggcaatacgcagttcattc

SEQ ID NO: 46859 - DNA, 21 bp, Artificial Sequence
  primer
aagttctgggattacaggcgt

SEQ ID NO: 46860 - DNA, 38 bp, Artificial Sequence
  primer
gtaaaacgacggccagtttggctgcttagggtattgac

SEQ ID NO: 46861 - DNA, 40 bp, Artificial Sequence
  primer
gtaaaacgacggccagtcgccactgaaactttatttcttc

SEQ ID NO: 46862 - DNA, 41 bp, Artificial Sequence
  primer
gtaaaacgacggccagttcaagttgaatggttggtttattg

SEQ ID NO: 46863 - DNA, 21 bp, Artificial Sequence
  primer
caacagcatctgtgcttaggg

SEQ ID NO: 46864 - DNA, 26 bp, Artificial Sequence
  primer
tgttgaacttgaaatcaatcttagcc

SEQ ID NO: 46865 - DNA, 25 bp, Artificial Sequence
  primer
tgtacgagttggtgatagaaacatt

SEQ ID NO: 46866 - DNA, 37 bp, Artificial Sequence
  primer
gtaaaacgacggccagtcggcagatcattcgagtcac

SEQ ID NO: 46867 - DNA, 21 bp, Artificial Sequence
  primer
atgcatagtgcttgacttggg

SEQ ID NO: 46868 - DNA, 21 bp, Artificial Sequence
  primer
tcaacagttcaggtcttggga

SEQ ID NO: 46869 - DNA, 21 bp, Artificial Sequence
  primer
ccttggatccagtgcaataac

SEQ ID NO: 46870 - DNA, 40 bp, Artificial Sequence
  primer
gtaaaacgacggccagtttgcttaaggcttattaggaggg

SEQ ID NO: 46871 - DNA, 39 bp, Artificial Sequence
  primer
gtaaaacgacggccagtcatcccagattacttgcagtcg

SEQ ID NO: 46872 - DNA, 21 bp, Artificial Sequence
  primer
ttcaccaagcagcaagtcaaa

SEQ ID NO: 46873 - DNA, 28 bp, Artificial Sequence
  primer
tctaatgaaacttatttctgaagtgtgg

SEQ ID NO: 46874 - DNA, 41 bp, Artificial Sequence
  primer
gtaaaacgacggccagtaaacattggatttacagagttccc

SEQ ID NO: 46875 - DNA, 22 bp, Artificial Sequence
  primer
aacaagggtttctgtgcatacc

SEQ ID NO: 46876 - DNA, 39 bp, Artificial Sequence
  primer
gtaaaacgacggccagtttgctagcttagtcctggcatc

SEQ ID NO: 46877 - DNA, 20 bp, Artificial Sequence
  primer
tgaagcattactttgctgcc

SEQ ID NO: 46878 - DNA, 38 bp, Artificial Sequence
  primer
gtaaaacgacggccagtccctgcatgattgtgtaatgg

SEQ ID NO: 46879 - DNA, 26 bp, Artificial Sequence
  primer
tttgtaaatttattggaggacgattt

SEQ ID NO: 46880 - DNA, 21 bp, Artificial Sequence
  primer
ggtgtagggttctctgaagcg

SEQ ID NO: 46881 - DNA, 37 bp, Artificial Sequence
  primer
gtaaaacgacggccagtcccatgctttcctgatttcc

SEQ ID NO: 46882 - DNA, 21 bp, Artificial Sequence
  primer
gcatttccaccaaacaaattc

SEQ ID NO: 46883 - DNA, 20 bp, Artificial Sequence
  primer
cccactgctaacattctggc

SEQ ID NO: 46884 - DNA, 38 bp, Artificial Sequence
  primer
gtaaaacgacggccagtcccaccttcagggacttaacc

SEQ ID NO: 46885 - DNA, 38 bp, Artificial Sequence
  primer
gtaaaacgacggccagtactgtcgtgccgtattggtag

SEQ ID NO: 46886 - DNA, 22 bp, Artificial Sequence
  primer
caaaccaatcttgtatttggcg

SEQ ID NO: 46887 - DNA, 21 bp, Artificial Sequence
  primer
ccaagagcatgtgtgtcagaa

SEQ ID NO: 46888 - DNA, 21 bp, Artificial Sequence
  primer
gtctgcagcaggttactttgg

SEQ ID NO: 46889 - DNA, 38 bp, Artificial Sequence
  primer
gtaaaacgacggccagtggaagaggcacatgacaaatc

SEQ ID NO: 46890 - DNA, 37 bp, Artificial Sequence
  primer
gtaaaacgacggccagtgggcagtggtttcataggtg

SEQ ID NO: 46891 - DNA, 21 bp, Artificial Sequence
  primer
ggcaaaggtgctttagtttcc

SEQ ID NO: 46892 - DNA, 38 bp, Artificial Sequence
  primer
gtaaaacgacggccagttaagaagtgtcatgcctcggg

SEQ ID NO: 46893 - DNA, 43 bp, Artificial Sequence
  primer
gtaaaacgacggccagtcactagaaagcatcatttctgttctg

SEQ ID NO: 46894 - DNA, 26 bp, Artificial Sequence
  primer
gaatttaaacctacagacgctgattc

SEQ ID NO: 46895 - DNA, 21 bp, Artificial Sequence
  primer
tgccatttagcttcatgtgtt

SEQ ID NO: 46896 - DNA, 21 bp, Artificial Sequence
  primer
tgaaatgagctcttcaggtgg

SEQ ID NO: 46897 - DNA, 21 bp, Artificial Sequence
  primer
aaatcccatttggccttagag

SEQ ID NO: 46898 - DNA, 38 bp, Artificial Sequence
  primer
gtaaaacgacggccagttctagggccagggattaaagc

SEQ ID NO: 46899 - DNA, 39 bp, Artificial Sequence
  primer
gtaaaacgacggccagtccctaacttagacttcgggtgg

SEQ ID NO: 46900 - DNA, 21 bp, Artificial Sequence
  primer
atacccgtgcaaccaactacc

SEQ ID NO: 46901 - DNA, 42 bp, Artificial Sequence
  primer
gtaaaacgacggccagttgaggatatgttaatatgccttgaa

SEQ ID NO: 46902 - DNA, 21 bp, Artificial Sequence
  primer
gcaaactggatgaggattacg

SEQ ID NO: 46903 - DNA, 20 bp, Artificial Sequence
  primer
gttgacacgggaaagcagtc

SEQ ID NO: 46904 - DNA, 38 bp, Artificial Sequence
  primer
gtaaaacgacggccagtcaaatcttcttcggatttggg

SEQ ID NO: 46905 - DNA, 27 bp, Artificial Sequence
  primer
tgctgggtatatagaataataaatggg

SEQ ID NO: 46906 - DNA, 20 bp, Artificial Sequence
  primer
gtactatcccatgatgcggc

SEQ ID NO: 46907 - DNA, 39 bp, Artificial Sequence
  primer
gtaaaacgacggccagtgcttatacatgggactcctggc

SEQ ID NO: 46908 - DNA, 38 bp, Artificial Sequence
  primer
gtaaaacgacggccagttcctaccctgcaccttcattc

SEQ ID NO: 46909 - DNA, 38 bp, Artificial Sequence
  primer
gtaaaacgacggccagttgctgatgccactgtacacac

SEQ ID NO: 46910 - DNA, 21 bp, Artificial Sequence
  primer
tcctaccctgcaccttcattc

SEQ ID NO: 46911 - DNA, 20 bp, Artificial Sequence
  primer
agtgcctaggacccatcctg

SEQ ID NO: 46912 - DNA, 21 bp, Artificial Sequence
  primer
caaccataatgggaaaccagg

SEQ ID NO: 46913 - DNA, 38 bp, Artificial Sequence
  primer
gtaaaacgacggccagttgcatctgccattgaattagc

SEQ ID NO: 46914 - DNA, 21 bp, Artificial Sequence
  primer
gaaagaggagacaacttgggc

SEQ ID NO: 46915 - DNA, 20 bp, Artificial Sequence
  primer
tctcagcagggtgcataacc

SEQ ID NO: 46916 - DNA, 38 bp, Artificial Sequence
  primer
gtaaaacgacggccagttgccatcatgcctctttactc

SEQ ID NO: 46917 - DNA, 21 bp, Artificial Sequence
  primer
acttgacctcctttcacgagc

SEQ ID NO: 46918 - DNA, 38 bp, Artificial Sequence
  primer
gtaaaacgacggccagtcaagatttctagggcattggc

SEQ ID NO: 46919 - DNA, 38 bp, Artificial Sequence
  primer
gtaaaacgacggccagtcttcactccttgaggctctgc

SEQ ID NO: 46920 - DNA, 38 bp, Artificial Sequence
  primer
gtaaaacgacggccagtcatggccagaagttggatttc

SEQ ID NO: 46921 - DNA, 21 bp, Artificial Sequence
  primer
ctccctacatcatcccacagc

SEQ ID NO: 46922 - DNA, 20 bp, Artificial Sequence
  primer
cttggaggtgtgtgtgggag

SEQ ID NO: 46923 - DNA, 38 bp, Artificial Sequence
  primer
gtaaaacgacggccagtacagacacgggtcttatgctg

SEQ ID NO: 46924 - DNA, 38 bp, Artificial Sequence
  primer
gtaaaacgacggccagttctgctgtttctgagtcaggc

SEQ ID NO: 46925 - DNA, 21 bp, Artificial Sequence
  primer
cagcatttcagcagtggagac

SEQ ID NO: 46926 - DNA, 38 bp, Artificial Sequence
  primer
gtaaaacgacggccagtcccttcatttccctgacctac

SEQ ID NO: 46927 - DNA, 20 bp, Artificial Sequence
  primer
gacgatttcattggcgagtc

SEQ ID NO: 46928 - DNA, 21 bp, Artificial Sequence
  primer
tctgagctgaaccgactctcc

SEQ ID NO: 46929 - DNA, 21 bp, Artificial Sequence
  primer
atccctgagtgtctggagagc

SEQ ID NO: 46930 - DNA, 18 bp, Artificial Sequence
  primer
agcgattcgatgccttcc

SEQ ID NO: 46931 - DNA, 21 bp, Artificial Sequence
  primer
gatgtcaccatcagcccatag

SEQ ID NO: 46932 - DNA, 38 bp, Artificial Sequence
  primer
gtaaaacgacggccagtctagaccagagctgggccttc

SEQ ID NO: 46933 - DNA, 21 bp, Artificial Sequence
  primer
atcaagaagtaagtcccgccc

SEQ ID NO: 46934 - DNA, 38 bp, Artificial Sequence
  primer
gtaaaacgacggccagtcggaaccatcaccctgagtag

SEQ ID NO: 46935 - DNA, 18 bp, Artificial Sequence
  primer
ggaagggacctcgggaac

SEQ ID NO: 46936 - DNA, 38 bp, Artificial Sequence
  primer
gtaaaacgacggccagttcctctcactgtgggtgtgac

SEQ ID NO: 46937 - DNA, 38 bp, Artificial Sequence
  primer
gtaaaacgacggccagtgtttcaccggttctgtgtctg

SEQ ID NO: 46938 - DNA, 21 bp, Artificial Sequence
  primer
tctgttgtttggaagtcccag

SEQ ID NO: 46939 - DNA, 38 bp, Artificial Sequence
  primer
gtaaaacgacggccagtgtgttggacttcgtctcggtc

SEQ ID NO: 46940 - DNA, 20 bp, Artificial Sequence
  primer
gccacacttcctgttgatcc

SEQ ID NO: 46941 - DNA, 21 bp, Artificial Sequence
  primer
agagctccaggaatcaaatgg

SEQ ID NO: 46942 - DNA, 39 bp, Artificial Sequence
  primer
gtaaaacgacggccagtcactggacccagccaatattac

SEQ ID NO: 46943 - DNA, 38 bp, Artificial Sequence
  primer
gtaaaacgacggccagtgctcttggagaagaaaggacg

SEQ ID NO: 46944 - DNA, 38 bp, Artificial Sequence
  primer
gtaaaacgacggccagtgtgccctggtcagttagaacc

SEQ ID NO: 46945 - DNA, 38 bp, Artificial Sequence
  primer
gtaaaacgacggccagtttgaagccgtatgttccagtg

SEQ ID NO: 46946 - DNA, 37 bp, Artificial Sequence
  primer
gtaaaacgacggccagtgtgtgggtgtgtgggcttac

SEQ ID NO: 46947 - DNA, 21 bp, Artificial Sequence
  primer
tgaagtgcagccttatctgtg

SEQ ID NO: 46948 - DNA, 38 bp, Artificial Sequence
  primer
gtaaaacgacggccagtctgcctgtctcaccttcagtg

SEQ ID NO: 46949 - DNA, 38 bp, Artificial Sequence
  primer
gtaaaacgacggccagtctggcagctccatctgtaagg

SEQ ID NO: 46950 - DNA, 21 bp, Artificial Sequence
  primer
cgaggtagcaagacttggagg

SEQ ID NO: 46951 - DNA, 36 bp, Artificial Sequence
  primer
gtaaaacgacggccagtcatcatgctgccttcatgg

SEQ ID NO: 46952 - DNA, 37 bp, Artificial Sequence
  primer
gtaaaacgacggccagtccaggctgagagcagaaagg

SEQ ID NO: 46953 - DNA, 38 bp, Artificial Sequence
  primer
gtaaaacgacggccagttaattatcagccaccggcatc

SEQ ID NO: 46954 - DNA, 38 bp, Artificial Sequence
  primer
gtaaaacgacggccagtgtcacctcagccttcaacaag

SEQ ID NO: 46955 - DNA, 38 bp, Artificial Sequence
  primer
gtaaaacgacggccagtccaaagactgttgccattctg

SEQ ID NO: 46956 - DNA, 38 bp, Artificial Sequence
  primer
gtaaaacgacggccagtagcacatctgaccctggtatg

SEQ ID NO: 46957 - DNA, 38 bp, Artificial Sequence
  primer
gtaaaacgacggccagttctcgcctcaccctctaacag

SEQ ID NO: 46958 - DNA, 22 bp, Artificial Sequence
  primer
accgcatacaggttcatgttag

SEQ ID NO: 46959 - DNA, 38 bp, Artificial Sequence
  primer
gtaaaacgacggccagtggccctatgtgatgagtctcc

SEQ ID NO: 46960 - DNA, 21 bp, Artificial Sequence
  primer
atattgaaagccaggccaaag

SEQ ID NO: 46961 - DNA, 38 bp, Artificial Sequence
  primer
gtaaaacgacggccagtggacagtctgcctcttccatc

SEQ ID NO: 46962 - DNA, 37 bp, Artificial Sequence
  primer
gtaaaacgacggccagtagagggcattccatttcctg

SEQ ID NO: 46963 - DNA, 21 bp, Artificial Sequence
  primer
cctctgagatgcgtcgtgtag

SEQ ID NO: 46964 - DNA, 20 bp, Artificial Sequence
  primer
agagaatcgctcaggcttcc

SEQ ID NO: 46965 - DNA, 21 bp, Artificial Sequence
  primer
cgctaatcacaaggtgtcgtg

SEQ ID NO: 46966 - DNA, 38 bp, Artificial Sequence
  primer
gtaaaacgacggccagttctctcgcaggaacagtgaac

SEQ ID NO: 46967 - DNA, 38 bp, Artificial Sequence
  primer
gtaaaacgacggccagtgggtcagagtctgtgagtggg

SEQ ID NO: 46968 - DNA, 20 bp, Artificial Sequence
  primer
ctcagtgtggtcttggtggg

SEQ ID NO: 46969 - DNA, 21 bp, Artificial Sequence
  primer
tggtctagccatgtgaacagc

SEQ ID NO: 46970 - DNA, 38 bp, Artificial Sequence
  primer
gtaaaacgacggccagtgcgtcagaacagaaatcatgc

SEQ ID NO: 46971 - DNA, 21 bp, Artificial Sequence
  primer
ttctgtggaacagacacagcc

SEQ ID NO: 46972 - DNA, 38 bp, Artificial Sequence
  primer
gtaaaacgacggccagttgtttggatggaaagcatcag

SEQ ID NO: 46973 - DNA, 38 bp, Artificial Sequence
  primer
gtaaaacgacggccagtatttccaacgtcatgatctgc

SEQ ID NO: 46974 - DNA, 21 bp, Artificial Sequence
  primer
acatgagcacatcagtcctgc

SEQ ID NO: 46975 - DNA, 38 bp, Artificial Sequence
  primer
gtaaaacgacggccagttattcttggccagtggatgtc

SEQ ID NO: 46976 - DNA, 21 bp, Artificial Sequence
  primer
ctggttgggctcagaggatac

SEQ ID NO: 46977 - DNA, 21 bp, Artificial Sequence
  primer
tcttctttgtgccaccctttc

SEQ ID NO: 46978 - DNA, 21 bp, Artificial Sequence
  primer
ctagaggctcctgtgctgttg

SEQ ID NO: 46979 - DNA, 37 bp, Artificial Sequence
  primer
gtaaaacgacggccagttcttccatcgtgagggtgag

SEQ ID NO: 46980 - DNA, 38 bp, Artificial Sequence
  primer
gtaaaacgacggccagtgatgtaggttgttggcctgag

SEQ ID NO: 46981 - DNA, 23 bp, Artificial Sequence
  primer
tgagatctatccaaattgctgtg

SEQ ID NO: 46982 - DNA, 38 bp, Artificial Sequence
  primer
gtaaaacgacggccagtgatgttgcccttaacccacag

SEQ ID NO: 46983 - DNA, 23 bp, Artificial Sequence
  primer
aggaccaacatgtgaggatagac

SEQ ID NO: 46984 - DNA, 38 bp, Artificial Sequence
  primer
gtaaaacgacggccagtagtgtgagtgggaactccgtc

SEQ ID NO: 46985 - DNA, 38 bp, Artificial Sequence
  primer
gtaaaacgacggccagtttcatagggtcccagtatgcc

SEQ ID NO: 46986 - DNA, 37 bp, Artificial Sequence
  primer
gtaaaacgacggccagtcccacacttggatggatttg

SEQ ID NO: 46987 - DNA, 38 bp, Artificial Sequence
  primer
gtaaaacgacggccagtagttgtcggtgactgtgatgc

SEQ ID NO: 46988 - DNA, 41 bp, Artificial Sequence
  primer
gtaaaacgacggccagtgatgttcattacaacattgtgcag

SEQ ID NO: 46989 - DNA, 39 bp, Artificial Sequence
  primer
gtaaaacgacggccagttgtcccttatggtttcaagcac

SEQ ID NO: 46990 - DNA, 35 bp, Artificial Sequence
  primer
gtaaaacgacggccagttggagcaccaagggtctg

SEQ ID NO: 46991 - DNA, 21 bp, Artificial Sequence
  primer
agctagtgctgcatgttggag

SEQ ID NO: 46992 - DNA, 21 bp, Artificial Sequence
  primer
tggttagaggccgatggttag

SEQ ID NO: 46993 - DNA, 38 bp, Artificial Sequence
  primer
gtaaaacgacggccagtttagtgctcagcgtggttctc

SEQ ID NO: 46994 - DNA, 38 bp, Artificial Sequence
  primer
gtaaaacgacggccagtcctctgcctgaaatgttgttg

SEQ ID NO: 46995 - DNA, 21 bp, Artificial Sequence
  primer
acgtgtctgtaggcgtgtgag

SEQ ID NO: 46996 - DNA, 21 bp, Artificial Sequence
  primer
atccatggctgtctgatttcc

SEQ ID NO: 46997 - DNA, 37 bp, Artificial Sequence
  primer
gtaaaacgacggccagtagtggctttggtgcagaatc

SEQ ID NO: 46998 - DNA, 22 bp, Artificial Sequence
  primer
gcagcaaggagatctttgtgag

SEQ ID NO: 46999 - DNA, 38 bp, Artificial Sequence
  primer
gtaaaacgacggccagtacagaaactgggcctatgcag

SEQ ID NO: 47000 - DNA, 21 bp, Artificial Sequence
  primer
ctagaggctcctgtgctgttg

SEQ ID NO: 47001 - DNA, 38 bp, Artificial Sequence; identical to SEQ ID NO: 46999
  primer

SEQ ID NO: 47002 - DNA, 36 bp, Artificial Sequence
  primer
gtaaaacgacggccagtgatcctgtagccgggtgtg

SEQ ID NO: 47003 - DNA, 20 bp, Artificial Sequence
  primer
ctccaagcctgtgggaaatc

SEQ ID NO: 47004 - DNA, 40 bp, Artificial Sequence
  primer
gtaaaacgacggccagtcaacctgttgacatttaaggctc

SEQ ID NO: 47005 - DNA, 39 bp, Artificial Sequence
  primer
gtaaaacgacggccagttgaggcagtgatagttcagctc

SEQ ID NO: 47006 - DNA, 23 bp, Artificial Sequence
  primer
tgaatgtgtgatcaatgagcaag

SEQ ID NO: 47007 - DNA, 21 bp, Artificial Sequence
  primer
tgttctcccattgtgtcttgc

SEQ ID NO: 47008 - DNA, 39 bp, Artificial Sequence
  primer
gtaaaacgacggccagtgacaaacgccaaacatccttag

SEQ ID NO: 47009 - DNA, 39 bp, Artificial Sequence
  primer
gtaaaacgacggccagtttgtggaccaccatttctaacc

SEQ ID NO: 47010 - DNA, 21 bp, Artificial Sequence
  primer
taacccatcatttggaagtgg

SEQ ID NO: 47011 - DNA, 39 bp, Artificial Sequence
  primer
gtaaaacgacggccagttttcctttagagcagatggctg

SEQ ID NO: 47012 - DNA, 39 bp, Artificial Sequence
  primer
gtaaaacgacggccagttgacaattgccagatattggtg

SEQ ID NO: 47013 - DNA, 38 bp, Artificial Sequence
  primer
gtaaaacgacggccagtaaggcctggaattagcatgtg

SEQ ID NO: 47014 - DNA, 40 bp, Artificial Sequence
  primer
gtaaaacgacggccagttcctccaatcctatctttgtgtg

SEQ ID NO: 47015 - DNA, 21 bp, Artificial Sequence
  primer
aattgatcgaacctgggagac

SEQ ID NO: 47016 - DNA, 38 bp, Artificial Sequence
  primer
gtaaaacgacggccagtggaaccaggtttgagggtagg

SEQ ID NO: 47017 - DNA, 39 bp, Artificial Sequence
  primer
gtaaaacgacggccagtccaagcaaatatcatgattccc

SEQ ID NO: 47018 - DNA, 40 bp, Artificial Sequence
  primer
gtaaaacgacggccagtatatcaaaccatctcacagggac

SEQ ID NO: 47019 - DNA, 20 bp, Artificial Sequence
  primer
actcctggcctcaagcaatc

SEQ ID NO: 47020 - DNA, 38 bp, Artificial Sequence
  primer
gtaaaacgacggccagtggactttcttgggttcacagg

SEQ ID NO: 47021 - DNA, 22 bp, Artificial Sequence
  primer
gggatggaattactggattcac

SEQ ID NO: 47022 - DNA, 40 bp, Artificial Sequence
  primer
gtaaaacgacggccagttgaaatgctttctctagaatccg

SEQ ID NO: 47023 - DNA, 18 bp, Artificial Sequence
  primer
tttgggtagcatggtggg

SEQ ID NO: 47024 - DNA, 21 bp, Artificial Sequence
  primer
aatctctgccacagctgaaag

SEQ ID NO: 47025 - DNA, 38 bp, Artificial Sequence
  primer
gtaaaacgacggccagtttggtcagtctggaaatgctc

SEQ ID NO: 47026 - DNA, 38 bp, Artificial Sequence
  primer
gtaaaacgacggccagtatagcacaagctgctggaagg

SEQ ID NO: 47027 - DNA, 38 bp, Artificial Sequence
  primer
gtaaaacgacggccagtatgatgttgaattggctgtgc

SEQ ID NO: 47028 - DNA, 40 bp, Artificial Sequence
  primer
gtaaaacgacggccagtctgtctggcacatgatttaattg

SEQ ID NO: 47029 - DNA, 38 bp, Artificial Sequence
  primer
gtaaaacgacggccagttgcaagggagtaacactgacc

SEQ ID NO: 47030 - DNA, 38 bp, Artificial Sequence
  primer
gtaaaacgacggccagtgccatagcaaagccacagaag

SEQ ID NO: 47031 - DNA, 38 bp, Artificial Sequence
  primer
gtaaaacgacggccagtcctcaaagctgtcgtcagagc

SEQ ID NO: 47032 - DNA, 38 bp, Artificial Sequence
  primer
gtaaaacgacggccagttgcgagttgcataggaacaag

SEQ ID NO: 47033 - DNA, 21 bp, Artificial Sequence
  primer
ccaaggagctagaacagtggc

SEQ ID NO: 47034 - DNA, 37 bp, Artificial Sequence
  primer
gtaaaacgacggccagtggaaatgtttcagtgctgcc

SEQ ID NO: 47035 - DNA, 20 bp, Artificial Sequence
  primer
tggtaaacaccgcaatgcac

SEQ ID NO: 47036 - DNA, 38 bp, Artificial Sequence
  primer
gtaaaacgacggccagtcatgtgtgcctctctcacctc

SEQ ID NO: 47037 - DNA, 21 bp, Artificial Sequence
  primer
gtcagctgcctttattgatgc

SEQ ID NO: 47038 - DNA, 21 bp, Artificial Sequence
  primer
tgcccagagttacacagttgg

SEQ ID NO: 47039 - DNA, 38 bp, Artificial Sequence
  primer
gtaaaacgacggccagtgggctaagtctgggacagatg

SEQ ID NO: 47040 - DNA, 38 bp, Artificial Sequence
  primer
gtaaaacgacggccagtgaggatcagtaacacccggag

SEQ ID NO: 47041 - DNA, 39 bp, Artificial Sequence
  primer
gtaaaacgacggccagtgctaggcaaggaagagctagtg

SEQ ID NO: 47042 - DNA, 35 bp, Artificial Sequence
  primer
gtaaaacgacggccagtaggaggtgaatcggcagc

SEQ ID NO: 47043 - DNA, 21 bp, Artificial Sequence
  primer
aagtaagcaaagggtgttggc

SEQ ID NO: 47044 - DNA, 38 bp, Artificial Sequence
  primer
gtaaaacgacggccagtcagagtaacgattaccgcgtg

SEQ ID NO: 47045 - DNA, 21 bp, Artificial Sequence
  primer
ccatctacaagctcatcgtgc

SEQ ID NO: 47046 - DNA, 38 bp, Artificial Sequence
  primer
gtaaaacgacggccagtagagaaacagatgggctccag

SEQ ID NO: 47047 - DNA, 21 bp, Artificial Sequence
  primer
acattccgggagagctacatc

SEQ ID NO: 47048 - DNA, 39 bp, Artificial Sequence
  primer
gtaaaacgacggccagttctcaccgtctcactttcttcc

SEQ ID NO: 47049 - DNA, 20 bp, Artificial Sequence
  primer
gatcagagattaccgcgtcg

SEQ ID NO: 47050 - DNA, 21 bp, Artificial Sequence
  primer
cagtcaccaagaaggaaaccc

SEQ ID NO: 47051 - DNA, 41 bp, Artificial Sequence
  primer
gtaaaacgacggccagtaacagagaaatcaaatggaatgaa

SEQ ID NO: 47052 - DNA, 38 bp, Artificial Sequence
  primer
gtaaaacgacggccagttgctgctcaggactattctgc

SEQ ID NO: 47053 - DNA, 21 bp, Artificial Sequence
  primer
ttcagcatgtagggttcgttg

SEQ ID NO: 47054 - DNA, 21 bp, Artificial Sequence
  primer
tgctgtttggctcatttcttt

SEQ ID NO: 47055 - DNA, 20 bp, Artificial Sequence
  primer
gtgacggagtgagaccctgt

SEQ ID NO: 47056 - DNA, 39 bp, Artificial Sequence
  primer
gtaaaacgacggccagttgattctggtgttccagtttcc

SEQ ID NO: 47057 - DNA, 26 bp, Artificial Sequence
  primer
ttccaataaacagttaatcaaggaca

SEQ ID NO: 47058 - DNA, 42 bp, Artificial Sequence
  primer
gtaaaacgacggccagtttgttagtgaaagtgtgtcatttgc

SEQ ID NO: 47059 - DNA, 38 bp, Artificial Sequence
  primer
gtaaaacgacggccagtgcagatgtgtgatgctttgtc

SEQ ID NO: 47060 - DNA, 21 bp, Artificial Sequence
  primer
agcagattccttccggcatac

SEQ ID NO: 47061 - DNA, 40 bp, Artificial Sequence
  primer
gtaaaacgacggccagtttagccaggtagacaagctatcg

SEQ ID NO: 47062 - DNA, 38 bp, Artificial Sequence
  primer
gtaaaacgacggccagttctgtagaatgcggacagctc

SEQ ID NO: 47063 - DNA, 38 bp, Artificial Sequence
  primer
gtaaaacgacggccagtttcactttgctcctttggacc

SEQ ID NO: 47064 - DNA, 38 bp, Artificial Sequence
  primer
gtaaaacgacggccagtccaatgctggaaaggaaacag

SEQ ID NO: 47065 - DNA, 38 bp, Artificial Sequence
  primer
gtaaaacgacggccagtaggagctgagatgctgtgttg

SEQ ID NO: 47066 - DNA, 19 bp, Artificial Sequence
  primer
cgggattgcttaccacctg

SEQ ID NO: 47067 - DNA, 21 bp, Artificial Sequence
  primer
cagacagtgtggccttgactc

SEQ ID NO: 47068 - DNA, 21 bp, Artificial Sequence
  primer
tctgccatcagcagagttgag

SEQ ID NO: 47069 - DNA, 22 bp, Artificial Sequence
  primer
tggagaaactaatgcatctggc

SEQ ID NO: 47070 - DNA, 22 bp, Artificial Sequence
  primer
ggcaaaggttcactacaactgg

SEQ ID NO: 47071 - DNA, 39 bp, Artificial Sequence
  primer
gtaaaacgacggccagtgccacttgctggagtttcttac

SEQ ID NO: 47072 - DNA, 37 bp, Artificial Sequence
  primer
gtaaaacgacggccagtaaatctgcctgcctcagaag

SEQ ID NO: 47073 - DNA, 38 bp, Artificial Sequence
  primer
gtaaaacgacggccagttcttcgtccatcagaccagtg

SEQ ID NO: 47074 - DNA, 21 bp, Artificial Sequence
  primer
aatctctgacctggctgttcc

SEQ ID NO: 47075 - DNA, 22 bp, Artificial Sequence
  primer
ctgctgctagatcttccatgtg

SEQ ID NO: 47076 - DNA, 21 bp, Artificial Sequence
  primer
gacctcaatcctttggctttg

SEQ ID NO: 47077 - DNA, 40 bp, Artificial Sequence; identical to SEQ ID NO: 47061
  primer

SEQ ID NO: 47078 - DNA, 38 bp, Artificial Sequence
  primer
gtaaaacgacggccagtgaggtgcagaaactgggagag

SEQ ID NO: 47079 - DNA, 38 bp, Artificial Sequence
  primer
gtaaaacgacggccagttcagtacccatctgcttccag

SEQ ID NO: 47080 - DNA, 38 bp, Artificial Sequence
  primer
gtaaaacgacggccagtccgggatcttagagacagagc

SEQ ID NO: 47081 - DNA, 21 bp, Artificial Sequence
  primer
aaatcaaccctgagtccctgt

SEQ ID NO: 47082 - DNA, 38 bp, Artificial Sequence
  primer
gtaaaacgacggccagttaccatgggttatccctcacc

SEQ ID NO: 47083 - DNA, 36 bp, Artificial Sequence
  primer
gtaaaacgacggccagtcttctgggtggagcctgag

SEQ ID NO: 47084 - DNA, 38 bp, Artificial Sequence
  primer
gtaaaacgacggccagtactcacatccacaattcaggc

SEQ ID NO: 47085 - DNA, 37 bp, Artificial Sequence
  primer
gtaaaacgacggccagtgagtggtctctggcctcctc

SEQ ID NO: 47086 - DNA, 38 bp, Artificial Sequence
  primer
gtaaaacgacggccagtgggagttctcagatgctccag

SEQ ID NO: 47087 - DNA, 38 bp, Artificial Sequence
  primer
gtaaaacgacggccagtgacaagcctatctcaccaggc

SEQ ID NO: 47088 - DNA, 38 bp, Artificial Sequence
  primer
gtaaaacgacggccagtcggacctgtgccctctactac

SEQ ID NO: 47089 - DNA, 37 bp, Artificial Sequence
  primer
gtaaaacgacggccagttctggttgccatcttcttcg

SEQ ID NO: 47090 - DNA, 38 bp, Artificial Sequence
  primer
gtaaaacgacggccagtctggtggccttcttcctttac

SEQ ID NO: 47091 - DNA, 37 bp, Artificial Sequence
  primer
gtaaaacgacggccagtgctacctgctgctggtctcc

SEQ ID NO: 47092 - DNA, 19 bp, Artificial Sequence
  primer
cacctcgcgtctgctcttc

SEQ ID NO: 47093 - DNA, 38 bp, Artificial Sequence
  primer
gtaaaacgacggccagtgttccgctacatctggatctg

SEQ ID NO: 47094 - DNA, 37 bp, Artificial Sequence
  primer
gtaaaacgacggccagtagtatcgccagctgttcctg

SEQ ID NO: 47095 - DNA, 21 bp, Artificial Sequence
  primer
atcagagcttcttcgacaccc

SEQ ID NO: 47096 - DNA, 21 bp, Artificial Sequence
  primer
acaattccagaccaacttccg

SEQ ID NO: 47097 - DNA, 24 bp, Artificial Sequence
  primer
tcaactactgcatctcctatcacc

SEQ ID NO: 47098 - DNA, 21 bp, Artificial Sequence
  primer
acagtgctgctctatcgcaag

SEQ ID NO: 47099 - DNA, 38 bp, Artificial Sequence
  primer
gtaaaacgacggccagtaagaactgtgggcagatcctc

SEQ ID NO: 47100 - DNA, 20 bp, Artificial Sequence
  primer
caggcagtcttcagccagtg

SEQ ID NO: 47101 - DNA, 21 bp, Artificial Sequence
  primer
gatgagacctgcctaagcacc

SEQ ID NO: 47102 - DNA, 38 bp, Artificial Sequence
  primer
gtaaaacgacggccagtctttgtgtgcagagggaggag

SEQ ID NO: 47103 - DNA, 36 bp, Artificial Sequence
  primer
gtaaaacgacggccagtcccagtcacaaacgcttcc

SEQ ID NO: 47104 - DNA, 39 bp, Artificial Sequence
  primer
gtaaaacgacggccagtttcacatcaaatcttcccttcc

SEQ ID NO: 47105 - DNA, 38 bp, Artificial Sequence
  primer
gtaaaacgacggccagtgaccctgactgccttgcttac

SEQ ID NO: 47106 - DNA, 21 bp, Artificial Sequence
  primer
accaagtgtctttgaggcagg

SEQ ID NO: 47107 - DNA, 38 bp, Artificial Sequence
  primer
gtaaaacgacggccagtgggccaagtactgtgttaccc

SEQ ID NO: 47108 - DNA, 38 bp, Artificial Sequence
  primer
gtaaaacgacggccagtctaccctgtgaacgctgtctg

SEQ ID NO: 47109 - DNA, 38 bp, Artificial Sequence
  primer
gtaaaacgacggccagtaacgaaatgtcttgaggaggc

SEQ ID NO: 47110 - DNA, 41 bp, Artificial Sequence
  primer
gtaaaacgacggccagtacttacatcagagagcaggaactg

SEQ ID NO: 47111 - DNA, 38 bp, Artificial Sequence
  primer
gtaaaacgacggccagtctgtggatcagcctgtactgc

SEQ ID NO: 47112 - DNA, 38 bp, Artificial Sequence
  primer
gtaaaacgacggccagtgccataacgaatgctggaaac

SEQ ID NO: 47113 - DNA, 39 bp, Artificial Sequence
  primer
gtaaaacgacggccagttgtgctgcatactgtaactgcc

SEQ ID NO: 47114 - DNA, 21 bp, Artificial Sequence
  primer
caaatgccagttcccttcttc

SEQ ID NO: 47115 - DNA, 21 bp, Artificial Sequence
  primer
agcaccaggccaagttagaag

SEQ ID NO: 47116 - DNA, 21 bp, Artificial Sequence
  primer
agtgtcaagtgctgggcatac

SEQ ID NO: 47117 - DNA, 37 bp, Artificial Sequence
  primer
gtaaaacgacggccagtgcaaaccataggcctgcttc

SEQ ID NO: 47118 - DNA, 19 bp, Artificial Sequence
  primer
gagcttggccttggatgag

SEQ ID NO: 47119 - DNA, 38 bp, Artificial Sequence
  primer
gtaaaacgacggccagtacctcaggcagctttgttctc

SEQ ID NO: 47120 - DNA, 22 bp, Artificial Sequence
  primer
tttagtcatctgggttatcggg

SEQ ID NO: 47121 - DNA, 22 bp, Artificial Sequence
  primer
ttgcagttctagggacaagacc

SEQ ID NO: 47122 - DNA, 37 bp, Artificial Sequence
  primer
gtaaaacgacggccagtgggagcgatgtgactctcag

SEQ ID NO: 47123 - DNA, 36 bp, Artificial Sequence
  primer
gtaaaacgacggccagtctcagtccgagagcaaccc

SEQ ID NO: 47124 - DNA, 38 bp, Artificial Sequence
  primer
gtaaaacgacggccagttcaagtgatcctcccatcttg

SEQ ID NO: 47125 - DNA, 41 bp, Artificial Sequence
  primer
gtaaaacgacggccagttgatcattgcttgtaatgttaccg

SEQ ID NO: 47126 - DNA, 21 bp, Artificial Sequence
  primer
ggaggcaagggaaagtgatac

SEQ ID NO: 47127 - DNA, 38 bp, Artificial Sequence
  primer
gtaaaacgacggccagtgcaaagctgaggttgtgacag

SEQ ID NO: 47128 - DNA, 38 bp, Artificial Sequence
  primer
gtaaaacgacggccagttgcgaattggctatttcagag

SEQ ID NO: 47129 - DNA, 21 bp, Artificial Sequence
  primer
ggaaaccaatttcacctttcc

SEQ ID NO: 47130 - DNA, 38 bp, Artificial Sequence
  primer
gtaaaacgacggccagttcagcaagtgttgatcccatc

SEQ ID NO: 47131 - DNA, 38 bp, Artificial Sequence
  primer
gtaaaacgacggccagttaagacatgattccgtggtcc

SEQ ID NO: 47132 - DNA, 36 bp, Artificial Sequence
  primer
gtaaaacgacggccagtaaaccagagtggcaatggg

SEQ ID NO: 47133 - DNA, 22 bp, Artificial Sequence
  primer
gtgtgatggcaaatatggtagg

SEQ ID NO: 47134 - DNA, 36 bp, Artificial Sequence
  primer
gtaaaacgacggccagtgagatagggcccggaattg

SEQ ID NO: 47135 - DNA, 38 bp, Artificial Sequence
  primer
gtaaaacgacggccagtgggcagctaagggtctgagtc

SEQ ID NO: 47136 - DNA, 21 bp, Artificial Sequence
  primer
ccttcgacagactcatccctc

SEQ ID NO: 47137 - DNA, 38 bp, Artificial Sequence
  primer
gtaaaacgacggccagtaagctagtgtcctgggtggac

SEQ ID NO: 47138 - DNA, 21 bp, Artificial Sequence
  primer
cagtgctgggtgcagacttag

SEQ ID NO: 47139 - DNA, 21 bp, Artificial Sequence
  primer
agactcgttcagaatcgtggg

SEQ ID NO: 47140 - DNA, 19 bp, Artificial Sequence
  primer
agatgatccgcccatcttg

SEQ ID NO: 47141 - DNA, 37 bp, Artificial Sequence
  primer
gtaaaacgacggccagtgtggtctagccctgctccag

SEQ ID NO: 47142 - DNA, 21 bp, Artificial Sequence
  primer
ggctaaagagccttcgatgag

SEQ ID NO: 47143 - DNA, 38 bp, Artificial Sequence
  primer
gtaaaacgacggccagtaactgagcctcaaatccaacc

SEQ ID NO: 47144 - DNA, 37 bp, Artificial Sequence
  primer
gtaaaacgacggccagtgggaaactcactgtgggagg

SEQ ID NO: 47145 - DNA, 37 bp, Artificial Sequence
  primer
gtaaaacgacggccagtaagtgccatcacctgtggag

SEQ ID NO: 47146 - DNA, 38 bp, Artificial Sequence
  primer
gtaaaacgacggccagtcagggtaatgtggaacaaccc

SEQ ID NO: 47147 - DNA, 35 bp, Artificial Sequence
  primer
gtaaaacgacggccagtagcggcgataagaggtgg

SEQ ID NO: 47148 - DNA, 24 bp, Artificial Sequence
  primer
ttggaaatattctcaaactttggc

SEQ ID NO: 47149 - DNA, 22 bp, Artificial Sequence
  primer
cagcctccttacaatccaagtg

SEQ ID NO: 47150 - DNA, 39 bp, Artificial Sequence
  primer
gtaaaacgacggccagttcaatttaaagttcagatggcg

SEQ ID NO: 47151 - DNA, 21 bp, Artificial Sequence
  primer
tggagggaaatagaccagtcc

SEQ ID NO: 47152 - DNA, 26 bp, Artificial Sequence
  primer
tgggaacctatgtatgtagaaacaac

SEQ ID NO: 47153 - DNA, 21 bp, Artificial Sequence
  primer
tttggctttgtgaccactttc

SEQ ID NO: 47154 - DNA, 38 bp, Artificial Sequence
  primer
gtaaaacgacggccagtaggtggagaagccctaaatgg

SEQ ID NO: 47155 - DNA, 21 bp, Artificial Sequence
  primer
cctccataagcagaatcggag

SEQ ID NO: 47156 - DNA, 35 bp, Artificial Sequence
  primer
gtaaaacgacggccagtaaatcgcattgcgcagac

SEQ ID NO: 47157 - DNA, 21 bp, Artificial Sequence
  primer
aaatccatttcctacctgccc

SEQ ID NO: 47158 - DNA, 38 bp, Artificial Sequence
  primer
gtaaaacgacggccagttctctctctttcccttggagg

SEQ ID NO: 47159 - DNA, 38 bp, Artificial Sequence
  primer
gtaaaacgacggccagtttgcagacctatgccagtttg

SEQ ID NO: 47160 - DNA, 21 bp, Artificial Sequence
  primer
agctattcaggaaggcagtgg

SEQ ID NO: 47161 - DNA, 22 bp, Artificial Sequence
  primer
tgagtactcccaactgtccctg

SEQ ID NO: 47162 - DNA, 38 bp, Artificial Sequence
  primer
gtaaaacgacggccagtggagatgggttagctgtcctg

SEQ ID NO: 47163 - DNA, 22 bp, Artificial Sequence
  primer
ggtggctcagatgaaggataac

SEQ ID NO: 47164 - DNA, 40 bp, Artificial Sequence
  primer
gtaaaacgacggccagtaggctgaagacataatgagcttg

SEQ ID NO: 47165 - DNA, 40 bp, Artificial Sequence
  primer
gtaaaacgacggccagttgttgtcctcctttactctggtg

SEQ ID NO: 47166 - DNA, 38 bp, Artificial Sequence
  primer
gtaaaacgacggccagtgcacatcctgagcaaaggtaa

SEQ ID NO: 47167 - DNA, 38 bp, Artificial Sequence
  primer
gtaaaacgacggccagtcctgctgagaatacaccaggg

SEQ ID NO: 47168 - DNA, 21 bp, Artificial Sequence
  primer
gatggtggctttagacttgcc

SEQ ID NO: 47169 - DNA, 38 bp, Artificial Sequence
  primer
gtaaaacgacggccagtctttcttggtgccttgctacc

SEQ ID NO: 47170 - DNA, 38 bp, Artificial Sequence
  primer
gtaaaacgacggccagtccagatttccttctgggagag

SEQ ID NO: 47171 - DNA, 20 bp, Artificial Sequence
  primer
caagctttgggagttgttcg

SEQ ID NO: 47172 - DNA, 38 bp, Artificial Sequence
  primer
gtaaaacgacggccagtccagatactggaaacaccctc

SEQ ID NO: 47173 - DNA, 22 bp, Artificial Sequence
  primer
tgggtacgtcttactgcagagc

SEQ ID NO: 47174 - DNA, 46 bp, Artificial Sequence
  primer
gtaaaacgacggccagttgttgatttcatcatacatacttattgga

SEQ ID NO: 47175 - DNA, 43 bp, Artificial Sequence
  primer
gtaaaacgacggccagttgacaaactcttatagggtagagtgg

SEQ ID NO: 47176 - DNA, 38 bp, Artificial Sequence
  primer
gtaaaacgacggccagtatctccagtctccatggcatt

SEQ ID NO: 47177 - DNA, 23 bp, Artificial Sequence
  primer
gggtgtttaactcctggtatgtt

SEQ ID NO: 47178 - DNA, 25 bp, Artificial Sequence
  primer
gggtgataatataaatcgcaatgtg

SEQ ID NO: 47179 - DNA, 21 bp, Artificial Sequence
  primer
ccatgtggtactcactgcttg

SEQ ID NO: 47180 - DNA, 40 bp, Artificial Sequence
  primer
gtaaaacgacggccagtccaaagagctatgaaatcccaac

SEQ ID NO: 47181 - DNA, 24 bp, Artificial Sequence
  primer
caggtgatttgctaataggacgaa

SEQ ID NO: 47182 - DNA, 20 bp, Artificial Sequence
  primer
tcatccatgttcccatgaaa

SEQ ID NO: 47183 - DNA, 21 bp, Artificial Sequence
  primer
ctccagtagttgtggtgggtg

SEQ ID NO: 47184 - DNA, 42 bp, Artificial Sequence
  primer
gtaaaacgacggccagttcctgggtttatacactatttgcac

SEQ ID NO: 47185 - DNA, 43 bp, Artificial Sequence
  primer
gtaaaacgacggccagttctcttacttgaactttccttcaatg

SEQ ID NO: 47186 - DNA, 21 bp, Artificial Sequence
  primer
gtcagagggcttgcaagtagg

SEQ ID NO: 47187 - DNA, 21 bp, Artificial Sequence
  primer
ataatttggcctttgtgggtg

SEQ ID NO: 47188 - DNA, 21 bp, Artificial Sequence
  primer
ccttagctctgcacctccttt

SEQ ID NO: 47189 - DNA, 21 bp, Artificial Sequence
  primer
ccaggagtttgagaccagctt

SEQ ID NO: 47190 - DNA, 38 bp, Artificial Sequence
  primer
gtaaaacgacggccagtcccaggtttcacatgactctg

SEQ ID NO: 47191 - DNA, 37 bp, Artificial Sequence
  primer
gtaaaacgacggccagtgtcagctggtcctggagatg

SEQ ID NO: 47192 - DNA, 37 bp, Artificial Sequence
  primer
gtaaaacgacggccagtgggtaggtgaacttgggacc

SEQ ID NO: 47193 - DNA, 37 bp, Artificial Sequence
  primer
gtaaaacgacggccagtaagaatggaagtccggatgg

SEQ ID NO: 47194 - DNA, 21 bp, Artificial Sequence
  primer
agtgagatctggacggtcagg

SEQ ID NO: 47195 - DNA, 37 bp, Artificial Sequence
  primer
gtaaaacgacggccagtagaagggtgagggtcactcg

SEQ ID NO: 47196 - DNA, 38 bp, Artificial Sequence
  primer
gtaaaacgacggccagttgaggcttaaacgaacgaacc

SEQ ID NO: 47197 - DNA, 19 bp, Artificial Sequence
  primer
cacacacacctgcacatgg

SEQ ID NO: 47198 - DNA, 21 bp, Artificial Sequence
  primer
cagcctggatgacagtgagac

SEQ ID NO: 47199 - DNA, 20 bp, Artificial Sequence
  primer
cgattccaagaatgccacag

SEQ ID NO: 47200 - DNA, 37 bp, Artificial Sequence
  primer
gtaaaacgacggccagtcgcagaagataccgtggaag

SEQ ID NO: 47201 - DNA, 38 bp, Artificial Sequence
  primer
gtaaaacgacggccagttagaaagggctgatttggtgg

SEQ ID NO: 47202 - DNA, 36 bp, Artificial Sequence
  primer
gtaaaacgacggccagtcggcagcgtcactgttatc

SEQ ID NO: 47203 - DNA, 37 bp, Artificial Sequence
  primer
gtaaaacgacggccagtgtgccaggagagagggtgtc

SEQ ID NO: 47204 - DNA, 21 bp, Artificial Sequence
  primer
gagcaggacatgaatgactgg

SEQ ID NO: 47205 - DNA, 37 bp, Artificial Sequence
  primer
gtaaaacgacggccagtcagaaccacaggaggacacg

SEQ ID NO: 47206 - DNA, 38 bp, Artificial Sequence
  primer
gtaaaacgacggccagtttcagacggaaagccagagtc

SEQ ID NO: 47207 - DNA, 37 bp, Artificial Sequence
  primer
gtaaaacgacggccagtcttaggagtgcgagtgcctg

SEQ ID NO: 47208 - DNA, 19 bp, Artificial Sequence
  primer
ggaccggtacatgtggagc

SEQ ID NO: 47209 - DNA, 39 bp, Artificial Sequence
  primer
gtaaaacgacggccagtagaatgtttacatgcacggtcc

SEQ ID NO: 47210 - DNA, 19 bp, Artificial Sequence
  primer
ctttcctcctcctggctcc

SEQ ID NO: 47211 - DNA, 36 bp, Artificial Sequence
  primer
gtaaaacgacggccagtgctaggcccatttctgctg

SEQ ID NO: 47212 - DNA, 38 bp, Artificial Sequence
  primer
gtaaaacgacggccagtgctgacaccaggctacacatc

SEQ ID NO: 47213 - DNA, 37 bp, Artificial Sequence
  primer
gtaaaacgacggccagtctgagtgtggagaagcggag

SEQ ID NO: 47214 - DNA, 19 bp, Artificial Sequence
  primer
acaacgtgtgccgagtgtc

SEQ ID NO: 47215 - DNA, 38 bp, Artificial Sequence
  primer
gtaaaacgacggccagtttgggctgtgttatcaccttg

SEQ ID NO: 47216 - DNA, 38 bp, Artificial Sequence
  primer
gtaaaacgacggccagtctaaaggaggatgaagggcag

SEQ ID NO: 47217 - DNA, 38 bp, Artificial Sequence
  primer
gtaaaacgacggccagtatagcataggtgctgggaacc

SEQ ID NO: 47218 - DNA, 38 bp, Artificial Sequence
  primer
gtaaaacgacggccagtggatcccagcatcagtaaagg

SEQ ID NO: 47219 - DNA, 24 bp, Artificial Sequence
  primer
tctgggtcctcctttctatattcc

SEQ ID NO: 47220 - DNA, 21 bp, Artificial Sequence
  primer
atctgctgatgagtggatggg

SEQ ID NO: 47221 - DNA, 38 bp, Artificial Sequence
  primer
gtaaaacgacggccagttcgttccttcccttgaatagc

SEQ ID NO: 47222 - DNA, 21 bp, Artificial Sequence
  primer
tctccttcagaacttggaggc

SEQ ID NO: 47223 - DNA, 38 bp, Artificial Sequence
  primer
gtaaaacgacggccagtctcccacaaggaaggctaatc

SEQ ID NO: 47224 - DNA, 38 bp, Artificial Sequence
  primer
gtaaaacgacggccagtggatctcagcatcaatccgac

SEQ ID NO: 47225 - DNA, 38 bp, Artificial Sequence
  primer
gtaaaacgacggccagttggcctagcttaaatgccatc

SEQ ID NO: 47226 - DNA, 37 bp, Artificial Sequence
  primer
gtaaaacgacggccagtaggaccctcagaagtcctgg

SEQ ID NO: 47227 - DNA, 21 bp, Artificial Sequence
  primer
tgaactctttacccagacccg

SEQ ID NO: 47228 - DNA, 38 bp, Artificial Sequence
  primer
gtaaaacgacggccagtctccagatttgaacccacacc

SEQ ID NO: 47229 - DNA, 38 bp, Artificial Sequence
  primer
gtaaaacgacggccagtatgcgtaacagggcttgacag

SEQ ID NO: 47230 - DNA, 29 bp, Artificial Sequence
  primer
cgatttccagattactatttcaatatacc

SEQ ID NO: 47231 - DNA, 40 bp, Artificial Sequence
  primer
gtaaaacgacggccagtactgcttatgcttaatgtccacc

SEQ ID NO: 47232 - DNA, 38 bp, Artificial Sequence
  primer
gtaaaacgacggccagtaatctgactttgccttgcctc

SEQ ID NO: 47233 - DNA, 19 bp, Artificial Sequence
  primer
ctaacccgagcacctgacc

SEQ ID NO: 47234 - DNA, 21 bp, Artificial Sequence
  primer
tgagaggaaataggcagcaaa

SEQ ID NO: 47235 - DNA, 39 bp, Artificial Sequence
  primer
gtaaaacgacggccagtggctctgatttgaagtgagtcc

SEQ ID NO: 47236 - DNA, 20 bp, Artificial Sequence
  primer
gcacctggcctcgatttaag

SEQ ID NO: 47237 - DNA, 39 bp, Artificial Sequence
  primer
gtaaaacgacggccagtttgaacctatgagctgaactgc

SEQ ID NO: 47238 - DNA, 26 bp, Artificial Sequence
  primer
ttaggttcatccatttaataattccc

SEQ ID NO: 47239 - DNA, 38 bp, Artificial Sequence
  primer
gtaaaacgacggccagttgcctacaagaaacctcaccc

SEQ ID NO: 47240 - DNA, 23 bp, Artificial Sequence
  primer
ttgctgttataaagagtgccctg

SEQ ID NO: 47241 - DNA, 22 bp, Artificial Sequence
  primer
tcagacttatccaaggtttggg

SEQ ID NO: 47242 - DNA, 25 bp, Artificial Sequence
  primer
tgaccacaaactgataaatacttgg

SEQ ID NO: 47243 - DNA, 26 bp, Artificial Sequence
  primer
tgtgaacatgtatagtttcatttgcc

SEQ ID NO: 47244 - DNA, 40 bp, Artificial Sequence
  primer
gtaaaacgacggccagtttggaacagagtctgaggatcac

SEQ ID NO: 47245 - DNA, 38 bp, Artificial Sequence
  primer
gtaaaacgacggccagtagacctgggtttgaattctgg

SEQ ID NO: 47246 - DNA, 39 bp, Artificial Sequence
  primer
gtaaaacgacggccagttcctggatgtgatgcctagttc

SEQ ID NO: 47247 - DNA, 40 bp, Artificial Sequence
  primer
gtaaaacgacggccagtgcacaatcgaatttgttaacctg

SEQ ID NO: 47248 - DNA, 40 bp, Artificial Sequence
  primer
gtaaaacgacggccagtgctcttagaacagggcctaactc

SEQ ID NO: 47249 - DNA, 38 bp, Artificial Sequence
  primer
gtaaaacgacggccagtcttccaggttcagtttcaggg

SEQ ID NO: 47250 - DNA, 37 bp, Artificial Sequence
  primer
gtaaaacgacggccagtagtcccactatagcagcccg

SEQ ID NO: 47251 - DNA, 21 bp, Artificial Sequence
  primer
cagagaccagggttctcatcc

SEQ ID NO: 47252 - DNA, 38 bp, Artificial Sequence
  primer
gtaaaacgacggccagttccctcagaggaagggttagg

SEQ ID NO: 47253 - DNA, 38 bp, Artificial Sequence
  primer
gtaaaacgacggccagttagactcctggcctctatggg

SEQ ID NO: 47254 - DNA, 38 bp, Artificial Sequence
  primer
gtaaaacgacggccagttgcaattctgcactgtaaggg

SEQ ID NO: 47255 - DNA, 38 bp, Artificial Sequence
  primer
gtaaaacgacggccagtgagaggaaggtgggtgacttg

SEQ ID NO: 47256 - DNA, 22 bp, Artificial Sequence
  primer
cagataagagggaggtgacagc

SEQ ID NO: 47257 - DNA, 21 bp, Artificial Sequence
  primer
tgctggtccatctaaggaagg

SEQ ID NO: 47258 - DNA, 20 bp, Artificial Sequence
  primer
cctgacctcaagtgatccgt

SEQ ID NO: 47259 - DNA, 20 bp, Artificial Sequence
  primer
gacaaaggcatggtggagag

SEQ ID NO: 47260 - DNA, 36 bp, Artificial Sequence
  primer
gtaaaacgacggccagtgacaggacacgggaagagg

SEQ ID NO: 47261 - DNA, 38 bp, Artificial Sequence
  primer
gtaaaacgacggccagtggtacacacagctgttcctgg

SEQ ID NO: 47262 - DNA, 38 bp, Artificial Sequence
  primer
gtaaaacgacggccagtatctgacccttagggcacctt

SEQ ID NO: 47263 - DNA, 37 bp, Artificial Sequence
  primer
gtaaaacgacggccagtctgcagacccaagaggtgag

SEQ ID NO: 47264 - DNA, 22 bp, Artificial Sequence
  primer
aagagcctctccaagaaatggt

SEQ ID NO: 47265 - DNA, 38 bp, Artificial Sequence
  primer
gtaaaacgacggccagttaaatacgggatgtgctgtgc

SEQ ID NO: 47266 - DNA, 38 bp, Artificial Sequence
  primer
gtaaaacgacggccagttgatccactggaaacagaccc

SEQ ID NO: 47267 - DNA, 18 bp, Artificial Sequence
  primer
cgctccctcgtagccaac

SEQ ID NO: 47268 - DNA, 21 bp, Artificial Sequence
  primer
ctctcgctgatcttctgcaac

SEQ ID NO: 47269 - DNA, 21 bp, Artificial Sequence
  primer
ctccatcgccctgtacaattc

SEQ ID NO: 47270 - DNA, 38 bp, Artificial Sequence
  primer
gtaaaacgacggccagtaagccactggcattgttatcc

SEQ ID NO: 47271 - DNA, 38 bp, Artificial Sequence
  primer
gtaaaacgacggccagtaatcacctggtggtggatgag

SEQ ID NO: 47272 - DNA, 20 bp, Artificial Sequence
  primer
cgtctcctacagcaacctgg

SEQ ID NO: 47273 - DNA, 21 bp, Artificial Sequence
  primer
cctccaacctgagatggtgtc

SEQ ID NO: 47274 - DNA, 23 bp, Artificial Sequence
  primer
cacctagtttctctggagtgacg

SEQ ID NO: 47275 - DNA, 21 bp, Artificial Sequence
  primer
ttcccatgaagaggcaatagg

SEQ ID NO: 47276 - DNA, 23 bp, Artificial Sequence
  primer
cctgcaaacctattcctatttgg

SEQ ID NO: 47277 - DNA, 26 bp, Artificial Sequence
  primer
aaggaagatactatcgttgatggaac

SEQ ID NO: 47278 - DNA, 23 bp, Artificial Sequence
  primer
cagagggctagtttacacagtgc

SEQ ID NO: 47279 - DNA, 20 bp, Artificial Sequence
  primer
ctgcagcctggtgacagagt

SEQ ID NO: 47280 - DNA, 36 bp, Artificial Sequence
  primer
gtaaaacgacggccagtgcttggcaactgccactta

SEQ ID NO: 47281 - DNA, 22 bp, Artificial Sequence
  primer
cagaccatttggtccctatgtg

SEQ ID NO: 47282 - DNA, 44 bp, Artificial Sequence
  primer
gtaaaacgacggccagttgcagaaggcttatttctacatttaac

SEQ ID NO: 47283 - DNA, 21 bp, Artificial Sequence
  primer
tacccatgttcattgcctcag

SEQ ID NO: 47284 - DNA, 22 bp, Artificial Sequence
  primer
cccacctttctccatgttatcc

SEQ ID NO: 47285 - DNA, 38 bp, Artificial Sequence
  primer
gtaaaacgacggccagtttacaaatccaggtcgcagtc

SEQ ID NO: 47286 - DNA, 21 bp, Artificial Sequence
  primer
aacagagtgagaccctgcctc

SEQ ID NO: 47287 - DNA, 21 bp, Artificial Sequence
  primer
cccactctgttggtaaccagg

SEQ ID NO: 47288 - DNA, 38 bp, Artificial Sequence
  primer
gtaaaacgacggccagtacccacccttgtactctaccg

SEQ ID NO: 47289 - DNA, 37 bp, Artificial Sequence
  primer
gtaaaacgacggccagttcctagcaagggccagactc

SEQ ID NO: 47290 - DNA, 39 bp, Artificial Sequence
  primer
gtaaaacgacggccagttccaggtacacaggtccttacc

SEQ ID NO: 47291 - DNA, 38 bp, Artificial Sequence
  primer
gtaaaacgacggccagtagagaagcagggcagctacag

SEQ ID NO: 47292 - DNA, 18 bp, Artificial Sequence
  primer
ctgcacaggaagccgaag

SEQ ID NO: 47293 - DNA, 38 bp, Artificial Sequence
  primer
gtaaaacgacggccagtgccagtctcttccacagaagg

SEQ ID NO: 47294 - DNA, 38 bp, Artificial Sequence
  primer
gtaaaacgacggccagtagtgaaggtcaggacaaaggc

SEQ ID NO: 47295 - DNA, 21 bp, Artificial Sequence
  primer
agctctgtggccttcatgttc

SEQ ID NO: 47296 - DNA, 36 bp, Artificial Sequence
  primer
gtaaaacgacggccagtgagctcaggctccagcttc

SEQ ID NO: 47297 - DNA, 21 bp, Artificial Sequence
  primer
gatgctatttctggctccgtc

SEQ ID NO: 47298 - DNA, 21 bp, Artificial Sequence
  primer
agagttctggtgtcacctggg

SEQ ID NO: 47299 - DNA, 38 bp, Artificial Sequence
  primer
gtaaaacgacggccagtcagagcagaagcactgtttgg

SEQ ID NO: 47300 - DNA, 38 bp, Artificial Sequence
  primer
gtaaaacgacggccagtctcttccagaaaggctccacc

SEQ ID NO: 47301 - DNA, 38 bp, Artificial Sequence
  primer
gtaaaacgacggccagtagacttgccgacctgtacgac

SEQ ID NO: 47302 - DNA, 21 bp, Artificial Sequence
  primer
gtcctgtagctgtgtggatgc

SEQ ID NO: 47303 - DNA, 38 bp, Artificial Sequence
  primer
gtaaaacgacggccagtaaagttgtgcattacgccaag

SEQ ID NO: 47304 - DNA, 38 bp, Artificial Sequence
  primer
gtaaaacgacggccagtctgctacctggagctattccc

SEQ ID NO: 47305 - DNA, 19 bp, Artificial Sequence
  primer
cctgacccaggacttggag

SEQ ID NO: 47306 - DNA, 22 bp, Artificial Sequence
  primer
tttaccacctggagaagcagac

SEQ ID NO: 47307 - DNA, 36 bp, Artificial Sequence
  primer
gtaaaacgacggccagtgcagtgctgtctgtgcctc

SEQ ID NO: 47308 - DNA, 37 bp, Artificial Sequence
  primer
gtaaaacgacggccagtccagctctccaagtacccag

SEQ ID NO: 47309 - DNA, 20 bp, Artificial Sequence
  primer
gacgcccgactctttagtgg

SEQ ID NO: 47310 - DNA, 39 bp, Artificial Sequence
  primer
gtaaaacgacggccagtgcgacagaataagacttcgtcc

SEQ ID NO: 47311 - DNA, 37 bp, Artificial Sequence
  primer
gtaaaacgacggccagtaactcagactggagggagcc

SEQ ID NO: 47312 - DNA, 36 bp, Artificial Sequence
  primer
gtaaaacgacggccagtcagttgtcctggagccacc

SEQ ID NO: 47313 - DNA, 38 bp, Artificial Sequence
  primer
gtaaaacgacggccagtcaagcctgaggtctgttcagg

SEQ ID NO: 47314 - DNA, 21 bp, Artificial Sequence
  primer
ctcagcttgtgagtagcagcc

SEQ ID NO: 47315 - DNA, 39 bp, Artificial Sequence
  primer
gtaaaacgacggccagttgcctctgacaggtgagtaagg

SEQ ID NO: 47316 - DNA, 38 bp, Artificial Sequence
  primer
gtaaaacgacggccagtctgtccaaactaaaggtgggc

SEQ ID NO: 47317 - DNA, 21 bp, Artificial Sequence
  primer
gcctccttcatctgattcacc

SEQ ID NO: 47318 - DNA, 21 bp, Artificial Sequence
  primer
accttgcaccttccatctgac

SEQ ID NO: 47319 - DNA, 21 bp, Artificial Sequence
  primer
tggctaggttggataaggctg

SEQ ID NO: 47320 - DNA, 36 bp, Artificial Sequence
  primer
gtaaaacgacggccagtagatggtgttggtggctcc

SEQ ID NO: 47321 - DNA, 21 bp, Artificial Sequence
  primer
tacctgccttctcagtagccg

SEQ ID NO: 47322 - DNA, 20 bp, Artificial Sequence
  primer
agatctgggcatcaccttcc

SEQ ID NO: 47323 - DNA, 38 bp, Artificial Sequence
  primer
gtaaaacgacggccagtaaatgtgaatggcatggtgtc

SEQ ID NO: 47324 - DNA, 38 bp, Artificial Sequence
  primer
gtaaaacgacggccagtggtctcacctcttggagttgc

SEQ ID NO: 47325 - DNA, 38 bp, Artificial Sequence
  primer
gtaaaacgacggccagtcagaactcagctctcctgctg

SEQ ID NO: 47326 - DNA, 38 bp, Artificial Sequence
  primer
gtaaaacgacggccagtctcagtttccctgttgggatg

SEQ ID NO: 47327 - DNA, 21 bp, Artificial Sequence
  primer
ggcaagtatagggaagggctc

SEQ ID NO: 47328 - DNA, 38 bp, Artificial Sequence
  primer
gtaaaacgacggccagtcagtacacagagaacgggcag

SEQ ID NO: 47329 - DNA, 21 bp, Artificial Sequence
  primer
tgaggacttgcagtgtaaggg

SEQ ID NO: 47330 - DNA, 38 bp, Artificial Sequence
  primer
gtaaaacgacggccagttgtgggtctgtcttctccctg

SEQ ID NO: 47331 - DNA, 37 bp, Artificial Sequence
  primer
gtaaaacgacggccagtgtcctgaacgttcgttgctc

SEQ ID NO: 47332 - DNA, 21 bp, Artificial Sequence
  primer
gggtagatttgaacccaggtg

SEQ ID NO: 47333 - DNA, 38 bp, Artificial Sequence
  primer
gtaaaacgacggccagtgaattcatgcaatctgccctc

SEQ ID NO: 47334 - DNA, 37 bp, Artificial Sequence
  primer
gtaaaacgacggccagtgaacctggctgtgaggtctg

SEQ ID NO: 47335 - DNA, 38 bp, Artificial Sequence
  primer
gtaaaacgacggccagtcatggtgctgtctagtgaccc

SEQ ID NO: 47336 - DNA, 21 bp, Artificial Sequence
  primer
tactgctctcaggccatgttc

SEQ ID NO: 47337 - DNA, 21 bp, Artificial Sequence
  primer
agaggcccaggcactatcaac

SEQ ID NO: 47338 - DNA, 21 bp, Artificial Sequence
  primer
aagacgagacatgaatcaggg

SEQ ID NO: 47339 - DNA, 38 bp, Artificial Sequence
  primer
gtaaaacgacggccagtttcaactccagcacacagtcc

SEQ ID NO: 47340 - DNA, 21 bp, Artificial Sequence
  primer
ctcgcgtgggaagaaatagac

SEQ ID NO: 47341 - DNA, 21 bp, Artificial Sequence
  primer
agcaacgaggagaaatcaagg

SEQ ID NO: 47342 - DNA, 21 bp, Artificial Sequence
  primer
tctgtacccaagactccgctc

SEQ ID NO: 47343 - DNA, 38 bp, Artificial Sequence
  primer
gtaaaacgacggccagtatctcccaaagtgacagaggg

SEQ ID NO: 47344 - DNA, 21 bp, Artificial Sequence
  primer
aagtgtctggtttgggaggag

SEQ ID NO: 47345 - DNA, 22 bp, Artificial Sequence
  primer
gaacctggtgtttggcagttac

SEQ ID NO: 47346 - DNA, 37 bp, Artificial Sequence
  primer
gtaaaacgacggccagtagacccaaagaggctaagcg

SEQ ID NO: 47347 - DNA, 21 bp, Artificial Sequence
  primer
cctgtgctatagggctgtctg

SEQ ID NO: 47348 - DNA, 38 bp, Artificial Sequence
  primer
gtaaaacgacggccagtgaatcaatgcaattccttggg

SEQ ID NO: 47349 - DNA, 21 bp, Artificial Sequence
  primer
cacttccagcagttcatggag

SEQ ID NO: 47350 - DNA, 21 bp, Artificial Sequence
  primer
aaggaggagcagttgttctcg

SEQ ID NO: 47351 - DNA, 22 bp, Artificial Sequence
  primer
aagttccactgtagcaagcagc

SEQ ID NO: 47352 - DNA, 21 bp, Artificial Sequence
  primer
gagagagccagagcagctagg

SEQ ID NO: 47353 - DNA, 21 bp, Artificial Sequence
  primer
ttacctacagaccacggaccc

SEQ ID NO: 47354 - DNA, 38 bp, Artificial Sequence
  primer
gtaaaacgacggccagttctcaccagcctccatttctc

SEQ ID NO: 47355 - DNA, 21 bp, Artificial Sequence
  primer
caccaacaaacagacaaagcc

SEQ ID NO: 47356 - DNA, 21 bp, Artificial Sequence
  primer
aggagacaaagctcacttggg

SEQ ID NO: 47357 - DNA, 21 bp, Artificial Sequence
  primer
aacaccaccatgtggacaaag

SEQ ID NO: 47358 - DNA, 21 bp, Artificial Sequence
  primer
ggaagagatgtggactttccg

SEQ ID NO: 47359 - DNA, 21 bp, Artificial Sequence
  primer
ggacaatgccttatgggaaag

SEQ ID NO: 47360 - DNA, 21 bp, Artificial Sequence
  primer
tggcctagaacgttgtcattc

SEQ ID NO: 47361 - DNA, 22 bp, Artificial Sequence
  primer
tggtagcttcatgtggaagagg

SEQ ID NO: 47362 - DNA, 21 bp, Artificial Sequence
  primer
aagtaaggcaccattgccaac

SEQ ID NO: 47363 - DNA, 22 bp, Artificial Sequence
  primer
tgtagagccagcattcataccc

SEQ ID NO: 47364 - DNA, 22 bp, Artificial Sequence
  primer
atttgggccaatcatttctatc

SEQ ID NO: 47365 - DNA, 20 bp, Artificial Sequence
  primer
cagatttggcctgcagtttg

SEQ ID NO: 47366 - DNA, 21 bp, Artificial Sequence
  primer
cagacccttgcctgtaggttc

SEQ ID NO: 47367 - DNA, 21 bp, Artificial Sequence
  primer
ctaagagcagtgcggatgatg

SEQ ID NO: 47368 - DNA, 21 bp, Artificial Sequence
  primer
cgtgattaccggaaagaaagg

SEQ ID NO: 47369 - DNA, 21 bp, Artificial Sequence
  primer
agcccaaattctagggcaaag

SEQ ID NO: 47370 - DNA, 36 bp, Artificial Sequence
  primer
gtaaaacgacggccagtctcctgggctcagttaccg

SEQ ID NO: 47371 - DNA, 21 bp, Artificial Sequence
  primer
cctaggcgactgagtgacacc

SEQ ID NO: 47372 - DNA, 37 bp, Artificial Sequence
  primer
gtaaaacgacggccagttcccaccagcttcatacctg

SEQ ID NO: 47373 - DNA, 38 bp, Artificial Sequence
  primer
gtaaaacgacggccagttgagattccctgagatggagg

SEQ ID NO: 47374 - DNA, 38 bp, Artificial Sequence
  primer
gtaaaacgacggccagtatctctagctgcctggaggtc

SEQ ID NO: 47375 - DNA, 39 bp, Artificial Sequence
  primer
gtaaaacgacggccagtggagaagcttcaggagaccaag

SEQ ID NO: 47376 - DNA, 20 bp, Artificial Sequence
  primer
gtcccactcagcctctctcc

SEQ ID NO: 47377 - DNA, 19 bp, Artificial Sequence
  primer
gaggagggtacatggtggc

SEQ ID NO: 47378 - DNA, 20 bp, Artificial Sequence
  primer
ccgactgactcctgaacagc

SEQ ID NO: 47379 - DNA, 38 bp, Artificial Sequence
  primer
gtaaaacgacggccagtagatggaggaaacagggattg

SEQ ID NO: 47380 - DNA, 37 bp, Artificial Sequence
  primer
gtaaaacgacggccagtgatcatcctctgggacatcg

SEQ ID NO: 47381 - DNA, 21 bp, Artificial Sequence
  primer
tctttggtggcatcttctgtg

SEQ ID NO: 47382 - DNA, 20 bp, Artificial Sequence
  primer
gtgagctcagcttgtgggac

SEQ ID NO: 47383 - DNA, 38 bp, Artificial Sequence
  primer
gtaaaacgacggccagtgttggcctacttctcgctcag

SEQ ID NO: 47384 - DNA, 37 bp, Artificial Sequence
  primer
gtaaaacgacggccagtcaacatcctgaagcagccac

SEQ ID NO: 47385 - DNA, 38 bp, Artificial Sequence
  primer
gtaaaacgacggccagtacgagtgggtacgatggtgta

SEQ ID NO: 47386 - DNA, 43 bp, Artificial Sequence
  primer
gtaaaacgacggccagttggaactgttataaacctgaactgat

SEQ ID NO: 47387 - DNA, 41 bp, Artificial Sequence
  primer
gtaaaacgacggccagttgaggatcgtcttcgactttattt

SEQ ID NO: 47388 - DNA, 38 bp, Artificial Sequence
  primer
gtaaaacgacggccagtgagaagtccctttgcctgttg

SEQ ID NO: 47389 - DNA, 40 bp, Artificial Sequence
  primer
gtaaaacgacggccagttgctcattctgtatgtacagtcg

SEQ ID NO: 47390 - DNA, 19 bp, Artificial Sequence
  primer
ggtaggtgcttgccaaggg

SEQ ID NO: 47391 - DNA, 25 bp, Artificial Sequence
  primer
tttgaatgcatactgctacctaatg

SEQ ID NO: 47392 - DNA, 38 bp, Artificial Sequence
  primer
gtaaaacgacggccagtcttaatggcagcacagcactc

SEQ ID NO: 47393 - DNA, 23 bp, Artificial Sequence
  primer
gcaggcaaatggtttaactatgg

SEQ ID NO: 47394 - DNA, 38 bp, Artificial Sequence
  primer
gtaaaacgacggccagtcaagctatcctgggaatggag

SEQ ID NO: 47395 - DNA, 21 bp, Artificial Sequence
  primer
caaagacatgggaatcactcg

SEQ ID NO: 47396 - DNA, 36 bp, Artificial Sequence
  primer
gtaaaacgacggccagtaatgggaactgagttgcgg

SEQ ID NO: 47397 - DNA, 21 bp, Artificial Sequence
  primer
aggcacaggagagagaaaggg

SEQ ID NO: 47398 - DNA, 21 bp, Artificial Sequence
  primer
tgtgaatggcatttgagatcc

SEQ ID NO: 47399 - DNA, 21 bp, Artificial Sequence
  primer
acctgttggaccctcttcctc

SEQ ID NO: 47400 - DNA, 24 bp, Artificial Sequence
  primer
gagttgtacagagtgttgcctgag

SEQ ID NO: 47401 - DNA, 38 bp, Artificial Sequence
  primer
gtaaaacgacggccagtgccaagttgggctttgactac

SEQ ID NO: 47402 - DNA, 21 bp, Artificial Sequence
  primer
gggtagccagttcattgcttc

SEQ ID NO: 47403 - DNA, 38 bp, Artificial Sequence
  primer
gtaaaacgacggccagttttgaccgtgaagtatgctgg

SEQ ID NO: 47404 - DNA, 37 bp, Artificial Sequence
  primer
gtaaaacgacggccagtgaggatcacttgagcctggg

SEQ ID NO: 47405 - DNA, 38 bp, Artificial Sequence
  primer
gtaaaacgacggccagttttgtgacaccgaggaacaag

SEQ ID NO: 47406 - DNA, 21 bp, Artificial Sequence
  primer
cttgggcaggtagagaattgg

SEQ ID NO: 47407 - DNA, 38 bp, Artificial Sequence
  primer
gtaaaacgacggccagtattggagcacaactgtgaagc

SEQ ID NO: 47408 - DNA, 21 bp, Artificial Sequence
  primer
gggtgtaggtagggtgagtcg

SEQ ID NO: 47409 - DNA, 21 bp, Artificial Sequence
  primer
tatgactcacccatcccttcc

SEQ ID NO: 47410 - DNA, 38 bp, Artificial Sequence
  primer
gtaaaacgacggccagtgcctatccatactgcaccctc

SEQ ID NO: 47411 - DNA, 21 bp, Artificial Sequence
  primer
accatgcatcacattagcagg

SEQ ID NO: 47412 - DNA, 21 bp, Artificial Sequence
  primer
acattaccctacgctccaagc

SEQ ID NO: 47413 - DNA, 38 bp, Artificial Sequence
  primer
gtaaaacgacggccagtcagggagcaaacctggttaag

SEQ ID NO: 47414 - DNA, 21 bp, Artificial Sequence
  primer
gtgaaagagtgaacgacctgc

SEQ ID NO: 47415 - DNA, 38 bp, Artificial Sequence
  primer
gtaaaacgacggccagtgagcctggccctcttagattc

SEQ ID NO: 47416 - DNA, 38 bp, Artificial Sequence
  primer
gtaaaacgacggccagtgcaggacagttgggtaaggag

SEQ ID NO: 47417 - DNA, 38 bp, Artificial Sequence
  primer
gtaaaacgacggccagtatcagagggtgcaggctactc

SEQ ID NO: 47418 - DNA, 21 bp, Artificial Sequence
  primer
tctgtcctcttcttccacacg

SEQ ID NO: 47419 - DNA, 38 bp, Artificial Sequence
  primer
gtaaaacgacggccagtgcctcccactacaacttggac

SEQ ID NO: 47420 - DNA, 38 bp, Artificial Sequence
  primer
gtaaaacgacggccagtaatcgcctgtggaagactcac

SEQ ID NO: 47421 - DNA, 21 bp, Artificial Sequence
  primer
gaatgggagccatttctcaag

SEQ ID NO: 47422 - DNA, 21 bp, Artificial Sequence
  primer
agggttacacagtgagggtgg

SEQ ID NO: 47423 - DNA, 21 bp, Artificial Sequence
  primer
ccagtggtcagacaccatttc

SEQ ID NO: 47424 - DNA, 21 bp, Artificial Sequence
  primer
tgaggaactggaacattgctg

SEQ ID NO: 47425 - DNA, 38 bp, Artificial Sequence
  primer
gtaaaacgacggccagtctgcaggagagtacatcgcac

SEQ ID NO: 47426 - DNA, 21 bp, Artificial Sequence
  primer
ctattgaagtgcgccactgag

SEQ ID NO: 47427 - DNA, 22 bp, Artificial Sequence
  primer
aaggacaagttgggaggctaag

SEQ ID NO: 47428 - DNA, 37 bp, Artificial Sequence
  primer
gtaaaacgacggccagtatcagggatgctgatgatgg

SEQ ID NO: 47429 - DNA, 20 bp, Artificial Sequence
  primer
tgctctgacagcaaaggaca

SEQ ID NO: 47430 - DNA, 38 bp, Artificial Sequence
  primer
gtaaaacgacggccagtacagagatccatggcgtacag

SEQ ID NO: 47431 - DNA, 38 bp, Artificial Sequence
  primer
gtaaaacgacggccagtaacagctttgagatcccttgc

SEQ ID NO: 47432 - DNA, 21 bp, Artificial Sequence
  primer
agtgcactgagtcaatgtggg

SEQ ID NO: 47433 - DNA, 38 bp, Artificial Sequence
  primer
gtaaaacgacggccagtagtgagtgacaagggctgtcc

SEQ ID NO: 47434 - DNA, 37 bp, Artificial Sequence
  primer
gtaaaacgacggccagtaaagcaaagagagcaagggc

SEQ ID NO: 47435 - DNA, 38 bp, Artificial Sequence
  primer
gtaaaacgacggccagtaaggctctgatttcatgacgg

SEQ ID NO: 47436 - DNA, 21 bp, Artificial Sequence
  primer
ctcccacagagaagggctaag

SEQ ID NO: 47437 - DNA, 21 bp, Artificial Sequence
  primer
ctgcaagaccttgtctgaccc

SEQ ID NO: 47438 - DNA, 18 bp, Artificial Sequence
  primer
attgtcttggcaatgcgg

SEQ ID NO: 47439 - DNA, 37 bp, Artificial Sequence
  primer
gtaaaacgacggccagtcagtgcgtgtgtactggacg

SEQ ID NO: 47440 - DNA, 38 bp, Artificial Sequence
  primer
gtaaaacgacggccagtccatcagtgtagagcctgtcg

SEQ ID NO: 47441 - DNA, 38 bp, Artificial Sequence
  primer
gtaaaacgacggccagttgtccaatgtcagactcctgc

SEQ ID NO: 47442 - DNA, 18 bp, Artificial Sequence
  primer
ggccctgagtgtgtgtcc

SEQ ID NO: 47443 - DNA, 20 bp, Artificial Sequence
  primer
atggcttcctggacatgttg

SEQ ID NO: 47444 - DNA, 38 bp, Artificial Sequence
  primer
gtaaaacgacggccagtgggtagattctgagaaagggc

SEQ ID NO: 47445 - DNA, 36 bp, Artificial Sequence
  primer
gtaaaacgacggccagtccaaacttgcccttccttg

SEQ ID NO: 47446 - DNA, 40 bp, Artificial Sequence
  primer
gtaaaacgacggccagtgggaagggtatctacaaaggagc

SEQ ID NO: 47447 - DNA, 21 bp, Artificial Sequence
  primer
aaagtgtcagacaagggctgg

SEQ ID NO: 47448 - DNA, 38 bp, Artificial Sequence
  primer
gtaaaacgacggccagtgtcccagattctccagttccc

SEQ ID NO: 47449 - DNA, 38 bp, Artificial Sequence
  primer
gtaaaacgacggccagtagtcatggaagaagcctccac

SEQ ID NO: 47450 - DNA, 38 bp, Artificial Sequence
  primer
gtaaaacgacggccagttgtcatgtccatttgctctcc

SEQ ID NO: 47451 - DNA, 38 bp, Artificial Sequence
  primer
gtaaaacgacggccagtctagtttcaggctggaggagg

SEQ ID NO: 47452 - DNA, 21 bp, Artificial Sequence
  primer
tcaaagggtgacatcatggag

SEQ ID NO: 47453 - DNA, 38 bp, Artificial Sequence
  primer
gtaaaacgacggccagtcaagacctacacggtgagcag

SEQ ID NO: 47454 - DNA, 35 bp, Artificial Sequence
  primer
gtaaaacgacggccagttgatcctcccaccttggc

SEQ ID NO: 47455 - DNA, 37 bp, Artificial Sequence
  primer
gtaaaacgacggccagttcatcccatcctattccgtg

SEQ ID NO: 47456 - DNA, 20 bp, Artificial Sequence
  primer
aaggcagaagtcagcccttg

SEQ ID NO: 47457 - DNA, 20 bp, Artificial Sequence
  primer
actacaggcacgtgctaccg

SEQ ID NO: 47458 - DNA, 38 bp, Artificial Sequence
  primer
gtaaaacgacggccagtcccagaaaggagggatgaaag

SEQ ID NO: 47459 - DNA, 38 bp, Artificial Sequence
  primer
gtaaaacgacggccagttacatttgggttaaggctggg

SEQ ID NO: 47460 - DNA, 38 bp, Artificial Sequence
  primer
gtaaaacgacggccagtgggacaggaggaacaactgac

SEQ ID NO: 47461 - DNA, 21 bp, Artificial Sequence
  primer
acttaatgccaatcctgcctg

SEQ ID NO: 47462 - DNA, 21 bp, Artificial Sequence
  primer
cacacttggaacgtccgtaac

SEQ ID NO: 47463 - DNA, 38 bp, Artificial Sequence
  primer
gtaaaacgacggccagtatccagaacatcctggtggag

SEQ ID NO: 47464 - DNA, 38 bp, Artificial Sequence
  primer
gtaaaacgacggccagtaactctcaagacctgggctcc

SEQ ID NO: 47465 - DNA, 21 bp, Artificial Sequence
  primer
agtttctcgtttgagcttggg

SEQ ID NO: 47466 - DNA, 21 bp, Artificial Sequence
  primer
aatcaagcctatgggatgtcg

SEQ ID NO: 47467 - DNA, 38 bp, Artificial Sequence
  primer
gtaaaacgacggccagtagcagaacccaggaaagtttg

SEQ ID NO: 47468 - DNA, 38 bp, Artificial Sequence
  primer
gtaaaacgacggccagtacgaatctggaactgggtttg

SEQ ID NO: 47469 - DNA, 37 bp, Artificial Sequence
  primer
gtaaaacgacggccagtcaccctacagtggtgatggg

SEQ ID NO: 47470 - DNA, 21 bp, Artificial Sequence
  primer
cccaggttactacagtgcagg

SEQ ID NO: 47471 - DNA, 21 bp, Artificial Sequence
  primer
tgtactttcacagggcctcag

SEQ ID NO: 47472 - DNA, 21 bp, Artificial Sequence
  primer
gagatcttgggtctgaccacc

SEQ ID NO: 47473 - DNA, 36 bp, Artificial Sequence
  primer
gtaaaacgacggccagtctgcagtatcggccctcac

SEQ ID NO: 47474 - DNA, 19 bp, Artificial Sequence
  primer
gcctgtggtcactgctgag

SEQ ID NO: 47475 - DNA, 38 bp, Artificial Sequence
  primer
gtaaaacgacggccagtatcagcagccagcagacatac

SEQ ID NO: 47476 - DNA, 20 bp, Artificial Sequence
  primer
ctggtgacacacaggcaaag

SEQ ID NO: 47477 - DNA, 37 bp, Artificial Sequence
  primer
gtaaaacgacggccagtggaggcaacagagtcaccag

SEQ ID NO: 47478 - DNA, 35 bp, Artificial Sequence
  primer
gtaaaacgacggccagtagcagcatctgcagggac

SEQ ID NO: 47479 - DNA, 38 bp, Artificial Sequence
  primer
gtaaaacgacggccagtaaacaggttcaggaatgggac

SEQ ID NO: 47480 - DNA, 21 bp, Artificial Sequence
  primer
aggagaggttcagaaatgggc

SEQ ID NO: 47481 - DNA, 21 bp, Artificial Sequence
  primer
agcagcccattagtggcatag

SEQ ID NO: 47482 - DNA, 38 bp, Artificial Sequence
  primer
gtaaaacgacggccagtgcgaagaatttcgaagtctgg

SEQ ID NO: 47483 - DNA, 37 bp, Artificial Sequence
  primer
gtaaaacgacggccagtaactgatgagtttggctggg

SEQ ID NO: 47484 - DNA, 38 bp, Artificial Sequence
  primer
gtaaaacgacggccagtgagttggtccttatggcaagg

SEQ ID NO: 47485 - DNA, 21 bp, Artificial Sequence
  primer
gcagctcaggagaccctagac

SEQ ID NO: 47486 - DNA, 37 bp, Artificial Sequence
  primer
gtaaaacgacggccagtggcagagaccatctgtggac

SEQ ID NO: 47487 - DNA, 21 bp, Artificial Sequence
  primer
tggtacacatgggagtccatc

SEQ ID NO: 47488 - DNA, 21 bp, Artificial Sequence
  primer
accaggcacagattccttgag

SEQ ID NO: 47489 - DNA, 21 bp, Artificial Sequence
  primer
agagagtcaaggacgggtctg

SEQ ID NO: 47490 - DNA, 38 bp, Artificial Sequence
  primer
gtaaaacgacggccagtactgcatcctgtaatgccttg

SEQ ID NO: 47491 - DNA, 35 bp, Artificial Sequence
  primer
gtaaaacgacggccagtagtgtttgccgccaagtg

SEQ ID NO: 47492 - DNA, 21 bp, Artificial Sequence
  primer
tgacctctcatcatagctggg

SEQ ID NO: 47493 - DNA, 20 bp, Artificial Sequence
  primer
gggatgaaggtttggtggag

SEQ ID NO: 47494 - DNA, 39 bp, Artificial Sequence
  primer
gtaaaacgacggccagttgtttgtaaacgtgtctggagg

SEQ ID NO: 47495 - DNA, 21 bp, Artificial Sequence
  primer
aaccactggatagcaaatccc

SEQ ID NO: 47496 - DNA, 36 bp, Artificial Sequence
  primer
gtaaaacgacggccagtccttgatagcccttgctgg

SEQ ID NO: 47497 - DNA, 38 bp, Artificial Sequence
  primer
gtaaaacgacggccagtagaagtgcctcccaaatcatc

SEQ ID NO: 47498 - DNA, 18 bp, Artificial Sequence
  primer
tcagctggaagaggagcg

SEQ ID NO: 47499 - DNA, 21 bp, Artificial Sequence
  primer
actggaagaagagttggcagc

SEQ ID NO: 47500 - DNA, 38 bp, Artificial Sequence
  primer
gtaaaacgacggccagtaagatgacaaacactgggctg

SEQ ID NO: 47501 - DNA, 21 bp, Artificial Sequence
  primer
gtagggatcaaccaacggttc

SEQ ID NO: 47502 - DNA, 38 bp, Artificial Sequence
  primer
gtaaaacgacggccagtatcaagccagtctctcccaac

SEQ ID NO: 47503 - DNA, 21 bp, Artificial Sequence
  primer
tctgggattctttgctaagcc

SEQ ID NO: 47504 - DNA, 44 bp, Artificial Sequence
  primer
gtaaaacgacggccagtcaaatacattcgtaggatttgatactg

SEQ ID NO: 47505 - DNA, 20 bp, Artificial Sequence
  primer
agtgggtgtgaaagggtcac

SEQ ID NO: 47506 - DNA, 21 bp, Artificial Sequence
  primer
gggtaacagagcaagaccctg

SEQ ID NO: 47507 - DNA, 38 bp, Artificial Sequence
  primer
gtaaaacgacggccagtaagctaagagcaagtcagggc

SEQ ID NO: 47508 - DNA, 37 bp, Artificial Sequence
  primer
gtaaaacgacggccagtcccagcctttcacattcttg

SEQ ID NO: 47509 - DNA, 38 bp, Artificial Sequence
  primer
gtaaaacgacggccagtacagaagcagaagaactcgcc

SEQ ID NO: 47510 - DNA, 38 bp, Artificial Sequence
  primer
gtaaaacgacggccagtaagcagaagaactcgcctctg

SEQ ID NO: 47511 - DNA, 21 bp, Artificial Sequence
  primer
cgtttgccagaactacattgc

SEQ ID NO: 47512 - DNA, 38 bp, Artificial Sequence
  primer
gtaaaacgacggccagttggatagtgcggtcatagagc

SEQ ID NO: 47513 - DNA, 39 bp, Artificial Sequence
  primer
gtaaaacgacggccagttttggagctactcatcaaccac

SEQ ID NO: 47514 - DNA, 24 bp, Artificial Sequence
  primer
gacttcctgtaacatacttggctg

SEQ ID NO: 47515 - DNA, 21 bp, Artificial Sequence
  primer
ctggaaggcagaggtgagaag

SEQ ID NO: 47516 - DNA, 38 bp, Artificial Sequence
  primer
gtaaaacgacggccagtgacagggtttagccacattgc

SEQ ID NO: 47517 - DNA, 21 bp, Artificial Sequence
  primer
aacacttccagcaattgggag

SEQ ID NO: 47518 - DNA, 21 bp, Artificial Sequence
  primer
ctgagcagccttcctcaaatc

SEQ ID NO: 47519 - DNA, 21 bp, Artificial Sequence
  primer
tgtttcaacccagtccctctc

SEQ ID NO: 47520 - DNA, 22 bp, Artificial Sequence
  primer
aacagaggaggttacatgggtg

SEQ ID NO: 47521 - DNA, 21 bp, Artificial Sequence
  primer
gtgggaagaagcattccagtc

SEQ ID NO: 47522 - DNA, 37 bp, Artificial Sequence
  primer
gtaaaacgacggccagtttgctgcatggaattatggg

SEQ ID NO: 47523 - DNA, 40 bp, Artificial Sequence
  primer
gtaaaacgacggccagttgaaccttattggcattctctcc

SEQ ID NO: 47524 - DNA, 38 bp, Artificial Sequence
  primer
gtaaaacgacggccagtatgggagtttgtcttgaagcg

SEQ ID NO: 47525 - DNA, 21 bp, Artificial Sequence
  primer
tctcaaatcttccatgttggg

SEQ ID NO: 47526 - DNA, 39 bp, Artificial Sequence
  primer
gtaaaacgacggccagtccaaatgcaaggttgtaaggaa

SEQ ID NO: 47527 - DNA, 21 bp, Artificial Sequence
  primer
ctggaggagacaacccacttc

SEQ ID NO: 47528 - DNA, 37 bp, Artificial Sequence
  primer
gtaaaacgacggccagttgaaatgaccttgggctttg

SEQ ID NO: 47529 - DNA, 38 bp, Artificial Sequence
  primer
gtaaaacgacggccagtgccttactcgcttgtctttgc

SEQ ID NO: 47530 - DNA, 21 bp, Artificial Sequence
  primer
tcagattcatggctgaaccac

SEQ ID NO: 47531 - DNA, 38 bp, Artificial Sequence
  primer
gtaaaacgacggccagtgccctcgtgtgctctttagtc

SEQ ID NO: 47532 - DNA, 38 bp, Artificial Sequence
  primer
gtaaaacgacggccagtatctggagctcctggtctagc

SEQ ID NO: 47533 - DNA, 21 bp, Artificial Sequence
  primer
ttctctgcactttgagttgcc

SEQ ID NO: 47534 - DNA, 38 bp, Artificial Sequence
  primer
gtaaaacgacggccagtaccttcatttaaccctcaccg

SEQ ID NO: 47535 - DNA, 21 bp, Artificial Sequence
  primer
tccagatttctcctctttgcc

SEQ ID NO: 47536 - DNA, 35 bp, Artificial Sequence
  primer
gtaaaacgacggccagtagtctcgcagtgttgccc

SEQ ID NO: 47537 - DNA, 21 bp, Artificial Sequence
  primer
gcagaccaaagccttgagaag

SEQ ID NO: 47538 - DNA, 38 bp, Artificial Sequence
  primer
gtaaaacgacggccagtagtaagctcttgcctgcttgg

SEQ ID NO: 47539 - DNA, 21 bp, Artificial Sequence
  primer
acaatttgttgggcacaatcg

SEQ ID NO: 47540 - DNA, 38 bp, Artificial Sequence
  primer
gtaaaacgacggccagttctgtctgtgcaggagtgagc

SEQ ID NO: 47541 - DNA, 37 bp, Artificial Sequence
  primer
gtaaaacgacggccagtgagctaccataagcgccgag

SEQ ID NO: 47542 - DNA, 21 bp, Artificial Sequence
  primer
ccaaggtcaagttcgagaagg

SEQ ID NO: 47543 - DNA, 20 bp, Artificial Sequence
  primer
ccacagagtgtgggttcgag

SEQ ID NO: 47544 - DNA, 21 bp, Artificial Sequence
  primer
atcaacgtgcagattgacgac

SEQ ID NO: 47545 - DNA, 20 bp, Artificial Sequence
  primer
ctacagctgccacttctgcg

SEQ ID NO: 47546 - DNA, 21 bp, Artificial Sequence
  primer
gaaagtgtgcctttgtgatgc

SEQ ID NO: 47547 - DNA, 37 bp, Artificial Sequence
  primer
gtaaaacgacggccagtcagccatagaggtgggagtg

SEQ ID NO: 47548 - DNA, 21 bp, Artificial Sequence
  primer
ttagaaaggccatcagcttcc

SEQ ID NO: 47549 - DNA, 38 bp, Artificial Sequence
  primer
gtaaaacgacggccagtaggagctagtcctggtcctcg

SEQ ID NO: 47550 - DNA, 39 bp, Artificial Sequence
  primer
gtaaaacgacggccagttgcaagtatctgctaaccaagg

SEQ ID NO: 47551 - DNA, 35 bp, Artificial Sequence; identical to SEQ ID NO: 13122
  primer

SEQ ID NO: 47552 - DNA, 22 bp, Artificial Sequence
  primer
tttcagaaagctctgggaaagt

SEQ ID NO: 47553 - DNA, 21 bp, Artificial Sequence
  primer
ttgccttgttgttggtctttg

SEQ ID NO: 47554 - DNA, 21 bp, Artificial Sequence
  primer
agcaatttaccttcacctggg

SEQ ID NO: 47555 - DNA, 38 bp, Artificial Sequence
  primer
gtaaaacgacggccagtggtgtgaatggatctccaagg

SEQ ID NO: 47556 - DNA, 35 bp, Artificial Sequence
  primer
gtaaaacgacggccagtgagccaccgcaccttgtc

SEQ ID NO: 47557 - DNA, 42 bp, Artificial Sequence
  primer
gtaaaacgacggccagttggctaagataattaaaccagaccc

SEQ ID NO: 47558 - DNA, 38 bp, Artificial Sequence
  primer
gtaaaacgacggccagtccagttggcagaggttcattc

SEQ ID NO: 47559 - DNA, 38 bp, Artificial Sequence
  primer
gtaaaacgacggccagtctcatacccagttgggaacac

SEQ ID NO: 47560 - DNA, 39 bp, Artificial Sequence
  primer
gtaaaacgacggccagtgataggtccctccagttatggc

SEQ ID NO: 47561 - DNA, 22 bp, Artificial Sequence
  primer
tccagttctcttgacattgtgg

SEQ ID NO: 47562 - DNA, 19 bp, Artificial Sequence
  primer
atttgcccacctcggtctc

SEQ ID NO: 47563 - DNA, 21 bp, Artificial Sequence
  primer
agggcagtaattcacctttgg

SEQ ID NO: 47564 - DNA, 41 bp, Artificial Sequence
  primer
gtaaaacgacggccagttgctagtattgacatgtaccaccg

SEQ ID NO: 47565 - DNA, 37 bp, Artificial Sequence
  primer
gtaaaacgacggccagtaagggtactccaggcgagag

SEQ ID NO: 47566 - DNA, 24 bp, Artificial Sequence
  primer
tggtgcctctctaaatgttaactg

SEQ ID NO: 47567 - DNA, 27 bp, Artificial Sequence
  primer
tttcagatatgtgagactgcttagtgt

SEQ ID NO: 47568 - DNA, 42 bp, Artificial Sequence
  primer
gtaaaacgacggccagttcagagtatagcatttctttgtccc

SEQ ID NO: 47569 - DNA, 39 bp, Artificial Sequence
  primer
gtaaaacgacggccagttgcttcccattctctccttacc

SEQ ID NO: 47570 - DNA, 21 bp, Artificial Sequence
  primer
gagaaccatagagccactcgg

SEQ ID NO: 47571 - DNA, 38 bp, Artificial Sequence
  primer
gtaaaacgacggccagtgtgggtgtctgtatccaaggg

SEQ ID NO: 47572 - DNA, 39 bp, Artificial Sequence
  primer
gtaaaacgacggccagttgaagggagtagactgaccctg

SEQ ID NO: 47573 - DNA, 22 bp, Artificial Sequence
  primer
ggacagctctgaggaggaagag

SEQ ID NO: 47574 - DNA, 38 bp, Artificial Sequence
  primer
gtaaaacgacggccagtccaacctctgccctatgtctg

SEQ ID NO: 47575 - DNA, 38 bp, Artificial Sequence
  primer
gtaaaacgacggccagtagtgctgaggccaacaaattc

SEQ ID NO: 47576 - DNA, 21 bp, Artificial Sequence
  primer
agtcgtagaggctatgctggc

SEQ ID NO: 47577 - DNA, 38 bp, Artificial Sequence
  primer
gtaaaacgacggccagttcggccatacaggtgctattc

SEQ ID NO: 47578 - DNA, 20 bp, Artificial Sequence
  primer
aggtgctttgggaagagctg

SEQ ID NO: 47579 - DNA, 36 bp, Artificial Sequence
  primer
gtaaaacgacggccagtaaggcccaggtgttcacag

SEQ ID NO: 47580 - DNA, 20 bp, Artificial Sequence
  primer
aggaaatgattcctgtgccg

SEQ ID NO: 47581 - DNA, 38 bp, Artificial Sequence
  primer
gtaaaacgacggccagtacgtgccttgtcctgctttag

SEQ ID NO: 47582 - DNA, 21 bp, Artificial Sequence
  primer
tatctcttgtttcgggttggg

SEQ ID NO: 47583 - DNA, 37 bp, Artificial Sequence
  primer
gtaaaacgacggccagtatggaccttcatggtctccc

SEQ ID NO: 47584 - DNA, 38 bp, Artificial Sequence
  primer
gtaaaacgacggccagtcaacagctatgcacttgagcc

SEQ ID NO: 47585 - DNA, 20 bp, Artificial Sequence
  primer
gagcagcaggcagtggttag

SEQ ID NO: 47586 - DNA, 21 bp, Artificial Sequence
  primer
aacttggaggatggctttgtg

SEQ ID NO: 47587 - DNA, 38 bp, Artificial Sequence
  primer
gtaaaacgacggccagtagtgaaggcctactgggattg

SEQ ID NO: 47588 - DNA, 38 bp, Artificial Sequence
  primer
gtaaaacgacggccagtgccaaatgctctgttctctgg

SEQ ID NO: 47589 - DNA, 18 bp, Artificial Sequence
  primer
atctccgggaagtgacgc

SEQ ID NO: 47590 - DNA, 38 bp, Artificial Sequence
  primer
gtaaaacgacggccagttgcagttacccttgtctgtgc

SEQ ID NO: 47591 - DNA, 38 bp, Artificial Sequence
  primer
gtaaaacgacggccagtaagtcactgcacttctgccac

SEQ ID NO: 47592 - DNA, 21 bp, Artificial Sequence
  primer
ctgtacatctcagcacccagc

SEQ ID NO: 47593 - DNA, 38 bp, Artificial Sequence
  primer
gtaaaacgacggccagtagtacaagcaccgcatggtag

SEQ ID NO: 47594 - DNA, 38 bp, Artificial Sequence
  primer
gtaaaacgacggccagtccagcgaggtgtcagtaaatc

SEQ ID NO: 47595 - DNA, 38 bp, Artificial Sequence
  primer
gtaaaacgacggccagtggatcaaggaagttctcgtgg

SEQ ID NO: 47596 - DNA, 26 bp, Artificial Sequence
  primer
tcaaggtgcttatgttaatactgtgc

SEQ ID NO: 47597 - DNA, 41 bp, Artificial Sequence
  primer
gtaaaacgacggccagtatgtttgcatcatagtgacatctg

SEQ ID NO: 47598 - DNA, 42 bp, Artificial Sequence
  primer
gtaaaacgacggccagtgagcaataacttgcaacaatttacc

SEQ ID NO: 47599 - DNA, 43 bp, Artificial Sequence
  primer
gtaaaacgacggccagtaaccatttaatactttgtaacagcca

SEQ ID NO: 47600 - DNA, 41 bp, Artificial Sequence
  primer
gtaaaacgacggccagtaaatcattatcttgcctaaaggag

SEQ ID NO: 47601 - DNA, 42 bp, Artificial Sequence
  primer
gtaaaacgacggccagttgctgtgtatgcaagcatataattt

SEQ ID NO: 47602 - DNA, 20 bp, Artificial Sequence
  primer
tcctcgaatcgtcaaaccac

SEQ ID NO: 47603 - DNA, 37 bp, Artificial Sequence
  primer
gtaaaacgacggccagtccctgcccttacatgtcatc

SEQ ID NO: 47604 - DNA, 36 bp, Artificial Sequence
  primer
gtaaaacgacggccagtcctagttgtgccctgggag

SEQ ID NO: 47605 - DNA, 38 bp, Artificial Sequence
  primer
gtaaaacgacggccagtagctctcacgattaaggcacg

SEQ ID NO: 47606 - DNA, 25 bp, Artificial Sequence
  primer
tgttccagtgtctggatattgttag

SEQ ID NO: 47607 - DNA, 19 bp, Artificial Sequence
  primer
agatggctgctgctgtttc

SEQ ID NO: 47608 - DNA, 20 bp, Artificial Sequence
  primer
gcagagcaactcgaagatgg

SEQ ID NO: 47609 - DNA, 21 bp, Artificial Sequence
  primer
cggtgctacctgtgaataagc

SEQ ID NO: 47610 - DNA, 37 bp, Artificial Sequence
  primer
gtaaaacgacggccagtggcaggctagggaatgtttc

SEQ ID NO: 47611 - DNA, 38 bp, Artificial Sequence
  primer
gtaaaacgacggccagtccagccctttgtactggtttc

SEQ ID NO: 47612 - DNA, 21 bp, Artificial Sequence
  primer
tgccattctttggctccttac

SEQ ID NO: 47613 - DNA, 21 bp, Artificial Sequence
  primer
tcctggagaaattccaactgc

SEQ ID NO: 47614 - DNA, 21 bp, Artificial Sequence
  primer
caacagttgccttggactttg

SEQ ID NO: 47615 - DNA, 21 bp, Artificial Sequence
  primer
gacccagacagcaagttctcc

SEQ ID NO: 47616 - DNA, 19 bp, Artificial Sequence
  primer
gtggctgtcaaccagcaag

SEQ ID NO: 47617 - DNA, 38 bp, Artificial Sequence
  primer
gtaaaacgacggccagtgacttctgcatccaaaggacc

SEQ ID NO: 47618 - DNA, 40 bp, Artificial Sequence
  primer
gtaaaacgacggccagtcagtaaccagtgctgaagaatcc

SEQ ID NO: 47619 - DNA, 21 bp, Artificial Sequence
  primer
cactgaaggagacctgaaggg

SEQ ID NO: 47620 - DNA, 38 bp, Artificial Sequence
  primer
gtaaaacgacggccagtcccaccatctgggttaatgac

SEQ ID NO: 47621 - DNA, 38 bp, Artificial Sequence
  primer
gtaaaacgacggccagtcatcactttgcctgactccac

SEQ ID NO: 47622 - DNA, 21 bp, Artificial Sequence
  primer
ctcaaccaactcaagcacctg

SEQ ID NO: 47623 - DNA, 39 bp, Artificial Sequence
  primer
gtaaaacgacggccagttccaagagacacttccagtcac

SEQ ID NO: 47624 - DNA, 38 bp, Artificial Sequence
  primer
gtaaaacgacggccagtctccttggtctccactatggg

SEQ ID NO: 47625 - DNA, 21 bp, Artificial Sequence
  primer
atttcaccaggaagaagctgg

SEQ ID NO: 47626 - DNA, 38 bp, Artificial Sequence
  primer
gtaaaacgacggccagtacaaaccaccaccactaagcc

SEQ ID NO: 47627 - DNA, 38 bp, Artificial Sequence
  primer
gtaaaacgacggccagttaccaacagcaacagtgaggc

SEQ ID NO: 47628 - DNA, 38 bp, Artificial Sequence
  primer
gtaaaacgacggccagtgcaagaaacccagttggaaag

SEQ ID NO: 47629 - DNA, 21 bp, Artificial Sequence
  primer
ccaaagcctttcgttacttgg

SEQ ID NO: 47630 - DNA, 38 bp, Artificial Sequence
  primer
gtaaaacgacggccagttagaaggctgagtccaggagg

SEQ ID NO: 47631 - DNA, 21 bp, Artificial Sequence
  primer
caagtacaagatcgaggccag

SEQ ID NO: 47632 - DNA, 21 bp, Artificial Sequence
  primer
ccaaatttcctggatcttccc

SEQ ID NO: 47633 - DNA, 38 bp, Artificial Sequence
  primer
gtaaaacgacggccagtttatccaccaggagaagctgg

SEQ ID NO: 47634 - DNA, 21 bp, Artificial Sequence
  primer
acttgcaggaatgggattgac

SEQ ID NO: 47635 - DNA, 21 bp, Artificial Sequence
  primer
gtgctcaaagtggatgtggtg

SEQ ID NO: 47636 - DNA, 21 bp, Artificial Sequence
  primer
ggaacaagacttacttggcgg

SEQ ID NO: 47637 - DNA, 21 bp, Artificial Sequence
  primer
ccacccaagatcaacggtaac

SEQ ID NO: 47638 - DNA, 21 bp, Artificial Sequence
  primer
gatctgcagagtggacagcag

SEQ ID NO: 47639 - DNA, 21 bp, Artificial Sequence
  primer
gtatgcaggatggagacggag

SEQ ID NO: 47640 - DNA, 21 bp, Artificial Sequence
  primer
gattgtgatcgcctatcctcc

SEQ ID NO: 47641 - DNA, 21 bp, Artificial Sequence
  primer
aagactgaggacactcgcctg

SEQ ID NO: 47642 - DNA, 20 bp, Artificial Sequence
  primer
cttccctggtgagcttggac

SEQ ID NO: 47643 - DNA, 38 bp, Artificial Sequence
  primer
gtaaaacgacggccagtgaaactgaggcccagagtcac

SEQ ID NO: 47644 - DNA, 38 bp, Artificial Sequence
  primer
gtaaaacgacggccagtggagaacagaggtgttctggg

SEQ ID NO: 47645 - DNA, 38 bp, Artificial Sequence
  primer
gtaaaacgacggccagtcttccctagagatcgtggtgg

SEQ ID NO: 47646 - DNA, 20 bp, Artificial Sequence
  primer
cttccctggtgagcttggac

SEQ ID NO: 47647 - DNA, 35 bp, Artificial Sequence
  primer
gtaaaacgacggccagttcgcctagcctcgtcctg

SEQ ID NO: 47648 - DNA, 18 bp, Artificial Sequence
  primer
attgagcctggccctgtc

SEQ ID NO: 47649 - DNA, 43 bp, Artificial Sequence
  primer
gtaaaacgacggccagtgcgaaataagctcatagattatcctt

SEQ ID NO: 47650 - DNA, 21 bp, Artificial Sequence
  primer
tacaagcaggtgcttaaggct

SEQ ID NO: 47651 - DNA, 38 bp, Artificial Sequence
  primer
gtaaaacgacggccagtagccctttaggcttatttggg

SEQ ID NO: 47652 - DNA, 21 bp, Artificial Sequence
  primer
tgttgatgaattgggatgtgg

SEQ ID NO: 47653 - DNA, 20 bp, Artificial Sequence
  primer
gccttagtgacggagcaagg

SEQ ID NO: 47654 - DNA, 41 bp, Artificial Sequence
  primer
gtaaaacgacggccagttcagagttgaggagtcttctttcc

SEQ ID NO: 47655 - DNA, 38 bp, Artificial Sequence
  primer
gtaaaacgacggccagtctgggaagactgcattgtgtg

SEQ ID NO: 47656 - DNA, 38 bp, Artificial Sequence
  primer
gtaaaacgacggccagtcactcaaaggtgtgtggtgtg

SEQ ID NO: 47657 - DNA, 26 bp, Artificial Sequence
  primer
ttcatcagttgaactatatggaaatc

SEQ ID NO: 47658 - DNA, 21 bp, Artificial Sequence
  primer
tcaaacaacttgctctggacc

SEQ ID NO: 47659 - DNA, 21 bp, Artificial Sequence
  primer
agctttcgttaccagcaggag

SEQ ID NO: 47660 - DNA, 38 bp, Artificial Sequence
  primer
gtaaaacgacggccagtgctttctgtaacatgccgatg

SEQ ID NO: 47661 - DNA, 38 bp, Artificial Sequence
  primer
gtaaaacgacggccagtagaagcccgcagttctgtaac

SEQ ID NO: 47662 - DNA, 37 bp, Artificial Sequence
  primer
gtaaaacgacggccagtcccacgttcccatacacatc

SEQ ID NO: 47663 - DNA, 21 bp, Artificial Sequence
  primer
gccatgatcgtttaagcattg

SEQ ID NO: 47664 - DNA, 23 bp, Artificial Sequence
  primer
aaccaggagttggtttcttgttt

SEQ ID NO: 47665 - DNA, 20 bp, Artificial Sequence
  primer
cgtggtaacatgtggagtgg

SEQ ID NO: 47666 - DNA, 20 bp, Artificial Sequence
  primer
gtgtttcctgctgatttcgg

SEQ ID NO: 47667 - DNA, 21 bp, Artificial Sequence
  primer
taagcacagacaggtgcgttc

SEQ ID NO: 47668 - DNA, 38 bp, Artificial Sequence
  primer
gtaaaacgacggccagttcttggcagatttcctgtcac

SEQ ID NO: 47669 - DNA, 37 bp, Artificial Sequence
  primer
gtaaaacgacggccagtgaacgattgagcatgtcgag

SEQ ID NO: 47670 - DNA, 21 bp, Artificial Sequence
  primer
cttcgagaaagaacagccacc

SEQ ID NO: 47671 - DNA, 37 bp, Artificial Sequence
  primer
gtaaaacgacggccagttctcgtgaatccaccagctc

SEQ ID NO: 47672 - DNA, 21 bp, Artificial Sequence
  primer
ctgaggcaggagaattgctta

SEQ ID NO: 47673 - DNA, 38 bp, Artificial Sequence
  primer
gtaaaacgacggccagtccacctgtcccactctctttc

SEQ ID NO: 47674 - DNA, 38 bp, Artificial Sequence
  primer
gtaaaacgacggccagttatggtgtatgtgggcctcag

SEQ ID NO: 47675 - DNA, 38 bp, Artificial Sequence
  primer
gtaaaacgacggccagtggaggtgctccctcctttaac

SEQ ID NO: 47676 - DNA, 21 bp, Artificial Sequence
  primer
tcacatctggccattaggttg

SEQ ID NO: 47677 - DNA, 19 bp, Artificial Sequence
  primer
cacttgagcctgggaggtg

SEQ ID NO: 47678 - DNA, 21 bp, Artificial Sequence
  primer
aacatcctagggaagggtgtg

SEQ ID NO: 47679 - DNA, 38 bp, Artificial Sequence
  primer
gtaaaacgacggccagtccttacaagacacgttggcac

SEQ ID NO: 47680 - DNA, 21 bp, Artificial Sequence
  primer
caggattggcagaagccttag

SEQ ID NO: 47681 - DNA, 21 bp, Artificial Sequence
  primer
gctttgccaccaggctattac

SEQ ID NO: 47682 - DNA, 21 bp, Artificial Sequence
  primer
ctgctgtcttccaccctatcc

SEQ ID NO: 47683 - DNA, 38 bp, Artificial Sequence
  primer
gtaaaacgacggccagtatggcagatgacaagaaaggg

SEQ ID NO: 47684 - DNA, 38 bp, Artificial Sequence
  primer
gtaaaacgacggccagtagagagaggctcaagtgggtc

SEQ ID NO: 47685 - DNA, 38 bp, Artificial Sequence
  primer
gtaaaacgacggccagtggagaggtcaatgaggtaggc

SEQ ID NO: 47686 - DNA, 38 bp, Artificial Sequence
  primer
gtaaaacgacggccagtctcctgcagtctgggtttctg

SEQ ID NO: 47687 - DNA, 20 bp, Artificial Sequence
  primer
cagacctcgggaacttctgg

SEQ ID NO: 47688 - DNA, 18 bp, Artificial Sequence
  primer
ctggaacccaggacggac

SEQ ID NO: 47689 - DNA, 21 bp, Artificial Sequence
  primer
aggtctcagacagcaagggtg

SEQ ID NO: 47690 - DNA, 38 bp, Artificial Sequence
  primer
gtaaaacgacggccagttccttaactcatcccgctctc

SEQ ID NO: 47691 - DNA, 21 bp, Artificial Sequence
  primer
tttgctgactgggttgaacag

SEQ ID NO: 47692 - DNA, 21 bp, Artificial Sequence
  primer
actgtccacaagcagagcatc

SEQ ID NO: 47693 - DNA, 22 bp, Artificial Sequence
  primer
aaccacttctgtttccctttcc

SEQ ID NO: 47694 - DNA, 18 bp, Artificial Sequence
  primer
aaactcagtggcctgccc

SEQ ID NO: 47695 - DNA, 21 bp, Artificial Sequence
  primer
ctctgcctcgaaagtgacatc

SEQ ID NO: 47696 - DNA, 36 bp, Artificial Sequence
  primer
gtaaaacgacggccagtccagtgcgctctgtcagtc

SEQ ID NO: 47697 - DNA, 38 bp, Artificial Sequence
  primer
gtaaaacgacggccagtgttcttactgagtttcgggcg

SEQ ID NO: 47698 - DNA, 21 bp, Artificial Sequence
  primer
aacactgatgcagacactgcc

SEQ ID NO: 47699 - DNA, 20 bp, Artificial Sequence
  primer
accacgttggaggaacacag

SEQ ID NO: 47700 - DNA, 38 bp, Artificial Sequence
  primer
gtaaaacgacggccagttactacgcacgccaaagtcac

SEQ ID NO: 47701 - DNA, 38 bp, Artificial Sequence
  primer
gtaaaacgacggccagtcagttcagtgcagggcattac

SEQ ID NO: 47702 - DNA, 20 bp, Artificial Sequence
  primer
ggtagctgcggatacaagcc

SEQ ID NO: 47703 - DNA, 20 bp, Artificial Sequence
  primer
ctgcgcccagccaatataag

SEQ ID NO: 47704 - DNA, 39 bp, Artificial Sequence
  primer
gtaaaacgacggccagtgggacaaagggtctgttatgtg

SEQ ID NO: 47705 - DNA, 38 bp, Artificial Sequence
  primer
gtaaaacgacggccagtatgtttgattacggcaggatg

SEQ ID NO: 47706 - DNA, 39 bp, Artificial Sequence
  primer
gtaaaacgacggccagttgttcactgagtttgccttctg

SEQ ID NO: 47707 - DNA, 38 bp, Artificial Sequence
  primer
gtaaaacgacggccagttctgcctaccacgtttgtcac

SEQ ID NO: 47708 - DNA, 38 bp, Artificial Sequence
  primer
gtaaaacgacggccagtttaaatggtgtttgcctctgc

SEQ ID NO: 47709 - DNA, 40 bp, Artificial Sequence
  primer
gtaaaacgacggccagtgctctcagatacatcagtgtccc

SEQ ID NO: 47710 - DNA, 20 bp, Artificial Sequence
  primer
cactgctaaatgggactgcg

SEQ ID NO: 47711 - DNA, 21 bp, Artificial Sequence
  primer
tggagggaagatgctgtgtaa

SEQ ID NO: 47712 - DNA, 39 bp, Artificial Sequence
  primer
gtaaaacgacggccagttcaaattaacttgctcttgggc

SEQ ID NO: 47713 - DNA, 39 bp, Artificial Sequence
  primer
gtaaaacgacggccagtcccaacctaaacagtgcatttg

SEQ ID NO: 47714 - DNA, 40 bp, Artificial Sequence
  primer
gtaaaacgacggccagttcccttaaaggctagaaacatcc

SEQ ID NO: 47715 - DNA, 21 bp, Artificial Sequence
  primer
caaagctgaagcctgtgtctc

SEQ ID NO: 47716 - DNA, 39 bp, Artificial Sequence
  primer
gtaaaacgacggccagtaggttctccaacctgactgaag

SEQ ID NO: 47717 - DNA, 21 bp, Artificial Sequence
  primer
tgaggcaagttcgtttctgtc

SEQ ID NO: 47718 - DNA, 39 bp, Artificial Sequence
  primer
gtaaaacgacggccagtgctccctaaagttcagtcaagg

SEQ ID NO: 47719 - DNA, 37 bp, Artificial Sequence
  primer
gtaaaacgacggccagtgcagacgactcggtaactgg

SEQ ID NO: 47720 - DNA, 37 bp, Artificial Sequence
  primer
gtaaaacgacggccagtgaactcccagaactttgccc

SEQ ID NO: 47721 - DNA, 21 bp, Artificial Sequence
  primer
agtggagggactaggctcaag

SEQ ID NO: 47722 - DNA, 37 bp, Artificial Sequence
  primer
gtaaaacgacggccagtaggtagtgtgtgccagtgcc

SEQ ID NO: 47723 - DNA, 38 bp, Artificial Sequence
  primer
gtaaaacgacggccagttggaagagttggatggtgttg

SEQ ID NO: 47724 - DNA, 38 bp, Artificial Sequence
  primer
gtaaaacgacggccagtgcacctgagttctagcttccc

SEQ ID NO: 47725 - DNA, 37 bp, Artificial Sequence
  primer
gtaaaacgacggccagtctcggcggtacctttaccag

SEQ ID NO: 47726 - DNA, 21 bp, Artificial Sequence
  primer
tttaccagaagcaggattggc

SEQ ID NO: 47727 - DNA, 38 bp, Artificial Sequence
  primer
gtaaaacgacggccagttgccagtgaaatttctgaagg

SEQ ID NO: 47728 - DNA, 23 bp, Artificial Sequence
  primer
ttccaagaggccttcagtaattt

SEQ ID NO: 47729 - DNA, 44 bp, Artificial Sequence
  primer
gtaaaacgacggccagtcaaatttaaatgcttatcagtttcaga

SEQ ID NO: 47730 - DNA, 38 bp, Artificial Sequence
  primer
gtaaaacgacggccagtgtgggtgggatgggagtatag

SEQ ID NO: 47731 - DNA, 43 bp, Artificial Sequence
  primer
gtaaaacgacggccagtggtattagcatcttggtttgagttta

SEQ ID NO: 47732 - DNA, 38 bp, Artificial Sequence
  primer
gtaaaacgacggccagtaccgtatttcatgtgtcctgc

SEQ ID NO: 47733 - DNA, 30 bp, Artificial Sequence
  primer
tgataatttcaagtaccaaaggaatattta

SEQ ID NO: 47734 - DNA, 21 bp, Artificial Sequence
  primer
tggaacgatcttggaaggaac

SEQ ID NO: 47735 - DNA, 23 bp, Artificial Sequence
  primer
tgtcattgaaagatgacagatgc

SEQ ID NO: 47736 - DNA, 23 bp, Artificial Sequence
  primer
tccaggtttgaagcatgtagttg

SEQ ID NO: 47737 - DNA, 21 bp, Artificial Sequence
  primer
acccagaactctccctgaaac

SEQ ID NO: 47738 - DNA, 38 bp, Artificial Sequence
  primer
gtaaaacgacggccagttgcgacgtttagcgactattg

SEQ ID NO: 47739 - DNA, 22 bp, Artificial Sequence
  primer
cggctatggattacaagctgac

SEQ ID NO: 47740 - DNA, 38 bp, Artificial Sequence
  primer
gtaaaacgacggccagttgccttaatgaacagtgctgg

SEQ ID NO: 47741 - DNA, 21 bp, Artificial Sequence
  primer
tttcatttctggatgcctttg

SEQ ID NO: 47742 - DNA, 21 bp, Artificial Sequence
  primer
tgcattacatcaagcatgtgg

SEQ ID NO: 47743 - DNA, 37 bp, Artificial Sequence
  primer
gtaaaacgacggccagtcggcaaagaagcaacttgag

SEQ ID NO: 47744 - DNA, 41 bp, Artificial Sequence
  primer
gtaaaacgacggccagtggaacaatttgggaaactttaatc

SEQ ID NO: 47745 - DNA, 38 bp, Artificial Sequence
  primer
gtaaaacgacggccagtttggtaatcatggaaacaggc

SEQ ID NO: 47746 - DNA, 21 bp, Artificial Sequence
  primer
aactcgcttcctatgggtcag

SEQ ID NO: 47747 - DNA, 38 bp, Artificial Sequence
  primer
gtaaaacgacggccagtgcagactggagacacaagtgg

SEQ ID NO: 47748 - DNA, 21 bp, Artificial Sequence
  primer
cactggtcccaggtaggagac

SEQ ID NO: 47749 - DNA, 38 bp, Artificial Sequence
  primer
gtaaaacgacggccagtctagtggtgcgaatcctggag

SEQ ID NO: 47750 - DNA, 21 bp, Artificial Sequence
  primer
ggcttggtgctacttctcagc

SEQ ID NO: 47751 - DNA, 21 bp, Artificial Sequence
  primer
cattgggtaggcaaatgcttg

SEQ ID NO: 47752 - DNA, 21 bp, Artificial Sequence
  primer
gtaggactgaaagtctggccc

SEQ ID NO: 47753 - DNA, 37 bp, Artificial Sequence
  primer
gtaaaacgacggccagtgtaggaggcggtgggtagag

SEQ ID NO: 47754 - DNA, 21 bp, Artificial Sequence
  primer
ctctaggagtggttggttggg

SEQ ID NO: 47755 - DNA, 37 bp, Artificial Sequence
  primer
gtaaaacgacggccagtcctgatgttcctctaggccc

SEQ ID NO: 47756 - DNA, 38 bp, Artificial Sequence
  primer
gtaaaacgacggccagtcagggaggacccttaacactc

SEQ ID NO: 47757 - DNA, 21 bp, Artificial Sequence
  primer
cccaagtgtggactcctcttc

SEQ ID NO: 47758 - DNA, 20 bp, Artificial Sequence
  primer
tggctcccggactaagaaac

SEQ ID NO: 47759 - DNA, 22 bp, Artificial Sequence
  primer
tggtgtctgccatcttatttcc

SEQ ID NO: 47760 - DNA, 37 bp, Artificial Sequence
  primer
gtaaaacgacggccagtggcccagtgggactagaaag

SEQ ID NO: 47761 - DNA, 38 bp, Artificial Sequence
  primer
gtaaaacgacggccagtagagtcaacttcagggatggg

SEQ ID NO: 47762 - DNA, 37 bp, Artificial Sequence
  primer
gtaaaacgacggccagtcatgcacacagtccaaccag

SEQ ID NO: 47763 - DNA, 21 bp, Artificial Sequence
  primer
ggattaggtgatcggagcttg

SEQ ID NO: 47764 - DNA, 20 bp, Artificial Sequence
  primer
aactacaggcatgcaccacc

SEQ ID NO: 47765 - DNA, 39 bp, Artificial Sequence
  primer
gtaaaacgacggccagttcttgcattctgtcttgtatgc

SEQ ID NO: 47766 - DNA, 38 bp, Artificial Sequence
  primer
gtaaaacgacggccagtacatttgcagcaccgtgtaag

SEQ ID NO: 47767 - DNA, 19 bp, Artificial Sequence
  primer
gttcaaggcatgacaagcg

SEQ ID NO: 47768 - DNA, 36 bp, Artificial Sequence
  primer
gtaaaacgacggccagtgcctcgcacttctgactcg

SEQ ID NO: 47769 - DNA, 39 bp, Artificial Sequence
  primer
gtaaaacgacggccagtgaaattgtagctctcgctgtgg

SEQ ID NO: 47770 - DNA, 21 bp, Artificial Sequence
  primer
agttgttgcaggtggagtctg

SEQ ID NO: 47771 - DNA, 21 bp, Artificial Sequence
  primer
atgggagacctctttgctcag

SEQ ID NO: 47772 - DNA, 20 bp, Artificial Sequence
  primer
ttccctgtggttgactttgg

SEQ ID NO: 47773 - DNA, 38 bp, Artificial Sequence
  primer
gtaaaacgacggccagtggcagcacacctgactatttg

SEQ ID NO: 47774 - DNA, 21 bp, Artificial Sequence
  primer
agcacatgctccagttacgtg

SEQ ID NO: 47775 - DNA, 19 bp, Artificial Sequence
  primer
aaccaccgagccacatagg

SEQ ID NO: 47776 - DNA, 21 bp, Artificial Sequence
  primer
atttccctccggaagatgaag

SEQ ID NO: 47777 - DNA, 21 bp, Artificial Sequence
  primer
tgctagggcttagagctggag

SEQ ID NO: 47778 - DNA, 38 bp, Artificial Sequence
  primer
gtaaaacgacggccagtaacacagacctgtgaagggtg

SEQ ID NO: 47779 - DNA, 21 bp, Artificial Sequence
  primer
gatccgtgggacacatagctc

SEQ ID NO: 47780 - DNA, 38 bp, Artificial Sequence
  primer
gtaaaacgacggccagttcaccattctccctcattctg

SEQ ID NO: 47781 - DNA, 38 bp, Artificial Sequence
  primer
gtaaaacgacggccagtagtgaatagttgggcaccagg

SEQ ID NO: 47782 - DNA, 38 bp, Artificial Sequence
  primer
gtaaaacgacggccagtgctgacctgacgactcacatc

SEQ ID NO: 47783 - DNA, 21 bp, Artificial Sequence
  primer
tgcaattaaaggagtcgggtc

SEQ ID NO: 47784 - DNA, 21 bp, Artificial Sequence
  primer
ttctgagcaatggagcttacc

SEQ ID NO: 47785 - DNA, 21 bp, Artificial Sequence
  primer
ttctctcacaggtttgcaagg

SEQ ID NO: 47786 - DNA, 38 bp, Artificial Sequence
  primer
gtaaaacgacggccagtgttccttccgcagcttgtatc

SEQ ID NO: 47787 - DNA, 38 bp, Artificial Sequence
  primer
gtaaaacgacggccagtatacccacctaagatgtcgcc

SEQ ID NO: 47788 - DNA, 38 bp, Artificial Sequence
  primer
gtaaaacgacggccagtgagcaccaagcacacagtagg

SEQ ID NO: 47789 - DNA, 38 bp, Artificial Sequence
  primer
gtaaaacgacggccagttccacctccaggtttcatagg

SEQ ID NO: 47790 - DNA, 21 bp, Artificial Sequence
  primer
tcccaacaagaaattcatccc

SEQ ID NO: 47791 - DNA, 38 bp, Artificial Sequence
  primer
gtaaaacgacggccagtatggctgaggtggagagtctg

SEQ ID NO: 47792 - DNA, 21 bp, Artificial Sequence
  primer
gctcccagagaacagagatcg

SEQ ID NO: 47793 - DNA, 21 bp, Artificial Sequence
  primer
agcagtgaccacatctatccg

SEQ ID NO: 47794 - DNA, 21 bp, Artificial Sequence
  primer
aaaggtaggtggtccctctgg

SEQ ID NO: 47795 - DNA, 38 bp, Artificial Sequence
  primer
gtaaaacgacggccagtccaggaggaaatcaggacatc

SEQ ID NO: 47796 - DNA, 21 bp, Artificial Sequence
  primer
actcagtccatgcttgtcgag

SEQ ID NO: 47797 - DNA, 38 bp, Artificial Sequence
  primer
gtaaaacgacggccagtgatgcaggagtatacggtggg

SEQ ID NO: 47798 - DNA, 21 bp, Artificial Sequence
  primer
cttcattccacttccctgtcg

SEQ ID NO: 47799 - DNA, 37 bp, Artificial Sequence
  primer
gtaaaacgacggccagtctcctggagaagatgggagg

SEQ ID NO: 47800 - DNA, 20 bp, Artificial Sequence
  primer
ggaagccatgcagaagtgag

SEQ ID NO: 47801 - DNA, 38 bp, Artificial Sequence
  primer
gtaaaacgacggccagtggtatgtactcaggctgtggc

SEQ ID NO: 47802 - DNA, 39 bp, Artificial Sequence
  primer
gtaaaacgacggccagtttccctgctggaagtagatgag

SEQ ID NO: 47803 - DNA, 27 bp, Artificial Sequence
  primer
aggaaatactttcaaggattatgaaga

SEQ ID NO: 47804 - DNA, 20 bp, Artificial Sequence
  primer
catgtcaagatcgggaaagc

SEQ ID NO: 47805 - DNA, 21 bp, Artificial Sequence
  primer
agcagtagcccaaaccatgag

SEQ ID NO: 47806 - DNA, 21 bp, Artificial Sequence
  primer
tgtatcacagatgggtttgcc

SEQ ID NO: 47807 - DNA, 38 bp, Artificial Sequence
  primer
gtaaaacgacggccagtaatcgaactggaggaaggagg

SEQ ID NO: 47808 - DNA, 20 bp, Artificial Sequence
  primer
tctgtttctgtgggcatgtg

SEQ ID NO: 47809 - DNA, 38 bp, Artificial Sequence
  primer
gtaaaacgacggccagtgtgggtgaaatggaggttgag

SEQ ID NO: 47810 - DNA, 38 bp, Artificial Sequence
  primer
gtaaaacgacggccagttgttaccatcactgacctgcc

SEQ ID NO: 47811 - DNA, 38 bp, Artificial Sequence
  primer
gtaaaacgacggccagtcagcagagaggagaggtttgg

SEQ ID NO: 47812 - DNA, 35 bp, Artificial Sequence
  primer
gtaaaacgacggccagtccgggaggcagagcttac

SEQ ID NO: 47813 - DNA, 21 bp, Artificial Sequence
  primer
aggcccagatgctcttagttg

SEQ ID NO: 47814 - DNA, 38 bp, Artificial Sequence
  primer
gtaaaacgacggccagtattgccagctgcttgagaaac

SEQ ID NO: 47815 - DNA, 37 bp, Artificial Sequence
  primer
gtaaaacgacggccagttcctcatctggccttgaatg

SEQ ID NO: 47816 - DNA, 40 bp, Artificial Sequence
  primer
gtaaaacgacggccagtaagactttggtcaagactctggg

SEQ ID NO: 47817 - DNA, 42 bp, Artificial Sequence
  primer
gtaaaacgacggccagtttcagtcttgccttctgtcttagtc

SEQ ID NO: 47818 - DNA, 42 bp, Artificial Sequence
  primer
gtaaaacgacggccagttgagcaccagatcctatatcattgt

SEQ ID NO: 47819 - DNA, 21 bp, Artificial Sequence
  primer
tgagatgttcaagcttggctg

SEQ ID NO: 47820 - DNA, 21 bp, Artificial Sequence
  primer
tgaatgctaaagaggccacag

SEQ ID NO: 47821 - DNA, 38 bp, Artificial Sequence
  primer
gtaaaacgacggccagtttccagatttgtgctctctgg

SEQ ID NO: 47822 - DNA, 37 bp, Artificial Sequence
  primer
gtaaaacgacggccagtatttcagcatggagtggctg

SEQ ID NO: 47823 - DNA, 21 bp, Artificial Sequence
  primer
tctgctatcattctgcatccc

SEQ ID NO: 47824 - DNA, 21 bp, Artificial Sequence
  primer
ctagacaaggcccgtatcagc

SEQ ID NO: 47825 - DNA, 38 bp, Artificial Sequence
  primer
gtaaaacgacggccagtcccacctggctaaattcacag

SEQ ID NO: 47826 - DNA, 37 bp, Artificial Sequence
  primer
gtaaaacgacggccagtatttgcccaccttgacctct

SEQ ID NO: 47827 - DNA, 21 bp, Artificial Sequence
  primer
gagctggtcagtgaaacaagg

SEQ ID NO: 47828 - DNA, 40 bp, Artificial Sequence
  primer
gtaaaacgacggccagtaagcagggactaggtagagagga

SEQ ID NO: 47829 - DNA, 38 bp, Artificial Sequence
  primer
gtaaaacgacggccagtacaaatgcgtattgcttgtgg

SEQ ID NO: 47830 - DNA, 20 bp, Artificial Sequence
  primer
ccacagagcaagaccctgtc

SEQ ID NO: 47831 - DNA, 38 bp, Artificial Sequence
  primer
gtaaaacgacggccagtagagaaagcacagtgatggga

SEQ ID NO: 47832 - DNA, 21 bp, Artificial Sequence
  primer
atttcttccagttcctgtggc

SEQ ID NO: 47833 - DNA, 21 bp, Artificial Sequence
  primer
atgcttcattcagacttgggc

SEQ ID NO: 47834 - DNA, 21 bp, Artificial Sequence
  primer
aacgttgttggacatacagcc

SEQ ID NO: 47835 - DNA, 39 bp, Artificial Sequence
  primer
gtaaaacgacggccagtcattctttatccagaaatgccc

SEQ ID NO: 47836 - DNA, 38 bp, Artificial Sequence
  primer
gtaaaacgacggccagtgcagtgtcagcttcagctttg

SEQ ID NO: 47837 - DNA, 24 bp, Artificial Sequence
  primer
tgtttgtgtgtaccacactgtacg

SEQ ID NO: 47838 - DNA, 40 bp, Artificial Sequence
  primer
gtaaaacgacggccagtcctgacattcctgaatcagtcac

SEQ ID NO: 47839 - DNA, 40 bp, Artificial Sequence
  primer
gtaaaacgacggccagtccaatgattaggagagtgtttgg

SEQ ID NO: 47840 - DNA, 21 bp, Artificial Sequence
  primer
ctcattaatgggagggactgc

SEQ ID NO: 47841 - DNA, 21 bp, Artificial Sequence
  primer
ctgggtgacatagcaagatcc

SEQ ID NO: 47842 - DNA, 21 bp, Artificial Sequence
  primer
atgatgccagaagcaaagagg

SEQ ID NO: 47843 - DNA, 38 bp, Artificial Sequence
  primer
gtaaaacgacggccagttgttcttcgggaacttgcttc

SEQ ID NO: 47844 - DNA, 38 bp, Artificial Sequence
  primer
gtaaaacgacggccagtgactgggactgaggctttcac

SEQ ID NO: 47845 - DNA, 21 bp, Artificial Sequence
  primer
tgcattagtgcaggatgtgtg

SEQ ID NO: 47846 - DNA, 39 bp, Artificial Sequence
  primer
gtaaaacgacggccagtggcctgcttacatttctaggtg

SEQ ID NO: 47847 - DNA, 38 bp, Artificial Sequence
  primer
gtaaaacgacggccagttcatgcatcacaggactttcc

SEQ ID NO: 47848 - DNA, 21 bp, Artificial Sequence
  primer
tgaagcatgtgaggtgagagg

SEQ ID NO: 47849 - DNA, 20 bp, Artificial Sequence
  primer
cggcaagcgttagaagtgag

SEQ ID NO: 47850 - DNA, 21 bp, Artificial Sequence
  primer
tgttcgcacagaattgaacag

SEQ ID NO: 47851 - DNA, 38 bp, Artificial Sequence
  primer
gtaaaacgacggccagtgaatcagggaaagtggtcctg

SEQ ID NO: 47852 - DNA, 38 bp, Artificial Sequence
  primer
gtaaaacgacggccagttactcatgcaaggtcagggag

SEQ ID NO: 47853 - DNA, 21 bp, Artificial Sequence
  primer
gtacctgctgcgaatgatgac

SEQ ID NO: 47854 - DNA, 20 bp, Artificial Sequence
  primer
ggtaccctgtttctggcagg

SEQ ID NO: 47855 - DNA, 38 bp, Artificial Sequence
  primer
gtaaaacgacggccagttagtgtattggagggaaggcg

SEQ ID NO: 47856 - DNA, 44 bp, Artificial Sequence
  primer
gtaaaacgacggccagttttctaagtggtgataaattgctgaac

SEQ ID NO: 47857 - DNA, 22 bp, Artificial Sequence
  primer
caatgcaatggtgttatccaac

SEQ ID NO: 47858 - DNA, 22 bp, Artificial Sequence
  primer
tttgaggtccaaactaccttgc

SEQ ID NO: 47859 - DNA, 40 bp, Artificial Sequence
  primer
gtaaaacgacggccagttcctctgatagaaggaaatgcac

SEQ ID NO: 47860 - DNA, 21 bp, Artificial Sequence
  primer
accagctgcatgtacgaagtg

SEQ ID NO: 47861 - DNA, 25 bp, Artificial Sequence
  primer
catatctccttccacatttagaacc

SEQ ID NO: 47862 - DNA, 21 bp, Artificial Sequence
  primer
tgggattatctccctggtgtc

SEQ ID NO: 47863 - DNA, 37 bp, Artificial Sequence
  primer
gtaaaacgacggccagttttcctcatcttgcctgtgc

SEQ ID NO: 47864 - DNA, 38 bp, Artificial Sequence
  primer
gtaaaacgacggccagttggtggaaggctttgaagaag

SEQ ID NO: 47865 - DNA, 21 bp, Artificial Sequence
  primer
gaaagggaggcaggtggtatc

SEQ ID NO: 47866 - DNA, 41 bp, Artificial Sequence
  primer
gtaaaacgacggccagtcctgaatggtttcctttataagcc

SEQ ID NO: 47867 - DNA, 21 bp, Artificial Sequence
  primer
tgggtcctttaaacatggctc

SEQ ID NO: 47868 - DNA, 38 bp, Artificial Sequence
  primer
gtaaaacgacggccagtgtggcaacacccattataccc

SEQ ID NO: 47869 - DNA, 21 bp, Artificial Sequence
  primer
gctccacctgtatgagctttg

SEQ ID NO: 47870 - DNA, 24 bp, Artificial Sequence
  primer
ttggtaggttactgacagatgcac

SEQ ID NO: 47871 - DNA, 41 bp, Artificial Sequence
  primer
gtaaaacgacggccagttcagacttcatagagaagcagaaa

SEQ ID NO: 47872 - DNA, 39 bp, Artificial Sequence
  primer
gtaaaacgacggccagtaattgtccaccagcaaggtatc

SEQ ID NO: 47873 - DNA, 38 bp, Artificial Sequence
  primer
gtaaaacgacggccagtcagaacaatcaggcaccaaag

SEQ ID NO: 47874 - DNA, 38 bp, Artificial Sequence
  primer
gtaaaacgacggccagtggacagattctctcattgccc

SEQ ID NO: 47875 - DNA, 28 bp, Artificial Sequence
  primer
aagcctagatagaaagcatatagttggt

SEQ ID NO: 47876 - DNA, 21 bp, Artificial Sequence
  primer
atgagagagtgagaccctgcc

SEQ ID NO: 47877 - DNA, 21 bp, Artificial Sequence
  primer
ttgcctctcaatggtcagatg

SEQ ID NO: 47878 - DNA, 38 bp, Artificial Sequence
  primer
gtaaaacgacggccagtatcgtggagatagagaacggg

SEQ ID NO: 47879 - DNA, 23 bp, Artificial Sequence
  primer
caccctcagtgagtatttcctcc

SEQ ID NO: 47880 - DNA, 38 bp, Artificial Sequence
  primer
gtaaaacgacggccagtaggaatagtcctgcttgtgcc

SEQ ID NO: 47881 - DNA, 38 bp, Artificial Sequence
  primer
gtaaaacgacggccagtcacctctctgagcttccatcc

SEQ ID NO: 47882 - DNA, 22 bp, Artificial Sequence
  primer
tgtgtgcaccctctaatctcag

SEQ ID NO: 47883 - DNA, 41 bp, Artificial Sequence
  primer
gtaaaacgacggccagttgatatccattcaggcatttacag

SEQ ID NO: 47884 - DNA, 21 bp, Artificial Sequence
  primer
ggccagaactgtgatagtggg

SEQ ID NO: 47885 - DNA, 37 bp, Artificial Sequence
  primer
gtaaaacgacggccagtgctcaagcggtagtgtccag

SEQ ID NO: 47886 - DNA, 38 bp, Artificial Sequence
  primer
gtaaaacgacggccagttccaacataccttgctgcttc

SEQ ID NO: 47887 - DNA, 38 bp, Artificial Sequence
  primer
gtaaaacgacggccagtcctctgttgccttgactacgg

SEQ ID NO: 47888 - DNA, 29 bp, Artificial Sequence
  primer
ttcagttacctctttcaagtagtttatca

SEQ ID NO: 47889 - DNA, 38 bp, Artificial Sequence
  primer
gtaaaacgacggccagtgagatgggtagaggaaggtgg

SEQ ID NO: 47890 - DNA, 38 bp, Artificial Sequence
  primer
gtaaaacgacggccagtgccagaacaaacttaccaccc

SEQ ID NO: 47891 - DNA, 21 bp, Artificial Sequence
  primer
caactcaccggtgtgactttc

SEQ ID NO: 47892 - DNA, 38 bp, Artificial Sequence
  primer
gtaaaacgacggccagtatgttccatatcaggccaacc

SEQ ID NO: 47893 - DNA, 38 bp, Artificial Sequence
  primer
gtaaaacgacggccagtaacaatgtgggcattgacttg

SEQ ID NO: 47894 - DNA, 24 bp, Artificial Sequence
  primer
aagctactcaactggaatactggg

SEQ ID NO: 47895 - DNA, 21 bp, Artificial Sequence
  primer
actggtggagtaggacatggg

SEQ ID NO: 47896 - DNA, 38 bp, Artificial Sequence
  primer
gtaaaacgacggccagtactgctacgtgggagatgagg

SEQ ID NO: 47897 - DNA, 21 bp, Artificial Sequence
  primer
ctatgaaggttatgccctgcc

SEQ ID NO: 47898 - DNA, 21 bp, Artificial Sequence
  primer
gtagccctggactttgagcag

SEQ ID NO: 47899 - DNA, 18 bp, Artificial Sequence
  primer
cgggaaagacttgcatcg

SEQ ID NO: 47900 - DNA, 18 bp, Artificial Sequence
  primer
ctccagggaggacggttg

SEQ ID NO: 47901 - DNA, 21 bp, Artificial Sequence
  primer
acttcctctaccatcctcggg

SEQ ID NO: 47902 - DNA, 38 bp, Artificial Sequence
  primer
gtaaaacgacggccagtctgggtaggaatatgggatgg

SEQ ID NO: 47903 - DNA, 38 bp, Artificial Sequence
  primer
gtaaaacgacggccagtagggtgtacaggagggagatg

SEQ ID NO: 47904 - DNA, 38 bp, Artificial Sequence
  primer
gtaaaacgacggccagtctgcactattcctgcaagacc

SEQ ID NO: 47905 - DNA, 38 bp, Artificial Sequence
  primer
gtaaaacgacggccagtcagttgaggccttctccattc

SEQ ID NO: 47906 - DNA, 21 bp, Artificial Sequence
  primer
tcccaagggaggtccttctac

SEQ ID NO: 47907 - DNA, 38 bp, Artificial Sequence
  primer
gtaaaacgacggccagtacagcaacaccaagtgtgagg

SEQ ID NO: 47908 - DNA, 21 bp, Artificial Sequence
  primer
agtgtggcatatgtgggaaag

SEQ ID NO: 47909 - DNA, 21 bp, Artificial Sequence
  primer
atatgagtgcagcgaatgtgg

SEQ ID NO: 47910 - DNA, 38 bp, Artificial Sequence
  primer
gtaaaacgacggccagttgaaggagacatgctggactg

SEQ ID NO: 47911 - DNA, 21 bp, Artificial Sequence
  primer
agagcagtatggctccttccc

SEQ ID NO: 47912 - DNA, 22 bp, Artificial Sequence
  primer
tctaacctcctgtcccattctg

SEQ ID NO: 47913 - DNA, 38 bp, Artificial Sequence
  primer
gtaaaacgacggccagtttcttgcaggttgaggatgtg

SEQ ID NO: 47914 - DNA, 21 bp, Artificial Sequence
  primer
agaacgatatggaggtggtgc

SEQ ID NO: 47915 - DNA, 40 bp, Artificial Sequence
  primer
gtaaaacgacggccagttgctactttgtgtgaatctttgg

SEQ ID NO: 47916 - DNA, 39 bp, Artificial Sequence
  primer
gtaaaacgacggccagtcattctgcagtccttgtgagtg

SEQ ID NO: 47917 - DNA, 39 bp, Artificial Sequence
  primer
gtaaaacgacggccagtaacaggttgttcctttcagcag

SEQ ID NO: 47918 - DNA, 41 bp, Artificial Sequence
  primer
gtaaaacgacggccagtggaatcaaatggaattctttaagc

SEQ ID NO: 47919 - DNA, 40 bp, Artificial Sequence
  primer
gtaaaacgacggccagttcagtctttcccaaatagacgat

SEQ ID NO: 47920 - DNA, 44 bp, Artificial Sequence
  primer
gtaaaacgacggccagtcattccgacatacttaactcttctgtg

SEQ ID NO: 47921 - DNA, 25 bp, Artificial Sequence
  primer
ttctggagggatttatagattggag

SEQ ID NO: 47922 - DNA, 22 bp, Artificial Sequence
  primer
tgacagctgttattggttggac

SEQ ID NO: 47923 - DNA, 43 bp, Artificial Sequence
  primer
gtaaaacgacggccagtaactgacagaaatatccagtttcatc

SEQ ID NO: 47924 - DNA, 38 bp, Artificial Sequence
  primer
gtaaaacgacggccagtagctgttgatttgattgtggc

SEQ ID NO: 47925 - DNA, 39 bp, Artificial Sequence
  primer
gtaaaacgacggccagttggtgaattgtgaaagtgtcag

SEQ ID NO: 47926 - DNA, 38 bp, Artificial Sequence
  primer
gtaaaacgacggccagtaccaagctccaacactggatg

SEQ ID NO: 47927 - DNA, 40 bp, Artificial Sequence
  primer
gtaaaacgacggccagttgctaagtgaatgagcattaggg

SEQ ID NO: 47928 - DNA, 38 bp, Artificial Sequence
  primer
gtaaaacgacggccagtaaagctgggtggaatgttgag

SEQ ID NO: 47929 - DNA, 38 bp, Artificial Sequence
  primer
gtaaaacgacggccagtcttcacaagccagcacaaatc

SEQ ID NO: 47930 - DNA, 43 bp, Artificial Sequence
  primer
gtaaaacgacggccagttgaatagcacatctgaactagacgta

SEQ ID NO: 47931 - DNA, 21 bp, Artificial Sequence
  primer
aagggtgccagcttcttacag

SEQ ID NO: 47932 - DNA, 26 bp, Artificial Sequence
  primer
caggagtatcttgtaggaaagaaacg

SEQ ID NO: 47933 - DNA, 41 bp, Artificial Sequence
  primer
gtaaaacgacggccagtacaacagctccatgtcaaagatag

SEQ ID NO: 47934 - DNA, 37 bp, Artificial Sequence
  primer
gtaaaacgacggccagtctggcctgactcttggtgac

SEQ ID NO: 47935 - DNA, 37 bp, Artificial Sequence
  primer
gtaaaacgacggccagttcagtgcccaggaggtacag

SEQ ID NO: 47936 - DNA, 21 bp, Artificial Sequence
  primer
gggatctgaagaagtgggatg

SEQ ID NO: 47937 - DNA, 21 bp, Artificial Sequence
  primer
atcccattcgtgaggactttc

SEQ ID NO: 47938 - DNA, 22 bp, Artificial Sequence
  primer
tgtgtcctcttattgccacagg

SEQ ID NO: 47939 - DNA, 21 bp, Artificial Sequence
  primer
gccagttagcataaggtgtgg

SEQ ID NO: 47940 - DNA, 21 bp, Artificial Sequence
  primer
acacaaccacacagttcccag

SEQ ID NO: 47941 - DNA, 38 bp, Artificial Sequence
  primer
gtaaaacgacggccagttgctgtcgatcactccagaag

SEQ ID NO: 47942 - DNA, 20 bp, Artificial Sequence
  primer
agacaggagggcaaatggtc

SEQ ID NO: 47943 - DNA, 21 bp, Artificial Sequence
  primer
tcgaagtttgttgagagcagg

SEQ ID NO: 47944 - DNA, 38 bp, Artificial Sequence
  primer
gtaaaacgacggccagtcacctcctgccatataccgtc

SEQ ID NO: 47945 - DNA, 21 bp, Artificial Sequence
  primer
attgcctcccagaagaaactg

SEQ ID NO: 47946 - DNA, 21 bp, Artificial Sequence
  primer
tcccagtggatattggagagg

SEQ ID NO: 47947 - DNA, 21 bp, Artificial Sequence
  primer
tgcccagtttaccaatgtctg

SEQ ID NO: 47948 - DNA, 21 bp, Artificial Sequence
  primer
tagcccagcaataccatgttg

SEQ ID NO: 47949 - DNA, 38 bp, Artificial Sequence
  primer
gtaaaacgacggccagtgcatgtatggacatggtacgg

SEQ ID NO: 47950 - DNA, 38 bp, Artificial Sequence
  primer
gtaaaacgacggccagtcaatgcttattacacggctgc

SEQ ID NO: 47951 - DNA, 21 bp, Artificial Sequence
  primer
cactgaatagccgacttctcg

SEQ ID NO: 47952 - DNA, 40 bp, Artificial Sequence
  primer
gtaaaacgacggccagttttgaagacgacatttgggtaac

SEQ ID NO: 47953 - DNA, 22 bp, Artificial Sequence
  primer
cgttattattgtggcaagcaag

SEQ ID NO: 47954 - DNA, 21 bp, Artificial Sequence
  primer
ttggatgaaagatccatttgc

SEQ ID NO: 47955 - DNA, 37 bp, Artificial Sequence
  primer
gtaaaacgacggccagtgatccctttatccgggtctc

SEQ ID NO: 47956 - DNA, 39 bp, Artificial Sequence
  primer
gtaaaacgacggccagtgtgcagccatgactatactccc

SEQ ID NO: 47957 - DNA, 35 bp, Artificial Sequence
  primer
gtaaaacgacggccagtctcaaggcccgctaccag

SEQ ID NO: 47958 - DNA, 21 bp, Artificial Sequence
  primer
gggctgagaactttaccttgg

SEQ ID NO: 47959 - DNA, 38 bp, Artificial Sequence
  primer
gtaaaacgacggccagtacaagggcaagaactctccag

SEQ ID NO: 47960 - DNA, 21 bp, Artificial Sequence
  primer
agcattgcatggactatctgg

SEQ ID NO: 47961 - DNA, 38 bp, Artificial Sequence
  primer
gtaaaacgacggccagttgggtaggtgagggaaagatg

SEQ ID NO: 47962 - DNA, 37 bp, Artificial Sequence
  primer
gtaaaacgacggccagttgagcctgttctggctcttg

SEQ ID NO: 47963 - DNA, 38 bp, Artificial Sequence
  primer
gtaaaacgacggccagtcctgtgaggagtcttgtggtc

SEQ ID NO: 47964 - DNA, 38 bp, Artificial Sequence
  primer
gtaaaacgacggccagttttagctcttgccaaacctcc

SEQ ID NO: 47965 - DNA, 38 bp, Artificial Sequence
  primer
gtaaaacgacggccagtctatgggatttctccagagcc

SEQ ID NO: 47966 - DNA, 37 bp, Artificial Sequence
  primer
gtaaaacgacggccagtccggacctctcaggctaatc

SEQ ID NO: 47967 - DNA, 40 bp, Artificial Sequence
  primer
gtaaaacgacggccagtgagaacacctgtggaaagtcttg

SEQ ID NO: 47968 - DNA, 39 bp, Artificial Sequence
  primer
gtaaaacgacggccagttttacagacctccatgtggctt

SEQ ID NO: 47969 - DNA, 20 bp, Artificial Sequence
  primer
agcctgggtgatggagtgag

SEQ ID NO: 47970 - DNA, 21 bp, Artificial Sequence
  primer
gtcctcaatgtgctccctttc

SEQ ID NO: 47971 - DNA, 38 bp, Artificial Sequence
  primer
gtaaaacgacggccagttaacaggcttccaggatgatg

SEQ ID NO: 47972 - DNA, 38 bp, Artificial Sequence
  primer
gtaaaacgacggccagtggctttgaacatgtcctgaaa

SEQ ID NO: 47973 - DNA, 21 bp, Artificial Sequence
  primer
gttgaccttgctttctccgtc

SEQ ID NO: 47974 - DNA, 22 bp, Artificial Sequence
  primer
gaggcatttgatacaatccagg

SEQ ID NO: 47975 - DNA, 24 bp, Artificial Sequence
  primer
aaacacaaatgccctaattattca

SEQ ID NO: 47976 - DNA, 42 bp, Artificial Sequence
  primer
gtaaaacgacggccagtcatgattcagataccttgattgctc

SEQ ID NO: 47977 - DNA, 24 bp, Artificial Sequence
  primer
ctctcctgtgatgtcaggtagttg

SEQ ID NO: 47978 - DNA, 38 bp, Artificial Sequence
  primer
gtaaaacgacggccagtacagatgctaatgccacctga

SEQ ID NO: 47979 - DNA, 21 bp, Artificial Sequence
  primer
tgcagtgaaccgtgattatgc

SEQ ID NO: 47980 - DNA, 23 bp, Artificial Sequence
  primer
accatttgcttaagaaaccagtg

SEQ ID NO: 47981 - DNA, 21 bp, Artificial Sequence
  primer
caggtaagcagggatttctgg

SEQ ID NO: 47982 - DNA, 38 bp, Artificial Sequence
  primer
gtaaaacgacggccagttggtgtgtaagaggaagctgg

SEQ ID NO: 47983 - DNA, 37 bp, Artificial Sequence
  primer
gtaaaacgacggccagtacattactggctgcagggtg

SEQ ID NO: 47984 - DNA, 37 bp, Artificial Sequence
  primer
gtaaaacgacggccagtcatccacaagcccaatgaag

SEQ ID NO: 47985 - DNA, 21 bp, Artificial Sequence
  primer
tagagtgcccaggccttaaac

SEQ ID NO: 47986 - DNA, 21 bp, Artificial Sequence
  primer
gtgtggcgcttatggctttag

SEQ ID NO: 47987 - DNA, 21 bp, Artificial Sequence
  primer
gagcaggcaaggtgttatgtg

SEQ ID NO: 47988 - DNA, 21 bp, Artificial Sequence
  primer
tgagagaaggcatctgctagg

SEQ ID NO: 47989 - DNA, 38 bp, Artificial Sequence
  primer
gtaaaacgacggccagttccaagaaggattgacattgg

SEQ ID NO: 47990 - DNA, 38 bp, Artificial Sequence
  primer
gtaaaacgacggccagtgatccagcttctggacacctc

SEQ ID NO: 47991 - DNA, 38 bp, Artificial Sequence
  primer
gtaaaacgacggccagtttaccttcactgcgtcctgag

SEQ ID NO: 47992 - DNA, 38 bp, Artificial Sequence
  primer
gtaaaacgacggccagtaagaggagaaaggccagcttc

SEQ ID NO: 47993 - DNA, 21 bp, Artificial Sequence
  primer
cctcttggatcaggtggactc

SEQ ID NO: 47994 - DNA, 37 bp, Artificial Sequence
  primer
gtaaaacgacggccagtacgcccgcctctactacatc

SEQ ID NO: 47995 - DNA, 21 bp, Artificial Sequence
  primer
caccacatccactggtctcac

SEQ ID NO: 47996 - DNA, 21 bp, Artificial Sequence
  primer
aactttgccgacctctttctg

SEQ ID NO: 47997 - DNA, 39 bp, Artificial Sequence
  primer
gtaaaacgacggccagtcccttattgagaaagaggtggg

SEQ ID NO: 47998 - DNA, 38 bp, Artificial Sequence
  primer
gtaaaacgacggccagtttgccaatgaactccatgaac

SEQ ID NO: 47999 - DNA, 38 bp, Artificial Sequence
  primer
gtaaaacgacggccagtaggcctgttggtttctagcac

SEQ ID NO: 48000 - DNA, 21 bp, Artificial Sequence
  primer
tcctgacagctgtagtggagg

SEQ ID NO: 48001 - DNA, 21 bp, Artificial Sequence
  primer
tcctgtgaaagggtatggtgc

SEQ ID NO: 48002 - DNA, 20 bp, Artificial Sequence
  primer
aaccctgccacacatgagac

SEQ ID NO: 48003 - DNA, 38 bp, Artificial Sequence
  primer
gtaaaacgacggccagtaagaagaccgtgtatggtggg

SEQ ID NO: 48004 - DNA, 39 bp, Artificial Sequence
  primer
gtaaaacgacggccagtcctctgttatcatggttcccag

SEQ ID NO: 48005 - DNA, 36 bp, Artificial Sequence
  primer
gtaaaacgacggccagtcctcaggagagatgctgcc

SEQ ID NO: 48006 - DNA, 36 bp, Artificial Sequence
  primer
gtaaaacgacggccagtcacgaggctctgttcctcc

SEQ ID NO: 48007 - DNA, 21 bp, Artificial Sequence
  primer
agagatggatacaagcgtggg

SEQ ID NO: 48008 - DNA, 38 bp, Artificial Sequence
  primer
gtaaaacgacggccagtagagctgtcagtgggtcagtg

SEQ ID NO: 48009 - DNA, 21 bp, Artificial Sequence
  primer
ctcagtgagagctgtttgggc

SEQ ID NO: 48010 - DNA, 21 bp, Artificial Sequence
  primer
cagttgcctcacacaggattg

SEQ ID NO: 48011 - DNA, 36 bp, Artificial Sequence
  primer
gtaaaacgacggccagtgaacctgcctggaaacagc

SEQ ID NO: 48012 - DNA, 38 bp, Artificial Sequence
  primer
gtaaaacgacggccagtgttgtttgtgggtgagcactg

SEQ ID NO: 48013 - DNA, 21 bp, Artificial Sequence
  primer
tcagagaagtctaccgcctgc

SEQ ID NO: 48014 - DNA, 38 bp, Artificial Sequence
  primer
gtaaaacgacggccagtgtgacaggatggtcactcagg

SEQ ID NO: 48015 - DNA, 18 bp, Artificial Sequence
  primer
gagacccggagagggagg

SEQ ID NO: 48016 - DNA, 21 bp, Artificial Sequence
  primer
gaatagttgatgccagcccag

SEQ ID NO: 48017 - DNA, 21 bp, Artificial Sequence
  primer
gctgcccatgaagtctctacc

SEQ ID NO: 48018 - DNA, 21 bp, Artificial Sequence
  primer
ctctggcaagtcccatgaatc

SEQ ID NO: 48019 - DNA, 21 bp, Artificial Sequence
  primer
agacctgtggcctgctcttag

SEQ ID NO: 48020 - DNA, 21 bp, Artificial Sequence
  primer
tgtcttggacttggtctgtgc

SEQ ID NO: 48021 - DNA, 37 bp, Artificial Sequence
  primer
gtaaaacgacggccagtcctttgttgtgcttgcttcc

SEQ ID NO: 48022 - DNA, 38 bp, Artificial Sequence
  primer
gtaaaacgacggccagtctgagctcataaggccacctg

SEQ ID NO: 48023 - DNA, 21 bp, Artificial Sequence
  primer
agccaagctaggagccttctc

SEQ ID NO: 48024 - DNA, 38 bp, Artificial Sequence
  primer
gtaaaacgacggccagtgtcctgtagccagaagcaagg

SEQ ID NO: 48025 - DNA, 36 bp, Artificial Sequence
  primer
gtaaaacgacggccagtggtgaaggagggtgcagag

SEQ ID NO: 48026 - DNA, 38 bp, Artificial Sequence
  primer
gtaaaacgacggccagtttcctcagtctagaggccacc

SEQ ID NO: 48027 - DNA, 38 bp, Artificial Sequence
  primer
gtaaaacgacggccagtcttaaggtgagtctgggcacc

SEQ ID NO: 48028 - DNA, 36 bp, Artificial Sequence
  primer
gtaaaacgacggccagtgaaagggagccagggaaag

SEQ ID NO: 48029 - DNA, 20 bp, Artificial Sequence
  primer
ctagaaggctgcagcgtgag

SEQ ID NO: 48030 - DNA, 38 bp, Artificial Sequence
  primer
gtaaaacgacggccagtccatggtaactgacttgcctc

SEQ ID NO: 48031 - DNA, 37 bp, Artificial Sequence
  primer
gtaaaacgacggccagtagaaccagtgtccagggttg

SEQ ID NO: 48032 - DNA, 36 bp, Artificial Sequence
  primer
gtaaaacgacggccagtcaaggctcatggaccatcc

SEQ ID NO: 48033 - DNA, 35 bp, Artificial Sequence
  primer
gtaaaacgacggccagtgtgctgctgcctgtggac

SEQ ID NO: 48034 - DNA, 20 bp, Artificial Sequence
  primer
gagaaatgtcttggctgccc

SEQ ID NO: 48035 - DNA, 36 bp, Artificial Sequence
  primer
gtaaaacgacggccagttcagtgtgggtcctctgga

SEQ ID NO: 48036 - DNA, 37 bp, Artificial Sequence
  primer
gtaaaacgacggccagtacatgcagtgtgtgcagagg

SEQ ID NO: 48037 - DNA, 38 bp, Artificial Sequence
  primer
gtaaaacgacggccagtcaccaagactgggagatggac

SEQ ID NO: 48038 - DNA, 37 bp, Artificial Sequence
  primer
gtaaaacgacggccagtagtgggaacaggcagtcctc

SEQ ID NO: 48039 - DNA, 38 bp, Artificial Sequence
  primer
gtaaaacgacggccagttccttgggctagagaggaaac

SEQ ID NO: 48040 - DNA, 38 bp, Artificial Sequence
  primer
gtaaaacgacggccagtgatcctcccacttctgactcc

SEQ ID NO: 48041 - DNA, 21 bp, Artificial Sequence
  primer
tcaacttgaaacaaggccaag

SEQ ID NO: 48042 - DNA, 38 bp, Artificial Sequence
  primer
gtaaaacgacggccagtacagcctgggtaagctctcag

SEQ ID NO: 48043 - DNA, 21 bp, Artificial Sequence
  primer
gagcacctggtgggaatagag

SEQ ID NO: 48044 - DNA, 38 bp, Artificial Sequence
  primer
gtaaaacgacggccagtaggccagttgtaggaatgagc

SEQ ID NO: 48045 - DNA, 37 bp, Artificial Sequence
  primer
gtaaaacgacggccagtacacttgaccacttggtgcc

SEQ ID NO: 48046 - DNA, 21 bp, Artificial Sequence
  primer
tatacatcgtgtcagagggcg

SEQ ID NO: 48047 - DNA, 38 bp, Artificial Sequence
  primer
gtaaaacgacggccagttttgcagctgcttacaacctc

SEQ ID NO: 48048 - DNA, 37 bp, Artificial Sequence
  primer
gtaaaacgacggccagtcaaaggcctaccgctctttc

SEQ ID NO: 48049 - DNA, 38 bp, Artificial Sequence
  primer
gtaaaacgacggccagtaggacagtctctaggcgcatc

SEQ ID NO: 48050 - DNA, 21 bp, Artificial Sequence
  primer
ttccctttattcttggcattg

SEQ ID NO: 48051 - DNA, 38 bp, Artificial Sequence
  primer
gtaaaacgacggccagtggtggttctctctgttctggc

SEQ ID NO: 48052 - DNA, 21 bp, Artificial Sequence
  primer
ctctgagactggcccttgttg

SEQ ID NO: 48053 - DNA, 38 bp, Artificial Sequence
  primer
gtaaaacgacggccagtgaagagttccagccacgattc

SEQ ID NO: 48054 - DNA, 21 bp, Artificial Sequence
  primer
ttcatgctggatttccatagg

SEQ ID NO: 48055 - DNA, 20 bp, Artificial Sequence
  primer
tccagaaacagggctgtgag

SEQ ID NO: 48056 - DNA, 36 bp, Artificial Sequence
  primer
gtaaaacgacggccagtgtgttaggtgggtggcagg

SEQ ID NO: 48057 - DNA, 21 bp, Artificial Sequence
  primer
agaaacaacccttgcagttcc

SEQ ID NO: 48058 - DNA, 38 bp, Artificial Sequence
  primer
gtaaaacgacggccagtctctacctgcctgcattcttg

SEQ ID NO: 48059 - DNA, 21 bp, Artificial Sequence
  primer
gaggagaggagtcgtggattg

SEQ ID NO: 48060 - DNA, 38 bp, Artificial Sequence
  primer
gtaaaacgacggccagtatatgtgcctggaatcccatc

SEQ ID NO: 48061 - DNA, 21 bp, Artificial Sequence
  primer
ccctggagctaccatcttgtc

SEQ ID NO: 48062 - DNA, 21 bp, Artificial Sequence
  primer
tctctaggcgtgcttgaaagg

SEQ ID NO: 48063 - DNA, 20 bp, Artificial Sequence
  primer
caagaacctctggctgttgc

SEQ ID NO: 48064 - DNA, 38 bp, Artificial Sequence
  primer
gtaaaacgacggccagtctatggtttgaagagcccgag

SEQ ID NO: 48065 - DNA, 38 bp, Artificial Sequence
  primer
gtaaaacgacggccagtccctgtggtacttcctgatgg

SEQ ID NO: 48066 - DNA, 21 bp, Artificial Sequence
  primer
ttccctcctgaggaatcattt

SEQ ID NO: 48067 - DNA, 24 bp, Artificial Sequence
  primer
ttctgcagtgatatttgcagtttc

SEQ ID NO: 48068 - DNA, 21 bp, Artificial Sequence
  primer
cttcactgactgggctgagtg

SEQ ID NO: 48069 - DNA, 21 bp, Artificial Sequence
  primer
acagcatctgaaattccacgc

SEQ ID NO: 48070 - DNA, 38 bp, Artificial Sequence
  primer
gtaaaacgacggccagtttggctacttcagttaggccc

SEQ ID NO: 48071 - DNA, 44 bp, Artificial Sequence
  primer
gtaaaacgacggccagtaagttagcaaatagaaaccttgaaatg

SEQ ID NO: 48072 - DNA, 38 bp, Artificial Sequence
  primer
gtaaaacgacggccagttgggcaatttattgtttggtg

SEQ ID NO: 48073 - DNA, 41 bp, Artificial Sequence
  primer
gtaaaacgacggccagtgggaattatttgcataagtggatg

SEQ ID NO: 48074 - DNA, 21 bp, Artificial Sequence
  primer
acgcaaatttgtttgaaaggc

SEQ ID NO: 48075 - DNA, 36 bp, Artificial Sequence
  primer
gtaaaacgacggccagtgacgagagaggcggagttg

SEQ ID NO: 48076 - DNA, 21 bp, Artificial Sequence
  primer
acaaagaggaacaatcgcagg

SEQ ID NO: 48077 - DNA, 38 bp, Artificial Sequence
  primer
gtaaaacgacggccagtagaagagaagccttgtggcag

SEQ ID NO: 48078 - DNA, 38 bp, Artificial Sequence
  primer
gtaaaacgacggccagttgggttactaagaaccacggg

SEQ ID NO: 48079 - DNA, 38 bp, Artificial Sequence
  primer
gtaaaacgacggccagtatgagcttgccagtttgttcc

SEQ ID NO: 48080 - DNA, 21 bp, Artificial Sequence
  primer
gctggaagctatcctggagac

SEQ ID NO: 48081 - DNA, 38 bp, Artificial Sequence
  primer
gtaaaacgacggccagtggaagacacctttgggaaatg

SEQ ID NO: 48082 - DNA, 38 bp, Artificial Sequence
  primer
gtaaaacgacggccagtcttcatctcccagagaatggg

SEQ ID NO: 48083 - DNA, 21 bp, Artificial Sequence
  primer
aaaggagccagacgttctcag

SEQ ID NO: 48084 - DNA, 38 bp, Artificial Sequence
  primer
gtaaaacgacggccagtagaccaacaatacgacagggc

SEQ ID NO: 48085 - DNA, 38 bp, Artificial Sequence
  primer
gtaaaacgacggccagtatcgggaatattgcctgagtc

SEQ ID NO: 48086 - DNA, 38 bp, Artificial Sequence
  primer
gtaaaacgacggccagtagaaagtcagtgtcacccagc

SEQ ID NO: 48087 - DNA, 21 bp, Artificial Sequence
  primer
caaatctcctgggcagatgac

SEQ ID NO: 48088 - DNA, 21 bp, Artificial Sequence
  primer
tcctaaattcactcgtgcagc

SEQ ID NO: 48089 - DNA, 35 bp, Artificial Sequence
  primer
gtaaaacgacggccagtcctctgaggaccgacgct

SEQ ID NO: 48090 - DNA, 38 bp, Artificial Sequence
  primer
gtaaaacgacggccagtggaagaagctgctgaacaacc

SEQ ID NO: 48091 - DNA, 38 bp, Artificial Sequence
  primer
gtaaaacgacggccagtttgtcccaggagtgaatgttg

SEQ ID NO: 48092 - DNA, 38 bp, Artificial Sequence
  primer
gtaaaacgacggccagttcacactgcatggttgggtag

SEQ ID NO: 48093 - DNA, 38 bp, Artificial Sequence
  primer
gtaaaacgacggccagtgatcctgaaagccagtgttcc

SEQ ID NO: 48094 - DNA, 37 bp, Artificial Sequence
  primer
gtaaaacgacggccagttcaaaggaccggacacgtag

SEQ ID NO: 48095 - DNA, 19 bp, Artificial Sequence
  primer
gaaatgtgcttccgacacg

SEQ ID NO: 48096 - DNA, 19 bp, Artificial Sequence
  primer
cagtgtgcactcgggacag

SEQ ID NO: 48097 - DNA, 35 bp, Artificial Sequence
  primer
gtaaaacgacggccagtgctcctgctcggagtgtg

SEQ ID NO: 48098 - DNA, 38 bp, Artificial Sequence
  primer
gtaaaacgacggccagtcgccaagcagtgtaaactcac

SEQ ID NO: 48099 - DNA, 37 bp, Artificial Sequence
  primer
gtaaaacgacggccagtgagtgtggcagaggcttcac

SEQ ID NO: 48100 - DNA, 38 bp, Artificial Sequence
  primer
gtaaaacgacggccagtcaagggctttgtgaaacactc

SEQ ID NO: 48101 - DNA, 21 bp, Artificial Sequence
  primer
cactcaaagctcatcgagcac

SEQ ID NO: 48102 - DNA, 37 bp, Artificial Sequence
  primer
gtaaaacgacggccagtagcagcagtagccaccactc

SEQ ID NO: 48103 - DNA, 40 bp, Artificial Sequence
  primer
gtaaaacgacggccagtgagtctcatggatgtttgtgctc

SEQ ID NO: 48104 - DNA, 24 bp, Artificial Sequence
  primer
tcagccagtgattattgtgtcttg

SEQ ID NO: 48105 - DNA, 36 bp, Artificial Sequence
  primer
gtaaaacgacggccagttttggccatatgttgcagg

SEQ ID NO: 48106 - DNA, 40 bp, Artificial Sequence
  primer
gtaaaacgacggccagtatgtaaccgtgagaaggtgattg

SEQ ID NO: 48107 - DNA, 21 bp, Artificial Sequence
  primer
atcacaaattcaccctgaacg

SEQ ID NO: 48108 - DNA, 25 bp, Artificial Sequence
  primer
cacatgtaagctgatacaagttccc

SEQ ID NO: 48109 - DNA, 35 bp, Artificial Sequence
  primer
gtaaaacgacggccagtgcgggcacctgttattcc

SEQ ID NO: 48110 - DNA, 20 bp, Artificial Sequence
  primer
gatggagaatccaaggtgcc

SEQ ID NO: 48111 - DNA, 21 bp, Artificial Sequence
  primer
cagtgattgggccagacattc

SEQ ID NO: 48112 - DNA, 38 bp, Artificial Sequence
  primer
gtaaaacgacggccagtcttcgcaagacaccaagaagg

SEQ ID NO: 48113 - DNA, 21 bp, Artificial Sequence
  primer
tgcactgtgaattctgtgctg

SEQ ID NO: 48114 - DNA, 38 bp, Artificial Sequence
  primer
gtaaaacgacggccagtgtgctttccctccattgtgtg

SEQ ID NO: 48115 - DNA, 38 bp, Artificial Sequence
  primer
gtaaaacgacggccagtctgctcttcacttgcctccag

SEQ ID NO: 48116 - DNA, 38 bp, Artificial Sequence
  primer
gtaaaacgacggccagttccttaatgtgatccagccac

SEQ ID NO: 48117 - DNA, 38 bp, Artificial Sequence
  primer
gtaaaacgacggccagttgtatcccatgaaaccagctc

SEQ ID NO: 48118 - DNA, 38 bp, Artificial Sequence
  primer
gtaaaacgacggccagtagcactgagcatcaaccactc

SEQ ID NO: 48119 - DNA, 21 bp, Artificial Sequence
  primer
ctccgaacagcttcttgtcag

SEQ ID NO: 48120 - DNA, 21 bp, Artificial Sequence
  primer
gggaacccaaacaagtctctc

SEQ ID NO: 48121 - DNA, 36 bp, Artificial Sequence
  primer
gtaaaacgacggccagtctggctgcatggagttgtg

SEQ ID NO: 48122 - DNA, 38 bp, Artificial Sequence
  primer
gtaaaacgacggccagttgggaagtctgttgtttccag

SEQ ID NO: 48123 - DNA, 38 bp, Artificial Sequence
  primer
gtaaaacgacggccagtagaaggctgattcgtcacagg

SEQ ID NO: 48124 - DNA, 21 bp, Artificial Sequence
  primer
caccagcgacaagtgtctttc

SEQ ID NO: 48125 - DNA, 21 bp, Artificial Sequence
  primer
gcccacatttcttattccacc

SEQ ID NO: 48126 - DNA, 39 bp, Artificial Sequence
  primer
gtaaaacgacggccagtggaagtcctttagtcgtggctc

SEQ ID NO: 48127 - DNA, 21 bp, Artificial Sequence
  primer
atgtaagcagtgtgggaaggc

SEQ ID NO: 48128 - DNA, 38 bp, Artificial Sequence
  primer
gtaaaacgacggccagtctgcagtcaggactctgggac

SEQ ID NO: 48129 - DNA, 38 bp, Artificial Sequence
  primer
gtaaaacgacggccagtatttggtaaccctgcatttgg

SEQ ID NO: 48130 - DNA, 22 bp, Artificial Sequence
  primer
ggcataacagactgccactgtc

SEQ ID NO: 48131 - DNA, 41 bp, Artificial Sequence
  primer
gtaaaacgacggccagttgtatcacaccaaaggtaaggatg

SEQ ID NO: 48132 - DNA, 38 bp, Artificial Sequence
  primer
gtaaaacgacggccagtctgagttcatagggtcctggg

SEQ ID NO: 48133 - DNA, 40 bp, Artificial Sequence
  primer
gtaaaacgacggccagtccttccgggtgagatatattgtg

SEQ ID NO: 48134 - DNA, 38 bp, Artificial Sequence
  primer
gtaaaacgacggccagtagggccaaagtatgctcagtc

SEQ ID NO: 48135 - DNA, 22 bp, Artificial Sequence
  primer
gccaattggtatcaaccaagac

SEQ ID NO: 48136 - DNA, 19 bp, Artificial Sequence
  primer
ctcggtttcctcccgtctc

SEQ ID NO: 48137 - DNA, 21 bp, Artificial Sequence
  primer
ccacctcccagagagattgtg

SEQ ID NO: 48138 - DNA, 38 bp, Artificial Sequence
  primer
gtaaaacgacggccagttgggcatttcgactcctatac

SEQ ID NO: 48139 - DNA, 38 bp, Artificial Sequence
  primer
gtaaaacgacggccagtggagcgactagagtctggagg

SEQ ID NO: 48140 - DNA, 38 bp, Artificial Sequence
  primer
gtaaaacgacggccagttctgtggtatcttcaggctgg

SEQ ID NO: 48141 - DNA, 21 bp, Artificial Sequence
  primer
ttatgctccatttctttgccc

SEQ ID NO: 48142 - DNA, 21 bp, Artificial Sequence
  primer
tgacgggaagtgaagtgtctc

SEQ ID NO: 48143 - DNA, 38 bp, Artificial Sequence
  primer
gtaaaacgacggccagtccagcttagtggaagctctgc

SEQ ID NO: 48144 - DNA, 38 bp, Artificial Sequence
  primer
gtaaaacgacggccagtctggagagtaagatgctgccc

SEQ ID NO: 48145 - DNA, 21 bp, Artificial Sequence
  primer
cagaggtgctgccaaactatg

SEQ ID NO: 48146 - DNA, 38 bp, Artificial Sequence
  primer
gtaaaacgacggccagtccattcccttatcccagtagc

SEQ ID NO: 48147 - DNA, 39 bp, Artificial Sequence
  primer
gtaaaacgacggccagtcaaccaacgctctagaccagac

SEQ ID NO: 48148 - DNA, 38 bp, Artificial Sequence
  primer
gtaaaacgacggccagttggagggtgtgggagtagaag

SEQ ID NO: 48149 - DNA, 21 bp, Artificial Sequence
  primer
cagggatagtaaggcaatggg

SEQ ID NO: 48150 - DNA, 38 bp, Artificial Sequence
  primer
gtaaaacgacggccagttatctgttgggagggaaggag

SEQ ID NO: 48151 - DNA, 38 bp, Artificial Sequence
  primer
gtaaaacgacggccagtgtgggctgaataggtcagtgg

SEQ ID NO: 48152 - DNA, 35 bp, Artificial Sequence
  primer
gtaaaacgacggccagtctgtgcggtgtggctgac

SEQ ID NO: 48153 - DNA, 38 bp, Artificial Sequence
  primer
gtaaaacgacggccagtccaatgtgcaatggaactgta

SEQ ID NO: 48154 - DNA, 18 bp, Artificial Sequence
  primer
catggcagcctgttcctg

SEQ ID NO: 48155 - DNA, 38 bp, Artificial Sequence
  primer
gtaaaacgacggccagtgtggaacttcattgcttggtg

SEQ ID NO: 48156 - DNA, 21 bp, Artificial Sequence
  primer
acctggtgggaagctattgag

SEQ ID NO: 48157 - DNA, 21 bp, Artificial Sequence
  primer
catcccagtaccaatccagtg

SEQ ID NO: 48158 - DNA, 24 bp, Artificial Sequence
  primer
gaagtatattgttctcgctgttcg

SEQ ID NO: 48159 - DNA, 39 bp, Artificial Sequence
  primer
gtaaaacgacggccagtgcttgcagtttaggatcacagc

SEQ ID NO: 48160 - DNA, 38 bp, Artificial Sequence
  primer
gtaaaacgacggccagtgtcactggcagtctttcccag

SEQ ID NO: 48161 - DNA, 38 bp, Artificial Sequence
  primer
gtaaaacgacggccagtcggagtcctccatctttcaat

SEQ ID NO: 48162 - DNA, 36 bp, Artificial Sequence
  primer
gtaaaacgacggccagtgtgatgggttgacaggtgc

SEQ ID NO: 48163 - DNA, 40 bp, Artificial Sequence
  primer
gtaaaacgacggccagtggctgaacaataacacacattgg

SEQ ID NO: 48164 - DNA, 22 bp, Artificial Sequence
  primer
caggcctttcttaagaccttgc

SEQ ID NO: 48165 - DNA, 38 bp, Artificial Sequence
  primer
gtaaaacgacggccagttgagcatttgggtggttactg

SEQ ID NO: 48166 - DNA, 22 bp, Artificial Sequence
  primer
gctccctcgtttcgatctttag

SEQ ID NO: 48167 - DNA, 37 bp, Artificial Sequence
  primer
gtaaaacgacggccagtactcattgattgccaccagc

SEQ ID NO: 48168 - DNA, 38 bp, Artificial Sequence
  primer
gtaaaacgacggccagtcattcgcttctttgattggtg

SEQ ID NO: 48169 - DNA, 20 bp, Artificial Sequence
  primer
aggccaatgggtcatctttc

SEQ ID NO: 48170 - DNA, 21 bp, Artificial Sequence
  primer
cacccaaagtaaatgcagtgg

SEQ ID NO: 48171 - DNA, 39 bp, Artificial Sequence
  primer
gtaaaacgacggccagttttgtcacattgaagaacaggg

SEQ ID NO: 48172 - DNA, 38 bp, Artificial Sequence
  primer
gtaaaacgacggccagtttctggtggtaggaagaaggg

SEQ ID NO: 48173 - DNA, 40 bp, Artificial Sequence
  primer
gtaaaacgacggccagttttgcgtcattaattacacttcg

SEQ ID NO: 48174 - DNA, 38 bp, Artificial Sequence
  primer
gtaaaacgacggccagtaaaccattcgaattaagcgtg

SEQ ID NO: 48175 - DNA, 38 bp, Artificial Sequence
  primer
gtaaaacgacggccagttggtaaactgggctatttggc

SEQ ID NO: 48176 - DNA, 18 bp, Artificial Sequence
  primer
cgctctcctgacctcgtg

SEQ ID NO: 48177 - DNA, 38 bp, Artificial Sequence
  primer
gtaaaacgacggccagtagcagttcagaatcagcctgg

SEQ ID NO: 48178 - DNA, 38 bp, Artificial Sequence
  primer
gtaaaacgacggccagttgtgtgaatggctcctttctg

SEQ ID NO: 48179 - DNA, 38 bp, Artificial Sequence
  primer
gtaaaacgacggccagttaactccgtcatcagcgtttg

SEQ ID NO: 48180 - DNA, 21 bp, Artificial Sequence
  primer
gtacgaaagaggagcgtttcc

SEQ ID NO: 48181 - DNA, 38 bp, Artificial Sequence
  primer
gtaaaacgacggccagtgggaataacggctctgtgaac

SEQ ID NO: 48182 - DNA, 38 bp, Artificial Sequence
  primer
gtaaaacgacggccagtgagctgaggagttcaaggctg

SEQ ID NO: 48183 - DNA, 38 bp, Artificial Sequence
  primer
gtaaaacgacggccagtattagcacagatctggagccc

SEQ ID NO: 48184 - DNA, 21 bp, Artificial Sequence
  primer
ggaaccattgtttggatcagg

SEQ ID NO: 48185 - DNA, 37 bp, Artificial Sequence
  primer
gtaaaacgacggccagtgctctgggacatttccttgc

SEQ ID NO: 48186 - DNA, 22 bp, Artificial Sequence
  primer
tggtttgaatcacctggatttc

SEQ ID NO: 48187 - DNA, 37 bp, Artificial Sequence
  primer
gtaaaacgacggccagtaccaggccattgttcctacc

SEQ ID NO: 48188 - DNA, 22 bp, Artificial Sequence
  primer
gggacagcagcctatttaagtc

SEQ ID NO: 48189 - DNA, 38 bp, Artificial Sequence
  primer
gtaaaacgacggccagtccgtcaccacactgcaaatag

SEQ ID NO: 48190 - DNA, 21 bp, Artificial Sequence
  primer
aattcaaaggcatgggaaatg

SEQ ID NO: 48191 - DNA, 21 bp, Artificial Sequence
  primer
cacacccagcagctaatgttc

SEQ ID NO: 48192 - DNA, 21 bp, Artificial Sequence
  primer
cagggagagactcccattctg

SEQ ID NO: 48193 - DNA, 20 bp, Artificial Sequence
  primer
cctaaagcattcccaccacc

SEQ ID NO: 48194 - DNA, 38 bp, Artificial Sequence
  primer
gtaaaacgacggccagttctgtgtggcaatggaagaag

SEQ ID NO: 48195 - DNA, 41 bp, Artificial Sequence
  primer
gtaaaacgacggccagtaggaaggtcagtgaatacaatgtg

SEQ ID NO: 48196 - DNA, 22 bp, Artificial Sequence
  primer
ttggcatctaatcacactttgg

SEQ ID NO: 48197 - DNA, 38 bp, Artificial Sequence
  primer
gtaaaacgacggccagtggcaataagaacgaaactccg

SEQ ID NO: 48198 - DNA, 41 bp, Artificial Sequence
  primer
gtaaaacgacggccagtcagaggatatgttatcacagtggg

SEQ ID NO: 48199 - DNA, 24 bp, Artificial Sequence
  primer
gctaacctgaaatagatttccctg

SEQ ID NO: 48200 - DNA, 37 bp, Artificial Sequence
  primer
gtaaaacgacggccagtacccatggatatggagggtc

SEQ ID NO: 48201 - DNA, 26 bp, Artificial Sequence
  primer
ggagcttctcataggaacatactagc

SEQ ID NO: 48202 - DNA, 38 bp, Artificial Sequence
  primer
gtaaaacgacggccagtcacttgagaaattgctggcct

SEQ ID NO: 48203 - DNA, 39 bp, Artificial Sequence
  primer
gtaaaacgacggccagttttgaagagctgcatttgatgt

SEQ ID NO: 48204 - DNA, 20 bp, Artificial Sequence
  primer
tgcgaacaattcccttcttg

SEQ ID NO: 48205 - DNA, 38 bp, Artificial Sequence
  primer
gtaaaacgacggccagtcagagcccaagctcttctgtg

SEQ ID NO: 48206 - DNA, 38 bp, Artificial Sequence
  primer
gtaaaacgacggccagtagagtctgtcatgcacatccg

SEQ ID NO: 48207 - DNA, 37 bp, Artificial Sequence
  primer
gtaaaacgacggccagtgaagtgccgcagggagttag

SEQ ID NO: 48208 - DNA, 21 bp, Artificial Sequence
  primer
tctatgcttcactggaagccc

SEQ ID NO: 48209 - DNA, 38 bp, Artificial Sequence
  primer
gtaaaacgacggccagtaagtttgggtgtgggttcttc

SEQ ID NO: 48210 - DNA, 38 bp, Artificial Sequence
  primer
gtaaaacgacggccagttcaagctaactgtggctttgg

SEQ ID NO: 48211 - DNA, 21 bp, Artificial Sequence
  primer
atctatgggtcatgcagttgg

SEQ ID NO: 48212 - DNA, 40 bp, Artificial Sequence
  primer
gtaaaacgacggccagtcccaacaaatggtatattgtgaa

SEQ ID NO: 48213 - DNA, 38 bp, Artificial Sequence
  primer
gtaaaacgacggccagtacatgtggccaagcctatttc

SEQ ID NO: 48214 - DNA, 38 bp, Artificial Sequence
  primer
gtaaaacgacggccagtgcccagaaggcacttacagag

SEQ ID NO: 48215 - DNA, 38 bp, Artificial Sequence
  primer
gtaaaacgacggccagtggagaagcatgacagtagggc

SEQ ID NO: 48216 - DNA, 21 bp, Artificial Sequence
  primer
tgcctgctgaatgaataagcc

SEQ ID NO: 48217 - DNA, 38 bp, Artificial Sequence
  primer
gtaaaacgacggccagtcagtgtgagcttgcaggaatc

SEQ ID NO: 48218 - DNA, 36 bp, Artificial Sequence
  primer
gtaaaacgacggccagtaaatgtgaccttggcgacc

SEQ ID NO: 48219 - DNA, 20 bp, Artificial Sequence
  primer
cccagaggaggaggtagtgc

SEQ ID NO: 48220 - DNA, 21 bp, Artificial Sequence
  primer
tgggtagccaagaaatgtgtg

SEQ ID NO: 48221 - DNA, 21 bp, Artificial Sequence
  primer
acgttgacagacaactgctgc

SEQ ID NO: 48222 - DNA, 19 bp, Artificial Sequence
  primer
tgacctgaaggatttgcgg

SEQ ID NO: 48223 - DNA, 45 bp, Artificial Sequence
  primer
gtaaaacgacggccagtaagtacattatacgatgggaattgattt

SEQ ID NO: 48224 - DNA, 40 bp, Artificial Sequence
  primer
gtaaaacgacggccagtcattgggtaagaaatgagcaatc

SEQ ID NO: 48225 - DNA, 42 bp, Artificial Sequence
  primer
gtaaaacgacggccagtgcatctaaagagtaggcattcattt

SEQ ID NO: 48226 - DNA, 38 bp, Artificial Sequence
  primer
gtaaaacgacggccagttctgtttggtgctggagaaag

SEQ ID NO: 48227 - DNA, 41 bp, Artificial Sequence
  primer
gtaaaacgacggccagttgataccacgaatgttgtcaactc

SEQ ID NO: 48228 - DNA, 21 bp, Artificial Sequence
  primer
gcctctgaaaggactttcctc

SEQ ID NO: 48229 - DNA, 21 bp, Artificial Sequence
  primer
gcccttgggaaatgtttgtat

SEQ ID NO: 48230 - DNA, 39 bp, Artificial Sequence
  primer
gtaaaacgacggccagtaagtgtcccttgattgcagaac

SEQ ID NO: 48231 - DNA, 21 bp, Artificial Sequence
  primer
gagactggaatcaagatgggc

SEQ ID NO: 48232 - DNA, 21 bp, Artificial Sequence
  primer
ggtgggagtatcacttcagga

SEQ ID NO: 48233 - DNA, 26 bp, Artificial Sequence
  primer
tttgtctagctttctttgtagtttga

SEQ ID NO: 48234 - DNA, 39 bp, Artificial Sequence
  primer
gtaaaacgacggccagtttgacattaagcaaggtggttt

SEQ ID NO: 48235 - DNA, 38 bp, Artificial Sequence
  primer
gtaaaacgacggccagtttgaaatttatgtgttgggca

SEQ ID NO: 48236 - DNA, 44 bp, Artificial Sequence
  primer
gtaaaacgacggccagtcccaaattacatatactttcagaaccc

SEQ ID NO: 48237 - DNA, 22 bp, Artificial Sequence
  primer
gggatgcaaacctagatgactc

SEQ ID NO: 48238 - DNA, 22 bp, Artificial Sequence
  primer
gtggtcataggagtcagcttcc

SEQ ID NO: 48239 - DNA, 22 bp, Artificial Sequence
  primer
ctaattcagggtcacttagccc

SEQ ID NO: 48240 - DNA, 42 bp, Artificial Sequence
  primer
gtaaaacgacggccagtaagtacctctttccatatctttgcc

SEQ ID NO: 48241 - DNA, 40 bp, Artificial Sequence
  primer
gtaaaacgacggccagtttggttgatggtagagtgagatg

SEQ ID NO: 48242 - DNA, 25 bp, Artificial Sequence
  primer
tttatcagttactcttccatcctcc

SEQ ID NO: 48243 - DNA, 26 bp, Artificial Sequence
  primer
cgaaacagatcatgatttagactgtg

SEQ ID NO: 48244 - DNA, 21 bp, Artificial Sequence
  primer
tgtcatctctcctttgccatc

SEQ ID NO: 48245 - DNA, 42 bp, Artificial Sequence
  primer
gtaaaacgacggccagtacagtgtgtaaatggtgattcttcc

SEQ ID NO: 48246 - DNA, 22 bp, Artificial Sequence
  primer
tgctctttagtagcacatgccc

SEQ ID NO: 48247 - DNA, 21 bp, Artificial Sequence
  primer
caaagcccatttggtgaagtc

SEQ ID NO: 48248 - DNA, 21 bp, Artificial Sequence
  primer
ctcaagaaatgcctgttgagc

SEQ ID NO: 48249 - DNA, 27 bp, Artificial Sequence
  primer
ttactaagggaagcaataatctttgag

SEQ ID NO: 48250 - DNA, 22 bp, Artificial Sequence
  primer
tgataatgcagagtgcaagagg

SEQ ID NO: 48251 - DNA, 21 bp, Artificial Sequence
  primer
ggaagaaggctaagaggcttg

SEQ ID NO: 48252 - DNA, 40 bp, Artificial Sequence
  primer
gtaaaacgacggccagtcagcagttaggcatacagtctgg

SEQ ID NO: 48253 - DNA, 21 bp, Artificial Sequence
  primer
ttccaggtatcttcttgcctg

SEQ ID NO: 48254 - DNA, 22 bp, Artificial Sequence
  primer
aatgcaaataagctgcaactcc

SEQ ID NO: 48255 - DNA, 38 bp, Artificial Sequence
  primer
gtaaaacgacggccagtagatgctactggttgcacagg

SEQ ID NO: 48256 - DNA, 21 bp, Artificial Sequence
  primer
tgatctgtgtttcttggaggg

SEQ ID NO: 48257 - DNA, 22 bp, Artificial Sequence
  primer
gggaactcaaacatctgtcctg

SEQ ID NO: 48258 - DNA, 22 bp, Artificial Sequence
  primer
catgaaagtccacaaacacctg

SEQ ID NO: 48259 - DNA, 37 bp, Artificial Sequence
  primer
gtaaaacgacggccagttgtttggcaaaggaaccaac

SEQ ID NO: 48260 - DNA, 39 bp, Artificial Sequence
  primer
gtaaaacgacggccagtggttctcagagcaagagcaaac

SEQ ID NO: 48261 - DNA, 39 bp, Artificial Sequence
  primer
gtaaaacgacggccagttttgagcttcaaggataggagg

SEQ ID NO: 48262 - DNA, 38 bp, Artificial Sequence
  primer
gtaaaacgacggccagtccacttgcgtcactacagctc

SEQ ID NO: 48263 - DNA, 38 bp, Artificial Sequence
  primer
gtaaaacgacggccagttttcctgtgtttcagagcagg

SEQ ID NO: 48264 - DNA, 38 bp, Artificial Sequence
  primer
gtaaaacgacggccagtagaatcacccttgcaggacag

SEQ ID NO: 48265 - DNA, 40 bp, Artificial Sequence
  primer
gtaaaacgacggccagtggatgtggtggagaatataggtg

SEQ ID NO: 48266 - DNA, 40 bp, Artificial Sequence
  primer
gtaaaacgacggccagttgactttagaaatccagcatccc

SEQ ID NO: 48267 - DNA, 38 bp, Artificial Sequence
  primer
gtaaaacgacggccagtctgccctttgagagaatgagc

SEQ ID NO: 48268 - DNA, 39 bp, Artificial Sequence
  primer
gtaaaacgacggccagtttgagcctccaatgtgtaagtg

SEQ ID NO: 48269 - DNA, 36 bp, Artificial Sequence
  primer
gtaaaacgacggccagtcagtgtgagtgtgccaggg

SEQ ID NO: 48270 - DNA, 22 bp, Artificial Sequence
  primer
tgtaagtgccctgagtgctatg

SEQ ID NO: 48271 - DNA, 38 bp, Artificial Sequence
  primer
gtaaaacgacggccagtgtcagcctgtcctcatctgtg

SEQ ID NO: 48272 - DNA, 38 bp, Artificial Sequence
  primer
gtaaaacgacggccagttctgaggcctggagaactagc

SEQ ID NO: 48273 - DNA, 21 bp, Artificial Sequence
  primer
ggacagagaagtgggaggaag

SEQ ID NO: 48274 - DNA, 21 bp, Artificial Sequence
  primer
tactcatctcaggatggcagc

SEQ ID NO: 48275 - DNA, 36 bp, Artificial Sequence
  primer
gtaaaacgacggccagtaaggcatccctcgagttcc

SEQ ID NO: 48276 - DNA, 21 bp, Artificial Sequence
  primer
gaatcagcatcccttggtctc

SEQ ID NO: 48277 - DNA, 21 bp, Artificial Sequence
  primer
caggtttcaggagacaaaggg

SEQ ID NO: 48278 - DNA, 21 bp, Artificial Sequence
  primer
tggaatattgggaaaggcatc

SEQ ID NO: 48279 - DNA, 38 bp, Artificial Sequence
  primer
gtaaaacgacggccagtaagcaaagactgagtgggctg

SEQ ID NO: 48280 - DNA, 38 bp, Artificial Sequence
  primer
gtaaaacgacggccagtgaggctgctatgtctgtgctg

SEQ ID NO: 48281 - DNA, 20 bp, Artificial Sequence
  primer
agagcaacgtttgtgccttg

SEQ ID NO: 48282 - DNA, 20 bp, Artificial Sequence
  primer
ctcttccattccctcccatc

SEQ ID NO: 48283 - DNA, 21 bp, Artificial Sequence
  primer
agaaaggatcacaggtggtgg

SEQ ID NO: 48284 - DNA, 21 bp, Artificial Sequence
  primer
ccctgtctgagtctctgctcc

SEQ ID NO: 48285 - DNA, 21 bp, Artificial Sequence
  primer
tgtgtgagacctggagattgg

SEQ ID NO: 48286 - DNA, 38 bp, Artificial Sequence
  primer
gtaaaacgacggccagttttcttaggccactttgggtg

SEQ ID NO: 48287 - DNA, 38 bp, Artificial Sequence
  primer
gtaaaacgacggccagtacgcaggtttgaggagttagc

SEQ ID NO: 48288 - DNA, 21 bp, Artificial Sequence
  primer
tgggaacatgtccttcatgtg

SEQ ID NO: 48289 - DNA, 22 bp, Artificial Sequence
  primer
gacggcctactttactcacagc

SEQ ID NO: 48290 - DNA, 21 bp, Artificial Sequence
  primer
gatgtcccagagaccaagagg

SEQ ID NO: 48291 - DNA, 37 bp, Artificial Sequence
  primer
gtaaaacgacggccagtatgagtgtggaccagccttg

SEQ ID NO: 48292 - DNA, 37 bp, Artificial Sequence
  primer
gtaaaacgacggccagtcaatgggctagaggagaggg

SEQ ID NO: 48293 - DNA, 38 bp, Artificial Sequence
  primer
gtaaaacgacggccagtgcttggctaagaggctgaaag

SEQ ID NO: 48294 - DNA, 37 bp, Artificial Sequence
  primer
gtaaaacgacggccagtgccattgcagaaggaaggag

SEQ ID NO: 48295 - DNA, 20 bp, Artificial Sequence
  primer
gcctcccgtctgtacctttc

SEQ ID NO: 48296 - DNA, 38 bp, Artificial Sequence
  primer
gtaaaacgacggccagtggttaggttgcttggtccctg

SEQ ID NO: 48297 - DNA, 38 bp, Artificial Sequence
  primer
gtaaaacgacggccagtggagatcaagctcatcaaggg

SEQ ID NO: 48298 - DNA, 38 bp, Artificial Sequence
  primer
gtaaaacgacggccagttgcagattggagacaagatcc

SEQ ID NO: 48299 - DNA, 38 bp, Artificial Sequence
  primer
gtaaaacgacggccagtcctaactttggctcttctggc

SEQ ID NO: 48300 - DNA, 20 bp, Artificial Sequence
  primer
gaccagatcctgtcggtgag

SEQ ID NO: 48301 - DNA, 38 bp, Artificial Sequence
  primer
gtaaaacgacggccagttggcccttagaactcttcctc

SEQ ID NO: 48302 - DNA, 21 bp, Artificial Sequence
  primer
ttatagtcagcgtttggtccc

SEQ ID NO: 48303 - DNA, 38 bp, Artificial Sequence
  primer
gtaaaacgacggccagtctggcccagagtatggagaag

SEQ ID NO: 48304 - DNA, 38 bp, Artificial Sequence
  primer
gtaaaacgacggccagtgtaggtggaggagggtgtgag

SEQ ID NO: 48305 - DNA, 38 bp, Artificial Sequence
  primer
gtaaaacgacggccagtggtgagaggagcactgagttg

SEQ ID NO: 48306 - DNA, 21 bp, Artificial Sequence
  primer
agacagtgacgcagatggaag

SEQ ID NO: 48307 - DNA, 38 bp, Artificial Sequence
  primer
gtaaaacgacggccagtagctccctttcaccaaaggac

SEQ ID NO: 48308 - DNA, 22 bp, Artificial Sequence
  primer
ttactctgtccatacccgcttc

SEQ ID NO: 48309 - DNA, 21 bp, Artificial Sequence
  primer
gaagctccgtagatgtccctg

SEQ ID NO: 48310 - DNA, 38 bp, Artificial Sequence
  primer
gtaaaacgacggccagtatggcttggagagttggaaag

SEQ ID NO: 48311 - DNA, 38 bp, Artificial Sequence
  primer
gtaaaacgacggccagttggatgtggatttctagtgcc

SEQ ID NO: 48312 - DNA, 38 bp, Artificial Sequence
  primer
gtaaaacgacggccagtgggaatgctaagaggacccac

SEQ ID NO: 48313 - DNA, 21 bp, Artificial Sequence
  primer
caggacctggttcctctatcc

SEQ ID NO: 48314 - DNA, 21 bp, Artificial Sequence
  primer
atctacgggaagtgttgggac

SEQ ID NO: 48315 - DNA, 38 bp, Artificial Sequence
  primer
gtaaaacgacggccagtgccttgtcatcagtctcaccc

SEQ ID NO: 48316 - DNA, 19 bp, Artificial Sequence
  primer
acagtagagctggcgggag

SEQ ID NO: 48317 - DNA, 37 bp, Artificial Sequence
  primer
gtaaaacgacggccagtcagctccctagagcctcagc

SEQ ID NO: 48318 - DNA, 21 bp, Artificial Sequence
  primer
aggtatttggagtgaggtggc

SEQ ID NO: 48319 - DNA, 21 bp, Artificial Sequence
  primer
ttagctgtttcaaatggcctg

SEQ ID NO: 48320 - DNA, 38 bp, Artificial Sequence
  primer
gtaaaacgacggccagtctcataggtttccatcctggg

SEQ ID NO: 48321 - DNA, 38 bp, Artificial Sequence
  primer
gtaaaacgacggccagtctgagcgtgtatgtgaggcac

SEQ ID NO: 48322 - DNA, 36 bp, Artificial Sequence
  primer
gtaaaacgacggccagtagggtgcaggcgtagacag

SEQ ID NO: 48323 - DNA, 21 bp, Artificial Sequence
  primer
actcctgactttggcaccttg

SEQ ID NO: 48324 - DNA, 38 bp, Artificial Sequence
  primer
gtaaaacgacggccagtgaccattgctttacctctggg

SEQ ID NO: 48325 - DNA, 38 bp, Artificial Sequence
  primer
gtaaaacgacggccagtgacaggctggaagacaggaag

SEQ ID NO: 48326 - DNA, 38 bp, Artificial Sequence
  primer
gtaaaacgacggccagtgactctgaaggctccaacagc

SEQ ID NO: 48327 - DNA, 21 bp, Artificial Sequence
  primer
gcgactccattaagttccagc

SEQ ID NO: 48328 - DNA, 18 bp, Artificial Sequence
  primer
gcacccactaccatgccc

SEQ ID NO: 48329 - DNA, 38 bp, Artificial Sequence
  primer
gtaaaacgacggccagtgggaaaggcttgtgtaagtcc

SEQ ID NO: 48330 - DNA, 38 bp, Artificial Sequence
  primer
gtaaaacgacggccagtcttgcctggtctgtgtgtttc

SEQ ID NO: 48331 - DNA, 38 bp, Artificial Sequence
  primer
gtaaaacgacggccagtctgttccatatcaaggctccc

SEQ ID NO: 48332 - DNA, 21 bp, Artificial Sequence
  primer
gggatagagctgtgtgtctgg

SEQ ID NO: 48333 - DNA, 21 bp, Artificial Sequence
  primer
tagctgtgtcacaatgggagc

SEQ ID NO: 48334 - DNA, 21 bp, Artificial Sequence
  primer
ctcctcctcctagggaacagc

SEQ ID NO: 48335 - DNA, 38 bp, Artificial Sequence
  primer
gtaaaacgacggccagtaatgtgtctgctctgctcagg

SEQ ID NO: 48336 - DNA, 21 bp, Artificial Sequence
  primer
agctccctgtggttctgagac

SEQ ID NO: 48337 - DNA, 36 bp, Artificial Sequence
  primer
gtaaaacgacggccagttctgccgtatggtcagcac

SEQ ID NO: 48338 - DNA, 38 bp, Artificial Sequence
  primer
gtaaaacgacggccagtaaagcagaatggcagccttag

SEQ ID NO: 48339 - DNA, 21 bp, Artificial Sequence
  primer
gtgggaggagatgtagccttg

SEQ ID NO: 48340 - DNA, 20 bp, Artificial Sequence
  primer
ctctggtgttcacagagggc

SEQ ID NO: 48341 - DNA, 38 bp, Artificial Sequence
  primer
gtaaaacgacggccagtctgctgacatgggtcagattc

SEQ ID NO: 48342 - DNA, 21 bp, Artificial Sequence
  primer
ctgtgtggctttactgccttg

SEQ ID NO: 48343 - DNA, 21 bp, Artificial Sequence
  primer
gttagcctggacagaggaagg

SEQ ID NO: 48344 - DNA, 20 bp, Artificial Sequence
  primer
gagtgccaaggagcacaaag

SEQ ID NO: 48345 - DNA, 38 bp, Artificial Sequence
  primer
gtaaaacgacggccagtctgaagtgggacaggaaatga

SEQ ID NO: 48346 - DNA, 23 bp, Artificial Sequence
  primer
tttagcagcagttgaaatgacac

SEQ ID NO: 48347 - DNA, 38 bp, Artificial Sequence
  primer
gtaaaacgacggccagtggtcagagaggcaggagaact

SEQ ID NO: 48348 - DNA, 39 bp, Artificial Sequence
  primer
gtaaaacgacggccagttgttgttgggtcatttacgatg

SEQ ID NO: 48349 - DNA, 21 bp, Artificial Sequence
  primer
gaagtaatcctcctgcctccc

SEQ ID NO: 48350 - DNA, 38 bp, Artificial Sequence
  primer
gtaaaacgacggccagtttggcaggaaattccataacc

SEQ ID NO: 48351 - DNA, 39 bp, Artificial Sequence
  primer
gtaaaacgacggccagtgcgtaactggtcttctgattcc

SEQ ID NO: 48352 - DNA, 39 bp, Artificial Sequence
  primer
gtaaaacgacggccagtgcccagatctacaagtgacaca

SEQ ID NO: 48353 - DNA, 39 bp, Artificial Sequence
  primer
gtaaaacgacggccagtggaaatgtgaagtgattgaggc

SEQ ID NO: 48354 - DNA, 44 bp, Artificial Sequence
  primer
gtaaaacgacggccagtaaataattcagtatcaactttgggaaa

SEQ ID NO: 48355 - DNA, 38 bp, Artificial Sequence
  primer
gtaaaacgacggccagtcttatcagtgggctgacttgc

SEQ ID NO: 48356 - DNA, 44 bp, Artificial Sequence
  primer
gtaaaacgacggccagtgaggtttgtaagacgaaagataatgaa

SEQ ID NO: 48357 - DNA, 21 bp, Artificial Sequence
  primer
gcagcaactctgtcctttacc

SEQ ID NO: 48358 - DNA, 41 bp, Artificial Sequence
  primer
gtaaaacgacggccagtttgacaggagaaagaggctaattg

SEQ ID NO: 48359 - DNA, 21 bp, Artificial Sequence
  primer
gtaaggccatcctgcagtagc

SEQ ID NO: 48360 - DNA, 38 bp, Artificial Sequence
  primer
gtaaaacgacggccagttaagactgtgtccgggatgtc

SEQ ID NO: 48361 - DNA, 21 bp, Artificial Sequence
  primer
tttcatggctttgtccatttc

SEQ ID NO: 48362 - DNA, 36 bp, Artificial Sequence
  primer
gtaaaacgacggccagttcctaccacctcagcctcc

SEQ ID NO: 48363 - DNA, 37 bp, Artificial Sequence
  primer
gtaaaacgacggccagtgtgtggaaggatggcttgag

SEQ ID NO: 48364 - DNA, 19 bp, Artificial Sequence
  primer
ctgtgactcgctgtcgcac

SEQ ID NO: 48365 - DNA, 21 bp, Artificial Sequence
  primer
cactacacctcgcagcaagag

SEQ ID NO: 48366 - DNA, 38 bp, Artificial Sequence
  primer
gtaaaacgacggccagtatcacaccctgcagtacaagc

SEQ ID NO: 48367 - DNA, 20 bp, Artificial Sequence
  primer
acgacaacctggatggtgac

SEQ ID NO: 48368 - DNA, 18 bp, Artificial Sequence
  primer
ggcgacaaagcaagaccc

SEQ ID NO: 48369 - DNA, 39 bp, Artificial Sequence
  primer
gtaaaacgacggccagttttgtcccagtatttagggtgc

SEQ ID NO: 48370 - DNA, 37 bp, Artificial Sequence
  primer
gtaaaacgacggccagtgggattgaagttcgcagatg

SEQ ID NO: 48371 - DNA, 21 bp, Artificial Sequence
  primer
ctcagtgtgtttcatgtgccc

SEQ ID NO: 48372 - DNA, 39 bp, Artificial Sequence
  primer
gtaaaacgacggccagtaaagagcgtgcagtgaaggtag

SEQ ID NO: 48373 - DNA, 38 bp, Artificial Sequence
  primer
gtaaaacgacggccagtagatgtggtggcatacacctg

SEQ ID NO: 48374 - DNA, 38 bp, Artificial Sequence
  primer
gtaaaacgacggccagtctattctcccaacttccgcag

SEQ ID NO: 48375 - DNA, 21 bp, Artificial Sequence
  primer
gacaacagtgattgggctgtc

SEQ ID NO: 48376 - DNA, 43 bp, Artificial Sequence
  primer
gtaaaacgacggccagtggaactagtcctccttatgttgtttg

SEQ ID NO: 48377 - DNA, 22 bp, Artificial Sequence
  primer
tgcagatcagaactaaccaccc

SEQ ID NO: 48378 - DNA, 20 bp, Artificial Sequence
  primer
ggtgttcaatgccgtttctg

SEQ ID NO: 48379 - DNA, 21 bp, Artificial Sequence
  primer
tacagctcgcactacgacacg

SEQ ID NO: 48380 - DNA, 20 bp, Artificial Sequence
  primer
ggtacactccgtgcagaagc

SEQ ID NO: 48381 - DNA, 20 bp, Artificial Sequence
  primer
ggacagcgacagcacctatc

SEQ ID NO: 48382 - DNA, 41 bp, Artificial Sequence
  primer
gtaaaacgacggccagttggaattgtagaggatttgtttcc

SEQ ID NO: 48383 - DNA, 37 bp, Artificial Sequence
  primer
gtaaaacgacggccagtgatggtcattcccacctctg

SEQ ID NO: 48384 - DNA, 22 bp, Artificial Sequence
  primer
tgtgctgaactatgaggcagtg

SEQ ID NO: 48385 - DNA, 38 bp, Artificial Sequence
  primer
gtaaaacgacggccagtgaacagacttgctccgtcaac

SEQ ID NO: 48386 - DNA, 38 bp, Artificial Sequence
  primer
gtaaaacgacggccagtcagtcagattcttgattgccg

SEQ ID NO: 48387 - DNA, 38 bp, Artificial Sequence
  primer
gtaaaacgacggccagtgtgaatgcatttccctctctg

SEQ ID NO: 48388 - DNA, 38 bp, Artificial Sequence
  primer
gtaaaacgacggccagtcaggcgacatgtaggactttg

SEQ ID NO: 48389 - DNA, 38 bp, Artificial Sequence
  primer
gtaaaacgacggccagtccatctgtcttccttccctcc

SEQ ID NO: 48390 - DNA, 38 bp, Artificial Sequence
  primer
gtaaaacgacggccagtgcacactaaggcacgagtcac

SEQ ID NO: 48391 - DNA, 21 bp, Artificial Sequence
  primer
ctggaattagccaggcttctc

SEQ ID NO: 48392 - DNA, 36 bp, Artificial Sequence
  primer
gtaaaacgacggccagtatcctgtgcagaaggcagg

SEQ ID NO: 48393 - DNA, 38 bp, Artificial Sequence
  primer
gtaaaacgacggccagtagctgaccgctttctgtcttc

SEQ ID NO: 48394 - DNA, 18 bp, Artificial Sequence
  primer
caccctgccaggagatgg

SEQ ID NO: 48395 - DNA, 38 bp, Artificial Sequence
  primer
gtaaaacgacggccagttccactacaactcccacttcg

SEQ ID NO: 48396 - DNA, 21 bp, Artificial Sequence
  primer
agctccgatgacaacttggac

SEQ ID NO: 48397 - DNA, 36 bp, Artificial Sequence
  primer
gtaaaacgacggccagtaattctgcagggaacgagg

SEQ ID NO: 48398 - DNA, 38 bp, Artificial Sequence
  primer
gtaaaacgacggccagttgtgcatcacagatggtcaag

SEQ ID NO: 48399 - DNA, 21 bp, Artificial Sequence
  primer
gaccagccagcttcaagtttc

SEQ ID NO: 48400 - DNA, 36 bp, Artificial Sequence
  primer
gtaaaacgacggccagtacagactgtccagccctgc

SEQ ID NO: 48401 - DNA, 38 bp, Artificial Sequence
  primer
gtaaaacgacggccagttagggcctgtgtgtgtctgtc

SEQ ID NO: 48402 - DNA, 20 bp, Artificial Sequence
  primer
gaccacaagagcgaggtgac

SEQ ID NO: 48403 - DNA, 21 bp, Artificial Sequence
  primer
tacaccagataacggctgtgg

SEQ ID NO: 48404 - DNA, 21 bp, Artificial Sequence
  primer
ccactgcagtaaacaggcaac

SEQ ID NO: 48405 - DNA, 21 bp, Artificial Sequence
  primer
acacagactcggatacccagg

SEQ ID NO: 48406 - DNA, 38 bp, Artificial Sequence
  primer
gtaaaacgacggccagttaccctaagggagtgtgggag

SEQ ID NO: 48407 - DNA, 20 bp, Artificial Sequence
  primer
cagaggaaccctgcttgttg

SEQ ID NO: 48408 - DNA, 21 bp, Artificial Sequence
  primer
tccaagtgtgtgttgcttgtg

SEQ ID NO: 48409 - DNA, 37 bp, Artificial Sequence
  primer
gtaaaacgacggccagttgctccttgtctccctctcc

SEQ ID NO: 48410 - DNA, 21 bp, Artificial Sequence
  primer
catgcctcgtgtctgtctgtc

SEQ ID NO: 48411 - DNA, 35 bp, Artificial Sequence
  primer
gtaaaacgacggccagtcaaccagaagcccagtgc

SEQ ID NO: 48412 - DNA, 21 bp, Artificial Sequence
  primer
ctgtggtcatttcattgctgg

SEQ ID NO: 48413 - DNA, 38 bp, Artificial Sequence
  primer
gtaaaacgacggccagtcagaaagtagcctgagctgcc

SEQ ID NO: 48414 - DNA, 38 bp, Artificial Sequence
  primer
gtaaaacgacggccagtgtgaccttaggcaaggaaacc

SEQ ID NO: 48415 - DNA, 21 bp, Artificial Sequence
  primer
ggtgtgtcccaggttagcatc

SEQ ID NO: 48416 - DNA, 20 bp, Artificial Sequence
  primer
gcttctcaggcaatttctgc

SEQ ID NO: 48417 - DNA, 21 bp, Artificial Sequence
  primer
gctacgagtgtctgtgcaagc

SEQ ID NO: 48418 - DNA, 21 bp, Artificial Sequence
  primer
tctcacctgtgtcaagaagcg

SEQ ID NO: 48419 - DNA, 22 bp, Artificial Sequence
  primer
aagaaagaagtcctgggtcctg

SEQ ID NO: 48420 - DNA, 36 bp, Artificial Sequence
  primer
gtaaaacgacggccagtctgagcccttccaggctct

SEQ ID NO: 48421 - DNA, 21 bp, Artificial Sequence
  primer
tgttgctgacctggctgttag

SEQ ID NO: 48422 - DNA, 37 bp, Artificial Sequence
  primer
gtaaaacgacggccagtcttcccgtgctgaatgtctc

SEQ ID NO: 48423 - DNA, 37 bp, Artificial Sequence
  primer
gtaaaacgacggccagtggtcagtcctccacaacctg

SEQ ID NO: 48424 - DNA, 38 bp, Artificial Sequence
  primer
gtaaaacgacggccagttctggagaaccagaggctcac

SEQ ID NO: 48425 - DNA, 38 bp, Artificial Sequence
  primer
gtaaaacgacggccagtaccagggtaagccttctctcc

SEQ ID NO: 48426 - DNA, 38 bp, Artificial Sequence
  primer
gtaaaacgacggccagtggtgttgaatggagtgtgtgg

SEQ ID NO: 48427 - DNA, 37 bp, Artificial Sequence
  primer
gtaaaacgacggccagtatgcagccaccagagtgttc

SEQ ID NO: 48428 - DNA, 38 bp, Artificial Sequence
  primer
gtaaaacgacggccagtgacacgtgatgttcatgtccc

SEQ ID NO: 48429 - DNA, 37 bp, Artificial Sequence
  primer
gtaaaacgacggccagtgatggcgtgaacgacttctc

SEQ ID NO: 48430 - DNA, 21 bp, Artificial Sequence
  primer
agacggagaccatgaacaacc

SEQ ID NO: 48431 - DNA, 38 bp, Artificial Sequence
  primer
gtaaaacgacggccagtgtcttcctggaaccactgctc

SEQ ID NO: 48432 - DNA, 21 bp, Artificial Sequence
  primer
ccaagtaccagtcggtgtacg

SEQ ID NO: 48433 - DNA, 21 bp, Artificial Sequence
  primer
tccctggtcggtctctcttac

SEQ ID NO: 48434 - DNA, 21 bp, Artificial Sequence
  primer
acagacggaatctcgctgttg

SEQ ID NO: 48435 - DNA, 36 bp, Artificial Sequence
  primer
gtaaaacgacggccagtgggtgagtgcgacctgaag

SEQ ID NO: 48436 - DNA, 38 bp, Artificial Sequence
  primer
gtaaaacgacggccagtaaagccacagatgtcattccc

SEQ ID NO: 48437 - DNA, 21 bp, Artificial Sequence
  primer
ttcgcagccttgctaaagtag

SEQ ID NO: 48438 - DNA, 21 bp, Artificial Sequence
  primer
ctccctgctttccatcttgtc

SEQ ID NO: 48439 - DNA, 38 bp, Artificial Sequence
  primer
gtaaaacgacggccagttgggacttgagactggacaag

SEQ ID NO: 48440 - DNA, 38 bp, Artificial Sequence
  primer
gtaaaacgacggccagtagacgctggcccttaagttag

SEQ ID NO: 48441 - DNA, 19 bp, Artificial Sequence
  primer
ctgctacgcccacttctcc

SEQ ID NO: 48442 - DNA, 38 bp, Artificial Sequence
  primer
gtaaaacgacggccagttccctggtcggtctctcttac

SEQ ID NO: 48443 - DNA, 21 bp, Artificial Sequence
  primer
tctgtccgtgaaatgaattgg

SEQ ID NO: 48444 - DNA, 21 bp, Artificial Sequence
  primer
gccgtagtcacctggattacc

SEQ ID NO: 48445 - DNA, 38 bp, Artificial Sequence
  primer
gtaaaacgacggccagtcactttggcagcaggtaacac

SEQ ID NO: 48446 - DNA, 20 bp, Artificial Sequence
  primer
gcgcagtaactgaatcctgc

SEQ ID NO: 48447 - DNA, 38 bp, Artificial Sequence
  primer
gtaaaacgacggccagttcacagccaagaaggacattg

SEQ ID NO: 48448 - DNA, 37 bp, Artificial Sequence
  primer
gtaaaacgacggccagtccagtttggcttctccttcc

SEQ ID NO: 48449 - DNA, 21 bp, Artificial Sequence
  primer
agcagagtgcctgtgagtagg

SEQ ID NO: 48450 - DNA, 38 bp, Artificial Sequence
  primer
gtaaaacgacggccagttttattggtggtggaggaagg

SEQ ID NO: 48451 - DNA, 21 bp, Artificial Sequence
  primer
acagaggtgtcaggtggtgtc

SEQ ID NO: 48452 - DNA, 21 bp, Artificial Sequence
  primer
tctgcaggtggaggtagaagg

SEQ ID NO: 48453 - DNA, 21 bp, Artificial Sequence
  primer
tacaccgacctctccacagac

SEQ ID NO: 48454 - DNA, 21 bp, Artificial Sequence
  primer
aggcctgtgactctcttaggg

SEQ ID NO: 48455 - DNA, 20 bp, Artificial Sequence
  primer
cactggcttcctccattgac

SEQ ID NO: 48456 - DNA, 37 bp, Artificial Sequence
  primer
gtaaaacgacggccagtctctgggatgttgttgcctg

SEQ ID NO: 48457 - DNA, 21 bp, Artificial Sequence
  primer
aggctagagatgggatgggag

SEQ ID NO: 48458 - DNA, 38 bp, Artificial Sequence
  primer
gtaaaacgacggccagtaggcagaaacccagatgtcag

SEQ ID NO: 48459 - DNA, 38 bp, Artificial Sequence
  primer
gtaaaacgacggccagtacaaggactctgggtgagagg

SEQ ID NO: 48460 - DNA, 38 bp, Artificial Sequence
  primer
gtaaaacgacggccagtagggcccaagttaaaggaaag

SEQ ID NO: 48461 - DNA, 38 bp, Artificial Sequence
  primer
gtaaaacgacggccagttatgtggacaggactgggagg

SEQ ID NO: 48462 - DNA, 38 bp, Artificial Sequence
  primer
gtaaaacgacggccagtaagctggaaagggatgaacag

SEQ ID NO: 48463 - DNA, 35 bp, Artificial Sequence
  primer
gtaaaacgacggccagtgcagcagtcacacccacc

SEQ ID NO: 48464 - DNA, 19 bp, Artificial Sequence
  primer
cagaattcctgggctttgc

SEQ ID NO: 48465 - DNA, 38 bp, Artificial Sequence
  primer
gtaaaacgacggccagttcacttgagcccagaagtttg

SEQ ID NO: 48466 - DNA, 38 bp, Artificial Sequence
  primer
gtaaaacgacggccagtctggcagtccaggtatgtgtg

SEQ ID NO: 48467 - DNA, 36 bp, Artificial Sequence
  primer
gtaaaacgacggccagtttagggttgcctgctccag

SEQ ID NO: 48468 - DNA, 20 bp, Artificial Sequence
  primer
agatagtttggcaggcccag

SEQ ID NO: 48469 - DNA, 38 bp, Artificial Sequence
  primer
gtaaaacgacggccagttttgctctctgccactaaggc

SEQ ID NO: 48470 - DNA, 38 bp, Artificial Sequence
  primer
gtaaaacgacggccagtaagtgacactgatggacaccc

SEQ ID NO: 48471 - DNA, 38 bp, Artificial Sequence
  primer
gtaaaacgacggccagttacctgctttcttgggaatgg

SEQ ID NO: 48472 - DNA, 35 bp, Artificial Sequence
  primer
gtaaaacgacggccagtcctgagccactgcgtgag

SEQ ID NO: 48473 - DNA, 37 bp, Artificial Sequence
  primer
gtaaaacgacggccagtcctggcttcattggagattc

SEQ ID NO: 48474 - DNA, 39 bp, Artificial Sequence
  primer
gtaaaacgacggccagtgctttgcatattgctgataccc

SEQ ID NO: 48475 - DNA, 21 bp, Artificial Sequence
  primer
ctgctttgcatctcagctttc

SEQ ID NO: 48476 - DNA, 21 bp, Artificial Sequence
  primer
gcaagccgtgttctttctgac

SEQ ID NO: 48477 - DNA, 21 bp, Artificial Sequence
  primer
ggtaatggtccagagtgaggg

SEQ ID NO: 48478 - DNA, 38 bp, Artificial Sequence
  primer
gtaaaacgacggccagtttggtcagcccacactgtatc

SEQ ID NO: 48479 - DNA, 39 bp, Artificial Sequence
  primer
gtaaaacgacggccagtcataccatgggttgaatcaagg

SEQ ID NO: 48480 - DNA, 37 bp, Artificial Sequence
  primer
gtaaaacgacggccagtaaagcgctgggattatggac

SEQ ID NO: 48481 - DNA, 38 bp, Artificial Sequence
  primer
gtaaaacgacggccagttgtgctaaatctccttcagcg

SEQ ID NO: 48482 - DNA, 38 bp, Artificial Sequence
  primer
gtaaaacgacggccagtgagagaaagtcccacacccag

SEQ ID NO: 48483 - DNA, 38 bp, Artificial Sequence
  primer
gtaaaacgacggccagttcttgaacgttctctccctgg

SEQ ID NO: 48484 - DNA, 21 bp, Artificial Sequence
  primer
tcctatctctgctgttctgcg

SEQ ID NO: 48485 - DNA, 38 bp, Artificial Sequence
  primer
gtaaaacgacggccagtaattacattggctgctggagg

SEQ ID NO: 48486 - DNA, 38 bp, Artificial Sequence
  primer
gtaaaacgacggccagtctctttgctcaagccaagtcc

SEQ ID NO: 48487 - DNA, 21 bp, Artificial Sequence
  primer
cccaagactaggttcctccac

SEQ ID NO: 48488 - DNA, 35 bp, Artificial Sequence
  primer
gtaaaacgacggccagtctcttccgcctctctcgc

SEQ ID NO: 48489 - DNA, 35 bp, Artificial Sequence
  primer
gtaaaacgacggccagttggagggtcgcaggagtc

SEQ ID NO: 48490 - DNA, 38 bp, Artificial Sequence
  primer
gtaaaacgacggccagttcttggctaggttcttcccag

SEQ ID NO: 48491 - DNA, 21 bp, Artificial Sequence
  primer
ctccgggatcttaagtgtggg

SEQ ID NO: 48492 - DNA, 38 bp, Artificial Sequence
  primer
gtaaaacgacggccagtgcagacgagatgcaaataagc

SEQ ID NO: 48493 - DNA, 20 bp, Artificial Sequence
  primer
acctggatccctttcccttc

SEQ ID NO: 48494 - DNA, 38 bp, Artificial Sequence
  primer
gtaaaacgacggccagtgcgcgcaattaaggatttaac

SEQ ID NO: 48495 - DNA, 21 bp, Artificial Sequence
  primer
tgagcatgacaggagtgtttg

SEQ ID NO: 48496 - DNA, 39 bp, Artificial Sequence
  primer
gtaaaacgacggccagtaagcaaaggtggtggtgatatg

SEQ ID NO: 48497 - DNA, 36 bp, Artificial Sequence
  primer
gtaaaacgacggccagtgtccgaagatgcctccagt

SEQ ID NO: 48498 - DNA, 38 bp, Artificial Sequence
  primer
gtaaaacgacggccagtagagctaaggtggctgcagag

SEQ ID NO: 48499 - DNA, 20 bp, Artificial Sequence
  primer
aatccgccttcatggagttc

SEQ ID NO: 48500 - DNA, 38 bp, Artificial Sequence
  primer
gtaaaacgacggccagtttcgaggtaacccttattggg

SEQ ID NO: 48501 - DNA, 19 bp, Artificial Sequence
  primer
cttggcttgtaggcgttgg

SEQ ID NO: 48502 - DNA, 20 bp, Artificial Sequence
  primer
ggaccacccttctcctcttg

SEQ ID NO: 48503 - DNA, 20 bp, Artificial Sequence
  primer
ttgttcagggattgagctgg

SEQ ID NO: 48504 - DNA, 21 bp, Artificial Sequence
  primer
tccaggacatgactttcttgc

SEQ ID NO: 48505 - DNA, 38 bp, Artificial Sequence
  primer
gtaaaacgacggccagtttctttcctcactccatgctg

SEQ ID NO: 48506 - DNA, 38 bp, Artificial Sequence
  primer
gtaaaacgacggccagtattgtgtatttgcatgggtgc

SEQ ID NO: 48507 - DNA, 21 bp, Artificial Sequence
  primer
ccctgtcacctccgtgtctac

SEQ ID NO: 48508 - DNA, 38 bp, Artificial Sequence
  primer
gtaaaacgacggccagtagagtacccagtgctgatggg

SEQ ID NO: 48509 - DNA, 38 bp, Artificial Sequence
  primer
gtaaaacgacggccagtcttccaccatctttccctctg

SEQ ID NO: 48510 - DNA, 38 bp, Artificial Sequence
  primer
gtaaaacgacggccagttgtggatataggttgggcagg

SEQ ID NO: 48511 - DNA, 21 bp, Artificial Sequence
  primer
gaagcacatgcactaagcctg

SEQ ID NO: 48512 - DNA, 38 bp, Artificial Sequence
  primer
gtaaaacgacggccagtcaccctagaggacacacctcc

SEQ ID NO: 48513 - DNA, 21 bp, Artificial Sequence
  primer
aatccacttgctttaatccgc

SEQ ID NO: 48514 - DNA, 37 bp, Artificial Sequence
  primer
gtaaaacgacggccagtatggagcgattggcacatag

SEQ ID NO: 48515 - DNA, 38 bp, Artificial Sequence
  primer
gtaaaacgacggccagtaatggaggttgcccttaggat

SEQ ID NO: 48516 - DNA, 38 bp, Artificial Sequence
  primer
gtaaaacgacggccagtagcaatggaggttgcctttag

SEQ ID NO: 48517 - DNA, 38 bp, Artificial Sequence
  primer
gtaaaacgacggccagttacaatgacaaagcgattggc

SEQ ID NO: 48518 - DNA, 18 bp, Artificial Sequence
  primer
agaccctgaatgccctgc

SEQ ID NO: 48519 - DNA, 21 bp, Artificial Sequence
  primer
catatccctggagagtgagcc

SEQ ID NO: 48520 - DNA, 38 bp, Artificial Sequence
  primer
gtaaaacgacggccagtggtgtcctttgtccctgaatg

SEQ ID NO: 48521 - DNA, 38 bp, Artificial Sequence
  primer
gtaaaacgacggccagtgactgcctgcctaggtgactt

SEQ ID NO: 48522 - DNA, 38 bp, Artificial Sequence
  primer
gtaaaacgacggccagttggcaatagtggacaggatct

SEQ ID NO: 48523 - DNA, 38 bp, Artificial Sequence
  primer
gtaaaacgacggccagtactggtctccagcaaggctta

SEQ ID NO: 48524 - DNA, 38 bp, Artificial Sequence
  primer
gtaaaacgacggccagtgtgccttgagtgtggaacatt

SEQ ID NO: 48525 - DNA, 39 bp, Artificial Sequence
  primer
gtaaaacgacggccagtctgagtgtggaatgtgccttag

SEQ ID NO: 48526 - DNA, 38 bp, Artificial Sequence
  primer
gtaaaacgacggccagttcactttggagctggcagtag

SEQ ID NO: 48527 - DNA, 38 bp, Artificial Sequence
  primer
gtaaaacgacggccagtatgcttgccttgtccagagac

SEQ ID NO: 48528 - DNA, 21 bp, Artificial Sequence
  primer
tgagtgtggaacgtgccttag

SEQ ID NO: 48529 - DNA, 38 bp, Artificial Sequence
  primer
gtaaaacgacggccagtggcaatagtggaaggatctgc

SEQ ID NO: 48530 - DNA, 38 bp, Artificial Sequence
  primer
gtaaaacgacggccagttggactgaaggcatgatctgt

SEQ ID NO: 48531 - DNA, 38 bp, Artificial Sequence
  primer
gtaaaacgacggccagtttcatgatgtttgccttctcc

SEQ ID NO: 48532 - DNA, 38 bp, Artificial Sequence
  primer
gtaaaacgacggccagttaggacatgccttgagtgtgg

SEQ ID NO: 48533 - DNA, 38 bp, Artificial Sequence
  primer
gtaaaacgacggccagtcccttacatggtgcatctctg

SEQ ID NO: 48534 - DNA, 38 bp, Artificial Sequence
  primer
gtaaaacgacggccagttttgtccgtggatgagttcac

SEQ ID NO: 48535 - DNA, 38 bp, Artificial Sequence
  primer
gtaaaacgacggccagtaattgttgccaggttgattcc

SEQ ID NO: 48536 - DNA, 38 bp, Artificial Sequence
  primer
gtaaaacgacggccagttaccctgagtgtggaacttgc

SEQ ID NO: 48537 - DNA, 38 bp, Artificial Sequence
  primer
gtaaaacgacggccagtgcttgcccagttccttctatc

SEQ ID NO: 48538 - DNA, 21 bp, Artificial Sequence
  primer
agtggcaggaaccagaaattg

SEQ ID NO: 48539 - DNA, 38 bp, Artificial Sequence
  primer
gtaaaacgacggccagtttaggaagtgccctgagtgtg

SEQ ID NO: 48540 - DNA, 38 bp, Artificial Sequence
  primer
gtaaaacgacggccagtgacaggcactcagcatttctc

SEQ ID NO: 48541 - DNA, 20 bp, Artificial Sequence
  primer
gccaaatatgttgggaggtg

SEQ ID NO: 48542 - DNA, 21 bp, Artificial Sequence
  primer
acctagaaccaggcccaagag

SEQ ID NO: 48543 - DNA, 38 bp, Artificial Sequence
  primer
gtaaaacgacggccagttcaatggcatccctcgtaaag

SEQ ID NO: 48544 - DNA, 20 bp, Artificial Sequence
  primer
ttggcctttgaggtttgttg

SEQ ID NO: 48545 - DNA, 20 bp, Artificial Sequence
  primer
gacgggacttagggagcatc

SEQ ID NO: 48546 - DNA, 38 bp, Artificial Sequence
  primer
gtaaaacgacggccagtaggctttggtcaatctcatcc

SEQ ID NO: 48547 - DNA, 38 bp, Artificial Sequence
  primer
gtaaaacgacggccagttctaggccacctcttgctctt

SEQ ID NO: 48548 - DNA, 19 bp, Artificial Sequence
  primer
ccaccctgagatctgaccc

SEQ ID NO: 48549 - DNA, 37 bp, Artificial Sequence
  primer
gtaaaacgacggccagtaagtggaaacagcctctggc

SEQ ID NO: 48550 - DNA, 21 bp, Artificial Sequence
  primer
tcacgtccctctcattcacac

SEQ ID NO: 48551 - DNA, 37 bp, Artificial Sequence
  primer
gtaaaacgacggccagtagtgaggacaggctgtggag

SEQ ID NO: 48552 - DNA, 37 bp, Artificial Sequence
  primer
gtaaaacgacggccagtgatggagggagcttctgacc

SEQ ID NO: 48553 - DNA, 38 bp, Artificial Sequence
  primer
gtaaaacgacggccagttctaagggtaagggaccaggg

SEQ ID NO: 48554 - DNA, 36 bp, Artificial Sequence
  primer
gtaaaacgacggccagtagagcaccctgctccacac

SEQ ID NO: 48555 - DNA, 38 bp, Artificial Sequence
  primer
gtaaaacgacggccagtagatgggatggatgtggtttc

SEQ ID NO: 48556 - DNA, 37 bp, Artificial Sequence
  primer
gtaaaacgacggccagtcctcccactcctattcctcg

SEQ ID NO: 48557 - DNA, 38 bp, Artificial Sequence
  primer
gtaaaacgacggccagtataggctggcctcatctttcc

SEQ ID NO: 48558 - DNA, 38 bp, Artificial Sequence
  primer
gtaaaacgacggccagtatgttgttccagtcctttggg

SEQ ID NO: 48559 - DNA, 38 bp, Artificial Sequence
  primer
gtaaaacgacggccagtatggtggaaggagatggacac

SEQ ID NO: 48560 - DNA, 38 bp, Artificial Sequence
  primer
gtaaaacgacggccagttgaacctagaaagggcagctc

SEQ ID NO: 48561 - DNA, 39 bp, Artificial Sequence
  primer
gtaaaacgacggccagtaacctgtgatctagcaagtggc

SEQ ID NO: 48562 - DNA, 21 bp, Artificial Sequence
  primer
cagcctgagtgagagcaagac

SEQ ID NO: 48563 - DNA, 20 bp, Artificial Sequence
  primer
gcaacagcagattccatgtg

SEQ ID NO: 48564 - DNA, 40 bp, Artificial Sequence
  primer
gtaaaacgacggccagttcacaggtacattgtttggcttc

SEQ ID NO: 48565 - DNA, 22 bp, Artificial Sequence
  primer
ccaaagtgttgggattataggc

SEQ ID NO: 48566 - DNA, 38 bp, Artificial Sequence
  primer
gtaaaacgacggccagtgctggcatcttcaagctattg

SEQ ID NO: 48567 - DNA, 36 bp, Artificial Sequence
  primer
gtaaaacgacggccagtctgagcccggctttacaac

SEQ ID NO: 48568 - DNA, 21 bp, Artificial Sequence
  primer
aactcctgacatccaccacag

SEQ ID NO: 48569 - DNA, 39 bp, Artificial Sequence
  primer
gtaaaacgacggccagttgtgggtaagttctgtaggcca

SEQ ID NO: 48570 - DNA, 21 bp, Artificial Sequence
  primer
gaggcaattaccttcggagaa

SEQ ID NO: 48571 - DNA, 18 bp, Artificial Sequence
  primer
ctcactggcctcccaaac

SEQ ID NO: 48572 - DNA, 22 bp, Artificial Sequence
  primer
tcggcagattaattatgcacac

SEQ ID NO: 48573 - DNA, 21 bp, Artificial Sequence
  primer
ttggtggtcatgcagtaatcc

SEQ ID NO: 48574 - DNA, 40 bp, Artificial Sequence
  primer
gtaaaacgacggccagttccagttgacctctttaatctgc

SEQ ID NO: 48575 - DNA, 43 bp, Artificial Sequence
  primer
gtaaaacgacggccagtcaatgaatcagaatagactcctagcc

SEQ ID NO: 48576 - DNA, 24 bp, Artificial Sequence
  primer
gcatggaagtaaatctcatggaac

SEQ ID NO: 48577 - DNA, 38 bp, Artificial Sequence
  primer
gtaaaacgacggccagttggaggacattcatggacaat

SEQ ID NO: 48578 - DNA, 23 bp, Artificial Sequence
  primer
aaacattgaatctcaccatttcc

SEQ ID NO: 48579 - DNA, 38 bp, Artificial Sequence
  primer
gtaaaacgacggccagtatgccagtggacagtcctagc

SEQ ID NO: 48580 - DNA, 38 bp, Artificial Sequence
  primer
gtaaaacgacggccagtggcctgcttctgaagaacttg

SEQ ID NO: 48581 - DNA, 39 bp, Artificial Sequence
  primer
gtaaaacgacggccagttctcaatgtccaatagatgccc

SEQ ID NO: 48582 - DNA, 43 bp, Artificial Sequence
  primer
gtaaaacgacggccagtgtagcagaaataaatttcaccatttg

SEQ ID NO: 48583 - DNA, 38 bp, Artificial Sequence
  primer
gtaaaacgacggccagttgtcccttccaacttctagcg

SEQ ID NO: 48584 - DNA, 22 bp, Artificial Sequence
  primer
tcaaatggcaacgtcttactga

SEQ ID NO: 48585 - DNA, 38 bp, Artificial Sequence
  primer
gtaaaacgacggccagttgcaaatgagcaaatacacgc

SEQ ID NO: 48586 - DNA, 37 bp, Artificial Sequence
  primer
gtaaaacgacggccagtctttgccactccaagcagtc

SEQ ID NO: 48587 - DNA, 21 bp, Artificial Sequence
  primer
tcaggcaggagtctcagattg

SEQ ID NO: 48588 - DNA, 41 bp, Artificial Sequence
  primer
gtaaaacgacggccagttgacagagtgaaacatcttaaggc

SEQ ID NO: 48589 - DNA, 23 bp, Artificial Sequence
  primer
aattaggatgtgttggctttcag

SEQ ID NO: 48590 - DNA, 38 bp, Artificial Sequence
  primer
gtaaaacgacggccagtggctggtgatagaggcttgtc

SEQ ID NO: 48591 - DNA, 24 bp, Artificial Sequence
  primer
cctggcatattacacatgtagcag

SEQ ID NO: 48592 - DNA, 28 bp, Artificial Sequence
  primer
tcatctactttgtttacatgtttgaatc

SEQ ID NO: 48593 - DNA, 39 bp, Artificial Sequence
  primer
gtaaaacgacggccagttgggcctgtgtttagacataac

SEQ ID NO: 48594 - DNA, 21 bp, Artificial Sequence
  primer
catatgcaatgccatcagtcc

SEQ ID NO: 48595 - DNA, 41 bp, Artificial Sequence
  primer
gtaaaacgacggccagtgggaaattgagtgtatctgatccc

SEQ ID NO: 48596 - DNA, 25 bp, Artificial Sequence
  primer
ttctaactgggatgttgtgagaaag

SEQ ID NO: 48597 - DNA, 27 bp, Artificial Sequence
  primer
tttgaattacctgctacaaagtaaagg

SEQ ID NO: 48598 - DNA, 21 bp, Artificial Sequence
  primer
tccgcaacactgtcataatcc

SEQ ID NO: 48599 - DNA, 40 bp, Artificial Sequence
  primer
gtaaaacgacggccagtggaagctgcgaaatctgtcttac

SEQ ID NO: 48600 - DNA, 39 bp, Artificial Sequence
  primer
gtaaaacgacggccagtggaagctacatggtagaggtgg

SEQ ID NO: 48601 - DNA, 38 bp, Artificial Sequence
  primer
gtaaaacgacggccagtttcctgtgttggatgaatgga

SEQ ID NO: 48602 - DNA, 41 bp, Artificial Sequence
  primer
gtaaaacgacggccagtcaaacatggaatagcaattaaggg

SEQ ID NO: 48603 - DNA, 21 bp, Artificial Sequence
  primer
aacgatgtcatctgccctaga

SEQ ID NO: 48604 - DNA, 41 bp, Artificial Sequence
  primer
gtaaaacgacggccagtccatacagaaagccgtttcataag

SEQ ID NO: 48605 - DNA, 25 bp, Artificial Sequence
  primer
ttctcaattctacgtatatgctggc

SEQ ID NO: 48606 - DNA, 19 bp, Artificial Sequence
  primer
gctcactcgctctgtttgg

SEQ ID NO: 48607 - DNA, 26 bp, Artificial Sequence
  primer
cataatgcatgtgattagtttagcaa

SEQ ID NO: 48608 - DNA, 43 bp, Artificial Sequence
  primer
gtaaaacgacggccagtttctttacaactagatgggaggaaac

SEQ ID NO: 48609 - DNA, 24 bp, Artificial Sequence
  primer
tttgataaataactgcagccagaa

SEQ ID NO: 48610 - DNA, 40 bp, Artificial Sequence
  primer
gtaaaacgacggccagttgagagaagtatttgctgcttgc

SEQ ID NO: 48611 - DNA, 24 bp, Artificial Sequence
  primer
gcccagtttgtagattcaattgtc

SEQ ID NO: 48612 - DNA, 21 bp, Artificial Sequence
  primer
acaccatttgctacctttggg

SEQ ID NO: 48613 - DNA, 39 bp, Artificial Sequence
  primer
gtaaaacgacggccagttgcaaatgcaggaaactatcag

SEQ ID NO: 48614 - DNA, 40 bp, Artificial Sequence
  primer
gtaaaacgacggccagttctttctttgccagtacaactgc

SEQ ID NO: 48615 - DNA, 21 bp, Artificial Sequence
  primer
catgtttgtgtcccagtttgc

SEQ ID NO: 48616 - DNA, 39 bp, Artificial Sequence
  primer
gtaaaacgacggccagttggtatttgaggtaccactggg

SEQ ID NO: 48617 - DNA, 24 bp, Artificial Sequence
  primer
cattggttaaatcccaacatgtaa

SEQ ID NO: 48618 - DNA, 37 bp, Artificial Sequence
  primer
gtaaaacgacggccagttgtgcccttatgtaccaggc

SEQ ID NO: 48619 - DNA, 41 bp, Artificial Sequence
  primer
gtaaaacgacggccagtttcaccaaatggattaagatgttc

SEQ ID NO: 48620 - DNA, 40 bp, Artificial Sequence
  primer
gtaaaacgacggccagttgaaattggctctttagcttgtg

SEQ ID NO: 48621 - DNA, 40 bp, Artificial Sequence
  primer
gtaaaacgacggccagttttccagcagagaataaatggtc

SEQ ID NO: 48622 - DNA, 38 bp, Artificial Sequence
  primer
gtaaaacgacggccagttaaggctttgcttcttcctgg

SEQ ID NO: 48623 - DNA, 38 bp, Artificial Sequence
  primer
gtaaaacgacggccagtgtgctttcagctgtgagcttg

SEQ ID NO: 48624 - DNA, 40 bp, Artificial Sequence; identical to SEQ ID NO: 48620
  primer

SEQ ID NO: 48625 - DNA, 42 bp, Artificial Sequence
  primer
gtaaaacgacggccagtggctggtctcacaattgtactttac

SEQ ID NO: 48626 - DNA, 26 bp, Artificial Sequence
  primer
caacataaatgtgagataacgtttgg

SEQ ID NO: 48627 - DNA, 23 bp, Artificial Sequence
  primer
tgaggattcagaagctgtttacg

SEQ ID NO: 48628 - DNA, 38 bp, Artificial Sequence
  primer
gtaaaacgacggccagtagctgtagcaacaactcaccc

SEQ ID NO: 48629 - DNA, 21 bp, Artificial Sequence
  primer
caaattcacattcatcgcttg

SEQ ID NO: 48630 - DNA, 40 bp, Artificial Sequence
  primer
gtaaaacgacggccagtgcatgtggaaataaacatatggc

SEQ ID NO: 48631 - DNA, 38 bp, Artificial Sequence
  primer
gtaaaacgacggccagtaacaagttctgagcacccagg

SEQ ID NO: 48632 - DNA, 25 bp, Artificial Sequence
  primer
gtaggttaccctcttgttcaactgt

SEQ ID NO: 48633 - DNA, 39 bp, Artificial Sequence
  primer
gtaaaacgacggccagtccctaaagagaataagcccagg

SEQ ID NO: 48634 - DNA, 21 bp, Artificial Sequence
  primer
aatcctttgtgtttggccttg

SEQ ID NO: 48635 - DNA, 20 bp, Artificial Sequence
  primer
atccatcctgtcttcatggg

SEQ ID NO: 48636 - DNA, 39 bp, Artificial Sequence
  primer
gtaaaacgacggccagtgcgctttgaaataaagattccg

SEQ ID NO: 48637 - DNA, 22 bp, Artificial Sequence
  primer
tcacagaacttagccttcctgg

SEQ ID NO: 48638 - DNA, 21 bp, Artificial Sequence
  primer
gagagtgtggttcacgtttgg

SEQ ID NO: 48639 - DNA, 22 bp, Artificial Sequence
  primer
tggtcaagttggttgaatttcc

SEQ ID NO: 48640 - DNA, 38 bp, Artificial Sequence
  primer
gtaaaacgacggccagtgttggatgtcaggttctgctg

SEQ ID NO: 48641 - DNA, 38 bp, Artificial Sequence
  primer
gtaaaacgacggccagtagcctagctttgcaaccattg

SEQ ID NO: 48642 - DNA, 22 bp, Artificial Sequence
  primer
ttgtgggactaatgaacattgc

SEQ ID NO: 48643 - DNA, 38 bp, Artificial Sequence
  primer
gtaaaacgacggccagtaaagcctttgctcacaaccac

SEQ ID NO: 48644 - DNA, 38 bp, Artificial Sequence
  primer
gtaaaacgacggccagtggctattgctttccatggttc

SEQ ID NO: 48645 - DNA, 42 bp, Artificial Sequence
  primer
gtaaaacgacggccagtgtgtataacataactgtgtggtggg

SEQ ID NO: 48646 - DNA, 21 bp, Artificial Sequence
  primer
gcctcaaatggttaagccaac

SEQ ID NO: 48647 - DNA, 42 bp, Artificial Sequence
  primer
gtaaaacgacggccagtttcaaatacactcctgagtccctaa

SEQ ID NO: 48648 - DNA, 19 bp, Artificial Sequence
  primer
cttcggtggcagtcagatg

SEQ ID NO: 48649 - DNA, 21 bp, Artificial Sequence
  primer
aacaatctttgggagggcttc

SEQ ID NO: 48650 - DNA, 43 bp, Artificial Sequence
  primer
gtaaaacgacggccagtgcaagtgaaatgaatttataatggtg

SEQ ID NO: 48651 - DNA, 37 bp, Artificial Sequence
  primer
gtaaaacgacggccagtcccaaatggcaaagaaacag

SEQ ID NO: 48652 - DNA, 21 bp, Artificial Sequence
  primer
ggacgaaactcaccttcttgg

SEQ ID NO: 48653 - DNA, 38 bp, Artificial Sequence
  primer
gtaaaacgacggccagtggaagtgctttaggccagaac

SEQ ID NO: 48654 - DNA, 22 bp, Artificial Sequence
  primer
tgcttctcagtttctttccagc

SEQ ID NO: 48655 - DNA, 41 bp, Artificial Sequence
  primer
gtaaaacgacggccagtcgaacaggcacttagtaaatatgg

SEQ ID NO: 48656 - DNA, 21 bp, Artificial Sequence
  primer
ttcagggacccagtcactttc

SEQ ID NO: 48657 - DNA, 26 bp, Artificial Sequence
  primer
gccatgagtacttaagccttctaaac

SEQ ID NO: 48658 - DNA, 39 bp, Artificial Sequence
  primer
gtaaaacgacggccagttggcagtactttcctaacaggc

SEQ ID NO: 48659 - DNA, 38 bp, Artificial Sequence
  primer
gtaaaacgacggccagtaacagtccaactttgaagccc

SEQ ID NO: 48660 - DNA, 19 bp, Artificial Sequence
  primer
cacgtggaatgcctcactg

SEQ ID NO: 48661 - DNA, 21 bp, Artificial Sequence
  primer
atggtctcgcctcccatagtc

SEQ ID NO: 48662 - DNA, 41 bp, Artificial Sequence
  primer
gtaaaacgacggccagtggagaacttcaaattactgttggg

SEQ ID NO: 48663 - DNA, 44 bp, Artificial Sequence
  primer
gtaaaacgacggccagtctgataactctagacacaaagcatgtc

SEQ ID NO: 48664 - DNA, 38 bp, Artificial Sequence
  primer
gtaaaacgacggccagtatatggtgggcttctttgcag

SEQ ID NO: 48665 - DNA, 25 bp, Artificial Sequence
  primer
ttgcctttctttagaatctgtgttg

SEQ ID NO: 48666 - DNA, 38 bp, Artificial Sequence
  primer
gtaaaacgacggccagtttctgaaggaataggtggctg

SEQ ID NO: 48667 - DNA, 18 bp, Artificial Sequence
  primer
tgtctctggcgttgtccc

SEQ ID NO: 48668 - DNA, 36 bp, Artificial Sequence
  primer
gtaaaacgacggccagtctaagtgcctgggctctcc

SEQ ID NO: 48669 - DNA, 20 bp, Artificial Sequence
  primer
cccggctctatgactacgtg

SEQ ID NO: 48670 - DNA, 20 bp, Artificial Sequence
  primer
cagccttaccatgcatttcc

SEQ ID NO: 48671 - DNA, 19 bp, Artificial Sequence
  primer
aggagagcagactccaggc

SEQ ID NO: 48672 - DNA, 22 bp, Artificial Sequence
  primer
tctggtctgctaataaccctgg

SEQ ID NO: 48673 - DNA, 38 bp, Artificial Sequence
  primer
gtaaaacgacggccagtctgcccaagtctcctcttcag

SEQ ID NO: 48674 - DNA, 38 bp, Artificial Sequence
  primer
gtaaaacgacggccagtaaagcacctttggcaagtttc

SEQ ID NO: 48675 - DNA, 38 bp, Artificial Sequence
  primer
gtaaaacgacggccagtgaaagcacacggtcaaatgag

SEQ ID NO: 48676 - DNA, 38 bp, Artificial Sequence
  primer
gtaaaacgacggccagtgaaagccagcagatgaaggag

SEQ ID NO: 48677 - DNA, 38 bp, Artificial Sequence
  primer
gtaaaacgacggccagtaggcgattccatgacagaaac

SEQ ID NO: 48678 - DNA, 21 bp, Artificial Sequence
  primer
gatgaagctggcctggactac

SEQ ID NO: 48679 - DNA, 38 bp, Artificial Sequence
  primer
gtaaaacgacggccagtgtccactccagatgaacaccc

SEQ ID NO: 48680 - DNA, 19 bp, Artificial Sequence
  primer
gcatgagggaggagctgtc

SEQ ID NO: 48681 - DNA, 38 bp, Artificial Sequence
  primer
gtaaaacgacggccagtatgtcaagaaggtccagggtg

SEQ ID NO: 48682 - DNA, 19 bp, Artificial Sequence
  primer
cattcgctttaggcgttgg

SEQ ID NO: 48683 - DNA, 21 bp, Artificial Sequence
  primer
caagttagcagacagcagcag

SEQ ID NO: 48684 - DNA, 38 bp, Artificial Sequence; identical to SEQ ID NO: 48674
  primer

SEQ ID NO: 48685 - DNA, 38 bp, Artificial Sequence; identical to SEQ ID NO: 48675
  primer

SEQ ID NO: 48686 - DNA, 21 bp, Artificial Sequence
  primer
gaaagccagcagatgaaggag

SEQ ID NO: 48687 - DNA, 21 bp, Artificial Sequence
  primer
aggcgattccatgacagaaac

SEQ ID NO: 48688 - DNA, 38 bp, Artificial Sequence
  primer
gtaaaacgacggccagtgatgaagctggcctggactac

SEQ ID NO: 48689 - DNA, 21 bp, Artificial Sequence
  primer
gtccactccagatgaacaccc

SEQ ID NO: 48690 - DNA, 19 bp, Artificial Sequence
  primer
gcatgagggaggagctgtc

SEQ ID NO: 48691 - DNA, 38 bp, Artificial Sequence; identical to SEQ ID NO: 48681
  primer

SEQ ID NO: 48692 - DNA, 21 bp, Artificial Sequence
  primer
gtacatcccttcaggcgagag

SEQ ID NO: 48693 - DNA, 21 bp, Artificial Sequence
  primer
gtcttctgcagatatggacgg

SEQ ID NO: 48694 - DNA, 21 bp, Artificial Sequence
  primer
tgcaacagaagagtcagtggg

SEQ ID NO: 48695 - DNA, 38 bp, Artificial Sequence
  primer
gtaaaacgacggccagtggtggagttgggtgtcatagg

SEQ ID NO: 48696 - DNA, 21 bp, Artificial Sequence
  primer
acatcgggtgttagcagatcc

SEQ ID NO: 48697 - DNA, 40 bp, Artificial Sequence
  primer
gtaaaacgacggccagtttcatggacatttggatgaattt

SEQ ID NO: 48698 - DNA, 35 bp, Artificial Sequence
  primer
gtaaaacgacggccagtggcctcccagtgattctg

SEQ ID NO: 48699 - DNA, 22 bp, Artificial Sequence
  primer
tcctctaggttgtatgaacggc

SEQ ID NO: 48700 - DNA, 22 bp, Artificial Sequence
  primer
cagactggaagcaattgatgtg

SEQ ID NO: 48701 - DNA, 38 bp, Artificial Sequence
  primer
gtaaaacgacggccagttccttctctatcggttcctgg

SEQ ID NO: 48702 - DNA, 38 bp, Artificial Sequence
  primer
gtaaaacgacggccagtgcccaagataccaccagtgag

SEQ ID NO: 48703 - DNA, 38 bp, Artificial Sequence
  primer
gtaaaacgacggccagtattgctggagcatcccagtag

SEQ ID NO: 48704 - DNA, 38 bp, Artificial Sequence
  primer
gtaaaacgacggccagtacagcaaggagaatctgtccc

SEQ ID NO: 48705 - DNA, 21 bp, Artificial Sequence
  primer
cctgaggatgagaacagctcc

SEQ ID NO: 48706 - DNA, 35 bp, Artificial Sequence
  primer
gtaaaacgacggccagtaggcagacatgcagccag

SEQ ID NO: 48707 - DNA, 21 bp, Artificial Sequence
  primer
tcctagggtgaagctgagagg

SEQ ID NO: 48708 - DNA, 38 bp, Artificial Sequence
  primer
gtaaaacgacggccagtaaattgatgaatgaccgagcc

SEQ ID NO: 48709 - DNA, 21 bp, Artificial Sequence
  primer
aagtgggacatgctgaagagg

SEQ ID NO: 48710 - DNA, 38 bp, Artificial Sequence
  primer
gtaaaacgacggccagttatggttatctctgggctggg

SEQ ID NO: 48711 - DNA, 38 bp, Artificial Sequence
  primer
gtaaaacgacggccagtgggtcagaactgtagaagccc

SEQ ID NO: 48712 - DNA, 38 bp, Artificial Sequence
  primer
gtaaaacgacggccagtgtggcggagtattagaccagg

SEQ ID NO: 48713 - DNA, 21 bp, Artificial Sequence
  primer
gtccactacaaggtgagcacg

SEQ ID NO: 48714 - DNA, 22 bp, Artificial Sequence
  primer
tttagataagccctgagttggg

SEQ ID NO: 48715 - DNA, 38 bp, Artificial Sequence
  primer
gtaaaacgacggccagtcctcaaatcaggaggtcttgg

SEQ ID NO: 48716 - DNA, 38 bp, Artificial Sequence
  primer
gtaaaacgacggccagtgatcattgcaggagctatggg

SEQ ID NO: 48717 - DNA, 37 bp, Artificial Sequence
  primer
gtaaaacgacggccagtgacaaccagaacttcgccag

SEQ ID NO: 48718 - DNA, 38 bp, Artificial Sequence
  primer
gtaaaacgacggccagtcaggtgagtccctcatgtgtc

SEQ ID NO: 48719 - DNA, 21 bp, Artificial Sequence
  primer
ccgggatctccctagataacc

SEQ ID NO: 48720 - DNA, 37 bp, Artificial Sequence
  primer
gtaaaacgacggccagtaacagctgtaggctgttggg

SEQ ID NO: 48721 - DNA, 35 bp, Artificial Sequence
  primer
gtaaaacgacggccagtctcgcagcagtctccagg

SEQ ID NO: 48722 - DNA, 21 bp, Artificial Sequence
  primer
attcagcaagccctctacacc

SEQ ID NO: 48723 - DNA, 38 bp, Artificial Sequence
  primer
gtaaaacgacggccagttgaatcatggtgtctgggatg

SEQ ID NO: 48724 - DNA, 38 bp, Artificial Sequence
  primer
gtaaaacgacggccagttattcagctaccttgctccgc

SEQ ID NO: 48725 - DNA, 38 bp, Artificial Sequence
  primer
gtaaaacgacggccagtgaacataggcatgagccactg

SEQ ID NO: 48726 - DNA, 21 bp, Artificial Sequence
  primer
tggagagcgtcactttctttg

SEQ ID NO: 48727 - DNA, 21 bp, Artificial Sequence
  primer
gggcctggttaaattgttcac

SEQ ID NO: 48728 - DNA, 21 bp, Artificial Sequence
  primer
agaacaggatgactcaagcgg

SEQ ID NO: 48729 - DNA, 20 bp, Artificial Sequence
  primer
agatcgatgtcgagagcctg

SEQ ID NO: 48730 - DNA, 18 bp, Artificial Sequence
  primer
ggtgtcctgcctgaaggg

SEQ ID NO: 48731 - DNA, 38 bp, Artificial Sequence
  primer
gtaaaacgacggccagtagaagatttacggacatcccg

SEQ ID NO: 48732 - DNA, 21 bp, Artificial Sequence
  primer
tgttgaagcaagcaagcaaac

SEQ ID NO: 48733 - DNA, 39 bp, Artificial Sequence
  primer
gtaaaacgacggccagtgcctttgctgataaagagttgg

SEQ ID NO: 48734 - DNA, 21 bp, Artificial Sequence
  primer
tgccttgatttaaccatgcag

SEQ ID NO: 48735 - DNA, 38 bp, Artificial Sequence
  primer
gtaaaacgacggccagtgacttgaagggagcacgagtc

SEQ ID NO: 48736 - DNA, 37 bp, Artificial Sequence
  primer
gtaaaacgacggccagtgggagctggagagacgactg

SEQ ID NO: 48737 - DNA, 35 bp, Artificial Sequence
  primer
gtaaaacgacggccagttgccaactcattcgggag

SEQ ID NO: 48738 - DNA, 20 bp, Artificial Sequence
  primer
tactgccgcttcaaggactg

SEQ ID NO: 48739 - DNA, 38 bp, Artificial Sequence
  primer
gtaaaacgacggccagtccaggaagccactctgatttc

SEQ ID NO: 48740 - DNA, 38 bp, Artificial Sequence
  primer
gtaaaacgacggccagtgcaaagagtaagggctgcttc

SEQ ID NO: 48741 - DNA, 21 bp, Artificial Sequence
  primer
acctgagagtctagcgttgcc

SEQ ID NO: 48742 - DNA, 21 bp, Artificial Sequence
  primer
tctctagccttgccttcttgg

SEQ ID NO: 48743 - DNA, 20 bp, Artificial Sequence
  primer
cacagtgtggcagcagagac

SEQ ID NO: 48744 - DNA, 21 bp, Artificial Sequence
  primer
tcgtaaccatggtgtggtgtc

SEQ ID NO: 48745 - DNA, 38 bp, Artificial Sequence
  primer
gtaaaacgacggccagttgagcagtaccacattctggg

SEQ ID NO: 48746 - DNA, 20 bp, Artificial Sequence
  primer
gggtcaaagacttgactgcg

SEQ ID NO: 48747 - DNA, 38 bp, Artificial Sequence
  primer
gtaaaacgacggccagtgccagacaacaggaacctagc

SEQ ID NO: 48748 - DNA, 21 bp, Artificial Sequence
  primer
cccaaagcacagaaactctcc

SEQ ID NO: 48749 - DNA, 38 bp, Artificial Sequence
  primer
gtaaaacgacggccagtctctgcgagaagtgctacctg

SEQ ID NO: 48750 - DNA, 38 bp, Artificial Sequence
  primer
gtaaaacgacggccagtggaggatggagatgcagtgag

SEQ ID NO: 48751 - DNA, 19 bp, Artificial Sequence
  primer
aggtgtttgctgaatgccc

SEQ ID NO: 48752 - DNA, 21 bp, Artificial Sequence
  primer
tgcggtgagctgagattacac

SEQ ID NO: 48753 - DNA, 36 bp, Artificial Sequence
  primer
gtaaaacgacggccagtctgcaggtgtggtctccag

SEQ ID NO: 48754 - DNA, 38 bp, Artificial Sequence
  primer
gtaaaacgacggccagttgagtatgaggtctgggaggg

SEQ ID NO: 48755 - DNA, 18 bp, Artificial Sequence
  primer
tggcgcatgcctgtagtc

SEQ ID NO: 48756 - DNA, 38 bp, Artificial Sequence
  primer
gtaaaacgacggccagtctcaacacctgggttctagcc

SEQ ID NO: 48757 - DNA, 38 bp, Artificial Sequence
  primer
gtaaaacgacggccagtcctcccttccctggtaagatg

SEQ ID NO: 48758 - DNA, 24 bp, Artificial Sequence
  primer
gaagaacactgtaggcagataccc

SEQ ID NO: 48759 - DNA, 21 bp, Artificial Sequence
  primer
aggcatagaaaggcagtgtcc

SEQ ID NO: 48760 - DNA, 23 bp, Artificial Sequence
  primer
ccatccaacgtagtatcttgtcc

SEQ ID NO: 48761 - DNA, 38 bp, Artificial Sequence
  primer
gtaaaacgacggccagtacaaagatgaatccggttgag

SEQ ID NO: 48762 - DNA, 41 bp, Artificial Sequence
  primer
gtaaaacgacggccagtcctttcagatttcagaggaatgag

SEQ ID NO: 48763 - DNA, 39 bp, Artificial Sequence
  primer
gtaaaacgacggccagttctaaatgccgttgatgacctt

SEQ ID NO: 48764 - DNA, 37 bp, Artificial Sequence
  primer
gtaaaacgacggccagtgcaccctgcctattctcaac

SEQ ID NO: 48765 - DNA, 39 bp, Artificial Sequence
  primer
gtaaaacgacggccagtccagtcaaatgggaagaagaag

SEQ ID NO: 48766 - DNA, 24 bp, Artificial Sequence
  primer
tccttgtaaatagagggctgaatc

SEQ ID NO: 48767 - DNA, 38 bp, Artificial Sequence
  primer
gtaaaacgacggccagtacctgccattccctttatttg

SEQ ID NO: 48768 - DNA, 21 bp, Artificial Sequence
  primer
acctcccttgctgcttagatg

SEQ ID NO: 48769 - DNA, 38 bp, Artificial Sequence
  primer
gtaaaacgacggccagtaatgacttcaggtctccaggc

SEQ ID NO: 48770 - DNA, 20 bp, Artificial Sequence
  primer
ttgttcgcaccttcacaatg

SEQ ID NO: 48771 - DNA, 21 bp, Artificial Sequence
  primer
accatcactctgccttcactg

SEQ ID NO: 48772 - DNA, 21 bp, Artificial Sequence
  primer
agtgcagtgtcacacaccaag

SEQ ID NO: 48773 - DNA, 21 bp, Artificial Sequence
  primer
ttgtggttcagcctaggaaca

SEQ ID NO: 48774 - DNA, 22 bp, Artificial Sequence
  primer
tgcctttgacaacactaacagg

SEQ ID NO: 48775 - DNA, 20 bp, Artificial Sequence
  primer
cacagtcccagcaccgttac

SEQ ID NO: 48776 - DNA, 21 bp, Artificial Sequence
  primer
gcggagattaagtcgcaattc

SEQ ID NO: 48777 - DNA, 38 bp, Artificial Sequence
  primer
gtaaaacgacggccagtcccaacctcaacatcctcttc

SEQ ID NO: 48778 - DNA, 38 bp, Artificial Sequence
  primer
gtaaaacgacggccagtctggtgtccatctgtcttccc

SEQ ID NO: 48779 - DNA, 38 bp, Artificial Sequence
  primer
gtaaaacgacggccagtggttgatcgacaagaccaagg

SEQ ID NO: 48780 - DNA, 21 bp, Artificial Sequence
  primer
gggcttctctgtctatgctgc

SEQ ID NO: 48781 - DNA, 19 bp, Artificial Sequence
  primer
acaagtcctgggtcaacgc

SEQ ID NO: 48782 - DNA, 21 bp, Artificial Sequence
  primer
tccattacttaccgctttggc

SEQ ID NO: 48783 - DNA, 19 bp, Artificial Sequence
  primer
cacaccattcagcattggc

SEQ ID NO: 48784 - DNA, 38 bp, Artificial Sequence
  primer
gtaaaacgacggccagtactcagaggcaagagtggtgg

SEQ ID NO: 48785 - DNA, 38 bp, Artificial Sequence
  primer
gtaaaacgacggccagtctaagatgcaagttcccagcc

SEQ ID NO: 48786 - DNA, 35 bp, Artificial Sequence
  primer
gtaaaacgacggccagtggaaggagggagggaagc

SEQ ID NO: 48787 - DNA, 23 bp, Artificial Sequence
  primer
ggtaagggaaatagtgccaaatg

SEQ ID NO: 48788 - DNA, 23 bp, Artificial Sequence
  primer
tgaatgaaattgtgtgtattggc

SEQ ID NO: 48789 - DNA, 25 bp, Artificial Sequence
  primer
ttgaccaccagttatggatattctc

SEQ ID NO: 48790 - DNA, 21 bp, Artificial Sequence
  primer
aaatacagccttctcctccgt

SEQ ID NO: 48791 - DNA, 39 bp, Artificial Sequence
  primer
gtaaaacgacggccagtcacaaagatgtgggtgtgaaac

SEQ ID NO: 48792 - DNA, 21 bp, Artificial Sequence
  primer
tctgtgctcaacgtctcttcc

SEQ ID NO: 48793 - DNA, 41 bp, Artificial Sequence
  primer
gtaaaacgacggccagttttcttcattggtaccttagttgg

SEQ ID NO: 48794 - DNA, 26 bp, Artificial Sequence
  primer
ggattaagagaacagccaggtacttt

SEQ ID NO: 48795 - DNA, 22 bp, Artificial Sequence
  primer
tgaaagagaaggactttcaggc

SEQ ID NO: 48796 - DNA, 40 bp, Artificial Sequence
  primer
gtaaaacgacggccagtgctatccagaagctcggtaattc

SEQ ID NO: 48797 - DNA, 38 bp, Artificial Sequence
  primer
gtaaaacgacggccagtgctagtttggcatgtggattg

SEQ ID NO: 48798 - DNA, 22 bp, Artificial Sequence
  primer
tgcctgtaccaagaatgttgac

SEQ ID NO: 48799 - DNA, 22 bp, Artificial Sequence
  primer
ggacaccagatgttgataaccc

SEQ ID NO: 48800 - DNA, 38 bp, Artificial Sequence
  primer
gtaaaacgacggccagtatggctgcccactcttatacc

SEQ ID NO: 48801 - DNA, 42 bp, Artificial Sequence
  primer
gtaaaacgacggccagttctctgtaccaactgagctgtaatg

SEQ ID NO: 48802 - DNA, 46 bp, Artificial Sequence
  primer
gtaaaacgacggccagttttgacttcttattctgcctttaaatatc

SEQ ID NO: 48803 - DNA, 42 bp, Artificial Sequence
  primer
gtaaaacgacggccagtacttgtgtttgaagccttaggtaaa

SEQ ID NO: 48804 - DNA, 41 bp, Artificial Sequence
  primer
gtaaaacgacggccagtagccattctcattaaatggtgata

SEQ ID NO: 48805 - DNA, 38 bp, Artificial Sequence
  primer
gtaaaacgacggccagtaaacatacagccaagatgccc

SEQ ID NO: 48806 - DNA, 21 bp, Artificial Sequence
  primer
agatggagaatctgccacgtc

SEQ ID NO: 48807 - DNA, 21 bp, Artificial Sequence
  primer
gggtccttgagcagacaattc

SEQ ID NO: 48808 - DNA, 21 bp, Artificial Sequence
  primer
tggcaaggtacaagaccaaac

SEQ ID NO: 48809 - DNA, 21 bp, Artificial Sequence
  primer
actgcattcgatccttcagtg

SEQ ID NO: 48810 - DNA, 21 bp, Artificial Sequence
  primer
cttggtaaagttcggagagcc

SEQ ID NO: 48811 - DNA, 21 bp, Artificial Sequence
  primer
tggagcagatgtctttgatgg

SEQ ID NO: 48812 - DNA, 27 bp, Artificial Sequence
  primer
aagaatgttatatgcctatattgggtg

SEQ ID NO: 48813 - DNA, 21 bp, Artificial Sequence
  primer
acagtggaatttgccataagc

SEQ ID NO: 48814 - DNA, 38 bp, Artificial Sequence
  primer
gtaaaacgacggccagtatggatatgtgccagcctttc

SEQ ID NO: 48815 - DNA, 26 bp, Artificial Sequence
  primer
aagttatgaactggcagatgtttcta

SEQ ID NO: 48816 - DNA, 27 bp, Artificial Sequence
  primer
ttgtttcttatccttctttgctaattt

SEQ ID NO: 48817 - DNA, 37 bp, Artificial Sequence
  primer
gtaaaacgacggccagtcagtgccatggatcattgtg

SEQ ID NO: 48818 - DNA, 39 bp, Artificial Sequence
  primer
gtaaaacgacggccagttccattaaagttggatgcaagg

SEQ ID NO: 48819 - DNA, 23 bp, Artificial Sequence
  primer
actggctatgaaatagatggtgg

SEQ ID NO: 48820 - DNA, 20 bp, Artificial Sequence
  primer
tgcatttggcagaaatgaag

SEQ ID NO: 48821 - DNA, 41 bp, Artificial Sequence
  primer
gtaaaacgacggccagtttgaaatgctgacttcttcacatc

SEQ ID NO: 48822 - DNA, 23 bp, Artificial Sequence
  primer
ggaaatagttcatgaaggcaaag

SEQ ID NO: 48823 - DNA, 29 bp, Artificial Sequence
  primer
ttgatactcttgaaagtagatctgaaaca

SEQ ID NO: 48824 - DNA, 45 bp, Artificial Sequence
  primer
gtaaaacgacggccagtcagtattaactcctgatgcaatacattt

SEQ ID NO: 48825 - DNA, 47 bp, Artificial Sequence
  primer
gtaaaacgacggccagtgtgcttatttgtagttaaccttagctctta

SEQ ID NO: 48826 - DNA, 38 bp, Artificial Sequence
  primer
gtaaaacgacggccagtgatgtcaaaggcataggatgg

SEQ ID NO: 48827 - DNA, 39 bp, Artificial Sequence
  primer
gtaaaacgacggccagttcaggttgattcctgatagtgg

SEQ ID NO: 48828 - DNA, 20 bp, Artificial Sequence
  primer
caccttgcacatcttccctg

SEQ ID NO: 48829 - DNA, 21 bp, Artificial Sequence
  primer
tggcaccaaggaattgttatc

SEQ ID NO: 48830 - DNA, 26 bp, Artificial Sequence
  primer
atgcaagtactaattgatagattggc

SEQ ID NO: 48831 - DNA, 42 bp, Artificial Sequence
  primer
gtaaaacgacggccagtcataaacgtatctccaaactgaagc

SEQ ID NO: 48832 - DNA, 23 bp, Artificial Sequence
  primer
ttgaggtatgaggtcattgtgtg

SEQ ID NO: 48833 - DNA, 23 bp, Artificial Sequence
  primer
gatcctagtcagtaatgcccaaa

SEQ ID NO: 48834 - DNA, 40 bp, Artificial Sequence
  primer
gtaaaacgacggccagttgctcctatcgtatttgaggatg

SEQ ID NO: 48835 - DNA, 21 bp, Artificial Sequence
  primer
ggtgtcacactgagggtaagg

SEQ ID NO: 48836 - DNA, 42 bp, Artificial Sequence
  primer
gtaaaacgacggccagtcagaggatttaagaaagccagaaac

SEQ ID NO: 48837 - DNA, 21 bp, Artificial Sequence
  primer
caagattccaccactgcattc

SEQ ID NO: 48838 - DNA, 27 bp, Artificial Sequence
  primer
ccttatatccagtgtctgaaatcattg

SEQ ID NO: 48839 - DNA, 21 bp, Artificial Sequence
  primer
taccttaggtggtctgcctgc

SEQ ID NO: 48840 - DNA, 38 bp, Artificial Sequence
  primer
gtaaaacgacggccagtaggagttaagccagagcctcc

SEQ ID NO: 48841 - DNA, 23 bp, Artificial Sequence
  primer
ttgttgaatgataatgcatggag

SEQ ID NO: 48842 - DNA, 25 bp, Artificial Sequence
  primer
ctcttaactccagtacacttccagg

SEQ ID NO: 48843 - DNA, 21 bp, Artificial Sequence
  primer
catggcaaggagctcaatatg

SEQ ID NO: 48844 - DNA, 37 bp, Artificial Sequence
  primer
gtaaaacgacggccagttttcgttggcgatattgctt

SEQ ID NO: 48845 - DNA, 23 bp, Artificial Sequence
  primer
tcccaaagtgaatgttggattag

SEQ ID NO: 48846 - DNA, 21 bp, Artificial Sequence
  primer
gagaatttggcatcagtctgc

SEQ ID NO: 48847 - DNA, 25 bp, Artificial Sequence
  primer
tgatttcaagctctttgattgattc

SEQ ID NO: 48848 - DNA, 26 bp, Artificial Sequence
  primer
caagaactgtagagaatacatccaaa

SEQ ID NO: 48849 - DNA, 21 bp, Artificial Sequence
  primer
gaaggttgatgcattcgtgta

SEQ ID NO: 48850 - DNA, 27 bp, Artificial Sequence
  primer
actgtagtaacattcaattcagacaaa

SEQ ID NO: 48851 - DNA, 38 bp, Artificial Sequence
  primer
gtaaaacgacggccagtgatgagctaaacgaagctgcc

SEQ ID NO: 48852 - DNA, 38 bp, Artificial Sequence
  primer
gtaaaacgacggccagtgattcctgttgcatttccctc

SEQ ID NO: 48853 - DNA, 21 bp, Artificial Sequence
  primer
aaagattctcaccacacgctg

SEQ ID NO: 48854 - DNA, 44 bp, Artificial Sequence
  primer
gtaaaacgacggccagttgaatacttgtttcttatcctttagcc

SEQ ID NO: 48855 - DNA, 38 bp, Artificial Sequence
  primer
gtaaaacgacggccagtattccattgccaatcagtgaa

SEQ ID NO: 48856 - DNA, 21 bp, Artificial Sequence
  primer
ttcttctgcattagcattggg

SEQ ID NO: 48857 - DNA, 22 bp, Artificial Sequence
  primer
ccatgcatatcaagaggtggtg

SEQ ID NO: 48858 - DNA, 38 bp, Artificial Sequence
  primer
gtaaaacgacggccagtcctttcctttgggtaaacacc

SEQ ID NO: 48859 - DNA, 38 bp, Artificial Sequence
  primer
gtaaaacgacggccagttgttggccaatggacatttag

SEQ ID NO: 48860 - DNA, 38 bp, Artificial Sequence
  primer
gtaaaacgacggccagtatgttgtatggaagccaaccc

SEQ ID NO: 48861 - DNA, 38 bp, Artificial Sequence
  primer
gtaaaacgacggccagtcagtgagcattgtgggaagac

SEQ ID NO: 48862 - DNA, 38 bp, Artificial Sequence
  primer
gtaaaacgacggccagtggaaggctttcaggaattgtg

SEQ ID NO: 48863 - DNA, 20 bp, Artificial Sequence
  primer
tggcttatttgaggctgcac

SEQ ID NO: 48864 - DNA, 38 bp, Artificial Sequence
  primer
gtaaaacgacggccagtgatggatttagggaaagtgcg

SEQ ID NO: 48865 - DNA, 27 bp, Artificial Sequence
  primer
cgttaaagtgttcaggaaggaatacac

SEQ ID NO: 48866 - DNA, 39 bp, Artificial Sequence
  primer
gtaaaacgacggccagtgtcctgaatgatgacagactgc

SEQ ID NO: 48867 - DNA, 37 bp, Artificial Sequence
  primer
gtaaaacgacggccagttcagccatggaagtagcagg

SEQ ID NO: 48868 - DNA, 41 bp, Artificial Sequence
  primer
gtaaaacgacggccagtggcattattgaccttccttcttag

SEQ ID NO: 48869 - DNA, 38 bp, Artificial Sequence
  primer
gtaaaacgacggccagtaatttcagggtattgatggga

SEQ ID NO: 48870 - DNA, 21 bp, Artificial Sequence
  primer
tgatgggaatcactccgtagc

SEQ ID NO: 48871 - DNA, 38 bp, Artificial Sequence
  primer
gtaaaacgacggccagtttgtaacccggtggcatttag

SEQ ID NO: 48872 - DNA, 39 bp, Artificial Sequence
  primer
gtaaaacgacggccagtgcctgacttcatttctcacagg

SEQ ID NO: 48873 - DNA, 22 bp, Artificial Sequence
  primer
gaagaggaagacgatgctgttg

SEQ ID NO: 48874 - DNA, 24 bp, Artificial Sequence
  primer
ccaaagtagagagtgatctgctgg

SEQ ID NO: 48875 - DNA, 23 bp, Artificial Sequence
  primer
gagcgaacatattccctttacac

SEQ ID NO: 48876 - DNA, 39 bp, Artificial Sequence
  primer
gtaaaacgacggccagttgttgctaggtttcctggatgt

SEQ ID NO: 48877 - DNA, 40 bp, Artificial Sequence
  primer
gtaaaacgacggccagtaaaggaataagtgtcatctgccc

SEQ ID NO: 48878 - DNA, 40 bp, Artificial Sequence
  primer
gtaaaacgacggccagttttgttgctcaaattatggaaat

SEQ ID NO: 48879 - DNA, 21 bp, Artificial Sequence
  primer
tgactgctggaaagctgattc

SEQ ID NO: 48880 - DNA, 38 bp, Artificial Sequence
  primer
gtaaaacgacggccagtcagggaacaccactctgtttc

SEQ ID NO: 48881 - DNA, 23 bp, Artificial Sequence
  primer
gagaaagagcagaaacccacttc

SEQ ID NO: 48882 - DNA, 23 bp, Artificial Sequence
  primer
gcttaatgctgtgtcttctttgc

SEQ ID NO: 48883 - DNA, 20 bp, Artificial Sequence
  primer
ccatcacagtggaaattggg

SEQ ID NO: 48884 - DNA, 37 bp, Artificial Sequence
  primer
gtaaaacgacggccagttgatctgggctatccaggtg

SEQ ID NO: 48885 - DNA, 21 bp, Artificial Sequence
  primer
gtgcagcaataaagttgtccc

SEQ ID NO: 48886 - DNA, 38 bp, Artificial Sequence
  primer
gtaaaacgacggccagtagtgactgtgcttcctcaccc

SEQ ID NO: 48887 - DNA, 38 bp, Artificial Sequence
  primer
gtaaaacgacggccagttgacttcacacccagtccatc

SEQ ID NO: 48888 - DNA, 39 bp, Artificial Sequence
  primer
gtaaaacgacggccagtgggccttagtgaatcttccttc

SEQ ID NO: 48889 - DNA, 43 bp, Artificial Sequence
  primer
gtaaaacgacggccagtttagcagacatgtatgttggtactgt

SEQ ID NO: 48890 - DNA, 22 bp, Artificial Sequence
  primer
tgactgaaagacaggttgtccc

SEQ ID NO: 48891 - DNA, 45 bp, Artificial Sequence
  primer
gtaaaacgacggccagtgcatcagtaaggtctgtatttaaatgtg

SEQ ID NO: 48892 - DNA, 21 bp, Artificial Sequence
  primer
ggaaggttgggctttagtgag

SEQ ID NO: 48893 - DNA, 38 bp, Artificial Sequence
  primer
gtaaaacgacggccagttctaggcatccatgtgtctcg

SEQ ID NO: 48894 - DNA, 37 bp, Artificial Sequence
  primer
gtaaaacgacggccagtactcctgtgctcctggagtg

SEQ ID NO: 48895 - DNA, 38 bp, Artificial Sequence
  primer
gtaaaacgacggccagtagctttgagcttcccacactc

SEQ ID NO: 48896 - DNA, 39 bp, Artificial Sequence
  primer
gtaaaacgacggccagtccacaccacttcctgatgagtc

SEQ ID NO: 48897 - DNA, 21 bp, Artificial Sequence
  primer
cagtcctagcagtggagaggg

SEQ ID NO: 48898 - DNA, 21 bp, Artificial Sequence
  primer
acgccagactggtgatctctg

SEQ ID NO: 48899 - DNA, 21 bp, Artificial Sequence
  primer
ccatttcacagatgcaacagg

SEQ ID NO: 48900 - DNA, 38 bp, Artificial Sequence
  primer
gtaaaacgacggccagtccagaagggaagccctaaatg

SEQ ID NO: 48901 - DNA, 37 bp, Artificial Sequence
  primer
gtaaaacgacggccagtaagcaccctgtggatctgtc

SEQ ID NO: 48902 - DNA, 38 bp, Artificial Sequence
  primer
gtaaaacgacggccagtcatagagtccctgagtgcagc

SEQ ID NO: 48903 - DNA, 21 bp, Artificial Sequence
  primer
gaaggcaagtattgtgcatgg

SEQ ID NO: 48904 - DNA, 38 bp, Artificial Sequence
  primer
gtaaaacgacggccagtctctaggcttcaggccacatc

SEQ ID NO: 48905 - DNA, 38 bp, Artificial Sequence
  primer
gtaaaacgacggccagtcattgcctcctttctcaagtg

SEQ ID NO: 48906 - DNA, 36 bp, Artificial Sequence
  primer
gtaaaacgacggccagtgtcgggagatgctggagac

SEQ ID NO: 48907 - DNA, 37 bp, Artificial Sequence
  primer
gtaaaacgacggccagtgggagccaggttccgattac

SEQ ID NO: 48908 - DNA, 38 bp, Artificial Sequence
  primer
gtaaaacgacggccagtctgtacttcgcagctgtctgg

SEQ ID NO: 48909 - DNA, 37 bp, Artificial Sequence
  primer
gtaaaacgacggccagtaggaacctgctcactccagg

SEQ ID NO: 48910 - DNA, 19 bp, Artificial Sequence
  primer
gagagggagaggacctggc

SEQ ID NO: 48911 - DNA, 38 bp, Artificial Sequence
  primer
gtaaaacgacggccagttgcgtgaagcagtttaaggac

SEQ ID NO: 48912 - DNA, 38 bp, Artificial Sequence
  primer
gtaaaacgacggccagtaggtactgtctgctgcttccc

SEQ ID NO: 48913 - DNA, 37 bp, Artificial Sequence
  primer
gtaaaacgacggccagtactggctttggtgtccagtg

SEQ ID NO: 48914 - DNA, 20 bp, Artificial Sequence
  primer
ctgcatcttctttcccaggc

SEQ ID NO: 48915 - DNA, 38 bp, Artificial Sequence
  primer
gtaaaacgacggccagttgcaacaagattctggacctg

SEQ ID NO: 48916 - DNA, 38 bp, Artificial Sequence
  primer
gtaaaacgacggccagtgctttcttcttgaggtggagg

SEQ ID NO: 48917 - DNA, 38 bp, Artificial Sequence
  primer
gtaaaacgacggccagtagcacagacagcattcagagg

SEQ ID NO: 48918 - DNA, 38 bp, Artificial Sequence
  primer
gtaaaacgacggccagtagggactgtttgtggcagaag

SEQ ID NO: 48919 - DNA, 21 bp, Artificial Sequence
  primer
ctctgtccttgaggttctggg

SEQ ID NO: 48920 - DNA, 39 bp, Artificial Sequence
  primer
gtaaaacgacggccagtcacaggaaattccaaggaaagg

SEQ ID NO: 48921 - DNA, 36 bp, Artificial Sequence
  primer
gtaaaacgacggccagttcccaagtggagttggagg

SEQ ID NO: 48922 - DNA, 38 bp, Artificial Sequence
  primer
gtaaaacgacggccagtcctaccagctacagccaggac

SEQ ID NO: 48923 - DNA, 21 bp, Artificial Sequence
  primer
tggcagagctaccagtctcag

SEQ ID NO: 48924 - DNA, 38 bp, Artificial Sequence
  primer
gtaaaacgacggccagtaagggaagtgctatgagctgg

SEQ ID NO: 48925 - DNA, 37 bp, Artificial Sequence
  primer
gtaaaacgacggccagtaggagtggaactctgggagg

SEQ ID NO: 48926 - DNA, 38 bp, Artificial Sequence
  primer
gtaaaacgacggccagtgagtgcagtgactcacccaag

SEQ ID NO: 48927 - DNA, 37 bp, Artificial Sequence
  primer
gtaaaacgacggccagttccggatagtgggcctgtag

SEQ ID NO: 48928 - DNA, 36 bp, Artificial Sequence
  primer
gtaaaacgacggccagtgaaagtagagcccgcccac

SEQ ID NO: 48929 - DNA, 36 bp, Artificial Sequence
  primer
gtaaaacgacggccagtaccgcccacttacaggatg

SEQ ID NO: 48930 - DNA, 38 bp, Artificial Sequence
  primer
gtaaaacgacggccagttttcaaggccctctttgtcag

SEQ ID NO: 48931 - DNA, 39 bp, Artificial Sequence
  primer
gtaaaacgacggccagttgtagcagaggtcaagacatgc

SEQ ID NO: 48932 - DNA, 38 bp, Artificial Sequence
  primer
gtaaaacgacggccagtggctcaagatggagaacgaac

SEQ ID NO: 48933 - DNA, 37 bp, Artificial Sequence
  primer
gtaaaacgacggccagtacaggactttccatttccgc

SEQ ID NO: 48934 - DNA, 21 bp, Artificial Sequence
  primer
tcccatttactggacatgctg

SEQ ID NO: 48935 - DNA, 21 bp, Artificial Sequence
  primer
aatttagcaagggcttcccag

SEQ ID NO: 48936 - DNA, 25 bp, Artificial Sequence
  primer
aaagttaaaggagaggagcatgaat

SEQ ID NO: 48937 - DNA, 38 bp, Artificial Sequence
  primer
gtaaaacgacggccagtagccacaagataggatggacg

SEQ ID NO: 48938 - DNA, 20 bp, Artificial Sequence
  primer
acagcaaaggcaaggaggtc

SEQ ID NO: 48939 - DNA, 37 bp, Artificial Sequence
  primer
gtaaaacgacggccagtcttgcctggtggtttgagag

SEQ ID NO: 48940 - DNA, 20 bp, Artificial Sequence
  primer
acagagaagaaagcgggtgg

SEQ ID NO: 48941 - DNA, 38 bp, Artificial Sequence
  primer
gtaaaacgacggccagtagcagaattccaggtggtcag

SEQ ID NO: 48942 - DNA, 37 bp, Artificial Sequence
  primer
gtaaaacgacggccagtgaaggtccagcgagactgtg

SEQ ID NO: 48943 - DNA, 36 bp, Artificial Sequence
  primer
gtaaaacgacggccagtctgtgctgctgtgtcctgg

SEQ ID NO: 48944 - DNA, 21 bp, Artificial Sequence
  primer
gtgaatgtgagaggcatggag

SEQ ID NO: 48945 - DNA, 19 bp, Artificial Sequence
  primer
cggccacagcttctctctc

SEQ ID NO: 48946 - DNA, 20 bp, Artificial Sequence
  primer
cccaactctccttccatctg

SEQ ID NO: 48947 - DNA, 20 bp, Artificial Sequence
  primer
gttggtagggccaacctttc

SEQ ID NO: 48948 - DNA, 38 bp, Artificial Sequence
  primer
gtaaaacgacggccagtcagcctttctgggctatgttg

SEQ ID NO: 48949 - DNA, 38 bp, Artificial Sequence
  primer
gtaaaacgacggccagttacttggcgagctaatcctgc

SEQ ID NO: 48950 - DNA, 21 bp, Artificial Sequence
  primer
cacaatgcaggctaagtaccg

SEQ ID NO: 48951 - DNA, 38 bp, Artificial Sequence
  primer
gtaaaacgacggccagtagatctctgcaactgccaagc

SEQ ID NO: 48952 - DNA, 21 bp, Artificial Sequence
  primer
ggaagtccatagccgaaacac

SEQ ID NO: 48953 - DNA, 38 bp, Artificial Sequence
  primer
gtaaaacgacggccagttggatcaagaacatggtgagc

SEQ ID NO: 48954 - DNA, 36 bp, Artificial Sequence
  primer
gtaaaacgacggccagtgatggcagggtggcagtag

SEQ ID NO: 48955 - DNA, 36 bp, Artificial Sequence
  primer
gtaaaacgacggccagtagaagcacaggtggatggg

SEQ ID NO: 48956 - DNA, 38 bp, Artificial Sequence
  primer
gtaaaacgacggccagtagatgaaggctgctgagatcc

SEQ ID NO: 48957 - DNA, 37 bp, Artificial Sequence
  primer
gtaaaacgacggccagtgaacaccaagtgcccaagag

SEQ ID NO: 48958 - DNA, 39 bp, Artificial Sequence
  primer
gtaaaacgacggccagtttagagaggcactactgggtgg

SEQ ID NO: 48959 - DNA, 38 bp, Artificial Sequence
  primer
gtaaaacgacggccagtacatctcctctgtgcctccag

SEQ ID NO: 48960 - DNA, 38 bp, Artificial Sequence
  primer
gtaaaacgacggccagttaaaggctctgaggttccagc

SEQ ID NO: 48961 - DNA, 21 bp, Artificial Sequence
  primer
ctcatctttgtgctgtcaccc

SEQ ID NO: 48962 - DNA, 35 bp, Artificial Sequence
  primer
gtaaaacgacggccagtaggagggagcctggtgtc

SEQ ID NO: 48963 - DNA, 39 bp, Artificial Sequence
  primer
gtaaaacgacggccagttgaagacttcctcaactcctgc

SEQ ID NO: 48964 - DNA, 38 bp, Artificial Sequence
  primer
gtaaaacgacggccagtagctcaagatgttcctggacg

SEQ ID NO: 48965 - DNA, 20 bp, Artificial Sequence
  primer
gagcaggagtgacaagtggg

SEQ ID NO: 48966 - DNA, 38 bp, Artificial Sequence
  primer
gtaaaacgacggccagttgcaacccaaatcatcttctg

SEQ ID NO: 48967 - DNA, 21 bp, Artificial Sequence
  primer
atagctactgccacgtgaccc

SEQ ID NO: 48968 - DNA, 20 bp, Artificial Sequence
  primer
aggtacgtgatgatgggcag

SEQ ID NO: 48969 - DNA, 38 bp, Artificial Sequence
  primer
gtaaaacgacggccagtaggtaggcttcctcttgggtc

SEQ ID NO: 48970 - DNA, 38 bp, Artificial Sequence
  primer
gtaaaacgacggccagtcagcacaggacgagtacaacc

SEQ ID NO: 48971 - DNA, 38 bp, Artificial Sequence
  primer
gtaaaacgacggccagtgccggtgaacttgaatgtttc

SEQ ID NO: 48972 - DNA, 21 bp, Artificial Sequence
  primer
aagaacggatgctggagaaac

SEQ ID NO: 48973 - DNA, 19 bp, Artificial Sequence
  primer
gggcaccagacttggtctc

SEQ ID NO: 48974 - DNA, 37 bp, Artificial Sequence
  primer
gtaaaacgacggccagtgtcagagcttcacgggacac

SEQ ID NO: 48975 - DNA, 44 bp, Artificial Sequence
  primer
gtaaaacgacggccagttctcgatatgctatccatttgtagttc

SEQ ID NO: 48976 - DNA, 43 bp, Artificial Sequence
  primer
gtaaaacgacggccagtaaagattcaaatctcatctttcttgg

SEQ ID NO: 48977 - DNA, 18 bp, Artificial Sequence
  primer
cgggaggcgaaggatgta

SEQ ID NO: 48978 - DNA, 37 bp, Artificial Sequence
  primer
gtaaaacgacggccagtggtgtgggttgtgttgatcc

SEQ ID NO: 48979 - DNA, 37 bp, Artificial Sequence
  primer
gtaaaacgacggccagtggtcttgattgagaccacgg

SEQ ID NO: 48980 - DNA, 39 bp, Artificial Sequence
  primer
gtaaaacgacggccagtgcaaagggatgccagtattaac

SEQ ID NO: 48981 - DNA, 39 bp, Artificial Sequence
  primer
gtaaaacgacggccagtaagacacacagctcatgtttgg

SEQ ID NO: 48982 - DNA, 37 bp, Artificial Sequence
  primer
gtaaaacgacggccagtagtgtgccattgcctgtacc

SEQ ID NO: 48983 - DNA, 21 bp, Artificial Sequence
  primer
ggaagggaaataggctccatc

SEQ ID NO: 48984 - DNA, 21 bp, Artificial Sequence
  primer
gaagcggtatcgacctctctg

SEQ ID NO: 48985 - DNA, 19 bp, Artificial Sequence
  primer
gtgtcctcgctcacttcgg

SEQ ID NO: 48986 - DNA, 38 bp, Artificial Sequence
  primer
gtaaaacgacggccagttttatagggcaggcaagatgc

SEQ ID NO: 48987 - DNA, 41 bp, Artificial Sequence
  primer
gtaaaacgacggccagtaaatgggtcactgactttatcctc

SEQ ID NO: 48988 - DNA, 39 bp, Artificial Sequence
  primer
gtaaaacgacggccagtcccacaactcaaatcaagacca

SEQ ID NO: 48989 - DNA, 26 bp, Artificial Sequence
  primer
tcaactggaaaccagatataactttg

SEQ ID NO: 48990 - DNA, 23 bp, Artificial Sequence
  primer
caacatttaagtgtggccatgtt

SEQ ID NO: 48991 - DNA, 39 bp, Artificial Sequence
  primer
gtaaaacgacggccagttgaaacagagacggttacaggg

SEQ ID NO: 48992 - DNA, 18 bp, Artificial Sequence
  primer
gtgcctggccagtgagag

SEQ ID NO: 48993 - DNA, 40 bp, Artificial Sequence
  primer
gtaaaacgacggccagtgctaaagtaaggtcacgcttgtg

SEQ ID NO: 48994 - DNA, 38 bp, Artificial Sequence
  primer
gtaaaacgacggccagtcagtggttcctttctgctgag

SEQ ID NO: 48995 - DNA, 41 bp, Artificial Sequence
  primer
gtaaaacgacggccagttggagatggtaaacttgctttagg

SEQ ID NO: 48996 - DNA, 27 bp, Artificial Sequence
  primer
actgtttctcttcctggttgtttatag

SEQ ID NO: 48997 - DNA, 41 bp, Artificial Sequence
  primer
gtaaaacgacggccagtctgaggattcgttctactttctga

SEQ ID NO: 48998 - DNA, 39 bp, Artificial Sequence
  primer
gtaaaacgacggccagtaccagattcagctttagccatc

SEQ ID NO: 48999 - DNA, 38 bp, Artificial Sequence
  primer
gtaaaacgacggccagtaactcaaacagacgctcctgg

SEQ ID NO: 49000 - DNA, 21 bp, Artificial Sequence
  primer
cgctcctggaagttgaatacc

SEQ ID NO: 49001 - DNA, 39 bp, Artificial Sequence
  primer
gtaaaacgacggccagttgcacaacaatgcagtctcttc

SEQ ID NO: 49002 - DNA, 39 bp, Artificial Sequence
  primer
gtaaaacgacggccagttccctttgaagaattaccttgg

SEQ ID NO: 49003 - DNA, 39 bp, Artificial Sequence
  primer
gtaaaacgacggccagtgaacaaccaccaactcttgagc

SEQ ID NO: 49004 - DNA, 23 bp, Artificial Sequence
  primer
tgttgccagtttcatgatagaga

SEQ ID NO: 49005 - DNA, 38 bp, Artificial Sequence
  primer
gtaaaacgacggccagtgggatagagccagaccttgtc

SEQ ID NO: 49006 - DNA, 21 bp, Artificial Sequence
  primer
cctctccataatgcggaagtc

SEQ ID NO: 49007 - DNA, 24 bp, Artificial Sequence
  primer
tcgagataaccagagctacagaac

SEQ ID NO: 49008 - DNA, 22 bp, Artificial Sequence
  primer
gcctttagcttgacgtgttctg

SEQ ID NO: 49009 - DNA, 23 bp, Artificial Sequence
  primer
tttgctccttggtctaggagttc

SEQ ID NO: 49010 - DNA, 21 bp, Artificial Sequence
  primer
ctaaactgtggcccttgcttc

SEQ ID NO: 49011 - DNA, 41 bp, Artificial Sequence
  primer
gtaaaacgacggccagtccattagcatgaattacttggagg

SEQ ID NO: 49012 - DNA, 38 bp, Artificial Sequence
  primer
gtaaaacgacggccagtagtgcctccctcatagcactc

SEQ ID NO: 49013 - DNA, 21 bp, Artificial Sequence
  primer
tttgaccttgcctcttcattc

SEQ ID NO: 49014 - DNA, 42 bp, Artificial Sequence
  primer
gtaaaacgacggccagtaatgaatggacatagaggacttgag

SEQ ID NO: 49015 - DNA, 38 bp, Artificial Sequence
  primer
gtaaaacgacggccagtaccaccaagatcctttcaagc

SEQ ID NO: 49016 - DNA, 38 bp, Artificial Sequence
  primer
gtaaaacgacggccagttggccttagagccagtaggag

SEQ ID NO: 49017 - DNA, 18 bp, Artificial Sequence
  primer
tgaacccaggacgcagag

SEQ ID NO: 49018 - DNA, 38 bp, Artificial Sequence
  primer
gtaaaacgacggccagtatttgcaatagcgtgcaagag

SEQ ID NO: 49019 - DNA, 24 bp, Artificial Sequence
  primer
ttctgattcattattgccatgaac

SEQ ID NO: 49020 - DNA, 42 bp, Artificial Sequence
  primer
gtaaaacgacggccagtttctctaacattattcctgattggg

SEQ ID NO: 49021 - DNA, 43 bp, Artificial Sequence
  primer
gtaaaacgacggccagtaaacagcttcctaataatttgcattt

SEQ ID NO: 49022 - DNA, 40 bp, Artificial Sequence
  primer
gtaaaacgacggccagtcgaaataaccacttgatttcagc

SEQ ID NO: 49023 - DNA, 22 bp, Artificial Sequence
  primer
gaaacaggacgacactacaggg

SEQ ID NO: 49024 - DNA, 23 bp, Artificial Sequence
  primer
gaatgccatcttaatggagaaca

SEQ ID NO: 49025 - DNA, 38 bp, Artificial Sequence
  primer
gtaaaacgacggccagtctggcttgggtgtaaggaaag

SEQ ID NO: 49026 - DNA, 39 bp, Artificial Sequence
  primer
gtaaaacgacggccagttcgatcttagcacacacacagc

SEQ ID NO: 49027 - DNA, 20 bp, Artificial Sequence
  primer
aaggtgttacacactgcccg

SEQ ID NO: 49028 - DNA, 40 bp, Artificial Sequence
  primer
gtaaaacgacggccagtgggaaagtacttgttgcttctgg

SEQ ID NO: 49029 - DNA, 38 bp, Artificial Sequence
  primer
gtaaaacgacggccagtcaccaagctgtgtcaaaggag

SEQ ID NO: 49030 - DNA, 23 bp, Artificial Sequence
  primer
tctcccaatgtagcaaatcacag

SEQ ID NO: 49031 - DNA, 39 bp, Artificial Sequence
  primer
gtaaaacgacggccagtttgtgcttgatgggtatatggc

SEQ ID NO: 49032 - DNA, 20 bp, Artificial Sequence
  primer
tttggaatgcctctctctcg

SEQ ID NO: 49033 - DNA, 26 bp, Artificial Sequence
  primer
ggatgaaatcgacagaagaagttaag

SEQ ID NO: 49034 - DNA, 39 bp, Artificial Sequence
  primer
gtaaaacgacggccagtaaggaggtaatctgcgatgaag

SEQ ID NO: 49035 - DNA, 35 bp, Artificial Sequence
  primer
gtaaaacgacggccagtgggcctggatacagggag

SEQ ID NO: 49036 - DNA, 40 bp, Artificial Sequence
  primer
gtaaaacgacggccagttgaaatggtcttactcgcatacc

SEQ ID NO: 49037 - DNA, 35 bp, Artificial Sequence
  primer
gtaaaacgacggccagtcttgctaggccatgctgc

SEQ ID NO: 49038 - DNA, 21 bp, Artificial Sequence
  primer
acttgaatctgaatccgggag

SEQ ID NO: 49039 - DNA, 38 bp, Artificial Sequence
  primer
gtaaaacgacggccagtatgtaaaccagggaaaggcac

SEQ ID NO: 49040 - DNA, 37 bp, Artificial Sequence
  primer
gtaaaacgacggccagtgttcaccatggctcgtcttc

SEQ ID NO: 49041 - DNA, 38 bp, Artificial Sequence
  primer
gtaaaacgacggccagtatgtcacagttggctgcactc

SEQ ID NO: 49042 - DNA, 27 bp, Artificial Sequence
  primer
gtggatagcgcttaaagattaaataag

SEQ ID NO: 49043 - DNA, 38 bp, Artificial Sequence
  primer
gtaaaacgacggccagtgatccctgaattcattcccag

SEQ ID NO: 49044 - DNA, 41 bp, Artificial Sequence
  primer
gtaaaacgacggccagttttaacagtgcatctgagtcaacc

SEQ ID NO: 49045 - DNA, 22 bp, Artificial Sequence
  primer
tggcaacttacagagcttctcc

SEQ ID NO: 49046 - DNA, 21 bp, Artificial Sequence
  primer
tgtgaatacctcctgtgctgg

SEQ ID NO: 49047 - DNA, 38 bp, Artificial Sequence
  primer
gtaaaacgacggccagtaaagcatccatcctatctggg

SEQ ID NO: 49048 - DNA, 26 bp, Artificial Sequence
  primer
ggaagaggtttgtccatttaccttac

SEQ ID NO: 49049 - DNA, 38 bp, Artificial Sequence
  primer
gtaaaacgacggccagttgtggaaggacgtaaaccttg

SEQ ID NO: 49050 - DNA, 26 bp, Artificial Sequence
  primer
tcatgtgtttacctagggttactttc

SEQ ID NO: 49051 - DNA, 42 bp, Artificial Sequence
  primer
gtaaaacgacggccagttttctgtgtaatctagtggaaggga

SEQ ID NO: 49052 - DNA, 21 bp, Artificial Sequence
  primer
tacaggaatggaatgacaccg

SEQ ID NO: 49053 - DNA, 21 bp, Artificial Sequence
  primer
cgcagtgagccaagatcatac

SEQ ID NO: 49054 - DNA, 38 bp, Artificial Sequence
  primer
gtaaaacgacggccagttcaggtacgtccttccattcc

SEQ ID NO: 49055 - DNA, 38 bp, Artificial Sequence
  primer
gtaaaacgacggccagtaaactgttgccctgtgtatcg

SEQ ID NO: 49056 - DNA, 39 bp, Artificial Sequence
  primer
gtaaaacgacggccagtcagcaggtatggttctgcctac

SEQ ID NO: 49057 - DNA, 22 bp, Artificial Sequence
  primer
tttgagcttaccctctcagcag

SEQ ID NO: 49058 - DNA, 41 bp, Artificial Sequence
  primer
gtaaaacgacggccagttggtttaagcttatccaaatggtg

SEQ ID NO: 49059 - DNA, 38 bp, Artificial Sequence
  primer
gtaaaacgacggccagtttagaccacagaattccaggc

SEQ ID NO: 49060 - DNA, 22 bp, Artificial Sequence
  primer
tgttcaaggttcaattcccttt

SEQ ID NO: 49061 - DNA, 22 bp, Artificial Sequence
  primer
aagtagccatgctgaagactgc

SEQ ID NO: 49062 - DNA, 38 bp, Artificial Sequence
  primer
gtaaaacgacggccagtgcttggagggcattgtgttag

SEQ ID NO: 49063 - DNA, 38 bp, Artificial Sequence
  primer
gtaaaacgacggccagtcagggtcttctcgaagtgttg

SEQ ID NO: 49064 - DNA, 37 bp, Artificial Sequence
  primer
gtaaaacgacggccagtgcaccttcggaagtcgtatg

SEQ ID NO: 49065 - DNA, 21 bp, Artificial Sequence
  primer
tgcttccaagaatgtgagagg

SEQ ID NO: 49066 - DNA, 38 bp, Artificial Sequence
  primer
gtaaaacgacggccagtgcccacaacagaacatactgg

SEQ ID NO: 49067 - DNA, 21 bp, Artificial Sequence
  primer
cctatgggactaaaggatgcc

SEQ ID NO: 49068 - DNA, 21 bp, Artificial Sequence
  primer
tacctttcaaagctcagtccg

SEQ ID NO: 49069 - DNA, 38 bp, Artificial Sequence
  primer
gtaaaacgacggccagtagacactgaggttgagagcgg

SEQ ID NO: 49070 - DNA, 21 bp, Artificial Sequence
  primer
actgggagtcgtaagacacgg

SEQ ID NO: 49071 - DNA, 21 bp, Artificial Sequence
  primer
cacatatgcacatggatgcac

SEQ ID NO: 49072 - DNA, 23 bp, Artificial Sequence
  primer
ggctctggacactctgaataagg

SEQ ID NO: 49073 - DNA, 38 bp, Artificial Sequence
  primer
gtaaaacgacggccagtagacactcagcttctctgggc

SEQ ID NO: 49074 - DNA, 38 bp, Artificial Sequence
  primer
gtaaaacgacggccagtgtgtccttagcctccatgctc

SEQ ID NO: 49075 - DNA, 20 bp, Artificial Sequence
  primer
cagaggtggaggcttgtctg

SEQ ID NO: 49076 - DNA, 37 bp, Artificial Sequence
  primer
gtaaaacgacggccagtctaaccgcagcaccagacag

SEQ ID NO: 49077 - DNA, 38 bp, Artificial Sequence
  primer
gtaaaacgacggccagtcaagttgtgggctcctaggtc

SEQ ID NO: 49078 - DNA, 38 bp, Artificial Sequence
  primer
gtaaaacgacggccagtgaccagaagggagggttcaag

SEQ ID NO: 49079 - DNA, 36 bp, Artificial Sequence
  primer
gtaaaacgacggccagttcagctacatggccacctg

SEQ ID NO: 49080 - DNA, 18 bp, Artificial Sequence
  primer
ctggtggctgggaatgag

SEQ ID NO: 49081 - DNA, 38 bp, Artificial Sequence
  primer
gtaaaacgacggccagtgaatcgcttgaacactgcaac

SEQ ID NO: 49082 - DNA, 21 bp, Artificial Sequence
  primer
gggagtgtgaactcctcttcg

SEQ ID NO: 49083 - DNA, 38 bp, Artificial Sequence
  primer
gtaaaacgacggccagtgcctctcctccttgaatgaac

SEQ ID NO: 49084 - DNA, 21 bp, Artificial Sequence
  primer
cttgtcccgctgaagaaagtc

SEQ ID NO: 49085 - DNA, 21 bp, Artificial Sequence
  primer
accaccgaaactaaatgaggg

SEQ ID NO: 49086 - DNA, 21 bp, Artificial Sequence
  primer
atagccacgtgccagtctctc

SEQ ID NO: 49087 - DNA, 35 bp, Artificial Sequence
  primer
gtaaaacgacggccagtgacgctggtcaccctcag

SEQ ID NO: 49088 - DNA, 38 bp, Artificial Sequence
  primer
gtaaaacgacggccagtctgaaggtaaatggccaggag

SEQ ID NO: 49089 - DNA, 38 bp, Artificial Sequence
  primer
gtaaaacgacggccagttgcttaaccaacaggacatgg

SEQ ID NO: 49090 - DNA, 39 bp, Artificial Sequence
  primer
gtaaaacgacggccagttctacttgcctcttccctcctc

SEQ ID NO: 49091 - DNA, 21 bp, Artificial Sequence
  primer
gacaactcatgacacgcactg

SEQ ID NO: 49092 - DNA, 20 bp, Artificial Sequence
  primer
ccagcacttctagctcgctg

SEQ ID NO: 49093 - DNA, 37 bp, Artificial Sequence
  primer
gtaaaacgacggccagtctacgaaggcctctgcttcc

SEQ ID NO: 49094 - DNA, 38 bp, Artificial Sequence
  primer
gtaaaacgacggccagtccaacaccagctaaccctttc

SEQ ID NO: 49095 - DNA, 36 bp, Artificial Sequence
  primer
gtaaaacgacggccagtaactggtgggattaccggg

SEQ ID NO: 49096 - DNA, 21 bp, Artificial Sequence
  primer
cttgtgagcctcagtgtgagc

SEQ ID NO: 49097 - DNA, 20 bp, Artificial Sequence
  primer
atgcacatgagacctgagcc

SEQ ID NO: 49098 - DNA, 21 bp, Artificial Sequence
  primer
agggaaagtaggcaacaccac

SEQ ID NO: 49099 - DNA, 38 bp, Artificial Sequence
  primer
gtaaaacgacggccagtaatgcatggttatggcaagtg

SEQ ID NO: 49100 - DNA, 37 bp, Artificial Sequence
  primer
gtaaaacgacggccagtcacttgagcccaggagtttg

SEQ ID NO: 49101 - DNA, 21 bp, Artificial Sequence
  primer
aaacgtgaacacacacccttg

SEQ ID NO: 49102 - DNA, 39 bp, Artificial Sequence
  primer
gtaaaacgacggccagtaagtactgatttgcaaggctgc

SEQ ID NO: 49103 - DNA, 38 bp, Artificial Sequence
  primer
gtaaaacgacggccagtgtgtatgatgcccttcattgc

SEQ ID NO: 49104 - DNA, 38 bp, Artificial Sequence
  primer
gtaaaacgacggccagtaagaaacactgggcagctctc

SEQ ID NO: 49105 - DNA, 39 bp, Artificial Sequence
  primer
gtaaaacgacggccagtttagagaaggctttgcatttgg

SEQ ID NO: 49106 - DNA, 21 bp, Artificial Sequence
  primer
agttctctttcctggcttggg

SEQ ID NO: 49107 - DNA, 37 bp, Artificial Sequence
  primer
gtaaaacgacggccagttgctcagcattggactaggg

SEQ ID NO: 49108 - DNA, 27 bp, Artificial Sequence
  primer
aacatggagtcttacaagaaagtcatt

SEQ ID NO: 49109 - DNA, 37 bp, Artificial Sequence
  primer
gtaaaacgacggccagtgtcctggagcaggcagtatg

SEQ ID NO: 49110 - DNA, 21 bp, Artificial Sequence
  primer
aggcttaaatatgggcaagca

SEQ ID NO: 49111 - DNA, 22 bp, Artificial Sequence
  primer
tccagatgaataagcatttccc

SEQ ID NO: 49112 - DNA, 21 bp, Artificial Sequence
  primer
ctggctaagtgcaggtttcag

SEQ ID NO: 49113 - DNA, 38 bp, Artificial Sequence
  primer
gtaaaacgacggccagttatgatggcactgtgttgcct

SEQ ID NO: 49114 - DNA, 38 bp, Artificial Sequence
  primer
gtaaaacgacggccagtctcaagcaatcttccctcctc

SEQ ID NO: 49115 - DNA, 38 bp, Artificial Sequence
  primer
gtaaaacgacggccagtgggcaacaggagtgaaactct

SEQ ID NO: 49116 - DNA, 39 bp, Artificial Sequence
  primer
gtaaaacgacggccagtgaataaatgtacggctccatcc

SEQ ID NO: 49117 - DNA, 38 bp, Artificial Sequence
  primer
gtaaaacgacggccagttcaaccatgatcagaggaaca

SEQ ID NO: 49118 - DNA, 21 bp, Artificial Sequence
  primer
cgtaggtgcggactacctgtc

SEQ ID NO: 49119 - DNA, 21 bp, Artificial Sequence
  primer
agagaaagctgtgttctgccc

SEQ ID NO: 49120 - DNA, 38 bp, Artificial Sequence
  primer
gtaaaacgacggccagttcaagccttgtagcgtctgag

SEQ ID NO: 49121 - DNA, 38 bp, Artificial Sequence
  primer
gtaaaacgacggccagtgacttgagggatgacacccag

SEQ ID NO: 49122 - DNA, 24 bp, Artificial Sequence
  primer
aacatccacttgtaactgaggagc

SEQ ID NO: 49123 - DNA, 38 bp, Artificial Sequence
  primer
gtaaaacgacggccagtctgggctctgaggttacaatg

SEQ ID NO: 49124 - DNA, 37 bp, Artificial Sequence
  primer
gtaaaacgacggccagtaaggagagaggagcccactg

SEQ ID NO: 49125 - DNA, 39 bp, Artificial Sequence
  primer
gtaaaacgacggccagtaggactccggtagagtagggtg

SEQ ID NO: 49126 - DNA, 38 bp, Artificial Sequence
  primer
gtaaaacgacggccagttggtccatctgcactcacttg

SEQ ID NO: 49127 - DNA, 21 bp, Artificial Sequence
  primer
atattgggaatgtctgctggg

SEQ ID NO: 49128 - DNA, 21 bp, Artificial Sequence
  primer
ggattacacagggattctggc

SEQ ID NO: 49129 - DNA, 22 bp, Artificial Sequence
  primer
aagaaccgaagttctccagagg

SEQ ID NO: 49130 - DNA, 39 bp, Artificial Sequence
  primer
gtaaaacgacggccagtttgattggttgttgagatgaca

SEQ ID NO: 49131 - DNA, 38 bp, Artificial Sequence
  primer
gtaaaacgacggccagtaccagctttgtctgcactgag

SEQ ID NO: 49132 - DNA, 38 bp, Artificial Sequence
  primer
gtaaaacgacggccagtccattaatgcctagcatggtg

SEQ ID NO: 49133 - DNA, 38 bp, Artificial Sequence
  primer
gtaaaacgacggccagtgcctcacaaggtagaccaagc

SEQ ID NO: 49134 - DNA, 37 bp, Artificial Sequence
  primer
gtaaaacgacggccagtaaggcaaagccaaccagttc

SEQ ID NO: 49135 - DNA, 43 bp, Artificial Sequence
  primer
gtaaaacgacggccagtcagcaatgtataagtttcaccacaac

SEQ ID NO: 49136 - DNA, 21 bp, Artificial Sequence
  primer
aaacccaggtctcttgaatgc

SEQ ID NO: 49137 - DNA, 38 bp, Artificial Sequence
  primer
gtaaaacgacggccagttggaaacctgggaacagattc

SEQ ID NO: 49138 - DNA, 21 bp, Artificial Sequence
  primer
gcacagctctggaacatgaag

SEQ ID NO: 49139 - DNA, 38 bp, Artificial Sequence
  primer
gtaaaacgacggccagtctgtcttcctggatagtgggc

SEQ ID NO: 49140 - DNA, 39 bp, Artificial Sequence
  primer
gtaaaacgacggccagtgatcattcagcatatccttggc

SEQ ID NO: 49141 - DNA, 38 bp, Artificial Sequence
  primer
gtaaaacgacggccagtctccctccatgatgtccctac

SEQ ID NO: 49142 - DNA, 21 bp, Artificial Sequence
  primer
cagctgactgtggtcatggag

SEQ ID NO: 49143 - DNA, 38 bp, Artificial Sequence
  primer
gtaaaacgacggccagtccattgacagtcacatccctg

SEQ ID NO: 49144 - DNA, 24 bp, Artificial Sequence
  primer
catgtcctcagagagtttggattc

SEQ ID NO: 49145 - DNA, 21 bp, Artificial Sequence
  primer
ggaaacgaatctgtacccagg

SEQ ID NO: 49146 - DNA, 38 bp, Artificial Sequence
  primer
gtaaaacgacggccagtttcctcatgtaggagtggagc

SEQ ID NO: 49147 - DNA, 38 bp, Artificial Sequence
  primer
gtaaaacgacggccagtcaagtttagggagcaaggcag

SEQ ID NO: 49148 - DNA, 39 bp, Artificial Sequence
  primer
gtaaaacgacggccagtccgggaaaggtttatcaatcac

SEQ ID NO: 49149 - DNA, 19 bp, Artificial Sequence
  primer
gctgcacagatgcagaagc

SEQ ID NO: 49150 - DNA, 21 bp, Artificial Sequence
  primer
gagagaaggacagatggaccg

SEQ ID NO: 49151 - DNA, 21 bp, Artificial Sequence
  primer
atccctggcttcagtgacttc

SEQ ID NO: 49152 - DNA, 21 bp, Artificial Sequence
  primer
cgaacctatcttgctcaaggc

SEQ ID NO: 49153 - DNA, 38 bp, Artificial Sequence
  primer
gtaaaacgacggccagtgccatcaaagttctgtcctcc

SEQ ID NO: 49154 - DNA, 38 bp, Artificial Sequence
  primer
gtaaaacgacggccagtattgaccatttcaccctgagc

SEQ ID NO: 49155 - DNA, 21 bp, Artificial Sequence
  primer
atttggaacagaacctgggtg

SEQ ID NO: 49156 - DNA, 38 bp, Artificial Sequence
  primer
gtaaaacgacggccagtcacccagccatgttgttattg

SEQ ID NO: 49157 - DNA, 38 bp, Artificial Sequence
  primer
gtaaaacgacggccagttgttacccaggctggtctgtt

SEQ ID NO: 49158 - DNA, 38 bp, Artificial Sequence
  primer
gtaaaacgacggccagttaatagttggcctcggtgctt

SEQ ID NO: 49159 - DNA, 39 bp, Artificial Sequence
  primer
gtaaaacgacggccagtccctatcactatgtcccagcag

SEQ ID NO: 49160 - DNA, 38 bp, Artificial Sequence
  primer
gtaaaacgacggccagtggttctgctaagcctggagtc

SEQ ID NO: 49161 - DNA, 21 bp, Artificial Sequence
  primer
cagaaatggcttctgttggag

SEQ ID NO: 49162 - DNA, 38 bp, Artificial Sequence
  primer
gtaaaacgacggccagtgacagcagtcagtggacttgg

SEQ ID NO: 49163 - DNA, 21 bp, Artificial Sequence
  primer
gaagctaaaccaagagggctg

SEQ ID NO: 49164 - DNA, 39 bp, Artificial Sequence
  primer
gtaaaacgacggccagttggtgggcaggaatattatcac

SEQ ID NO: 49165 - DNA, 20 bp, Artificial Sequence
  primer
ttcttagaaggtgcccgttg

SEQ ID NO: 49166 - DNA, 38 bp, Artificial Sequence
  primer
gtaaaacgacggccagtggaagcctgttggatgttgag

SEQ ID NO: 49167 - DNA, 21 bp, Artificial Sequence
  primer
tgcaatttcacaacaatgagc

SEQ ID NO: 49168 - DNA, 24 bp, Artificial Sequence
  primer
tgcagtcctgtttgaataagaaag

SEQ ID NO: 49169 - DNA, 39 bp, Artificial Sequence
  primer
gtaaaacgacggccagtaaggaaacttcattccaaaggg

SEQ ID NO: 49170 - DNA, 36 bp, Artificial Sequence
  primer
gtaaaacgacggccagtcaccacacctggcacaaac

SEQ ID NO: 49171 - DNA, 19 bp, Artificial Sequence
  primer
aaacacagggcccacagtc

SEQ ID NO: 49172 - DNA, 21 bp, Artificial Sequence
  primer
tattggaagcatggaatacgc

SEQ ID NO: 49173 - DNA, 38 bp, Artificial Sequence
  primer
gtaaaacgacggccagtaggtctcgcctaatggacttg

SEQ ID NO: 49174 - DNA, 22 bp, Artificial Sequence
  primer
gggtcaatgtttcttccactga

SEQ ID NO: 49175 - DNA, 41 bp, Artificial Sequence
  primer
gtaaaacgacggccagtccaagctcaagttagaagattgtg

SEQ ID NO: 49176 - DNA, 40 bp, Artificial Sequence
  primer
gtaaaacgacggccagtgagtacaagcaaaggcatgaaac

SEQ ID NO: 49177 - DNA, 21 bp, Artificial Sequence
  primer
agggcaaccttatactgcctg

SEQ ID NO: 49178 - DNA, 38 bp, Artificial Sequence
  primer
gtaaaacgacggccagttttgcacagaatggaaagctc

SEQ ID NO: 49179 - DNA, 42 bp, Artificial Sequence
  primer
gtaaaacgacggccagtcccttaatttaggaagctcaaatcc

SEQ ID NO: 49180 - DNA, 22 bp, Artificial Sequence
  primer
ttagagccctacagtttgaccc

SEQ ID NO: 49181 - DNA, 38 bp, Artificial Sequence
  primer
gtaaaacgacggccagtagcgacaaccaagtgtgaatc

SEQ ID NO: 49182 - DNA, 20 bp, Artificial Sequence
  primer
tgagccacagcattgctacc

SEQ ID NO: 49183 - DNA, 38 bp, Artificial Sequence
  primer
gtaaaacgacggccagttctggttcctgatttcctcct

SEQ ID NO: 49184 - DNA, 43 bp, Artificial Sequence
  primer
gtaaaacgacggccagtttgagcaatactagatcctccattag

SEQ ID NO: 49185 - DNA, 37 bp, Artificial Sequence
  primer
gtaaaacgacggccagtgttgtccaaggtgggtatgg

SEQ ID NO: 49186 - DNA, 26 bp, Artificial Sequence
  primer
cagaagtccttgctttactatcacag

SEQ ID NO: 49187 - DNA, 38 bp, Artificial Sequence
  primer
gtaaaacgacggccagtaaatccataggaaccaccagc

SEQ ID NO: 49188 - DNA, 20 bp, Artificial Sequence
  primer
tggagaacagcgacagtttg

SEQ ID NO: 49189 - DNA, 21 bp, Artificial Sequence
  primer
cagttaacctcttgcggtttg

SEQ ID NO: 49190 - DNA, 24 bp, Artificial Sequence
  primer
tctaaatgaatcactttgtgaggc

SEQ ID NO: 49191 - DNA, 38 bp, Artificial Sequence
  primer
gtaaaacgacggccagtcatctctggcttgcttgtttg

SEQ ID NO: 49192 - DNA, 21 bp, Artificial Sequence
  primer
actagcagaccgtcttggtcc

SEQ ID NO: 49193 - DNA, 25 bp, Artificial Sequence
  primer
gggtattgcacgtagactattaagg

SEQ ID NO: 49194 - DNA, 43 bp, Artificial Sequence
  primer
gtaaaacgacggccagtcataattaaggttgtaaagaaagcgg

SEQ ID NO: 49195 - DNA, 38 bp, Artificial Sequence
  primer
gtaaaacgacggccagtttgcttggatatctggactgg

SEQ ID NO: 49196 - DNA, 23 bp, Artificial Sequence
  primer
cacaagtcacacaatcttctccc

SEQ ID NO: 49197 - DNA, 25 bp, Artificial Sequence
  primer
tgtagctttactttctttgggaagg

SEQ ID NO: 49198 - DNA, 25 bp, Artificial Sequence
  primer
tgatgtaatcatggctttacacttg

SEQ ID NO: 49199 - DNA, 39 bp, Artificial Sequence
  primer
gtaaaacgacggccagttgacacctgtgaaatagttcgg

SEQ ID NO: 49200 - DNA, 35 bp, Artificial Sequence
  primer
gtaaaacgacggccagtgtgcgtttcatgccactg

SEQ ID NO: 49201 - DNA, 22 bp, Artificial Sequence
  primer
tgaagtgccaaattgtaagctg

SEQ ID NO: 49202 - DNA, 40 bp, Artificial Sequence
  primer
gtaaaacgacggccagttgtcattccagatttgttgtgtg

SEQ ID NO: 49203 - DNA, 20 bp, Artificial Sequence
  primer
acatgggaggactctttggg

SEQ ID NO: 49204 - DNA, 21 bp, Artificial Sequence
  primer
acattgcaataacccggactg

SEQ ID NO: 49205 - DNA, 37 bp, Artificial Sequence
  primer
gtaaaacgacggccagtcctgaccttgtgatctgccc

SEQ ID NO: 49206 - DNA, 38 bp, Artificial Sequence
  primer
gtaaaacgacggccagttgagcacctgctgacagtaca

SEQ ID NO: 49207 - DNA, 24 bp, Artificial Sequence
  primer
aaacaaggtaatcatttggagcaa

SEQ ID NO: 49208 - DNA, 38 bp, Artificial Sequence
  primer
gtaaaacgacggccagtgcctggaacatagtgtgtggt

SEQ ID NO: 49209 - DNA, 38 bp, Artificial Sequence
  primer
gtaaaacgacggccagtttcccattgaaaccctagagc

SEQ ID NO: 49210 - DNA, 38 bp, Artificial Sequence
  primer
gtaaaacgacggccagtaccttgaaattgttccttggg

SEQ ID NO: 49211 - DNA, 22 bp, Artificial Sequence
  primer
tggaataagcctcatccaacag

SEQ ID NO: 49212 - DNA, 27 bp, Artificial Sequence
  primer
aattcatatcagttcaaaggttaccag

SEQ ID NO: 49213 - DNA, 40 bp, Artificial Sequence
  primer
gtaaaacgacggccagttttctttggaaacactcaaggag

SEQ ID NO: 49214 - DNA, 40 bp, Artificial Sequence
  primer
gtaaaacgacggccagtttgcaaaccctatgctataatgc

SEQ ID NO: 49215 - DNA, 40 bp, Artificial Sequence
  primer
gtaaaacgacggccagtcagtactgtcaacctgaattccc

SEQ ID NO: 49216 - DNA, 23 bp, Artificial Sequence
  primer
ttgctggataggaaacaacaaag

SEQ ID NO: 49217 - DNA, 21 bp, Artificial Sequence
  primer
tccttcaaccagtgtgtctcc

SEQ ID NO: 49218 - DNA, 39 bp, Artificial Sequence
  primer
gtaaaacgacggccagttgcgttgttacaaggttctttc

SEQ ID NO: 49219 - DNA, 23 bp, Artificial Sequence
  primer
tgagttcaagaacacaaatggag

SEQ ID NO: 49220 - DNA, 24 bp, Artificial Sequence
  primer
tgctgacacagatctacctagctg

SEQ ID NO: 49221 - DNA, 40 bp, Artificial Sequence
  primer
gtaaaacgacggccagtttggaccagtacttgagaattgc

SEQ ID NO: 49222 - DNA, 20 bp, Artificial Sequence
  primer
actgggtaagtgcaggaggc

SEQ ID NO: 49223 - DNA, 36 bp, Artificial Sequence
  primer
gtaaaacgacggccagttggacatgcaaggtttgct

SEQ ID NO: 49224 - DNA, 38 bp, Artificial Sequence
  primer
gtaaaacgacggccagtgcattgagagcatgatgcaag

SEQ ID NO: 49225 - DNA, 20 bp, Artificial Sequence
  primer
tttgaaaggattctggagcg

SEQ ID NO: 49226 - DNA, 39 bp, Artificial Sequence
  primer
gtaaaacgacggccagtaggcagataatatggcgtgttc

SEQ ID NO: 49227 - DNA, 21 bp, Artificial Sequence
  primer
cctccagtttgatttgtggaa

SEQ ID NO: 49228 - DNA, 42 bp, Artificial Sequence
  primer
gtaaaacgacggccagtagtagaatgctttaggcttcatttg

SEQ ID NO: 49229 - DNA, 21 bp, Artificial Sequence
  primer
acgcctcatgaccatttcttt

SEQ ID NO: 49230 - DNA, 38 bp, Artificial Sequence
  primer
gtaaaacgacggccagtgcttcaaagcagccatgtagg

SEQ ID NO: 49231 - DNA, 21 bp, Artificial Sequence
  primer
taggctgatctctttgcatgg

SEQ ID NO: 49232 - DNA, 41 bp, Artificial Sequence
  primer
gtaaaacgacggccagtggaggctttctcttgatgtgtaaa

SEQ ID NO: 49233 - DNA, 37 bp, Artificial Sequence
  primer
gtaaaacgacggccagtatccagcatctgcctggttc

SEQ ID NO: 49234 - DNA, 39 bp, Artificial Sequence
  primer
gtaaaacgacggccagttggagaggtcagaggtttgatg

SEQ ID NO: 49235 - DNA, 40 bp, Artificial Sequence
  primer
gtaaaacgacggccagtgggttactgtggacatcactgag

SEQ ID NO: 49236 - DNA, 39 bp, Artificial Sequence
  primer
gtaaaacgacggccagttggaacaaatgcatggactaaa

SEQ ID NO: 49237 - DNA, 21 bp, Artificial Sequence
  primer
agagaaatggcctctggacac

SEQ ID NO: 49238 - DNA, 38 bp, Artificial Sequence
  primer
gtaaaacgacggccagttacatgggtgtgacttggcag

SEQ ID NO: 49239 - DNA, 21 bp, Artificial Sequence
  primer
gagccatgagcctactgtctg

SEQ ID NO: 49240 - DNA, 38 bp, Artificial Sequence
  primer
gtaaaacgacggccagtagaatttgggcctgttcagag

SEQ ID NO: 49241 - DNA, 20 bp, Artificial Sequence
  primer
acttacgccagaatccaggg

SEQ ID NO: 49242 - DNA, 38 bp, Artificial Sequence
  primer
gtaaaacgacggccagttagagtgattcggagccaagc

SEQ ID NO: 49243 - DNA, 21 bp, Artificial Sequence
  primer
tacagaatgcagaagcatggc

SEQ ID NO: 49244 - DNA, 38 bp, Artificial Sequence
  primer
gtaaaacgacggccagtacagatgaccggaaatggaac

SEQ ID NO: 49245 - DNA, 21 bp, Artificial Sequence
  primer
tgtatcctgcaacctacctgg

SEQ ID NO: 49246 - DNA, 36 bp, Artificial Sequence
  primer
gtaaaacgacggccagttgctgggattacagccacc

SEQ ID NO: 49247 - DNA, 38 bp, Artificial Sequence
  primer
gtaaaacgacggccagtaaacactcgtgcatttcatgg

SEQ ID NO: 49248 - DNA, 28 bp, Artificial Sequence
  primer
aatcagtggaatattcttgaaatagatg

SEQ ID NO: 49249 - DNA, 21 bp, Artificial Sequence
  primer
tcaaggagggtgtgatttctg

SEQ ID NO: 49250 - DNA, 42 bp, Artificial Sequence
  primer
gtaaaacgacggccagtgcatggactctgttaagtacatcat

SEQ ID NO: 49251 - DNA, 38 bp, Artificial Sequence
  primer
gtaaaacgacggccagtctagctttgcaattgcttgga

SEQ ID NO: 49252 - DNA, 39 bp, Artificial Sequence
  primer
gtaaaacgacggccagtttatgatgagggatacagcaca

SEQ ID NO: 49253 - DNA, 23 bp, Artificial Sequence
  primer
tcccagttattgcaactttcttc

SEQ ID NO: 49254 - DNA, 22 bp, Artificial Sequence
  primer
cacttacatttcggagagtggg

SEQ ID NO: 49255 - DNA, 21 bp, Artificial Sequence
  primer
ctcctccttggcttagctgtc

SEQ ID NO: 49256 - DNA, 40 bp, Artificial Sequence
  primer
gtaaaacgacggccagtaaacattgtaagattggcgtttg

SEQ ID NO: 49257 - DNA, 21 bp, Artificial Sequence
  primer
cctgagattgaattggcttcc

SEQ ID NO: 49258 - DNA, 38 bp, Artificial Sequence
  primer
gtaaaacgacggccagttgagggccattatgctatctg

SEQ ID NO: 49259 - DNA, 37 bp, Artificial Sequence
  primer
gtaaaacgacggccagtgtatttccgcaggctgtttc

SEQ ID NO: 49260 - DNA, 27 bp, Artificial Sequence
  primer
tttctaatctgtgagttagaggaatct

SEQ ID NO: 49261 - DNA, 23 bp, Artificial Sequence
  primer
tgagcagtttaatgctgaagagg

SEQ ID NO: 49262 - DNA, 38 bp, Artificial Sequence
  primer
gtaaaacgacggccagtgatctgtaatcctggtttgcg

SEQ ID NO: 49263 - DNA, 40 bp, Artificial Sequence
  primer
gtaaaacgacggccagtttgacaacctagttgtggtttga

SEQ ID NO: 49264 - DNA, 40 bp, Artificial Sequence
  primer
gtaaaacgacggccagtcagaatcagagaggccaagtaga

SEQ ID NO: 49265 - DNA, 36 bp, Artificial Sequence
  primer
gtaaaacgacggccagtattcccagcagcacctagc

SEQ ID NO: 49266 - DNA, 43 bp, Artificial Sequence
  primer
gtaaaacgacggccagtttgtaatcacacggtttaagtgagtc

SEQ ID NO: 49267 - DNA, 22 bp, Artificial Sequence
  primer
ggcctgattggtcttgtttacc

SEQ ID NO: 49268 - DNA, 38 bp, Artificial Sequence
  primer
gtaaaacgacggccagttgccatggaatcaaatgacac

SEQ ID NO: 49269 - DNA, 21 bp, Artificial Sequence
  primer
aggaagctggaggtttggttc

SEQ ID NO: 49270 - DNA, 41 bp, Artificial Sequence
  primer
gtaaaacgacggccagtcgaataagcaatttctttgacagg

SEQ ID NO: 49271 - DNA, 39 bp, Artificial Sequence
  primer
gtaaaacgacggccagtgagaggtagtgaatggcacagc

SEQ ID NO: 49272 - DNA, 21 bp, Artificial Sequence
  primer
cacctttcccagcctctagtt

SEQ ID NO: 49273 - DNA, 26 bp, Artificial Sequence
  primer
tgcatttgtttaaactgagttacagg

SEQ ID NO: 49274 - DNA, 22 bp, Artificial Sequence
  primer
tggccctatttccatcaataca

SEQ ID NO: 49275 - DNA, 21 bp, Artificial Sequence
  primer
accttgtatgctgggaccttg

SEQ ID NO: 49276 - DNA, 43 bp, Artificial Sequence
  primer
gtaaaacgacggccagtgtgcacacacacacatagtaatcttt

SEQ ID NO: 49277 - DNA, 35 bp, Artificial Sequence
  primer
gtaaaacgacggccagtccgcccaagactttgctg

SEQ ID NO: 49278 - DNA, 38 bp, Artificial Sequence
  primer
gtaaaacgacggccagtaacatccagttctcccaagtg

SEQ ID NO: 49279 - DNA, 40 bp, Artificial Sequence
  primer
gtaaaacgacggccagttgagcttacgtgtttcctttcag

SEQ ID NO: 49280 - DNA, 43 bp, Artificial Sequence
  primer
gtaaaacgacggccagtttctacaatggcacaggagtatagag

SEQ ID NO: 49281 - DNA, 24 bp, Artificial Sequence
  primer
cattggcatggtaactgttattcc

SEQ ID NO: 49282 - DNA, 44 bp, Artificial Sequence
  primer
gtaaaacgacggccagtagctaagtatttgcctcaatattgttt

SEQ ID NO: 49283 - DNA, 38 bp, Artificial Sequence
  primer
gtaaaacgacggccagtttcatgtgccgtgaatttgtc

SEQ ID NO: 49284 - DNA, 23 bp, Artificial Sequence
  primer
tgttggtcctgctaaatatcctt

SEQ ID NO: 49285 - DNA, 21 bp, Artificial Sequence
  primer
tacatctgcttcagctcccac

SEQ ID NO: 49286 - DNA, 21 bp, Artificial Sequence
  primer
ttcgagtgtattatgaccgcc

SEQ ID NO: 49287 - DNA, 21 bp, Artificial Sequence
  primer
tttcgatttgccatagagcac

SEQ ID NO: 49288 - DNA, 23 bp, Artificial Sequence
  primer
tcagtaatctgctaaatgctggg

SEQ ID NO: 49289 - DNA, 39 bp, Artificial Sequence
  primer
gtaaaacgacggccagttccataagttgtaaagggctgc

SEQ ID NO: 49290 - DNA, 43 bp, Artificial Sequence
  primer
gtaaaacgacggccagtaaagcctagaaagctcagaaacactt

SEQ ID NO: 49291 - DNA, 39 bp, Artificial Sequence
  primer
gtaaaacgacggccagtccatttctacccagtgaacaca

SEQ ID NO: 49292 - DNA, 40 bp, Artificial Sequence
  primer
gtaaaacgacggccagtgaaacaggaaatatggaaatcgg

SEQ ID NO: 49293 - DNA, 38 bp, Artificial Sequence
  primer
gtaaaacgacggccagtcccaggcagaagtctgtcatt

SEQ ID NO: 49294 - DNA, 41 bp, Artificial Sequence
  primer
gtaaaacgacggccagtgaggtagagtttccacaatggttt

SEQ ID NO: 49295 - DNA, 38 bp, Artificial Sequence
  primer
gtaaaacgacggccagttttctgtagttgccgttcagg

SEQ ID NO: 49296 - DNA, 37 bp, Artificial Sequence
  primer
gtaaaacgacggccagtggctgaaagaacttggaggg

SEQ ID NO: 49297 - DNA, 26 bp, Artificial Sequence
  primer
ttgcctatgtcgttaatcatagtctc

SEQ ID NO: 49298 - DNA, 43 bp, Artificial Sequence
  primer
gtaaaacgacggccagtaagtgatgcatttctttaggttacaa

SEQ ID NO: 49299 - DNA, 39 bp, Artificial Sequence
  primer
gtaaaacgacggccagttgaggattcttgattgtttggg

SEQ ID NO: 49300 - DNA, 39 bp, Artificial Sequence
  primer
gtaaaacgacggccagtgagaccacatctgaaacttgga

SEQ ID NO: 49301 - DNA, 23 bp, Artificial Sequence
  primer
gacaagcattcttgatttcattt

SEQ ID NO: 49302 - DNA, 38 bp, Artificial Sequence
  primer
gtaaaacgacggccagtaaacattgatgccttggactc

SEQ ID NO: 49303 - DNA, 21 bp, Artificial Sequence
  primer
tttagggatgcatgtgtttgg

SEQ ID NO: 49304 - DNA, 37 bp, Artificial Sequence
  primer
gtaaaacgacggccagtacaccttgggccttctcaac

SEQ ID NO: 49305 - DNA, 40 bp, Artificial Sequence
  primer
gtaaaacgacggccagttttgggatgaatatgtccctatg

SEQ ID NO: 49306 - DNA, 39 bp, Artificial Sequence
  primer
gtaaaacgacggccagtgaagggaagttgtgttaatgcg

SEQ ID NO: 49307 - DNA, 38 bp, Artificial Sequence
  primer
gtaaaacgacggccagttccagtgtcacaggcctatcc

SEQ ID NO: 49308 - DNA, 38 bp, Artificial Sequence
  primer
gtaaaacgacggccagttgtgtggagatggatcatgga

SEQ ID NO: 49309 - DNA, 21 bp, Artificial Sequence
  primer
ttcaaagactccctggcctac

SEQ ID NO: 49310 - DNA, 20 bp, Artificial Sequence
  primer
gggcaaccagagatcctgtc

SEQ ID NO: 49311 - DNA, 39 bp, Artificial Sequence
  primer
gtaaaacgacggccagttggagaacaaatcttaggctgc

SEQ ID NO: 49312 - DNA, 38 bp, Artificial Sequence
  primer
gtaaaacgacggccagtacaacaacactgctggtgaaa

SEQ ID NO: 49313 - DNA, 26 bp, Artificial Sequence
  primer
aaacaggaaacaatagtgtaagagcc

SEQ ID NO: 49314 - DNA, 41 bp, Artificial Sequence
  primer
gtaaaacgacggccagtggttcataaccacttaagattccc

SEQ ID NO: 49315 - DNA, 27 bp, Artificial Sequence
  primer
tgaacattatttatactttcagctgcc

SEQ ID NO: 49316 - DNA, 21 bp, Artificial Sequence
  primer
agaagcaggtccagttcaagc

SEQ ID NO: 49317 - DNA, 42 bp, Artificial Sequence
  primer
gtaaaacgacggccagtcacagaattctctttacccagtttc

SEQ ID NO: 49318 - DNA, 21 bp, Artificial Sequence
  primer
tcaagttaccctcccaccttg

SEQ ID NO: 49319 - DNA, 21 bp, Artificial Sequence
  primer
aatttctggacctcttgggag

SEQ ID NO: 49320 - DNA, 21 bp, Artificial Sequence
  primer
ggccctgtttaatggtttgtg

SEQ ID NO: 49321 - DNA, 41 bp, Artificial Sequence
  primer
gtaaaacgacggccagtaggcttgaggctatcttaattctg

SEQ ID NO: 49322 - DNA, 36 bp, Artificial Sequence
  primer
gtaaaacgacggccagtgacaacgaatgagggctgg

SEQ ID NO: 49323 - DNA, 23 bp, Artificial Sequence
  primer
ggttaccttggatgtgcatttac

SEQ ID NO: 49324 - DNA, 38 bp, Artificial Sequence
  primer
gtaaaacgacggccagtttcttgctgatatggccttcc

SEQ ID NO: 49325 - DNA, 38 bp, Artificial Sequence
  primer
gtaaaacgacggccagtatttcctttgccctcaagaag

SEQ ID NO: 49326 - DNA, 38 bp, Artificial Sequence
  primer
gtaaaacgacggccagtcaggactacgaggaaactggg

SEQ ID NO: 49327 - DNA, 36 bp, Artificial Sequence
  primer
gtaaaacgacggccagtcctggacagccaaagatgg

SEQ ID NO: 49328 - DNA, 38 bp, Artificial Sequence
  primer
gtaaaacgacggccagtttggctcaagatgcaagtttc

SEQ ID NO: 49329 - DNA, 21 bp, Artificial Sequence
  primer
ctgctgttctttgggccttag

SEQ ID NO: 49330 - DNA, 40 bp, Artificial Sequence
  primer
gtaaaacgacggccagtggaacttcctaagaggatttggc

SEQ ID NO: 49331 - DNA, 24 bp, Artificial Sequence
  primer
tcacatgccacatctaatattctg

SEQ ID NO: 49332 - DNA, 39 bp, Artificial Sequence
  primer
gtaaaacgacggccagttgggaacaaagaatgcctttag

SEQ ID NO: 49333 - DNA, 36 bp, Artificial Sequence
  primer
gtaaaacgacggccagtaaatcagccttgcactggg

SEQ ID NO: 49334 - DNA, 40 bp, Artificial Sequence
  primer
gtaaaacgacggccagtagctcttagtttcttggagggag

SEQ ID NO: 49335 - DNA, 26 bp, Artificial Sequence
  primer
acacacaagtgtaaatgtgtatgagc

SEQ ID NO: 49336 - DNA, 44 bp, Artificial Sequence
  primer
gtaaaacgacggccagtacagagcaattatagatgcccttatag

SEQ ID NO: 49337 - DNA, 39 bp, Artificial Sequence
  primer
gtaaaacgacggccagtaggaatgtgtttctagaaggcg

SEQ ID NO: 49338 - DNA, 21 bp, Artificial Sequence
  primer
cagagaaattggctttgcctc

SEQ ID NO: 49339 - DNA, 43 bp, Artificial Sequence
  primer
gtaaaacgacggccagtaaagcttcaagtacaggacacaatta

SEQ ID NO: 49340 - DNA, 40 bp, Artificial Sequence
  primer
gtaaaacgacggccagtttgaaagcgaactttcctaagtg

SEQ ID NO: 49341 - DNA, 38 bp, Artificial Sequence
  primer
gtaaaacgacggccagttttgattggatgaactctgcc

SEQ ID NO: 49342 - DNA, 26 bp, Artificial Sequence
  primer
ggtatttcagaagctaatttattccc

SEQ ID NO: 49343 - DNA, 39 bp, Artificial Sequence
  primer
gtaaaacgacggccagtgggtgacttacaggtccctttc

SEQ ID NO: 49344 - DNA, 23 bp, Artificial Sequence
  primer
tctggaatttacttcggtaaggc

SEQ ID NO: 49345 - DNA, 23 bp, Artificial Sequence
  primer
aaattccaaggtgaagactttgc

SEQ ID NO: 49346 - DNA, 20 bp, Artificial Sequence
  primer
tttcaccaaacattgcaggg

SEQ ID NO: 49347 - DNA, 21 bp, Artificial Sequence
  primer
gacctccaagccagttaaggg

SEQ ID NO: 49348 - DNA, 39 bp, Artificial Sequence
  primer
gtaaaacgacggccagtttaagtgtgcatggaacgtctg

SEQ ID NO: 49349 - DNA, 38 bp, Artificial Sequence
  primer
gtaaaacgacggccagtcctttgggagtgaagaaatgc

SEQ ID NO: 49350 - DNA, 22 bp, Artificial Sequence
  primer
tctgtctttgtttgcctagcac

SEQ ID NO: 49351 - DNA, 39 bp, Artificial Sequence
  primer
gtaaaacgacggccagtcaagaaatctttgggctcactg

SEQ ID NO: 49352 - DNA, 38 bp, Artificial Sequence
  primer
gtaaaacgacggccagtggagcactggagaaatgattg

SEQ ID NO: 49353 - DNA, 22 bp, Artificial Sequence
  primer
tttaagccagcagacacaattt

SEQ ID NO: 49354 - DNA, 41 bp, Artificial Sequence
  primer
gtaaaacgacggccagtggttcctgatagacaggtatgcac

SEQ ID NO: 49355 - DNA, 38 bp, Artificial Sequence
  primer
gtaaaacgacggccagtgcatagagtgagccgtgagtc

SEQ ID NO: 49356 - DNA, 42 bp, Artificial Sequence
  primer
gtaaaacgacggccagttgataagtactatgcacatcccagc

SEQ ID NO: 49357 - DNA, 38 bp, Artificial Sequence
  primer
gtaaaacgacggccagtgctcatttgctatgcacatct

SEQ ID NO: 49358 - DNA, 21 bp, Artificial Sequence
  primer
caatgactggacagatgggat

SEQ ID NO: 49359 - DNA, 38 bp, Artificial Sequence
  primer
gtaaaacgacggccagttcagctggaggccaatcttac

SEQ ID NO: 49360 - DNA, 21 bp, Artificial Sequence
  primer
aggacggtgatcaagcaatag

SEQ ID NO: 49361 - DNA, 25 bp, Artificial Sequence
  primer
cgattctattgattgtttattgcac

SEQ ID NO: 49362 - DNA, 35 bp, Artificial Sequence
  primer
gtaaaacgacggccagtccacgggaatatgcaccc

SEQ ID NO: 49363 - DNA, 36 bp, Artificial Sequence
  primer
gtaaaacgacggccagttgcagctgaactttggagc

SEQ ID NO: 49364 - DNA, 40 bp, Artificial Sequence
  primer
gtaaaacgacggccagtcgacattcacaaacacttcattg

SEQ ID NO: 49365 - DNA, 39 bp, Artificial Sequence
  primer
gtaaaacgacggccagtgaaattctgaacaacacccagc

SEQ ID NO: 49366 - DNA, 38 bp, Artificial Sequence
  primer
gtaaaacgacggccagtccttggtcttgaatccatcct

SEQ ID NO: 49367 - DNA, 38 bp, Artificial Sequence
  primer
gtaaaacgacggccagtctgaattgagaaggtccaggg

SEQ ID NO: 49368 - DNA, 24 bp, Artificial Sequence
  primer
gagaaacctctggaaatccataac

SEQ ID NO: 49369 - DNA, 38 bp, Artificial Sequence
  primer
gtaaaacgacggccagttggtcaaggaaagattcgagc

SEQ ID NO: 49370 - DNA, 18 bp, Artificial Sequence
  primer
tgacctcgtgatccaccc

SEQ ID NO: 49371 - DNA, 38 bp, Artificial Sequence
  primer
gtaaaacgacggccagtctggactttggcagtgaattg

SEQ ID NO: 49372 - DNA, 38 bp, Artificial Sequence
  primer
gtaaaacgacggccagtttgcgtaaatctctctctggc

SEQ ID NO: 49373 - DNA, 38 bp, Artificial Sequence
  primer
gtaaaacgacggccagttcacactgatttcaccttggg

SEQ ID NO: 49374 - DNA, 21 bp, Artificial Sequence
  primer
tgccttcctgttgaaactcag

SEQ ID NO: 49375 - DNA, 36 bp, Artificial Sequence
  primer
gtaaaacgacggccagtgcgaggaactgctcaaagg

SEQ ID NO: 49376 - DNA, 21 bp, Artificial Sequence
  primer
ttaaaccaattcgttgggagc

SEQ ID NO: 49377 - DNA, 40 bp, Artificial Sequence
  primer
gtaaaacgacggccagtggttggctactgccaatagtctc

SEQ ID NO: 49378 - DNA, 38 bp, Artificial Sequence
  primer
gtaaaacgacggccagtgctcgaaagtcccgtctagtg

SEQ ID NO: 49379 - DNA, 26 bp, Artificial Sequence
  primer
ttatgtgatttggattctgtcttaca

SEQ ID NO: 49380 - DNA, 21 bp, Artificial Sequence
  primer
gcaaagaaggatttcacccag

SEQ ID NO: 49381 - DNA, 25 bp, Artificial Sequence
  primer
tcttgggtaattaaagaagggattc

SEQ ID NO: 49382 - DNA, 38 bp, Artificial Sequence
  primer
gtaaaacgacggccagtcaacaaatctctcggtttccc

SEQ ID NO: 49383 - DNA, 38 bp, Artificial Sequence
  primer
gtaaaacgacggccagtccttcccaatttattgaagcg

SEQ ID NO: 49384 - DNA, 21 bp, Artificial Sequence
  primer
tggtgcctgccagtataagtg

SEQ ID NO: 49385 - DNA, 21 bp, Artificial Sequence
  primer
tcaagttgaaagctaacagcg

SEQ ID NO: 49386 - DNA, 38 bp, Artificial Sequence
  primer
gtaaaacgacggccagtcgacgtacaaaccttcatgtg

SEQ ID NO: 49387 - DNA, 41 bp, Artificial Sequence
  primer
gtaaaacgacggccagtaagacttgaaggaaatgtaccaaa

SEQ ID NO: 49388 - DNA, 21 bp, Artificial Sequence
  primer
tgcctgtaaagaatgaccctc

SEQ ID NO: 49389 - DNA, 41 bp, Artificial Sequence
  primer
gtaaaacgacggccagtaaagtaggaattaacttgttgccc

SEQ ID NO: 49390 - DNA, 21 bp, Artificial Sequence
  primer
aggcctgtttgaacagcaaag

SEQ ID NO: 49391 - DNA, 21 bp, Artificial Sequence
  primer
ctgttcctttctgaaccaggg

SEQ ID NO: 49392 - DNA, 20 bp, Artificial Sequence
  primer
tccagtcccaagcatttcag

SEQ ID NO: 49393 - DNA, 39 bp, Artificial Sequence
  primer
gtaaaacgacggccagtcctctaagatgtttgcgtgagg

SEQ ID NO: 49394 - DNA, 38 bp, Artificial Sequence
  primer
gtaaaacgacggccagttctagggaaagacccgaaatg

SEQ ID NO: 49395 - DNA, 20 bp, Artificial Sequence
  primer
ggtgttaaatggaggccagg

SEQ ID NO: 49396 - DNA, 24 bp, Artificial Sequence
  primer
tctttcattcctctaggttgatgg

SEQ ID NO: 49397 - DNA, 39 bp, Artificial Sequence
  primer
gtaaaacgacggccagtgaattcatttgggctggtagag

SEQ ID NO: 49398 - DNA, 38 bp, Artificial Sequence
  primer
gtaaaacgacggccagttcaatactccgcagtagcctg

SEQ ID NO: 49399 - DNA, 21 bp, Artificial Sequence
  primer
atttagctcattgcaggtccc

SEQ ID NO: 49400 - DNA, 23 bp, Artificial Sequence
  primer
tccaaactgacagcctttatgac

SEQ ID NO: 49401 - DNA, 37 bp, Artificial Sequence
  primer
gtaaaacgacggccagtatcaataagccattgcgctc

SEQ ID NO: 49402 - DNA, 36 bp, Artificial Sequence
  primer
gtaaaacgacggccagtgctagggaaaccgatgcag

SEQ ID NO: 49403 - DNA, 22 bp, Artificial Sequence
  primer
ccctattattaggccttccagc

SEQ ID NO: 49404 - DNA, 38 bp, Artificial Sequence
  primer
gtaaaacgacggccagtaatttgggattctgtcttggg

SEQ ID NO: 49405 - DNA, 38 bp, Artificial Sequence
  primer
gtaaaacgacggccagtctctttctgtgtgacgatggg

SEQ ID NO: 49406 - DNA, 36 bp, Artificial Sequence
  primer
gtaaaacgacggccagtttcccagggactagggctc

SEQ ID NO: 49407 - DNA, 38 bp, Artificial Sequence
  primer
gtaaaacgacggccagtaaagcgaggtcagatgtttcc

SEQ ID NO: 49408 - DNA, 21 bp, Artificial Sequence
  primer
gagtgagaacatgcggtgttt

SEQ ID NO: 49409 - DNA, 21 bp, Artificial Sequence
  primer
agctgtgaggagcatagtggg

SEQ ID NO: 49410 - DNA, 21 bp, Artificial Sequence
  primer
caggtccagctccacaataac

SEQ ID NO: 49411 - DNA, 38 bp, Artificial Sequence
  primer
gtaaaacgacggccagttgtgctcccaggtgactttag

SEQ ID NO: 49412 - DNA, 38 bp, Artificial Sequence
  primer
gtaaaacgacggccagtagactgcagtttgttcctcgg

SEQ ID NO: 49413 - DNA, 36 bp, Artificial Sequence
  primer
gtaaaacgacggccagtcagatcatgaccaggcacc

SEQ ID NO: 49414 - DNA, 21 bp, Artificial Sequence
  primer
tgtccagtctttgaccaatgc

SEQ ID NO: 49415 - DNA, 41 bp, Artificial Sequence
  primer
gtaaaacgacggccagttccctgtctttcatagcaactagc

SEQ ID NO: 49416 - DNA, 21 bp, Artificial Sequence
  primer
ttgccttcctttcagtcaatg

SEQ ID NO: 49417 - DNA, 39 bp, Artificial Sequence
  primer
gtaaaacgacggccagtcgtttccctacagtctagcagc

SEQ ID NO: 49418 - DNA, 38 bp, Artificial Sequence
  primer
gtaaaacgacggccagtatctcgaacttcctgccacac

SEQ ID NO: 49419 - DNA, 38 bp, Artificial Sequence
  primer
gtaaaacgacggccagtggctatcagagcaccttcagc

SEQ ID NO: 49420 - DNA, 38 bp, Artificial Sequence
  primer
gtaaaacgacggccagttgcttagtcaagtgttgggca

SEQ ID NO: 49421 - DNA, 38 bp, Artificial Sequence
  primer
gtaaaacgacggccagtctgtccagctcaggactatgg

SEQ ID NO: 49422 - DNA, 21 bp, Artificial Sequence
  primer
tgcgtgccatacttacaaagg

SEQ ID NO: 49423 - DNA, 38 bp, Artificial Sequence
  primer
gtaaaacgacggccagtctggaaagcactgtgtggaac

SEQ ID NO: 49424 - DNA, 21 bp, Artificial Sequence
  primer
actatggaccaggacaccacc

SEQ ID NO: 49425 - DNA, 38 bp, Artificial Sequence
  primer
gtaaaacgacggccagtaagggtgtttccttcgttgag

SEQ ID NO: 49426 - DNA, 21 bp, Artificial Sequence
  primer
tgttgacgccaaggtagacac

SEQ ID NO: 49427 - DNA, 38 bp, Artificial Sequence
  primer
gtaaaacgacggccagttgcttggtatccaccactctg

SEQ ID NO: 49428 - DNA, 38 bp, Artificial Sequence
  primer
gtaaaacgacggccagtggctgtatacaatgtgtgggc

SEQ ID NO: 49429 - DNA, 37 bp, Artificial Sequence
  primer
gtaaaacgacggccagtagcccttgctgtgtgatgag

SEQ ID NO: 49430 - DNA, 21 bp, Artificial Sequence
  primer
tagcagcagtcaacagccaag

SEQ ID NO: 49431 - DNA, 38 bp, Artificial Sequence
  primer
gtaaaacgacggccagtacatggccttgagccttagtc

SEQ ID NO: 49432 - DNA, 38 bp, Artificial Sequence
  primer
gtaaaacgacggccagtgggatggagaatggcttcaac

SEQ ID NO: 49433 - DNA, 38 bp, Artificial Sequence
  primer
gtaaaacgacggccagtcagttcttcgtgctgtgtgtg

SEQ ID NO: 49434 - DNA, 37 bp, Artificial Sequence
  primer
gtaaaacgacggccagtatgtgtgatctcggccagtg

SEQ ID NO: 49435 - DNA, 21 bp, Artificial Sequence
  primer
tgattctgcagacactcaccc

SEQ ID NO: 49436 - DNA, 38 bp, Artificial Sequence
  primer
gtaaaacgacggccagtggtcacagaagagcagttggg

SEQ ID NO: 49437 - DNA, 21 bp, Artificial Sequence
  primer
ctgatctgcctttgcatgttc

SEQ ID NO: 49438 - DNA, 38 bp, Artificial Sequence
  primer
gtaaaacgacggccagtctccataatcccaaccaaacc

SEQ ID NO: 49439 - DNA, 38 bp, Artificial Sequence
  primer
gtaaaacgacggccagtttggtcctcaatagcaaaccc

SEQ ID NO: 49440 - DNA, 21 bp, Artificial Sequence
  primer
tgagtggttccatagctgtcc

SEQ ID NO: 49441 - DNA, 21 bp, Artificial Sequence
  primer
cctgccctgaccttctatctg

SEQ ID NO: 49442 - DNA, 20 bp, Artificial Sequence
  primer
cctgttctgaaatgcttcgg

SEQ ID NO: 49443 - DNA, 20 bp, Artificial Sequence
  primer
cctgttgggagcagcagtag

SEQ ID NO: 49444 - DNA, 38 bp, Artificial Sequence
  primer
gtaaaacgacggccagtcatgaacagtagggcacatcc

SEQ ID NO: 49445 - DNA, 37 bp, Artificial Sequence
  primer
gtaaaacgacggccagtctccaaattcagaagcggtg

SEQ ID NO: 49446 - DNA, 38 bp, Artificial Sequence
  primer
gtaaaacgacggccagtgcttctcagtgttccctccac

SEQ ID NO: 49447 - DNA, 38 bp, Artificial Sequence
  primer
gtaaaacgacggccagtgaatgtgcagagcaaatcagg

SEQ ID NO: 49448 - DNA, 38 bp, Artificial Sequence
  primer
gtaaaacgacggccagtaggccaggtttagggacaatc

SEQ ID NO: 49449 - DNA, 38 bp, Artificial Sequence
  primer
gtaaaacgacggccagtgtcagtgcaagatagccctcc

SEQ ID NO: 49450 - DNA, 21 bp, Artificial Sequence
  primer
gcttcaccagcaagagagttg

SEQ ID NO: 49451 - DNA, 38 bp, Artificial Sequence
  primer
gtaaaacgacggccagtagaacccaaggccatatctgc

SEQ ID NO: 49452 - DNA, 20 bp, Artificial Sequence
  primer
ttccacatggtggaggaatg

SEQ ID NO: 49453 - DNA, 38 bp, Artificial Sequence
  primer
gtaaaacgacggccagtccagtgactagtccagtgccc

SEQ ID NO: 49454 - DNA, 38 bp, Artificial Sequence
  primer
gtaaaacgacggccagtgtttctaatgggctgcgagtc

SEQ ID NO: 49455 - DNA, 21 bp, Artificial Sequence
  primer
ggtgatggtactgatggctcc

SEQ ID NO: 49456 - DNA, 38 bp, Artificial Sequence
  primer
gtaaaacgacggccagtagaaccacctccatgtgaacc

SEQ ID NO: 49457 - DNA, 21 bp, Artificial Sequence
  primer
gtgatattctgcctcttcccg

SEQ ID NO: 49458 - DNA, 39 bp, Artificial Sequence
  primer
gtaaaacgacggccagtgagtaactgcattcatcccagc

SEQ ID NO: 49459 - DNA, 39 bp, Artificial Sequence
  primer
gtaaaacgacggccagtgctgtgcctccaactataccac

SEQ ID NO: 49460 - DNA, 20 bp, Artificial Sequence
  primer
aaagaatcccagggctcatc

SEQ ID NO: 49461 - DNA, 38 bp, Artificial Sequence
  primer
gtaaaacgacggccagtgccattctgcctccactttac

SEQ ID NO: 49462 - DNA, 39 bp, Artificial Sequence
  primer
gtaaaacgacggccagtgcagacgcatgtctactcacac

SEQ ID NO: 49463 - DNA, 18 bp, Artificial Sequence
  primer
ggtgatctgcccaccttg

SEQ ID NO: 49464 - DNA, 41 bp, Artificial Sequence
  primer
gtaaaacgacggccagttgggcaaactagtattagaggcag

SEQ ID NO: 49465 - DNA, 39 bp, Artificial Sequence
  primer
gtaaaacgacggccagttgtagataagaccatctggccc

SEQ ID NO: 49466 - DNA, 21 bp, Artificial Sequence
  primer
tacctagcccatgaccttgag

SEQ ID NO: 49467 - DNA, 38 bp, Artificial Sequence
  primer
gtaaaacgacggccagtgagcgtgtgcatttccttatg

SEQ ID NO: 49468 - DNA, 21 bp, Artificial Sequence
  primer
tgtgatgctaagaccagtccc

SEQ ID NO: 49469 - DNA, 21 bp, Artificial Sequence
  primer
tgtaacctcaccctagccagc

SEQ ID NO: 49470 - DNA, 21 bp, Artificial Sequence
  primer
aagaagcgtccctctcttgtg

SEQ ID NO: 49471 - DNA, 38 bp, Artificial Sequence
  primer
gtaaaacgacggccagtgatactagcccatggactccc

SEQ ID NO: 49472 - DNA, 39 bp, Artificial Sequence
  primer
gtaaaacgacggccagttgggtgattggcatctctagtc

SEQ ID NO: 49473 - DNA, 21 bp, Artificial Sequence
  primer
tcaaggaccagcttctgtgag

SEQ ID NO: 49474 - DNA, 21 bp, Artificial Sequence
  primer
gagctgactatgaccagccac

SEQ ID NO: 49475 - DNA, 38 bp, Artificial Sequence
  primer
gtaaaacgacggccagtggatctgctgacaagagcaag

SEQ ID NO: 49476 - DNA, 38 bp, Artificial Sequence
  primer
gtaaaacgacggccagtgttgattctcaggaagcccag

SEQ ID NO: 49477 - DNA, 21 bp, Artificial Sequence
  primer
ctgtccctaaagaaccgttgc

SEQ ID NO: 49478 - DNA, 35 bp, Artificial Sequence
  primer
gtaaaacgacggccagtagggctctgaggactgcc

SEQ ID NO: 49479 - DNA, 38 bp, Artificial Sequence
  primer
gtaaaacgacggccagtcaggatcttccaggcaatgag

SEQ ID NO: 49480 - DNA, 21 bp, Artificial Sequence
  primer
ctgggtgtgagatgtctgctg

SEQ ID NO: 49481 - DNA, 24 bp, Artificial Sequence
  primer
gaggatttggtgagttacatttcc

SEQ ID NO: 49482 - DNA, 38 bp, Artificial Sequence
  primer
gtaaaacgacggccagtgctaacccatgacactcaggc

SEQ ID NO: 49483 - DNA, 38 bp, Artificial Sequence
  primer
gtaaaacgacggccagtgtgtctggcagcatcactctc

SEQ ID NO: 49484 - DNA, 21 bp, Artificial Sequence
  primer
ttcagttattcacccaagccc

SEQ ID NO: 49485 - DNA, 38 bp, Artificial Sequence
  primer
gtaaaacgacggccagtgttgccagggttaacatgacc

SEQ ID NO: 49486 - DNA, 38 bp, Artificial Sequence
  primer
gtaaaacgacggccagttgaatcaattgcaagggtgac

SEQ ID NO: 49487 - DNA, 21 bp, Artificial Sequence
  primer
tttgcccaaggaggtacagac

SEQ ID NO: 49488 - DNA, 21 bp, Artificial Sequence
  primer
agggcctaagctggagaacag

SEQ ID NO: 49489 - DNA, 38 bp, Artificial Sequence
  primer
gtaaaacgacggccagtctctgacagatgcagagcagg

SEQ ID NO: 49490 - DNA, 38 bp, Artificial Sequence
  primer
gtaaaacgacggccagtaggaccaatcatgggattctg

SEQ ID NO: 49491 - DNA, 21 bp, Artificial Sequence
  primer
gcctatttcccagagagggtc

SEQ ID NO: 49492 - DNA, 38 bp, Artificial Sequence
  primer
gtaaaacgacggccagtgggccctagttcagtctgtcc

SEQ ID NO: 49493 - DNA, 20 bp, Artificial Sequence
  primer
aggctctgatcctccagacc

SEQ ID NO: 49494 - DNA, 38 bp, Artificial Sequence
  primer
gtaaaacgacggccagtaagatctgggaccacaccatc

SEQ ID NO: 49495 - DNA, 39 bp, Artificial Sequence
  primer
gtaaaacgacggccagtgaagtccagggactcattcctc

SEQ ID NO: 49496 - DNA, 21 bp, Artificial Sequence
  primer
atccagaatttactgggcagg

SEQ ID NO: 49497 - DNA, 21 bp, Artificial Sequence
  primer
acctgtggagatagggaaggg

SEQ ID NO: 49498 - DNA, 21 bp, Artificial Sequence
  primer
gaatttccttgcctgcatttg

SEQ ID NO: 49499 - DNA, 21 bp, Artificial Sequence
  primer
tgaaagcacatggttaggtgg

SEQ ID NO: 49500 - DNA, 20 bp, Artificial Sequence
  primer
gagattatgccactgcctgg

SEQ ID NO: 49501 - DNA, 22 bp, Artificial Sequence
  primer
acaccaaacctaggaactggac

SEQ ID NO: 49502 - DNA, 38 bp, Artificial Sequence
  primer
gtaaaacgacggccagtaaaccacatacctgccaaacc

SEQ ID NO: 49503 - DNA, 38 bp, Artificial Sequence
  primer
gtaaaacgacggccagttgtatttgctcccacgaattg

SEQ ID NO: 49504 - DNA, 21 bp, Artificial Sequence
  primer
tgatctgagggcctttctagc

SEQ ID NO: 49505 - DNA, 37 bp, Artificial Sequence
  primer
gtaaaacgacggccagtaagggaccaagtgagccaag

SEQ ID NO: 49506 - DNA, 21 bp, Artificial Sequence
  primer
ggatgtttgaatagggccaag

SEQ ID NO: 49507 - DNA, 21 bp, Artificial Sequence
  primer
gggactgtatggagagcaagg

SEQ ID NO: 49508 - DNA, 37 bp, Artificial Sequence
  primer
gtaaaacgacggccagtatttggctgctttggtcctc

SEQ ID NO: 49509 - DNA, 21 bp, Artificial Sequence
  primer
ggtgaaatttagggaaggtgg

SEQ ID NO: 49510 - DNA, 23 bp, Artificial Sequence
  primer
tctgaatagttctttgccagacg

SEQ ID NO: 49511 - DNA, 22 bp, Artificial Sequence
  primer
caacagatgtaccctgtgaggc

SEQ ID NO: 49512 - DNA, 39 bp, Artificial Sequence
  primer
gtaaaacgacggccagtcattcagagggtagcattccat

SEQ ID NO: 49513 - DNA, 38 bp, Artificial Sequence
  primer
gtaaaacgacggccagtcttcaggagcaaattggactg

SEQ ID NO: 49514 - DNA, 21 bp, Artificial Sequence
  primer
gttgcacatgtttgctcttcc

SEQ ID NO: 49515 - DNA, 38 bp, Artificial Sequence
  primer
gtaaaacgacggccagtaggattgctttgccacgtaag

SEQ ID NO: 49516 - DNA, 21 bp, Artificial Sequence
  primer
cctgagattggcagattcacc

SEQ ID NO: 49517 - DNA, 38 bp, Artificial Sequence
  primer
gtaaaacgacggccagtggcccactcttcaatacttcg

SEQ ID NO: 49518 - DNA, 39 bp, Artificial Sequence
  primer
gtaaaacgacggccagtgccgaagaatccctacgaatag

SEQ ID NO: 49519 - DNA, 38 bp, Artificial Sequence
  primer
gtaaaacgacggccagttggattcctgtagcttctccc

SEQ ID NO: 49520 - DNA, 37 bp, Artificial Sequence
  primer
gtaaaacgacggccagtgctataggctctggctttgg

SEQ ID NO: 49521 - DNA, 40 bp, Artificial Sequence
  primer
gtaaaacgacggccagtgcacaatttctgtgtgtcatagc

SEQ ID NO: 49522 - DNA, 38 bp, Artificial Sequence
  primer
gtaaaacgacggccagtgctcaagtgatcctaccaccc

SEQ ID NO: 49523 - DNA, 38 bp, Artificial Sequence
  primer
gtaaaacgacggccagtgcactttggatttgcagtgag

SEQ ID NO: 49524 - DNA, 21 bp, Artificial Sequence
  primer
tggcaaagtaattgaaccagg

SEQ ID NO: 49525 - DNA, 35 bp, Artificial Sequence
  primer
gtaaaacgacggccagtgaaccaccacacccagcc

SEQ ID NO: 49526 - DNA, 22 bp, Artificial Sequence
  primer
cacggcgagtctacctaacaac

SEQ ID NO: 49527 - DNA, 21 bp, Artificial Sequence
  primer
tcacagatatagcctggtggg

SEQ ID NO: 49528 - DNA, 20 bp, Artificial Sequence
  primer
atctgcctgccttcacttcc

SEQ ID NO: 49529 - DNA, 38 bp, Artificial Sequence
  primer
gtaaaacgacggccagtttatggctgccttatttgctg

SEQ ID NO: 49530 - DNA, 38 bp, Artificial Sequence
  primer
gtaaaacgacggccagttcctttccctttagagccgag

SEQ ID NO: 49531 - DNA, 38 bp, Artificial Sequence
  primer
gtaaaacgacggccagtttcttacgcacattgtggtcc

SEQ ID NO: 49532 - DNA, 35 bp, Artificial Sequence
  primer
gtaaaacgacggccagtggctggcgtgtagtggag

SEQ ID NO: 49533 - DNA, 38 bp, Artificial Sequence
  primer
gtaaaacgacggccagtgtttgtcaggtctgagcttgg

SEQ ID NO: 49534 - DNA, 21 bp, Artificial Sequence
  primer
agcgtgagccagtggtagttc

SEQ ID NO: 49535 - DNA, 38 bp, Artificial Sequence
  primer
gtaaaacgacggccagtatggtccttaggttctcaccg

SEQ ID NO: 49536 - DNA, 37 bp, Artificial Sequence
  primer
gtaaaacgacggccagtcttcttgaggtggcacttgg

SEQ ID NO: 49537 - DNA, 21 bp, Artificial Sequence
  primer
aaggttctaggcctttgtggc

SEQ ID NO: 49538 - DNA, 21 bp, Artificial Sequence
  primer
ctggctagttcaagggtttgg

SEQ ID NO: 49539 - DNA, 22 bp, Artificial Sequence
  primer
caactaagggtcatatgggtgg

SEQ ID NO: 49540 - DNA, 38 bp, Artificial Sequence
  primer
gtaaaacgacggccagtattgtccaatgtgagggttcc

SEQ ID NO: 49541 - DNA, 39 bp, Artificial Sequence
  primer
gtaaaacgacggccagtaatccctgaaggactctgttcc

SEQ ID NO: 49542 - DNA, 37 bp, Artificial Sequence
  primer
gtaaaacgacggccagtcaaggatacctgggattggg

SEQ ID NO: 49543 - DNA, 21 bp, Artificial Sequence
  primer
aatgcccatctacaaagcacc

SEQ ID NO: 49544 - DNA, 21 bp, Artificial Sequence
  primer
ttgcagggactgaactttgtc

SEQ ID NO: 49545 - DNA, 30 bp, Artificial Sequence
  primer
tgtcttctccagagattattagaagtgtta

SEQ ID NO: 49546 - DNA, 38 bp, Artificial Sequence
  primer
gtaaaacgacggccagttgggagcaagctctctagtgg

SEQ ID NO: 49547 - DNA, 21 bp, Artificial Sequence
  primer
tgctttatttggagcctttcc

SEQ ID NO: 49548 - DNA, 38 bp, Artificial Sequence
  primer
gtaaaacgacggccagttcttggttgcagttatccagc

SEQ ID NO: 49549 - DNA, 22 bp, Artificial Sequence
  primer
tccattgaactacagccttgtg

SEQ ID NO: 49550 - DNA, 40 bp, Artificial Sequence
  primer
gtaaaacgacggccagtggtaaatttgaatgtgggttgtg

SEQ ID NO: 49551 - DNA, 43 bp, Artificial Sequence
  primer
gtaaaacgacggccagtccgaaggtatataactatttggcaac

SEQ ID NO: 49552 - DNA, 40 bp, Artificial Sequence
  primer
gtaaaacgacggccagtagagagcactcaaataatgatgg

SEQ ID NO: 49553 - DNA, 43 bp, Artificial Sequence
  primer
gtaaaacgacggccagtgaacgtgtttattacctgtccactct

SEQ ID NO: 49554 - DNA, 38 bp, Artificial Sequence
  primer
gtaaaacgacggccagtgacgggtatatagagtccggg

SEQ ID NO: 49555 - DNA, 21 bp, Artificial Sequence
  primer
gtctctgctgttggcagtgag

SEQ ID NO: 49556 - DNA, 38 bp, Artificial Sequence
  primer
gtaaaacgacggccagtcatgtttgctgagttcttcgg

SEQ ID NO: 49557 - DNA, 21 bp, Artificial Sequence
  primer
atctcccacaagcggctaaac

SEQ ID NO: 49558 - DNA, 22 bp, Artificial Sequence
  primer
tgggtcttatctatggcagacg

SEQ ID NO: 49559 - DNA, 21 bp, Artificial Sequence
  primer
tagctagctgtctctgcggac

SEQ ID NO: 49560 - DNA, 44 bp, Artificial Sequence
  primer
gtaaaacgacggccagtgctcagatacaaacctaaatgtagagg

SEQ ID NO: 49561 - DNA, 39 bp, Artificial Sequence
  primer
gtaaaacgacggccagttggaatgaacagtgcatcaaag

SEQ ID NO: 49562 - DNA, 21 bp, Artificial Sequence
  primer
ttcattggcatactgtgtgtg

SEQ ID NO: 49563 - DNA, 21 bp, Artificial Sequence
  primer
agtccaggcatatgtgcagag

SEQ ID NO: 49564 - DNA, 39 bp, Artificial Sequence
  primer
gtaaaacgacggccagtcaagcagtgccctttatttctg

SEQ ID NO: 49565 - DNA, 22 bp, Artificial Sequence
  primer
gacaggtcaatgcccaaagtag

SEQ ID NO: 49566 - DNA, 44 bp, Artificial Sequence
  primer
gtaaaacgacggccagtaaatgtttattgtttgaaagagtggtg

SEQ ID NO: 49567 - DNA, 40 bp, Artificial Sequence
  primer
gtaaaacgacggccagttgctcactagaagctgtgtgatg

SEQ ID NO: 49568 - DNA, 38 bp, Artificial Sequence
  primer
gtaaaacgacggccagttgcaattacgttggagattgg

SEQ ID NO: 49569 - DNA, 38 bp, Artificial Sequence
  primer
gtaaaacgacggccagttacggtagcacttccaccctc

SEQ ID NO: 49570 - DNA, 21 bp, Artificial Sequence
  primer
tggctttcaagagagcagatg

SEQ ID NO: 49571 - DNA, 21 bp, Artificial Sequence
  primer
gtgtcacacagctgacccaag

SEQ ID NO: 49572 - DNA, 21 bp, Artificial Sequence
  primer
cgtctgcttcctaaagcactg

SEQ ID NO: 49573 - DNA, 38 bp, Artificial Sequence
  primer
gtaaaacgacggccagttcttcaacatgttctttggcg

SEQ ID NO: 49574 - DNA, 38 bp, Artificial Sequence
  primer
gtaaaacgacggccagtcccaggctccactattctagg

SEQ ID NO: 49575 - DNA, 38 bp, Artificial Sequence
  primer
gtaaaacgacggccagtctggtttgagagggaaccaac

SEQ ID NO: 49576 - DNA, 38 bp, Artificial Sequence
  primer
gtaaaacgacggccagtctccatggtcttcctaatggg

SEQ ID NO: 49577 - DNA, 37 bp, Artificial Sequence
  primer
gtaaaacgacggccagtcttggttctttccgcctgac

SEQ ID NO: 49578 - DNA, 21 bp, Artificial Sequence
  primer
ttgtacatgtggtcccagcac

SEQ ID NO: 49579 - DNA, 38 bp, Artificial Sequence
  primer
gtaaaacgacggccagtaggctgagttgctgcctaaac

SEQ ID NO: 49580 - DNA, 20 bp, Artificial Sequence
  primer
ctggctgtgccttaggtgag

SEQ ID NO: 49581 - DNA, 38 bp, Artificial Sequence
  primer
gtaaaacgacggccagttacttccagacttgggctcac

SEQ ID NO: 49582 - DNA, 37 bp, Artificial Sequence
  primer
gtaaaacgacggccagtctgtctcctgtgttgggagc

SEQ ID NO: 49583 - DNA, 37 bp, Artificial Sequence
  primer
gtaaaacgacggccagtgaaagttggctccttgaggg

SEQ ID NO: 49584 - DNA, 38 bp, Artificial Sequence
  primer
gtaaaacgacggccagtgacttgcctaagggtaggagc

SEQ ID NO: 49585 - DNA, 21 bp, Artificial Sequence
  primer
tcatggtggctgtgactcttg

SEQ ID NO: 49586 - DNA, 37 bp, Artificial Sequence
  primer
gtaaaacgacggccagtgagacgctgtctgcttgctg

SEQ ID NO: 49587 - DNA, 21 bp, Artificial Sequence
  primer
gcaaacaagagcgaaactctg

SEQ ID NO: 49588 - DNA, 22 bp, Artificial Sequence
  primer
gcaggaggtactgatggacaag

SEQ ID NO: 49589 - DNA, 21 bp, Artificial Sequence
  primer
agtggttgtaccaaacggatg

SEQ ID NO: 49590 - DNA, 21 bp, Artificial Sequence
  primer
gcctgacctctgaaggaattt

SEQ ID NO: 49591 - DNA, 38 bp, Artificial Sequence
  primer
gtaaaacgacggccagtgagaaggcatcaagtcttggc

SEQ ID NO: 49592 - DNA, 21 bp, Artificial Sequence
  primer
ctattagcctggccctctctg

SEQ ID NO: 49593 - DNA, 21 bp, Artificial Sequence
  primer
atatcttctttgccagcagcc

SEQ ID NO: 49594 - DNA, 21 bp, Artificial Sequence
  primer
atctaccatggctccaccaag

SEQ ID NO: 49595 - DNA, 19 bp, Artificial Sequence
  primer
agctggcacattctttccc

SEQ ID NO: 49596 - DNA, 38 bp, Artificial Sequence
  primer
gtaaaacgacggccagtccctctgtaggccagtaggtg

SEQ ID NO: 49597 - DNA, 38 bp, Artificial Sequence
  primer
gtaaaacgacggccagtattcatctcaccagttggcag

SEQ ID NO: 49598 - DNA, 37 bp, Artificial Sequence
  primer
gtaaaacgacggccagtaaaggtggccatactccttg

SEQ ID NO: 49599 - DNA, 38 bp, Artificial Sequence
  primer
gtaaaacgacggccagtctgggcacactcactctctgt

SEQ ID NO: 49600 - DNA, 24 bp, Artificial Sequence
  primer
aactgttggtgaggtagtgtttca

SEQ ID NO: 49601 - DNA, 38 bp, Artificial Sequence
  primer
gtaaaacgacggccagtgcgtcgtttattactcctcgg

SEQ ID NO: 49602 - DNA, 21 bp, Artificial Sequence
  primer
tgttgttgacaggttggcttc

SEQ ID NO: 49603 - DNA, 20 bp, Artificial Sequence
  primer
ctggattcagggagatcgtg

SEQ ID NO: 49604 - DNA, 39 bp, Artificial Sequence
  primer
gtaaaacgacggccagtagtgtgagcagttctcaacgtg

SEQ ID NO: 49605 - DNA, 21 bp, Artificial Sequence
  primer
ctctatcaccaccaccagcag

SEQ ID NO: 49606 - DNA, 39 bp, Artificial Sequence
  primer
gtaaaacgacggccagtttctttgaagactcgcttgagg

SEQ ID NO: 49607 - DNA, 38 bp, Artificial Sequence
  primer
gtaaaacgacggccagttacatcacagggttcattggg

SEQ ID NO: 49608 - DNA, 38 bp, Artificial Sequence
  primer
gtaaaacgacggccagtgaatcttgcctagagcttgcg

SEQ ID NO: 49609 - DNA, 38 bp, Artificial Sequence
  primer
gtaaaacgacggccagtaggcggagaagaagttcaagc

SEQ ID NO: 49610 - DNA, 21 bp, Artificial Sequence
  primer
gctacaccttccgtaaccctg

SEQ ID NO: 49611 - DNA, 23 bp, Artificial Sequence
  primer
gcattaggtttaccttgtgttgg

SEQ ID NO: 49612 - DNA, 37 bp, Artificial Sequence
  primer
gtaaaacgacggccagttctgatgcgaaattcttccc

SEQ ID NO: 49613 - DNA, 20 bp, Artificial Sequence
  primer
atcatttccagacacgccag

SEQ ID NO: 49614 - DNA, 35 bp, Artificial Sequence
  primer
gtaaaacgacggccagtactgacaggcgctgttcc

SEQ ID NO: 49615 - DNA, 38 bp, Artificial Sequence
  primer
gtaaaacgacggccagtcttggttggctgtcttctcag

SEQ ID NO: 49616 - DNA, 38 bp, Artificial Sequence
  primer
gtaaaacgacggccagtattgtagtgccttcaccctcc

SEQ ID NO: 49617 - DNA, 25 bp, Artificial Sequence
  primer
gctgggaacgtacataaacattatc

SEQ ID NO: 49618 - DNA, 24 bp, Artificial Sequence
  primer
catgttggaccctacatacatttg

SEQ ID NO: 49619 - DNA, 21 bp, Artificial Sequence
  primer
agcccaggttagaaagaaggc

SEQ ID NO: 49620 - DNA, 40 bp, Artificial Sequence
  primer
gtaaaacgacggccagttttctcattgtaactggctctcc

SEQ ID NO: 49621 - DNA, 24 bp, Artificial Sequence
  primer
ggtgtatgcaaattgatatgatgg

SEQ ID NO: 49622 - DNA, 41 bp, Artificial Sequence
  primer
gtaaaacgacggccagttttgcttcacagcaattatctctc

SEQ ID NO: 49623 - DNA, 38 bp, Artificial Sequence
  primer
gtaaaacgacggccagtcatggaatcgtttcactcagc

SEQ ID NO: 49624 - DNA, 38 bp, Artificial Sequence
  primer
gtaaaacgacggccagtctgctgttctcaccgtcttcc

SEQ ID NO: 49625 - DNA, 21 bp, Artificial Sequence
  primer
tctccgaactcaaatcgacag

SEQ ID NO: 49626 - DNA, 36 bp, Artificial Sequence
  primer
gtaaaacgacggccagttgagcagaagccagcagac

SEQ ID NO: 49627 - DNA, 38 bp, Artificial Sequence
  primer
gtaaaacgacggccagttttgtgatgcttgattcaccc

SEQ ID NO: 49628 - DNA, 22 bp, Artificial Sequence
  primer
catttcaacccatggtaactca

SEQ ID NO: 49629 - DNA, 23 bp, Artificial Sequence
  primer
ttacgaactaccgcatacacatc

SEQ ID NO: 49630 - DNA, 21 bp, Artificial Sequence
  primer
ttcaagtatgggcgtaggaga

SEQ ID NO: 49631 - DNA, 20 bp, Artificial Sequence
  primer
gccatgatttagctcccaca

SEQ ID NO: 49632 - DNA, 39 bp, Artificial Sequence
  primer
gtaaaacgacggccagtgagctttgctgcattattcaag

SEQ ID NO: 49633 - DNA, 21 bp, Artificial Sequence
  primer
aaattggagagccattgaagg

SEQ ID NO: 49634 - DNA, 18 bp, Artificial Sequence
  primer
gggaaaggcaaatgcaag

SEQ ID NO: 49635 - DNA, 24 bp, Artificial Sequence
  primer
ttgctgtagaactaaggcatgaag

SEQ ID NO: 49636 - DNA, 29 bp, Artificial Sequence
  primer
gttaatgcaacatcttataatggaattta

SEQ ID NO: 49637 - DNA, 23 bp, Artificial Sequence
  primer
aaataagagaatgagtgggtccg

SEQ ID NO: 49638 - DNA, 39 bp, Artificial Sequence
  primer
gtaaaacgacggccagtaaactgtgtcattagggcagtg

SEQ ID NO: 49639 - DNA, 19 bp, Artificial Sequence
  primer
cactgcacctggccaattt

SEQ ID NO: 49640 - DNA, 22 bp, Artificial Sequence
  primer
gaaggtttgccgctaagtacag

SEQ ID NO: 49641 - DNA, 44 bp, Artificial Sequence
  primer
gtaaaacgacggccagttcttgttcttgttacttaaaggcaaac

SEQ ID NO: 49642 - DNA, 21 bp, Artificial Sequence
  primer
cctgtaccaacaatttgccag

SEQ ID NO: 49643 - DNA, 45 bp, Artificial Sequence
  primer
gtaaaacgacggccagtactgtttcaccataataatacaatgctt

SEQ ID NO: 49644 - DNA, 21 bp, Artificial Sequence
  primer
gtttcgcaattcccataggtc

SEQ ID NO: 49645 - DNA, 37 bp, Artificial Sequence
  primer
gtaaaacgacggccagtcattgcccttccttgacatc

SEQ ID NO: 49646 - DNA, 38 bp, Artificial Sequence
  primer
gtaaaacgacggccagttcctattgctttgttgttgcc

SEQ ID NO: 49647 - DNA, 21 bp, Artificial Sequence
  primer
tgttcttgcacagtttcgatg

SEQ ID NO: 49648 - DNA, 23 bp, Artificial Sequence
  primer
gctgtgagcaggtaagaactagg

SEQ ID NO: 49649 - DNA, 35 bp, Artificial Sequence
  primer
gtaaaacgacggccagtgtccctgacgcggatcac

SEQ ID NO: 49650 - DNA, 38 bp, Artificial Sequence
  primer
gtaaaacgacggccagtttcccatttcaaggctgattc

SEQ ID NO: 49651 - DNA, 38 bp, Artificial Sequence
  primer
gtaaaacgacggccagtgacagggagaacaggagatgg

SEQ ID NO: 49652 - DNA, 20 bp, Artificial Sequence
  primer
tggtggaactcatggtttgg

SEQ ID NO: 49653 - DNA, 38 bp, Artificial Sequence
  primer
gtaaaacgacggccagtcagtttggttcggactgtgac

SEQ ID NO: 49654 - DNA, 21 bp, Artificial Sequence
  primer
gaggaatcgtctgcacctttg

SEQ ID NO: 49655 - DNA, 39 bp, Artificial Sequence
  primer
gtaaaacgacggccagtccatttggcaaaggttaagatg

SEQ ID NO: 49656 - DNA, 21 bp, Artificial Sequence
  primer
agtgaggtcttagccaggcag

SEQ ID NO: 49657 - DNA, 38 bp, Artificial Sequence
  primer
gtaaaacgacggccagtagcagatgcccagagctagtg

SEQ ID NO: 49658 - DNA, 21 bp, Artificial Sequence
  primer
gaactagaccatgggtgtccc

SEQ ID NO: 49659 - DNA, 21 bp, Artificial Sequence
  primer
cacgcagcacaagttctcttc

SEQ ID NO: 49660 - DNA, 38 bp, Artificial Sequence
  primer
gtaaaacgacggccagtatcacagactgtttgctgggc

SEQ ID NO: 49661 - DNA, 38 bp, Artificial Sequence
  primer
gtaaaacgacggccagtccctgagcaagtatgttgacg

SEQ ID NO: 49662 - DNA, 21 bp, Artificial Sequence
  primer
aggcagaagagtccagaatgg

SEQ ID NO: 49663 - DNA, 38 bp, Artificial Sequence
  primer
gtaaaacgacggccagtcggtggtagtgaggaggagtg

SEQ ID NO: 49664 - DNA, 38 bp, Artificial Sequence
  primer
gtaaaacgacggccagtagcagacctctacgttccagc

SEQ ID NO: 49665 - DNA, 40 bp, Artificial Sequence
  primer
gtaaaacgacggccagttgtggaacatgctgctctaattc

SEQ ID NO: 49666 - DNA, 38 bp, Artificial Sequence
  primer
gtaaaacgacggccagtgtcttattcctggtgatccgc

SEQ ID NO: 49667 - DNA, 22 bp, Artificial Sequence
  primer
gcttaatgaggtaaattggccc

SEQ ID NO: 49668 - DNA, 41 bp, Artificial Sequence
  primer
gtaaaacgacggccagtggtcaggtgttaccacatatcaaa

SEQ ID NO: 49669 - DNA, 38 bp, Artificial Sequence
  primer
gtaaaacgacggccagtcccttacattgtacctgctgc

SEQ ID NO: 49670 - DNA, 22 bp, Artificial Sequence
  primer
gcttaatgaggtaaattggccc

SEQ ID NO: 49671 - DNA, 38 bp, Artificial Sequence
  primer
gtaaaacgacggccagtaaggatatacggcaggctgtg

SEQ ID NO: 49672 - DNA, 19 bp, Artificial Sequence
  primer
cagctgatgctttgccaac

SEQ ID NO: 49673 - DNA, 25 bp, Artificial Sequence
  primer
ttcacttcccagttcttatcacttt

SEQ ID NO: 49674 - DNA, 39 bp, Artificial Sequence
  primer
gtaaaacgacggccagtgcatatgcaggagaaagcattg

SEQ ID NO: 49675 - DNA, 40 bp, Artificial Sequence
  primer
gtaaaacgacggccagttggtcgtttcaatagtgactgtg

SEQ ID NO: 49676 - DNA, 42 bp, Artificial Sequence
  primer
gtaaaacgacggccagttgcttatttgcctctaatacctacc

SEQ ID NO: 49677 - DNA, 23 bp, Artificial Sequence
  primer
gcaatatttgaatcttcgctttg

SEQ ID NO: 49678 - DNA, 40 bp, Artificial Sequence
  primer
gtaaaacgacggccagtcatggctaaagaatatggaatgg

SEQ ID NO: 49679 - DNA, 21 bp, Artificial Sequence
  primer
taaagggcctatgcttcatgc

SEQ ID NO: 49680 - DNA, 38 bp, Artificial Sequence
  primer
gtaaaacgacggccagtcctcaggttcttagctacgcc

SEQ ID NO: 49681 - DNA, 24 bp, Artificial Sequence
  primer
ttcatacagtggagtcctacatgc

SEQ ID NO: 49682 - DNA, 22 bp, Artificial Sequence
  primer
tttgaatgggaaattacatgcc

SEQ ID NO: 49683 - DNA, 21 bp, Artificial Sequence
  primer
taaatcgtcacttctgcctgc

SEQ ID NO: 49684 - DNA, 42 bp, Artificial Sequence
  primer
gtaaaacgacggccagtcaactttgaacctcatgttgagaaa

SEQ ID NO: 49685 - DNA, 25 bp, Artificial Sequence
  primer
gatgccttctgtttcctactaatgt

SEQ ID NO: 49686 - DNA, 24 bp, Artificial Sequence
  primer
aacatctcaaccttattccaaagg

SEQ ID NO: 49687 - DNA, 22 bp, Artificial Sequence
  primer
ttcctgttcgggtttattgaaa

SEQ ID NO: 49688 - DNA, 38 bp, Artificial Sequence
  primer
gtaaaacgacggccagtccctcaatagctaagccacag

SEQ ID NO: 49689 - DNA, 39 bp, Artificial Sequence
  primer
gtaaaacgacggccagttcactgaaccataacatccagc

SEQ ID NO: 49690 - DNA, 23 bp, Artificial Sequence
  primer
tgaaacagctttaggctacatgg

SEQ ID NO: 49691 - DNA, 23 bp, Artificial Sequence
  primer
cctaccaccaagattctgtcatt

SEQ ID NO: 49692 - DNA, 40 bp, Artificial Sequence
  primer
gtaaaacgacggccagtttgacaccagatagtgctgtgac

SEQ ID NO: 49693 - DNA, 23 bp, Artificial Sequence
  primer
ggatcaattaagagatcgtgagc

SEQ ID NO: 49694 - DNA, 40 bp, Artificial Sequence
  primer
gtaaaacgacggccagtcattacttcttatgggctgttgg

SEQ ID NO: 49695 - DNA, 38 bp, Artificial Sequence
  primer
gtaaaacgacggccagtcttcgaggaccttgtaggtgg

SEQ ID NO: 49696 - DNA, 27 bp, Artificial Sequence
  primer
tgagtgtgaacttaagaaaccatttac

SEQ ID NO: 49697 - DNA, 21 bp, Artificial Sequence
  primer
caaatttgggttcctaaaggc

SEQ ID NO: 49698 - DNA, 21 bp, Artificial Sequence
  primer
taaggtaacctgcttcatgcc

SEQ ID NO: 49699 - DNA, 24 bp, Artificial Sequence
  primer
tggtagatgagcttactgactccc

SEQ ID NO: 49700 - DNA, 25 bp, Artificial Sequence
  primer
tgggaatatggatttatgtgagttg

SEQ ID NO: 49701 - DNA, 39 bp, Artificial Sequence
  primer
gtaaaacgacggccagtgcaatttgttccaattgtgttc

SEQ ID NO: 49702 - DNA, 21 bp, Artificial Sequence
  primer
ggaaggactgggattatcagc

SEQ ID NO: 49703 - DNA, 38 bp, Artificial Sequence
  primer
gtaaaacgacggccagttgctctgcccaactatacagc

SEQ ID NO: 49704 - DNA, 22 bp, Artificial Sequence
  primer
ttgaagtgaatgggtagggaac

SEQ ID NO: 49705 - DNA, 44 bp, Artificial Sequence
  primer
gtaaaacgacggccagtgctagattacagttggaatgaatacct

SEQ ID NO: 49706 - DNA, 36 bp, Artificial Sequence; identical to SEQ ID NO: 41824
  primer

SEQ ID NO: 49707 - DNA, 23 bp, Artificial Sequence
  primer
aatgtgagttggaaagtattggg

SEQ ID NO: 49708 - DNA, 21 bp, Artificial Sequence
  primer
gcccatgggttgtagtagctg

SEQ ID NO: 49709 - DNA, 21 bp, Artificial Sequence
  primer
acaaccagttcctcttgggag

SEQ ID NO: 49710 - DNA, 27 bp, Artificial Sequence
  primer
tgatgtttacctcagtggtaggtactc

SEQ ID NO: 49711 - DNA, 25 bp, Artificial Sequence
  primer
caatttcaaatcctagtttcaccag

SEQ ID NO: 49712 - DNA, 41 bp, Artificial Sequence
  primer
gtaaaacgacggccagtctgtgacatgtatcacaccacatt

SEQ ID NO: 49713 - DNA, 27 bp, Artificial Sequence
  primer
cctatagtgcataggtgtattcatgtg

SEQ ID NO: 49714 - DNA, 41 bp, Artificial Sequence
  primer
gtaaaacgacggccagtggtcctccacttacttcatgtcac

SEQ ID NO: 49715 - DNA, 43 bp, Artificial Sequence
  primer
gtaaaacgacggccagtaacctcaaggtattatttccaaagag

SEQ ID NO: 49716 - DNA, 35 bp, Artificial Sequence
  primer
gtaaaacgacggccagtcacagagctggtgccaag

SEQ ID NO: 49717 - DNA, 37 bp, Artificial Sequence
  primer
gtaaaacgacggccagtaaagaagcaatggcaaaggg

SEQ ID NO: 49718 - DNA, 21 bp, Artificial Sequence
  primer
tggttatggcccacataagtc

SEQ ID NO: 49719 - DNA, 22 bp, Artificial Sequence
  primer
gggaagggcaaacatttcttac

SEQ ID NO: 49720 - DNA, 38 bp, Artificial Sequence
  primer
gtaaaacgacggccagtttatggctgtttgtggactgg

SEQ ID NO: 49721 - DNA, 43 bp, Artificial Sequence
  primer
gtaaaacgacggccagtttcttaaagtcctttagattcatgcc

SEQ ID NO: 49722 - DNA, 22 bp, Artificial Sequence
  primer
tgcatacgaaccacatggtatt

SEQ ID NO: 49723 - DNA, 19 bp, Artificial Sequence
  primer
ctgccttccaggtaggtcc

SEQ ID NO: 49724 - DNA, 38 bp, Artificial Sequence
  primer
gtaaaacgacggccagttccttgttgctttggaagttg

SEQ ID NO: 49725 - DNA, 20 bp, Artificial Sequence
  primer
tgtgtgatggagtgcctgag

SEQ ID NO: 49726 - DNA, 38 bp, Artificial Sequence
  primer
gtaaaacgacggccagttccttgactgtctccaccttg

SEQ ID NO: 49727 - DNA, 38 bp, Artificial Sequence
  primer
gtaaaacgacggccagtcggagaaagagggttgtatgg

SEQ ID NO: 49728 - DNA, 21 bp, Artificial Sequence
  primer
aagaatcaggagtggaccagg

SEQ ID NO: 49729 - DNA, 21 bp, Artificial Sequence
  primer
gtgtgtccagcggaaagaaac

SEQ ID NO: 49730 - DNA, 21 bp, Artificial Sequence
  primer
agtttggatgggagtgtggac

SEQ ID NO: 49731 - DNA, 38 bp, Artificial Sequence
  primer
gtaaaacgacggccagtgggctttctacagttgggatg

SEQ ID NO: 49732 - DNA, 21 bp, Artificial Sequence
  primer
cagagccatgaattgaaccag

SEQ ID NO: 49733 - DNA, 20 bp, Artificial Sequence
  primer
ggtggaggcttgttgagatg

SEQ ID NO: 49734 - DNA, 40 bp, Artificial Sequence
  primer
gtaaaacgacggccagttcagccctatttgtgaataatgg

SEQ ID NO: 49735 - DNA, 21 bp, Artificial Sequence
  primer
tttgcactgatggatggaaag

SEQ ID NO: 49736 - DNA, 35 bp, Artificial Sequence
  primer
gtaaaacgacggccagtagagggcggcagaggtag

SEQ ID NO: 49737 - DNA, 38 bp, Artificial Sequence
  primer
gtaaaacgacggccagtaagactgtccaggtttctgcc

SEQ ID NO: 49738 - DNA, 38 bp, Artificial Sequence
  primer
gtaaaacgacggccagtcctccgtctgcctctgtagtg

SEQ ID NO: 49739 - DNA, 40 bp, Artificial Sequence
  primer
gtaaaacgacggccagttcttcctatgtctttcaagctgc

SEQ ID NO: 49740 - DNA, 21 bp, Artificial Sequence
  primer
tgaggtcgggatttcaatttc

SEQ ID NO: 49741 - DNA, 43 bp, Artificial Sequence
  primer
gtaaaacgacggccagttgtttcagacaggattatgatttcag

SEQ ID NO: 49742 - DNA, 21 bp, Artificial Sequence
  primer
ctggcatgtacctctctgctc

SEQ ID NO: 49743 - DNA, 38 bp, Artificial Sequence
  primer
gtaaaacgacggccagtctttagccaaggtcagctacg

SEQ ID NO: 49744 - DNA, 39 bp, Artificial Sequence
  primer
gtaaaacgacggccagtcgtcttcttcaccttcacttgc

SEQ ID NO: 49745 - DNA, 20 bp, Artificial Sequence
  primer
gtgcctctagtcccagccac

SEQ ID NO: 49746 - DNA, 21 bp, Artificial Sequence
  primer
gggcttgtgagtacacagtgc

SEQ ID NO: 49747 - DNA, 40 bp, Artificial Sequence
  primer
gtaaaacgacggccagttgtttgcctgaaattagtaagcg

SEQ ID NO: 49748 - DNA, 21 bp, Artificial Sequence
  primer
cctgctgtccctgatcttctc

SEQ ID NO: 49749 - DNA, 38 bp, Artificial Sequence
  primer
gtaaaacgacggccagtgattaccaagtcaggccatcc

SEQ ID NO: 49750 - DNA, 38 bp, Artificial Sequence
  primer
gtaaaacgacggccagtgttaagttccaccgagcaagc

SEQ ID NO: 49751 - DNA, 38 bp, Artificial Sequence
  primer
gtaaaacgacggccagtaggagcagctgcctacacttc

SEQ ID NO: 49752 - DNA, 21 bp, Artificial Sequence
  primer
tgagcgactttccttctcctc

SEQ ID NO: 49753 - DNA, 20 bp, Artificial Sequence
  primer
aggtgggaggattgcttgag

SEQ ID NO: 49754 - DNA, 38 bp, Artificial Sequence
  primer
gtaaaacgacggccagtcagttggactgaccattgctg

SEQ ID NO: 49755 - DNA, 40 bp, Artificial Sequence
  primer
gtaaaacgacggccagtaatacctcgggaattgcactaaa

SEQ ID NO: 49756 - DNA, 21 bp, Artificial Sequence
  primer
atacgcattgggtgtgttgag

SEQ ID NO: 49757 - DNA, 21 bp, Artificial Sequence
  primer
tttggtcatccagttgcagtg

SEQ ID NO: 49758 - DNA, 38 bp, Artificial Sequence; identical to SEQ ID NO: 49754
  primer

SEQ ID NO: 49759 - DNA, 21 bp, Artificial Sequence
  primer
atacgcattgggtgtgttgag

SEQ ID NO: 49760 - DNA, 21 bp, Artificial Sequence
  primer
ggaagacctggctttcagaca

SEQ ID NO: 49761 - DNA, 21 bp, Artificial Sequence
  primer
atacgcattgggtgtgttgag

SEQ ID NO: 49762 - DNA, 21 bp, Artificial Sequence
  primer
cagaaagaaggcgattggatg

SEQ ID NO: 49763 - DNA, 40 bp, Artificial Sequence
  primer
gtaaaacgacggccagtttgactgattaggtcaagatggg

SEQ ID NO: 49764 - DNA, 21 bp, Artificial Sequence
  primer
tttgcactgatcttgctaggc

SEQ ID NO: 49765 - DNA, 38 bp, Artificial Sequence
  primer
gtaaaacgacggccagtcaagtcagatgtgcactggaa

SEQ ID NO: 49766 - DNA, 39 bp, Artificial Sequence
  primer
gtaaaacgacggccagttttggaatggtttacccttgtg

SEQ ID NO: 49767 - DNA, 39 bp, Artificial Sequence
  primer
gtaaaacgacggccagtaaatacgtggaatgcaacaatg

SEQ ID NO: 49768 - DNA, 25 bp, Artificial Sequence
  primer
tgcttattaaacaggaaggctctta

SEQ ID NO: 49769 - DNA, 38 bp, Artificial Sequence
  primer
gtaaaacgacggccagtagcaacacatggtgaagaggg

SEQ ID NO: 49770 - DNA, 39 bp, Artificial Sequence
  primer
gtaaaacgacggccagtttgacttgttcccagaaatgtg

SEQ ID NO: 49771 - DNA, 38 bp, Artificial Sequence
  primer
gtaaaacgacggccagttaatggccaaagagtgaaggg

SEQ ID NO: 49772 - DNA, 38 bp, Artificial Sequence
  primer
gtaaaacgacggccagtggcctgtgataccattggaac

SEQ ID NO: 49773 - DNA, 38 bp, Artificial Sequence
  primer
gtaaaacgacggccagtctggatttgaatgtcaggcac

SEQ ID NO: 49774 - DNA, 38 bp, Artificial Sequence
  primer
gtaaaacgacggccagtacacaggaggaagcaggagtc

SEQ ID NO: 49775 - DNA, 22 bp, Artificial Sequence
  primer
cacaggtacagtaatcctgccc

SEQ ID NO: 49776 - DNA, 38 bp, Artificial Sequence
  primer
gtaaaacgacggccagtagctctgcccttggtactttc

SEQ ID NO: 49777 - DNA, 38 bp, Artificial Sequence
  primer
gtaaaacgacggccagtgagagtcggacagtgaggtgg

SEQ ID NO: 49778 - DNA, 38 bp, Artificial Sequence
  primer
gtaaaacgacggccagtctgtctggaaggcagtatccc

SEQ ID NO: 49779 - DNA, 21 bp, Artificial Sequence
  primer
aggtcagcgagtagcctctcc

SEQ ID NO: 49780 - DNA, 21 bp, Artificial Sequence
  primer
gagaaagccctgttccatttg

SEQ ID NO: 49781 - DNA, 22 bp, Artificial Sequence
  primer
caccgctagtctgaaactcacc

SEQ ID NO: 49782 - DNA, 40 bp, Artificial Sequence
  primer
gtaaaacgacggccagttgggtacagacttgatttcatgg

SEQ ID NO: 49783 - DNA, 38 bp, Artificial Sequence
  primer
gtaaaacgacggccagtgtaaagacagtgcctcctccc

SEQ ID NO: 49784 - DNA, 38 bp, Artificial Sequence
  primer
gtaaaacgacggccagtcgtttacctgcctaatccctg

SEQ ID NO: 49785 - DNA, 22 bp, Artificial Sequence
  primer
tgtaccacatctcatgcattcc

SEQ ID NO: 49786 - DNA, 38 bp, Artificial Sequence
  primer
gtaaaacgacggccagtattgagggagggaagcttgag

SEQ ID NO: 49787 - DNA, 21 bp, Artificial Sequence
  primer
tgattgaacttgacaccagcg

SEQ ID NO: 49788 - DNA, 38 bp, Artificial Sequence
  primer
gtaaaacgacggccagtgtttacgtctgccttcatccc

SEQ ID NO: 49789 - DNA, 21 bp, Artificial Sequence
  primer
gagtgggacacaatttccagg

SEQ ID NO: 49790 - DNA, 38 bp, Artificial Sequence
  primer
gtaaaacgacggccagtgcgcaagtgattgagagagag

SEQ ID NO: 49791 - DNA, 21 bp, Artificial Sequence
  primer
cagtcctttggctcagtttcc

SEQ ID NO: 49792 - DNA, 38 bp, Artificial Sequence
  primer
gtaaaacgacggccagtttggttggtgtgataacctgc

SEQ ID NO: 49793 - DNA, 22 bp, Artificial Sequence
  primer
aaagcacccacagttaagagga

SEQ ID NO: 49794 - DNA, 26 bp, Artificial Sequence
  primer
aatgtttcctaaattattgatcgcat

SEQ ID NO: 49795 - DNA, 21 bp, Artificial Sequence
  primer
gaaatagtttctgggtccggg

SEQ ID NO: 49796 - DNA, 21 bp, Artificial Sequence
  primer
agttgaaggtgcatgtctccc

SEQ ID NO: 49797 - DNA, 40 bp, Artificial Sequence
  primer
gtaaaacgacggccagtcaacctaagatgacttctgtgcc

SEQ ID NO: 49798 - DNA, 38 bp, Artificial Sequence
  primer
gtaaaacgacggccagtgtcaatcccagcatcctcttc

SEQ ID NO: 49799 - DNA, 21 bp, Artificial Sequence
  primer
aaccaacaatgctgtggtcag

SEQ ID NO: 49800 - DNA, 38 bp, Artificial Sequence
  primer
gtaaaacgacggccagtcttggagtccactgttagccc

SEQ ID NO: 49801 - DNA, 21 bp, Artificial Sequence
  primer
gttgcagagtgtggcaagaac

SEQ ID NO: 49802 - DNA, 38 bp, Artificial Sequence
  primer
gtaaaacgacggccagtcaaaccctgtcctaatttgcc

SEQ ID NO: 49803 - DNA, 20 bp, Artificial Sequence
  primer
tgctgtcagtcaagggaatg

SEQ ID NO: 49804 - DNA, 21 bp, Artificial Sequence
  primer
caccttgaagactccagatgc

SEQ ID NO: 49805 - DNA, 38 bp, Artificial Sequence
  primer
gtaaaacgacggccagttgaggaggagaagcattccag

SEQ ID NO: 49806 - DNA, 42 bp, Artificial Sequence
  primer
gtaaaacgacggccagtgggaggttatagtaatttgggtcag

SEQ ID NO: 49807 - DNA, 38 bp, Artificial Sequence
  primer
gtaaaacgacggccagtgagctgctctatgctccaacc

SEQ ID NO: 49808 - DNA, 38 bp, Artificial Sequence
  primer
gtaaaacgacggccagtgggctctagaccaaagattcc

SEQ ID NO: 49809 - DNA, 37 bp, Artificial Sequence
  primer
gtaaaacgacggccagtattatgggcatgagccactg

SEQ ID NO: 49810 - DNA, 20 bp, Artificial Sequence
  primer
tttgtgtgggtgtctgttgc

SEQ ID NO: 49811 - DNA, 39 bp, Artificial Sequence
  primer
gtaaaacgacggccagtgaggtatgcattcgaccctatc

SEQ ID NO: 49812 - DNA, 38 bp, Artificial Sequence
  primer
gtaaaacgacggccagtagaagtggacccaaagacctc

SEQ ID NO: 49813 - DNA, 39 bp, Artificial Sequence
  primer
gtaaaacgacggccagtgctagacacatggtcaaggagg

SEQ ID NO: 49814 - DNA, 20 bp, Artificial Sequence
  primer
gatgctgaactgctggaagc

SEQ ID NO: 49815 - DNA, 21 bp, Artificial Sequence
  primer
aagttgctgtccatagccctg

SEQ ID NO: 49816 - DNA, 21 bp, Artificial Sequence
  primer
gaacatcactttgctggttgg

SEQ ID NO: 49817 - DNA, 21 bp, Artificial Sequence
  primer
acaaggcctctaactcccagg

SEQ ID NO: 49818 - DNA, 38 bp, Artificial Sequence
  primer
gtaaaacgacggccagtgtgttgcagacttgtggaccc

SEQ ID NO: 49819 - DNA, 38 bp, Artificial Sequence
  primer
gtaaaacgacggccagtggaacatgtcctaggagtggg

SEQ ID NO: 49820 - DNA, 21 bp, Artificial Sequence
  primer
tgctgaggtcagaagctaccc

SEQ ID NO: 49821 - DNA, 36 bp, Artificial Sequence
  primer
gtaaaacgacggccagtaacctctcagacgggaggc

SEQ ID NO: 49822 - DNA, 22 bp, Artificial Sequence
  primer
ttgcacatggtaaacacacaaa

SEQ ID NO: 49823 - DNA, 21 bp, Artificial Sequence
  primer
ttctagaactgtgtgccagcc

SEQ ID NO: 49824 - DNA, 38 bp, Artificial Sequence
  primer
gtaaaacgacggccagttttggttgtaacgagacaggg

SEQ ID NO: 49825 - DNA, 39 bp, Artificial Sequence
  primer
gtaaaacgacggccagtagcacaagtccatttacactgc

SEQ ID NO: 49826 - DNA, 24 bp, Artificial Sequence
  primer
tgctatacccgtgcctatagaaag

SEQ ID NO: 49827 - DNA, 40 bp, Artificial Sequence
  primer
gtaaaacgacggccagtggactccaggtgaaagtacatgg

SEQ ID NO: 49828 - DNA, 21 bp, Artificial Sequence
  primer
ctttccagacagccatctttg

SEQ ID NO: 49829 - DNA, 38 bp, Artificial Sequence
  primer
gtaaaacgacggccagtgcctggccagctctattctac

SEQ ID NO: 49830 - DNA, 38 bp, Artificial Sequence
  primer
gtaaaacgacggccagtgaagcagtcctgggttgtacc

SEQ ID NO: 49831 - DNA, 21 bp, Artificial Sequence
  primer
ctgatctttatttctcgcgcc

SEQ ID NO: 49832 - DNA, 38 bp, Artificial Sequence
  primer
gtaaaacgacggccagtcagcaattcaacacccaactc

SEQ ID NO: 49833 - DNA, 22 bp, Artificial Sequence
  primer
tcagaggatctactgcttgctg

SEQ ID NO: 49834 - DNA, 23 bp, Artificial Sequence
  primer
aaccgcataccttctatttgtcc

SEQ ID NO: 49835 - DNA, 38 bp, Artificial Sequence
  primer
gtaaaacgacggccagtctggatctgcgagaagaaacc

SEQ ID NO: 49836 - DNA, 23 bp, Artificial Sequence
  primer
ttagctgatacagtgagcagcag

SEQ ID NO: 49837 - DNA, 38 bp, Artificial Sequence
  primer
gtaaaacgacggccagtctgttgcaagcactttgaagg

SEQ ID NO: 49838 - DNA, 40 bp, Artificial Sequence
  primer
gtaaaacgacggccagttgcagctacatgatgagattgag

SEQ ID NO: 49839 - DNA, 38 bp, Artificial Sequence
  primer
gtaaaacgacggccagtttgtctgcagaagctgactcc

SEQ ID NO: 49840 - DNA, 39 bp, Artificial Sequence
  primer
gtaaaacgacggccagttgtctgaccagtgcagtagttg

SEQ ID NO: 49841 - DNA, 38 bp, Artificial Sequence
  primer
gtaaaacgacggccagttcctgggtgtgtcttaactgc

SEQ ID NO: 49842 - DNA, 38 bp, Artificial Sequence
  primer
gtaaaacgacggccagtttaagcttgggacagagaggc

SEQ ID NO: 49843 - DNA, 38 bp, Artificial Sequence
  primer
gtaaaacgacggccagtcttcctggagaaggacctgac

SEQ ID NO: 49844 - DNA, 38 bp, Artificial Sequence
  primer
gtaaaacgacggccagtccaagagtacagggacgaacc

SEQ ID NO: 49845 - DNA, 38 bp, Artificial Sequence
  primer
gtaaaacgacggccagttggagcaatatacaggttggg

SEQ ID NO: 49846 - DNA, 38 bp, Artificial Sequence
  primer
gtaaaacgacggccagttcaccactactcaggcagagg

SEQ ID NO: 49847 - DNA, 21 bp, Artificial Sequence
  primer
agcgagaacaccctaatgtcc

SEQ ID NO: 49848 - DNA, 21 bp, Artificial Sequence
  primer
gagttgtttccgctgtagacg

SEQ ID NO: 49849 - DNA, 38 bp, Artificial Sequence
  primer
gtaaaacgacggccagtttgtgttgaaaccaggacagc

SEQ ID NO: 49850 - DNA, 22 bp, Artificial Sequence
  primer
aaattcccatctgtctttgtcg

SEQ ID NO: 49851 - DNA, 21 bp, Artificial Sequence
  primer
actggtctggaatgccttgag

SEQ ID NO: 49852 - DNA, 39 bp, Artificial Sequence
  primer
gtaaaacgacggccagtgctgctaccaagatggaaagac

SEQ ID NO: 49853 - DNA, 22 bp, Artificial Sequence
  primer
ataagaagagccaggaaccaaa

SEQ ID NO: 49854 - DNA, 38 bp, Artificial Sequence
  primer
gtaaaacgacggccagtgcatcctccatcactttatcg

SEQ ID NO: 49855 - DNA, 20 bp, Artificial Sequence
  primer
ctggtgggctaattgctttg

SEQ ID NO: 49856 - DNA, 38 bp, Artificial Sequence
  primer
gtaaaacgacggccagttggagaggcagagtgtactgc

SEQ ID NO: 49857 - DNA, 38 bp, Artificial Sequence
  primer
gtaaaacgacggccagtgtggtccaacaaagcaatcag

SEQ ID NO: 49858 - DNA, 38 bp, Artificial Sequence
  primer
gtaaaacgacggccagtactaagactgagcgtggagcc

SEQ ID NO: 49859 - DNA, 38 bp, Artificial Sequence
  primer
gtaaaacgacggccagtgcgcttcctaatgggttactg

SEQ ID NO: 49860 - DNA, 37 bp, Artificial Sequence
  primer
gtaaaacgacggccagtgtgtcatcagtggcttgctg

SEQ ID NO: 49861 - DNA, 37 bp, Artificial Sequence
  primer
gtaaaacgacggccagtctgaccttgagctccaccag

SEQ ID NO: 49862 - DNA, 36 bp, Artificial Sequence
  primer
gtaaaacgacggccagtagctgtggctccctttgtg

SEQ ID NO: 49863 - DNA, 38 bp, Artificial Sequence
  primer
gtaaaacgacggccagtggaaggtgacatctcgtccac

SEQ ID NO: 49864 - DNA, 19 bp, Artificial Sequence
  primer
gaccaatgggttgagcagg

SEQ ID NO: 49865 - DNA, 38 bp, Artificial Sequence
  primer
gtaaaacgacggccagtagttccagctgacatggtgac

SEQ ID NO: 49866 - DNA, 38 bp, Artificial Sequence
  primer
gtaaaacgacggccagttggatgtccaagagaaatggg

SEQ ID NO: 49867 - DNA, 21 bp, Artificial Sequence
  primer
tagtttagttcctgcgggtgc

SEQ ID NO: 49868 - DNA, 38 bp, Artificial Sequence
  primer
gtaaaacgacggccagtggtatgtgtcctcccttgcac

SEQ ID NO: 49869 - DNA, 21 bp, Artificial Sequence
  primer
cagaactgagcccagtgagag

SEQ ID NO: 49870 - DNA, 38 bp, Artificial Sequence
  primer
gtaaaacgacggccagtatttccagtcccactgctttc

SEQ ID NO: 49871 - DNA, 37 bp, Artificial Sequence
  primer
gtaaaacgacggccagtcgagaactcaatcggtgagg

SEQ ID NO: 49872 - DNA, 21 bp, Artificial Sequence
  primer
acattgccgctgttagtggag

SEQ ID NO: 49873 - DNA, 21 bp, Artificial Sequence
  primer
cagcaatggtaggaagggaag

SEQ ID NO: 49874 - DNA, 38 bp, Artificial Sequence
  primer
gtaaaacgacggccagtctgggcagtttgtacaggagg

SEQ ID NO: 49875 - DNA, 37 bp, Artificial Sequence
  primer
gtaaaacgacggccagtgaggaggaggtgaagggatg

SEQ ID NO: 49876 - DNA, 35 bp, Artificial Sequence
  primer
gtaaaacgacggccagtgtcggtgggtctgacagc

SEQ ID NO: 49877 - DNA, 38 bp, Artificial Sequence
  primer
gtaaaacgacggccagtcttcggtgacagcaaagtgtc

SEQ ID NO: 49878 - DNA, 38 bp, Artificial Sequence
  primer
gtaaaacgacggccagtagcagatcaacaggtgtggtg

SEQ ID NO: 49879 - DNA, 19 bp, Artificial Sequence
  primer
ccgggaccagtacaaggag

SEQ ID NO: 49880 - DNA, 35 bp, Artificial Sequence
  primer
gtaaaacgacggccagtgtctggttcatgagggcg

SEQ ID NO: 49881 - DNA, 38 bp, Artificial Sequence
  primer
gtaaaacgacggccagttaccttgcctttccctcaaag

SEQ ID NO: 49882 - DNA, 38 bp, Artificial Sequence
  primer
gtaaaacgacggccagttataagtcagtggagcctgcg

SEQ ID NO: 49883 - DNA, 39 bp, Artificial Sequence
  primer
gtaaaacgacggccagtaaagcacctacctacctcaggg

SEQ ID NO: 49884 - DNA, 38 bp, Artificial Sequence
  primer
gtaaaacgacggccagttatgatgaacagtggcccttc

SEQ ID NO: 49885 - DNA, 38 bp, Artificial Sequence
  primer
gtaaaacgacggccagtatggctcagatcttcagctcc

SEQ ID NO: 49886 - DNA, 21 bp, Artificial Sequence
  primer
acccagataatgcagcctgtg

SEQ ID NO: 49887 - DNA, 39 bp, Artificial Sequence
  primer
gtaaaacgacggccagtggacgcagagtctttgctagag

SEQ ID NO: 49888 - DNA, 38 bp, Artificial Sequence
  primer
gtaaaacgacggccagtgacagcaaacacagaccttgg

SEQ ID NO: 49889 - DNA, 38 bp, Artificial Sequence
  primer
gtaaaacgacggccagttccctggtcctaaatttgctc

SEQ ID NO: 49890 - DNA, 38 bp, Artificial Sequence
  primer
gtaaaacgacggccagtccaggcaagtttagggaagtg

SEQ ID NO: 49891 - DNA, 18 bp, Artificial Sequence
  primer
gatggctacctcctcggg

SEQ ID NO: 49892 - DNA, 38 bp, Artificial Sequence
  primer
gtaaaacgacggccagtcagagagggctgcagtacaag

SEQ ID NO: 49893 - DNA, 38 bp, Artificial Sequence
  primer
gtaaaacgacggccagtggtgatctgtgtgtctcggtc

SEQ ID NO: 49894 - DNA, 38 bp, Artificial Sequence
  primer
gtaaaacgacggccagtgatgggtaagtcgagtcaggg

SEQ ID NO: 49895 - DNA, 37 bp, Artificial Sequence
  primer
gtaaaacgacggccagtactagggacttccctcgcag

SEQ ID NO: 49896 - DNA, 21 bp, Artificial Sequence
  primer
gtaggcatcctgccctctaac

SEQ ID NO: 49897 - DNA, 38 bp, Artificial Sequence
  primer
gtaaaacgacggccagtgattctcagctcttggtctgc

SEQ ID NO: 49898 - DNA, 22 bp, Artificial Sequence
  primer
ggtgaaagatgatttccattcc

SEQ ID NO: 49899 - DNA, 38 bp, Artificial Sequence
  primer
gtaaaacgacggccagttatgtcaggctgggagtaggg

SEQ ID NO: 49900 - DNA, 38 bp, Artificial Sequence
  primer
gtaaaacgacggccagttgcctggtttcatgtttgttc

SEQ ID NO: 49901 - DNA, 38 bp, Artificial Sequence
  primer
gtaaaacgacggccagttgacagacctgaaatgatggg

SEQ ID NO: 49902 - DNA, 43 bp, Artificial Sequence
  primer
gtaaaacgacggccagttttgatttacagggaaggaaatctac

SEQ ID NO: 49903 - DNA, 40 bp, Artificial Sequence
  primer
gtaaaacgacggccagttgttccattgtaatggcatattt

SEQ ID NO: 49904 - DNA, 40 bp, Artificial Sequence
  primer
gtaaaacgacggccagtaattgatgcatgttgcttatgaa

SEQ ID NO: 49905 - DNA, 37 bp, Artificial Sequence
  primer
gtaaaacgacggccagtgaatacaggcatgcaccacc

SEQ ID NO: 49906 - DNA, 21 bp, Artificial Sequence
  primer
ttctcctttaggtcacggcag

SEQ ID NO: 49907 - DNA, 38 bp, Artificial Sequence
  primer
gtaaaacgacggccagtacgtcaaggaagtggatggac

SEQ ID NO: 49908 - DNA, 38 bp, Artificial Sequence
  primer
gtaaaacgacggccagtcacgacaagttcaaggtccag

SEQ ID NO: 49909 - DNA, 21 bp, Artificial Sequence
  primer
ttcaccatcgaaagtactcgg

SEQ ID NO: 49910 - DNA, 19 bp, Artificial Sequence
  primer
tgtgcctggagcatttgtc

SEQ ID NO: 49911 - DNA, 38 bp, Artificial Sequence
  primer
gtaaaacgacggccagtatctgtggctgggagaaagtg

SEQ ID NO: 49912 - DNA, 21 bp, Artificial Sequence
  primer
gagccaaggttgtgccattac

SEQ ID NO: 49913 - DNA, 39 bp, Artificial Sequence
  primer
gtaaaacgacggccagtgccagggtaagtggatgttatc

SEQ ID NO: 49914 - DNA, 40 bp, Artificial Sequence
  primer
gtaaaacgacggccagtgtggtgaaagacatgaaccttct

SEQ ID NO: 49915 - DNA, 38 bp, Artificial Sequence
  primer
gtaaaacgacggccagttgaaaggtgtcacgggtagtg

SEQ ID NO: 49916 - DNA, 21 bp, Artificial Sequence
  primer
tccattcccagatctcaaagg

SEQ ID NO: 49917 - DNA, 20 bp, Artificial Sequence
  primer
tgtgtctggccagtcttacg

SEQ ID NO: 49918 - DNA, 21 bp, Artificial Sequence
  primer
tgtgtgcaaagaatccgaaac

SEQ ID NO: 49919 - DNA, 38 bp, Artificial Sequence
  primer
gtaaaacgacggccagtggcgctggaattgacagatac

SEQ ID NO: 49920 - DNA, 18 bp, Artificial Sequence
  primer
caagtgatctgctcgccc

SEQ ID NO: 49921 - DNA, 38 bp, Artificial Sequence
  primer
gtaaaacgacggccagtgaaggtaggtggccagtatcg

SEQ ID NO: 49922 - DNA, 39 bp, Artificial Sequence
  primer
gtaaaacgacggccagtttataatgctgggtcccttgtg

SEQ ID NO: 49923 - DNA, 37 bp, Artificial Sequence
  primer
gtaaaacgacggccagtccaccacacccgtctacttg

SEQ ID NO: 49924 - DNA, 21 bp, Artificial Sequence
  primer
ggtttcagaggtatggcctcc

SEQ ID NO: 49925 - DNA, 38 bp, Artificial Sequence
  primer
gtaaaacgacggccagtcccttcctgcagtttgaaatc

SEQ ID NO: 49926 - DNA, 21 bp, Artificial Sequence
  primer
gggtatttcatctcgggaagg

SEQ ID NO: 49927 - DNA, 40 bp, Artificial Sequence
  primer
gtaaaacgacggccagtggtaaagcaacttcaattgaccc

SEQ ID NO: 49928 - DNA, 38 bp, Artificial Sequence
  primer
gtaaaacgacggccagttaacagtccacaaacccggag

SEQ ID NO: 49929 - DNA, 21 bp, Artificial Sequence
  primer
accctacctggccactacttg

SEQ ID NO: 49930 - DNA, 38 bp, Artificial Sequence
  primer
gtaaaacgacggccagtcatactgatttgtggcaaggg

SEQ ID NO: 49931 - DNA, 21 bp, Artificial Sequence
  primer
tgggagaacgagagctttgtc

SEQ ID NO: 49932 - DNA, 21 bp, Artificial Sequence
  primer
tggtttcttgacacttgaccc

SEQ ID NO: 49933 - DNA, 39 bp, Artificial Sequence
  primer
gtaaaacgacggccagtcaccaacagttactgatcacgc

SEQ ID NO: 49934 - DNA, 38 bp, Artificial Sequence
  primer
gtaaaacgacggccagtcactttcacaagaggtggctg

SEQ ID NO: 49935 - DNA, 39 bp, Artificial Sequence
  primer
gtaaaacgacggccagttttgtgttctcctggatatggg

SEQ ID NO: 49936 - DNA, 20 bp, Artificial Sequence
  primer
ccatgcctggctactttctg

SEQ ID NO: 49937 - DNA, 38 bp, Artificial Sequence
  primer
gtaaaacgacggccagtgtcgtatgaccttctcctggg

SEQ ID NO: 49938 - DNA, 38 bp, Artificial Sequence
  primer
gtaaaacgacggccagtctgtgatgcaagaagactggg

SEQ ID NO: 49939 - DNA, 24 bp, Artificial Sequence
  primer
tgaaagttcaagtttgtgttcagg

SEQ ID NO: 49940 - DNA, 38 bp, Artificial Sequence
  primer
gtaaaacgacggccagtacatggaggtaaagaggccag

SEQ ID NO: 49941 - DNA, 38 bp, Artificial Sequence
  primer
gtaaaacgacggccagtttgtttctatccacaaggccc

SEQ ID NO: 49942 - DNA, 21 bp, Artificial Sequence
  primer
tgtcaagtctgcatagctggg

SEQ ID NO: 49943 - DNA, 21 bp, Artificial Sequence
  primer
ccaccatgtccagctatcttc

SEQ ID NO: 49944 - DNA, 38 bp, Artificial Sequence
  primer
gtaaaacgacggccagtgactgcatcctttggaagagc

SEQ ID NO: 49945 - DNA, 21 bp, Artificial Sequence
  primer
attgaggtcctcttcattgcc

SEQ ID NO: 49946 - DNA, 38 bp, Artificial Sequence
  primer
gtaaaacgacggccagtcaggaccgtgtcttactggtc

SEQ ID NO: 49947 - DNA, 21 bp, Artificial Sequence
  primer
gcctcttaatcccagcaacag

SEQ ID NO: 49948 - DNA, 38 bp, Artificial Sequence
  primer
gtaaaacgacggccagtattaggtgacgtgttgcgttg

SEQ ID NO: 49949 - DNA, 19 bp, Artificial Sequence
  primer
tctgggtcaggaaagtcgg

SEQ ID NO: 49950 - DNA, 36 bp, Artificial Sequence
  primer
gtaaaacgacggccagtcatgtcacacccatctgcc

SEQ ID NO: 49951 - DNA, 37 bp, Artificial Sequence
  primer
gtaaaacgacggccagtagtgagctgcagtgaggacc

SEQ ID NO: 49952 - DNA, 39 bp, Artificial Sequence
  primer
gtaaaacgacggccagtgttggcagagtgaagaatgttg

SEQ ID NO: 49953 - DNA, 22 bp, Artificial Sequence
  primer
ggttcattctcaccatgctttg

SEQ ID NO: 49954 - DNA, 38 bp, Artificial Sequence
  primer
gtaaaacgacggccagtcctgagaaccaagggtcagtc

SEQ ID NO: 49955 - DNA, 38 bp, Artificial Sequence
  primer
gtaaaacgacggccagtgtgattaacacagccaggagc

SEQ ID NO: 49956 - DNA, 21 bp, Artificial Sequence
  primer
atgaaccgatttgcaggattc

SEQ ID NO: 49957 - DNA, 38 bp, Artificial Sequence
  primer
gtaaaacgacggccagtgtgaggcaagctggtgtttag

SEQ ID NO: 49958 - DNA, 21 bp, Artificial Sequence
  primer
actctcgggtggtggtaacag

SEQ ID NO: 49959 - DNA, 21 bp, Artificial Sequence
  primer
gacagcaacatagcatttggg

SEQ ID NO: 49960 - DNA, 38 bp, Artificial Sequence
  primer
gtaaaacgacggccagtccaactgtaaggaatgggacc

SEQ ID NO: 49961 - DNA, 38 bp, Artificial Sequence
  primer
gtaaaacgacggccagtcacgtttgtggcaaacacttc

SEQ ID NO: 49962 - DNA, 37 bp, Artificial Sequence
  primer
gtaaaacgacggccagttcaccatggagtccctcaag

SEQ ID NO: 49963 - DNA, 22 bp, Artificial Sequence
  primer
tcttccaggtagagtgaggtcc

SEQ ID NO: 49964 - DNA, 20 bp, Artificial Sequence
  primer
ataggcctgagccactgtgc

SEQ ID NO: 49965 - DNA, 38 bp, Artificial Sequence
  primer
gtaaaacgacggccagtaggcagacgaggtgattgttc

SEQ ID NO: 49966 - DNA, 38 bp, Artificial Sequence
  primer
gtaaaacgacggccagtctttgggaagaacagtccagg

SEQ ID NO: 49967 - DNA, 21 bp, Artificial Sequence
  primer
ctcgctgcagattctcaactc

SEQ ID NO: 49968 - DNA, 38 bp, Artificial Sequence
  primer
gtaaaacgacggccagtctctgtgcctggttatgatgc

SEQ ID NO: 49969 - DNA, 21 bp, Artificial Sequence
  primer
tctctttggctgaagaaagcc

SEQ ID NO: 49970 - DNA, 21 bp, Artificial Sequence
  primer
ggtggttgaaggagtggagac

SEQ ID NO: 49971 - DNA, 37 bp, Artificial Sequence
  primer
gtaaaacgacggccagttggcatctgcactgttcttg

SEQ ID NO: 49972 - DNA, 21 bp, Artificial Sequence
  primer
ggagtgaggaggaaagctgtg

SEQ ID NO: 49973 - DNA, 38 bp, Artificial Sequence
  primer
gtaaaacgacggccagtctgctggaatggagacagttg

SEQ ID NO: 49974 - DNA, 38 bp, Artificial Sequence
  primer
gtaaaacgacggccagtcactcaccatgtggcctttac

SEQ ID NO: 49975 - DNA, 21 bp, Artificial Sequence
  primer
acacaagctcggttccaagtc

SEQ ID NO: 49976 - DNA, 20 bp, Artificial Sequence
  primer
gggaaaggcagtaggtggag

SEQ ID NO: 49977 - DNA, 38 bp, Artificial Sequence
  primer
gtaaaacgacggccagtgccaaggagctaaaggtgaag

SEQ ID NO: 49978 - DNA, 38 bp, Artificial Sequence
  primer
gtaaaacgacggccagttacatgcacttagggtgaccg

SEQ ID NO: 49979 - DNA, 38 bp, Artificial Sequence
  primer
gtaaaacgacggccagtacctgtccaaacctctccttg

SEQ ID NO: 49980 - DNA, 21 bp, Artificial Sequence
  primer
ggaagttgcgattcttgctta

SEQ ID NO: 49981 - DNA, 38 bp, Artificial Sequence
  primer
gtaaaacgacggccagtgggctttcaccttgtcttcac

SEQ ID NO: 49982 - DNA, 38 bp, Artificial Sequence
  primer
gtaaaacgacggccagttcccatctcaatgtctcctgg

SEQ ID NO: 49983 - DNA, 38 bp, Artificial Sequence
  primer
gtaaaacgacggccagtaaaggatggctcctcgatttc

SEQ ID NO: 49984 - DNA, 22 bp, Artificial Sequence
  primer
cagaagctgagggtatttgtgg

SEQ ID NO: 49985 - DNA, 21 bp, Artificial Sequence
  primer
ccctacctcccactatcaacc

SEQ ID NO: 49986 - DNA, 21 bp, Artificial Sequence
  primer
tgccactcgtttgataagcag

SEQ ID NO: 49987 - DNA, 39 bp, Artificial Sequence
  primer
gtaaaacgacggccagtgcctcagagagtattgtgtgcc

SEQ ID NO: 49988 - DNA, 38 bp, Artificial Sequence
  primer
gtaaaacgacggccagtaacaagattgcaggaggttgc

SEQ ID NO: 49989 - DNA, 21 bp, Artificial Sequence
  primer
ctccaaagaaagtcctgtgcc

SEQ ID NO: 49990 - DNA, 38 bp, Artificial Sequence
  primer
gtaaaacgacggccagttctgactgagcaaggtgaagc

SEQ ID NO: 49991 - DNA, 21 bp, Artificial Sequence
  primer
gtaaagcatggtttctggcac

SEQ ID NO: 49992 - DNA, 21 bp, Artificial Sequence
  primer
tttggtggtgtgtggttgttc

SEQ ID NO: 49993 - DNA, 21 bp, Artificial Sequence
  primer
tctcgaggactttcatctcgg

SEQ ID NO: 49994 - DNA, 39 bp, Artificial Sequence
  primer
gtaaaacgacggccagtttaatgcacatgaaggcagttg

SEQ ID NO: 49995 - DNA, 38 bp, Artificial Sequence
  primer
gtaaaacgacggccagtcattcaggcttcaaggctttc

SEQ ID NO: 49996 - DNA, 21 bp, Artificial Sequence
  primer
gtgtcctcgctgccttatttc

SEQ ID NO: 49997 - DNA, 38 bp, Artificial Sequence
  primer
gtaaaacgacggccagtccctacaggctctggcttatc

SEQ ID NO: 49998 - DNA, 36 bp, Artificial Sequence
  primer
gtaaaacgacggccagttccacagcttagcgcactg

SEQ ID NO: 49999 - DNA, 37 bp, Artificial Sequence
  primer
gtaaaacgacggccagtgaggagcacgtcagatcagc

SEQ ID NO: 50000 - DNA, 38 bp, Artificial Sequence
  primer
gtaaaacgacggccagtgtggcattgactgagaactgc

SEQ ID NO: 50001 - DNA, 21 bp, Artificial Sequence
  primer
ggtgagaatcctgcctacctg

SEQ ID NO: 50002 - DNA, 37 bp, Artificial Sequence
  primer
gtaaaacgacggccagtatttccaagtcagcagagcc

SEQ ID NO: 50003 - DNA, 20 bp, Artificial Sequence
  primer
ctgacccacttccctcttcc

SEQ ID NO: 50004 - DNA, 38 bp, Artificial Sequence
  primer
gtaaaacgacggccagtgagattatcacacctggcacc

SEQ ID NO: 50005 - DNA, 25 bp, Artificial Sequence
  primer
aaattgttaccagagagggataagc

SEQ ID NO: 50006 - DNA, 35 bp, Artificial Sequence
  primer
gtaaaacgacggccagtgaggccctaggaaatggg

SEQ ID NO: 50007 - DNA, 36 bp, Artificial Sequence
  primer
gtaaaacgacggccagtctcgctcgctccatcagtc

SEQ ID NO: 50008 - DNA, 21 bp, Artificial Sequence
  primer
tggtaacgactccacctctcc

SEQ ID NO: 50009 - DNA, 38 bp, Artificial Sequence
  primer
gtaaaacgacggccagtttgaagctagttccagttggg

SEQ ID NO: 50010 - DNA, 39 bp, Artificial Sequence
  primer
gtaaaacgacggccagttctcctgtggagatgcactaaa

SEQ ID NO: 50011 - DNA, 39 bp, Artificial Sequence
  primer
gtaaaacgacggccagtttactgtgggtccagtgtttgt

SEQ ID NO: 50012 - DNA, 38 bp, Artificial Sequence
  primer
gtaaaacgacggccagtgtgtcctgctgttcattcacc

SEQ ID NO: 50013 - DNA, 46 bp, Artificial Sequence
  primer
gtaaaacgacggccagttggtgtcagtatttctagatttaccttta

SEQ ID NO: 50014 - DNA, 43 bp, Artificial Sequence
  primer
gtaaaacgacggccagttttccataattgttcaaattgacttc

SEQ ID NO: 50015 - DNA, 36 bp, Artificial Sequence
  primer
gtaaaacgacggccagtctgaaggccttgggtaggg

SEQ ID NO: 50016 - DNA, 23 bp, Artificial Sequence
  primer
tgagaaggaaattatggcagaag

SEQ ID NO: 50017 - DNA, 37 bp, Artificial Sequence
  primer
gtaaaacgacggccagttttgtcaatggcttgcagtg

SEQ ID NO: 50018 - DNA, 27 bp, Artificial Sequence
  primer
aagatcaaactagacttgaatttggaa

SEQ ID NO: 50019 - DNA, 21 bp, Artificial Sequence
  primer
acttgaagtgatcctcccacc

SEQ ID NO: 50020 - DNA, 38 bp, Artificial Sequence
  primer
gtaaaacgacggccagtagacctagaggacacgttggg

SEQ ID NO: 50021 - DNA, 21 bp, Artificial Sequence
  primer
ggagaagaagctgctgctagg

SEQ ID NO: 50022 - DNA, 38 bp, Artificial Sequence
  primer
gtaaaacgacggccagtggaatttgctgcctttaccac

SEQ ID NO: 50023 - DNA, 39 bp, Artificial Sequence
  primer
gtaaaacgacggccagtttcctgatgtgtctgtttctgc

SEQ ID NO: 50024 - DNA, 38 bp, Artificial Sequence
  primer
gtaaaacgacggccagttttgtcacacacaactgcctg

SEQ ID NO: 50025 - DNA, 38 bp, Artificial Sequence
  primer
gtaaaacgacggccagttaatgcttggaccctgagctg

SEQ ID NO: 50026 - DNA, 21 bp, Artificial Sequence
  primer
gcccactagcatcaacatagc

SEQ ID NO: 50027 - DNA, 22 bp, Artificial Sequence
  primer
tgtgagaagtgtcctacccagg

SEQ ID NO: 50028 - DNA, 37 bp, Artificial Sequence
  primer
gtaaaacgacggccagtaatgccagttggctacatgc

SEQ ID NO: 50029 - DNA, 22 bp, Artificial Sequence
  primer
ttcaccatataccaaacggctc

SEQ ID NO: 50030 - DNA, 21 bp, Artificial Sequence
  primer
gaagcatgtctccatttgtgg

SEQ ID NO: 50031 - DNA, 21 bp, Artificial Sequence
  primer
ggctaatgccaagctgagaac

SEQ ID NO: 50032 - DNA, 38 bp, Artificial Sequence
  primer
gtaaaacgacggccagtgccagagagcagtcaagtcac

SEQ ID NO: 50033 - DNA, 38 bp, Artificial Sequence
  primer
gtaaaacgacggccagtcacctgaaggtctgagcgaag

SEQ ID NO: 50034 - DNA, 21 bp, Artificial Sequence
  primer
caagcgggattgtgaggtaag

SEQ ID NO: 50035 - DNA, 38 bp, Artificial Sequence
  primer
gtaaaacgacggccagtgctcaagaattcgaaagcgtc

SEQ ID NO: 50036 - DNA, 37 bp, Artificial Sequence
  primer
gtaaaacgacggccagttgcataccctcttcccacag

SEQ ID NO: 50037 - DNA, 21 bp, Artificial Sequence
  primer
cactaccaggaaatgggaagg

SEQ ID NO: 50038 - DNA, 21 bp, Artificial Sequence
  primer
ccaagtgtttgggcataggac

SEQ ID NO: 50039 - DNA, 35 bp, Artificial Sequence
  primer
gtaaaacgacggccagtctctcgcagctctcgtcg

SEQ ID NO: 50040 - DNA, 38 bp, Artificial Sequence
  primer
gtaaaacgacggccagtcatttccattacagcagtcgc

SEQ ID NO: 50041 - DNA, 21 bp, Artificial Sequence
  primer
agggaagctgttgcatttcag

SEQ ID NO: 50042 - DNA, 39 bp, Artificial Sequence
  primer
gtaaaacgacggccagtcctggtaccttggtagatgcac

SEQ ID NO: 50043 - DNA, 40 bp, Artificial Sequence
  primer
gtaaaacgacggccagttggtaaagctttcaacacactgc

SEQ ID NO: 50044 - DNA, 21 bp, Artificial Sequence
  primer
tttgagtctcacagccaaagc

SEQ ID NO: 50045 - DNA, 37 bp, Artificial Sequence
  primer
gtaaaacgacggccagttcactgggcaggtaccagtt

SEQ ID NO: 50046 - DNA, 24 bp, Artificial Sequence
  primer
tggagcagactcagttgattagtt

SEQ ID NO: 50047 - DNA, 39 bp, Artificial Sequence
  primer
gtaaaacgacggccagtctagctcctgaaatcccatctg

SEQ ID NO: 50048 - DNA, 38 bp, Artificial Sequence
  primer
gtaaaacgacggccagtttccgactttgctttcagagg

SEQ ID NO: 50049 - DNA, 21 bp, Artificial Sequence
  primer
acagcaggttgggctctattg

SEQ ID NO: 50050 - DNA, 38 bp, Artificial Sequence
  primer
gtaaaacgacggccagtccaagtttgaatggcccttag

SEQ ID NO: 50051 - DNA, 38 bp, Artificial Sequence
  primer
gtaaaacgacggccagtgcctcgaacaccaaagactaa

SEQ ID NO: 50052 - DNA, 38 bp, Artificial Sequence
  primer
gtaaaacgacggccagtggtctagggtgcgaagaactg

SEQ ID NO: 50053 - DNA, 39 bp, Artificial Sequence
  primer
gtaaaacgacggccagtgggagccatactccctgtctac

SEQ ID NO: 50054 - DNA, 21 bp, Artificial Sequence
  primer
ccctagatacctgcaaggctg

SEQ ID NO: 50055 - DNA, 21 bp, Artificial Sequence
  primer
acaggagatggtattgtgggc

SEQ ID NO: 50056 - DNA, 38 bp, Artificial Sequence
  primer
gtaaaacgacggccagtttacccaagtacccttggtgg

SEQ ID NO: 50057 - DNA, 20 bp, Artificial Sequence
  primer
cctcctccagaagctgatcc

SEQ ID NO: 50058 - DNA, 20 bp, Artificial Sequence
  primer
cattagtttgggtccctcgg

SEQ ID NO: 50059 - DNA, 38 bp, Artificial Sequence
  primer
gtaaaacgacggccagtttgtccacttggccttgtatc

SEQ ID NO: 50060 - DNA, 38 bp, Artificial Sequence
  primer
gtaaaacgacggccagtttgccaggtgaggagcttaac

SEQ ID NO: 50061 - DNA, 21 bp, Artificial Sequence
  primer
gcaagttgtatttgaggtgcc

SEQ ID NO: 50062 - DNA, 38 bp, Artificial Sequence
  primer
gtaaaacgacggccagtgggtgggatacaattcacagc

SEQ ID NO: 50063 - DNA, 21 bp, Artificial Sequence
  primer
gagtccatcttgtccctcacc

SEQ ID NO: 50064 - DNA, 38 bp, Artificial Sequence
  primer
gtaaaacgacggccagtgttcctgagtctcgaagaggc

SEQ ID NO: 50065 - DNA, 37 bp, Artificial Sequence
  primer
gtaaaacgacggccagtagggcgtcttagagaccgag

SEQ ID NO: 50066 - DNA, 38 bp, Artificial Sequence
  primer
gtaaaacgacggccagttagcttctccgatctcgcttc

SEQ ID NO: 50067 - DNA, 38 bp, Artificial Sequence
  primer
gtaaaacgacggccagttttacatgccctcgtgtgtgt

SEQ ID NO: 50068 - DNA, 21 bp, Artificial Sequence
  primer
gtcctgcactggctattgaac

SEQ ID NO: 50069 - DNA, 20 bp, Artificial Sequence
  primer
gccttcagaggactcaggtg

SEQ ID NO: 50070 - DNA, 42 bp, Artificial Sequence
  primer
gtaaaacgacggccagttgaccattaggctcaaattgtattc

SEQ ID NO: 50071 - DNA, 21 bp, Artificial Sequence
  primer
tcctatggccagtaagtgcat

SEQ ID NO: 50072 - DNA, 21 bp, Artificial Sequence
  primer
tggagttctccattatgcctg

SEQ ID NO: 50073 - DNA, 23 bp, Artificial Sequence
  primer
ggtttgtccagatttggagattt

SEQ ID NO: 50074 - DNA, 19 bp, Artificial Sequence
  primer
cgacagagcgagactgtcc

SEQ ID NO: 50075 - DNA, 40 bp, Artificial Sequence
  primer
gtaaaacgacggccagtgagtagcgtatcctgatcatccc

SEQ ID NO: 50076 - DNA, 22 bp, Artificial Sequence
  primer
gtaactgtggttgtggatgagc

SEQ ID NO: 50077 - DNA, 38 bp, Artificial Sequence
  primer
gtaaaacgacggccagtaagctgggaatgaaattcctg

SEQ ID NO: 50078 - DNA, 21 bp, Artificial Sequence
  primer
gtgtgtttgacgtcagggaag

SEQ ID NO: 50079 - DNA, 39 bp, Artificial Sequence
  primer
gtaaaacgacggccagtgagtttccctgaatgtgttctg

SEQ ID NO: 50080 - DNA, 38 bp, Artificial Sequence
  primer
gtaaaacgacggccagtaccctttgcctttccatcatt

SEQ ID NO: 50081 - DNA, 43 bp, Artificial Sequence
  primer
gtaaaacgacggccagtgatcttagatttagttctggccattt

SEQ ID NO: 50082 - DNA, 38 bp, Artificial Sequence
  primer
gtaaaacgacggccagtaagggactgcttgtatcaggg

SEQ ID NO: 50083 - DNA, 37 bp, Artificial Sequence
  primer
gtaaaacgacggccagtctggaattacagacacccgc

SEQ ID NO: 50084 - DNA, 38 bp, Artificial Sequence
  primer
gtaaaacgacggccagttcacttgtgattgtggatggg

SEQ ID NO: 50085 - DNA, 37 bp, Artificial Sequence
  primer
gtaaaacgacggccagtcgtgagaaagaactcagccg

SEQ ID NO: 50086 - DNA, 38 bp, Artificial Sequence
  primer
gtaaaacgacggccagttcatcaaccgtgattcctacg

SEQ ID NO: 50087 - DNA, 37 bp, Artificial Sequence
  primer
gtaaaacgacggccagtatgctgacaatggagttggg

SEQ ID NO: 50088 - DNA, 18 bp, Artificial Sequence
  primer
cagcccgggtgacaagag

SEQ ID NO: 50089 - DNA, 20 bp, Artificial Sequence
  primer
tctgtggccaaagttcatcc

SEQ ID NO: 50090 - DNA, 38 bp, Artificial Sequence
  primer
gtaaaacgacggccagtatgcatgggattcttcctcag

SEQ ID NO: 50091 - DNA, 38 bp, Artificial Sequence
  primer
gtaaaacgacggccagtagctttcctctgggatgagtg

SEQ ID NO: 50092 - DNA, 38 bp, Artificial Sequence
  primer
gtaaaacgacggccagttaggtctcagggagatggtgg

SEQ ID NO: 50093 - DNA, 38 bp, Artificial Sequence
  primer
gtaaaacgacggccagttctccacctgttcgattgttg

SEQ ID NO: 50094 - DNA, 38 bp, Artificial Sequence
  primer
gtaaaacgacggccagtcactgtttcctgaagtggagg

SEQ ID NO: 50095 - DNA, 38 bp, Artificial Sequence
  primer
gtaaaacgacggccagtggagaacaagtgggagggtag

SEQ ID NO: 50096 - DNA, 38 bp, Artificial Sequence
  primer
gtaaaacgacggccagtgtcctgcgtttccattaaacc

SEQ ID NO: 50097 - DNA, 21 bp, Artificial Sequence
  primer
taaacttggtccttggccttg

SEQ ID NO: 50098 - DNA, 38 bp, Artificial Sequence
  primer
gtaaaacgacggccagtagagtggaaggtctggagcag

SEQ ID NO: 50099 - DNA, 38 bp, Artificial Sequence
  primer
gtaaaacgacggccagtgtggaaggaaatgagacctgc

SEQ ID NO: 50100 - DNA, 38 bp, Artificial Sequence
  primer
gtaaaacgacggccagtctgttcgcacctcaagttctc

SEQ ID NO: 50101 - DNA, 21 bp, Artificial Sequence
  primer
tctggtctggaggatcagaaa

SEQ ID NO: 50102 - DNA, 38 bp, Artificial Sequence
  primer
gtaaaacgacggccagtagagaggtgagatttgcccac

SEQ ID NO: 50103 - DNA, 38 bp, Artificial Sequence
  primer
gtaaaacgacggccagttgaggaggccgctgtattatc

SEQ ID NO: 50104 - DNA, 37 bp, Artificial Sequence
  primer
gtaaaacgacggccagtcagacggaaaccatggagac

SEQ ID NO: 50105 - DNA, 38 bp, Artificial Sequence
  primer
gtaaaacgacggccagtgcatcttcgagcctgtttagc

SEQ ID NO: 50106 - DNA, 37 bp, Artificial Sequence
  primer
gtaaaacgacggccagtacaggctccagctgttcatc

SEQ ID NO: 50107 - DNA, 38 bp, Artificial Sequence
  primer
gtaaaacgacggccagtctaggagaatggagggctgtg

SEQ ID NO: 50108 - DNA, 21 bp, Artificial Sequence
  primer
ccaactgtcacccacaatctg

SEQ ID NO: 50109 - DNA, 38 bp, Artificial Sequence
  primer
gtaaaacgacggccagtgagctggcaaagaacacagag

SEQ ID NO: 50110 - DNA, 41 bp, Artificial Sequence
  primer
gtaaaacgacggccagtgggccatgttaattaatgattctc

SEQ ID NO: 50111 - DNA, 21 bp, Artificial Sequence
  primer
ataagtgccttccctgtggag

SEQ ID NO: 50112 - DNA, 38 bp, Artificial Sequence
  primer
gtaaaacgacggccagttgagctgtggctctggtacac

SEQ ID NO: 50113 - DNA, 38 bp, Artificial Sequence
  primer
gtaaaacgacggccagtaccaggagttacagcaggtgg

SEQ ID NO: 50114 - DNA, 21 bp, Artificial Sequence
  primer
tttccatcttgcccataaacc

SEQ ID NO: 50115 - DNA, 20 bp, Artificial Sequence
  primer
atgtgggatgaatgaggtgg

SEQ ID NO: 50116 - DNA, 37 bp, Artificial Sequence
  primer
gtaaaacgacggccagtggtgcgttaatcacgctttc

SEQ ID NO: 50117 - DNA, 21 bp, Artificial Sequence
  primer
ctgattggaaagtgggtttgg

SEQ ID NO: 50118 - DNA, 38 bp, Artificial Sequence
  primer
gtaaaacgacggccagtggacctggcttcttgtctctg

SEQ ID NO: 50119 - DNA, 21 bp, Artificial Sequence
  primer
gattgggattctcaccttccc

SEQ ID NO: 50120 - DNA, 38 bp, Artificial Sequence
  primer
gtaaaacgacggccagtaacgtattctctctggcaccg

SEQ ID NO: 50121 - DNA, 37 bp, Artificial Sequence
  primer
gtaaaacgacggccagtggagcgatgagagaagggac

SEQ ID NO: 50122 - DNA, 21 bp, Artificial Sequence
  primer
gagtgtaggcttgtgtctccg

SEQ ID NO: 50123 - DNA, 22 bp, Artificial Sequence
  primer
ttgtgaacttgtagcatccgag

SEQ ID NO: 50124 - DNA, 38 bp, Artificial Sequence
  primer
gtaaaacgacggccagtggagagggaaagtaaccaggg

SEQ ID NO: 50125 - DNA, 38 bp, Artificial Sequence
  primer
gtaaaacgacggccagtggctttccacactctggtgtc

SEQ ID NO: 50126 - DNA, 38 bp, Artificial Sequence
  primer
gtaaaacgacggccagtcctctctctttcttccacccg

SEQ ID NO: 50127 - DNA, 38 bp, Artificial Sequence
  primer
gtaaaacgacggccagtagggaaaggaagtgggagttg

SEQ ID NO: 50128 - DNA, 21 bp, Artificial Sequence
  primer
tgcctgaccctcctctctaag

SEQ ID NO: 50129 - DNA, 21 bp, Artificial Sequence
  primer
catgttcctctcaactcgctg

SEQ ID NO: 50130 - DNA, 38 bp, Artificial Sequence
  primer
gtaaaacgacggccagttgagccaagctctttattggc

SEQ ID NO: 50131 - DNA, 18 bp, Artificial Sequence
  primer
tgcagtccagccttggag

SEQ ID NO: 50132 - DNA, 38 bp, Artificial Sequence
  primer
gtaaaacgacggccagtactttgttcccagcctgacac

SEQ ID NO: 50133 - DNA, 21 bp, Artificial Sequence
  primer
ctagaaggagtcagggcatgg

SEQ ID NO: 50134 - DNA, 38 bp, Artificial Sequence
  primer
gtaaaacgacggccagttcctctgcttcagtttcaggg

SEQ ID NO: 50135 - DNA, 38 bp, Artificial Sequence
  primer
gtaaaacgacggccagttgttgggtgtaggatggtgtc

SEQ ID NO: 50136 - DNA, 37 bp, Artificial Sequence
  primer
gtaaaacgacggccagtctgggaaacacttcgtcagc

SEQ ID NO: 50137 - DNA, 38 bp, Artificial Sequence
  primer
gtaaaacgacggccagtaaagtgagtggatgcgtgttg

SEQ ID NO: 50138 - DNA, 21 bp, Artificial Sequence
  primer
ctctcatctctcatcgcaccc

SEQ ID NO: 50139 - DNA, 38 bp, Artificial Sequence
  primer
gtaaaacgacggccagtaacagaaaggaaggcggactc

SEQ ID NO: 50140 - DNA, 20 bp, Artificial Sequence
  primer
ttccaccaacaccgtcactc

SEQ ID NO: 50141 - DNA, 20 bp, Artificial Sequence
  primer
gaatgggccagtcttctttg

SEQ ID NO: 50142 - DNA, 38 bp, Artificial Sequence
  primer
gtaaaacgacggccagtgtggctatgcgtgagtagtgg

SEQ ID NO: 50143 - DNA, 37 bp, Artificial Sequence
  primer
gtaaaacgacggccagtacagacccaggtggaaggag

SEQ ID NO: 50144 - DNA, 38 bp, Artificial Sequence
  primer
gtaaaacgacggccagttctaggaaagggtggtggaag

SEQ ID NO: 50145 - DNA, 38 bp, Artificial Sequence
  primer
gtaaaacgacggccagtgggaaagatcctctttgaacc

SEQ ID NO: 50146 - DNA, 38 bp, Artificial Sequence
  primer
gtaaaacgacggccagtacaagtaggctccgagaccag

SEQ ID NO: 50147 - DNA, 38 bp, Artificial Sequence
  primer
gtaaaacgacggccagtgactggaacatccaagggttg

SEQ ID NO: 50148 - DNA, 19 bp, Artificial Sequence
  primer
gaaggaggccaggtgtgag

SEQ ID NO: 50149 - DNA, 38 bp, Artificial Sequence
  primer
gtaaaacgacggccagtcctgtccctccattcagacag

SEQ ID NO: 50150 - DNA, 38 bp, Artificial Sequence
  primer
gtaaaacgacggccagtggtggaaagagatgaggaagg

SEQ ID NO: 50151 - DNA, 37 bp, Artificial Sequence
  primer
gtaaaacgacggccagtcagcctccacccagtctacc

SEQ ID NO: 50152 - DNA, 38 bp, Artificial Sequence
  primer
gtaaaacgacggccagtgagatcaacactgacttggcg

SEQ ID NO: 50153 - DNA, 38 bp, Artificial Sequence
  primer
gtaaaacgacggccagtggtcctctgtgtgaagctgtg

SEQ ID NO: 50154 - DNA, 21 bp, Artificial Sequence
  primer
cactctggcctaggtgacaag

SEQ ID NO: 50155 - DNA, 36 bp, Artificial Sequence
  primer
gtaaaacgacggccagtctccattcagccacatgcc

SEQ ID NO: 50156 - DNA, 21 bp, Artificial Sequence
  primer
tgaatatgaagtcggtcggtg

SEQ ID NO: 50157 - DNA, 21 bp, Artificial Sequence
  primer
tgtccctgtacctcccacttc

SEQ ID NO: 50158 - DNA, 38 bp, Artificial Sequence
  primer
gtaaaacgacggccagtgtacatggcagtgctagtggc

SEQ ID NO: 50159 - DNA, 38 bp, Artificial Sequence
  primer
gtaaaacgacggccagtaatatccgtggacacaaagcc

SEQ ID NO: 50160 - DNA, 22 bp, Artificial Sequence
  primer
aattggacatgcataggtttgg

SEQ ID NO: 50161 - DNA, 38 bp, Artificial Sequence
  primer
gtaaaacgacggccagtttgcaacctcagattacaccc

SEQ ID NO: 50162 - DNA, 38 bp, Artificial Sequence
  primer
gtaaaacgacggccagtacacactgatgcagaccatcc

SEQ ID NO: 50163 - DNA, 38 bp, Artificial Sequence
  primer
gtaaaacgacggccagtagcttaacttgggaggtggag

SEQ ID NO: 50164 - DNA, 21 bp, Artificial Sequence
  primer
gtctggtttcacctttcccac

SEQ ID NO: 50165 - DNA, 37 bp, Artificial Sequence
  primer
gtaaaacgacggccagtgaggagagagggagcaggtc

SEQ ID NO: 50166 - DNA, 39 bp, Artificial Sequence
  primer
gtaaaacgacggccagttggaacttaacccattctctgc

SEQ ID NO: 50167 - DNA, 38 bp, Artificial Sequence
  primer
gtaaaacgacggccagtaaactacgacacccatgatgc

SEQ ID NO: 50168 - DNA, 38 bp, Artificial Sequence
  primer
gtaaaacgacggccagtagcactttggaaggagctttg

SEQ ID NO: 50169 - DNA, 21 bp, Artificial Sequence
  primer
ataatggagacgtgggtggtg

SEQ ID NO: 50170 - DNA, 38 bp, Artificial Sequence
  primer
gtaaaacgacggccagtgatttcctagtcccacccacc

SEQ ID NO: 50171 - DNA, 20 bp, Artificial Sequence
  primer
agtgggagtgcatggaattg

SEQ ID NO: 50172 - DNA, 38 bp, Artificial Sequence
  primer
gtaaaacgacggccagtgatgtgctggagaacaagctg

SEQ ID NO: 50173 - DNA, 21 bp, Artificial Sequence
  primer
cctcaccacgttcacacagtc

SEQ ID NO: 50174 - DNA, 38 bp, Artificial Sequence
  primer
gtaaaacgacggccagtaatacaagaacttccgccctg

SEQ ID NO: 50175 - DNA, 38 bp, Artificial Sequence
  primer
gtaaaacgacggccagttcactcaggactctctctgcg

SEQ ID NO: 50176 - DNA, 36 bp, Artificial Sequence
  primer
gtaaaacgacggccagtcctcaggcagagttcgtgg

SEQ ID NO: 50177 - DNA, 21 bp, Artificial Sequence
  primer
caggaagacccttgaatcacc

SEQ ID NO: 50178 - DNA, 37 bp, Artificial Sequence
  primer
gtaaaacgacggccagttaggctcaagcaatcctccc

SEQ ID NO: 50179 - DNA, 38 bp, Artificial Sequence
  primer
gtaaaacgacggccagttgtgtgtgtagagcccaggtc

SEQ ID NO: 50180 - DNA, 21 bp, Artificial Sequence
  primer
gacttcagggaaccaggtgag

SEQ ID NO: 50181 - DNA, 38 bp, Artificial Sequence
  primer
gtaaaacgacggccagtggtttcgaatgcctctctttg

SEQ ID NO: 50182 - DNA, 20 bp, Artificial Sequence
  primer
gctgatgcttagaagccctg

SEQ ID NO: 50183 - DNA, 38 bp, Artificial Sequence
  primer
gtaaaacgacggccagtgtcacacagctgggaaatgag

SEQ ID NO: 50184 - DNA, 20 bp, Artificial Sequence
  primer
agatggcatttcctccatcc

SEQ ID NO: 50185 - DNA, 38 bp, Artificial Sequence
  primer
gtaaaacgacggccagttattctgggtacccttggagg

SEQ ID NO: 50186 - DNA, 37 bp, Artificial Sequence
  primer
gtaaaacgacggccagtacaccagctcacagtcccag

SEQ ID NO: 50187 - DNA, 35 bp, Artificial Sequence
  primer
gtaaaacgacggccagtggagagctggctgcaagg

SEQ ID NO: 50188 - DNA, 19 bp, Artificial Sequence
  primer
tttccaggaaccttgccac

SEQ ID NO: 50189 - DNA, 36 bp, Artificial Sequence
  primer
gtaaaacgacggccagtaggaaggaggcgaactgtg

SEQ ID NO: 50190 - DNA, 21 bp, Artificial Sequence
  primer
tagccaacaagagcgaaactc

SEQ ID NO: 50191 - DNA, 37 bp, Artificial Sequence
  primer
gtaaaacgacggccagtagcagctctgcctgaagttg

SEQ ID NO: 50192 - DNA, 21 bp, Artificial Sequence
  primer
tctgggtgacagagtcagacc

SEQ ID NO: 50193 - DNA, 21 bp, Artificial Sequence
  primer
atggctggctacctgacttcc

SEQ ID NO: 50194 - DNA, 42 bp, Artificial Sequence
  primer
gtaaaacgacggccagtattctatcgattaaatgtgggtaaa

SEQ ID NO: 50195 - DNA, 40 bp, Artificial Sequence
  primer
gtaaaacgacggccagtctaagtgggattgtagatgaggg

SEQ ID NO: 50196 - DNA, 38 bp, Artificial Sequence
  primer
gtaaaacgacggccagtagaacaatgcctggtgctgtc

SEQ ID NO: 50197 - DNA, 22 bp, Artificial Sequence
  primer
tcacagtatcacatttgccagg

SEQ ID NO: 50198 - DNA, 41 bp, Artificial Sequence
  primer
gtaaaacgacggccagttgagttagaacacatggtaatggg

SEQ ID NO: 50199 - DNA, 24 bp, Artificial Sequence
  primer
aaatgtgactttcttaacccttgg

SEQ ID NO: 50200 - DNA, 21 bp, Artificial Sequence
  primer
gggaggatggcttagtgagac

SEQ ID NO: 50201 - DNA, 25 bp, Artificial Sequence
  primer
tttggcataagatttatcagttgga

SEQ ID NO: 50202 - DNA, 39 bp, Artificial Sequence
  primer
gtaaaacgacggccagtgagtcccaacagtgagaggatg

SEQ ID NO: 50203 - DNA, 40 bp, Artificial Sequence
  primer
gtaaaacgacggccagtaaacttcagatgggtactggatg

SEQ ID NO: 50204 - DNA, 21 bp, Artificial Sequence
  primer
tggtaagccatgacaatttgg

SEQ ID NO: 50205 - DNA, 39 bp, Artificial Sequence
  primer
gtaaaacgacggccagtgaggttagcatctaagcccaaa

SEQ ID NO: 50206 - DNA, 18 bp, Artificial Sequence
  primer
cctgacctcatgatccgc

SEQ ID NO: 50207 - DNA, 23 bp, Artificial Sequence
  primer
gacaatggtgaaggaaataaggc

SEQ ID NO: 50208 - DNA, 20 bp, Artificial Sequence
  primer
ctgcatgccttgttctctgg

SEQ ID NO: 50209 - DNA, 37 bp, Artificial Sequence
  primer
gtaaaacgacggccagtcttcacgtcccttccatctc

SEQ ID NO: 50210 - DNA, 21 bp, Artificial Sequence
  primer
cagacctctttgatccgaagc

SEQ ID NO: 50211 - DNA, 36 bp, Artificial Sequence
  primer
gtaaaacgacggccagtgggagcaacggctacagac

SEQ ID NO: 50212 - DNA, 21 bp, Artificial Sequence
  primer
tgcaagacagagttgctccac

SEQ ID NO: 50213 - DNA, 21 bp, Artificial Sequence
  primer
ccagcctgggtcattactttc

SEQ ID NO: 50214 - DNA, 38 bp, Artificial Sequence
  primer
gtaaaacgacggccagtgtggttcaggcagagtgtcag

SEQ ID NO: 50215 - DNA, 38 bp, Artificial Sequence
  primer
gtaaaacgacggccagtctgtgagatcagggctgtgac

SEQ ID NO: 50216 - DNA, 38 bp, Artificial Sequence
  primer
gtaaaacgacggccagttacttgaatcttgcccatccc

SEQ ID NO: 50217 - DNA, 20 bp, Artificial Sequence
  primer
atagtggcaccctggtgttg

SEQ ID NO: 50218 - DNA, 38 bp, Artificial Sequence
  primer
gtaaaacgacggccagtgtaaaccctggcttgacttgg

SEQ ID NO: 50219 - DNA, 21 bp, Artificial Sequence
  primer
gtgtgagccactgtatctggc

SEQ ID NO: 50220 - DNA, 21 bp, Artificial Sequence
  primer
caaccttcattccttgttggg

SEQ ID NO: 50221 - DNA, 21 bp, Artificial Sequence
  primer
tcttctgctcttagctcccag

SEQ ID NO: 50222 - DNA, 21 bp, Artificial Sequence
  primer
tctgttgcctatgagggtgtg

SEQ ID NO: 50223 - DNA, 21 bp, Artificial Sequence
  primer
ctacctgtggctgctcacttg

SEQ ID NO: 50224 - DNA, 21 bp, Artificial Sequence
  primer
gggctggaggtgtctctattg

SEQ ID NO: 50225 - DNA, 38 bp, Artificial Sequence
  primer
gtaaaacgacggccagttcatatacagcagcgaccagc

SEQ ID NO: 50226 - DNA, 20 bp, Artificial Sequence
  primer
ctagagcccattcctctcgg

SEQ ID NO: 50227 - DNA, 38 bp, Artificial Sequence
  primer
gtaaaacgacggccagttagggcagatggtttccagag

SEQ ID NO: 50228 - DNA, 35 bp, Artificial Sequence
  primer
gtaaaacgacggccagtcccgccctgtgagagatg

SEQ ID NO: 50229 - DNA, 36 bp, Artificial Sequence
  primer
gtaaaacgacggccagtcacctcaggttctggcagc

SEQ ID NO: 50230 - DNA, 38 bp, Artificial Sequence
  primer
gtaaaacgacggccagtgagttgatgcctaggtttggc

SEQ ID NO: 50231 - DNA, 35 bp, Artificial Sequence
  primer
gtaaaacgacggccagtaggacctggctggctgag

SEQ ID NO: 50232 - DNA, 22 bp, Artificial Sequence
  primer
ggaattaggagaattgctgtgg

SEQ ID NO: 50233 - DNA, 43 bp, Artificial Sequence
  primer
gtaaaacgacggccagtcatgaaggaagaagagagaatattgg

SEQ ID NO: 50234 - DNA, 37 bp, Artificial Sequence
  primer
gtaaaacgacggccagttggcaactgtcctcctcatc

SEQ ID NO: 50235 - DNA, 38 bp, Artificial Sequence
  primer
gtaaaacgacggccagttctgcctatgtgagagccttg

SEQ ID NO: 50236 - DNA, 20 bp, Artificial Sequence
  primer
aatggaggcggatctttgtc

SEQ ID NO: 50237 - DNA, 37 bp, Artificial Sequence
  primer
gtaaaacgacggccagtgtgccactaagagcacctgg

SEQ ID NO: 50238 - DNA, 21 bp, Artificial Sequence
  primer
tccctagtgttctgtgttgcc

SEQ ID NO: 50239 - DNA, 21 bp, Artificial Sequence
  primer
gctgcgaaacagcaagttaag

SEQ ID NO: 50240 - DNA, 38 bp, Artificial Sequence
  primer
gtaaaacgacggccagttctcccatcaccttgacatcc

SEQ ID NO: 50241 - DNA, 41 bp, Artificial Sequence
  primer
gtaaaacgacggccagttgtgggcaattactgaatttaatg

SEQ ID NO: 50242 - DNA, 24 bp, Artificial Sequence
  primer
tttgcttccagaattaaactgacc

SEQ ID NO: 50243 - DNA, 38 bp, Artificial Sequence
  primer
gtaaaacgacggccagtatggaagttgagtttggaggg

SEQ ID NO: 50244 - DNA, 21 bp, Artificial Sequence
  primer
caactcaggtgatgtgttgcc

SEQ ID NO: 50245 - DNA, 23 bp, Artificial Sequence
  primer
aaactgtccatttggattgtcac

SEQ ID NO: 50246 - DNA, 19 bp, Artificial Sequence
  primer
ccatgagctctggatgctg

SEQ ID NO: 50247 - DNA, 38 bp, Artificial Sequence
  primer
gtaaaacgacggccagtcccatctcctttcagaaccag

SEQ ID NO: 50248 - DNA, 38 bp, Artificial Sequence
  primer
gtaaaacgacggccagtctgccacagccatgtttctac

SEQ ID NO: 50249 - DNA, 38 bp, Artificial Sequence
  primer
gtaaaacgacggccagtttgtttcaacagagtgaaggg

SEQ ID NO: 50250 - DNA, 22 bp, Artificial Sequence
  primer
gatcataaccacttctgctggc

SEQ ID NO: 50251 - DNA, 35 bp, Artificial Sequence
  primer
gtaaaacgacggccagtctgggcgatgggagtgag

SEQ ID NO: 50252 - DNA, 37 bp, Artificial Sequence
  primer
gtaaaacgacggccagtcgtgctttgcctatagcagc

SEQ ID NO: 50253 - DNA, 38 bp, Artificial Sequence
  primer
gtaaaacgacggccagttcgtgataatggttctgctgg

SEQ ID NO: 50254 - DNA, 38 bp, Artificial Sequence
  primer
gtaaaacgacggccagtgctctgcctctcctcacagag

SEQ ID NO: 50255 - DNA, 20 bp, Artificial Sequence
  primer
agagatagggccggatgagg

SEQ ID NO: 50256 - DNA, 38 bp, Artificial Sequence
  primer
gtaaaacgacggccagtgacaggcatctttccttaccg

SEQ ID NO: 50257 - DNA, 21 bp, Artificial Sequence
  primer
caatggtatttcctcccaacc

SEQ ID NO: 50258 - DNA, 21 bp, Artificial Sequence
  primer
aagcagcaacacattcacagg

SEQ ID NO: 50259 - DNA, 21 bp, Artificial Sequence
  primer
ccaagctcctatctcgacacc

SEQ ID NO: 50260 - DNA, 38 bp, Artificial Sequence
  primer
gtaaaacgacggccagtctttggttctcaggaaatggg

SEQ ID NO: 50261 - DNA, 38 bp, Artificial Sequence
  primer
gtaaaacgacggccagtttggatcaaggacaaaggatg

SEQ ID NO: 50262 - DNA, 23 bp, Artificial Sequence
  primer
gctggtactaaagtttggctgtg

SEQ ID NO: 50263 - DNA, 24 bp, Artificial Sequence
  primer
ttgtcccacatgatttatgttctg

SEQ ID NO: 50264 - DNA, 21 bp, Artificial Sequence
  primer
aacaaatcctgcccataggtg

SEQ ID NO: 50265 - DNA, 38 bp, Artificial Sequence
  primer
gtaaaacgacggccagtacaaggactagctcccgtttg

SEQ ID NO: 50266 - DNA, 20 bp, Artificial Sequence
  primer
cagctatgcgagaggctgac

SEQ ID NO: 50267 - DNA, 21 bp, Artificial Sequence
  primer
tcttagcctttctctgtgccc

SEQ ID NO: 50268 - DNA, 38 bp, Artificial Sequence
  primer
gtaaaacgacggccagtcaggacacaacaaagtcagcc

SEQ ID NO: 50269 - DNA, 21 bp, Artificial Sequence
  primer
gtcaatccgggatctttcatc

SEQ ID NO: 50270 - DNA, 38 bp, Artificial Sequence
  primer
gtaaaacgacggccagtactgtccctgcctcatttctg

SEQ ID NO: 50271 - DNA, 38 bp, Artificial Sequence
  primer
gtaaaacgacggccagttgcatctgttgtgaggttgtg

SEQ ID NO: 50272 - DNA, 38 bp, Artificial Sequence
  primer
gtaaaacgacggccagtggtagccactcctccacagag

SEQ ID NO: 50273 - DNA, 20 bp, Artificial Sequence
  primer
atgtggatgtggaaccctcc

SEQ ID NO: 50274 - DNA, 38 bp, Artificial Sequence
  primer
gtaaaacgacggccagttctctccgtttggtacatccc

SEQ ID NO: 50275 - DNA, 38 bp, Artificial Sequence
  primer
gtaaaacgacggccagtggacactctagactcttgcgg

SEQ ID NO: 50276 - DNA, 21 bp, Artificial Sequence
  primer
attgtgatgtgatcaggcagc

SEQ ID NO: 50277 - DNA, 38 bp, Artificial Sequence
  primer
gtaaaacgacggccagtcctcattgcctgatgatgatg

SEQ ID NO: 50278 - DNA, 21 bp, Artificial Sequence
  primer
gaacctggcttcctgcaatag

SEQ ID NO: 50279 - DNA, 22 bp, Artificial Sequence
  primer
ggcaagacaacattctaaaccc

SEQ ID NO: 50280 - DNA, 20 bp, Artificial Sequence
  primer
gtgtgcctgcctacttctcg

SEQ ID NO: 50281 - DNA, 38 bp, Artificial Sequence
  primer
gtaaaacgacggccagtgtatgtgtctgtcagggctcc

SEQ ID NO: 50282 - DNA, 21 bp, Artificial Sequence
  primer
agtgatcctctcacctcagcc

SEQ ID NO: 50283 - DNA, 21 bp, Artificial Sequence
  primer
ggagcttgtgtcagcccttag

SEQ ID NO: 50284 - DNA, 21 bp, Artificial Sequence
  primer
agtgctgggatccctaacctg

SEQ ID NO: 50285 - DNA, 38 bp, Artificial Sequence
  primer
gtaaaacgacggccagttagtttgtcactttccgtgcg

SEQ ID NO: 50286 - DNA, 21 bp, Artificial Sequence
  primer
tgtgctgggcctgactataag

SEQ ID NO: 50287 - DNA, 21 bp, Artificial Sequence
  primer
aacataggaccaaggtgcgtc

SEQ ID NO: 50288 - DNA, 38 bp, Artificial Sequence
  primer
gtaaaacgacggccagtaaacatctgccgggaataaag

SEQ ID NO: 50289 - DNA, 38 bp, Artificial Sequence
  primer
gtaaaacgacggccagtacgtacagctctcttcccagc

SEQ ID NO: 50290 - DNA, 37 bp, Artificial Sequence
  primer
gtaaaacgacggccagtattctctcattgcctcgtgc

SEQ ID NO: 50291 - DNA, 38 bp, Artificial Sequence
  primer
gtaaaacgacggccagtgctgtaggccaagtcattgtg

SEQ ID NO: 50292 - DNA, 38 bp, Artificial Sequence
  primer
gtaaaacgacggccagtgacatttgggtacgggatgac

SEQ ID NO: 50293 - DNA, 21 bp, Artificial Sequence
  primer
aaacttgccttcagaaccagc

SEQ ID NO: 50294 - DNA, 37 bp, Artificial Sequence
  primer
gtaaaacgacggccagtcacgctgggacagaggtaag

SEQ ID NO: 50295 - DNA, 21 bp, Artificial Sequence
  primer
cctcggccttctgaaatactg

SEQ ID NO: 50296 - DNA, 38 bp, Artificial Sequence
  primer
gtaaaacgacggccagttcaggacctgtccctgttatg

SEQ ID NO: 50297 - DNA, 38 bp, Artificial Sequence
  primer
gtaaaacgacggccagtcagaggaccatgcaagtcaag

SEQ ID NO: 50298 - DNA, 38 bp, Artificial Sequence
  primer
gtaaaacgacggccagttgctcctgcatagacttggtc

SEQ ID NO: 50299 - DNA, 37 bp, Artificial Sequence
  primer
gtaaaacgacggccagtttacaggcacccaccatcac

SEQ ID NO: 50300 - DNA, 22 bp, Artificial Sequence
  primer
tctggattaagctggcagtagc

SEQ ID NO: 50301 - DNA, 41 bp, Artificial Sequence
  primer
gtaaaacgacggccagtcacctaccttaattcatcaggtgc

SEQ ID NO: 50302 - DNA, 38 bp, Artificial Sequence
  primer
gtaaaacgacggccagttctttaccctgcagttccctg

SEQ ID NO: 50303 - DNA, 20 bp, Artificial Sequence
  primer
tggtggctaattggtcatgg

SEQ ID NO: 50304 - DNA, 21 bp, Artificial Sequence
  primer
tactgactctgggacagcgag

SEQ ID NO: 50305 - DNA, 21 bp, Artificial Sequence
  primer
agagcgagactccatctcaaa

SEQ ID NO: 50306 - DNA, 21 bp, Artificial Sequence
  primer
tcacagctcagctctcaccag

SEQ ID NO: 50307 - DNA, 36 bp, Artificial Sequence
  primer
gtaaaacgacggccagtgcctgctgaggtaactggg

SEQ ID NO: 50308 - DNA, 38 bp, Artificial Sequence
  primer
gtaaaacgacggccagtgtgctgtgatctcgggagaag

SEQ ID NO: 50309 - DNA, 19 bp, Artificial Sequence
  primer
accatggtgttcccagctc

SEQ ID NO: 50310 - DNA, 36 bp, Artificial Sequence
  primer
gtaaaacgacggccagtgaggtgccatctctgcctc

SEQ ID NO: 50311 - DNA, 38 bp, Artificial Sequence
  primer
gtaaaacgacggccagtatgctgtcacagtgccatttc

SEQ ID NO: 50312 - DNA, 37 bp, Artificial Sequence
  primer
gtaaaacgacggccagtgagcaggaccagaacccttc

SEQ ID NO: 50313 - DNA, 38 bp, Artificial Sequence
  primer
gtaaaacgacggccagtttgaggagtgttcagtctccg

SEQ ID NO: 50314 - DNA, 38 bp, Artificial Sequence
  primer
gtaaaacgacggccagtttcattcgggaagccttattg

SEQ ID NO: 50315 - DNA, 39 bp, Artificial Sequence
  primer
gtaaaacgacggccagtccactgacagtctgagatgagg

SEQ ID NO: 50316 - DNA, 22 bp, Artificial Sequence
  primer
cccacttccttcacagtattgc

SEQ ID NO: 50317 - DNA, 18 bp, Artificial Sequence
  primer
acaagcgtgagcctctgc

SEQ ID NO: 50318 - DNA, 27 bp, Artificial Sequence
  primer
aatgttaactttatcaagtgtgctgtg

SEQ ID NO: 50319 - DNA, 21 bp, Artificial Sequence
  primer
gagattctgccattgcattcc

SEQ ID NO: 50320 - DNA, 39 bp, Artificial Sequence
  primer
gtaaaacgacggccagtttgttgctgtttaacttggtgc

SEQ ID NO: 50321 - DNA, 40 bp, Artificial Sequence
  primer
gtaaaacgacggccagtcgtaatgttgactggacattgtt

SEQ ID NO: 50322 - DNA, 44 bp, Artificial Sequence
  primer
gtaaaacgacggccagttcaagatatttcagaaggatgtaactg

SEQ ID NO: 50323 - DNA, 38 bp, Artificial Sequence
  primer
gtaaaacgacggccagttttgccactgtgtgttacagc

SEQ ID NO: 50324 - DNA, 38 bp, Artificial Sequence
  primer
gtaaaacgacggccagtgaccgctgtgcccttactaaa

SEQ ID NO: 50325 - DNA, 18 bp, Artificial Sequence
  primer
tgatccacctgcctcacc

SEQ ID NO: 50326 - DNA, 27 bp, Artificial Sequence
  primer
aatgttaactttatcaagtgtgctgtg

SEQ ID NO: 50327 - DNA, 43 bp, Artificial Sequence
  primer
gtaaaacgacggccagttgttgactggacattgttaatttctc

SEQ ID NO: 50328 - DNA, 21 bp, Artificial Sequence
  primer
attcctggagaggtcaaggtg

SEQ ID NO: 50329 - DNA, 20 bp, Artificial Sequence
  primer
ttgcctcattcagatggagc

SEQ ID NO: 50330 - DNA, 21 bp, Artificial Sequence
  primer
ttggtctggactcctctttgc

SEQ ID NO: 50331 - DNA, 20 bp, Artificial Sequence
  primer
gcgactcctttctctccacc

SEQ ID NO: 50332 - DNA, 38 bp, Artificial Sequence
  primer
gtaaaacgacggccagtaggtgggaacaagttggagac

SEQ ID NO: 50333 - DNA, 38 bp, Artificial Sequence
  primer
gtaaaacgacggccagtgtagttggcctgcttctggag

SEQ ID NO: 50334 - DNA, 21 bp, Artificial Sequence
  primer
ctgtcctgctgtcactccatc

SEQ ID NO: 50335 - DNA, 38 bp, Artificial Sequence
  primer
gtaaaacgacggccagttcagggcttaggctctgtgag

SEQ ID NO: 50336 - DNA, 21 bp, Artificial Sequence
  primer
cggtctttccattccaggtag

SEQ ID NO: 50337 - DNA, 37 bp, Artificial Sequence
  primer
gtaaaacgacggccagtgtctaggagcctggctggag

SEQ ID NO: 50338 - DNA, 38 bp, Artificial Sequence
  primer
gtaaaacgacggccagtgataggacttgggcctacagc

SEQ ID NO: 50339 - DNA, 21 bp, Artificial Sequence
  primer
ttggtcccgttcttgtttagg

SEQ ID NO: 50340 - DNA, 37 bp, Artificial Sequence
  primer
gtaaaacgacggccagtacagctattcccgatgaccc

SEQ ID NO: 50341 - DNA, 21 bp, Artificial Sequence
  primer
agcttgtggaatgtggctagg

SEQ ID NO: 50342 - DNA, 21 bp, Artificial Sequence
  primer
cctgtgaactagtggctgctg

SEQ ID NO: 50343 - DNA, 38 bp, Artificial Sequence
  primer
gtaaaacgacggccagtgcgagtacctggcatatttgg

SEQ ID NO: 50344 - DNA, 38 bp, Artificial Sequence
  primer
gtaaaacgacggccagtctgtgtggttagacggcttcc

SEQ ID NO: 50345 - DNA, 38 bp, Artificial Sequence
  primer
gtaaaacgacggccagttacttgggcaagagcatcacc

SEQ ID NO: 50346 - DNA, 21 bp, Artificial Sequence
  primer
aggtgggagaattggcttgag

SEQ ID NO: 50347 - DNA, 38 bp, Artificial Sequence
  primer
gtaaaacgacggccagtggctaattgcacagagcagtc

SEQ ID NO: 50348 - DNA, 38 bp, Artificial Sequence; identical to SEQ ID NO: 50345
  primer

SEQ ID NO: 50349 - DNA, 37 bp, Artificial Sequence
  primer
gtaaaacgacggccagtctattagcaaggccgttccc

SEQ ID NO: 50350 - DNA, 38 bp, Artificial Sequence
  primer
gtaaaacgacggccagttttcatattgcaggtgccttg

SEQ ID NO: 50351 - DNA, 21 bp, Artificial Sequence
  primer
ctcagtccagagtcccacctc

SEQ ID NO: 50352 - DNA, 35 bp, Artificial Sequence
  primer
gtaaaacgacggccagtggtgccgttggtctctgg

SEQ ID NO: 50353 - DNA, 38 bp, Artificial Sequence
  primer
gtaaaacgacggccagtctcagggacagtggagtggac

SEQ ID NO: 50354 - DNA, 22 bp, Artificial Sequence
  primer
tgtgttgagactctgccatttc

SEQ ID NO: 50355 - DNA, 21 bp, Artificial Sequence
  primer
agctgtctggctatgaaaggg

SEQ ID NO: 50356 - DNA, 21 bp, Artificial Sequence
  primer
atagcatggtcttgtcctggg

SEQ ID NO: 50357 - DNA, 38 bp, Artificial Sequence
  primer
gtaaaacgacggccagtgtacctgggatcatgggacag

SEQ ID NO: 50358 - DNA, 38 bp, Artificial Sequence
  primer
gtaaaacgacggccagtcaaagagtccttggcaagctg

SEQ ID NO: 50359 - DNA, 21 bp, Artificial Sequence
  primer
tttaaaggacaccaagccacc

SEQ ID NO: 50360 - DNA, 21 bp, Artificial Sequence
  primer
ttccctgtggaagtggtaagg

SEQ ID NO: 50361 - DNA, 37 bp, Artificial Sequence
  primer
gtaaaacgacggccagtaggtttgaagccctctgagc

SEQ ID NO: 50362 - DNA, 21 bp, Artificial Sequence
  primer
taccatagcagggagtggagg

SEQ ID NO: 50363 - DNA, 22 bp, Artificial Sequence
  primer
cacgcaagattctagaagtggg

SEQ ID NO: 50364 - DNA, 38 bp, Artificial Sequence
  primer
gtaaaacgacggccagtctggtaggcatcaccctgaac

SEQ ID NO: 50365 - DNA, 38 bp, Artificial Sequence
  primer
gtaaaacgacggccagtatagccctgtcacctgcaaag

SEQ ID NO: 50366 - DNA, 38 bp, Artificial Sequence
  primer
gtaaaacgacggccagtgcaacatagaccctcactccc

SEQ ID NO: 50367 - DNA, 20 bp, Artificial Sequence
  primer
ctcccttccatctttcccag

SEQ ID NO: 50368 - DNA, 38 bp, Artificial Sequence
  primer
gtaaaacgacggccagtccttactgatgggactgaggg

SEQ ID NO: 50369 - DNA, 36 bp, Artificial Sequence
  primer
gtaaaacgacggccagtatcagggatctgagcaggg

SEQ ID NO: 50370 - DNA, 21 bp, Artificial Sequence
  primer
ttcatgcattattcaggcacc

SEQ ID NO: 50371 - DNA, 22 bp, Artificial Sequence
  primer
cacacccagccaatgttaaatc

SEQ ID NO: 50372 - DNA, 38 bp, Artificial Sequence
  primer
gtaaaacgacggccagtccatgtaaggtaggcagggag

SEQ ID NO: 50373 - DNA, 20 bp, Artificial Sequence
  primer
accacctggtcttcccaaag

SEQ ID NO: 50374 - DNA, 38 bp, Artificial Sequence
  primer
gtaaaacgacggccagttcgagtgagtgttcatccagg

SEQ ID NO: 50375 - DNA, 19 bp, Artificial Sequence
  primer
ctctgatcgtccgtcagcc

SEQ ID NO: 50376 - DNA, 36 bp, Artificial Sequence
  primer
gtaaaacgacggccagtctccactcctcagcttgcc

SEQ ID NO: 50377 - DNA, 19 bp, Artificial Sequence
  primer
ccagatgcacctgaacagc

SEQ ID NO: 50378 - DNA, 21 bp, Artificial Sequence
  primer
gtcgggctagaaagtccattg

SEQ ID NO: 50379 - DNA, 38 bp, Artificial Sequence
  primer
gtaaaacgacggccagtctcactccacctccatgagaa

SEQ ID NO: 50380 - DNA, 21 bp, Artificial Sequence
  primer
gggacctgcaaagctagtgag

SEQ ID NO: 50381 - DNA, 39 bp, Artificial Sequence
  primer
gtaaaacgacggccagtgaagcagaggtctgtgccttag

SEQ ID NO: 50382 - DNA, 38 bp, Artificial Sequence
  primer
gtaaaacgacggccagtactcctcaagttcgtgaaccg

SEQ ID NO: 50383 - DNA, 20 bp, Artificial Sequence
  primer
caggtccctaggctggtctc

SEQ ID NO: 50384 - DNA, 38 bp, Artificial Sequence
  primer
gtaaaacgacggccagtccttcacaccttgagcctttc

SEQ ID NO: 50385 - DNA, 38 bp, Artificial Sequence
  primer
gtaaaacgacggccagttcagaggaccaccctgcttag

SEQ ID NO: 50386 - DNA, 21 bp, Artificial Sequence
  primer
tcctcacagccttgtgatttg

SEQ ID NO: 50387 - DNA, 38 bp, Artificial Sequence
  primer
gtaaaacgacggccagtgcctctcaatgctgtggtaag

SEQ ID NO: 50388 - DNA, 37 bp, Artificial Sequence
  primer
gtaaaacgacggccagtgcaagaaaccaaggagaccc

SEQ ID NO: 50389 - DNA, 35 bp, Artificial Sequence
  primer
gtaaaacgacggccagtccaaggtgctggtggatg

SEQ ID NO: 50390 - DNA, 38 bp, Artificial Sequence
  primer
gtaaaacgacggccagtcccactgtctggtgttcagtg

SEQ ID NO: 50391 - DNA, 22 bp, Artificial Sequence
  primer
tccatctattgctagaggctgc

SEQ ID NO: 50392 - DNA, 38 bp, Artificial Sequence
  primer
gtaaaacgacggccagtattccacaaggtgagacgtgc

SEQ ID NO: 50393 - DNA, 21 bp, Artificial Sequence
  primer
ttcccaccctgcaattctaag

SEQ ID NO: 50394 - DNA, 38 bp, Artificial Sequence
  primer
gtaaaacgacggccagtggtggctgtcaagaacagatg

SEQ ID NO: 50395 - DNA, 37 bp, Artificial Sequence
  primer
gtaaaacgacggccagtggcttcagagtctgctggtg

SEQ ID NO: 50396 - DNA, 39 bp, Artificial Sequence
  primer
gtaaaacgacggccagttgctcagaaaccttgaggaaag

SEQ ID NO: 50397 - DNA, 26 bp, Artificial Sequence
  primer
tcctccaactacagacaactacttcc

SEQ ID NO: 50398 - DNA, 38 bp, Artificial Sequence
  primer
gtaaaacgacggccagtcaagaggcgtttgtgagtgac

SEQ ID NO: 50399 - DNA, 42 bp, Artificial Sequence
  primer
gtaaaacgacggccagttctccagatcaattagggaaatacc

SEQ ID NO: 50400 - DNA, 38 bp, Artificial Sequence
  primer
gtaaaacgacggccagtttgcctgagacctagaaaggg

SEQ ID NO: 50401 - DNA, 21 bp, Artificial Sequence
  primer
tctgtctctgtgggaatggag

SEQ ID NO: 50402 - DNA, 22 bp, Artificial Sequence
  primer
gcatagggcatagaaacaaagg

SEQ ID NO: 50403 - DNA, 38 bp, Artificial Sequence
  primer
gtaaaacgacggccagttgtccatgttctgctcgaatc

SEQ ID NO: 50404 - DNA, 21 bp, Artificial Sequence
  primer
aaaccaggttcctgctctcac

SEQ ID NO: 50405 - DNA, 38 bp, Artificial Sequence
  primer
gtaaaacgacggccagtaagcagggaattatgtttggg

SEQ ID NO: 50406 - DNA, 21 bp, Artificial Sequence
  primer
taagtgtaactgtcctgggcg

SEQ ID NO: 50407 - DNA, 21 bp, Artificial Sequence
  primer
ttgtggaggaggccttacaac

SEQ ID NO: 50408 - DNA, 38 bp, Artificial Sequence
  primer
gtaaaacgacggccagtagtcatgcctctgtgatttgc

SEQ ID NO: 50409 - DNA, 38 bp, Artificial Sequence
  primer
gtaaaacgacggccagtgaggaggtcaagcctgaaatg

SEQ ID NO: 50410 - DNA, 20 bp, Artificial Sequence
  primer
cacttgaacccaggagatgg

SEQ ID NO: 50411 - DNA, 38 bp, Artificial Sequence
  primer
gtaaaacgacggccagtctggagagctgtagtccaggg

SEQ ID NO: 50412 - DNA, 37 bp, Artificial Sequence
  primer
gtaaaacgacggccagtatctctgccaagtgaccctg

SEQ ID NO: 50413 - DNA, 38 bp, Artificial Sequence
  primer
gtaaaacgacggccagttgaggaactcctaccaccacc

SEQ ID NO: 50414 - DNA, 38 bp, Artificial Sequence
  primer
gtaaaacgacggccagtctagcacagacagggcctagc

SEQ ID NO: 50415 - DNA, 21 bp, Artificial Sequence
  primer
aacttcaccctcacgagcttc

SEQ ID NO: 50416 - DNA, 37 bp, Artificial Sequence
  primer
gtaaaacgacggccagtagccctctaagtccaccacg

SEQ ID NO: 50417 - DNA, 38 bp, Artificial Sequence
  primer
gtaaaacgacggccagttctcaaggaaccattcccatc

SEQ ID NO: 50418 - DNA, 21 bp, Artificial Sequence
  primer
tgaatcaggcaatgaccactc

SEQ ID NO: 50419 - DNA, 38 bp, Artificial Sequence
  primer
gtaaaacgacggccagtaatgcacacttaaacccaggc

SEQ ID NO: 50420 - DNA, 37 bp, Artificial Sequence
  primer
gtaaaacgacggccagtatttgctttggcccttgttc

SEQ ID NO: 50421 - DNA, 38 bp, Artificial Sequence
  primer
gtaaaacgacggccagtatctgatgcccgaactactgc

SEQ ID NO: 50422 - DNA, 38 bp, Artificial Sequence
  primer
gtaaaacgacggccagtctctgacagatccaagccaag

SEQ ID NO: 50423 - DNA, 21 bp, Artificial Sequence
  primer
aacagatcgtgggtacacctg

SEQ ID NO: 50424 - DNA, 39 bp, Artificial Sequence
  primer
gtaaaacgacggccagtgccaatggaataacagatgagg

SEQ ID NO: 50425 - DNA, 21 bp, Artificial Sequence
  primer
caaactatacacgtctgcgcc

SEQ ID NO: 50426 - DNA, 23 bp, Artificial Sequence
  primer
ttgtggacaatacaagggaagag

SEQ ID NO: 50427 - DNA, 39 bp, Artificial Sequence
  primer
gtaaaacgacggccagtttataggtgtgagccactttgc

SEQ ID NO: 50428 - DNA, 27 bp, Artificial Sequence
  primer
tctatgattctggatttaagtgctttc

SEQ ID NO: 50429 - DNA, 44 bp, Artificial Sequence
  primer
gtaaaacgacggccagttgtaatgtaagcttgttctttccattc

SEQ ID NO: 50430 - DNA, 21 bp, Artificial Sequence
  primer
ttgcaagcaagtgctatgagg

SEQ ID NO: 50431 - DNA, 39 bp, Artificial Sequence
  primer
gtaaaacgacggccagtcggttacggatgagactgaaag

SEQ ID NO: 50432 - DNA, 21 bp, Artificial Sequence
  primer
ctgcaaccacaattcaccatc

SEQ ID NO: 50433 - DNA, 21 bp, Artificial Sequence
  primer
tacctcacctcagcaatccag

SEQ ID NO: 50434 - DNA, 36 bp, Artificial Sequence
  primer
gtaaaacgacggccagtcaccagctggctgggttac

SEQ ID NO: 50435 - DNA, 44 bp, Artificial Sequence
  primer
gtaaaacgacggccagtttgcatattgtatatgaactgacacag

SEQ ID NO: 50436 - DNA, 38 bp, Artificial Sequence
  primer
gtaaaacgacggccagtgtcaccaccctgaaagaggag

SEQ ID NO: 50437 - DNA, 20 bp, Artificial Sequence
  primer
atgaacagcaaaggctgacg

SEQ ID NO: 50438 - DNA, 38 bp, Artificial Sequence
  primer
gtaaaacgacggccagtctggtatcatggctgaaggtg

SEQ ID NO: 50439 - DNA, 21 bp, Artificial Sequence
  primer
ctctgggaaatccacaacagc

SEQ ID NO: 50440 - DNA, 38 bp, Artificial Sequence
  primer
gtaaaacgacggccagtgaagctaagtcagggcacctc

SEQ ID NO: 50441 - DNA, 38 bp, Artificial Sequence
  primer
gtaaaacgacggccagttggaagaagaatttccgatcc

SEQ ID NO: 50442 - DNA, 21 bp, Artificial Sequence
  primer
tgatgagggatctgtgctgtc

SEQ ID NO: 50443 - DNA, 43 bp, Artificial Sequence
  primer
gtaaaacgacggccagttctgctaatatccttctctgctgtag

SEQ ID NO: 50444 - DNA, 43 bp, Artificial Sequence
  primer
gtaaaacgacggccagtaattagactacaagaaggatgaaggg

SEQ ID NO: 50445 - DNA, 21 bp, Artificial Sequence
  primer
aacccactgccgaattaatca

SEQ ID NO: 50446 - DNA, 39 bp, Artificial Sequence
  primer
gtaaaacgacggccagttgcagctgttactgatcaatgg

SEQ ID NO: 50447 - DNA, 21 bp, Artificial Sequence
  primer
caccctgaaagaggagctgac

SEQ ID NO: 50448 - DNA, 21 bp, Artificial Sequence
  primer
aagagcagaaggcaaccagac

SEQ ID NO: 50449 - DNA, 24 bp, Artificial Sequence
  primer
gcagagatctcaataagaggcttg

SEQ ID NO: 50450 - DNA, 21 bp, Artificial Sequence
  primer
aggatgaccacaaagcagttg

SEQ ID NO: 50451 - DNA, 39 bp, Artificial Sequence
  primer
gtaaaacgacggccagtgcttcttctcagcttcaagtgg

SEQ ID NO: 50452 - DNA, 21 bp, Artificial Sequence
  primer
aggacatgaaagccattgagg

SEQ ID NO: 50453 - DNA, 38 bp, Artificial Sequence
  primer
gtaaaacgacggccagttccggccagacctctatttac

SEQ ID NO: 50454 - DNA, 38 bp, Artificial Sequence
  primer
gtaaaacgacggccagtgaatgaagcatcctttggagg

SEQ ID NO: 50455 - DNA, 21 bp, Artificial Sequence
  primer
accgctgtttaacgactttgg

SEQ ID NO: 50456 - DNA, 22 bp, Artificial Sequence
  primer
tttgtatttcaacagggcaacc

SEQ ID NO: 50457 - DNA, 36 bp, Artificial Sequence
  primer
gtaaaacgacggccagtaggaagggaggccagtgag

SEQ ID NO: 50458 - DNA, 21 bp, Artificial Sequence
  primer
ctcagcctcttgcactcacac

SEQ ID NO: 50459 - DNA, 21 bp, Artificial Sequence
  primer
tccagggtccagctctacaag

SEQ ID NO: 50460 - DNA, 38 bp, Artificial Sequence
  primer
gtaaaacgacggccagtgcctggagcctgtaaggtaac

SEQ ID NO: 50461 - DNA, 37 bp, Artificial Sequence
  primer
gtaaaacgacggccagtgtccaaggcccttcctacac

SEQ ID NO: 50462 - DNA, 20 bp, Artificial Sequence
  primer
gtccaaggcccttcctacac

SEQ ID NO: 50463 - DNA, 40 bp, Artificial Sequence
  primer
gtaaaacgacggccagtcctgttatctgaaggaggtgagg

SEQ ID NO: 50464 - DNA, 36 bp, Artificial Sequence
  primer
gtaaaacgacggccagtgtgagcccttgctctgacc

SEQ ID NO: 50465 - DNA, 38 bp, Artificial Sequence
  primer
gtaaaacgacggccagttttaacgaggtacccaggagg

SEQ ID NO: 50466 - DNA, 38 bp, Artificial Sequence
  primer
gtaaaacgacggccagttgacttcattggtgagggagg

SEQ ID NO: 50467 - DNA, 35 bp, Artificial Sequence
  primer
gtaaaacgacggccagtcaccctgcttggttgctg

SEQ ID NO: 50468 - DNA, 19 bp, Artificial Sequence
  primer
gaaggcgaccatcagcatc

SEQ ID NO: 50469 - DNA, 39 bp, Artificial Sequence
  primer
gtaaaacgacggccagtttattgtgacttcccagggttg

SEQ ID NO: 50470 - DNA, 35 bp, Artificial Sequence
  primer
gtaaaacgacggccagtacaagggcatctgcaggc

SEQ ID NO: 50471 - DNA, 38 bp, Artificial Sequence
  primer
gtaaaacgacggccagtaacacattcacaggctccaag

SEQ ID NO: 50472 - DNA, 21 bp, Artificial Sequence
  primer
tgaggacacttgtccatgagg

SEQ ID NO: 50473 - DNA, 20 bp, Artificial Sequence
  primer
ctcaggaagaggaggccaag

SEQ ID NO: 50474 - DNA, 38 bp, Artificial Sequence
  primer
gtaaaacgacggccagtgctctttgaatacctgctggc

SEQ ID NO: 50475 - DNA, 37 bp, Artificial Sequence
  primer
gtaaaacgacggccagtccctcctctgtccctacacc

SEQ ID NO: 50476 - DNA, 38 bp, Artificial Sequence
  primer
gtaaaacgacggccagtctgttcatgctcagaacccag

SEQ ID NO: 50477 - DNA, 36 bp, Artificial Sequence
  primer
gtaaaacgacggccagtggctcgaaaggaatggaaa

SEQ ID NO: 50478 - DNA, 21 bp, Artificial Sequence
  primer
ggcagcgactgaatgtatttc

SEQ ID NO: 50479 - DNA, 38 bp, Artificial Sequence
  primer
gtaaaacgacggccagttgctggtgacaaactgacctc

SEQ ID NO: 50480 - DNA, 21 bp, Artificial Sequence
  primer
gacatcggcagactgcaatac

SEQ ID NO: 50481 - DNA, 38 bp, Artificial Sequence
  primer
gtaaaacgacggccagtctgaacgctatggcctagatg

SEQ ID NO: 50482 - DNA, 37 bp, Artificial Sequence
  primer
gtaaaacgacggccagtgtcgcatggaaaccaaattc

SEQ ID NO: 50483 - DNA, 38 bp, Artificial Sequence
  primer
gtaaaacgacggccagtcaagcccgagtttctaggttg

SEQ ID NO: 50484 - DNA, 37 bp, Artificial Sequence
  primer
gtaaaacgacggccagtaaggcctttgctgggttatg

SEQ ID NO: 50485 - DNA, 43 bp, Artificial Sequence
  primer
gtaaaacgacggccagtatggtattaattatgaagcaatgtgg

SEQ ID NO: 50486 - DNA, 19 bp, Artificial Sequence
  primer
ctcgtgatccaccctcctc

SEQ ID NO: 50487 - DNA, 35 bp, Artificial Sequence
  primer
gtaaaacgacggccagtaattccatttgggccagc

SEQ ID NO: 50488 - DNA, 37 bp, Artificial Sequence
  primer
gtaaaacgacggccagtctcctgtggtcttggtcgtc

SEQ ID NO: 50489 - DNA, 39 bp, Artificial Sequence
  primer
gtaaaacgacggccagttcattcattgaaattggtttcg

SEQ ID NO: 50490 - DNA, 22 bp, Artificial Sequence
  primer
aaccaagcagatcattggaaac

SEQ ID NO: 50491 - DNA, 21 bp, Artificial Sequence
  primer
gtgtgttggtgttcttggagc

SEQ ID NO: 50492 - DNA, 38 bp, Artificial Sequence
  primer
gtaaaacgacggccagtagttggcttggcagctgttac

SEQ ID NO: 50493 - DNA, 24 bp, Artificial Sequence
  primer
caactgatccctttatgctaggag

SEQ ID NO: 50494 - DNA, 38 bp, Artificial Sequence
  primer
gtaaaacgacggccagtttagggataacaaagggtggc

SEQ ID NO: 50495 - DNA, 41 bp, Artificial Sequence
  primer
gtaaaacgacggccagtcaaaggaatggaatatttagcagg

SEQ ID NO: 50496 - DNA, 38 bp, Artificial Sequence
  primer
gtaaaacgacggccagtgggcaaagtgggtatttggag

SEQ ID NO: 50497 - DNA, 37 bp, Artificial Sequence
  primer
gtaaaacgacggccagtgggtgcagatggttctgatg

SEQ ID NO: 50498 - DNA, 21 bp, Artificial Sequence
  primer
ctgggtgacagggtgaaactg

SEQ ID NO: 50499 - DNA, 21 bp, Artificial Sequence
  primer
cttgtcacccaagtgattccc

SEQ ID NO: 50500 - DNA, 38 bp, Artificial Sequence
  primer
gtaaaacgacggccagttttcatcgtgttagccgtcag

SEQ ID NO: 50501 - DNA, 38 bp, Artificial Sequence
  primer
gtaaaacgacggccagtagtgcatgagaggctgtgttg

SEQ ID NO: 50502 - DNA, 21 bp, Artificial Sequence
  primer
aaactgcttgaaagggcagac

SEQ ID NO: 50503 - DNA, 38 bp, Artificial Sequence
  primer
gtaaaacgacggccagtgattcaatgacaaccactggg

SEQ ID NO: 50504 - DNA, 38 bp, Artificial Sequence
  primer
gtaaaacgacggccagttccctgacagtttcaagtccc

SEQ ID NO: 50505 - DNA, 21 bp, Artificial Sequence
  primer
tcaggatgtgttcattcagcc

SEQ ID NO: 50506 - DNA, 20 bp, Artificial Sequence
  primer
tttgcgcaagacttggagag

SEQ ID NO: 50507 - DNA, 19 bp, Artificial Sequence
  primer
gaattacaccgtgggtggc

SEQ ID NO: 50508 - DNA, 21 bp, Artificial Sequence
  primer
ggtggcaagagaagttgaagc

SEQ ID NO: 50509 - DNA, 21 bp, Artificial Sequence
  primer
tcctgctgctcaaagtcacag

SEQ ID NO: 50510 - DNA, 38 bp, Artificial Sequence
  primer
gtaaaacgacggccagtggcttcaaaggcagagggtag

SEQ ID NO: 50511 - DNA, 23 bp, Artificial Sequence
  primer
gcagtgggatttatgtctgagag

SEQ ID NO: 50512 - DNA, 38 bp, Artificial Sequence
  primer
gtaaaacgacggccagtggttctgatccaaagagctgg

SEQ ID NO: 50513 - DNA, 43 bp, Artificial Sequence
  primer
gtaaaacgacggccagtcatagaatttagctcttgcaatcctc

SEQ ID NO: 50514 - DNA, 21 bp, Artificial Sequence
  primer
tttatgcctgtcggtatgtcc

SEQ ID NO: 50515 - DNA, 39 bp, Artificial Sequence
  primer
gtaaaacgacggccagttgaatgattgcattcctgtttg

SEQ ID NO: 50516 - DNA, 21 bp, Artificial Sequence
  primer
tcccaccctatagaagttgcc

SEQ ID NO: 50517 - DNA, 38 bp, Artificial Sequence
  primer
gtaaaacgacggccagtgccagcatattgcatgtgaac

SEQ ID NO: 50518 - DNA, 21 bp, Artificial Sequence
  primer
actctgaaaccatggtgatgc

SEQ ID NO: 50519 - DNA, 38 bp, Artificial Sequence
  primer
gtaaaacgacggccagttggcttcaggtcaaggttagg

SEQ ID NO: 50520 - DNA, 21 bp, Artificial Sequence
  primer
tgaaggacctgactcctttgg

SEQ ID NO: 50521 - DNA, 19 bp, Artificial Sequence
  primer
agagcacgtggctcctctg

SEQ ID NO: 50522 - DNA, 21 bp, Artificial Sequence
  primer
aagggtgtgaccctgagtctg

SEQ ID NO: 50523 - DNA, 21 bp, Artificial Sequence
  primer
tgcctgctggtaaattgaatc

SEQ ID NO: 50524 - DNA, 21 bp, Artificial Sequence
  primer
gatggtctcgattccacacag

SEQ ID NO: 50525 - DNA, 39 bp, Artificial Sequence
  primer
gtaaaacgacggccagttgtcttcgatggattgtgagtg

SEQ ID NO: 50526 - DNA, 40 bp, Artificial Sequence
  primer
gtaaaacgacggccagtcataggaatttaggtggaaacgc

SEQ ID NO: 50527 - DNA, 21 bp, Artificial Sequence
  primer
tgccagatgaagtgtttctgc

SEQ ID NO: 50528 - DNA, 37 bp, Artificial Sequence
  primer
gtaaaacgacggccagtcctagtagacctgccagccc

SEQ ID NO: 50529 - DNA, 22 bp, Artificial Sequence
  primer
ctgcttagtcagtcatgccaaa

SEQ ID NO: 50530 - DNA, 38 bp, Artificial Sequence
  primer
gtaaaacgacggccagtttcagttgatacttcctcggc

SEQ ID NO: 50531 - DNA, 20 bp, Artificial Sequence
  primer
tgccatatgtggatgactgc

SEQ ID NO: 50532 - DNA, 23 bp, Artificial Sequence
  primer
tggtccgacaagtgtatggtaac

SEQ ID NO: 50533 - DNA, 21 bp, Artificial Sequence
  primer
cagccaagattgtgctactgc

SEQ ID NO: 50534 - DNA, 38 bp, Artificial Sequence
  primer
gtaaaacgacggccagtcctgaatccctcctagtggtg

SEQ ID NO: 50535 - DNA, 38 bp, Artificial Sequence
  primer
gtaaaacgacggccagtgatcttcctttctcccttccc

SEQ ID NO: 50536 - DNA, 38 bp, Artificial Sequence
  primer
gtaaaacgacggccagtaacgaagaaggcatatgtggg

SEQ ID NO: 50537 - DNA, 22 bp, Artificial Sequence
  primer
tgttggtctttgacaacactgc

SEQ ID NO: 50538 - DNA, 38 bp, Artificial Sequence
  primer
gtaaaacgacggccagtaaaccatgctgactccagagc

SEQ ID NO: 50539 - DNA, 21 bp, Artificial Sequence
  primer
agacccttgtctttgattggc

SEQ ID NO: 50540 - DNA, 39 bp, Artificial Sequence
  primer
gtaaaacgacggccagtccatgtttcatttcaagaaccc

SEQ ID NO: 50541 - DNA, 40 bp, Artificial Sequence
  primer
gtaaaacgacggccagttttgaagcaccttcactaaatcc

SEQ ID NO: 50542 - DNA, 27 bp, Artificial Sequence
  primer
tgacctgttattctacagattaccctt

SEQ ID NO: 50543 - DNA, 41 bp, Artificial Sequence
  primer
gtaaaacgacggccagtaaagggcacacacactaaagactc

SEQ ID NO: 50544 - DNA, 21 bp, Artificial Sequence
  primer
gccttaccacatgacaggttc

SEQ ID NO: 50545 - DNA, 23 bp, Artificial Sequence
  primer
ggccttaacaaattctatcctcc

SEQ ID NO: 50546 - DNA, 22 bp, Artificial Sequence
  primer
aatacatttacccagcccagtg

SEQ ID NO: 50547 - DNA, 21 bp, Artificial Sequence
  primer
gctccaaactgtgatgcgtag

SEQ ID NO: 50548 - DNA, 38 bp, Artificial Sequence
  primer
gtaaaacgacggccagtgactcgccttggaagattagc

SEQ ID NO: 50549 - DNA, 38 bp, Artificial Sequence
  primer
gtaaaacgacggccagtgcatcattggctaacgatttg

SEQ ID NO: 50550 - DNA, 23 bp, Artificial Sequence
  primer
gcagagcgcatttatcaatagtc

SEQ ID NO: 50551 - DNA, 21 bp, Artificial Sequence
  primer
cttggaaaccaagtttcaggc

SEQ ID NO: 50552 - DNA, 38 bp, Artificial Sequence
  primer
gtaaaacgacggccagtatgtcaacaagcccatcattg

SEQ ID NO: 50553 - DNA, 24 bp, Artificial Sequence
  primer
gggtgttaaccaatggattagatg

SEQ ID NO: 50554 - DNA, 38 bp, Artificial Sequence
  primer
gtaaaacgacggccagttctgaaatgatgtgactgccc

SEQ ID NO: 50555 - DNA, 37 bp, Artificial Sequence
  primer
gtaaaacgacggccagtgatcctctggtccttcaggg

SEQ ID NO: 50556 - DNA, 38 bp, Artificial Sequence
  primer
gtaaaacgacggccagtagtggactagaaggcagggtg

SEQ ID NO: 50557 - DNA, 38 bp, Artificial Sequence
  primer
gtaaaacgacggccagtgcagcctgactctgaactcac

SEQ ID NO: 50558 - DNA, 38 bp, Artificial Sequence
  primer
gtaaaacgacggccagtaaagctagcacgtggtcttgg

SEQ ID NO: 50559 - DNA, 35 bp, Artificial Sequence
  primer
gtaaaacgacggccagtacagagggagcagcagcg

SEQ ID NO: 50560 - DNA, 42 bp, Artificial Sequence
  primer
gtaaaacgacggccagtttgtggtgtgtgtctagctatgaag

SEQ ID NO: 50561 - DNA, 38 bp, Artificial Sequence
  primer
gtaaaacgacggccagtccgagatctgcttatgttccc

SEQ ID NO: 50562 - DNA, 21 bp, Artificial Sequence
  primer
aaagcctgtcggcatagtacc

SEQ ID NO: 50563 - DNA, 21 bp, Artificial Sequence
  primer
agttatgtcttcgctgctggc

SEQ ID NO: 50564 - DNA, 35 bp, Artificial Sequence
  primer
gtaaaacgacggccagtagggcctcattctgtgcc

SEQ ID NO: 50565 - DNA, 22 bp, Artificial Sequence
  primer
cagggttgtctgaagattgtcc

SEQ ID NO: 50566 - DNA, 38 bp, Artificial Sequence
  primer
gtaaaacgacggccagttgacgcacatatgcactaagc

SEQ ID NO: 50567 - DNA, 21 bp, Artificial Sequence
  primer
cttgtaggagaggatgggtgg

SEQ ID NO: 50568 - DNA, 25 bp, Artificial Sequence
  primer
tttgtactgactacaggatgaatgg

SEQ ID NO: 50569 - DNA, 21 bp, Artificial Sequence
  primer
atccgagtttcatcatctccc

SEQ ID NO: 50570 - DNA, 42 bp, Artificial Sequence
  primer
gtaaaacgacggccagtggaattgtaatcacagaaactggag

SEQ ID NO: 50571 - DNA, 21 bp, Artificial Sequence
  primer
cctggacatgatcctttgttg

SEQ ID NO: 50572 - DNA, 21 bp, Artificial Sequence
  primer
gcatgttattctgcttgtggc

SEQ ID NO: 50573 - DNA, 20 bp, Artificial Sequence
  primer
ggagtggaattgcaggattg

SEQ ID NO: 50574 - DNA, 42 bp, Artificial Sequence
  primer
gtaaaacgacggccagtaagtttggatagagggtaaccagtg

SEQ ID NO: 50575 - DNA, 24 bp, Artificial Sequence
  primer
ttgggttcttaaagttgtcatgtg

SEQ ID NO: 50576 - DNA, 38 bp, Artificial Sequence
  primer
gtaaaacgacggccagtaaacatttgccaaggtaacca

SEQ ID NO: 50577 - DNA, 38 bp, Artificial Sequence
  primer
gtaaaacgacggccagtggccctatagtcacagatgcc

SEQ ID NO: 50578 - DNA, 37 bp, Artificial Sequence
  primer
gtaaaacgacggccagtccacttggccagtcctttag

SEQ ID NO: 50579 - DNA, 38 bp, Artificial Sequence
  primer
gtaaaacgacggccagtcctagcagtcagccatttgtg

SEQ ID NO: 50580 - DNA, 26 bp, Artificial Sequence
  primer
atgatacatttattctaaaggcaggg

SEQ ID NO: 50581 - DNA, 39 bp, Artificial Sequence
  primer
gtaaaacgacggccagtgagggagaggtagagagcttgc

SEQ ID NO: 50582 - DNA, 24 bp, Artificial Sequence
  primer
tgccaaatagaggtgtggattaag

SEQ ID NO: 50583 - DNA, 40 bp, Artificial Sequence
  primer
gtaaaacgacggccagtgatgctgaaatctttgttatgcc

SEQ ID NO: 50584 - DNA, 21 bp, Artificial Sequence
  primer
aagtgccatgaagaaggcttg

SEQ ID NO: 50585 - DNA, 21 bp, Artificial Sequence
  primer
gacaaaggttcccatccttcc

SEQ ID NO: 50586 - DNA, 44 bp, Artificial Sequence
  primer
gtaaaacgacggccagttaagttgggagaacaattatacatcag

SEQ ID NO: 50587 - DNA, 37 bp, Artificial Sequence
  primer
gtaaaacgacggccagtattccagtgatgccacttgc

SEQ ID NO: 50588 - DNA, 38 bp, Artificial Sequence
  primer
gtaaaacgacggccagtcaggtcgcatctcaaggtatg

SEQ ID NO: 50589 - DNA, 42 bp, Artificial Sequence
  primer
gtaaaacgacggccagtgatcattaaagctatcgtttagccc

SEQ ID NO: 50590 - DNA, 42 bp, Artificial Sequence
  primer
gtaaaacgacggccagtttcatgcttcagtaatttgttatgg

SEQ ID NO: 50591 - DNA, 42 bp, Artificial Sequence
  primer
gtaaaacgacggccagttctgatttagactttcacagtgagc

SEQ ID NO: 50592 - DNA, 22 bp, Artificial Sequence
  primer
ccatctatgggctcaagtttcc

SEQ ID NO: 50593 - DNA, 21 bp, Artificial Sequence
  primer
cccattcaccttcaagttgtg

SEQ ID NO: 50594 - DNA, 21 bp, Artificial Sequence
  primer
acgaagattgggataagcgac

SEQ ID NO: 50595 - DNA, 21 bp, Artificial Sequence
  primer
gaaagagaatatggcaagccc

SEQ ID NO: 50596 - DNA, 42 bp, Artificial Sequence
  primer
gtaaaacgacggccagttgacacttcatttaatccttgagtg

SEQ ID NO: 50597 - DNA, 21 bp, Artificial Sequence
  primer
ggctggtcttgaactgacctc

SEQ ID NO: 50598 - DNA, 21 bp, Artificial Sequence
  primer
ttccaagttgaaagatggcac

SEQ ID NO: 50599 - DNA, 23 bp, Artificial Sequence
  primer
ggtgaggatatagagggcacttg

SEQ ID NO: 50600 - DNA, 23 bp, Artificial Sequence
  primer
tttcagcagaagaatgtaaaccc

SEQ ID NO: 50601 - DNA, 21 bp, Artificial Sequence
  primer
tcctcagcattggatgacaag

SEQ ID NO: 50602 - DNA, 38 bp, Artificial Sequence
  primer
gtaaaacgacggccagtaaacctggcttgatagcatgg

SEQ ID NO: 50603 - DNA, 40 bp, Artificial Sequence
  primer
gtaaaacgacggccagtaatagcccatctctgtaaggctc

SEQ ID NO: 50604 - DNA, 26 bp, Artificial Sequence
  primer
ttgtgcatctcattgaatttagtacc

SEQ ID NO: 50605 - DNA, 21 bp, Artificial Sequence
  primer
ggagatgagtatgaatggccc

SEQ ID NO: 50606 - DNA, 22 bp, Artificial Sequence
  primer
agggtaaatacaagcatgggac

SEQ ID NO: 50607 - DNA, 22 bp, Artificial Sequence
  primer
gcaatgttcctcacttggtctc

SEQ ID NO: 50608 - DNA, 21 bp, Artificial Sequence
  primer
atgattgcccagaggtgtctc

SEQ ID NO: 50609 - DNA, 22 bp, Artificial Sequence
  primer
gactgtagcgaagccctgtatg

SEQ ID NO: 50610 - DNA, 40 bp, Artificial Sequence
  primer
gtaaaacgacggccagtgccatggctaaactgagttatca

SEQ ID NO: 50611 - DNA, 24 bp, Artificial Sequence
  primer
gcctgcaatttcatatacacattc

SEQ ID NO: 50612 - DNA, 37 bp, Artificial Sequence
  primer
gtaaaacgacggccagtggcaccagccttctagtgtg

SEQ ID NO: 50613 - DNA, 21 bp, Artificial Sequence
  primer
actcttgtggcaggcaatagg

SEQ ID NO: 50614 - DNA, 38 bp, Artificial Sequence
  primer
gtaaaacgacggccagtgatgttggcaaccaattcaac

SEQ ID NO: 50615 - DNA, 21 bp, Artificial Sequence
  primer
ccctgttctatctggctctgg

SEQ ID NO: 50616 - DNA, 39 bp, Artificial Sequence
  primer
gtaaaacgacggccagtccctagcgaaggaggacataac

SEQ ID NO: 50617 - DNA, 38 bp, Artificial Sequence
  primer
gtaaaacgacggccagtccttgaccacactcacctgac

SEQ ID NO: 50618 - DNA, 38 bp, Artificial Sequence
  primer
gtaaaacgacggccagtcagtgtcccaggctatcagtg

SEQ ID NO: 50619 - DNA, 21 bp, Artificial Sequence
  primer
ggcttgaacccaatatccttg

SEQ ID NO: 50620 - DNA, 37 bp, Artificial Sequence
  primer
gtaaaacgacggccagtagcagccagtatggtgttgg

SEQ ID NO: 50621 - DNA, 21 bp, Artificial Sequence
  primer
gaaatggatgtgagagccttg

SEQ ID NO: 50622 - DNA, 38 bp, Artificial Sequence
  primer
gtaaaacgacggccagttgctgtctgagtgttgtgcag

SEQ ID NO: 50623 - DNA, 21 bp, Artificial Sequence
  primer
tggcatgtatataccctgggc

SEQ ID NO: 50624 - DNA, 38 bp, Artificial Sequence
  primer
gtaaaacgacggccagttggctgtatgactctgttccc

SEQ ID NO: 50625 - DNA, 21 bp, Artificial Sequence
  primer
caggtgggagagcttcttctc

SEQ ID NO: 50626 - DNA, 38 bp, Artificial Sequence
  primer
gtaaaacgacggccagttagggaccaaacctgcacaag

SEQ ID NO: 50627 - DNA, 21 bp, Artificial Sequence
  primer
aaatcagcaggcagctctctc

SEQ ID NO: 50628 - DNA, 37 bp, Artificial Sequence
  primer
gtaaaacgacggccagtgaatggcatctctgcacctc

SEQ ID NO: 50629 - DNA, 36 bp, Artificial Sequence
  primer
gtaaaacgacggccagtgtctgctgcaggctctgtg

SEQ ID NO: 50630 - DNA, 21 bp, Artificial Sequence
  primer
cgggtcatcaagagttgtgtc

SEQ ID NO: 50631 - DNA, 38 bp, Artificial Sequence
  primer
gtaaaacgacggccagtatgacatgtggtggatgtgtg

SEQ ID NO: 50632 - DNA, 40 bp, Artificial Sequence
  primer
gtaaaacgacggccagtgggttgaattatgccaggtaaag

SEQ ID NO: 50633 - DNA, 41 bp, Artificial Sequence
  primer
gtaaaacgacggccagtcacctttaacctttgattgaatgc

SEQ ID NO: 50634 - DNA, 21 bp, Artificial Sequence
  primer
agcatctgcagaatcctctcc

SEQ ID NO: 50635 - DNA, 39 bp, Artificial Sequence
  primer
gtaaaacgacggccagttgtccatacagaggcttccatc

SEQ ID NO: 50636 - DNA, 38 bp, Artificial Sequence
  primer
gtaaaacgacggccagtggtccagggatggactgtaag

SEQ ID NO: 50637 - DNA, 20 bp, Artificial Sequence
  primer
gttgcctctgggtaggaagg

SEQ ID NO: 50638 - DNA, 38 bp, Artificial Sequence
  primer
gtaaaacgacggccagtatgatggcagtagtggtggtg

SEQ ID NO: 50639 - DNA, 22 bp, Artificial Sequence
  primer
cactgctattacagtcccaggc

SEQ ID NO: 50640 - DNA, 21 bp, Artificial Sequence
  primer
acatttgggaaacagcattcc

SEQ ID NO: 50641 - DNA, 21 bp, Artificial Sequence
  primer
cagtaatttggcctttgagcc

SEQ ID NO: 50642 - DNA, 38 bp, Artificial Sequence
  primer
gtaaaacgacggccagttcacactacccagcgcttatg

SEQ ID NO: 50643 - DNA, 38 bp, Artificial Sequence
  primer
gtaaaacgacggccagtcagctggagcagttctcacac

SEQ ID NO: 50644 - DNA, 21 bp, Artificial Sequence
  primer
gaagtgctttctacacgcacg

SEQ ID NO: 50645 - DNA, 38 bp, Artificial Sequence
  primer
gtaaaacgacggccagttgggagataaagagtgctccc

SEQ ID NO: 50646 - DNA, 38 bp, Artificial Sequence
  primer
gtaaaacgacggccagtagggaacttgggttgactgac

SEQ ID NO: 50647 - DNA, 38 bp, Artificial Sequence
  primer
gtaaaacgacggccagtaggctgtttgatgcatctttg

SEQ ID NO: 50648 - DNA, 37 bp, Artificial Sequence
  primer
gtaaaacgacggccagtaggaggactttcttgcgacc

SEQ ID NO: 50649 - DNA, 38 bp, Artificial Sequence
  primer
gtaaaacgacggccagtagagatggaaaggacagggtg

SEQ ID NO: 50650 - DNA, 37 bp, Artificial Sequence
  primer
gtaaaacgacggccagtagctacgcctgagtcccttc

SEQ ID NO: 50651 - DNA, 38 bp, Artificial Sequence
  primer
gtaaaacgacggccagtcaccaaggcctctttgagttg

SEQ ID NO: 50652 - DNA, 38 bp, Artificial Sequence
  primer
gtaaaacgacggccagtgaggagagtgatgcactggac

SEQ ID NO: 50653 - DNA, 38 bp, Artificial Sequence
  primer
gtaaaacgacggccagtgaaggtctcagcaaggaccag

SEQ ID NO: 50654 - DNA, 38 bp, Artificial Sequence
  primer
gtaaaacgacggccagtctcttacggagcccagaacac

SEQ ID NO: 50655 - DNA, 20 bp, Artificial Sequence
  primer
ggtttctgccaagcttctcc

SEQ ID NO: 50656 - DNA, 37 bp, Artificial Sequence
  primer
gtaaaacgacggccagtcctcatttgaattcccaccc

SEQ ID NO: 50657 - DNA, 38 bp, Artificial Sequence
  primer
gtaaaacgacggccagtaatcttctcccagtgccaaag

SEQ ID NO: 50658 - DNA, 19 bp, Artificial Sequence
  primer
gactgcagctgccttgatg

SEQ ID NO: 50659 - DNA, 38 bp, Artificial Sequence
  primer
gtaaaacgacggccagtgtggaggaagaaggtgacagg

SEQ ID NO: 50660 - DNA, 38 bp, Artificial Sequence
  primer
gtaaaacgacggccagttccagaccctgtagtgacagc

SEQ ID NO: 50661 - DNA, 21 bp, Artificial Sequence
  primer
cttcatagaaaccatgccacg

SEQ ID NO: 50662 - DNA, 38 bp, Artificial Sequence
  primer
gtaaaacgacggccagttcctgcttggcacatacaatg

SEQ ID NO: 50663 - DNA, 21 bp, Artificial Sequence
  primer
tagcagctcacattcactggg

SEQ ID NO: 50664 - DNA, 35 bp, Artificial Sequence
  primer
gtaaaacgacggccagtgacggcctgtgagggatg

SEQ ID NO: 50665 - DNA, 37 bp, Artificial Sequence
  primer
gtaaaacgacggccagtacccaccactcatggatagc

SEQ ID NO: 50666 - DNA, 21 bp, Artificial Sequence
  primer
ttgaaagggctttatgccttg

SEQ ID NO: 50667 - DNA, 20 bp, Artificial Sequence
  primer
tggtctggctagcggtctac

SEQ ID NO: 50668 - DNA, 24 bp, Artificial Sequence
  primer
ttcagtttactttcactgttgcag

SEQ ID NO: 50669 - DNA, 44 bp, Artificial Sequence
  primer
gtaaaacgacggccagtgatagaaggaggtaatgactttcagac

SEQ ID NO: 50670 - DNA, 38 bp, Artificial Sequence
  primer
gtaaaacgacggccagtggttcccaggcacataaagag

SEQ ID NO: 50671 - DNA, 36 bp, Artificial Sequence
  primer
gtaaaacgacggccagtctggaagggctcaggtttg

SEQ ID NO: 50672 - DNA, 21 bp, Artificial Sequence
  primer
tcaacccaagtctgttgatgc

SEQ ID NO: 50673 - DNA, 21 bp, Artificial Sequence
  primer
tgtcctgccactagacgtgtg

SEQ ID NO: 50674 - DNA, 22 bp, Artificial Sequence
  primer
ccagactttcactgcagacatc

SEQ ID NO: 50675 - DNA, 39 bp, Artificial Sequence
  primer
gtaaaacgacggccagtggcatccttggatgacaattag

SEQ ID NO: 50676 - DNA, 40 bp, Artificial Sequence
  primer
gtaaaacgacggccagttgcttaataggaaatgagccttg

SEQ ID NO: 50677 - DNA, 22 bp, Artificial Sequence
  primer
gggaaagacaactcaatctccc

SEQ ID NO: 50678 - DNA, 20 bp, Artificial Sequence
  primer
aagcttggaatgccctgaac

SEQ ID NO: 50679 - DNA, 38 bp, Artificial Sequence
  primer
gtaaaacgacggccagtaacaaggagcattgtgactgc

SEQ ID NO: 50680 - DNA, 38 bp, Artificial Sequence
  primer
gtaaaacgacggccagtatcattcctgcagtcaggttg

SEQ ID NO: 50681 - DNA, 21 bp, Artificial Sequence
  primer
tgagagcaagtatcagcccag

SEQ ID NO: 50682 - DNA, 19 bp, Artificial Sequence
  primer
atacaaccgcactccagcc

SEQ ID NO: 50683 - DNA, 38 bp, Artificial Sequence
  primer
gtaaaacgacggccagttgggctataagccaacacctc

SEQ ID NO: 50684 - DNA, 39 bp, Artificial Sequence
  primer
gtaaaacgacggccagtaggaagactctgtttcctgctg

SEQ ID NO: 50685 - DNA, 39 bp, Artificial Sequence
  primer
gtaaaacgacggccagttttgcctaattcagggctacag

SEQ ID NO: 50686 - DNA, 22 bp, Artificial Sequence
  primer
cccttgtttcctgctatgtgag

SEQ ID NO: 50687 - DNA, 20 bp, Artificial Sequence
  primer
ctcagcctctcaccaccttg

SEQ ID NO: 50688 - DNA, 21 bp, Artificial Sequence
  primer
cccacctgctttgagaatagc

SEQ ID NO: 50689 - DNA, 21 bp, Artificial Sequence
  primer
gagagcttggtgttgggaatc

SEQ ID NO: 50690 - DNA, 21 bp, Artificial Sequence
  primer
agaccctcccttctctccttg

SEQ ID NO: 50691 - DNA, 38 bp, Artificial Sequence
  primer
gtaaaacgacggccagttctaactcactggtcccaccc

SEQ ID NO: 50692 - DNA, 38 bp, Artificial Sequence
  primer
gtaaaacgacggccagttcaagaagtttgcacacaggc

SEQ ID NO: 50693 - DNA, 21 bp, Artificial Sequence
  primer
cacaattggcttcagaaggag

SEQ ID NO: 50694 - DNA, 38 bp, Artificial Sequence
  primer
gtaaaacgacggccagtcaaacagtgctgaagtcctgg

SEQ ID NO: 50695 - DNA, 38 bp, Artificial Sequence
  primer
gtaaaacgacggccagtctgggctaggccaactttatc

SEQ ID NO: 50696 - DNA, 38 bp, Artificial Sequence
  primer
gtaaaacgacggccagtagcaaggacaggatcaggaag

SEQ ID NO: 50697 - DNA, 21 bp, Artificial Sequence
  primer
gtgtatgcctaaggtggctgg

SEQ ID NO: 50698 - DNA, 38 bp, Artificial Sequence
  primer
gtaaaacgacggccagttgctgtctccagatccatcac

SEQ ID NO: 50699 - DNA, 21 bp, Artificial Sequence
  primer
tggttccaaagctaaaggagc

SEQ ID NO: 50700 - DNA, 38 bp, Artificial Sequence
  primer
gtaaaacgacggccagtttctccttctggtgctgtctg

SEQ ID NO: 50701 - DNA, 38 bp, Artificial Sequence
  primer
gtaaaacgacggccagttgctgtggacaagggttattg

SEQ ID NO: 50702 - DNA, 22 bp, Artificial Sequence
  primer
tttgtgacacatgagttggagc

SEQ ID NO: 50703 - DNA, 38 bp, Artificial Sequence
  primer
gtaaaacgacggccagtagattgagttgccatgatccc

SEQ ID NO: 50704 - DNA, 21 bp, Artificial Sequence
  primer
cagggcctgatacagagaagg

SEQ ID NO: 50705 - DNA, 38 bp, Artificial Sequence
  primer
gtaaaacgacggccagtggactatggtgcacttctccc

SEQ ID NO: 50706 - DNA, 38 bp, Artificial Sequence
  primer
gtaaaacgacggccagttttatccctcaggtaggcagg

SEQ ID NO: 50707 - DNA, 21 bp, Artificial Sequence
  primer
ggtccagggagtctcaagttc

SEQ ID NO: 50708 - DNA, 38 bp, Artificial Sequence
  primer
gtaaaacgacggccagtaacaggccagactggtgtatg

SEQ ID NO: 50709 - DNA, 38 bp, Artificial Sequence
  primer
gtaaaacgacggccagtgagcaggtatgtcttggaggg

SEQ ID NO: 50710 - DNA, 21 bp, Artificial Sequence
  primer
cccaaaggaagtcagcagttc

SEQ ID NO: 50711 - DNA, 21 bp, Artificial Sequence
  primer
tgactattccacacattccgc

SEQ ID NO: 50712 - DNA, 37 bp, Artificial Sequence
  primer
gtaaaacgacggccagtaaagcaaactctgtgccagc

SEQ ID NO: 50713 - DNA, 38 bp, Artificial Sequence
  primer
gtaaaacgacggccagtccctagtcctgaggatgcttg

SEQ ID NO: 50714 - DNA, 21 bp, Artificial Sequence
  primer
atctcaagtgtgagctgtgcc

SEQ ID NO: 50715 - DNA, 38 bp, Artificial Sequence
  primer
gtaaaacgacggccagttatccatagccctcaatgctg

SEQ ID NO: 50716 - DNA, 38 bp, Artificial Sequence
  primer
gtaaaacgacggccagttaagcaggctcttggtcttcc

SEQ ID NO: 50717 - DNA, 37 bp, Artificial Sequence
  primer
gtaaaacgacggccagtggcagcaactctacgctgtc

SEQ ID NO: 50718 - DNA, 18 bp, Artificial Sequence
  primer
gaggactgtgagcagccg

SEQ ID NO: 50719 - DNA, 22 bp, Artificial Sequence
  primer
aaatatgacagagggttccagc

SEQ ID NO: 50720 - DNA, 20 bp, Artificial Sequence
  primer
aattgaagcccaatgctctg

SEQ ID NO: 50721 - DNA, 38 bp, Artificial Sequence
  primer
gtaaaacgacggccagttgtcatggttgtatggctgtg

SEQ ID NO: 50722 - DNA, 21 bp, Artificial Sequence
  primer
tcctaccacaacccatgtagc

SEQ ID NO: 50723 - DNA, 38 bp, Artificial Sequence
  primer
gtaaaacgacggccagttccagagtggcaagcacatag

SEQ ID NO: 50724 - DNA, 38 bp, Artificial Sequence
  primer
gtaaaacgacggccagtcaaggtgagagaagcatggtg

SEQ ID NO: 50725 - DNA, 38 bp, Artificial Sequence
  primer
gtaaaacgacggccagtgcgtaggacatcacagtcacc

SEQ ID NO: 50726 - DNA, 37 bp, Artificial Sequence
  primer
gtaaaacgacggccagttttgtagttgctgctttgcc

SEQ ID NO: 50727 - DNA, 42 bp, Artificial Sequence
  primer
gtaaaacgacggccagtcattccattaagaatgtctgtgtcc

SEQ ID NO: 50728 - DNA, 21 bp, Artificial Sequence
  primer
actgacgcccagaatttaagc

SEQ ID NO: 50729 - DNA, 38 bp, Artificial Sequence
  primer
gtaaaacgacggccagtgtcagttgcagcaggttgatg

SEQ ID NO: 50730 - DNA, 22 bp, Artificial Sequence
  primer
cgatttcgtcggaatattaacc

SEQ ID NO: 50731 - DNA, 21 bp, Artificial Sequence
  primer
gttggcagtaagggtgaggac

SEQ ID NO: 50732 - DNA, 21 bp, Artificial Sequence
  primer
aggcaggcagatagagcaaag

SEQ ID NO: 50733 - DNA, 38 bp, Artificial Sequence
  primer
gtaaaacgacggccagtgctgtgctgcattgtgtagtg

SEQ ID NO: 50734 - DNA, 25 bp, Artificial Sequence
  primer
tgtaatactgtttggaatgtttccc

SEQ ID NO: 50735 - DNA, 39 bp, Artificial Sequence
  primer
gtaaaacgacggccagtactagcagaacgctttcatgtg

SEQ ID NO: 50736 - DNA, 20 bp, Artificial Sequence
  primer
acccagacaagatcactggc

SEQ ID NO: 50737 - DNA, 21 bp, Artificial Sequence
  primer
tcttgactttcatgaggctgg

SEQ ID NO: 50738 - DNA, 37 bp, Artificial Sequence
  primer
gtaaaacgacggccagtagggtggcagtgttgatctg

SEQ ID NO: 50739 - DNA, 22 bp, Artificial Sequence
  primer
ttatgccgtgtcattgctaaat

SEQ ID NO: 50740 - DNA, 38 bp, Artificial Sequence
  primer
gtaaaacgacggccagtcttgccacggtccttaaactc

SEQ ID NO: 50741 - DNA, 21 bp, Artificial Sequence
  primer
tgcattagggaaaggaactgc

SEQ ID NO: 50742 - DNA, 21 bp, Artificial Sequence
  primer
aggtgaaatccatgcctcaag

SEQ ID NO: 50743 - DNA, 20 bp, Artificial Sequence
  primer
ggcaagtttggatcatcgtg

SEQ ID NO: 50744 - DNA, 39 bp, Artificial Sequence
  primer
gtaaaacgacggccagtcagtactgcctgtgtatgtgcg

SEQ ID NO: 50745 - DNA, 24 bp, Artificial Sequence
  primer
tccagatgcttactgaagaaggtt

SEQ ID NO: 50746 - DNA, 22 bp, Artificial Sequence
  primer
tgaggtacccatatccagcttc

SEQ ID NO: 50747 - DNA, 23 bp, Artificial Sequence
  primer
cagaatttgacttagaggcatcg

SEQ ID NO: 50748 - DNA, 21 bp, Artificial Sequence
  primer
tttcttgcttgaggagacgac

SEQ ID NO: 50749 - DNA, 38 bp, Artificial Sequence
  primer
gtaaaacgacggccagttccttggcacaaagaaatacg

SEQ ID NO: 50750 - DNA, 38 bp, Artificial Sequence
  primer
gtaaaacgacggccagttgtgagatgttgcagtggttg

SEQ ID NO: 50751 - DNA, 21 bp, Artificial Sequence
  primer
tctaaatgaacgaacgcttgc

SEQ ID NO: 50752 - DNA, 21 bp, Artificial Sequence
  primer
atgaatccgttctcttggctc

SEQ ID NO: 50753 - DNA, 21 bp, Artificial Sequence
  primer
ggaagtcctcgttcattaccc

SEQ ID NO: 50754 - DNA, 18 bp, Artificial Sequence
  primer
ccaagatgaggccactgc

SEQ ID NO: 50755 - DNA, 37 bp, Artificial Sequence
  primer
gtaaaacgacggccagtgagacgatatggcctgcaaa

SEQ ID NO: 50756 - DNA, 20 bp, Artificial Sequence
  primer
tgcacctcatgcaagtgaac

SEQ ID NO: 50757 - DNA, 21 bp, Artificial Sequence
  primer
aactgagttcctggcgtcttc

SEQ ID NO: 50758 - DNA, 23 bp, Artificial Sequence
  primer
ccgacaaacactagtcatggaag

SEQ ID NO: 50759 - DNA, 21 bp, Artificial Sequence
  primer
gatattgatggaagccaaggg

SEQ ID NO: 50760 - DNA, 21 bp, Artificial Sequence
  primer
agtaatcagcccatctgtccc

SEQ ID NO: 50761 - DNA, 21 bp, Artificial Sequence
  primer
agtaaagtgctcggcccatag

SEQ ID NO: 50762 - DNA, 38 bp, Artificial Sequence
  primer
gtaaaacgacggccagtgatggcaattaggatgtgtgc

SEQ ID NO: 50763 - DNA, 24 bp, Artificial Sequence
  primer
cctttggtttcatagcattctagc

SEQ ID NO: 50764 - DNA, 22 bp, Artificial Sequence
  primer
tgcactgctaactggtacgaag

SEQ ID NO: 50765 - DNA, 21 bp, Artificial Sequence
  primer
tctagtcctgggaactgtggc

SEQ ID NO: 50766 - DNA, 38 bp, Artificial Sequence
  primer
gtaaaacgacggccagtaaacctaaggctcttcccacc

SEQ ID NO: 50767 - DNA, 38 bp, Artificial Sequence
  primer
gtaaaacgacggccagtaagagacttgttagcgcccag

SEQ ID NO: 50768 - DNA, 21 bp, Artificial Sequence
  primer
tggatcatctgtttgggtttg

SEQ ID NO: 50769 - DNA, 38 bp, Artificial Sequence
  primer
gtaaaacgacggccagtgctgtgtctccctctcgtttc

SEQ ID NO: 50770 - DNA, 36 bp, Artificial Sequence
  primer
gtaaaacgacggccagtgaagtttggcggaacatgg

SEQ ID NO: 50771 - DNA, 20 bp, Artificial Sequence
  primer
cccacctcaccctctcaaag

SEQ ID NO: 50772 - DNA, 24 bp, Artificial Sequence
  primer
tcaactgttgtatcccagtattgc

SEQ ID NO: 50773 - DNA, 21 bp, Artificial Sequence
  primer
tcaacgtaagtggtgtcctgc

SEQ ID NO: 50774 - DNA, 38 bp, Artificial Sequence
  primer
gtaaaacgacggccagtgaacgttgggaagtctgatcc

SEQ ID NO: 50775 - DNA, 37 bp, Artificial Sequence
  primer
gtaaaacgacggccagttcatctgtctgacattcccg

SEQ ID NO: 50776 - DNA, 21 bp, Artificial Sequence
  primer
aactatggatcctctgggctc

SEQ ID NO: 50777 - DNA, 37 bp, Artificial Sequence
  primer
gtaaaacgacggccagtacaggaatgagccactgtgc

SEQ ID NO: 50778 - DNA, 21 bp, Artificial Sequence
  primer
atttctggcctttcctccttc

SEQ ID NO: 50779 - DNA, 39 bp, Artificial Sequence
  primer
gtaaaacgacggccagtcagcattgagaaataaggtcgg

SEQ ID NO: 50780 - DNA, 38 bp, Artificial Sequence
  primer
gtaaaacgacggccagtcctgcagtgtttgatgtttgc

SEQ ID NO: 50781 - DNA, 39 bp, Artificial Sequence
  primer
gtaaaacgacggccagttcaccattatctgaggttgtgc

SEQ ID NO: 50782 - DNA, 41 bp, Artificial Sequence
  primer
gtaaaacgacggccagtcaaatgttcttctcaccagttacg

SEQ ID NO: 50783 - DNA, 21 bp, Artificial Sequence
  primer
aaaccagaccatttcgtgttg

SEQ ID NO: 50784 - DNA, 20 bp, Artificial Sequence
  primer
gatcagtgccagtgtagggc

SEQ ID NO: 50785 - DNA, 44 bp, Artificial Sequence
  primer
gtaaaacgacggccagttcagtctcctttgaatgaaacctatac

SEQ ID NO: 50786 - DNA, 21 bp, Artificial Sequence
  primer
gaaatcgtgtcatagccatcg

SEQ ID NO: 50787 - DNA, 22 bp, Artificial Sequence
  primer
gataagtccacgcttctcatgc

SEQ ID NO: 50788 - DNA, 42 bp, Artificial Sequence
  primer
gtaaaacgacggccagtatataaggcatcttgaattagccac

SEQ ID NO: 50789 - DNA, 45 bp, Artificial Sequence
  primer
gtaaaacgacggccagttgatttaaactagttgtacccagatttc

SEQ ID NO: 50790 - DNA, 38 bp, Artificial Sequence
  primer
gtaaaacgacggccagttccagagaggaaagaaggcac

SEQ ID NO: 50791 - DNA, 38 bp, Artificial Sequence
  primer
gtaaaacgacggccagttacttccaggatgccatgttc

SEQ ID NO: 50792 - DNA, 38 bp, Artificial Sequence
  primer
gtaaaacgacggccagtgcttctctaacccattgcctg

SEQ ID NO: 50793 - DNA, 38 bp, Artificial Sequence
  primer
gtaaaacgacggccagttttcttcctgggatcaagcag

SEQ ID NO: 50794 - DNA, 21 bp, Artificial Sequence
  primer
caggtaaatctctccatgccc

SEQ ID NO: 50795 - DNA, 21 bp, Artificial Sequence
  primer
gagttgcaggaaggagacagg

SEQ ID NO: 50796 - DNA, 21 bp, Artificial Sequence
  primer
taagaaggcactcatccctgc

SEQ ID NO: 50797 - DNA, 38 bp, Artificial Sequence
  primer
gtaaaacgacggccagttagaatgcagcgtgtttccag

SEQ ID NO: 50798 - DNA, 38 bp, Artificial Sequence
  primer
gtaaaacgacggccagtaagatgggctgttactgtggg

SEQ ID NO: 50799 - DNA, 38 bp, Artificial Sequence
  primer
gtaaaacgacggccagtccaagttcaggtttggtttgg

SEQ ID NO: 50800 - DNA, 25 bp, Artificial Sequence
  primer
aaatagatacacttcttggcagcag

SEQ ID NO: 50801 - DNA, 38 bp, Artificial Sequence
  primer
gtaaaacgacggccagtgggctcgtttaggtatgaacc

SEQ ID NO: 50802 - DNA, 41 bp, Artificial Sequence
  primer
gtaaaacgacggccagtttcttatggaacttgtggaggaag

SEQ ID NO: 50803 - DNA, 38 bp, Artificial Sequence
  primer
gtaaaacgacggccagtctgtgatcctccctgtctgtg

SEQ ID NO: 50804 - DNA, 21 bp, Artificial Sequence
  primer
tctgtgtcatcaaatcctgcc

SEQ ID NO: 50805 - DNA, 22 bp, Artificial Sequence
  primer
cctcaccctcctataaccttcc

SEQ ID NO: 50806 - DNA, 38 bp, Artificial Sequence
  primer
gtaaaacgacggccagtgcaatacagcaagaccctgtc

SEQ ID NO: 50807 - DNA, 21 bp, Artificial Sequence
  primer
tgtgagtgctccttcatttgg

SEQ ID NO: 50808 - DNA, 38 bp, Artificial Sequence
  primer
gtaaaacgacggccagtcacttgctcattcccagtgac

SEQ ID NO: 50809 - DNA, 21 bp, Artificial Sequence
  primer
aagacctttcattgctctggg

SEQ ID NO: 50810 - DNA, 38 bp, Artificial Sequence
  primer
gtaaaacgacggccagtcagtgagaacttgatggtggg

SEQ ID NO: 50811 - DNA, 38 bp, Artificial Sequence
  primer
gtaaaacgacggccagtggtcaaagggagtgattggtg

SEQ ID NO: 50812 - DNA, 23 bp, Artificial Sequence
  primer
agaccaggcagatgtgttatagg

SEQ ID NO: 50813 - DNA, 38 bp, Artificial Sequence
  primer
gtaaaacgacggccagttttggctcagtctctacgagg

SEQ ID NO: 50814 - DNA, 38 bp, Artificial Sequence
  primer
gtaaaacgacggccagtgcttccctcacttacctgtcg

SEQ ID NO: 50815 - DNA, 21 bp, Artificial Sequence
  primer
cacaggacacatgtttcaccc

SEQ ID NO: 50816 - DNA, 21 bp, Artificial Sequence
  primer
accaaagtccatccagtccac

SEQ ID NO: 50817 - DNA, 38 bp, Artificial Sequence
  primer
gtaaaacgacggccagttggttagccacaagcaaacag

SEQ ID NO: 50818 - DNA, 21 bp, Artificial Sequence
  primer
tgaatgatgggagaaagaccc

SEQ ID NO: 50819 - DNA, 21 bp, Artificial Sequence
  primer
ctagtcagtgcctgttcggtg

SEQ ID NO: 50820 - DNA, 21 bp, Artificial Sequence
  primer
tacagtgccagcaacatttcc

SEQ ID NO: 50821 - DNA, 38 bp, Artificial Sequence
  primer
gtaaaacgacggccagtacgcgtgtgtctgattagctc

SEQ ID NO: 50822 - DNA, 39 bp, Artificial Sequence
  primer
gtaaaacgacggccagttcctagggtagaaagagcgtcc

SEQ ID NO: 50823 - DNA, 38 bp, Artificial Sequence
  primer
gtaaaacgacggccagtttaaagcctcagcactcctgg

SEQ ID NO: 50824 - DNA, 21 bp, Artificial Sequence
  primer
ctccgtaactccaacaccctc

SEQ ID NO: 50825 - DNA, 38 bp, Artificial Sequence
  primer
gtaaaacgacggccagttttctctgagcctccatctcc

SEQ ID NO: 50826 - DNA, 21 bp, Artificial Sequence
  primer
gctttgaaggtgccatgtagg

SEQ ID NO: 50827 - DNA, 42 bp, Artificial Sequence
  primer
gtaaaacgacggccagtgaatgagtatgaggacactctcacc

SEQ ID NO: 50828 - DNA, 38 bp, Artificial Sequence
  primer
gtaaaacgacggccagtgtagagctggtctgaggctgg

SEQ ID NO: 50829 - DNA, 38 bp, Artificial Sequence
  primer
gtaaaacgacggccagtcttaagtggcggttccatgtg

SEQ ID NO: 50830 - DNA, 37 bp, Artificial Sequence
  primer
gtaaaacgacggccagtcccttccttctccttgttgg

SEQ ID NO: 50831 - DNA, 21 bp, Artificial Sequence
  primer
gccaacactaacccttgatcc

SEQ ID NO: 50832 - DNA, 37 bp, Artificial Sequence
  primer
gtaaaacgacggccagtacagccaaggtaagcgtgtg

SEQ ID NO: 50833 - DNA, 38 bp, Artificial Sequence
  primer
gtaaaacgacggccagtctaaagggtggtgctgacagg

SEQ ID NO: 50834 - DNA, 38 bp, Artificial Sequence
  primer
gtaaaacgacggccagttaagcaggtgtcctaccctgg

SEQ ID NO: 50835 - DNA, 38 bp, Artificial Sequence
  primer
gtaaaacgacggccagtgactacacagcccagaaaggg

SEQ ID NO: 50836 - DNA, 38 bp, Artificial Sequence
  primer
gtaaaacgacggccagttctgccctctgtcctatctcc

SEQ ID NO: 50837 - DNA, 38 bp, Artificial Sequence
  primer
gtaaaacgacggccagtcagtacatgacaggcgaggac

SEQ ID NO: 50838 - DNA, 37 bp, Artificial Sequence
  primer
gtaaaacgacggccagtctagcagcaataagggcgtg

SEQ ID NO: 50839 - DNA, 38 bp, Artificial Sequence
  primer
gtaaaacgacggccagtgaaccatcacctgctgttcac

SEQ ID NO: 50840 - DNA, 38 bp, Artificial Sequence
  primer
gtaaaacgacggccagtctcagtctactgggaccaggg

SEQ ID NO: 50841 - DNA, 38 bp, Artificial Sequence
  primer
gtaaaacgacggccagtcagctttaagggaagctgctg

SEQ ID NO: 50842 - DNA, 38 bp, Artificial Sequence
  primer
gtaaaacgacggccagtttatatttggaaagtgggcgg

SEQ ID NO: 50843 - DNA, 38 bp, Artificial Sequence
  primer
gtaaaacgacggccagtagctgagtaggaagggactgg

SEQ ID NO: 50844 - DNA, 38 bp, Artificial Sequence
  primer
gtaaaacgacggccagtggcacttccactcctcttgtc

SEQ ID NO: 50845 - DNA, 38 bp, Artificial Sequence
  primer
gtaaaacgacggccagtcctccattgctaataaagccc

SEQ ID NO: 50846 - DNA, 20 bp, Artificial Sequence
  primer
atcttggtgagagccaagcc

SEQ ID NO: 50847 - DNA, 38 bp, Artificial Sequence
  primer
gtaaaacgacggccagttacaagcaggtaggagtgggc

SEQ ID NO: 50848 - DNA, 38 bp, Artificial Sequence
  primer
gtaaaacgacggccagtcctccaagatggctttaatgg

SEQ ID NO: 50849 - DNA, 38 bp, Artificial Sequence
  primer
gtaaaacgacggccagttgagcagagctcctgtctagc

SEQ ID NO: 50850 - DNA, 37 bp, Artificial Sequence
  primer
gtaaaacgacggccagtgccatgagggaagacttctg

SEQ ID NO: 50851 - DNA, 21 bp, Artificial Sequence
  primer
tcaagatacagattggccagg

SEQ ID NO: 50852 - DNA, 21 bp, Artificial Sequence
  primer
agagcacaaagaaagggatgg

SEQ ID NO: 50853 - DNA, 21 bp, Artificial Sequence
  primer
cccatctgtcactcgtgtttg

SEQ ID NO: 50854 - DNA, 21 bp, Artificial Sequence
  primer
aggtgggagaatgacttgagc

SEQ ID NO: 50855 - DNA, 38 bp, Artificial Sequence
  primer
gtaaaacgacggccagtacacactggagatcatcgtgc

SEQ ID NO: 50856 - DNA, 38 bp, Artificial Sequence
  primer
gtaaaacgacggccagtagtggtacttggccaaagagg

SEQ ID NO: 50857 - DNA, 19 bp, Artificial Sequence
  primer
gtcggcaggttgagcagac

SEQ ID NO: 50858 - DNA, 38 bp, Artificial Sequence
  primer
gtaaaacgacggccagtctatgctgaggaggacatggg

SEQ ID NO: 50859 - DNA, 21 bp, Artificial Sequence
  primer
ggtacaggtgaggagattggc

SEQ ID NO: 50860 - DNA, 37 bp, Artificial Sequence
  primer
gtaaaacgacggccagtcgtttccttccaggtgagtg

SEQ ID NO: 50861 - DNA, 21 bp, Artificial Sequence
  primer
gctcacaagggagatgggtag

SEQ ID NO: 50862 - DNA, 38 bp, Artificial Sequence
  primer
gtaaaacgacggccagtgaggcggtgaatgaggtctac

SEQ ID NO: 50863 - DNA, 38 bp, Artificial Sequence
  primer
gtaaaacgacggccagtttcgagacacctatctctggg

SEQ ID NO: 50864 - DNA, 21 bp, Artificial Sequence
  primer
tttgtgtacaaggagccatcg

SEQ ID NO: 50865 - DNA, 37 bp, Artificial Sequence
  primer
gtaaaacgacggccagtctctccaggaacagggcttg

SEQ ID NO: 50866 - DNA, 21 bp, Artificial Sequence
  primer
agattctgttcattgcctggg

SEQ ID NO: 50867 - DNA, 38 bp, Artificial Sequence
  primer
gtaaaacgacggccagttgctacagatggtgcttcagg

SEQ ID NO: 50868 - DNA, 38 bp, Artificial Sequence
  primer
gtaaaacgacggccagtctcctattgcgggtctttctg

SEQ ID NO: 50869 - DNA, 37 bp, Artificial Sequence
  primer
gtaaaacgacggccagtgaggaggaagaggatgtggg

SEQ ID NO: 50870 - DNA, 25 bp, Artificial Sequence
  primer
cgaatttctagccttattgttatgc

SEQ ID NO: 50871 - DNA, 24 bp, Artificial Sequence
  primer
aaacatcaaggagtacaagaaggg

SEQ ID NO: 50872 - DNA, 38 bp, Artificial Sequence
  primer
gtaaaacgacggccagtctcgggactgcagaactcttg

SEQ ID NO: 50873 - DNA, 24 bp, Artificial Sequence
  primer
tctactccttagctgggttaaagg

SEQ ID NO: 50874 - DNA, 37 bp, Artificial Sequence
  primer
gtaaaacgacggccagttggcaacagctaccaggatg

SEQ ID NO: 50875 - DNA, 43 bp, Artificial Sequence
  primer
gtaaaacgacggccagttctgtctgtggataaataggtcattc

SEQ ID NO: 50876 - DNA, 38 bp, Artificial Sequence
  primer
gtaaaacgacggccagttaggcaaaggcacaggtgtag

SEQ ID NO: 50877 - DNA, 43 bp, Artificial Sequence
  primer
gtaaaacgacggccagtagtaagtagcagaagcagctttcttt

SEQ ID NO: 50878 - DNA, 20 bp, Artificial Sequence
  primer
ctttgttgagcgtttctgcc

SEQ ID NO: 50879 - DNA, 42 bp, Artificial Sequence
  primer
gtaaaacgacggccagtcatctctgctgagaattgagacttc

SEQ ID NO: 50880 - DNA, 21 bp, Artificial Sequence
  primer
ctctttgtggctcatcattgg

SEQ ID NO: 50881 - DNA, 37 bp, Artificial Sequence
  primer
gtaaaacgacggccagtacctccatctcccgtgattc

SEQ ID NO: 50882 - DNA, 25 bp, Artificial Sequence
  primer
aaatgaaatgatttagaggcatgag

SEQ ID NO: 50883 - DNA, 38 bp, Artificial Sequence
  primer
gtaaaacgacggccagttcagctttgtcactcacttgg

SEQ ID NO: 50884 - DNA, 38 bp, Artificial Sequence
  primer
gtaaaacgacggccagtaggcacattgttcttcattgg

SEQ ID NO: 50885 - DNA, 38 bp, Artificial Sequence
  primer
gtaaaacgacggccagttcagaaacagtggcagctctc

SEQ ID NO: 50886 - DNA, 39 bp, Artificial Sequence
  primer
gtaaaacgacggccagtgatatgggacaaatttggcttg

SEQ ID NO: 50887 - DNA, 21 bp, Artificial Sequence
  primer
gcttgttgctcctggagactt

SEQ ID NO: 50888 - DNA, 38 bp, Artificial Sequence
  primer
gtaaaacgacggccagtggtccgtggtcctttagaagt

SEQ ID NO: 50889 - DNA, 20 bp, Artificial Sequence
  primer
ggctcagctaatgcaacgtg

SEQ ID NO: 50890 - DNA, 18 bp, Artificial Sequence
  primer
ccagcctggcaacagaga

SEQ ID NO: 50891 - DNA, 38 bp, Artificial Sequence
  primer
gtaaaacgacggccagtatccatcagctgcaaagtcat

SEQ ID NO: 50892 - DNA, 37 bp, Artificial Sequence
  primer
gtaaaacgacggccagtgcatcattgaatggttcacg

SEQ ID NO: 50893 - DNA, 28 bp, Artificial Sequence
  primer
aaatagtccaagtgtttagagttgttgt

SEQ ID NO: 50894 - DNA, 21 bp, Artificial Sequence
  primer
ttgtcagcacgattgctagtg

SEQ ID NO: 50895 - DNA, 44 bp, Artificial Sequence
  primer
gtaaaacgacggccagtcccaaactggataccaagtactatctc

SEQ ID NO: 50896 - DNA, 41 bp, Artificial Sequence
  primer
gtaaaacgacggccagtaatctcatcatagtttcctgtccc

SEQ ID NO: 50897 - DNA, 41 bp, Artificial Sequence
  primer
gtaaaacgacggccagttgcatgcaaatatatgacaaaggt

SEQ ID NO: 50898 - DNA, 39 bp, Artificial Sequence
  primer
gtaaaacgacggccagttccttacctgaaggcagaaatg

SEQ ID NO: 50899 - DNA, 42 bp, Artificial Sequence
  primer
gtaaaacgacggccagtaagtgttgtctgaatcaaatggttt

SEQ ID NO: 50900 - DNA, 22 bp, Artificial Sequence
  primer
ccattgcaaagaacaagaaagg

SEQ ID NO: 50901 - DNA, 20 bp, Artificial Sequence
  primer
aaagcaccattgtcaggttt

SEQ ID NO: 50902 - DNA, 21 bp, Artificial Sequence
  primer
gtctgctgcatgtttgaaagc

SEQ ID NO: 50903 - DNA, 41 bp, Artificial Sequence
  primer
gtaaaacgacggccagtatacatagggaggcctgtaacatc

SEQ ID NO: 50904 - DNA, 44 bp, Artificial Sequence
  primer
gtaaaacgacggccagtttgactctgtgtctcacactattaacc

SEQ ID NO: 50905 - DNA, 25 bp, Artificial Sequence
  primer
aattcaacccttaacacatgacttc

SEQ ID NO: 50906 - DNA, 44 bp, Artificial Sequence
  primer
gtaaaacgacggccagttgaaatatctctgaaactaatttggtg

SEQ ID NO: 50907 - DNA, 37 bp, Artificial Sequence
  primer
gtaaaacgacggccagtctctaggcctgcatagcgac

SEQ ID NO: 50908 - DNA, 29 bp, Artificial Sequence
  primer
cctaacctgatagttacagttcatcttca

SEQ ID NO: 50909 - DNA, 40 bp, Artificial Sequence
  primer
gtaaaacgacggccagtgcgtctggcctcagtgtattatc

SEQ ID NO: 50910 - DNA, 21 bp, Artificial Sequence
  primer
atggtatatggtgcctttggc

SEQ ID NO: 50911 - DNA, 42 bp, Artificial Sequence
  primer
gtaaaacgacggccagtgtcacttgttagtagccctatttgc

SEQ ID NO: 50912 - DNA, 37 bp, Artificial Sequence
  primer
gtaaaacgacggccagtagtcaccctcaggccttctc

SEQ ID NO: 50913 - DNA, 23 bp, Artificial Sequence
  primer
catctctttgaaatcctctgtgc

SEQ ID NO: 50914 - DNA, 24 bp, Artificial Sequence
  primer
tgtaccatcccttataccataaca

SEQ ID NO: 50915 - DNA, 27 bp, Artificial Sequence
  primer
gtagtcagtccttgagttcctattctg

SEQ ID NO: 50916 - DNA, 19 bp, Artificial Sequence
  primer
aagtggtccacctgccttg

SEQ ID NO: 50917 - DNA, 24 bp, Artificial Sequence
  primer
tggaagttagtaagaaatggtggc

SEQ ID NO: 50918 - DNA, 21 bp, Artificial Sequence
  primer
aaggaaagcaaggcaaacatc

SEQ ID NO: 50919 - DNA, 38 bp, Artificial Sequence
  primer
gtaaaacgacggccagtttcgtgtcatgttccttgctc

SEQ ID NO: 50920 - DNA, 21 bp, Artificial Sequence
  primer
tttgaaagctctctcagcacc

SEQ ID NO: 50921 - DNA, 21 bp, Artificial Sequence
  primer
tgtagtcccaaattggagcag

SEQ ID NO: 50922 - DNA, 38 bp, Artificial Sequence
  primer
gtaaaacgacggccagtagttaacttgagccgtggagg

SEQ ID NO: 50923 - DNA, 38 bp, Artificial Sequence
  primer
gtaaaacgacggccagtccaaatatttcgggaaactgc

SEQ ID NO: 50924 - DNA, 38 bp, Artificial Sequence
  primer
gtaaaacgacggccagtcaggagccactttcctaaacc

SEQ ID NO: 50925 - DNA, 43 bp, Artificial Sequence
  primer
gtaaaacgacggccagtagcttcctatgtcatcaaatattgtc

SEQ ID NO: 50926 - DNA, 39 bp, Artificial Sequence
  primer
gtaaaacgacggccagtggagatggctgtcatattcagg

SEQ ID NO: 50927 - DNA, 21 bp, Artificial Sequence
  primer
tggccatattcagtgttcctg

SEQ ID NO: 50928 - DNA, 38 bp, Artificial Sequence
  primer
gtaaaacgacggccagtcttcccagaaatcgtttgtcc

SEQ ID NO: 50929 - DNA, 24 bp, Artificial Sequence
  primer
tgaaagaaacacagtgcaacaatc

SEQ ID NO: 50930 - DNA, 38 bp, Artificial Sequence
  primer
gtaaaacgacggccagtcccatgaatggaagtctcagc

SEQ ID NO: 50931 - DNA, 38 bp, Artificial Sequence
  primer
gtaaaacgacggccagtagaccagaacatcctgttggc

SEQ ID NO: 50932 - DNA, 38 bp, Artificial Sequence
  primer
gtaaaacgacggccagtcaaattctgaggagcaaaggg

SEQ ID NO: 50933 - DNA, 38 bp, Artificial Sequence
  primer
gtaaaacgacggccagtttaccatttcaggaggtctcg

SEQ ID NO: 50934 - DNA, 21 bp, Artificial Sequence
  primer
caagttggtctgcattgcttg

SEQ ID NO: 50935 - DNA, 37 bp, Artificial Sequence
  primer
gtaaaacgacggccagtcttctggtctgaaacgctgg

SEQ ID NO: 50936 - DNA, 38 bp, Artificial Sequence
  primer
gtaaaacgacggccagttcatccaccctatccctcttc

SEQ ID NO: 50937 - DNA, 39 bp, Artificial Sequence
  primer
gtaaaacgacggccagtctgaggttgtgatttccagatg

SEQ ID NO: 50938 - DNA, 21 bp, Artificial Sequence
  primer
catgcttcaggaacgaacaag

SEQ ID NO: 50939 - DNA, 39 bp, Artificial Sequence
  primer
gtaaaacgacggccagtagcatttctgtgagtctttccc

SEQ ID NO: 50940 - DNA, 38 bp, Artificial Sequence
  primer
gtaaaacgacggccagtacctgtctctcccaatgttcc

SEQ ID NO: 50941 - DNA, 39 bp, Artificial Sequence
  primer
gtaaaacgacggccagtttgattgccttaacctggagag

SEQ ID NO: 50942 - DNA, 39 bp, Artificial Sequence
  primer
gtaaaacgacggccagtgcgaggactcagtaaacactgg

SEQ ID NO: 50943 - DNA, 44 bp, Artificial Sequence
  primer
gtaaaacgacggccagtgaagtatcagtctcttattgggtaggg

SEQ ID NO: 50944 - DNA, 39 bp, Artificial Sequence
  primer
gtaaaacgacggccagtgatctccagcctagcagtgatg

SEQ ID NO: 50945 - DNA, 38 bp, Artificial Sequence
  primer
gtaaaacgacggccagtttagctggcatcactgtggag

SEQ ID NO: 50946 - DNA, 38 bp, Artificial Sequence
  primer
gtaaaacgacggccagtgtggcgactttgtctcctacc

SEQ ID NO: 50947 - DNA, 38 bp, Artificial Sequence
  primer
gtaaaacgacggccagtgttactcagggccagttgctc

SEQ ID NO: 50948 - DNA, 38 bp, Artificial Sequence
  primer
gtaaaacgacggccagtcaccactggacatggaacatc

SEQ ID NO: 50949 - DNA, 39 bp, Artificial Sequence
  primer
gtaaaacgacggccagtcatttgcatatttcaacggtcc

SEQ ID NO: 50950 - DNA, 20 bp, Artificial Sequence
  primer
gtttgtgtctggccatgctg

SEQ ID NO: 50951 - DNA, 38 bp, Artificial Sequence
  primer
gtaaaacgacggccagtcctagtctctgctgccctctg

SEQ ID NO: 50952 - DNA, 43 bp, Artificial Sequence
  primer
gtaaaacgacggccagtaaaggtcacacaaagtagaagaacag

SEQ ID NO: 50953 - DNA, 38 bp, Artificial Sequence
  primer
gtaaaacgacggccagtacggtcttggtaaggatctgc

SEQ ID NO: 50954 - DNA, 21 bp, Artificial Sequence
  primer
ttggacaatgacctctggttg

SEQ ID NO: 50955 - DNA, 36 bp, Artificial Sequence
  primer
gtaaaacgacggccagttgccctttgcaactcagtg

SEQ ID NO: 50956 - DNA, 39 bp, Artificial Sequence
  primer
gtaaaacgacggccagtcattctaccttgcacttgctcc

SEQ ID NO: 50957 - DNA, 38 bp, Artificial Sequence
  primer
gtaaaacgacggccagtgagaggaggaacttctgctgg

SEQ ID NO: 50958 - DNA, 38 bp, Artificial Sequence
  primer
gtaaaacgacggccagtgtcatagctccaggcttgtcc

SEQ ID NO: 50959 - DNA, 22 bp, Artificial Sequence
  primer
tgagatgtccaagaccttcctt

SEQ ID NO: 50960 - DNA, 37 bp, Artificial Sequence
  primer
gtaaaacgacggccagtcacaggtgatcccgatatgc

SEQ ID NO: 50961 - DNA, 39 bp, Artificial Sequence
  primer
gtaaaacgacggccagttgatgtccatttctactgggtg

SEQ ID NO: 50962 - DNA, 18 bp, Artificial Sequence
  primer
gtgacacggtgcagaggg

SEQ ID NO: 50963 - DNA, 38 bp, Artificial Sequence
  primer
gtaaaacgacggccagttctgtgtagcaggacaccacc

SEQ ID NO: 50964 - DNA, 20 bp, Artificial Sequence
  primer
atgggagaaactggagggac

SEQ ID NO: 50965 - DNA, 22 bp, Artificial Sequence
  primer
ccttcacaaactttcccaagtg

SEQ ID NO: 50966 - DNA, 37 bp, Artificial Sequence
  primer
gtaaaacgacggccagttggatttagtaaaggccggg

SEQ ID NO: 50967 - DNA, 21 bp, Artificial Sequence
  primer
tcccattgaccaaactcacag

SEQ ID NO: 50968 - DNA, 20 bp, Artificial Sequence
  primer
ccacagtgacctggagcatc

SEQ ID NO: 50969 - DNA, 21 bp, Artificial Sequence
  primer
gacggtaatgggatttcatgg

SEQ ID NO: 50970 - DNA, 21 bp, Artificial Sequence
  primer
ctttcatcactgagcctgtgg

SEQ ID NO: 50971 - DNA, 36 bp, Artificial Sequence
  primer
gtaaaacgacggccagttcaaccttcaggactgggc

SEQ ID NO: 50972 - DNA, 39 bp, Artificial Sequence
  primer
gtaaaacgacggccagttcctttggatgcatttatgatg

SEQ ID NO: 50973 - DNA, 42 bp, Artificial Sequence
  primer
gtaaaacgacggccagttatgcagaaggatgagactgtttag

SEQ ID NO: 50974 - DNA, 39 bp, Artificial Sequence
  primer
gtaaaacgacggccagttttgctgtttaatgttcatggg

SEQ ID NO: 50975 - DNA, 38 bp, Artificial Sequence
  primer
gtaaaacgacggccagtgcatccaatgctatggtaagg

SEQ ID NO: 50976 - DNA, 38 bp, Artificial Sequence
  primer
gtaaaacgacggccagttttcctaagcacaagccattg

SEQ ID NO: 50977 - DNA, 39 bp, Artificial Sequence
  primer
gtaaaacgacggccagttgttaccagttcctgtttgctg

SEQ ID NO: 50978 - DNA, 38 bp, Artificial Sequence
  primer
gtaaaacgacggccagttgagaagatggctaagctccc

SEQ ID NO: 50979 - DNA, 38 bp, Artificial Sequence
  primer
gtaaaacgacggccagtctccctttagattcagcgtcc

SEQ ID NO: 50980 - DNA, 20 bp, Artificial Sequence
  primer
gcgatgctaagtctatgccg

SEQ ID NO: 50981 - DNA, 38 bp, Artificial Sequence
  primer
gtaaaacgacggccagtcgtttatgcgttgggtaacac

SEQ ID NO: 50982 - DNA, 41 bp, Artificial Sequence
  primer
gtaaaacgacggccagttttacattggcttgctttcataag

SEQ ID NO: 50983 - DNA, 22 bp, Artificial Sequence
  primer
tttcagtccctcatcattaccc

SEQ ID NO: 50984 - DNA, 21 bp, Artificial Sequence
  primer
gcatgctgcaagaaacaaatg

SEQ ID NO: 50985 - DNA, 39 bp, Artificial Sequence
  primer
gtaaaacgacggccagttccttgtttggaagagtggaag

SEQ ID NO: 50986 - DNA, 38 bp, Artificial Sequence
  primer
gtaaaacgacggccagttgcatagctgggatgctactg

SEQ ID NO: 50987 - DNA, 21 bp, Artificial Sequence
  primer
caccttcctctcccacaaatg

SEQ ID NO: 50988 - DNA, 21 bp, Artificial Sequence
  primer
ataatgtgccaagaggtgcag

SEQ ID NO: 50989 - DNA, 21 bp, Artificial Sequence
  primer
cacccagctagaaactctggg

SEQ ID NO: 50990 - DNA, 38 bp, Artificial Sequence
  primer
gtaaaacgacggccagtagagtaggtgctctggcaatg

SEQ ID NO: 50991 - DNA, 41 bp, Artificial Sequence
  primer
gtaaaacgacggccagtgtgtgcagttctaagaaggtcaag

SEQ ID NO: 50992 - DNA, 20 bp, Artificial Sequence
  primer
ctgaatgcagaggatgggtc

SEQ ID NO: 50993 - DNA, 21 bp, Artificial Sequence
  primer
aatggaaggaatgtgcattga

SEQ ID NO: 50994 - DNA, 37 bp, Artificial Sequence
  primer
gtaaaacgacggccagtcctggcacttccaagaacag

SEQ ID NO: 50995 - DNA, 38 bp, Artificial Sequence
  primer
gtaaaacgacggccagtatggaatgcaactcttgagcc

SEQ ID NO: 50996 - DNA, 44 bp, Artificial Sequence
  primer
gtaaaacgacggccagtgattctaagagtctttctcttccaagg

SEQ ID NO: 50997 - DNA, 38 bp, Artificial Sequence
  primer
gtaaaacgacggccagttacactccaaggttccttccc

SEQ ID NO: 50998 - DNA, 38 bp, Artificial Sequence
  primer
gtaaaacgacggccagtctgacagctacacaggatggg

SEQ ID NO: 50999 - DNA, 38 bp, Artificial Sequence
  primer
gtaaaacgacggccagtccatttcactcatgttgcagg

SEQ ID NO: 51000 - DNA, 38 bp, Artificial Sequence
  primer
gtaaaacgacggccagtaaagttgactgtgcctaccgc

SEQ ID NO: 51001 - DNA, 21 bp, Artificial Sequence
  primer
tgttagtttgctgggaggttc

SEQ ID NO: 51002 - DNA, 21 bp, Artificial Sequence
  primer
ttcatgggcagtggttagatg

SEQ ID NO: 51003 - DNA, 20 bp, Artificial Sequence
  primer
actttgctgggtccttaggc

SEQ ID NO: 51004 - DNA, 37 bp, Artificial Sequence
  primer
gtaaaacgacggccagtcctgaggtgcttgtggacag

SEQ ID NO: 51005 - DNA, 22 bp, Artificial Sequence
  primer
actgccatttatctcaactccc

SEQ ID NO: 51006 - DNA, 37 bp, Artificial Sequence
  primer
gtaaaacgacggccagttggaatgaaacagcagagcc

SEQ ID NO: 51007 - DNA, 19 bp, Artificial Sequence
  primer
ctggcctggtgcctaagag

SEQ ID NO: 51008 - DNA, 38 bp, Artificial Sequence
  primer
gtaaaacgacggccagttcctcctggcagtcttagcac

SEQ ID NO: 51009 - DNA, 39 bp, Artificial Sequence
  primer
gtaaaacgacggccagtgatcactacaagttgtgcagcc

SEQ ID NO: 51010 - DNA, 38 bp, Artificial Sequence
  primer
gtaaaacgacggccagttgtgcctgtgcatctttatcc

SEQ ID NO: 51011 - DNA, 37 bp, Artificial Sequence
  primer
gtaaaacgacggccagtcagaaagcccatttcagcag

SEQ ID NO: 51012 - DNA, 39 bp, Artificial Sequence
  primer
gtaaaacgacggccagttgatccaagtggtggatatgtg

SEQ ID NO: 51013 - DNA, 36 bp, Artificial Sequence
  primer
gtaaaacgacggccagtgtctttggcaagctttggg

SEQ ID NO: 51014 - DNA, 38 bp, Artificial Sequence
  primer
gtaaaacgacggccagtagtgcctgcaaactgaaactg

SEQ ID NO: 51015 - DNA, 38 bp, Artificial Sequence
  primer
gtaaaacgacggccagtactcattcgggaaggagatgc

SEQ ID NO: 51016 - DNA, 21 bp, Artificial Sequence
  primer
ccctccattatcgtccttcag

SEQ ID NO: 51017 - DNA, 38 bp, Artificial Sequence
  primer
gtaaaacgacggccagttggcaacattgccttaaactc

SEQ ID NO: 51018 - DNA, 21 bp, Artificial Sequence
  primer
gggtctccaccattccttctc

SEQ ID NO: 51019 - DNA, 19 bp, Artificial Sequence
  primer
gcatcgtccttgggaaact

SEQ ID NO: 51020 - DNA, 21 bp, Artificial Sequence
  primer
ttacagaggcagagaaatggg

SEQ ID NO: 51021 - DNA, 38 bp, Artificial Sequence
  primer
gtaaaacgacggccagtgagatctggcttccgagtgag

SEQ ID NO: 51022 - DNA, 21 bp, Artificial Sequence
  primer
cctaactagtgcaggcgtgtg

SEQ ID NO: 51023 - DNA, 21 bp, Artificial Sequence
  primer
atgctgagcccttagactccc

SEQ ID NO: 51024 - DNA, 20 bp, Artificial Sequence
  primer
ggtgaaggaggagggctatg

SEQ ID NO: 51025 - DNA, 22 bp, Artificial Sequence
  primer
aaccctaggcagagaggaaatg

SEQ ID NO: 51026 - DNA, 37 bp, Artificial Sequence
  primer
gtaaaacgacggccagtctcccacggttcctcttctc

SEQ ID NO: 51027 - DNA, 21 bp, Artificial Sequence
  primer
ttacaggtgtcaaggtcaggg

SEQ ID NO: 51028 - DNA, 21 bp, Artificial Sequence
  primer
ttagaactgggcagtggtgag

SEQ ID NO: 51029 - DNA, 21 bp, Artificial Sequence
  primer
tggccaataacctgctttctc

SEQ ID NO: 51030 - DNA, 21 bp, Artificial Sequence
  primer
caactttgagttcgaaacccg

SEQ ID NO: 51031 - DNA, 21 bp, Artificial Sequence
  primer
accctctgtacgacagcattg

SEQ ID NO: 51032 - DNA, 21 bp, Artificial Sequence
  primer
gtttcccattaactgccttcg

SEQ ID NO: 51033 - DNA, 20 bp, Artificial Sequence
  primer
gagaggagcaggtgaacacg

SEQ ID NO: 51034 - DNA, 20 bp, Artificial Sequence
  primer
cccagggaggaaatacatgc

SEQ ID NO: 51035 - DNA, 38 bp, Artificial Sequence
  primer
gtaaaacgacggccagtttacctggctccctgagaaac

SEQ ID NO: 51036 - DNA, 38 bp, Artificial Sequence
  primer
gtaaaacgacggccagtggagttctgggatactgaggg

SEQ ID NO: 51037 - DNA, 21 bp, Artificial Sequence
  primer
tggcaggaaggtaagttggag

SEQ ID NO: 51038 - DNA, 38 bp, Artificial Sequence
  primer
gtaaaacgacggccagtctctacagctggccctaccac

SEQ ID NO: 51039 - DNA, 19 bp, Artificial Sequence
  primer
ctctttgccttcagcaccc

SEQ ID NO: 51040 - DNA, 37 bp, Artificial Sequence
  primer
gtaaaacgacggccagtgggctctacgcttcagtgtg

SEQ ID NO: 51041 - DNA, 21 bp, Artificial Sequence
  primer
gagaacctgtgtgtgctggag

SEQ ID NO: 51042 - DNA, 38 bp, Artificial Sequence
  primer
gtaaaacgacggccagttctggaacaggtgattggagg

SEQ ID NO: 51043 - DNA, 38 bp, Artificial Sequence
  primer
gtaaaacgacggccagtaggtgacactgctggtgactc

SEQ ID NO: 51044 - DNA, 19 bp, Artificial Sequence
  primer
ccaaggttaggaggcctgg

SEQ ID NO: 51045 - DNA, 38 bp, Artificial Sequence
  primer
gtaaaacgacggccagtgtgcatggtggcataagtcag

SEQ ID NO: 51046 - DNA, 21 bp, Artificial Sequence
  primer
tgcagtgtgaacagacaggtg

SEQ ID NO: 51047 - DNA, 38 bp, Artificial Sequence
  primer
gtaaaacgacggccagtgaatgcaaccacaacttgcag

SEQ ID NO: 51048 - DNA, 38 bp, Artificial Sequence
  primer
gtaaaacgacggccagttacacagtggaggcaggtagg

SEQ ID NO: 51049 - DNA, 38 bp, Artificial Sequence
  primer
gtaaaacgacggccagtctccagctatgctggtgagtc

SEQ ID NO: 51050 - DNA, 38 bp, Artificial Sequence
  primer
gtaaaacgacggccagtgactgcttgtcttgaccctgc

SEQ ID NO: 51051 - DNA, 38 bp, Artificial Sequence
  primer
gtaaaacgacggccagtaagcaacatcacatttctggc

SEQ ID NO: 51052 - DNA, 37 bp, Artificial Sequence
  primer
gtaaaacgacggccagttcagctgtgctgtgccatac

SEQ ID NO: 51053 - DNA, 38 bp, Artificial Sequence
  primer
gtaaaacgacggccagttgcgaatcaggtttgtctcag

SEQ ID NO: 51054 - DNA, 41 bp, Artificial Sequence
  primer
gtaaaacgacggccagtgcaaccgaaatctagaatgtgaac

SEQ ID NO: 51055 - DNA, 21 bp, Artificial Sequence
  primer
agtatgccaggatcttggtgc

SEQ ID NO: 51056 - DNA, 38 bp, Artificial Sequence
  primer
gtaaaacgacggccagtctcctgtttcctcagtcaggc

SEQ ID NO: 51057 - DNA, 38 bp, Artificial Sequence
  primer
gtaaaacgacggccagtcctgaataccctggatatggg

SEQ ID NO: 51058 - DNA, 38 bp, Artificial Sequence; identical to SEQ ID NO: 51053
  primer

SEQ ID NO: 51059 - DNA, 35 bp, Artificial Sequence
  primer
gtaaaacgacggccagtgaaggtgagcgccagaac

SEQ ID NO: 51060 - DNA, 23 bp, Artificial Sequence
  primer
tggtactgacatccagatgattt

SEQ ID NO: 51061 - DNA, 21 bp, Artificial Sequence
  primer
tcccgtggaaattcatgtaag

SEQ ID NO: 51062 - DNA, 38 bp, Artificial Sequence
  primer
gtaaaacgacggccagtgcaggttcttaactcttgcca

SEQ ID NO: 51063 - DNA, 23 bp, Artificial Sequence
  primer
catatcacctagggaggatgtgg

SEQ ID NO: 51064 - DNA, 37 bp, Artificial Sequence
  primer
gtaaaacgacggccagtgcaagggctttgtctacgtg

SEQ ID NO: 51065 - DNA, 40 bp, Artificial Sequence
  primer
gtaaaacgacggccagttcattggaatcattcgtaccatc

SEQ ID NO: 51066 - DNA, 38 bp, Artificial Sequence
  primer
gtaaaacgacggccagtatcaaggcaacaagattgctc

SEQ ID NO: 51067 - DNA, 21 bp, Artificial Sequence
  primer
acctatattggcctccgattg

SEQ ID NO: 51068 - DNA, 21 bp, Artificial Sequence
  primer
ggacctcctttctggatcagg

SEQ ID NO: 51069 - DNA, 38 bp, Artificial Sequence
  primer
gtaaaacgacggccagtggttactcacctgttgggctg

SEQ ID NO: 51070 - DNA, 20 bp, Artificial Sequence
  primer
agcagatctccttccttggg

SEQ ID NO: 51071 - DNA, 38 bp, Artificial Sequence
  primer
gtaaaacgacggccagtgactcactgctagccctttgg

SEQ ID NO: 51072 - DNA, 21 bp, Artificial Sequence
  primer
acttggaaatggatctgaggc

SEQ ID NO: 51073 - DNA, 21 bp, Artificial Sequence
  primer
caaagactctaggcagtcggg

SEQ ID NO: 51074 - DNA, 38 bp, Artificial Sequence
  primer
gtaaaacgacggccagtagatcagccctgtctaggtgc

SEQ ID NO: 51075 - DNA, 38 bp, Artificial Sequence
  primer
gtaaaacgacggccagtaaccagtcatccttctccagg

SEQ ID NO: 51076 - DNA, 38 bp, Artificial Sequence
  primer
gtaaaacgacggccagtaaattaggagagccaaagccg

SEQ ID NO: 51077 - DNA, 21 bp, Artificial Sequence
  primer
tgagcagtacatgtgtgcagg

SEQ ID NO: 51078 - DNA, 38 bp, Artificial Sequence
  primer
gtaaaacgacggccagtgcgagagcttaggcttgaagg

SEQ ID NO: 51079 - DNA, 37 bp, Artificial Sequence
  primer
gtaaaacgacggccagtccaaacaccaagaccacagg

SEQ ID NO: 51080 - DNA, 37 bp, Artificial Sequence
  primer
gtaaaacgacggccagtcttagctttgcccagagcac

SEQ ID NO: 51081 - DNA, 36 bp, Artificial Sequence
  primer
gtaaaacgacggccagtcgcgggaagtctctgtagg

SEQ ID NO: 51082 - DNA, 35 bp, Artificial Sequence
  primer
gtaaaacgacggccagtctgcctcttcgccctttc

SEQ ID NO: 51083 - DNA, 37 bp, Artificial Sequence
  primer
gtaaaacgacggccagtgtatgccaggtgaggctctg

SEQ ID NO: 51084 - DNA, 20 bp, Artificial Sequence
  primer
aacaacaaattcccgcttcc

SEQ ID NO: 51085 - DNA, 38 bp, Artificial Sequence
  primer
gtaaaacgacggccagtcggcttaccattacatctggc

SEQ ID NO: 51086 - DNA, 42 bp, Artificial Sequence
  primer
gtaaaacgacggccagtccaatttcagtcctttaaagctaag

SEQ ID NO: 51087 - DNA, 21 bp, Artificial Sequence
  primer
atgtgttgtttcccgaacctc

SEQ ID NO: 51088 - DNA, 37 bp, Artificial Sequence
  primer
gtaaaacgacggccagtggaacaagcttgggatatgg

SEQ ID NO: 51089 - DNA, 38 bp, Artificial Sequence
  primer
gtaaaacgacggccagtagcaagaggatttccatttca

SEQ ID NO: 51090 - DNA, 25 bp, Artificial Sequence
  primer
atctcttaatatggaaaggttgctg

SEQ ID NO: 51091 - DNA, 26 bp, Artificial Sequence
  primer
tcacattaatcagccatttatttgtc

SEQ ID NO: 51092 - DNA, 21 bp, Artificial Sequence
  primer
gactacaaagagggagtcggg

SEQ ID NO: 51093 - DNA, 21 bp, Artificial Sequence
  primer
caccagttgggaaatgaagag

SEQ ID NO: 51094 - DNA, 37 bp, Artificial Sequence
  primer
gtaaaacgacggccagttggcctaacccggtctctac

SEQ ID NO: 51095 - DNA, 38 bp, Artificial Sequence
  primer
gtaaaacgacggccagtctgccttatccacatgctgtc

SEQ ID NO: 51096 - DNA, 35 bp, Artificial Sequence
  primer
gtaaaacgacggccagtggtcttggtggtggaggg

SEQ ID NO: 51097 - DNA, 21 bp, Artificial Sequence
  primer
attcttgtggcctctgtctcc

SEQ ID NO: 51098 - DNA, 37 bp, Artificial Sequence
  primer
gtaaaacgacggccagtaggatggtcgcaatctcctg

SEQ ID NO: 51099 - DNA, 38 bp, Artificial Sequence
  primer
gtaaaacgacggccagtttccattctttcttcacaggg

SEQ ID NO: 51100 - DNA, 35 bp, Artificial Sequence
  primer
gtaaaacgacggccagtgcctagcaccgacagcag

SEQ ID NO: 51101 - DNA, 21 bp, Artificial Sequence
  primer
agtgttgcttgtaggcaggtg

SEQ ID NO: 51102 - DNA, 37 bp, Artificial Sequence
  primer
gtaaaacgacggccagtgtgggagaagagggaagacg

SEQ ID NO: 51103 - DNA, 38 bp, Artificial Sequence
  primer
gtaaaacgacggccagtacctgggtgtccagacaaatc

SEQ ID NO: 51104 - DNA, 38 bp, Artificial Sequence
  primer
gtaaaacgacggccagtcacagaggacttgcagtggac

SEQ ID NO: 51105 - DNA, 37 bp, Artificial Sequence
  primer
gtaaaacgacggccagttctccttccaggaggaacag

SEQ ID NO: 51106 - DNA, 36 bp, Artificial Sequence
  primer
gtaaaacgacggccagtctgttgtggctgtgccttc

SEQ ID NO: 51107 - DNA, 20 bp, Artificial Sequence
  primer
ctgggactcgttctcaaggg

SEQ ID NO: 51108 - DNA, 38 bp, Artificial Sequence
  primer
gtaaaacgacggccagttgtccttgagcgtgtcttcag

SEQ ID NO: 51109 - DNA, 38 bp, Artificial Sequence
  primer
gtaaaacgacggccagttcctgtggcttcctgtctatg

SEQ ID NO: 51110 - DNA, 37 bp, Artificial Sequence
  primer
gtaaaacgacggccagtcacacatgctgttggctgag

SEQ ID NO: 51111 - DNA, 38 bp, Artificial Sequence
  primer
gtaaaacgacggccagtcatctgtggcagtcttggttc

SEQ ID NO: 51112 - DNA, 37 bp, Artificial Sequence
  primer
gtaaaacgacggccagtgcagatcagcattgtggagc

SEQ ID NO: 51113 - DNA, 38 bp, Artificial Sequence
  primer
gtaaaacgacggccagtgcaggagtgtgtttgttgagg

SEQ ID NO: 51114 - DNA, 20 bp, Artificial Sequence
  primer
ctctggagtgtcccaaagcc

SEQ ID NO: 51115 - DNA, 19 bp, Artificial Sequence
  primer
gtttccagctgggttctgg

SEQ ID NO: 51116 - DNA, 21 bp, Artificial Sequence
  primer
acagcaaggctttctctttgg

SEQ ID NO: 51117 - DNA, 20 bp, Artificial Sequence
  primer
ccaccagctctcctccagtc

SEQ ID NO: 51118 - DNA, 22 bp, Artificial Sequence
  primer
caagaggaggattgtgttcacc

SEQ ID NO: 51119 - DNA, 19 bp, Artificial Sequence
  primer
tttcctcaggagaccctgg

SEQ ID NO: 51120 - DNA, 20 bp, Artificial Sequence
  primer
tggctgtcagcatttgtgtc

SEQ ID NO: 51121 - DNA, 38 bp, Artificial Sequence
  primer
gtaaaacgacggccagtgtgctgtagtcctcctgtccc

SEQ ID NO: 51122 - DNA, 21 bp, Artificial Sequence
  primer
aagtggaagtccaccttctcg

SEQ ID NO: 51123 - DNA, 18 bp, Artificial Sequence
  primer
agcaagaggcagctggac

SEQ ID NO: 51124 - DNA, 21 bp, Artificial Sequence
  primer
ctcaagaatggccacaacctc

SEQ ID NO: 51125 - DNA, 21 bp, Artificial Sequence
  primer
gttgtggttagaggagctggc

SEQ ID NO: 51126 - DNA, 38 bp, Artificial Sequence
  primer
gtaaaacgacggccagtgcatgatcccatttatgtccc

SEQ ID NO: 51127 - DNA, 21 bp, Artificial Sequence
  primer
ttagagaacaatgccgatccc

SEQ ID NO: 51128 - DNA, 21 bp, Artificial Sequence
  primer
agctacctgcaccactccttc

SEQ ID NO: 51129 - DNA, 21 bp, Artificial Sequence
  primer
aagcggttcatcactaggcac

SEQ ID NO: 51130 - DNA, 20 bp, Artificial Sequence
  primer
agctctcagctggccttacc

SEQ ID NO: 51131 - DNA, 21 bp, Artificial Sequence
  primer
tagaaaggcgaggttcaggag

SEQ ID NO: 51132 - DNA, 37 bp, Artificial Sequence
  primer
gtaaaacgacggccagtgccactccatactgctgagg

SEQ ID NO: 51133 - DNA, 37 bp, Artificial Sequence
  primer
gtaaaacgacggccagtaccgggaatgagaagaccac

SEQ ID NO: 51134 - DNA, 37 bp, Artificial Sequence
  primer
gtaaaacgacggccagtggacctgggaggtacctgag

SEQ ID NO: 51135 - DNA, 38 bp, Artificial Sequence
  primer
gtaaaacgacggccagttcccagatcctttctggtagc

SEQ ID NO: 51136 - DNA, 38 bp, Artificial Sequence
  primer
gtaaaacgacggccagtcgaaagaggtggaatattggg

SEQ ID NO: 51137 - DNA, 20 bp, Artificial Sequence
  primer
agtgcccatagggtgtgatg

SEQ ID NO: 51138 - DNA, 22 bp, Artificial Sequence
  primer
gctcttcctattagccacaggg

SEQ ID NO: 51139 - DNA, 21 bp, Artificial Sequence
  primer
catcctgaccttgaggaatgg

SEQ ID NO: 51140 - DNA, 38 bp, Artificial Sequence
  primer
gtaaaacgacggccagtggcccatacatgagagaaacc

SEQ ID NO: 51141 - DNA, 37 bp, Artificial Sequence
  primer
gtaaaacgacggccagtaatgggagcaggcttgagtc

SEQ ID NO: 51142 - DNA, 38 bp, Artificial Sequence
  primer
gtaaaacgacggccagtcaaatggccagaatagcttcc

SEQ ID NO: 51143 - DNA, 38 bp, Artificial Sequence
  primer
gtaaaacgacggccagtggttcctcagtactcccaagg

SEQ ID NO: 51144 - DNA, 21 bp, Artificial Sequence
  primer
caaagctgagagtaaaggccc

SEQ ID NO: 51145 - DNA, 38 bp, Artificial Sequence
  primer
gtaaaacgacggccagtagcagtggagaagagctgagg

SEQ ID NO: 51146 - DNA, 21 bp, Artificial Sequence
  primer
gtttcccttctccctctctgc

SEQ ID NO: 51147 - DNA, 21 bp, Artificial Sequence
  primer
gcacatgaccttgagcaaatc

SEQ ID NO: 51148 - DNA, 38 bp, Artificial Sequence
  primer
gtaaaacgacggccagtattggcccatgagaagatgac

SEQ ID NO: 51149 - DNA, 20 bp, Artificial Sequence
  primer
gtgcccactggttctttcac

SEQ ID NO: 51150 - DNA, 38 bp, Artificial Sequence
  primer
gtaaaacgacggccagtgacctgaggtgagtgttgtgg

SEQ ID NO: 51151 - DNA, 21 bp, Artificial Sequence
  primer
atcacttccacccacacctct

SEQ ID NO: 51152 - DNA, 38 bp, Artificial Sequence
  primer
gtaaaacgacggccagttgcgtctgtcgtgaggagtag

SEQ ID NO: 51153 - DNA, 20 bp, Artificial Sequence
  primer
ctacagtgggaccatccctg

SEQ ID NO: 51154 - DNA, 39 bp, Artificial Sequence
  primer
gtaaaacgacggccagtgaccttcctgtatgtcaccagc

SEQ ID NO: 51155 - DNA, 38 bp, Artificial Sequence
  primer
gtaaaacgacggccagtgtacctgaccctcacccacag

SEQ ID NO: 51156 - DNA, 37 bp, Artificial Sequence
  primer
gtaaaacgacggccagtgactcacatctggtccagcc

SEQ ID NO: 51157 - DNA, 38 bp, Artificial Sequence
  primer
gtaaaacgacggccagtggtcatcttcagccactcctc

SEQ ID NO: 51158 - DNA, 38 bp, Artificial Sequence
  primer
gtaaaacgacggccagtaaacagacagacagcctggtg

SEQ ID NO: 51159 - DNA, 37 bp, Artificial Sequence
  primer
gtaaaacgacggccagtctcgtcagagggatgaggtg

SEQ ID NO: 51160 - DNA, 37 bp, Artificial Sequence
  primer
gtaaaacgacggccagtctgacaacctgctgagggtc

SEQ ID NO: 51161 - DNA, 21 bp, Artificial Sequence
  primer
cctgtgacttcgttaccctcc

SEQ ID NO: 51162 - DNA, 38 bp, Artificial Sequence
  primer
gtaaaacgacggccagttgtgtccttcctgaactggag

SEQ ID NO: 51163 - DNA, 21 bp, Artificial Sequence
  primer
ctacagtgagccagcttggtg

SEQ ID NO: 51164 - DNA, 38 bp, Artificial Sequence
  primer
gtaaaacgacggccagtgtaggcaagttgatgggaagc

SEQ ID NO: 51165 - DNA, 37 bp, Artificial Sequence
  primer
gtaaaacgacggccagtgtgagctgagatggcacgac

SEQ ID NO: 51166 - DNA, 37 bp, Artificial Sequence
  primer
gtaaaacgacggccagtaggaccctggttcacactcc

SEQ ID NO: 51167 - DNA, 38 bp, Artificial Sequence
  primer
gtaaaacgacggccagtcaagtgccaagacacctatgc

SEQ ID NO: 51168 - DNA, 38 bp, Artificial Sequence
  primer
gtaaaacgacggccagttgcaagaaggagactcagtgc

SEQ ID NO: 51169 - DNA, 38 bp, Artificial Sequence
  primer
gtaaaacgacggccagtagaccctggactgtggttctg

SEQ ID NO: 51170 - DNA, 36 bp, Artificial Sequence
  primer
gtaaaacgacggccagtgggcaagagagtagccgag

SEQ ID NO: 51171 - DNA, 19 bp, Artificial Sequence
  primer
agtcgcgtgacttcaaccc

SEQ ID NO: 51172 - DNA, 38 bp, Artificial Sequence
  primer
gtaaaacgacggccagtgtggaggagggtagacccaag

SEQ ID NO: 51173 - DNA, 38 bp, Artificial Sequence
  primer
gtaaaacgacggccagtctgacccaaatgggtgttatg

SEQ ID NO: 51174 - DNA, 21 bp, Artificial Sequence
  primer
tctgaactcgagcttgtgacc

SEQ ID NO: 51175 - DNA, 38 bp, Artificial Sequence
  primer
gtaaaacgacggccagtagcaggatggatggatagagc

SEQ ID NO: 51176 - DNA, 21 bp, Artificial Sequence
  primer
ttgacaagctttggtgaggtg

SEQ ID NO: 51177 - DNA, 38 bp, Artificial Sequence
  primer
gtaaaacgacggccagtcacaaacgcagagaggtgaag

SEQ ID NO: 51178 - DNA, 38 bp, Artificial Sequence
  primer
gtaaaacgacggccagtctctaggtccagtgaccagcc

SEQ ID NO: 51179 - DNA, 39 bp, Artificial Sequence
  primer
gtaaaacgacggccagttcactagcctgaagaacttggc

SEQ ID NO: 51180 - DNA, 21 bp, Artificial Sequence
  primer
acaggatggttcagtggtttg

SEQ ID NO: 51181 - DNA, 37 bp, Artificial Sequence
  primer
gtaaaacgacggccagtctggcctgggactaccactc

SEQ ID NO: 51182 - DNA, 21 bp, Artificial Sequence
  primer
gcctgtttgagtcccagtttg

SEQ ID NO: 51183 - DNA, 21 bp, Artificial Sequence
  primer
atctggatggagaagacccac

SEQ ID NO: 51184 - DNA, 21 bp, Artificial Sequence
  primer
gggcatgtggttaaatccttg

SEQ ID NO: 51185 - DNA, 38 bp, Artificial Sequence
  primer
gtaaaacgacggccagtgtcaccatcctcccagacttc

SEQ ID NO: 51186 - DNA, 35 bp, Artificial Sequence
  primer
gtaaaacgacggccagtgacctcgtgatccgcctg

SEQ ID NO: 51187 - DNA, 21 bp, Artificial Sequence
  primer
gcctggactaagaggtccatc

SEQ ID NO: 51188 - DNA, 38 bp, Artificial Sequence
  primer
gtaaaacgacggccagtctcctaaagtctgcagccacc

SEQ ID NO: 51189 - DNA, 38 bp, Artificial Sequence
  primer
gtaaaacgacggccagttgtggtaggagactgtggtgg

SEQ ID NO: 51190 - DNA, 21 bp, Artificial Sequence
  primer
acatttcctgctgcaaagacc

SEQ ID NO: 51191 - DNA, 38 bp, Artificial Sequence
  primer
gtaaaacgacggccagtgtggaagactgtgtgtcctcg

SEQ ID NO: 51192 - DNA, 19 bp, Artificial Sequence
  primer
gtccacgcatttcctaccc

SEQ ID NO: 51193 - DNA, 21 bp, Artificial Sequence
  primer
gggagaggaatagctcagcac

SEQ ID NO: 51194 - DNA, 22 bp, Artificial Sequence
  primer
tgtcagaatttctcccttgctc

SEQ ID NO: 51195 - DNA, 21 bp, Artificial Sequence
  primer
gtgtcttaattcctgggcgtg

SEQ ID NO: 51196 - DNA, 38 bp, Artificial Sequence
  primer
gtaaaacgacggccagtcacgtcacagaggaggttctg

SEQ ID NO: 51197 - DNA, 38 bp, Artificial Sequence
  primer
gtaaaacgacggccagtagtgagattagcggccacttc

SEQ ID NO: 51198 - DNA, 35 bp, Artificial Sequence
  primer
gtaaaacgacggccagtcacagcttgcagggatgg

SEQ ID NO: 51199 - DNA, 21 bp, Artificial Sequence
  primer
ggaagactctcaaccacccac

SEQ ID NO: 51200 - DNA, 21 bp, Artificial Sequence
  primer
agatgtagccacaggcaggag

SEQ ID NO: 51201 - DNA, 38 bp, Artificial Sequence
  primer
gtaaaacgacggccagtatgacagtgactggatctgcg

SEQ ID NO: 51202 - DNA, 21 bp, Artificial Sequence
  primer
tttatcccagctcaggaaacc

SEQ ID NO: 51203 - DNA, 37 bp, Artificial Sequence
  primer
gtaaaacgacggccagtttaagacctgctggctctcg

SEQ ID NO: 51204 - DNA, 21 bp, Artificial Sequence
  primer
gggaggtcttcagtctttcca

SEQ ID NO: 51205 - DNA, 38 bp, Artificial Sequence
  primer
gtaaaacgacggccagttcacttctctctgggcttcag

SEQ ID NO: 51206 - DNA, 20 bp, Artificial Sequence
  primer
gtcctccaggactgtccctc

SEQ ID NO: 51207 - DNA, 21 bp, Artificial Sequence
  primer
aaaggcagcgtcttcactttg

SEQ ID NO: 51208 - DNA, 38 bp, Artificial Sequence
  primer
gtaaaacgacggccagtgctatcaaagggatgcaaagc

SEQ ID NO: 51209 - DNA, 37 bp, Artificial Sequence
  primer
gtaaaacgacggccagtgcaagggcaactgcatagtc

SEQ ID NO: 51210 - DNA, 21 bp, Artificial Sequence
  primer
agggctagctaagatgcctgg

SEQ ID NO: 51211 - DNA, 37 bp, Artificial Sequence
  primer
gtaaaacgacggccagtcctgtgatcattgagctggg

SEQ ID NO: 51212 - DNA, 21 bp, Artificial Sequence
  primer
atctttgttggcagaagtggc

SEQ ID NO: 51213 - DNA, 38 bp, Artificial Sequence
  primer
gtaaaacgacggccagtccctcttctcctaccctgtcc

SEQ ID NO: 51214 - DNA, 38 bp, Artificial Sequence
  primer
gtaaaacgacggccagtagcaccattcagtttgtgtcg

SEQ ID NO: 51215 - DNA, 38 bp, Artificial Sequence
  primer
gtaaaacgacggccagtcagccctgtggacttctaagc

SEQ ID NO: 51216 - DNA, 21 bp, Artificial Sequence
  primer
cctaaaggttcaggagcccac

SEQ ID NO: 51217 - DNA, 38 bp, Artificial Sequence
  primer
gtaaaacgacggccagtaccagtaggccacaggttcag

SEQ ID NO: 51218 - DNA, 38 bp, Artificial Sequence
  primer
gtaaaacgacggccagtgggcactgtcatgttcttcag

SEQ ID NO: 51219 - DNA, 38 bp, Artificial Sequence
  primer
gtaaaacgacggccagtagcggagtcacttcctagctg

SEQ ID NO: 51220 - DNA, 21 bp, Artificial Sequence
  primer
cttccaggagggaggagagac

SEQ ID NO: 51221 - DNA, 20 bp, Artificial Sequence
  primer
gctctagaggactcaggccc

SEQ ID NO: 51222 - DNA, 21 bp, Artificial Sequence
  primer
gctttgaaggttgagtgggag

SEQ ID NO: 51223 - DNA, 38 bp, Artificial Sequence
  primer
gtaaaacgacggccagtttcactgaccacatttcccag

SEQ ID NO: 51224 - DNA, 21 bp, Artificial Sequence
  primer
aactcttgatatgggcttggc

SEQ ID NO: 51225 - DNA, 21 bp, Artificial Sequence
  primer
accaggtcaacccttctcctc

SEQ ID NO: 51226 - DNA, 21 bp, Artificial Sequence
  primer
caagcgtagctatgtgttggc

SEQ ID NO: 51227 - DNA, 38 bp, Artificial Sequence
  primer
gtaaaacgacggccagtattgcctaagctggaaacctg

SEQ ID NO: 51228 - DNA, 38 bp, Artificial Sequence
  primer
gtaaaacgacggccagtaaatgatcatggaagcttggc

SEQ ID NO: 51229 - DNA, 21 bp, Artificial Sequence
  primer
tgacataaggttcccaaaccc

SEQ ID NO: 51230 - DNA, 21 bp, Artificial Sequence
  primer
gcaccagtcccaaacaaagag

SEQ ID NO: 51231 - DNA, 39 bp, Artificial Sequence
  primer
gtaaaacgacggccagttgctcctgcctctttaattgac

SEQ ID NO: 51232 - DNA, 22 bp, Artificial Sequence
  primer
ccagctaccatgaaccaaagag

SEQ ID NO: 51233 - DNA, 22 bp, Artificial Sequence
  primer
ccagctaccatgaaccaaagag

SEQ ID NO: 51234 - DNA, 38 bp, Artificial Sequence
  primer
gtaaaacgacggccagtcacaaccacaagcttccattc

SEQ ID NO: 51235 - DNA, 42 bp, Artificial Sequence
  primer
gtaaaacgacggccagttgggagagctaattgcattaataac

SEQ ID NO: 51236 - DNA, 23 bp, Artificial Sequence
  primer
ggcttcttgaaatgtacttgtgg

SEQ ID NO: 51237 - DNA, 38 bp, Artificial Sequence
  primer
gtaaaacgacggccagtgcttccgaatttggtacggtc

SEQ ID NO: 51238 - DNA, 21 bp, Artificial Sequence
  primer
tcagcaacatactgggtttgg

SEQ ID NO: 51239 - DNA, 21 bp, Artificial Sequence
  primer
agagcgagactgcatctcaaa

SEQ ID NO: 51240 - DNA, 40 bp, Artificial Sequence
  primer
gtaaaacgacggccagttcaggtgctaaacaatttccttg

SEQ ID NO: 51241 - DNA, 38 bp, Artificial Sequence
  primer
gtaaaacgacggccagtatggaatgaaacatgccacag

SEQ ID NO: 51242 - DNA, 37 bp, Artificial Sequence
  primer
gtaaaacgacggccagtacccagcctgtgtcgacttc

SEQ ID NO: 51243 - DNA, 38 bp, Artificial Sequence
  primer
gtaaaacgacggccagttcaagtgatccagccatcttg

SEQ ID NO: 51244 - DNA, 24 bp, Artificial Sequence
  primer
cagtgaactctttgaaaggtcagg

SEQ ID NO: 51245 - DNA, 24 bp, Artificial Sequence
  primer
tggtaatgtggtataccggctaag

SEQ ID NO: 51246 - DNA, 21 bp, Artificial Sequence
  primer
cttgagaactacacttcgccg

SEQ ID NO: 51247 - DNA, 38 bp, Artificial Sequence
  primer
gtaaaacgacggccagtgaatgggaagcttagaccgtg

SEQ ID NO: 51248 - DNA, 21 bp, Artificial Sequence
  primer
aagaaacaaaccacgacaccc

SEQ ID NO: 51249 - DNA, 21 bp, Artificial Sequence
  primer
atggttgggtaggttcacagc

SEQ ID NO: 51250 - DNA, 38 bp, Artificial Sequence; identical to SEQ ID NO: 51247
  primer

SEQ ID NO: 51251 - DNA, 36 bp, Artificial Sequence
  primer
gtaaaacgacggccagttgtgggcactcaaagttcg

SEQ ID NO: 51252 - DNA, 20 bp, Artificial Sequence
  primer
gcttcggttgagtttggtcc

SEQ ID NO: 51253 - DNA, 38 bp, Artificial Sequence
  primer
gtaaaacgacggccagtagttccaggctctcctgcttc

SEQ ID NO: 51254 - DNA, 36 bp, Artificial Sequence
  primer
gtaaaacgacggccagtctccggagtgaggaagcag

SEQ ID NO: 51255 - DNA, 21 bp, Artificial Sequence
  primer
caaactgtgattgtgccatgc

SEQ ID NO: 51256 - DNA, 27 bp, Artificial Sequence
  primer
gggattgctctattaaatttgtaccag

SEQ ID NO: 51257 - DNA, 38 bp, Artificial Sequence
  primer
gtaaaacgacggccagtggcttcctgatctttcacgag

SEQ ID NO: 51258 - DNA, 25 bp, Artificial Sequence
  primer
agcaaacctgttcttactgaaatgt

SEQ ID NO: 51259 - DNA, 22 bp, Artificial Sequence
  primer
caccaattcttggattacctgg

SEQ ID NO: 51260 - DNA, 47 bp, Artificial Sequence
  primer
gtaaaacgacggccagtaacatacacactaggtaagttctttgattt

SEQ ID NO: 51261 - DNA, 41 bp, Artificial Sequence
  primer
gtaaaacgacggccagtcatggctattcagtgatcattctg

SEQ ID NO: 51262 - DNA, 38 bp, Artificial Sequence
  primer
gtaaaacgacggccagttcaaggacagatgtttgtggg

SEQ ID NO: 51263 - DNA, 22 bp, Artificial Sequence
  primer
tgattgagaagcagcaatcttc

SEQ ID NO: 51264 - DNA, 44 bp, Artificial Sequence
  primer
gtaaaacgacggccagtaaatggcaaatgtatattgttggtact

SEQ ID NO: 51265 - DNA, 21 bp, Artificial Sequence
  primer
tttcaccagttgaagagaggg

SEQ ID NO: 51266 - DNA, 20 bp, Artificial Sequence
  primer
ccttcccacaactcaaccac

SEQ ID NO: 51267 - DNA, 21 bp, Artificial Sequence
  primer
tcgaagtgtcacaagcagttg

SEQ ID NO: 51268 - DNA, 40 bp, Artificial Sequence
  primer
gtaaaacgacggccagttcaggattcaatgtgacaatgtg

SEQ ID NO: 51269 - DNA, 38 bp, Artificial Sequence
  primer
gtaaaacgacggccagtgcaccgatgtaactcccttgt

SEQ ID NO: 51270 - DNA, 38 bp, Artificial Sequence
  primer
gtaaaacgacggccagtaccacgaagtgcttccatttg

SEQ ID NO: 51271 - DNA, 20 bp, Artificial Sequence
  primer
gcctgccaaatggtaacaag

SEQ ID NO: 51272 - DNA, 40 bp, Artificial Sequence
  primer
gtaaaacgacggccagttgaaggaagctatcctgaagaag

SEQ ID NO: 51273 - DNA, 38 bp, Artificial Sequence
  primer
gtaaaacgacggccagttagccagcacagttctttccc

SEQ ID NO: 51274 - DNA, 22 bp, Artificial Sequence
  primer
ggccatcactttgagtagcaag

SEQ ID NO: 51275 - DNA, 20 bp, Artificial Sequence
  primer
cccaagcctgagacattctg

SEQ ID NO: 51276 - DNA, 41 bp, Artificial Sequence
  primer
gtaaaacgacggccagttgtttatctcctccttgattcagc

SEQ ID NO: 51277 - DNA, 21 bp, Artificial Sequence
  primer
ttgggatgccatctaaggaag

SEQ ID NO: 51278 - DNA, 37 bp, Artificial Sequence
  primer
gtaaaacgacggccagtcgtgcccagccagatataag

SEQ ID NO: 51279 - DNA, 21 bp, Artificial Sequence
  primer
gtttccatgacgttagggctc

SEQ ID NO: 51280 - DNA, 42 bp, Artificial Sequence
  primer
gtaaaacgacggccagttgggtacaatagtattcccttccac

SEQ ID NO: 51281 - DNA, 37 bp, Artificial Sequence
  primer
gtaaaacgacggccagtcattcgcatctcaggaggag

SEQ ID NO: 51282 - DNA, 21 bp, Artificial Sequence
  primer
catggacgcttgacatttctc

SEQ ID NO: 51283 - DNA, 39 bp, Artificial Sequence
  primer
gtaaaacgacggccagttggagatgagcatgtttgtttg

SEQ ID NO: 51284 - DNA, 37 bp, Artificial Sequence
  primer
gtaaaacgacggccagtccactcccactctctcccac

SEQ ID NO: 51285 - DNA, 38 bp, Artificial Sequence
  primer
gtaaaacgacggccagttcatgtctgttggctacaggg

SEQ ID NO: 51286 - DNA, 21 bp, Artificial Sequence
  primer
tgaagagctatgaattccggg

SEQ ID NO: 51287 - DNA, 21 bp, Artificial Sequence
  primer
atagagagcttcacccagggc

SEQ ID NO: 51288 - DNA, 38 bp, Artificial Sequence
  primer
gtaaaacgacggccagtgatggctggagtagggtgaag

SEQ ID NO: 51289 - DNA, 21 bp, Artificial Sequence
  primer
aaccttcctttagagtcgccc

SEQ ID NO: 51290 - DNA, 37 bp, Artificial Sequence
  primer
gtaaaacgacggccagtacatgcactgagatgggtcc

SEQ ID NO: 51291 - DNA, 21 bp, Artificial Sequence
  primer
taggcagctcaggttctcagg

SEQ ID NO: 51292 - DNA, 38 bp, Artificial Sequence
  primer
gtaaaacgacggccagtccaggaaacagtgatcaaccc

SEQ ID NO: 51293 - DNA, 38 bp, Artificial Sequence
  primer
gtaaaacgacggccagtctctacctctgtctccacccg

SEQ ID NO: 51294 - DNA, 38 bp, Artificial Sequence
  primer
gtaaaacgacggccagtcagttaatgggcaactgggac

SEQ ID NO: 51295 - DNA, 38 bp, Artificial Sequence
  primer
gtaaaacgacggccagtacaatcagctgtggcctatgg

SEQ ID NO: 51296 - DNA, 40 bp, Artificial Sequence
  primer
gtaaaacgacggccagtggcagagctcagtaagaaacagc

SEQ ID NO: 51297 - DNA, 23 bp, Artificial Sequence
  primer
cgctcactaatgtttaactcggg

SEQ ID NO: 51298 - DNA, 38 bp, Artificial Sequence
  primer
gtaaaacgacggccagtctcttctaacgcactcccacc

SEQ ID NO: 51299 - DNA, 43 bp, Artificial Sequence
  primer
gtaaaacgacggccagtttgagcagggtatattgtagagatcc

SEQ ID NO: 51300 - DNA, 39 bp, Artificial Sequence
  primer
gtaaaacgacggccagttgcctatttggtatttgtgagc

SEQ ID NO: 51301 - DNA, 37 bp, Artificial Sequence
  primer
gtaaaacgacggccagtggtgaatatgccacctctgc

SEQ ID NO: 51302 - DNA, 40 bp, Artificial Sequence
  primer
gtaaaacgacggccagtccaaacctatcatcttggtctcc

SEQ ID NO: 51303 - DNA, 21 bp, Artificial Sequence
  primer
atggaggcattcctacacagc

SEQ ID NO: 51304 - DNA, 24 bp, Artificial Sequence
  primer
gataagtgtttctacaattccggg

SEQ ID NO: 51305 - DNA, 23 bp, Artificial Sequence
  primer
gcaaatgcaaagtggttcattag

SEQ ID NO: 51306 - DNA, 23 bp, Artificial Sequence
  primer
ttgttggaacatgtctgattgtg

SEQ ID NO: 51307 - DNA, 21 bp, Artificial Sequence
  primer
ttgagtcacgcatgttaagcc

SEQ ID NO: 51308 - DNA, 42 bp, Artificial Sequence
  primer
gtaaaacgacggccagtaaggacccaggatataactttaggc

SEQ ID NO: 51309 - DNA, 38 bp, Artificial Sequence
  primer
gtaaaacgacggccagttggcatataaatggagcatgg

SEQ ID NO: 51310 - DNA, 21 bp, Artificial Sequence
  primer
attgtgtcatgtggaacgagg

SEQ ID NO: 51311 - DNA, 36 bp, Artificial Sequence
  primer
gtaaaacgacggccagtgtctgagtgcggtggatcg

SEQ ID NO: 51312 - DNA, 38 bp, Artificial Sequence
  primer
gtaaaacgacggccagtgcatgctgctgtctttgaaac

SEQ ID NO: 51313 - DNA, 21 bp, Artificial Sequence
  primer
ctactgagccctgtgcctttc

SEQ ID NO: 51314 - DNA, 40 bp, Artificial Sequence
  primer
gtaaaacgacggccagtttcatgtttgctcattattgcac

SEQ ID NO: 51315 - DNA, 38 bp, Artificial Sequence
  primer
gtaaaacgacggccagtttgctactgacggacatgagg

SEQ ID NO: 51316 - DNA, 38 bp, Artificial Sequence
  primer
gtaaaacgacggccagtaggatgcatacttctccacgg

SEQ ID NO: 51317 - DNA, 38 bp, Artificial Sequence
  primer
gtaaaacgacggccagtagggtttcacatttgtgcctc

SEQ ID NO: 51318 - DNA, 22 bp, Artificial Sequence
  primer
ccaattaaggccaatttaagcc

SEQ ID NO: 51319 - DNA, 21 bp, Artificial Sequence
  primer
ctcccataaggtgctttagcc

SEQ ID NO: 51320 - DNA, 21 bp, Artificial Sequence
  primer
cagcatttgcttgaatatcgg

SEQ ID NO: 51321 - DNA, 38 bp, Artificial Sequence
  primer
gtaaaacgacggccagtcagtccctttcttcttgtgcc

SEQ ID NO: 51322 - DNA, 21 bp, Artificial Sequence
  primer
tctgcaggacagaacaacgtg

SEQ ID NO: 51323 - DNA, 37 bp, Artificial Sequence
  primer
gtaaaacgacggccagttgagtaaagacacgggcagg

SEQ ID NO: 51324 - DNA, 38 bp, Artificial Sequence
  primer
gtaaaacgacggccagtcttaccgcttggactctggtg

SEQ ID NO: 51325 - DNA, 38 bp, Artificial Sequence
  primer
gtaaaacgacggccagtgggaagatgcctctttcactg

SEQ ID NO: 51326 - DNA, 19 bp, Artificial Sequence
  primer
aggcgtgatgccgttctac

SEQ ID NO: 51327 - DNA, 21 bp, Artificial Sequence
  primer
gctggattaagaagagctggg

SEQ ID NO: 51328 - DNA, 27 bp, Artificial Sequence
  primer
tttatattggcttgtctcagtaagtcc

SEQ ID NO: 51329 - DNA, 21 bp, Artificial Sequence
  primer
actttgtctccaggtgttggg

SEQ ID NO: 51330 - DNA, 39 bp, Artificial Sequence
  primer
gtaaaacgacggccagtttgaaatggataccatggaagg

SEQ ID NO: 51331 - DNA, 38 bp, Artificial Sequence
  primer
gtaaaacgacggccagtaaacccggttgatgatttcag

SEQ ID NO: 51332 - DNA, 20 bp, Artificial Sequence
  primer
acctcatgttcctgctggtg

SEQ ID NO: 51333 - DNA, 38 bp, Artificial Sequence
  primer
gtaaaacgacggccagtcaagaatcagcccacttagcc

SEQ ID NO: 51334 - DNA, 35 bp, Artificial Sequence
  primer
gtaaaacgacggccagtctcccgtgtcgtgtccag

SEQ ID NO: 51335 - DNA, 21 bp, Artificial Sequence
  primer
aagccaaattgtttcctgcac

SEQ ID NO: 51336 - DNA, 38 bp, Artificial Sequence
  primer
gtaaaacgacggccagtgaaagtgacggcctcatcaag

SEQ ID NO: 51337 - DNA, 20 bp, Artificial Sequence
  primer
tcccacagagagaatggcag

SEQ ID NO: 51338 - DNA, 38 bp, Artificial Sequence
  primer
gtaaaacgacggccagttctggtcacaggtgtagctgg

SEQ ID NO: 51339 - DNA, 21 bp, Artificial Sequence
  primer
aaaggaaggtggaaatggagc

SEQ ID NO: 51340 - DNA, 38 bp, Artificial Sequence
  primer
gtaaaacgacggccagtaggctccgcacgtctatctac

SEQ ID NO: 51341 - DNA, 21 bp, Artificial Sequence
  primer
tgatgaaagcagcagttacgc

SEQ ID NO: 51342 - DNA, 38 bp, Artificial Sequence
  primer
gtaaaacgacggccagtagtctctgtctgtgggcttcc

SEQ ID NO: 51343 - DNA, 38 bp, Artificial Sequence
  primer
gtaaaacgacggccagttgtggataacacctggctcac

SEQ ID NO: 51344 - DNA, 38 bp, Artificial Sequence
  primer
gtaaaacgacggccagtaacgtgaacatgctgacttgg

SEQ ID NO: 51345 - DNA, 21 bp, Artificial Sequence
  primer
gctgagttggaagggagtttg

SEQ ID NO: 51346 - DNA, 38 bp, Artificial Sequence
  primer
gtaaaacgacggccagtgaatgagcctgagtcctcacc

SEQ ID NO: 51347 - DNA, 38 bp, Artificial Sequence
  primer
gtaaaacgacggccagtagtcaaaccataccactgggc

SEQ ID NO: 51348 - DNA, 21 bp, Artificial Sequence
  primer
tcctgatcattcatcccactg

SEQ ID NO: 51349 - DNA, 38 bp, Artificial Sequence
  primer
gtaaaacgacggccagtatcaggagtggcatggttagc

SEQ ID NO: 51350 - DNA, 37 bp, Artificial Sequence
  primer
gtaaaacgacggccagtggtaggaggacgagccagtg

SEQ ID NO: 51351 - DNA, 18 bp, Artificial Sequence
  primer
ctgaagcagcgacggtct

SEQ ID NO: 51352 - DNA, 19 bp, Artificial Sequence
  primer
cttcctggtgtcgggtgag

SEQ ID NO: 51353 - DNA, 36 bp, Artificial Sequence
  primer
gtaaaacgacggccagtgctctactggtcttcgcgg

SEQ ID NO: 51354 - DNA, 21 bp, Artificial Sequence
  primer
ttgtgggtctcagaagtgtcg

SEQ ID NO: 51355 - DNA, 21 bp, Artificial Sequence
  primer
ctcagtgcctacctgaggatg

SEQ ID NO: 51356 - DNA, 38 bp, Artificial Sequence
  primer
gtaaaacgacggccagtttcctacagggaggtgaggtc

SEQ ID NO: 51357 - DNA, 36 bp, Artificial Sequence
  primer
gtaaaacgacggccagtcccactgacttcctgggtc

SEQ ID NO: 51358 - DNA, 21 bp, Artificial Sequence
  primer
ggacctacagatcccagagcc

SEQ ID NO: 51359 - DNA, 38 bp, Artificial Sequence
  primer
gtaaaacgacggccagtatctaccggctctaccacagc

SEQ ID NO: 51360 - DNA, 22 bp, Artificial Sequence
  primer
cagcaacaatgtgaccgatatg

SEQ ID NO: 51361 - DNA, 38 bp, Artificial Sequence
  primer
gtaaaacgacggccagtctggttctctctggttgcttg

SEQ ID NO: 51362 - DNA, 21 bp, Artificial Sequence
  primer
tttccactgaccacagattcg

SEQ ID NO: 51363 - DNA, 21 bp, Artificial Sequence
  primer
aagtttcattgcagctgtgct

SEQ ID NO: 51364 - DNA, 38 bp, Artificial Sequence
  primer
gtaaaacgacggccagtgattcctgtgagaagagcagg

SEQ ID NO: 51365 - DNA, 21 bp, Artificial Sequence
  primer
aagtttcattgcagctgtgct

SEQ ID NO: 51366 - DNA, 43 bp, Artificial Sequence
  primer
gtaaaacgacggccagtcatatggcataagcacattctacttg

SEQ ID NO: 51367 - DNA, 40 bp, Artificial Sequence
  primer
gtaaaacgacggccagttggagattctaggatttcagtgc

SEQ ID NO: 51368 - DNA, 39 bp, Artificial Sequence
  primer
gtaaaacgacggccagtcatcttataggaagggtgctgg

SEQ ID NO: 51369 - DNA, 39 bp, Artificial Sequence
  primer
gtaaaacgacggccagtcactgtattccagccacctttc

SEQ ID NO: 51370 - DNA, 24 bp, Artificial Sequence
  primer
tctgatactagaaggaacggttgg

SEQ ID NO: 51371 - DNA, 37 bp, Artificial Sequence
  primer
gtaaaacgacggccagtccactgcacccgacctatac

SEQ ID NO: 51372 - DNA, 27 bp, Artificial Sequence
  primer
ggcacagaaattaagtaccagtatagg

SEQ ID NO: 51373 - DNA, 39 bp, Artificial Sequence
  primer
gtaaaacgacggccagtggtgccaaaggagataataggg

SEQ ID NO: 51374 - DNA, 37 bp, Artificial Sequence
  primer
gtaaaacgacggccagtcattcctttggcattgatgg

SEQ ID NO: 51375 - DNA, 39 bp, Artificial Sequence
  primer
gtaaaacgacggccagtacaaacaatgcagtggcattta

SEQ ID NO: 51376 - DNA, 38 bp, Artificial Sequence
  primer
gtaaaacgacggccagtaggcataagtcaaggagtggc

SEQ ID NO: 51377 - DNA, 38 bp, Artificial Sequence
  primer
gtaaaacgacggccagtgaatgatgtgaaattggcctg

SEQ ID NO: 51378 - DNA, 40 bp, Artificial Sequence
  primer
gtaaaacgacggccagttcttgtttcttgttcccagattg

SEQ ID NO: 51379 - DNA, 39 bp, Artificial Sequence
  primer
gtaaaacgacggccagtttctatttcttgcaatgcccag

SEQ ID NO: 51380 - DNA, 20 bp, Artificial Sequence
  primer
agactgcgtcattgcactcc

SEQ ID NO: 51381 - DNA, 38 bp, Artificial Sequence
  primer
gtaaaacgacggccagttcagctagcccaggttaaagg

SEQ ID NO: 51382 - DNA, 38 bp, Artificial Sequence
  primer
gtaaaacgacggccagttaatccttcattgcatgtggc

SEQ ID NO: 51383 - DNA, 21 bp, Artificial Sequence
  primer
attgcatagaggctgtgcttc

SEQ ID NO: 51384 - DNA, 38 bp, Artificial Sequence
  primer
gtaaaacgacggccagtgctcgtctggaagaacctgag

SEQ ID NO: 51385 - DNA, 21 bp, Artificial Sequence
  primer
ctagaagcagagggaaccagc

SEQ ID NO: 51386 - DNA, 38 bp, Artificial Sequence
  primer
gtaaaacgacggccagttacaggaagttctctctggcg

SEQ ID NO: 51387 - DNA, 21 bp, Artificial Sequence
  primer
agagtggcctcttcctcttcc

SEQ ID NO: 51388 - DNA, 38 bp, Artificial Sequence
  primer
gtaaaacgacggccagtctctcatgctctccttgagcc

SEQ ID NO: 51389 - DNA, 21 bp, Artificial Sequence
  primer
ggcataaggtctagcgaatgg

SEQ ID NO: 51390 - DNA, 21 bp, Artificial Sequence
  primer
tacagacagaccgtgggacac

SEQ ID NO: 51391 - DNA, 20 bp, Artificial Sequence
  primer
caaagaaggttgcgttctgg

SEQ ID NO: 51392 - DNA, 20 bp, Artificial Sequence
  primer
ctaagcatgtgccaggaagg

SEQ ID NO: 51393 - DNA, 38 bp, Artificial Sequence
  primer
gtaaaacgacggccagtgctggtctctgaaattcctgg

SEQ ID NO: 51394 - DNA, 38 bp, Artificial Sequence
  primer
gtaaaacgacggccagtagtggctccatggtgagtctg

SEQ ID NO: 51395 - DNA, 37 bp, Artificial Sequence
  primer
gtaaaacgacggccagtagccctaaagccagacttgg

SEQ ID NO: 51396 - DNA, 37 bp, Artificial Sequence
  primer
gtaaaacgacggccagtgggaagctaccctggatctg

SEQ ID NO: 51397 - DNA, 19 bp, Artificial Sequence
  primer
ctttggtccaccctccaag

SEQ ID NO: 51398 - DNA, 20 bp, Artificial Sequence
  primer
ttcattaggctctgaggccc

SEQ ID NO: 51399 - DNA, 38 bp, Artificial Sequence
  primer
gtaaaacgacggccagtcctgaaaggagcagaggtgtc

SEQ ID NO: 51400 - DNA, 20 bp, Artificial Sequence
  primer
gctgatgctggctgtaggac

SEQ ID NO: 51401 - DNA, 38 bp, Artificial Sequence
  primer
gtaaaacgacggccagttcctgaccttgtgatctgctc

SEQ ID NO: 51402 - DNA, 21 bp, Artificial Sequence
  primer
tgagccagaataagggaggag

SEQ ID NO: 51403 - DNA, 39 bp, Artificial Sequence
  primer
gtaaaacgacggccagtaagagctcatctgggtaacagg

SEQ ID NO: 51404 - DNA, 41 bp, Artificial Sequence
  primer
gtaaaacgacggccagttttctccatccacctactgtcttc

SEQ ID NO: 51405 - DNA, 38 bp, Artificial Sequence
  primer
gtaaaacgacggccagtgcccgaccctagatctttgta

SEQ ID NO: 51406 - DNA, 22 bp, Artificial Sequence
  primer
tcccattaataaggtgtgtcgg

SEQ ID NO: 51407 - DNA, 20 bp, Artificial Sequence
  primer
agagcgagactccgtctcaa

SEQ ID NO: 51408 - DNA, 23 bp, Artificial Sequence
  primer
gcaaattcaagagtgacttgctg

SEQ ID NO: 51409 - DNA, 38 bp, Artificial Sequence
  primer
gtaaaacgacggccagtaaagggattggtaagggatgg

SEQ ID NO: 51410 - DNA, 38 bp, Artificial Sequence
  primer
gtaaaacgacggccagttggtagcaatttgaggctctg

SEQ ID NO: 51411 - DNA, 22 bp, Artificial Sequence
  primer
tgcttaagggcagacctagttg

SEQ ID NO: 51412 - DNA, 39 bp, Artificial Sequence
  primer
gtaaaacgacggccagtcaaattccctagcttctctccc

SEQ ID NO: 51413 - DNA, 38 bp, Artificial Sequence
  primer
gtaaaacgacggccagttttgtgtgtgttccctgttcc

SEQ ID NO: 51414 - DNA, 38 bp, Artificial Sequence
  primer
gtaaaacgacggccagttgtctccggaaccatactttg

SEQ ID NO: 51415 - DNA, 21 bp, Artificial Sequence
  primer
tggagtccagtaactgcgttg

SEQ ID NO: 51416 - DNA, 18 bp, Artificial Sequence
  primer
cacttgaacccacgaggc

SEQ ID NO: 51417 - DNA, 38 bp, Artificial Sequence
  primer
gtaaaacgacggccagtatctgattcaccgggacattc

SEQ ID NO: 51418 - DNA, 22 bp, Artificial Sequence
  primer
tttgatcaagagctccttaggc

SEQ ID NO: 51419 - DNA, 21 bp, Artificial Sequence
  primer
tgggccataatgcagtcttac

SEQ ID NO: 51420 - DNA, 21 bp, Artificial Sequence
  primer
gcaatttcaacagcattccag

SEQ ID NO: 51421 - DNA, 37 bp, Artificial Sequence
  primer
gtaaaacgacggccagtaccaggtgcgaggctttatc

SEQ ID NO: 51422 - DNA, 38 bp, Artificial Sequence
  primer
gtaaaacgacggccagtgatccagaggtgttccaggtc

SEQ ID NO: 51423 - DNA, 38 bp, Artificial Sequence
  primer
gtaaaacgacggccagttgaaagaggcggagaacagtc

SEQ ID NO: 51424 - DNA, 38 bp, Artificial Sequence
  primer
gtaaaacgacggccagtcatattggaggcagatagggc

SEQ ID NO: 51425 - DNA, 21 bp, Artificial Sequence
  primer
aaaggaaaggaaagctcaggc

SEQ ID NO: 51426 - DNA, 21 bp, Artificial Sequence
  primer
ctctcttcccttcaggtctgg

SEQ ID NO: 51427 - DNA, 18 bp, Artificial Sequence
  primer
gaagccacatgtcagcgg

SEQ ID NO: 51428 - DNA, 38 bp, Artificial Sequence
  primer
gtaaaacgacggccagtgtgtgtaactgtggcagtggg

SEQ ID NO: 51429 - DNA, 38 bp, Artificial Sequence
  primer
gtaaaacgacggccagtgatttgccaggatgctcaaac

SEQ ID NO: 51430 - DNA, 38 bp, Artificial Sequence
  primer
gtaaaacgacggccagttccaaatgttctctgctgctg

SEQ ID NO: 51431 - DNA, 37 bp, Artificial Sequence
  primer
gtaaaacgacggccagttcaggtctctctggacctcg

SEQ ID NO: 51432 - DNA, 20 bp, Artificial Sequence
  primer
aggattagctggccgtcttg

SEQ ID NO: 51433 - DNA, 25 bp, Artificial Sequence
  primer
tgtgtgccatactggattataaatg

SEQ ID NO: 51434 - DNA, 21 bp, Artificial Sequence
  primer
gtttgaccatccctccatctc

SEQ ID NO: 51435 - DNA, 21 bp, Artificial Sequence
  primer
tccagcttcatccatgtcact

SEQ ID NO: 51436 - DNA, 22 bp, Artificial Sequence
  primer
caaccacatgggtatggtttag

SEQ ID NO: 51437 - DNA, 21 bp, Artificial Sequence
  primer
atgccagacactcagaaatgg

SEQ ID NO: 51438 - DNA, 38 bp, Artificial Sequence
  primer
gtaaaacgacggccagtagtgggaaggttggttcaaat

SEQ ID NO: 51439 - DNA, 21 bp, Artificial Sequence
  primer
tttggccaagagtcattcatc

SEQ ID NO: 51440 - DNA, 21 bp, Artificial Sequence
  primer
agaggaattagcctgcagaaa

SEQ ID NO: 51441 - DNA, 40 bp, Artificial Sequence
  primer
gtaaaacgacggccagtcagcacatggtatatttggttca

SEQ ID NO: 51442 - DNA, 41 bp, Artificial Sequence
  primer
gtaaaacgacggccagttcatggcacttagtttgacatagg

SEQ ID NO: 51443 - DNA, 21 bp, Artificial Sequence
  primer
agtatgaccgtcctgttcctg

SEQ ID NO: 51444 - DNA, 47 bp, Artificial Sequence
  primer
gtaaaacgacggccagtcatttattaatgagaggtacaatctctagg

SEQ ID NO: 51445 - DNA, 38 bp, Artificial Sequence
  primer
gtaaaacgacggccagttgccaatatattcgttgcttt

SEQ ID NO: 51446 - DNA, 39 bp, Artificial Sequence
  primer
gtaaaacgacggccagtgcatcatccttcttaatttggg

SEQ ID NO: 51447 - DNA, 21 bp, Artificial Sequence
  primer
tgtatatcggtgttccatcca

SEQ ID NO: 51448 - DNA, 23 bp, Artificial Sequence
  primer
tgtctttcccttggttaaatgag

SEQ ID NO: 51449 - DNA, 38 bp, Artificial Sequence
  primer
gtaaaacgacggccagtcctctcccaacactctggttc

SEQ ID NO: 51450 - DNA, 27 bp, Artificial Sequence
  primer
gcacattggtttactattaggattgtc

SEQ ID NO: 51451 - DNA, 24 bp, Artificial Sequence
  primer
tggctttgatactttctcaagctc

SEQ ID NO: 51452 - DNA, 21 bp, Artificial Sequence
  primer
gaaatggcatgaacctacgag

SEQ ID NO: 51453 - DNA, 40 bp, Artificial Sequence
  primer
gtaaaacgacggccagtgcagcatggagtattctatttgg

SEQ ID NO: 51454 - DNA, 21 bp, Artificial Sequence
  primer
aaatgcagtgcagcaaatgtc

SEQ ID NO: 51455 - DNA, 38 bp, Artificial Sequence
  primer
gtaaaacgacggccagtggtggatctggctatgcctac

SEQ ID NO: 51456 - DNA, 44 bp, Artificial Sequence
  primer
gtaaaacgacggccagtcagagctacaactttgaggtaacagtc

SEQ ID NO: 51457 - DNA, 18 bp, Artificial Sequence
  primer
ggccactgaaagtgctgg

SEQ ID NO: 51458 - DNA, 35 bp, Artificial Sequence
  primer
gtaaaacgacggccagtaggcttgagccactgtgc

SEQ ID NO: 51459 - DNA, 21 bp, Artificial Sequence
  primer
ctgggcaacaagagtgaaact

SEQ ID NO: 51460 - DNA, 26 bp, Artificial Sequence
  primer
aagtaaacgggtttaggaaatgtgtt

SEQ ID NO: 51461 - DNA, 21 bp, Artificial Sequence
  primer
gccattcgcagaaacttagag

SEQ ID NO: 51462 - DNA, 41 bp, Artificial Sequence
  primer
gtaaaacgacggccagtaaactggataacaatctgttgctg

SEQ ID NO: 51463 - DNA, 22 bp, Artificial Sequence
  primer
tcacccatctcattctgtgaac

SEQ ID NO: 51464 - DNA, 23 bp, Artificial Sequence
  primer
catgcgaacggtgttgtaatatc

SEQ ID NO: 51465 - DNA, 21 bp, Artificial Sequence
  primer
ctgctgcatagttaggtgccc

SEQ ID NO: 51466 - DNA, 43 bp, Artificial Sequence
  primer
gtaaaacgacggccagtcgtacttagaacacagtagatgcttg

SEQ ID NO: 51467 - DNA, 21 bp, Artificial Sequence
  primer
tcaggagtatagtgggcatgg

SEQ ID NO: 51468 - DNA, 37 bp, Artificial Sequence
  primer
gtaaaacgacggccagtgtcacttggctctctggctg

SEQ ID NO: 51469 - DNA, 39 bp, Artificial Sequence
  primer
gtaaaacgacggccagttgacaaagtgagagagaccgtg

SEQ ID NO: 51470 - DNA, 42 bp, Artificial Sequence
  primer
gtaaaacgacggccagtaaattgataacgaaactccactttg

SEQ ID NO: 51471 - DNA, 38 bp, Artificial Sequence
  primer
gtaaaacgacggccagtggagtgccaaagatgaaacac

SEQ ID NO: 51472 - DNA, 42 bp, Artificial Sequence
  primer
gtaaaacgacggccagtgaaataatgtttgtcgtaatttggc

SEQ ID NO: 51473 - DNA, 25 bp, Artificial Sequence
  primer
tgaaagttagccataactcctcatc

SEQ ID NO: 51474 - DNA, 23 bp, Artificial Sequence
  primer
tgtcctcatgcatatcttgtgtg

SEQ ID NO: 51475 - DNA, 43 bp, Artificial Sequence
  primer
gtaaaacgacggccagtattatgcaagctatggaagtttactg

SEQ ID NO: 51476 - DNA, 25 bp, Artificial Sequence
  primer
tgtgtgatttacgatgtgtacttgg

SEQ ID NO: 51477 - DNA, 41 bp, Artificial Sequence
  primer
gtaaaacgacggccagtgatagtgacacttcatcctggaaa

SEQ ID NO: 51478 - DNA, 40 bp, Artificial Sequence
  primer
gtaaaacgacggccagttggtaactgaaactcaggtttgg

SEQ ID NO: 51479 - DNA, 38 bp, Artificial Sequence
  primer
gtaaaacgacggccagtcagttgtttgaatccctggaa

SEQ ID NO: 51480 - DNA, 38 bp, Artificial Sequence
  primer
gtaaaacgacggccagtaattcggatgctgtgttgaag

SEQ ID NO: 51481 - DNA, 42 bp, Artificial Sequence
  primer
gtaaaacgacggccagtttgtcatatggaaatgagcagataa

SEQ ID NO: 51482 - DNA, 40 bp, Artificial Sequence
  primer
gtaaaacgacggccagtctcctaatgtaattccaaagccc

SEQ ID NO: 51483 - DNA, 22 bp, Artificial Sequence
  primer
tcacaagatagctgtgatgcag

SEQ ID NO: 51484 - DNA, 38 bp, Artificial Sequence
  primer
gtaaaacgacggccagttctccagctttgctgttgttc

SEQ ID NO: 51485 - DNA, 37 bp, Artificial Sequence
  primer
gtaaaacgacggccagtttctgggatgtgagggtttg

SEQ ID NO: 51486 - DNA, 37 bp, Artificial Sequence
  primer
gtaaaacgacggccagttgaaatttgtccagtgacgc

SEQ ID NO: 51487 - DNA, 38 bp, Artificial Sequence
  primer
gtaaaacgacggccagttccatcatgcctcaaacagtg

SEQ ID NO: 51488 - DNA, 25 bp, Artificial Sequence
  primer
tgaaacaatccctagacacacattt

SEQ ID NO: 51489 - DNA, 39 bp, Artificial Sequence
  primer
gtaaaacgacggccagtgcccatctttcagaagacaaac

SEQ ID NO: 51490 - DNA, 38 bp, Artificial Sequence
  primer
gtaaaacgacggccagtgcaccatagagctggacgtag

SEQ ID NO: 51491 - DNA, 18 bp, Artificial Sequence
  primer
gaccttgcaggagggcac

SEQ ID NO: 51492 - DNA, 21 bp, Artificial Sequence
  primer
ttgcccaagtgcttacaaatg

SEQ ID NO: 51493 - DNA, 39 bp, Artificial Sequence
  primer
gtaaaacgacggccagtagcagcagcagtttatcagatg

SEQ ID NO: 51494 - DNA, 37 bp, Artificial Sequence
  primer
gtaaaacgacggccagtaaagcctggcattgcattta

SEQ ID NO: 51495 - DNA, 36 bp, Artificial Sequence
  primer
gtaaaacgacggccagttggctcttgtaccagccag

SEQ ID NO: 51496 - DNA, 21 bp, Artificial Sequence
  primer
gaagggagccaggagattagg

SEQ ID NO: 51497 - DNA, 37 bp, Artificial Sequence
  primer
gtaaaacgacggccagtccatcatctccatcattggc

SEQ ID NO: 51498 - DNA, 24 bp, Artificial Sequence
  primer
caccttaaagagtgatctcttggg

SEQ ID NO: 51499 - DNA, 38 bp, Artificial Sequence
  primer
gtaaaacgacggccagtctcgcaattcataaagggagc

SEQ ID NO: 51500 - DNA, 21 bp, Artificial Sequence
  primer
ttgcattcatccgttacgttc

SEQ ID NO: 51501 - DNA, 39 bp, Artificial Sequence
  primer
gtaaaacgacggccagtgccacatacaggcttacctttg

SEQ ID NO: 51502 - DNA, 36 bp, Artificial Sequence
  primer
gtaaaacgacggccagtggcacagagcggaggatag

SEQ ID NO: 51503 - DNA, 38 bp, Artificial Sequence
  primer
gtaaaacgacggccagtcccaagaagccttattcaggg

SEQ ID NO: 51504 - DNA, 21 bp, Artificial Sequence
  primer
ctcttcctcccacattcacag

SEQ ID NO: 51505 - DNA, 21 bp, Artificial Sequence
  primer
aaatgtggccagtaacattgc

SEQ ID NO: 51506 - DNA, 37 bp, Artificial Sequence
  primer
gtaaaacgacggccagtaacagggcagtgaacccttc

SEQ ID NO: 51507 - DNA, 38 bp, Artificial Sequence
  primer
gtaaaacgacggccagtggtggaggataaaggtagcgg

SEQ ID NO: 51508 - DNA, 20 bp, Artificial Sequence
  primer
caggcagtggctcctcatag

SEQ ID NO: 51509 - DNA, 37 bp, Artificial Sequence
  primer
gtaaaacgacggccagtccaccaaataggtgtaggcg

SEQ ID NO: 51510 - DNA, 21 bp, Artificial Sequence
  primer
ggtttgtgtttcacttggcac

SEQ ID NO: 51511 - DNA, 40 bp, Artificial Sequence
  primer
gtaaaacgacggccagtggatccctgtctctgagtctctc

SEQ ID NO: 51512 - DNA, 21 bp, Artificial Sequence
  primer
ctagatctcacaggcccatcc

SEQ ID NO: 51513 - DNA, 38 bp, Artificial Sequence
  primer
gtaaaacgacggccagtgtgccatagcactttggtctg

SEQ ID NO: 51514 - DNA, 38 bp, Artificial Sequence
  primer
gtaaaacgacggccagtcattcactccacctgatctcg

SEQ ID NO: 51515 - DNA, 38 bp, Artificial Sequence
  primer
gtaaaacgacggccagtcagaagcaagaggtgaaaccc

SEQ ID NO: 51516 - DNA, 41 bp, Artificial Sequence
  primer
gtaaaacgacggccagttggcatatcagatcattctgtgac

SEQ ID NO: 51517 - DNA, 38 bp, Artificial Sequence
  primer
gtaaaacgacggccagttcacagctaagcaagcaggag

SEQ ID NO: 51518 - DNA, 38 bp, Artificial Sequence
  primer
gtaaaacgacggccagtgtgctatggtcgatggaagtg

SEQ ID NO: 51519 - DNA, 38 bp, Artificial Sequence
  primer
gtaaaacgacggccagtctctggtaattggcccttctg

SEQ ID NO: 51520 - DNA, 22 bp, Artificial Sequence
  primer
cctggtatgattcttgaagggc

SEQ ID NO: 51521 - DNA, 38 bp, Artificial Sequence
  primer
gtaaaacgacggccagtactgcatcctcacagttcgtg

SEQ ID NO: 51522 - DNA, 38 bp, Artificial Sequence
  primer
gtaaaacgacggccagtaaaggtgggaacatggacttg

SEQ ID NO: 51523 - DNA, 38 bp, Artificial Sequence
  primer
gtaaaacgacggccagtaggcattccaaacccaaatag

SEQ ID NO: 51524 - DNA, 22 bp, Artificial Sequence
  primer
ttctctgagttcagaagccctg

SEQ ID NO: 51525 - DNA, 21 bp, Artificial Sequence
  primer
ggtgaatcagcagcaaatgac

SEQ ID NO: 51526 - DNA, 21 bp, Artificial Sequence
  primer
aattcctagctcccaccacac

SEQ ID NO: 51527 - DNA, 21 bp, Artificial Sequence
  primer
aacccagtttctctcttgccc

SEQ ID NO: 51528 - DNA, 21 bp, Artificial Sequence
  primer
tttaaagcgaaggagtggctg

SEQ ID NO: 51529 - DNA, 38 bp, Artificial Sequence
  primer
gtaaaacgacggccagtatgcaaaccctttagctctgc

SEQ ID NO: 51530 - DNA, 38 bp, Artificial Sequence
  primer
gtaaaacgacggccagtaatggtcctctggtctcttgg

SEQ ID NO: 51531 - DNA, 21 bp, Artificial Sequence
  primer
caatcagttcctaacccggag

SEQ ID NO: 51532 - DNA, 38 bp, Artificial Sequence
  primer
gtaaaacgacggccagttggtcttcatggcatacaagg

SEQ ID NO: 51533 - DNA, 37 bp, Artificial Sequence
  primer
gtaaaacgacggccagttctgtggctgggaaattctg

SEQ ID NO: 51534 - DNA, 38 bp, Artificial Sequence
  primer
gtaaaacgacggccagtctcctactaggctgccctgag

SEQ ID NO: 51535 - DNA, 38 bp, Artificial Sequence
  primer
gtaaaacgacggccagtctctagactgggcacaagctg

SEQ ID NO: 51536 - DNA, 35 bp, Artificial Sequence
  primer
gtaaaacgacggccagtccagcgagagccactcag

SEQ ID NO: 51537 - DNA, 36 bp, Artificial Sequence
  primer
gtaaaacgacggccagttggcccagtgtctgtcctc

SEQ ID NO: 51538 - DNA, 20 bp, Artificial Sequence
  primer
cctcagttccagcatcttgc

SEQ ID NO: 51539 - DNA, 21 bp, Artificial Sequence
  primer
aaattcctgaagctggcactg

SEQ ID NO: 51540 - DNA, 37 bp, Artificial Sequence
  primer
gtaaaacgacggccagtctgcctcacgccttgaatag

SEQ ID NO: 51541 - DNA, 38 bp, Artificial Sequence
  primer
gtaaaacgacggccagtataggagggatgggaaactgg

SEQ ID NO: 51542 - DNA, 38 bp, Artificial Sequence
  primer
gtaaaacgacggccagtaggaccatgtctcaccacatc

SEQ ID NO: 51543 - DNA, 37 bp, Artificial Sequence
  primer
gtaaaacgacggccagtgggtcaaccgacagactgag

SEQ ID NO: 51544 - DNA, 38 bp, Artificial Sequence
  primer
gtaaaacgacggccagttgcatgctctgccttctttag

SEQ ID NO: 51545 - DNA, 38 bp, Artificial Sequence
  primer
gtaaaacgacggccagtgtgagccaaggtagttggagg

SEQ ID NO: 51546 - DNA, 38 bp, Artificial Sequence
  primer
gtaaaacgacggccagtctccgcttaaggactgtcacc

SEQ ID NO: 51547 - DNA, 21 bp, Artificial Sequence
  primer
aggtcccttcctgtctctgac

SEQ ID NO: 51548 - DNA, 38 bp, Artificial Sequence
  primer
gtaaaacgacggccagtctgaaattggagtcggctttg

SEQ ID NO: 51549 - DNA, 38 bp, Artificial Sequence
  primer
gtaaaacgacggccagttttgtgaccactgtcctgacc

SEQ ID NO: 51550 - DNA, 38 bp, Artificial Sequence
  primer
gtaaaacgacggccagtacccataacaaccagcctttg

SEQ ID NO: 51551 - DNA, 38 bp, Artificial Sequence
  primer
gtaaaacgacggccagttggcagtgtctaatgtcccac

SEQ ID NO: 51552 - DNA, 38 bp, Artificial Sequence
  primer
gtaaaacgacggccagtatggagtggctgtgaggattc

SEQ ID NO: 51553 - DNA, 38 bp, Artificial Sequence
  primer
gtaaaacgacggccagtcatcttcctcactggctctcc

SEQ ID NO: 51554 - DNA, 38 bp, Artificial Sequence
  primer
gtaaaacgacggccagtgaagattccctgagcttgtgg

SEQ ID NO: 51555 - DNA, 41 bp, Artificial Sequence
  primer
gtaaaacgacggccagtaacagtctttcaaagggatctgtg

SEQ ID NO: 51556 - DNA, 21 bp, Artificial Sequence
  primer
cttccatccaacatgtcatcg

SEQ ID NO: 51557 - DNA, 21 bp, Artificial Sequence
  primer
agggttcccaccaggtaagag

SEQ ID NO: 51558 - DNA, 38 bp, Artificial Sequence
  primer
gtaaaacgacggccagtgagaatctgagctccctggtg

SEQ ID NO: 51559 - DNA, 38 bp, Artificial Sequence
  primer
gtaaaacgacggccagtgctccttgatggcagagactg

SEQ ID NO: 51560 - DNA, 39 bp, Artificial Sequence
  primer
gtaaaacgacggccagttctatgctcagaaagaggaggc

SEQ ID NO: 51561 - DNA, 40 bp, Artificial Sequence
  primer
gtaaaacgacggccagtcacccttactctttctcaatccc

SEQ ID NO: 51562 - DNA, 21 bp, Artificial Sequence
  primer
aggtaacagagcgagaccctg

SEQ ID NO: 51563 - DNA, 40 bp, Artificial Sequence
  primer
gtaaaacgacggccagtgaaatctcggtggagtagtggac

SEQ ID NO: 51564 - DNA, 39 bp, Artificial Sequence
  primer
gtaaaacgacggccagtaactttaggtctacgggttggg

SEQ ID NO: 51565 - DNA, 25 bp, Artificial Sequence
  primer
tggcctaatctacatttaaccaaag

SEQ ID NO: 51566 - DNA, 19 bp, Artificial Sequence
  primer
ctaggactccgcgggaaac

SEQ ID NO: 51567 - DNA, 21 bp, Artificial Sequence
  primer
atgccgagcaagaagaagaag

SEQ ID NO: 51568 - DNA, 38 bp, Artificial Sequence
  primer
gtaaaacgacggccagtgacgaagagattgggaaggtg

SEQ ID NO: 51569 - DNA, 37 bp, Artificial Sequence
  primer
gtaaaacgacggccagtgccacctgagtaaagcaggg

SEQ ID NO: 51570 - DNA, 36 bp, Artificial Sequence
  primer
gtaaaacgacggccagtacctggtggcatctgttcc

SEQ ID NO: 51571 - DNA, 38 bp, Artificial Sequence
  primer
gtaaaacgacggccagtctgcaacctgtttgctcactg

SEQ ID NO: 51572 - DNA, 21 bp, Artificial Sequence
  primer
ctgttctcccgaaagatcctg

SEQ ID NO: 51573 - DNA, 21 bp, Artificial Sequence
  primer
aaaggcttgggtgtgagacag

SEQ ID NO: 51574 - DNA, 20 bp, Artificial Sequence
  primer
gtgagccatgatcacaccac

SEQ ID NO: 51575 - DNA, 43 bp, Artificial Sequence
  primer
gtaaaacgacggccagttttatactgcctatttctttgtttgc

SEQ ID NO: 51576 - DNA, 23 bp, Artificial Sequence
  primer
gcaaagaagtaggtctggaggag

SEQ ID NO: 51577 - DNA, 42 bp, Artificial Sequence
  primer
gtaaaacgacggccagtcagtgcctttattcagtacaatgga

SEQ ID NO: 51578 - DNA, 24 bp, Artificial Sequence
  primer
tttctaggaatacacctgttgcac

SEQ ID NO: 51579 - DNA, 21 bp, Artificial Sequence
  primer
aaggcttgtttgtgcacattg

SEQ ID NO: 51580 - DNA, 21 bp, Artificial Sequence
  primer
atctgcagtcctggcaacaac

SEQ ID NO: 51581 - DNA, 42 bp, Artificial Sequence
  primer
gtaaaacgacggccagtaggaagaaactccctacaacttagc

SEQ ID NO: 51582 - DNA, 23 bp, Artificial Sequence
  primer
ccggtgttgatgaataataatgg

SEQ ID NO: 51583 - DNA, 21 bp, Artificial Sequence
  primer
ggtgggcaattgtgtatttcc

SEQ ID NO: 51584 - DNA, 22 bp, Artificial Sequence
  primer
tggtgtgcttatactgtgcagg

SEQ ID NO: 51585 - DNA, 44 bp, Artificial Sequence
  primer
gtaaaacgacggccagtaaagtgtacctagtacattgttggctt

SEQ ID NO: 51586 - DNA, 44 bp, Artificial Sequence
  primer
gtaaaacgacggccagtaagaggagtagaatgttaagcaatgtg

SEQ ID NO: 51587 - DNA, 21 bp, Artificial Sequence
  primer
ccatgaatttccctcttagcc

SEQ ID NO: 51588 - DNA, 19 bp, Artificial Sequence
  primer
tttattccagggctgcgtc

SEQ ID NO: 51589 - DNA, 20 bp, Artificial Sequence
  primer
ccagggctgcgtctagtacc

SEQ ID NO: 51590 - DNA, 21 bp, Artificial Sequence
  primer
tcctctcatggaatgttggtg

SEQ ID NO: 51591 - DNA, 38 bp, Artificial Sequence
  primer
gtaaaacgacggccagttttgtcatctccttggctgtg

SEQ ID NO: 51592 - DNA, 38 bp, Artificial Sequence
  primer
gtaaaacgacggccagtatctccttcatcccagtgcag

SEQ ID NO: 51593 - DNA, 38 bp, Artificial Sequence
  primer
gtaaaacgacggccagtcaccacaggtaatggaaagcc

SEQ ID NO: 51594 - DNA, 21 bp, Artificial Sequence
  primer
ttgattccaacacctttgacg

SEQ ID NO: 51595 - DNA, 38 bp, Artificial Sequence
  primer
gtaaaacgacggccagtctggtgtgaggagcattaggc

SEQ ID NO: 51596 - DNA, 37 bp, Artificial Sequence
  primer
gtaaaacgacggccagtagatgggtcagcgtcaacac

SEQ ID NO: 51597 - DNA, 38 bp, Artificial Sequence
  primer
gtaaaacgacggccagtggtggcagatgtttccagaac

SEQ ID NO: 51598 - DNA, 38 bp, Artificial Sequence
  primer
gtaaaacgacggccagttccattacaaactgtccgcag

SEQ ID NO: 51599 - DNA, 38 bp, Artificial Sequence
  primer
gtaaaacgacggccagtaaatgccaggagttggtcttc

SEQ ID NO: 51600 - DNA, 38 bp, Artificial Sequence
  primer
gtaaaacgacggccagtccaggagtaccaggctacagg

SEQ ID NO: 51601 - DNA, 38 bp, Artificial Sequence
  primer
gtaaaacgacggccagttggtgtgtgcatattgtggag

SEQ ID NO: 51602 - DNA, 37 bp, Artificial Sequence
  primer
gtaaaacgacggccagtacatgaatgggctcttgtgg

SEQ ID NO: 51603 - DNA, 21 bp, Artificial Sequence
  primer
ctgcactttgggtttctgtcc

SEQ ID NO: 51604 - DNA, 36 bp, Artificial Sequence
  primer
gtaaaacgacggccagtccagtgagatgggtggctg

SEQ ID NO: 51605 - DNA, 21 bp, Artificial Sequence
  primer
ggtgtcagaggcaggtctagg

SEQ ID NO: 51606 - DNA, 21 bp, Artificial Sequence
  primer
tgtaactaagcaaccaagccc

SEQ ID NO: 51607 - DNA, 38 bp, Artificial Sequence
  primer
gtaaaacgacggccagtgggagtaggagtgccaacatc

SEQ ID NO: 51608 - DNA, 39 bp, Artificial Sequence
  primer
gtaaaacgacggccagttgaacagtaatcatgccactgc

SEQ ID NO: 51609 - DNA, 36 bp, Artificial Sequence
  primer
gtaaaacgacggccagtaccacacgtgacatggagc

SEQ ID NO: 51610 - DNA, 21 bp, Artificial Sequence
  primer
tttgaattctctggccctttc

SEQ ID NO: 51611 - DNA, 22 bp, Artificial Sequence
  primer
gctggcataaagtagacaaccg

SEQ ID NO: 51612 - DNA, 20 bp, Artificial Sequence
  primer
gagcaaatactgggctcacg

SEQ ID NO: 51613 - DNA, 38 bp, Artificial Sequence
  primer
gtaaaacgacggccagttattcagccctggaactaccc

SEQ ID NO: 51614 - DNA, 37 bp, Artificial Sequence
  primer
gtaaaacgacggccagtgcctccatcttcaacctgtg

SEQ ID NO: 51615 - DNA, 22 bp, Artificial Sequence
  primer
gactacgtggtctactcgtccg

SEQ ID NO: 51616 - DNA, 37 bp, Artificial Sequence
  primer
gtaaaacgacggccagtacgtggtctactcgtccgtg

SEQ ID NO: 51617 - DNA, 19 bp, Artificial Sequence
  primer
ggtgggttcctgtcctgag

SEQ ID NO: 51618 - DNA, 21 bp, Artificial Sequence
  primer
gggcagttcgctctataccag

SEQ ID NO: 51619 - DNA, 39 bp, Artificial Sequence
  primer
gtaaaacgacggccagtcaacgtcttcatcgtgtctctg

SEQ ID NO: 51620 - DNA, 38 bp, Artificial Sequence
  primer
gtaaaacgacggccagtgctacaagcgcaagatgactc

SEQ ID NO: 51621 - DNA, 38 bp, Artificial Sequence
  primer
gtaaaacgacggccagtgccatcatgatcgtgacctac

SEQ ID NO: 51622 - DNA, 38 bp, Artificial Sequence
  primer
gtaaaacgacggccagtcatccttaactgcatggtccc

SEQ ID NO: 51623 - DNA, 37 bp, Artificial Sequence
  primer
gtaaaacgacggccagttcttcaggatcatcccatgc

SEQ ID NO: 51624 - DNA, 21 bp, Artificial Sequence
  primer
aaagccgagaaatgttggttg

SEQ ID NO: 51625 - DNA, 38 bp, Artificial Sequence
  primer
gtaaaacgacggccagtaggatgtatcccagcacgaag

SEQ ID NO: 51626 - DNA, 20 bp, Artificial Sequence
  primer
ttggcacatgcacagagaag

SEQ ID NO: 51627 - DNA, 20 bp, Artificial Sequence
  primer
tggtggcacagatctcttgg

SEQ ID NO: 51628 - DNA, 21 bp, Artificial Sequence
  primer
cgtggattgtgatggtggtag

SEQ ID NO: 51629 - DNA, 25 bp, Artificial Sequence
  primer
catttcactatcaggctaacctctc

SEQ ID NO: 51630 - DNA, 19 bp, Artificial Sequence
  primer
cagagttgggccaaaggac

SEQ ID NO: 51631 - DNA, 35 bp, Artificial Sequence
  primer
gtaaaacgacggccagtccagcctttgccctgaag

SEQ ID NO: 51632 - DNA, 28 bp, Artificial Sequence
  primer
cagagtatcatgagatggtaatatttgg

SEQ ID NO: 51633 - DNA, 21 bp, Artificial Sequence
  primer
tgattatggttgttggtgctg

SEQ ID NO: 51634 - DNA, 38 bp, Artificial Sequence
  primer
gtaaaacgacggccagtggccatgtcattattgcaaac

SEQ ID NO: 51635 - DNA, 38 bp, Artificial Sequence
  primer
gtaaaacgacggccagtgtagatatggctcctccctgc

SEQ ID NO: 51636 - DNA, 38 bp, Artificial Sequence
  primer
gtaaaacgacggccagttgtagctgccctgagataacc

SEQ ID NO: 51637 - DNA, 38 bp, Artificial Sequence
  primer
gtaaaacgacggccagtaggtcggaatggagttgagtc

SEQ ID NO: 51638 - DNA, 39 bp, Artificial Sequence
  primer
gtaaaacgacggccagtacagactgagctgtcagtgagg

SEQ ID NO: 51639 - DNA, 38 bp, Artificial Sequence
  primer
gtaaaacgacggccagtagccaagatttccttctccag

SEQ ID NO: 51640 - DNA, 38 bp, Artificial Sequence
  primer
gtaaaacgacggccagtcagctttccgagggacataac

SEQ ID NO: 51641 - DNA, 38 bp, Artificial Sequence
  primer
gtaaaacgacggccagtagtccctcccatggatgactc

SEQ ID NO: 51642 - DNA, 38 bp, Artificial Sequence
  primer
gtaaaacgacggccagtcaaggctggagtgattcagtg

SEQ ID NO: 51643 - DNA, 38 bp, Artificial Sequence
  primer
gtaaaacgacggccagtaggaagcaaagtgggacagac

SEQ ID NO: 51644 - DNA, 20 bp, Artificial Sequence
  primer
ggcatgatttccagctcttg

SEQ ID NO: 51645 - DNA, 38 bp, Artificial Sequence
  primer
gtaaaacgacggccagtagtccactttatcagggctgg

SEQ ID NO: 51646 - DNA, 20 bp, Artificial Sequence
  primer
ggtaccaagctcagggaagg

SEQ ID NO: 51647 - DNA, 38 bp, Artificial Sequence
  primer
gtaaaacgacggccagttatgctgctatggctgtcctc

SEQ ID NO: 51648 - DNA, 21 bp, Artificial Sequence
  primer
cccaaacaggaggactttcac

SEQ ID NO: 51649 - DNA, 21 bp, Artificial Sequence
  primer
aatgccatatgtcggtccttg

SEQ ID NO: 51650 - DNA, 20 bp, Artificial Sequence
  primer
ctgttaagggcccactcctc

SEQ ID NO: 51651 - DNA, 19 bp, Artificial Sequence
  primer
cctacgcggaactctctcg

SEQ ID NO: 51652 - DNA, 38 bp, Artificial Sequence
  primer
gtaaaacgacggccagtgctggatggaggagataatgg

SEQ ID NO: 51653 - DNA, 19 bp, Artificial Sequence
  primer
tgtgaattgctgtgccctc

SEQ ID NO: 51654 - DNA, 21 bp, Artificial Sequence
  primer
ggaagattggatttgggtctg

SEQ ID NO: 51655 - DNA, 25 bp, Artificial Sequence
  primer
aaacacctctacttgagtatttggg

SEQ ID NO: 51656 - DNA, 21 bp, Artificial Sequence
  primer
caccttccttggagtttggac

SEQ ID NO: 51657 - DNA, 38 bp, Artificial Sequence
  primer
gtaaaacgacggccagtcttacagtccctcttgggagc

SEQ ID NO: 51658 - DNA, 37 bp, Artificial Sequence
  primer
gtaaaacgacggccagtgtcctggtctgatgtcaggg

SEQ ID NO: 51659 - DNA, 21 bp, Artificial Sequence
  primer
cagtgtctcatgctgctaggg

SEQ ID NO: 51660 - DNA, 38 bp, Artificial Sequence
  primer
gtaaaacgacggccagtaccgatagtgtctggcacttg

SEQ ID NO: 51661 - DNA, 37 bp, Artificial Sequence
  primer
gtaaaacgacggccagtcttgacagcagttgcttccc

SEQ ID NO: 51662 - DNA, 37 bp, Artificial Sequence
  primer
gtaaaacgacggccagtgtctgacccatccaggacag

SEQ ID NO: 51663 - DNA, 38 bp, Artificial Sequence
  primer
gtaaaacgacggccagtctcagctcataggctgtggtc

SEQ ID NO: 51664 - DNA, 37 bp, Artificial Sequence
  primer
gtaaaacgacggccagtggcagaggctgtggtaggtc

SEQ ID NO: 51665 - DNA, 38 bp, Artificial Sequence
  primer
gtaaaacgacggccagtacatcctgcgtaacagggaag

SEQ ID NO: 51666 - DNA, 37 bp, Artificial Sequence
  primer
gtaaaacgacggccagtcaaggtgaggcacctctctg

SEQ ID NO: 51667 - DNA, 37 bp, Artificial Sequence
  primer
gtaaaacgacggccagtcagcatatttcctgcttggc

SEQ ID NO: 51668 - DNA, 38 bp, Artificial Sequence
  primer
gtaaaacgacggccagtaagggcgtagactcagctctc

SEQ ID NO: 51669 - DNA, 38 bp, Artificial Sequence
  primer
gtaaaacgacggccagtcgctccaatagtgagaagtgg

SEQ ID NO: 51670 - DNA, 21 bp, Artificial Sequence
  primer
gggatctatgtggagggtgtg

SEQ ID NO: 51671 - DNA, 21 bp, Artificial Sequence
  primer
aattgagcacgtcagtcctcc

SEQ ID NO: 51672 - DNA, 21 bp, Artificial Sequence
  primer
tcagggatggtcagacaactg

SEQ ID NO: 51673 - DNA, 38 bp, Artificial Sequence
  primer
gtaaaacgacggccagtagagtatagcctgtgagccgc

SEQ ID NO: 51674 - DNA, 21 bp, Artificial Sequence
  primer
atccacctaggctcaccagtc

SEQ ID NO: 51675 - DNA, 24 bp, Artificial Sequence
  primer
ggcctattgataacttctgattgc

SEQ ID NO: 51676 - DNA, 21 bp, Artificial Sequence
  primer
aaacctcacagaacacttcgg

SEQ ID NO: 51677 - DNA, 38 bp, Artificial Sequence
  primer
gtaaaacgacggccagttcttgcctgatttctttgctg

SEQ ID NO: 51678 - DNA, 20 bp, Artificial Sequence
  primer
atacccagcacattgttgcc

SEQ ID NO: 51679 - DNA, 22 bp, Artificial Sequence
  primer
tgtgacattccaagtgagaaca

SEQ ID NO: 51680 - DNA, 38 bp, Artificial Sequence
  primer
gtaaaacgacggccagttcagagtggtgactcccagag

SEQ ID NO: 51681 - DNA, 21 bp, Artificial Sequence
  primer
cttccaaagcaagagaatggg

SEQ ID NO: 51682 - DNA, 21 bp, Artificial Sequence
  primer
acgcctgctgatgtctgtaag

SEQ ID NO: 51683 - DNA, 38 bp, Artificial Sequence
  primer
gtaaaacgacggccagtgccattcccttctatagctgc

SEQ ID NO: 51684 - DNA, 21 bp, Artificial Sequence
  primer
tgccattgtgattcttgatcc

SEQ ID NO: 51685 - DNA, 21 bp, Artificial Sequence
  primer
tccttccctctaatgctccac

SEQ ID NO: 51686 - DNA, 39 bp, Artificial Sequence
  primer
gtaaaacgacggccagttgttagccattccttgctgttc

SEQ ID NO: 51687 - DNA, 40 bp, Artificial Sequence
  primer
gtaaaacgacggccagtttctttggaaggcataaattcac

SEQ ID NO: 51688 - DNA, 38 bp, Artificial Sequence
  primer
gtaaaacgacggccagtgaagtgagccagatatccacg

SEQ ID NO: 51689 - DNA, 38 bp, Artificial Sequence
  primer
gtaaaacgacggccagtaggtgttggttggtgttgaat

SEQ ID NO: 51690 - DNA, 25 bp, Artificial Sequence
  primer
tctaccaagaagtaaatggtatggg

SEQ ID NO: 51691 - DNA, 21 bp, Artificial Sequence
  primer
ttatcgcacaggcttctttcc

SEQ ID NO: 51692 - DNA, 21 bp, Artificial Sequence
  primer
tttacgactccacattgaggg

SEQ ID NO: 51693 - DNA, 24 bp, Artificial Sequence
  primer
ttgggagtgacattctttccttac

SEQ ID NO: 51694 - DNA, 39 bp, Artificial Sequence
  primer
gtaaaacgacggccagttctcatgaacagaatcagcacc

SEQ ID NO: 51695 - DNA, 24 bp, Artificial Sequence
  primer
caatttaaaccattctgagcacac

SEQ ID NO: 51696 - DNA, 21 bp, Artificial Sequence
  primer
tatgactgtgggatgcaggtg

SEQ ID NO: 51697 - DNA, 26 bp, Artificial Sequence
  primer
cagctgagttatggacagaatctaat

SEQ ID NO: 51698 - DNA, 21 bp, Artificial Sequence
  primer
cactgcacccagctctcttag

SEQ ID NO: 51699 - DNA, 44 bp, Artificial Sequence
  primer
gtaaaacgacggccagttcttatgtagctccttgagtatttggt

SEQ ID NO: 51700 - DNA, 20 bp, Artificial Sequence
  primer
tgcctctctgaggaatcagg

SEQ ID NO: 51701 - DNA, 36 bp, Artificial Sequence
  primer
gtaaaacgacggccagtttccatgcatcacctttgc

SEQ ID NO: 51702 - DNA, 43 bp, Artificial Sequence
  primer
gtaaaacgacggccagtttgaatatttgttaaactcatggtga

SEQ ID NO: 51703 - DNA, 39 bp, Artificial Sequence
  primer
gtaaaacgacggccagttggtttaaataaagcctcaggg

SEQ ID NO: 51704 - DNA, 21 bp, Artificial Sequence
  primer
agaatagtggccatgagcttg

SEQ ID NO: 51705 - DNA, 40 bp, Artificial Sequence
  primer
gtaaaacgacggccagtggaagaaactggttcacacattc

SEQ ID NO: 51706 - DNA, 37 bp, Artificial Sequence
  primer
gtaaaacgacggccagtttcttcatgccagggtgatg

SEQ ID NO: 51707 - DNA, 40 bp, Artificial Sequence
  primer
gtaaaacgacggccagtaagaaagaagggtttctctttgg

SEQ ID NO: 51708 - DNA, 21 bp, Artificial Sequence
  primer
cacagaacatttggttctccc

SEQ ID NO: 51709 - DNA, 19 bp, Artificial Sequence
  primer
gggctcaagcaatcctgac

SEQ ID NO: 51710 - DNA, 35 bp, Artificial Sequence
  primer
gtaaaacgacggccagtatgcaccaccacacccag

SEQ ID NO: 51711 - DNA, 38 bp, Artificial Sequence
  primer
gtaaaacgacggccagttatcagggaggtctgagtgga

SEQ ID NO: 51712 - DNA, 27 bp, Artificial Sequence
  primer
tgtgaattagtctttctgtaatctcaa

SEQ ID NO: 51713 - DNA, 38 bp, Artificial Sequence
  primer
gtaaaacgacggccagtttatcggaagttggacgttgg

SEQ ID NO: 51714 - DNA, 35 bp, Artificial Sequence
  primer
gtaaaacgacggccagtggtggtctcaaactcccg

SEQ ID NO: 51715 - DNA, 22 bp, Artificial Sequence
  primer
gtcataacttgctgtggtttcg

SEQ ID NO: 51716 - DNA, 38 bp, Artificial Sequence
  primer
gtaaaacgacggccagtatttgtcgaagcttctcctgg

SEQ ID NO: 51717 - DNA, 21 bp, Artificial Sequence
  primer
tttgagtccagtccaacttgc

SEQ ID NO: 51718 - DNA, 38 bp, Artificial Sequence
  primer
gtaaaacgacggccagtacagtggttcttcctgggatt

SEQ ID NO: 51719 - DNA, 39 bp, Artificial Sequence
  primer
gtaaaacgacggccagtaagggccactctaacttcttgg

SEQ ID NO: 51720 - DNA, 21 bp, Artificial Sequence
  primer
acttactgagaccctcccagg

SEQ ID NO: 51721 - DNA, 21 bp, Artificial Sequence
  primer
agtctgcatagcctcaggtgc

SEQ ID NO: 51722 - DNA, 21 bp, Artificial Sequence
  primer
taatttgccaaggctagaggg

SEQ ID NO: 51723 - DNA, 37 bp, Artificial Sequence
  primer
gtaaaacgacggccagtgtcctgtggttgctttagcg

SEQ ID NO: 51724 - DNA, 21 bp, Artificial Sequence
  primer
cagtgagttccagaaagcagc

SEQ ID NO: 51725 - DNA, 22 bp, Artificial Sequence
  primer
gcttggcttcatatagccgttc

SEQ ID NO: 51726 - DNA, 38 bp, Artificial Sequence
  primer
gtaaaacgacggccagtactcctggaagtcctcagtcc

SEQ ID NO: 51727 - DNA, 38 bp, Artificial Sequence
  primer
gtaaaacgacggccagtattggccatcaaagctccata

SEQ ID NO: 51728 - DNA, 39 bp, Artificial Sequence
  primer
gtaaaacgacggccagttggattgatgtgctggagtaaa

SEQ ID NO: 51729 - DNA, 35 bp, Artificial Sequence
  primer
gtaaaacgacggccagtcccacttcccagccattg

SEQ ID NO: 51730 - DNA, 38 bp, Artificial Sequence
  primer
gtaaaacgacggccagtggtcatgaacctttcctctcc

SEQ ID NO: 51731 - DNA, 24 bp, Artificial Sequence
  primer
tggagccttcatcatttaatagtt

SEQ ID NO: 51732 - DNA, 21 bp, Artificial Sequence
  primer
actgcagcaataacatccgtc

SEQ ID NO: 51733 - DNA, 22 bp, Artificial Sequence
  primer
gggtttcttgccagatcagtag

SEQ ID NO: 51734 - DNA, 38 bp, Artificial Sequence
  primer
gtaaaacgacggccagtagggaggatcaagggtttgag

SEQ ID NO: 51735 - DNA, 21 bp, Artificial Sequence
  primer
tggcctgggtaggtcagtaag

SEQ ID NO: 51736 - DNA, 38 bp, Artificial Sequence
  primer
gtaaaacgacggccagttcacacttgtctcacccttgg

SEQ ID NO: 51737 - DNA, 21 bp, Artificial Sequence
  primer
ggtaagagggaggactccagg

SEQ ID NO: 51738 - DNA, 38 bp, Artificial Sequence
  primer
gtaaaacgacggccagttgtcaattgcaggatggaatg

SEQ ID NO: 51739 - DNA, 21 bp, Artificial Sequence
  primer
taaagggctcaaccatggaaa

SEQ ID NO: 51740 - DNA, 37 bp, Artificial Sequence
  primer
gtaaaacgacggccagtaaacctctgggtgaagaggg

SEQ ID NO: 51741 - DNA, 38 bp, Artificial Sequence
  primer
gtaaaacgacggccagtgatggctaggagttgggtgac

SEQ ID NO: 51742 - DNA, 21 bp, Artificial Sequence
  primer
tagagcaagggagtagctggg

SEQ ID NO: 51743 - DNA, 39 bp, Artificial Sequence
  primer
gtaaaacgacggccagtaacctgtcacttgagtggtgtg

SEQ ID NO: 51744 - DNA, 21 bp, Artificial Sequence
  primer
ctattggttgccagtctggtg

SEQ ID NO: 51745 - DNA, 21 bp, Artificial Sequence
  primer
gatgctggtggctttatctcc

SEQ ID NO: 51746 - DNA, 38 bp, Artificial Sequence
  primer
gtaaaacgacggccagtagggaaatgattgccaagatg

SEQ ID NO: 51747 - DNA, 37 bp, Artificial Sequence
  primer
gtaaaacgacggccagtttctgccctttctcctcacc

SEQ ID NO: 51748 - DNA, 36 bp, Artificial Sequence
  primer
gtaaaacgacggccagttgagggctgccattctagg

SEQ ID NO: 51749 - DNA, 22 bp, Artificial Sequence
  primer
tgctatgtatacgaggttgggc

SEQ ID NO: 51750 - DNA, 38 bp, Artificial Sequence
  primer
gtaaaacgacggccagtgctctagcagagcagccacac

SEQ ID NO: 51751 - DNA, 38 bp, Artificial Sequence
  primer
gtaaaacgacggccagttgcccatgtccataatgtagg

SEQ ID NO: 51752 - DNA, 38 bp, Artificial Sequence
  primer
gtaaaacgacggccagtagctctcaaagccaatgatcc

SEQ ID NO: 51753 - DNA, 38 bp, Artificial Sequence
  primer
gtaaaacgacggccagtcctgagctgagagctgagttg

SEQ ID NO: 51754 - DNA, 21 bp, Artificial Sequence
  primer
ggaagagcacagggattgttc

SEQ ID NO: 51755 - DNA, 21 bp, Artificial Sequence
  primer
agaactgggagcctttgacac

SEQ ID NO: 51756 - DNA, 21 bp, Artificial Sequence
  primer
tgtattaggcattgtgctggg

SEQ ID NO: 51757 - DNA, 23 bp, Artificial Sequence
  primer
tgttgcgtgatatatgcgtagtc

SEQ ID NO: 51758 - DNA, 38 bp, Artificial Sequence
  primer
gtaaaacgacggccagtaagtgccagcgtcttcttagc

SEQ ID NO: 51759 - DNA, 26 bp, Artificial Sequence
  primer
tgacagtgctattcctaaagctattc

SEQ ID NO: 51760 - DNA, 38 bp, Artificial Sequence
  primer
gtaaaacgacggccagtatgcattaactcacggctgtc

SEQ ID NO: 51761 - DNA, 21 bp, Artificial Sequence
  primer
tgccctatacatttcctggtg

SEQ ID NO: 51762 - DNA, 38 bp, Artificial Sequence
  primer
gtaaaacgacggccagtgaatttgtggctttgcacaat

SEQ ID NO: 51763 - DNA, 21 bp, Artificial Sequence
  primer
agttacgggtctttgggaatg

SEQ ID NO: 51764 - DNA, 38 bp, Artificial Sequence
  primer
gtaaaacgacggccagtgaagttcccgagtaagggagg

SEQ ID NO: 51765 - DNA, 37 bp, Artificial Sequence
  primer
gtaaaacgacggccagtgttgctgtgagccaagatca

SEQ ID NO: 51766 - DNA, 21 bp, Artificial Sequence
  primer
ggcaattcaggaggaaagaac

SEQ ID NO: 51767 - DNA, 41 bp, Artificial Sequence
  primer
gtaaaacgacggccagttcactttaggaagctaattgttgg

SEQ ID NO: 51768 - DNA, 39 bp, Artificial Sequence
  primer
gtaaaacgacggccagtgtggtgaaggcttaaggtgatg

SEQ ID NO: 51769 - DNA, 44 bp, Artificial Sequence
  primer
gtaaaacgacggccagtgctagtagaaagcagatgtcaactgtg

SEQ ID NO: 51770 - DNA, 22 bp, Artificial Sequence
  primer
aaattgattcccttccactgag

SEQ ID NO: 51771 - DNA, 21 bp, Artificial Sequence
  primer
cctgaagagctcaatttgtgg

SEQ ID NO: 51772 - DNA, 21 bp, Artificial Sequence
  primer
gcaagtgatttgcctatggtg

SEQ ID NO: 51773 - DNA, 24 bp, Artificial Sequence
  primer
gaatccattagaggacacactctg

SEQ ID NO: 51774 - DNA, 21 bp, Artificial Sequence
  primer
tgtatacttgctgccacatgc

SEQ ID NO: 51775 - DNA, 21 bp, Artificial Sequence
  primer
aggcgcttcagagaagctaag

SEQ ID NO: 51776 - DNA, 40 bp, Artificial Sequence
  primer
gtaaaacgacggccagttttgtcctgatttctttctccaa

SEQ ID NO: 51777 - DNA, 42 bp, Artificial Sequence
  primer
gtaaaacgacggccagtacttcagagcaaatgtctcttcttt

SEQ ID NO: 51778 - DNA, 20 bp, Artificial Sequence
  primer
tttcaagcactcccatggtc

SEQ ID NO: 51779 - DNA, 38 bp, Artificial Sequence
  primer
gtaaaacgacggccagtactcatgccttgctcttgaaa

SEQ ID NO: 51780 - DNA, 38 bp, Artificial Sequence
  primer
gtaaaacgacggccagtgaaattaggcacctctttggc

SEQ ID NO: 51781 - DNA, 22 bp, Artificial Sequence
  primer
ttgccatgtaataatgtggtcc

SEQ ID NO: 51782 - DNA, 25 bp, Artificial Sequence
  primer
tctaatacacgaatgctgtgaaatg

SEQ ID NO: 51783 - DNA, 41 bp, Artificial Sequence
  primer
gtaaaacgacggccagtggatttacttcacatcgtgttcaa

SEQ ID NO: 51784 - DNA, 43 bp, Artificial Sequence
  primer
gtaaaacgacggccagttcccaacatgacacttaacatatttc

SEQ ID NO: 51785 - DNA, 23 bp, Artificial Sequence
  primer
aaagcatatgacccagaaacaag

SEQ ID NO: 51786 - DNA, 38 bp, Artificial Sequence
  primer
gtaaaacgacggccagtgcttgtgactgcttgtcattg

SEQ ID NO: 51787 - DNA, 21 bp, Artificial Sequence
  primer
ttctagcagctatgccatccc

SEQ ID NO: 51788 - DNA, 21 bp, Artificial Sequence
  primer
gacacaagcaatccaggaaag

SEQ ID NO: 51789 - DNA, 37 bp, Artificial Sequence
  primer
gtaaaacgacggccagtatggggtttccatagttggg

SEQ ID NO: 51790 - DNA, 41 bp, Artificial Sequence
  primer
gtaaaacgacggccagtgaatccattagaggacacactctg

SEQ ID NO: 51791 - DNA, 38 bp, Artificial Sequence
  primer
gtaaaacgacggccagtagcctgagagaggccaaatac

SEQ ID NO: 51792 - DNA, 23 bp, Artificial Sequence
  primer
ttgtaaatgggtgttggactttg

SEQ ID NO: 51793 - DNA, 22 bp, Artificial Sequence
  primer
tgattggcttatttcatcccac

SEQ ID NO: 51794 - DNA, 22 bp, Artificial Sequence
  primer
gcctgacactgaaactccaaag

SEQ ID NO: 51795 - DNA, 21 bp, Artificial Sequence
  primer
gccttactcttgccaacaatg

SEQ ID NO: 51796 - DNA, 41 bp, Artificial Sequence
  primer
gtaaaacgacggccagttgcaaggcaggtagtagataaagc

SEQ ID NO: 51797 - DNA, 41 bp, Artificial Sequence
  primer
gtaaaacgacggccagtttcagcatcaaagtgttatgtgtg

SEQ ID NO: 51798 - DNA, 20 bp, Artificial Sequence
  primer
agcacggaaacacacagatg

SEQ ID NO: 51799 - DNA, 19 bp, Artificial Sequence
  primer
cccttctgtcaaaggccag

SEQ ID NO: 51800 - DNA, 39 bp, Artificial Sequence
  primer
gtaaaacgacggccagtggtcaggatgacaaatgttcac

SEQ ID NO: 51801 - DNA, 42 bp, Artificial Sequence
  primer
gtaaaacgacggccagtaaatagaaatggcaatggtttaagg

SEQ ID NO: 51802 - DNA, 44 bp, Artificial Sequence
  primer
gtaaaacgacggccagtgctgcagattctatttatctgtctatg

SEQ ID NO: 51803 - DNA, 37 bp, Artificial Sequence
  primer
gtaaaacgacggccagttttcatctggcaggcagttc

SEQ ID NO: 51804 - DNA, 38 bp, Artificial Sequence
  primer
gtaaaacgacggccagttccactttgatccttaggtcg

SEQ ID NO: 51805 - DNA, 43 bp, Artificial Sequence
  primer
gtaaaacgacggccagtggttgaacaaatattctctctccttt

SEQ ID NO: 51806 - DNA, 23 bp, Artificial Sequence
  primer
gaatccattagaggacacactgg

SEQ ID NO: 51807 - DNA, 21 bp, Artificial Sequence
  primer
tcacaaccaaggctgtttgac

SEQ ID NO: 51808 - DNA, 37 bp, Artificial Sequence
  primer
gtaaaacgacggccagtgagggaaatgcgtgaagatg

SEQ ID NO: 51809 - DNA, 37 bp, Artificial Sequence
  primer
gtaaaacgacggccagtacacccttggatcacacagc

SEQ ID NO: 51810 - DNA, 41 bp, Artificial Sequence
  primer
gtaaaacgacggccagtaaggactccatgaaactctaggtc

SEQ ID NO: 51811 - DNA, 38 bp, Artificial Sequence
  primer
gtaaaacgacggccagtttctgaaactctccagccagc

SEQ ID NO: 51812 - DNA, 38 bp, Artificial Sequence
  primer
gtaaaacgacggccagtttagctcattgctcccaaagc

SEQ ID NO: 51813 - DNA, 38 bp, Artificial Sequence
  primer
gtaaaacgacggccagtacctctacgcttgctctcagc

SEQ ID NO: 51814 - DNA, 38 bp, Artificial Sequence
  primer
gtaaaacgacggccagtcaaggagccagaactcctacc

SEQ ID NO: 51815 - DNA, 38 bp, Artificial Sequence
  primer
gtaaaacgacggccagtggatcttgagaaaggcacctg

SEQ ID NO: 51816 - DNA, 21 bp, Artificial Sequence
  primer
tttgttaaaccgaggtggtcc

SEQ ID NO: 51817 - DNA, 35 bp, Artificial Sequence
  primer
gtaaaacgacggccagtgagcaggtgtgcaggagc

SEQ ID NO: 51818 - DNA, 38 bp, Artificial Sequence
  primer
gtaaaacgacggccagtgccagacattgaactgcaaat

SEQ ID NO: 51819 - DNA, 21 bp, Artificial Sequence
  primer
caattgatgtgtgtgtgctgc

SEQ ID NO: 51820 - DNA, 41 bp, Artificial Sequence
  primer
gtaaaacgacggccagttgtttaaggactttgtctgtgtgg

SEQ ID NO: 51821 - DNA, 39 bp, Artificial Sequence
  primer
gtaaaacgacggccagtcaatagttggtatgatgcaccg

SEQ ID NO: 51822 - DNA, 21 bp, Artificial Sequence
  primer
tgttgaaagtccagcctgttg

SEQ ID NO: 51823 - DNA, 42 bp, Artificial Sequence
  primer
gtaaaacgacggccagttgtttaacaactacgacatttaccc

SEQ ID NO: 51824 - DNA, 43 bp, Artificial Sequence
  primer
gtaaaacgacggccagtagaagtagcagataaagtgtttcaca

SEQ ID NO: 51825 - DNA, 38 bp, Artificial Sequence
  primer
gtaaaacgacggccagtttcagtgccgtatacagggtt

SEQ ID NO: 51826 - DNA, 21 bp, Artificial Sequence
  primer
tttgtcccaaactgccaatag

SEQ ID NO: 51827 - DNA, 38 bp, Artificial Sequence
  primer
gtaaaacgacggccagtctgccttatgggatcagtgtg

SEQ ID NO: 51828 - DNA, 37 bp, Artificial Sequence
  primer
gtaaaacgacggccagtgctcgagattctcatgcagc

SEQ ID NO: 51829 - DNA, 22 bp, Artificial Sequence
  primer
tgtacctatgtgtgtgcttggc

SEQ ID NO: 51830 - DNA, 38 bp, Artificial Sequence
  primer
gtaaaacgacggccagtgtgagtcacgctcagcatttc

SEQ ID NO: 51831 - DNA, 21 bp, Artificial Sequence
  primer
aaagctgggaacattgcattc

SEQ ID NO: 51832 - DNA, 40 bp, Artificial Sequence
  primer
gtaaaacgacggccagtaacaaaggcctagagttggacac

SEQ ID NO: 51833 - DNA, 18 bp, Artificial Sequence
  primer
gtgtgggcgttgatttcg

SEQ ID NO: 51834 - DNA, 21 bp, Artificial Sequence
  primer
tttccagggaagtgatctttg

SEQ ID NO: 51835 - DNA, 38 bp, Artificial Sequence
  primer
gtaaaacgacggccagtttgtgttctggagcagtttgg

SEQ ID NO: 51836 - DNA, 21 bp, Artificial Sequence
  primer
tgaacagtaagtgcggagtgg

SEQ ID NO: 51837 - DNA, 20 bp, Artificial Sequence
  primer
gttcatgaccattccttcgg

SEQ ID NO: 51838 - DNA, 37 bp, Artificial Sequence
  primer
gtaaaacgacggccagttgtgaattggcttcacatcc

SEQ ID NO: 51839 - DNA, 38 bp, Artificial Sequence
  primer
gtaaaacgacggccagttccaaatgtgtggtttgcttc

SEQ ID NO: 51840 - DNA, 23 bp, Artificial Sequence
  primer
gaatccaagtagaaatgtggctg

SEQ ID NO: 51841 - DNA, 38 bp, Artificial Sequence
  primer
gtaaaacgacggccagtatgcaagcatcagtccacttc

SEQ ID NO: 51842 - DNA, 37 bp, Artificial Sequence; identical to SEQ ID NO: 51808
  primer

SEQ ID NO: 51843 - DNA, 38 bp, Artificial Sequence
  primer
gtaaaacgacggccagtatagccatctaacaccgtggc

SEQ ID NO: 51844 - DNA, 41 bp, Artificial Sequence; identical to SEQ ID NO: 51810
  primer

SEQ ID NO: 51845 - DNA, 19 bp, Artificial Sequence
  primer
ctcctgttcctgggcttgt

SEQ ID NO: 51846 - DNA, 20 bp, Artificial Sequence
  primer
agcctccgtggcttatatgg

SEQ ID NO: 51847 - DNA, 21 bp, Artificial Sequence
  primer
gttgagctgactccctgttcc

SEQ ID NO: 51848 - DNA, 36 bp, Artificial Sequence
  primer
gtaaaacgacggccagtagacgctaccctgcctctg

SEQ ID NO: 51849 - DNA, 19 bp, Artificial Sequence
  primer
ctggaaactgctcgctgtg

SEQ ID NO: 51850 - DNA, 38 bp, Artificial Sequence
  primer
gtaaaacgacggccagtcactccactcacagtaagccc

SEQ ID NO: 51851 - DNA, 21 bp, Artificial Sequence
  primer
tgtttgctcttatggctgctt

SEQ ID NO: 51852 - DNA, 18 bp, Artificial Sequence
  primer
ggccgagtgcctgagaag

SEQ ID NO: 51853 - DNA, 19 bp, Artificial Sequence
  primer
caggtaaggcaggtgaggc

SEQ ID NO: 51854 - DNA, 38 bp, Artificial Sequence
  primer
gtaaaacgacggccagtttccaactttataatggcccg

SEQ ID NO: 51855 - DNA, 38 bp, Artificial Sequence
  primer
gtaaaacgacggccagtatggccctagatctgcaagag

SEQ ID NO: 51856 - DNA, 20 bp, Artificial Sequence
  primer
ttattggagcctctcctggg

SEQ ID NO: 51857 - DNA, 38 bp, Artificial Sequence
  primer
gtaaaacgacggccagtggaagtccctgggaagagaag

SEQ ID NO: 51858 - DNA, 20 bp, Artificial Sequence
  primer
caggtgatgccaatcctcag

SEQ ID NO: 51859 - DNA, 21 bp, Artificial Sequence
  primer
cgtctgtgaagttgttcaggc

SEQ ID NO: 51860 - DNA, 38 bp, Artificial Sequence
  primer
gtaaaacgacggccagttgggagtgggaacatagaacc

SEQ ID NO: 51861 - DNA, 21 bp, Artificial Sequence
  primer
attctgagtgagatgggagcc

SEQ ID NO: 51862 - DNA, 38 bp, Artificial Sequence
  primer
gtaaaacgacggccagtcccacttgtctaactggacgc

SEQ ID NO: 51863 - DNA, 37 bp, Artificial Sequence
  primer
gtaaaacgacggccagtagcctgtgcagtaggtgtgg

SEQ ID NO: 51864 - DNA, 21 bp, Artificial Sequence
  primer
ccaagaagctctcccagattg

SEQ ID NO: 51865 - DNA, 38 bp, Artificial Sequence
  primer
gtaaaacgacggccagtggcactgaggaagatttggac

SEQ ID NO: 51866 - DNA, 38 bp, Artificial Sequence
  primer
gtaaaacgacggccagtcagccaatattccctgacacc

SEQ ID NO: 51867 - DNA, 38 bp, Artificial Sequence
  primer
gtaaaacgacggccagtagctctctttgtcacacaccg

SEQ ID NO: 51868 - DNA, 21 bp, Artificial Sequence
  primer
gagaaacagaggtgcacatgg

SEQ ID NO: 51869 - DNA, 36 bp, Artificial Sequence
  primer
gtaaaacgacggccagtgtacctgaggctgggcttc

SEQ ID NO: 51870 - DNA, 19 bp, Artificial Sequence
  primer
agggaaatcctttccagcc

SEQ ID NO: 51871 - DNA, 38 bp, Artificial Sequence
  primer
gtaaaacgacggccagtcacccatgagatgttctgcac

SEQ ID NO: 51872 - DNA, 38 bp, Artificial Sequence
  primer
gtaaaacgacggccagtgaattctccaccttgtttccc

SEQ ID NO: 51873 - DNA, 21 bp, Artificial Sequence
  primer
actcccagaataggaggcagg

SEQ ID NO: 51874 - DNA, 20 bp, Artificial Sequence
  primer
caattaagcctgggcaacag

SEQ ID NO: 51875 - DNA, 37 bp, Artificial Sequence
  primer
gtaaaacgacggccagtatctgcctcttcccttgctc

SEQ ID NO: 51876 - DNA, 38 bp, Artificial Sequence
  primer
gtaaaacgacggccagtggccagacttacagatggctg

SEQ ID NO: 51877 - DNA, 22 bp, Artificial Sequence
  primer
gccaaatcagagagaagactgg

SEQ ID NO: 51878 - DNA, 37 bp, Artificial Sequence
  primer
gtaaaacgacggccagtgaacctggctcgaacctacc

SEQ ID NO: 51879 - DNA, 18 bp, Artificial Sequence
  primer
ggagactgctgacagccc

SEQ ID NO: 51880 - DNA, 19 bp, Artificial Sequence
  primer
ctggcaggcacctgtaacc

SEQ ID NO: 51881 - DNA, 21 bp, Artificial Sequence
  primer
aattggtcctggaatcacacc

SEQ ID NO: 51882 - DNA, 37 bp, Artificial Sequence
  primer
gtaaaacgacggccagtaatcgaatggtcacgagcag

SEQ ID NO: 51883 - DNA, 37 bp, Artificial Sequence
  primer
gtaaaacgacggccagtcacctccttccctctgtcct

SEQ ID NO: 51884 - DNA, 21 bp, Artificial Sequence
  primer
tctggaagctcttcccttcac

SEQ ID NO: 51885 - DNA, 21 bp, Artificial Sequence
  primer
tgcacctggcaacagatctac

SEQ ID NO: 51886 - DNA, 38 bp, Artificial Sequence
  primer
gtaaaacgacggccagtgtcgcaggctgaaactaaacc

SEQ ID NO: 51887 - DNA, 21 bp, Artificial Sequence
  primer
tgcataagatcacaggcttcc

SEQ ID NO: 51888 - DNA, 20 bp, Artificial Sequence
  primer
attgcagcctggagacattg

SEQ ID NO: 51889 - DNA, 27 bp, Artificial Sequence
  primer
aattaggtttcatgatttaaatttccc

SEQ ID NO: 51890 - DNA, 20 bp, Artificial Sequence
  primer
agctgagattggaccactgc

SEQ ID NO: 51891 - DNA, 43 bp, Artificial Sequence
  primer
gtaaaacgacggccagtgatttaaagaacaagaatcacccatt

SEQ ID NO: 51892 - DNA, 18 bp, Artificial Sequence
  primer
gagctcagggtgtgcctg

SEQ ID NO: 51893 - DNA, 38 bp, Artificial Sequence
  primer
gtaaaacgacggccagttatcattgtccgagtccatcg

SEQ ID NO: 51894 - DNA, 39 bp, Artificial Sequence
  primer
gtaaaacgacggccagttcttgaatggctctttcagctc

SEQ ID NO: 51895 - DNA, 21 bp, Artificial Sequence
  primer
tggcaaatctttcagttgctc

SEQ ID NO: 51896 - DNA, 22 bp, Artificial Sequence
  primer
ggcatgctattattgtctgtgg

SEQ ID NO: 51897 - DNA, 21 bp, Artificial Sequence
  primer
accttgattgaaagaggcagc

SEQ ID NO: 51898 - DNA, 37 bp, Artificial Sequence
  primer
gtaaaacgacggccagtaaggagagtaaaggccacgc

SEQ ID NO: 51899 - DNA, 18 bp, Artificial Sequence
  primer
tgtgccggaaggaggaag

SEQ ID NO: 51900 - DNA, 22 bp, Artificial Sequence
  primer
tgatgaaggagacctacgtttg

SEQ ID NO: 51901 - DNA, 21 bp, Artificial Sequence
  primer
tcactgttcatctccagaccc

SEQ ID NO: 51902 - DNA, 18 bp, Artificial Sequence
  primer
caggccagctgtgcaaac

SEQ ID NO: 51903 - DNA, 37 bp, Artificial Sequence
  primer
gtaaaacgacggccagtaggcttgcgcctcttagttc

SEQ ID NO: 51904 - DNA, 21 bp, Artificial Sequence
  primer
ccactatccaacttcgcttcc

SEQ ID NO: 51905 - DNA, 38 bp, Artificial Sequence
  primer
gtaaaacgacggccagtaggattcttggagcagactgg

SEQ ID NO: 51906 - DNA, 21 bp, Artificial Sequence
  primer
aagtttggctgaaaggtcagg

SEQ ID NO: 51907 - DNA, 22 bp, Artificial Sequence
  primer
gcctttcccttaaggatgtctg

SEQ ID NO: 51908 - DNA, 35 bp, Artificial Sequence
  primer
gtaaaacgacggccagtactgcacccggcctttac

SEQ ID NO: 51909 - DNA, 21 bp, Artificial Sequence
  primer
atggaggtctcagtctgtggg

SEQ ID NO: 51910 - DNA, 37 bp, Artificial Sequence
  primer
gtaaaacgacggccagtccagcctgggtgtctgtatg

SEQ ID NO: 51911 - DNA, 42 bp, Artificial Sequence
  primer
gtaaaacgacggccagttttctgagttaatcagggacacttc

SEQ ID NO: 51912 - DNA, 37 bp, Artificial Sequence
  primer
gtaaaacgacggccagtgttggctttgtgaccgactc

SEQ ID NO: 51913 - DNA, 38 bp, Artificial Sequence
  primer
gtaaaacgacggccagtgggtctccatcagacacagag

SEQ ID NO: 51914 - DNA, 37 bp, Artificial Sequence
  primer
gtaaaacgacggccagtcgagaatggatcaatggtgc

SEQ ID NO: 51915 - DNA, 19 bp, Artificial Sequence
  primer
ggtaggtgagcgcgttagc

SEQ ID NO: 51916 - DNA, 23 bp, Artificial Sequence
  primer
ttcaggcagacactggaactaag

SEQ ID NO: 51917 - DNA, 21 bp, Artificial Sequence
  primer
taacaggaacacgggcttatc

SEQ ID NO: 51918 - DNA, 39 bp, Artificial Sequence
  primer
gtaaaacgacggccagtggagttctctgcttctgggaaa

SEQ ID NO: 51919 - DNA, 38 bp, Artificial Sequence
  primer
gtaaaacgacggccagtcagtcaatgcgactgacaagg

SEQ ID NO: 51920 - DNA, 38 bp, Artificial Sequence
  primer
gtaaaacgacggccagtggaatgggctgagacagtgac

SEQ ID NO: 51921 - DNA, 39 bp, Artificial Sequence
  primer
gtaaaacgacggccagttggactgaagggtgaattatgg

SEQ ID NO: 51922 - DNA, 38 bp, Artificial Sequence; identical to SEQ ID NO: 51920
  primer

SEQ ID NO: 51923 - DNA, 39 bp, Artificial Sequence; identical to SEQ ID NO: 51921
  primer

SEQ ID NO: 51924 - DNA, 21 bp, Artificial Sequence
  primer
caccacagagtaacgcagacc

SEQ ID NO: 51925 - DNA, 21 bp, Artificial Sequence
  primer
gtccagcagcgtatagacgag

SEQ ID NO: 51926 - DNA, 37 bp, Artificial Sequence
  primer
gtaaaacgacggccagtagacaccagctgagtgggag

SEQ ID NO: 51927 - DNA, 40 bp, Artificial Sequence
  primer
gtaaaacgacggccagtcacaagcctatggtttcatgttg

SEQ ID NO: 51928 - DNA, 25 bp, Artificial Sequence
  primer
cccaattaaacatcctctatttctg

SEQ ID NO: 51929 - DNA, 44 bp, Artificial Sequence
  primer
gtaaaacgacggccagtcaactctcaagaaagctgtcgtatatc

SEQ ID NO: 51930 - DNA, 21 bp, Artificial Sequence
  primer
gccacatttgctttcccttag

SEQ ID NO: 51931 - DNA, 23 bp, Artificial Sequence
  primer
tgaagtccacatcataaggatca

SEQ ID NO: 51932 - DNA, 41 bp, Artificial Sequence
  primer
gtaaaacgacggccagtcccatattctgtgttaaccctacc

SEQ ID NO: 51933 - DNA, 26 bp, Artificial Sequence
  primer
gcaagaataaatggagttaagcaatg

SEQ ID NO: 51934 - DNA, 21 bp, Artificial Sequence
  primer
tttgtgtgcatttgtgtttca

SEQ ID NO: 51935 - DNA, 20 bp, Artificial Sequence
  primer
cctgagtggctccatattgc

SEQ ID NO: 51936 - DNA, 43 bp, Artificial Sequence
  primer
gtaaaacgacggccagttgggaataaagacactgaaataaatg

SEQ ID NO: 51937 - DNA, 20 bp, Artificial Sequence
  primer
gggtctgaccatcattcagc

SEQ ID NO: 51938 - DNA, 42 bp, Artificial Sequence
  primer
gtaaaacgacggccagtataaaccaaatgtatgactgcagaa

SEQ ID NO: 51939 - DNA, 24 bp, Artificial Sequence
  primer
tttctttgttcacaaatgcatacc

SEQ ID NO: 51940 - DNA, 38 bp, Artificial Sequence
  primer
gtaaaacgacggccagttcctctttggaaatgctctgg

SEQ ID NO: 51941 - DNA, 21 bp, Artificial Sequence
  primer
cgcccatctaatgactgtttg

SEQ ID NO: 51942 - DNA, 21 bp, Artificial Sequence
  primer
ccagaccttgatccttcttgg

SEQ ID NO: 51943 - DNA, 21 bp, Artificial Sequence
  primer
ctgacactctgaagccctctg

SEQ ID NO: 51944 - DNA, 21 bp, Artificial Sequence
  primer
agttagccaatgcccacaatg

SEQ ID NO: 51945 - DNA, 18 bp, Artificial Sequence
  primer
cacgggaagacagccctc

SEQ ID NO: 51946 - DNA, 20 bp, Artificial Sequence
  primer
tcccattagggaaggcaatg

SEQ ID NO: 51947 - DNA, 40 bp, Artificial Sequence
  primer
gtaaaacgacggccagtaagcctcataggaaatacgaagc

SEQ ID NO: 51948 - DNA, 40 bp, Artificial Sequence
  primer
gtaaaacgacggccagttgtcatctctggcctgtattacc

SEQ ID NO: 51949 - DNA, 39 bp, Artificial Sequence
  primer
gtaaaacgacggccagttggagaactgaatgttaccagc

SEQ ID NO: 51950 - DNA, 38 bp, Artificial Sequence
  primer
gtaaaacgacggccagtatcccattcacgcttatgtcc

SEQ ID NO: 51951 - DNA, 41 bp, Artificial Sequence
  primer
gtaaaacgacggccagtactgtggtacgtgataaactggac

SEQ ID NO: 51952 - DNA, 38 bp, Artificial Sequence
  primer
gtaaaacgacggccagtcaagagatggcaatggagaag

SEQ ID NO: 51953 - DNA, 41 bp, Artificial Sequence
  primer
gtaaaacgacggccagtttcagtgctgctatatttcctgtg

SEQ ID NO: 51954 - DNA, 40 bp, Artificial Sequence
  primer
gtaaaacgacggccagttgtgacatgcagtaaagagaggg

SEQ ID NO: 51955 - DNA, 21 bp, Artificial Sequence
  primer
aattggcaagggaattcaaac

SEQ ID NO: 51956 - DNA, 40 bp, Artificial Sequence
  primer
gtaaaacgacggccagtcagcaatgaaagaacatttgtgg

SEQ ID NO: 51957 - DNA, 20 bp, Artificial Sequence
  primer
aagtccaggaagggacatgc

SEQ ID NO: 51958 - DNA, 38 bp, Artificial Sequence
  primer
gtaaaacgacggccagtgcccacttgactcagatcctt

SEQ ID NO: 51959 - DNA, 38 bp, Artificial Sequence
  primer
gtaaaacgacggccagtttgtgtttccctgatggttcc

SEQ ID NO: 51960 - DNA, 38 bp, Artificial Sequence
  primer
gtaaaacgacggccagtagaaagcggcctcttacactg

SEQ ID NO: 51961 - DNA, 21 bp, Artificial Sequence
  primer
ctggcagtagcttcccagttc

SEQ ID NO: 51962 - DNA, 21 bp, Artificial Sequence
  primer
aatcctctggaaggcactcag

SEQ ID NO: 51963 - DNA, 38 bp, Artificial Sequence
  primer
gtaaaacgacggccagtctacccttggtttagggtggg

SEQ ID NO: 51964 - DNA, 40 bp, Artificial Sequence
  primer
gtaaaacgacggccagtttgcaaagtccaataggttcttc

SEQ ID NO: 51965 - DNA, 39 bp, Artificial Sequence
  primer
gtaaaacgacggccagtgggttcctcaactaggtgtctg

SEQ ID NO: 51966 - DNA, 37 bp, Artificial Sequence
  primer
gtaaaacgacggccagtattggttcaggctggttgtc

SEQ ID NO: 51967 - DNA, 37 bp, Artificial Sequence
  primer
gtaaaacgacggccagttgatgtccatgccaacagag

SEQ ID NO: 51968 - DNA, 39 bp, Artificial Sequence
  primer
gtaaaacgacggccagtcctggttgggagagacagaaag

SEQ ID NO: 51969 - DNA, 39 bp, Artificial Sequence
  primer
gtaaaacgacggccagtccagagtcccacaaatgtcttc

SEQ ID NO: 51970 - DNA, 46 bp, Artificial Sequence
  primer
gtaaaacgacggccagtggattaccatttagaagaaacataatctc

SEQ ID NO: 51971 - DNA, 22 bp, Artificial Sequence
  primer
tgtgctgtcatcatctactggg

SEQ ID NO: 51972 - DNA, 20 bp, Artificial Sequence
  primer
agagcgaaactccgtctcaa

SEQ ID NO: 51973 - DNA, 23 bp, Artificial Sequence
  primer
gaagacacactgagttggctaca

SEQ ID NO: 51974 - DNA, 38 bp, Artificial Sequence
  primer
gtaaaacgacggccagtttgagcttcccaaccttcaaa

SEQ ID NO: 51975 - DNA, 25 bp, Artificial Sequence
  primer
tgcttactgtaccaagtttcatttg

SEQ ID NO: 51976 - DNA, 39 bp, Artificial Sequence
  primer
gtaaaacgacggccagtttatcgctgaaagaatttgcac

SEQ ID NO: 51977 - DNA, 39 bp, Artificial Sequence
  primer
gtaaaacgacggccagttggtgactgcttatagacaccc

SEQ ID NO: 51978 - DNA, 39 bp, Artificial Sequence
  primer
gtaaaacgacggccagtgggcattcataatccaaatgag

SEQ ID NO: 51979 - DNA, 38 bp, Artificial Sequence
  primer
gtaaaacgacggccagtacctggatgacagcttcttgg

SEQ ID NO: 51980 - DNA, 21 bp, Artificial Sequence
  primer
caaacaatgccagtcttccag

SEQ ID NO: 51981 - DNA, 38 bp, Artificial Sequence
  primer
gtaaaacgacggccagttctctatcctccattgagccc

SEQ ID NO: 51982 - DNA, 35 bp, Artificial Sequence
  primer
gtaaaacgacggccagtaagaagtggcagccaggg

SEQ ID NO: 51983 - DNA, 38 bp, Artificial Sequence
  primer
gtaaaacgacggccagtttggtaaagaaacccactccc

SEQ ID NO: 51984 - DNA, 21 bp, Artificial Sequence
  primer
tggcagactgaacccaaatag

SEQ ID NO: 51985 - DNA, 41 bp, Artificial Sequence
  primer
gtaaaacgacggccagtcttcttatgcctaatgatttgctg

SEQ ID NO: 51986 - DNA, 22 bp, Artificial Sequence
  primer
tccagtttcttggacagagagg

SEQ ID NO: 51987 - DNA, 38 bp, Artificial Sequence
  primer
gtaaaacgacggccagttctcctgattggactatgggc

SEQ ID NO: 51988 - DNA, 21 bp, Artificial Sequence
  primer
aaacagcgtatctcctggacc

SEQ ID NO: 51989 - DNA, 22 bp, Artificial Sequence
  primer
aaagtttgccacattgtagctg

SEQ ID NO: 51990 - DNA, 37 bp, Artificial Sequence
  primer
gtaaaacgacggccagtagttccatggcatcatcagg

SEQ ID NO: 51991 - DNA, 28 bp, Artificial Sequence
  primer
aatatttggtattagggagagttaacca

SEQ ID NO: 51992 - DNA, 22 bp, Artificial Sequence
  primer
ccagaatgattcatccagtgac

SEQ ID NO: 51993 - DNA, 21 bp, Artificial Sequence
  primer
aacaagatttgctcctgtgcc

SEQ ID NO: 51994 - DNA, 21 bp, Artificial Sequence
  primer
aagcctggagatgtatcggtg

SEQ ID NO: 51995 - DNA, 38 bp, Artificial Sequence
  primer
gtaaaacgacggccagtagtcggcctgctttattctcc

SEQ ID NO: 51996 - DNA, 38 bp, Artificial Sequence
  primer
gtaaaacgacggccagttcccgtaggctctattggttg

SEQ ID NO: 51997 - DNA, 21 bp, Artificial Sequence
  primer
acggtaatgctgatccatgtg

SEQ ID NO: 51998 - DNA, 36 bp, Artificial Sequence
  primer
gtaaaacgacggccagtcttggctttgggttcgttc

SEQ ID NO: 51999 - DNA, 21 bp, Artificial Sequence
  primer
ggcgctaatttccaactcttt

SEQ ID NO: 52000 - DNA, 38 bp, Artificial Sequence
  primer
gtaaaacgacggccagtgagagagaggaagagccgagg

SEQ ID NO: 52001 - DNA, 21 bp, Artificial Sequence
  primer
cacaccaatgacagagcaaag

SEQ ID NO: 52002 - DNA, 35 bp, Artificial Sequence
  primer
gtaaaacgacggccagtcaggtagcgagcagcgac

SEQ ID NO: 52003 - DNA, 38 bp, Artificial Sequence
  primer
gtaaaacgacggccagtattccgggtaaagggtctcac

SEQ ID NO: 52004 - DNA, 38 bp, Artificial Sequence
  primer
gtaaaacgacggccagtctcttgcttccattaatgccc

SEQ ID NO: 52005 - DNA, 21 bp, Artificial Sequence
  primer
tgctgttacgcactttgaacc

SEQ ID NO: 52006 - DNA, 21 bp, Artificial Sequence
  primer
tgaagtaaagccgtgatggtg

SEQ ID NO: 52007 - DNA, 38 bp, Artificial Sequence
  primer
gtaaaacgacggccagtagcaagggtttgctttccaac

SEQ ID NO: 52008 - DNA, 20 bp, Artificial Sequence
  primer
tggtcagtgaatgcacaagg

SEQ ID NO: 52009 - DNA, 38 bp, Artificial Sequence
  primer
gtaaaacgacggccagtcgtgattctttggcattgttc

SEQ ID NO: 52010 - DNA, 38 bp, Artificial Sequence
  primer
gtaaaacgacggccagtgcaggctcacctatctcttgg

SEQ ID NO: 52011 - DNA, 22 bp, Artificial Sequence
  primer
ccgctgccacatacctaaatac

SEQ ID NO: 52012 - DNA, 38 bp, Artificial Sequence
  primer
gtaaaacgacggccagtgttctcatgtttcctgccgac

SEQ ID NO: 52013 - DNA, 21 bp, Artificial Sequence
  primer
agcatcggtattgttgggttg

SEQ ID NO: 52014 - DNA, 37 bp, Artificial Sequence
  primer
gtaaaacgacggccagttgtgagcgtgtccaggtttc

SEQ ID NO: 52015 - DNA, 38 bp, Artificial Sequence
  primer
gtaaaacgacggccagtttggccaactcttcttgattg

SEQ ID NO: 52016 - DNA, 40 bp, Artificial Sequence
  primer
gtaaaacgacggccagtttcagaaccatttctctgaatgc

SEQ ID NO: 52017 - DNA, 22 bp, Artificial Sequence
  primer
accatggaagttgactgatgtg

SEQ ID NO: 52018 - DNA, 39 bp, Artificial Sequence
  primer
gtaaaacgacggccagtgctgtgagaggcaaatcttcac

SEQ ID NO: 52019 - DNA, 21 bp, Artificial Sequence
  primer
gcccaatttggtgacttgtag

SEQ ID NO: 52020 - DNA, 23 bp, Artificial Sequence
  primer
tcaagtgaatttctgggtgattc

SEQ ID NO: 52021 - DNA, 21 bp, Artificial Sequence
  primer
agggcttgcttctcttctctg

SEQ ID NO: 52022 - DNA, 37 bp, Artificial Sequence
  primer
gtaaaacgacggccagtattagacgtgcagcccaatg

SEQ ID NO: 52023 - DNA, 21 bp, Artificial Sequence
  primer
gaaacagcctggagagatgag

SEQ ID NO: 52024 - DNA, 37 bp, Artificial Sequence
  primer
gtaaaacgacggccagtagaatgcacattggtctggg

SEQ ID NO: 52025 - DNA, 38 bp, Artificial Sequence
  primer
gtaaaacgacggccagtaataccaggcagagtgttccc

SEQ ID NO: 52026 - DNA, 21 bp, Artificial Sequence
  primer
gcacccggaagagagaatatg

SEQ ID NO: 52027 - DNA, 38 bp, Artificial Sequence
  primer
gtaaaacgacggccagtacgaagaccaccatcaaggag

SEQ ID NO: 52028 - DNA, 38 bp, Artificial Sequence
  primer
gtaaaacgacggccagtgtcaggctcaatgacagcatc

SEQ ID NO: 52029 - DNA, 38 bp, Artificial Sequence
  primer
gtaaaacgacggccagtctcaccatgcagaaggaagag

SEQ ID NO: 52030 - DNA, 21 bp, Artificial Sequence
  primer
caatctcttgatgatgctgcc

SEQ ID NO: 52031 - DNA, 38 bp, Artificial Sequence
  primer
gtaaaacgacggccagtgtttcccaggagaggactgtg

SEQ ID NO: 52032 - DNA, 19 bp, Artificial Sequence
  primer
aggcggcagttactccagg

SEQ ID NO: 52033 - DNA, 21 bp, Artificial Sequence
  primer
aggctggagtacgatgacctg

SEQ ID NO: 52034 - DNA, 38 bp, Artificial Sequence
  primer
gtaaaacgacggccagtaagtcctggagcaagacaagg

SEQ ID NO: 52035 - DNA, 38 bp, Artificial Sequence
  primer
gtaaaacgacggccagtgaattgaagagaggtgcaggc

SEQ ID NO: 52036 - DNA, 21 bp, Artificial Sequence
  primer
ctgaaatccagccattccttc

SEQ ID NO: 52037 - DNA, 20 bp, Artificial Sequence
  primer
ggaagcccagattgcttcag

SEQ ID NO: 52038 - DNA, 38 bp, Artificial Sequence
  primer
gtaaaacgacggccagttcgaaccacatactggtctgc

SEQ ID NO: 52039 - DNA, 38 bp, Artificial Sequence
  primer
gtaaaacgacggccagtgtctgcagaacgagctgtcac

SEQ ID NO: 52040 - DNA, 38 bp, Artificial Sequence
  primer
gtaaaacgacggccagtaaacagggctctgtcttctgc

SEQ ID NO: 52041 - DNA, 38 bp, Artificial Sequence
  primer
gtaaaacgacggccagttaaccatcacgggatcagatg

SEQ ID NO: 52042 - DNA, 38 bp, Artificial Sequence
  primer
gtaaaacgacggccagtatttccaccatatccagcgtc

SEQ ID NO: 52043 - DNA, 21 bp, Artificial Sequence
  primer
cagggtgtgattgaccaagac

SEQ ID NO: 52044 - DNA, 20 bp, Artificial Sequence
  primer
cacagaggctgcaagacacc

SEQ ID NO: 52045 - DNA, 23 bp, Artificial Sequence
  primer
cataaatcgctccatggtagaag

SEQ ID NO: 52046 - DNA, 38 bp, Artificial Sequence
  primer
gtaaaacgacggccagtccatggaaggaaagctaccag

SEQ ID NO: 52047 - DNA, 21 bp, Artificial Sequence
  primer
tcctcttgtggcaaatatggg

SEQ ID NO: 52048 - DNA, 43 bp, Artificial Sequence
  primer
gtaaaacgacggccagtggttagtgggagactctaatcttgtg

SEQ ID NO: 52049 - DNA, 24 bp, Artificial Sequence
  primer
tcatctcattaactgtgcattgct

SEQ ID NO: 52050 - DNA, 21 bp, Artificial Sequence
  primer
tctgcatgtagagggaatggg

SEQ ID NO: 52051 - DNA, 38 bp, Artificial Sequence
  primer
gtaaaacgacggccagtagtggactgcgctatcaatca

SEQ ID NO: 52052 - DNA, 39 bp, Artificial Sequence
  primer
gtaaaacgacggccagtaaagggcaaatgcttacacatc

SEQ ID NO: 52053 - DNA, 22 bp, Artificial Sequence
  primer
aacctttcttcttcatggaggg

SEQ ID NO: 52054 - DNA, 38 bp, Artificial Sequence
  primer
gtaaaacgacggccagtaggttcctcaaagcaaaccac

SEQ ID NO: 52055 - DNA, 21 bp, Artificial Sequence
  primer
ttaaatgccagtggaaccatc

SEQ ID NO: 52056 - DNA, 38 bp, Artificial Sequence
  primer
gtaaaacgacggccagtacaatgaggatgtcgctgttg

SEQ ID NO: 52057 - DNA, 39 bp, Artificial Sequence
  primer
gtaaaacgacggccagtgcaccaggatgctttcaattac

SEQ ID NO: 52058 - DNA, 21 bp, Artificial Sequence
  primer
tttcctccatccttccatagg

SEQ ID NO: 52059 - DNA, 38 bp, Artificial Sequence
  primer
gtaaaacgacggccagtgtccatgcaaggagatgatcc

SEQ ID NO: 52060 - DNA, 21 bp, Artificial Sequence
  primer
caaatcagacagtggcaaagg

SEQ ID NO: 52061 - DNA, 22 bp, Artificial Sequence
  primer
gcagtgaaagcagtgatagcag

SEQ ID NO: 52062 - DNA, 38 bp, Artificial Sequence
  primer
gtaaaacgacggccagtgcgacagcagcgatagtagtg

SEQ ID NO: 52063 - DNA, 21 bp, Artificial Sequence
  primer
tagcaaacgaatggctttagg

SEQ ID NO: 52064 - DNA, 38 bp, Artificial Sequence
  primer
gtaaaacgacggccagtaatcattggtgtgggattgtg

SEQ ID NO: 52065 - DNA, 38 bp, Artificial Sequence
  primer
gtaaaacgacggccagtagcccaagtaggcttctgttc

SEQ ID NO: 52066 - DNA, 21 bp, Artificial Sequence
  primer
ttgagccgtttaggcatactg

SEQ ID NO: 52067 - DNA, 38 bp, Artificial Sequence
  primer
gtaaaacgacggccagtaactgcgtgacgaaattatgg

SEQ ID NO: 52068 - DNA, 21 bp, Artificial Sequence
  primer
cccagagtttaacaccttccc

SEQ ID NO: 52069 - DNA, 21 bp, Artificial Sequence
  primer
tgaattgggttgatgagatgc

SEQ ID NO: 52070 - DNA, 39 bp, Artificial Sequence
  primer
gtaaaacgacggccagtcagatttgccaagtgttgaaag

SEQ ID NO: 52071 - DNA, 21 bp, Artificial Sequence
  primer
ttccttcagattcctgactgg

SEQ ID NO: 52072 - DNA, 22 bp, Artificial Sequence
  primer
tgactggagtgagagaaacacc

SEQ ID NO: 52073 - DNA, 40 bp, Artificial Sequence
  primer
gtaaaacgacggccagttttccaagtcttattctgccaaa

SEQ ID NO: 52074 - DNA, 21 bp, Artificial Sequence
  primer
ggaccttggtattggagtgtg

SEQ ID NO: 52075 - DNA, 21 bp, Artificial Sequence
  primer
ggaagagggatacaagatggg

SEQ ID NO: 52076 - DNA, 21 bp, Artificial Sequence
  primer
tagtgatcaagatttcccgcc

SEQ ID NO: 52077 - DNA, 21 bp, Artificial Sequence
  primer
ccctctgaaggttgaaggaac

SEQ ID NO: 52078 - DNA, 38 bp, Artificial Sequence
  primer
gtaaaacgacggccagttggcatataccacacgaccag

SEQ ID NO: 52079 - DNA, 38 bp, Artificial Sequence
  primer
gtaaaacgacggccagtttgcttgactagctgtgtccc

SEQ ID NO: 52080 - DNA, 45 bp, Artificial Sequence
  primer
gtaaaacgacggccagttgaacagtaagggaattattgattgtaa

SEQ ID NO: 52081 - DNA, 23 bp, Artificial Sequence
  primer
ggtgcttcaggactacattatgc

SEQ ID NO: 52082 - DNA, 39 bp, Artificial Sequence
  primer
gtaaaacgacggccagttgtgcttagttcattgcagtcc

SEQ ID NO: 52083 - DNA, 38 bp, Artificial Sequence
  primer
gtaaaacgacggccagtaagtgcaaagggctaaggagc

SEQ ID NO: 52084 - DNA, 39 bp, Artificial Sequence
  primer
gtaaaacgacggccagtcggtctgtctttgactgaaatg

SEQ ID NO: 52085 - DNA, 21 bp, Artificial Sequence
  primer
gtgtgctttgctgtctgaagg

SEQ ID NO: 52086 - DNA, 21 bp, Artificial Sequence
  primer
ctgaagaaggtgatgctgctg

SEQ ID NO: 52087 - DNA, 21 bp, Artificial Sequence
  primer
gcagggaacttgaaaccattg

SEQ ID NO: 52088 - DNA, 21 bp, Artificial Sequence
  primer
gtgtccgatcacacaggctac

SEQ ID NO: 52089 - DNA, 21 bp, Artificial Sequence
  primer
gatgccttaagttggagctgg

SEQ ID NO: 52090 - DNA, 39 bp, Artificial Sequence
  primer
gtaaaacgacggccagtcaaaggctcaatgaagaattgg

SEQ ID NO: 52091 - DNA, 39 bp, Artificial Sequence
  primer
gtaaaacgacggccagtaatgcctagaagaagacctggc

SEQ ID NO: 52092 - DNA, 21 bp, Artificial Sequence
  primer
tcagcagaggagtttcggaag

SEQ ID NO: 52093 - DNA, 38 bp, Artificial Sequence
  primer
gtaaaacgacggccagtagcacagccaaagactgtacc

SEQ ID NO: 52094 - DNA, 21 bp, Artificial Sequence
  primer
gaagaatggatgcttgaaggg

SEQ ID NO: 52095 - DNA, 21 bp, Artificial Sequence
  primer
gtttctgacgaaagccacctc

SEQ ID NO: 52096 - DNA, 38 bp, Artificial Sequence
  primer
gtaaaacgacggccagtctgtgagaggcattcgtgttc

SEQ ID NO: 52097 - DNA, 38 bp, Artificial Sequence
  primer
gtaaaacgacggccagtgggcagcaatatcagtggaag

SEQ ID NO: 52098 - DNA, 18 bp, Artificial Sequence
  primer
cctccgatgccttgaagc

SEQ ID NO: 52099 - DNA, 21 bp, Artificial Sequence
  primer
cagtggtggaagctgtgaatg

SEQ ID NO: 52100 - DNA, 35 bp, Artificial Sequence
  primer
gtaaaacgacggccagtcgtgaggaggacggtctg

SEQ ID NO: 52101 - DNA, 21 bp, Artificial Sequence
  primer
ccctgtgcagtagtgaggaat

SEQ ID NO: 52102 - DNA, 21 bp, Artificial Sequence
  primer
atttcctctctgagctgctgg

SEQ ID NO: 52103 - DNA, 21 bp, Artificial Sequence
  primer
ttgtgaggcccatctatcttg

SEQ ID NO: 52104 - DNA, 19 bp, Artificial Sequence
  primer
aaacgcaaggagaggaggg

SEQ ID NO: 52105 - DNA, 23 bp, Artificial Sequence
  primer
tctgctcaggtacgtctgttctc

SEQ ID NO: 52106 - DNA, 38 bp, Artificial Sequence
  primer
gtaaaacgacggccagtagagccaggtgtttaggcaac

SEQ ID NO: 52107 - DNA, 37 bp, Artificial Sequence
  primer
gtaaaacgacggccagtgtaatctcctgcagggaccg

SEQ ID NO: 52108 - DNA, 21 bp, Artificial Sequence
  primer
ctcattgtcatttccagggtg

SEQ ID NO: 52109 - DNA, 20 bp, Artificial Sequence
  primer
ctcgatctcctgacctcgtc

SEQ ID NO: 52110 - DNA, 38 bp, Artificial Sequence
  primer
gtaaaacgacggccagtaatcctgtgttctcaggctcg

SEQ ID NO: 52111 - DNA, 37 bp, Artificial Sequence
  primer
gtaaaacgacggccagtagggcaaggtcaaggttagg

SEQ ID NO: 52112 - DNA, 38 bp, Artificial Sequence
  primer
gtaaaacgacggccagtatattgaagagcagtgggcag

SEQ ID NO: 52113 - DNA, 37 bp, Artificial Sequence
  primer
gtaaaacgacggccagtccactgttgcttcaaacacg

SEQ ID NO: 52114 - DNA, 39 bp, Artificial Sequence
  primer
gtaaaacgacggccagtaaagttacacagccaatcctgg

SEQ ID NO: 52115 - DNA, 41 bp, Artificial Sequence
  primer
gtaaaacgacggccagtcaagtacgtttacagagaaatggc

SEQ ID NO: 52116 - DNA, 21 bp, Artificial Sequence
  primer
agaagtggtggacacaacagg

SEQ ID NO: 52117 - DNA, 41 bp, Artificial Sequence
  primer
gtaaaacgacggccagtaacaggacagagggtcatgtaaac

SEQ ID NO: 52118 - DNA, 38 bp, Artificial Sequence
  primer
gtaaaacgacggccagtaatgtcaaaccttgttgctgg

SEQ ID NO: 52119 - DNA, 21 bp, Artificial Sequence
  primer
cttgtgattgctatgtgccag

SEQ ID NO: 52120 - DNA, 21 bp, Artificial Sequence
  primer
tgactcagcctcagtggagag

SEQ ID NO: 52121 - DNA, 38 bp, Artificial Sequence
  primer
gtaaaacgacggccagtaaggtgcaattcctgtaaggc

SEQ ID NO: 52122 - DNA, 37 bp, Artificial Sequence
  primer
gtaaaacgacggccagtcgagcattgagcaaacttcc

SEQ ID NO: 52123 - DNA, 38 bp, Artificial Sequence
  primer
gtaaaacgacggccagtatcctgggaaaggtagaaccc

SEQ ID NO: 52124 - DNA, 38 bp, Artificial Sequence
  primer
gtaaaacgacggccagtgacttgggagtgtctgttgcc

SEQ ID NO: 52125 - DNA, 38 bp, Artificial Sequence
  primer
gtaaaacgacggccagtacccttcctttacctgcttgg

SEQ ID NO: 52126 - DNA, 44 bp, Artificial Sequence
  primer
gtaaaacgacggccagtagatcatgttacaaattcaagtctgag

SEQ ID NO: 52127 - DNA, 38 bp, Artificial Sequence
  primer
gtaaaacgacggccagttcacagatgtgctccagatcc

SEQ ID NO: 52128 - DNA, 39 bp, Artificial Sequence
  primer
gtaaaacgacggccagtccttgatctgctccgatgttag

SEQ ID NO: 52129 - DNA, 21 bp, Artificial Sequence
  primer
ttgtcagagacccagagatgc

SEQ ID NO: 52130 - DNA, 38 bp, Artificial Sequence
  primer
gtaaaacgacggccagtatcttgcgttccttcacactg

SEQ ID NO: 52131 - DNA, 38 bp, Artificial Sequence
  primer
gtaaaacgacggccagttgccttccttcttctttccag

SEQ ID NO: 52132 - DNA, 38 bp, Artificial Sequence
  primer
gtaaaacgacggccagtacaatcaactgaggcattggg

SEQ ID NO: 52133 - DNA, 42 bp, Artificial Sequence
  primer
gtaaaacgacggccagtttgctttaggttattaatgggaagg

SEQ ID NO: 52134 - DNA, 21 bp, Artificial Sequence
  primer
gcacaggttgatttgtgaagc

SEQ ID NO: 52135 - DNA, 21 bp, Artificial Sequence
  primer
aggtgccaacgaaactacagc

SEQ ID NO: 52136 - DNA, 38 bp, Artificial Sequence
  primer
gtaaaacgacggccagtctctgtgtctttgtgcatggc

SEQ ID NO: 52137 - DNA, 38 bp, Artificial Sequence
  primer
gtaaaacgacggccagttgttccacacctgtgttctcg

SEQ ID NO: 52138 - DNA, 38 bp, Artificial Sequence
  primer
gtaaaacgacggccagtctcaacaggttcttcccaagg

SEQ ID NO: 52139 - DNA, 20 bp, Artificial Sequence
  primer
gtcctctgatgctcctgtgg

SEQ ID NO: 52140 - DNA, 38 bp, Artificial Sequence
  primer
gtaaaacgacggccagtaaatgtgcatttgcaacttgg

SEQ ID NO: 52141 - DNA, 22 bp, Artificial Sequence
  primer
agaatggagtcatttcctagcg

SEQ ID NO: 52142 - DNA, 21 bp, Artificial Sequence
  primer
gtggctccttgatgttgtctg

SEQ ID NO: 52143 - DNA, 39 bp, Artificial Sequence
  primer
gtaaaacgacggccagtaggaatcaacttactgggttgc

SEQ ID NO: 52144 - DNA, 24 bp, Artificial Sequence
  primer
ggtagccacacagtgttaataagg

SEQ ID NO: 52145 - DNA, 25 bp, Artificial Sequence
  primer
tgtaattcactaaagtttggatggg

SEQ ID NO: 52146 - DNA, 20 bp, Artificial Sequence
  primer
gattacaagggcaagccacc

SEQ ID NO: 52147 - DNA, 22 bp, Artificial Sequence
  primer
gaaaggcccaatgatattgatg

SEQ ID NO: 52148 - DNA, 38 bp, Artificial Sequence
  primer
gtaaaacgacggccagtgtccctttgctcttaccatgc

SEQ ID NO: 52149 - DNA, 40 bp, Artificial Sequence
  primer
gtaaaacgacggccagttctatgacccaggcctctagttc

SEQ ID NO: 52150 - DNA, 21 bp, Artificial Sequence
  primer
ctggtgacaaactggcatgag

SEQ ID NO: 52151 - DNA, 21 bp, Artificial Sequence
  primer
ggtgtccatttcacctcttgg

SEQ ID NO: 52152 - DNA, 38 bp, Artificial Sequence
  primer
gtaaaacgacggccagttgctaaatgacttgctcagcg

SEQ ID NO: 52153 - DNA, 38 bp, Artificial Sequence
  primer
gtaaaacgacggccagttaccactgaactgaggcccac

SEQ ID NO: 52154 - DNA, 38 bp, Artificial Sequence
  primer
gtaaaacgacggccagttcagcagttgctttgttcacc

SEQ ID NO: 52155 - DNA, 21 bp, Artificial Sequence
  primer
caaacgagtaacgggagaagc

SEQ ID NO: 52156 - DNA, 20 bp, Artificial Sequence
  primer
ataggaatgagccgaggagc

SEQ ID NO: 52157 - DNA, 20 bp, Artificial Sequence
  primer
gaggtgggaggatcacttgg

SEQ ID NO: 52158 - DNA, 27 bp, Artificial Sequence
  primer
tgatggttgatagtgtgttacatacag

SEQ ID NO: 52159 - DNA, 23 bp, Artificial Sequence
  primer
ccacaggatattccacattcatc

SEQ ID NO: 52160 - DNA, 21 bp, Artificial Sequence
  primer
aattggaggtttcctgcactg

SEQ ID NO: 52161 - DNA, 24 bp, Artificial Sequence
  primer
tttgaattatggtttaatgttggc

SEQ ID NO: 52162 - DNA, 20 bp, Artificial Sequence
  primer
ccagaaataccactgtgggc

SEQ ID NO: 52163 - DNA, 22 bp, Artificial Sequence
  primer
gatgcgagcagctgtttatacc

SEQ ID NO: 52164 - DNA, 38 bp, Artificial Sequence
  primer
gtaaaacgacggccagtttagcctaatgccaatggaag

SEQ ID NO: 52165 - DNA, 35 bp, Artificial Sequence
  primer
gtaaaacgacggccagtatgacgggcacattccac

SEQ ID NO: 52166 - DNA, 38 bp, Artificial Sequence; identical to SEQ ID NO: 52164
  primer

SEQ ID NO: 52167 - DNA, 18 bp, Artificial Sequence
  primer
gtttctacagcgcgtggc

SEQ ID NO: 52168 - DNA, 25 bp, Artificial Sequence
  primer
caaacctctttgtataaatgcagtg

SEQ ID NO: 52169 - DNA, 28 bp, Artificial Sequence
  primer
tgcttgtgttatggttaatactgataaa

SEQ ID NO: 52170 - DNA, 21 bp, Artificial Sequence
  primer
aagcctagaggagagtggcag

SEQ ID NO: 52171 - DNA, 43 bp, Artificial Sequence
  primer
gtaaaacgacggccagtcacatttagtacttctaagctgctgg

SEQ ID NO: 52172 - DNA, 25 bp, Artificial Sequence
  primer
tcagagtgcctagtgtttctcatag

SEQ ID NO: 52173 - DNA, 21 bp, Artificial Sequence
  primer
agttagaaaggaggccagacg

SEQ ID NO: 52174 - DNA, 37 bp, Artificial Sequence
  primer
gtaaaacgacggccagtcttgacctccttcctctccg

SEQ ID NO: 52175 - DNA, 38 bp, Artificial Sequence
  primer
gtaaaacgacggccagtcatcgctaggcttctgctacc

SEQ ID NO: 52176 - DNA, 21 bp, Artificial Sequence
  primer
ctccatccctaagtcgcagtc

SEQ ID NO: 52177 - DNA, 19 bp, Artificial Sequence
  primer
tgcatcccattggaacctg

SEQ ID NO: 52178 - DNA, 35 bp, Artificial Sequence
  primer
gtaaaacgacggccagtccgagatgggctggtgag

SEQ ID NO: 52179 - DNA, 39 bp, Artificial Sequence
  primer
gtaaaacgacggccagtttacagctaacctccagcaacc

SEQ ID NO: 52180 - DNA, 37 bp, Artificial Sequence
  primer
gtaaaacgacggccagtggtctgctgcctatggtgac

SEQ ID NO: 52181 - DNA, 21 bp, Artificial Sequence
  primer
tgtactccaatggcaacaagg

SEQ ID NO: 52182 - DNA, 21 bp, Artificial Sequence
  primer
ctcctccagatgcttctccac

SEQ ID NO: 52183 - DNA, 21 bp, Artificial Sequence
  primer
ggacgaagccataaggtagcc

SEQ ID NO: 52184 - DNA, 37 bp, Artificial Sequence
  primer
gtaaaacgacggccagtaggctgattctgcagggcta

SEQ ID NO: 52185 - DNA, 38 bp, Artificial Sequence
  primer
gtaaaacgacggccagtgaacgttccctgtatcttggg

SEQ ID NO: 52186 - DNA, 21 bp, Artificial Sequence
  primer
acaagacttccagcttctgcc

SEQ ID NO: 52187 - DNA, 38 bp, Artificial Sequence
  primer
gtaaaacgacggccagtgcgaagacacctcagtgactc

SEQ ID NO: 52188 - DNA, 20 bp, Artificial Sequence
  primer
gatggtgtcacatccttggc

SEQ ID NO: 52189 - DNA, 21 bp, Artificial Sequence
  primer
agacctcttccttcccttcct

SEQ ID NO: 52190 - DNA, 38 bp, Artificial Sequence
  primer
gtaaaacgacggccagttagagtgctgggattacaggc

SEQ ID NO: 52191 - DNA, 20 bp, Artificial Sequence
  primer
ttaccatctgacggtggagg

SEQ ID NO: 52192 - DNA, 38 bp, Artificial Sequence
  primer
gtaaaacgacggccagtagggaaattcaggaacattcg

SEQ ID NO: 52193 - DNA, 36 bp, Artificial Sequence
  primer
gtaaaacgacggccagtgctgggatgggaagaacat

SEQ ID NO: 52194 - DNA, 38 bp, Artificial Sequence
  primer
gtaaaacgacggccagtccaggtcacacgacctacaag

SEQ ID NO: 52195 - DNA, 38 bp, Artificial Sequence
  primer
gtaaaacgacggccagttttgggtttggaagataaggg

SEQ ID NO: 52196 - DNA, 21 bp, Artificial Sequence
  primer
caaagtgactgtgtccaagcc

SEQ ID NO: 52197 - DNA, 22 bp, Artificial Sequence
  primer
tcctcatagatggcgagacttc

SEQ ID NO: 52198 - DNA, 21 bp, Artificial Sequence
  primer
ggagatccagaatgccaagac

SEQ ID NO: 52199 - DNA, 38 bp, Artificial Sequence
  primer
gtaaaacgacggccagtagactagcctggatgaccctc

SEQ ID NO: 52200 - DNA, 38 bp, Artificial Sequence
  primer
gtaaaacgacggccagtccacctagaatgagggtgagc

SEQ ID NO: 52201 - DNA, 37 bp, Artificial Sequence
  primer
gtaaaacgacggccagtagcgaaactgaaactttgcg

SEQ ID NO: 52202 - DNA, 20 bp, Artificial Sequence
  primer
agccttactgggaggtgctg

SEQ ID NO: 52203 - DNA, 22 bp, Artificial Sequence
  primer
ccacttgggaaagatgtagtgg

SEQ ID NO: 52204 - DNA, 38 bp, Artificial Sequence
  primer
gtaaaacgacggccagtggacagctgcatttctccttc

SEQ ID NO: 52205 - DNA, 21 bp, Artificial Sequence
  primer
ggcgaattaactctccttggg

SEQ ID NO: 52206 - DNA, 21 bp, Artificial Sequence
  primer
ggtatgacatttgcagcaagg

SEQ ID NO: 52207 - DNA, 21 bp, Artificial Sequence
  primer
aggaatgtcttcattggctgg

SEQ ID NO: 52208 - DNA, 38 bp, Artificial Sequence
  primer
gtaaaacgacggccagtagggctctgtgagttctgagg

SEQ ID NO: 52209 - DNA, 26 bp, Artificial Sequence
  primer
gagcataacttcaatacctttcttgc

SEQ ID NO: 52210 - DNA, 38 bp, Artificial Sequence
  primer
gtaaaacgacggccagttgtgaatgtttgcaacactgg

SEQ ID NO: 52211 - DNA, 19 bp, Artificial Sequence
  primer
tctctgcagcctctcctgc

SEQ ID NO: 52212 - DNA, 42 bp, Artificial Sequence
  primer
gtaaaacgacggccagtcctgtggtaaatgttcattatgtgc

SEQ ID NO: 52213 - DNA, 39 bp, Artificial Sequence
  primer
gtaaaacgacggccagtcggctaggtaagtatgtggtgg

SEQ ID NO: 52214 - DNA, 21 bp, Artificial Sequence
  primer
agtcccagagcatctgtctcc

SEQ ID NO: 52215 - DNA, 38 bp, Artificial Sequence
  primer
gtaaaacgacggccagtatgttgatggaaggcctgaag

SEQ ID NO: 52216 - DNA, 21 bp, Artificial Sequence
  primer
ctaagagtgtggcttgggagg

SEQ ID NO: 52217 - DNA, 21 bp, Artificial Sequence
  primer
ttcctccttccctccaagaag

SEQ ID NO: 52218 - DNA, 38 bp, Artificial Sequence
  primer
gtaaaacgacggccagtttaggtcccacatctccagtg

SEQ ID NO: 52219 - DNA, 38 bp, Artificial Sequence
  primer
gtaaaacgacggccagttacctactgtgaccttggccc

SEQ ID NO: 52220 - DNA, 38 bp, Artificial Sequence
  primer
gtaaaacgacggccagtcctctgcaccctacctctcac

SEQ ID NO: 52221 - DNA, 37 bp, Artificial Sequence
  primer
gtaaaacgacggccagtaaaggccatccatttccaag

SEQ ID NO: 52222 - DNA, 35 bp, Artificial Sequence
  primer
gtaaaacgacggccagtgggagggaaggaaactgg

SEQ ID NO: 52223 - DNA, 35 bp, Artificial Sequence
  primer
gtaaaacgacggccagtaggtgggacctgggcttc

SEQ ID NO: 52224 - DNA, 21 bp, Artificial Sequence
  primer
atctatggttcctcgcattcc

SEQ ID NO: 52225 - DNA, 38 bp, Artificial Sequence
  primer
gtaaaacgacggccagtcactgctcctgtttgagttgc

SEQ ID NO: 52226 - DNA, 38 bp, Artificial Sequence
  primer
gtaaaacgacggccagttcccggagtatacaggtgagg

SEQ ID NO: 52227 - DNA, 38 bp, Artificial Sequence
  primer
gtaaaacgacggccagtctaaggtccgaaccacacacc

SEQ ID NO: 52228 - DNA, 38 bp, Artificial Sequence
  primer
gtaaaacgacggccagtgctcagggataaggatgatgg

SEQ ID NO: 52229 - DNA, 37 bp, Artificial Sequence
  primer
gtaaaacgacggccagtggctccttctggctcaagtc

SEQ ID NO: 52230 - DNA, 38 bp, Artificial Sequence
  primer
gtaaaacgacggccagtacactcagagaagtgcctggg

SEQ ID NO: 52231 - DNA, 38 bp, Artificial Sequence
  primer
gtaaaacgacggccagttctttctggccttagacagcc

SEQ ID NO: 52232 - DNA, 38 bp, Artificial Sequence
  primer
gtaaaacgacggccagtctaacctcctccgtgatcctg

SEQ ID NO: 52233 - DNA, 38 bp, Artificial Sequence
  primer
gtaaaacgacggccagtattgccaggtaaggagctgag

SEQ ID NO: 52234 - DNA, 21 bp, Artificial Sequence
  primer
gccttgatctaatttcagccc

SEQ ID NO: 52235 - DNA, 39 bp, Artificial Sequence
  primer
gtaaaacgacggccagtgtcacttaaccctactgagccc

SEQ ID NO: 52236 - DNA, 37 bp, Artificial Sequence
  primer
gtaaaacgacggccagtgtggctcctacagggctcag

SEQ ID NO: 52237 - DNA, 38 bp, Artificial Sequence
  primer
gtaaaacgacggccagttgtgtccagaagtgggtcatc

SEQ ID NO: 52238 - DNA, 38 bp, Artificial Sequence
  primer
gtaaaacgacggccagtcgatggagtcagtgtgtcctg

SEQ ID NO: 52239 - DNA, 38 bp, Artificial Sequence
  primer
gtaaaacgacggccagtgagcatgggatggtaggagtg

SEQ ID NO: 52240 - DNA, 38 bp, Artificial Sequence
  primer
gtaaaacgacggccagtaggcagaccaggatagcagag

SEQ ID NO: 52241 - DNA, 38 bp, Artificial Sequence
  primer
gtaaaacgacggccagttttctttctcggaagcagtgg

SEQ ID NO: 52242 - DNA, 38 bp, Artificial Sequence
  primer
gtaaaacgacggccagtgtctgagtgaagactgtgcgg

SEQ ID NO: 52243 - DNA, 39 bp, Artificial Sequence
  primer
gtaaaacgacggccagtgatcttgggctgaatgagtgag

SEQ ID NO: 52244 - DNA, 21 bp, Artificial Sequence
  primer
ctggaattcccaaagatctcc

SEQ ID NO: 52245 - DNA, 37 bp, Artificial Sequence
  primer
gtaaaacgacggccagttactccaacttgggcagtgg

SEQ ID NO: 52246 - DNA, 37 bp, Artificial Sequence
  primer
gtaaaacgacggccagtgagcatggtacgtggtgagg

SEQ ID NO: 52247 - DNA, 40 bp, Artificial Sequence
  primer
gtaaaacgacggccagtcatattccagaagcagagctgag

SEQ ID NO: 52248 - DNA, 21 bp, Artificial Sequence
  primer
atgccacaaatcctcctcttc

SEQ ID NO: 52249 - DNA, 38 bp, Artificial Sequence
  primer
gtaaaacgacggccagtgtggcccatacactccatctc

SEQ ID NO: 52250 - DNA, 38 bp, Artificial Sequence
  primer
gtaaaacgacggccagtggctgagaagttcgacctcag

SEQ ID NO: 52251 - DNA, 21 bp, Artificial Sequence
  primer
ggctggtcttgaactagggag

SEQ ID NO: 52252 - DNA, 38 bp, Artificial Sequence
  primer
gtaaaacgacggccagtccttccagaagtggaaacagc

SEQ ID NO: 52253 - DNA, 37 bp, Artificial Sequence
  primer
gtaaaacgacggccagtgacacttgggtccggttagg

SEQ ID NO: 52254 - DNA, 21 bp, Artificial Sequence
  primer
tctgtcagtgaagtgggatgg

SEQ ID NO: 52255 - DNA, 37 bp, Artificial Sequence
  primer
gtaaaacgacggccagtttggctcctgaggacacttg

SEQ ID NO: 52256 - DNA, 18 bp, Artificial Sequence
  primer
ggacggagtcccagcaac

SEQ ID NO: 52257 - DNA, 18 bp, Artificial Sequence
  primer
gtctgcgagtgtgggctc

SEQ ID NO: 52258 - DNA, 21 bp, Artificial Sequence
  primer
ccttcctggtctcatctccac

SEQ ID NO: 52259 - DNA, 38 bp, Artificial Sequence; identical to SEQ ID NO: 52226
  primer

SEQ ID NO: 52260 - DNA, 38 bp, Artificial Sequence
  primer
gtaaaacgacggccagtcaaatctctgccgtgttcaag

SEQ ID NO: 52261 - DNA, 21 bp, Artificial Sequence
  primer
gggtagaggaaattatccggg

SEQ ID NO: 52262 - DNA, 21 bp, Artificial Sequence
  primer
gtcagatacaaggctgcaggg

SEQ ID NO: 52263 - DNA, 20 bp, Artificial Sequence
  primer
agacttgtcctgcctgaggg

SEQ ID NO: 52264 - DNA, 36 bp, Artificial Sequence
  primer
gtaaaacgacggccagtttctcacctgggtccttgg

SEQ ID NO: 52265 - DNA, 38 bp, Artificial Sequence
  primer
gtaaaacgacggccagtggagacagtttcagggaggtg

SEQ ID NO: 52266 - DNA, 21 bp, Artificial Sequence
  primer
tttggtaccgtttgagaccag

SEQ ID NO: 52267 - DNA, 38 bp, Artificial Sequence
  primer
gtaaaacgacggccagtagaggaattgacctgaaggcg

SEQ ID NO: 52268 - DNA, 37 bp, Artificial Sequence
  primer
gtaaaacgacggccagtaacccaagatccattgaggg

SEQ ID NO: 52269 - DNA, 38 bp, Artificial Sequence
  primer
gtaaaacgacggccagtaagggtcactgaactgcttcc

SEQ ID NO: 52270 - DNA, 38 bp, Artificial Sequence
  primer
gtaaaacgacggccagtgagttcctggacatcctggtg

SEQ ID NO: 52271 - DNA, 38 bp, Artificial Sequence
  primer
gtaaaacgacggccagtcaccttctcagtgccatttcc

SEQ ID NO: 52272 - DNA, 38 bp, Artificial Sequence
  primer
gtaaaacgacggccagtgactttcccagaagggaggag

SEQ ID NO: 52273 - DNA, 38 bp, Artificial Sequence
  primer
gtaaaacgacggccagtagccactccctacctctaccc

SEQ ID NO: 52274 - DNA, 38 bp, Artificial Sequence
  primer
gtaaaacgacggccagtcaggtcacctttcatggagtg

SEQ ID NO: 52275 - DNA, 38 bp, Artificial Sequence
  primer
gtaaaacgacggccagtagaggagtggaaagccctctg

SEQ ID NO: 52276 - DNA, 38 bp, Artificial Sequence
  primer
gtaaaacgacggccagttatgcctcctctctccctcag

SEQ ID NO: 52277 - DNA, 38 bp, Artificial Sequence
  primer
gtaaaacgacggccagtcatgctgtgttgtgacagtgc

SEQ ID NO: 52278 - DNA, 21 bp, Artificial Sequence
  primer
ttctagccttcaggacaagcc

SEQ ID NO: 52279 - DNA, 38 bp, Artificial Sequence
  primer
gtaaaacgacggccagtgatgggacaggaaggtgaaag

SEQ ID NO: 52280 - DNA, 38 bp, Artificial Sequence
  primer
gtaaaacgacggccagtcaggtgcctatcagtcctcag

SEQ ID NO: 52281 - DNA, 21 bp, Artificial Sequence
  primer
cctgtgtctccgtttctggtc

SEQ ID NO: 52282 - DNA, 36 bp, Artificial Sequence
  primer
gtaaaacgacggccagtcttcccagcctctcaggtg

SEQ ID NO: 52283 - DNA, 38 bp, Artificial Sequence
  primer
gtaaaacgacggccagttctgtctcttgggctatgtgg

SEQ ID NO: 52284 - DNA, 21 bp, Artificial Sequence
  primer
agccttagtcattccagccag

SEQ ID NO: 52285 - DNA, 21 bp, Artificial Sequence
  primer
ttgtaaagcctattccctgcc

SEQ ID NO: 52286 - DNA, 20 bp, Artificial Sequence
  primer
ctggaactggaatccacagc

SEQ ID NO: 52287 - DNA, 21 bp, Artificial Sequence
  primer
agagggtgacagtcaggatgg

SEQ ID NO: 52288 - DNA, 37 bp, Artificial Sequence
  primer
gtaaaacgacggccagtccttagaagggtgaccgctg

SEQ ID NO: 52289 - DNA, 38 bp, Artificial Sequence
  primer
gtaaaacgacggccagttcacactggacctctcgtagg

SEQ ID NO: 52290 - DNA, 38 bp, Artificial Sequence
  primer
gtaaaacgacggccagtctggagacactgctggttctg

SEQ ID NO: 52291 - DNA, 20 bp, Artificial Sequence
  primer
cctgcttgtttgaacttcgg

SEQ ID NO: 52292 - DNA, 38 bp, Artificial Sequence
  primer
gtaaaacgacggccagttcaggagctgatatggtgagg

SEQ ID NO: 52293 - DNA, 37 bp, Artificial Sequence
  primer
gtaaaacgacggccagtggagcatatcaaggctgtgc

SEQ ID NO: 52294 - DNA, 38 bp, Artificial Sequence
  primer
gtaaaacgacggccagtcacagaagggtgtcctgagtg

SEQ ID NO: 52295 - DNA, 38 bp, Artificial Sequence
  primer
gtaaaacgacggccagtcttaggagtggagttgggcag

SEQ ID NO: 52296 - DNA, 38 bp, Artificial Sequence
  primer
gtaaaacgacggccagtgagttgggcaggaagagacac

SEQ ID NO: 52297 - DNA, 38 bp, Artificial Sequence
  primer
gtaaaacgacggccagttagtgacgagtcctgaatggg

SEQ ID NO: 52298 - DNA, 37 bp, Artificial Sequence
  primer
gtaaaacgacggccagtcagcccacctgcttcctatc

SEQ ID NO: 52299 - DNA, 20 bp, Artificial Sequence
  primer
atctggcttgggagcagttc

SEQ ID NO: 52300 - DNA, 37 bp, Artificial Sequence
  primer
gtaaaacgacggccagtagaagcgagcctccaaagag

SEQ ID NO: 52301 - DNA, 38 bp, Artificial Sequence
  primer
gtaaaacgacggccagtagcacaatcagggaagacacg

SEQ ID NO: 52302 - DNA, 38 bp, Artificial Sequence
  primer
gtaaaacgacggccagtcgtgcaagtgtttctagcctc

SEQ ID NO: 52303 - DNA, 38 bp, Artificial Sequence
  primer
gtaaaacgacggccagttcctcgggatacattgtaggg

SEQ ID NO: 52304 - DNA, 21 bp, Artificial Sequence
  primer
ggctgctaagtgtttcttcgg

SEQ ID NO: 52305 - DNA, 20 bp, Artificial Sequence
  primer
cagtggaggagacgatgagg

SEQ ID NO: 52306 - DNA, 21 bp, Artificial Sequence
  primer
acagggcttagtgtctgtccc

SEQ ID NO: 52307 - DNA, 21 bp, Artificial Sequence
  primer
cagacagaccttggctccttc

SEQ ID NO: 52308 - DNA, 38 bp, Artificial Sequence
  primer
gtaaaacgacggccagttcgtgtacaagaaggtagcgg

SEQ ID NO: 52309 - DNA, 38 bp, Artificial Sequence
  primer
gtaaaacgacggccagtaccaagttccagcagatcgtc

SEQ ID NO: 52310 - DNA, 20 bp, Artificial Sequence
  primer
agcctggctctcttggtctc

SEQ ID NO: 52311 - DNA, 38 bp, Artificial Sequence
  primer
gtaaaacgacggccagtctagccgactggcagtacatc

SEQ ID NO: 52312 - DNA, 36 bp, Artificial Sequence
  primer
gtaaaacgacggccagtatggaagcagaggccacac

SEQ ID NO: 52313 - DNA, 37 bp, Artificial Sequence
  primer
gtaaaacgacggccagtgagtggctgtccttcctgtg

SEQ ID NO: 52314 - DNA, 20 bp, Artificial Sequence
  primer
tcccacagaggatcaacgag

SEQ ID NO: 52315 - DNA, 19 bp, Artificial Sequence
  primer
cagacaaagagcaccgcag

SEQ ID NO: 52316 - DNA, 21 bp, Artificial Sequence
  primer
gtaaacttccagcccttggtg

SEQ ID NO: 52317 - DNA, 38 bp, Artificial Sequence
  primer
gtaaaacgacggccagttcctccagcaacagaactgag

SEQ ID NO: 52318 - DNA, 39 bp, Artificial Sequence
  primer
gtaaaacgacggccagtgatacactgtacctgggcttgg

SEQ ID NO: 52319 - DNA, 21 bp, Artificial Sequence
  primer
aactctcaagtaaccagccgc

SEQ ID NO: 52320 - DNA, 38 bp, Artificial Sequence
  primer
gtaaaacgacggccagtagggcaattaggacgactttg

SEQ ID NO: 52321 - DNA, 38 bp, Artificial Sequence
  primer
gtaaaacgacggccagtacgtatatgccctcatccagc

SEQ ID NO: 52322 - DNA, 38 bp, Artificial Sequence
  primer
gtaaaacgacggccagtcatcggaacctctaccacctg

SEQ ID NO: 52323 - DNA, 38 bp, Artificial Sequence
  primer
gtaaaacgacggccagttctcctgccagctctgaaatc

SEQ ID NO: 52324 - DNA, 21 bp, Artificial Sequence
  primer
acctctgtgacaactccctcc

SEQ ID NO: 52325 - DNA, 40 bp, Artificial Sequence
  primer
gtaaaacgacggccagtaataaggcattgcaaagttgaga

SEQ ID NO: 52326 - DNA, 36 bp, Artificial Sequence
  primer
gtaaaacgacggccagtttgctacctcagcccatcc

SEQ ID NO: 52327 - DNA, 38 bp, Artificial Sequence
  primer
gtaaaacgacggccagtgtcttatcctggcattgaggg

SEQ ID NO: 52328 - DNA, 22 bp, Artificial Sequence
  primer
gaggagagaggacatgttgtgc

SEQ ID NO: 52329 - DNA, 41 bp, Artificial Sequence
  primer
gtaaaacgacggccagtgaaactttcctttgaatctcgttg

SEQ ID NO: 52330 - DNA, 38 bp, Artificial Sequence
  primer
gtaaaacgacggccagtttcctggttgaagcagtgttg

SEQ ID NO: 52331 - DNA, 38 bp, Artificial Sequence
  primer
gtaaaacgacggccagttatgcaaagtttcccagaagc

SEQ ID NO: 52332 - DNA, 21 bp, Artificial Sequence
  primer
agttgggtcatccttgcattc

SEQ ID NO: 52333 - DNA, 43 bp, Artificial Sequence
  primer
gtaaaacgacggccagtttgaatgtaagtatgagggttgacac

SEQ ID NO: 52334 - DNA, 38 bp, Artificial Sequence
  primer
gtaaaacgacggccagtaggaatgggagaaggaagaaa

SEQ ID NO: 52335 - DNA, 23 bp, Artificial Sequence
  primer
aggtcacacaggtaggaaacagt

SEQ ID NO: 52336 - DNA, 36 bp, Artificial Sequence
  primer
gtaaaacgacggccagtgggaaggatgttctagccg

SEQ ID NO: 52337 - DNA, 21 bp, Artificial Sequence
  primer
gaggcaatgggcttatttgag

SEQ ID NO: 52338 - DNA, 21 bp, Artificial Sequence
  primer
tcaaaccagaggctaagtggg

SEQ ID NO: 52339 - DNA, 38 bp, Artificial Sequence
  primer
gtaaaacgacggccagttgaggttagcacttgttgcct

SEQ ID NO: 52340 - DNA, 38 bp, Artificial Sequence
  primer
gtaaaacgacggccagtgaaataccgcacatttcatcc

SEQ ID NO: 52341 - DNA, 38 bp, Artificial Sequence
  primer
gtaaaacgacggccagtcccttcaagctccctgaatac

SEQ ID NO: 52342 - DNA, 39 bp, Artificial Sequence
  primer
gtaaaacgacggccagtcccagctgagcttgttaatacc

SEQ ID NO: 52343 - DNA, 38 bp, Artificial Sequence
  primer
gtaaaacgacggccagtcaaacttcaacccagccagag

SEQ ID NO: 52344 - DNA, 38 bp, Artificial Sequence
  primer
gtaaaacgacggccagtggtgtctcttcttcccaaagg

SEQ ID NO: 52345 - DNA, 39 bp, Artificial Sequence
  primer
gtaaaacgacggccagttgacaaatgtgacagaaggctg

SEQ ID NO: 52346 - DNA, 21 bp, Artificial Sequence
  primer
acgatgcaagtgtgactgctg

SEQ ID NO: 52347 - DNA, 21 bp, Artificial Sequence
  primer
atccctaatttcaactggccc

SEQ ID NO: 52348 - DNA, 19 bp, Artificial Sequence
  primer
ctccaccaccatttccctc

SEQ ID NO: 52349 - DNA, 21 bp, Artificial Sequence
  primer
gttccctcggttggttaactg

SEQ ID NO: 52350 - DNA, 38 bp, Artificial Sequence
  primer
gtaaaacgacggccagtcaaagaatatgcctgggaagg

SEQ ID NO: 52351 - DNA, 38 bp, Artificial Sequence
  primer
gtaaaacgacggccagttttggacagagaggaccacag

SEQ ID NO: 52352 - DNA, 38 bp, Artificial Sequence
  primer
gtaaaacgacggccagtatattcactgcatgtgctggc

SEQ ID NO: 52353 - DNA, 21 bp, Artificial Sequence
  primer
ttatggttggagctcaggagg

SEQ ID NO: 52354 - DNA, 20 bp, Artificial Sequence
  primer
gaagacgctcaggaagggag

SEQ ID NO: 52355 - DNA, 38 bp, Artificial Sequence
  primer
gtaaaacgacggccagtcctttgagcacaccaccatta

SEQ ID NO: 52356 - DNA, 38 bp, Artificial Sequence
  primer
gtaaaacgacggccagtaacaggaagcaattattcgcc

SEQ ID NO: 52357 - DNA, 21 bp, Artificial Sequence
  primer
gagcagttcacagaaagctgg

SEQ ID NO: 52358 - DNA, 42 bp, Artificial Sequence
  primer
gtaaaacgacggccagtgaattatatttcaaggaaactgggc

SEQ ID NO: 52359 - DNA, 40 bp, Artificial Sequence
  primer
gtaaaacgacggccagttcagtggtgagggaattatcttc

SEQ ID NO: 52360 - DNA, 38 bp, Artificial Sequence
  primer
gtaaaacgacggccagtgaggtctgcctgataattccc

SEQ ID NO: 52361 - DNA, 38 bp, Artificial Sequence
  primer
gtaaaacgacggccagtaatgaacctgtccctgctgtc

SEQ ID NO: 52362 - DNA, 20 bp, Artificial Sequence
  primer
atggcagcatccttacatgg

SEQ ID NO: 52363 - DNA, 38 bp, Artificial Sequence
  primer
gtaaaacgacggccagttcctgataaggaggaagccag

SEQ ID NO: 52364 - DNA, 21 bp, Artificial Sequence
  primer
tgcagattcatgctcttcacc

SEQ ID NO: 52365 - DNA, 39 bp, Artificial Sequence
  primer
gtaaaacgacggccagttgtatatcagcaatggtgtggc

SEQ ID NO: 52366 - DNA, 21 bp, Artificial Sequence
  primer
atgaagtaccacgccatgtcc

SEQ ID NO: 52367 - DNA, 38 bp, Artificial Sequence
  primer
gtaaaacgacggccagtttgttacctgggcaataaggg

SEQ ID NO: 52368 - DNA, 21 bp, Artificial Sequence
  primer
ggtccttccaagttgttggtc

SEQ ID NO: 52369 - DNA, 21 bp, Artificial Sequence
  primer
cacttctggtgtgggattgaa

SEQ ID NO: 52370 - DNA, 21 bp, Artificial Sequence
  primer
gagtttccatttgttgctggt

SEQ ID NO: 52371 - DNA, 21 bp, Artificial Sequence
  primer
ggaaagaccgaaaggaagagg

SEQ ID NO: 52372 - DNA, 37 bp, Artificial Sequence
  primer
gtaaaacgacggccagtgtacttcctgcgaggtgagc

SEQ ID NO: 52373 - DNA, 38 bp, Artificial Sequence
  primer
gtaaaacgacggccagtgtctcaggtcaggaggactgg

SEQ ID NO: 52374 - DNA, 37 bp, Artificial Sequence
  primer
gtaaaacgacggccagtctccagaggagaggactggg

SEQ ID NO: 52375 - DNA, 21 bp, Artificial Sequence
  primer
tggtcctctttctccaacacc

SEQ ID NO: 52376 - DNA, 21 bp, Artificial Sequence
  primer
gtcaacgtattcttcgagggc

SEQ ID NO: 52377 - DNA, 38 bp, Artificial Sequence
  primer
gtaaaacgacggccagtctcctcctccctgtaacatgc

SEQ ID NO: 52378 - DNA, 18 bp, Artificial Sequence
  primer
tcctgctgctggatgagg

SEQ ID NO: 52379 - DNA, 23 bp, Artificial Sequence
  primer
gaaagcagtagccctaagtttcc

SEQ ID NO: 52380 - DNA, 21 bp, Artificial Sequence
  primer
tatttgtacgcatggtcacgg

SEQ ID NO: 52381 - DNA, 22 bp, Artificial Sequence
  primer
gtgtcacactgtagcccataaa

SEQ ID NO: 52382 - DNA, 22 bp, Artificial Sequence
  primer
tccacatataatccaaggcagg

SEQ ID NO: 52383 - DNA, 21 bp, Artificial Sequence
  primer
ctgtggtgaagtcacaggtgc

SEQ ID NO: 52384 - DNA, 38 bp, Artificial Sequence
  primer
gtaaaacgacggccagtggctgtagaatcatccatccg

SEQ ID NO: 52385 - DNA, 20 bp, Artificial Sequence
  primer
tggtgagttacttggctcgg

SEQ ID NO: 52386 - DNA, 37 bp, Artificial Sequence
  primer
gtaaaacgacggccagtgcctcctagccacctagtgc

SEQ ID NO: 52387 - DNA, 23 bp, Artificial Sequence
  primer
tgtcatctttgcttgaaggtatg

SEQ ID NO: 52388 - DNA, 39 bp, Artificial Sequence
  primer
gtaaaacgacggccagtcaaatagacgttgatgacgacg

SEQ ID NO: 52389 - DNA, 21 bp, Artificial Sequence
  primer
acagttgtggaggatccttgg

SEQ ID NO: 52390 - DNA, 39 bp, Artificial Sequence
  primer
gtaaaacgacggccagtgaaagtggtcatctatcccagc

SEQ ID NO: 52391 - DNA, 38 bp, Artificial Sequence
  primer
gtaaaacgacggccagtttgctgagctgtgtttcaaga

SEQ ID NO: 52392 - DNA, 21 bp, Artificial Sequence
  primer
atcctcccatctctgtttccc

SEQ ID NO: 52393 - DNA, 21 bp, Artificial Sequence
  primer
cagtgtctgacagcaacccag

SEQ ID NO: 52394 - DNA, 21 bp, Artificial Sequence
  primer
gtgcctcctgtctctgaaagc

SEQ ID NO: 52395 - DNA, 21 bp, Artificial Sequence
  primer
aaagatacacaaacggcctgg

SEQ ID NO: 52396 - DNA, 38 bp, Artificial Sequence
  primer
gtaaaacgacggccagtatggagggtttccttgctttg

SEQ ID NO: 52397 - DNA, 38 bp, Artificial Sequence
  primer
gtaaaacgacggccagtacggaagagtcttgaccaacg

SEQ ID NO: 52398 - DNA, 37 bp, Artificial Sequence
  primer
gtaaaacgacggccagtgtcccttcttagctctcgcc

SEQ ID NO: 52399 - DNA, 20 bp, Artificial Sequence
  primer
acatggtgacgatggaggag

SEQ ID NO: 52400 - DNA, 38 bp, Artificial Sequence
  primer
gtaaaacgacggccagtccgcctgagtctgtaggagtc

SEQ ID NO: 52401 - DNA, 21 bp, Artificial Sequence
  primer
ctcagacaagcttccactccc

SEQ ID NO: 52402 - DNA, 38 bp, Artificial Sequence
  primer
gtaaaacgacggccagtttctgcaaagggaaatccttg

SEQ ID NO: 52403 - DNA, 21 bp, Artificial Sequence
  primer
atgatgaagaaacgggtgagg

SEQ ID NO: 52404 - DNA, 21 bp, Artificial Sequence
  primer
gtgcttataggagaggtgggc

SEQ ID NO: 52405 - DNA, 36 bp, Artificial Sequence
  primer
gtaaaacgacggccagtacggacggcactcattcac

SEQ ID NO: 52406 - DNA, 21 bp, Artificial Sequence
  primer
ctcaacgtcaacctcaactcg

SEQ ID NO: 52407 - DNA, 24 bp, Artificial Sequence
  primer
ttaatgaccagaatctgtactggc

SEQ ID NO: 52408 - DNA, 21 bp, Artificial Sequence
  primer
tccacttggaaaccagaaagg

SEQ ID NO: 52409 - DNA, 21 bp, Artificial Sequence
  primer
tttgccattgcccttagattc

SEQ ID NO: 52410 - DNA, 21 bp, Artificial Sequence
  primer
cattgacactaagagccagcg

SEQ ID NO: 52411 - DNA, 21 bp, Artificial Sequence
  primer
gagctatacgagtcgtcgcac

SEQ ID NO: 52412 - DNA, 38 bp, Artificial Sequence
  primer
gtaaaacgacggccagtgatgcttgtggtgtttcttgc

SEQ ID NO: 52413 - DNA, 21 bp, Artificial Sequence
  primer
tctggcagtggcttcagtaag

SEQ ID NO: 52414 - DNA, 37 bp, Artificial Sequence
  primer
gtaaaacgacggccagtttgtagggctcaactgccac

SEQ ID NO: 52415 - DNA, 19 bp, Artificial Sequence
  primer
cttcgagtcgtcgcacatc

SEQ ID NO: 52416 - DNA, 21 bp, Artificial Sequence
  primer
ggtaccagtttggagtccagg

SEQ ID NO: 52417 - DNA, 38 bp, Artificial Sequence
  primer
gtaaaacgacggccagttactctgagcactgcgagacc

SEQ ID NO: 52418 - DNA, 35 bp, Artificial Sequence
  primer
gtaaaacgacggccagtaccatgctgccctctgtg

SEQ ID NO: 52419 - DNA, 38 bp, Artificial Sequence
  primer
gtaaaacgacggccagtgcaccatgtgctaggtcactc

SEQ ID NO: 52420 - DNA, 38 bp, Artificial Sequence
  primer
gtaaaacgacggccagtcccatcatctgatgcccttac

SEQ ID NO: 52421 - DNA, 38 bp, Artificial Sequence
  primer
gtaaaacgacggccagtggtgtgactgatcctcagcag

SEQ ID NO: 52422 - DNA, 38 bp, Artificial Sequence
  primer
gtaaaacgacggccagtaggctcccaggattctaaagg

SEQ ID NO: 52423 - DNA, 38 bp, Artificial Sequence
  primer
gtaaaacgacggccagtaggaagtagccggaactgttg

SEQ ID NO: 52424 - DNA, 19 bp, Artificial Sequence
  primer
acttgtggctcacagcgtc

SEQ ID NO: 52425 - DNA, 36 bp, Artificial Sequence
  primer
gtaaaacgacggccagtcgcagttcgtgaaggacag

SEQ ID NO: 52426 - DNA, 38 bp, Artificial Sequence
  primer
gtaaaacgacggccagttggacatcaagtctgcctacg

SEQ ID NO: 52427 - DNA, 20 bp, Artificial Sequence
  primer
gccttctctctcttcgcagc

SEQ ID NO: 52428 - DNA, 21 bp, Artificial Sequence
  primer
aacatttgcaaaccctccaag

SEQ ID NO: 52429 - DNA, 20 bp, Artificial Sequence
  primer
atgagctgtggcctggattc

SEQ ID NO: 52430 - DNA, 22 bp, Artificial Sequence
  primer
ccagaggccactagagaaacct

SEQ ID NO: 52431 - DNA, 38 bp, Artificial Sequence
  primer
gtaaaacgacggccagtactgcttccgaggtcatgttc

SEQ ID NO: 52432 - DNA, 38 bp, Artificial Sequence
  primer
gtaaaacgacggccagtctctcagccagaactgtggac

SEQ ID NO: 52433 - DNA, 41 bp, Artificial Sequence
  primer
gtaaaacgacggccagtgccacctctaccttcttcataaac

SEQ ID NO: 52434 - DNA, 21 bp, Artificial Sequence
  primer
ctgaagtcacatgggagtggt

SEQ ID NO: 52435 - DNA, 39 bp, Artificial Sequence
  primer
gtaaaacgacggccagtccagggcaagattcacttattc

SEQ ID NO: 52436 - DNA, 40 bp, Artificial Sequence
  primer
gtaaaacgacggccagtgaggaaatgttggtgttgtactg

SEQ ID NO: 52437 - DNA, 40 bp, Artificial Sequence
  primer
gtaaaacgacggccagttttcttaggagctggagaggaaa

SEQ ID NO: 52438 - DNA, 38 bp, Artificial Sequence; identical to SEQ ID NO: 52432
  primer

SEQ ID NO: 52439 - DNA, 38 bp, Artificial Sequence; identical to SEQ ID NO: 52432
  primer

SEQ ID NO: 52440 - DNA, 20 bp, Artificial Sequence
  primer
atgttcataacgcggtggag

SEQ ID NO: 52441 - DNA, 21 bp, Artificial Sequence
  primer
tcgtctacagtcacctccagc

SEQ ID NO: 52442 - DNA, 22 bp, Artificial Sequence
  primer
aaatatcaattgacggaaaggg

SEQ ID NO: 52443 - DNA, 38 bp, Artificial Sequence
  primer
gtaaaacgacggccagtagtggattccagtggatttgg

SEQ ID NO: 52444 - DNA, 38 bp, Artificial Sequence
  primer
gtaaaacgacggccagtattgctcactttgggaacagg

SEQ ID NO: 52445 - DNA, 21 bp, Artificial Sequence
  primer
agggagagtgacaagtttggg

SEQ ID NO: 52446 - DNA, 21 bp, Artificial Sequence
  primer
gctacttgggaggattggttg

SEQ ID NO: 52447 - DNA, 20 bp, Artificial Sequence
  primer
aaggctgacgtccatgtttg

SEQ ID NO: 52448 - DNA, 21 bp, Artificial Sequence
  primer
acagagtgacattgtgtgggc

SEQ ID NO: 52449 - DNA, 35 bp, Artificial Sequence
  primer
gtaaaacgacggccagtcaggctgggtgcggatag

SEQ ID NO: 52450 - DNA, 37 bp, Artificial Sequence
  primer
gtaaaacgacggccagtcagcgagcctacagttgagc

SEQ ID NO: 52451 - DNA, 38 bp, Artificial Sequence
  primer
gtaaaacgacggccagtataaccgactccaccatgtcc

SEQ ID NO: 52452 - DNA, 37 bp, Artificial Sequence
  primer
gtaaaacgacggccagtgtgacatgtagctgcgggtg

SEQ ID NO: 52453 - DNA, 36 bp, Artificial Sequence
  primer
gtaaaacgacggccagtggtggactgagctgcacat

SEQ ID NO: 52454 - DNA, 38 bp, Artificial Sequence
  primer
gtaaaacgacggccagtcctagcctgaaggcctctctc

SEQ ID NO: 52455 - DNA, 21 bp, Artificial Sequence
  primer
gcagtgctactacgtcttcgg

SEQ ID NO: 52456 - DNA, 36 bp, Artificial Sequence; identical to SEQ ID NO: 52453
  primer

SEQ ID NO: 52457 - DNA, 21 bp, Artificial Sequence
  primer
ctctcccgtactgggtcagtc

SEQ ID NO: 52458 - DNA, 38 bp, Artificial Sequence
  primer
gtaaaacgacggccagtgggcaggagaaagtcaacatc

SEQ ID NO: 52459 - DNA, 20 bp, Artificial Sequence
  primer
cctcagccttctccttctgg

SEQ ID NO: 52460 - DNA, 38 bp, Artificial Sequence
  primer
gtaaaacgacggccagtttcagattcttgactgcaggg

SEQ ID NO: 52461 - DNA, 21 bp, Artificial Sequence
  primer
ctggagcctgagacagaaacc

SEQ ID NO: 52462 - DNA, 38 bp, Artificial Sequence
  primer
gtaaaacgacggccagtcgtctcgtcttccagtcaatc

SEQ ID NO: 52463 - DNA, 37 bp, Artificial Sequence
  primer
gtaaaacgacggccagtggttcctacaggaaggctgg

SEQ ID NO: 52464 - DNA, 21 bp, Artificial Sequence
  primer
tcacgctaaacatgggtatgg

SEQ ID NO: 52465 - DNA, 38 bp, Artificial Sequence
  primer
gtaaaacgacggccagtagacggaggcatctacattgg

SEQ ID NO: 52466 - DNA, 38 bp, Artificial Sequence
  primer
gtaaaacgacggccagtaatccatccttgcttcagacc

SEQ ID NO: 52467 - DNA, 37 bp, Artificial Sequence
  primer
gtaaaacgacggccagtaggtggaacaggaggctgag

SEQ ID NO: 52468 - DNA, 21 bp, Artificial Sequence
  primer
tacatctggatcgtctttgcc

SEQ ID NO: 52469 - DNA, 38 bp, Artificial Sequence
  primer
gtaaaacgacggccagttaatgcctttctgggtatggc

SEQ ID NO: 52470 - DNA, 20 bp, Artificial Sequence
  primer
cctctccattcggtgtcttg

SEQ ID NO: 52471 - DNA, 21 bp, Artificial Sequence
  primer
ctgctgcccactttctcctac

SEQ ID NO: 52472 - DNA, 37 bp, Artificial Sequence
  primer
gtaaaacgacggccagtctgggtgaggactcagttgc

SEQ ID NO: 52473 - DNA, 19 bp, Artificial Sequence
  primer
ggagaacaagggagctggc

SEQ ID NO: 52474 - DNA, 38 bp, Artificial Sequence
  primer
gtaaaacgacggccagtccaaagagctgtctctgggtc

SEQ ID NO: 52475 - DNA, 38 bp, Artificial Sequence
  primer
gtaaaacgacggccagtcctgcttccttcctcttaggc

SEQ ID NO: 52476 - DNA, 38 bp, Artificial Sequence
  primer
gtaaaacgacggccagtttctccctttcagctggtgtc

SEQ ID NO: 52477 - DNA, 21 bp, Artificial Sequence
  primer
ctacccaccttcttgccctac

SEQ ID NO: 52478 - DNA, 38 bp, Artificial Sequence
  primer
gtaaaacgacggccagtaggcttatgggctttgtgttg

SEQ ID NO: 52479 - DNA, 38 bp, Artificial Sequence
  primer
gtaaaacgacggccagttcaccttgaggaggagtcagg

SEQ ID NO: 52480 - DNA, 21 bp, Artificial Sequence
  primer
tgtcagttcagttcctgtccc

SEQ ID NO: 52481 - DNA, 39 bp, Artificial Sequence
  primer
gtaaaacgacggccagttctgtaccctgctccttcagag

SEQ ID NO: 52482 - DNA, 38 bp, Artificial Sequence
  primer
gtaaaacgacggccagtgagtaatgacgatgcagtccg

SEQ ID NO: 52483 - DNA, 21 bp, Artificial Sequence
  primer
acattgcccaggagtaagtgg

SEQ ID NO: 52484 - DNA, 38 bp, Artificial Sequence
  primer
gtaaaacgacggccagtcacatgcacatcgtacactgg

SEQ ID NO: 52485 - DNA, 38 bp, Artificial Sequence
  primer
gtaaaacgacggccagtttggacccttcctttgatctg

SEQ ID NO: 52486 - DNA, 21 bp, Artificial Sequence
  primer
accacggtctctctcatccag

SEQ ID NO: 52487 - DNA, 21 bp, Artificial Sequence
  primer
cgtggaggaaggctataggtg

SEQ ID NO: 52488 - DNA, 36 bp, Artificial Sequence
  primer
gtaaaacgacggccagtggaaggagccacagagagg

SEQ ID NO: 52489 - DNA, 38 bp, Artificial Sequence
  primer
gtaaaacgacggccagtctaggcagggtgacctgagag

SEQ ID NO: 52490 - DNA, 38 bp, Artificial Sequence
  primer
gtaaaacgacggccagtccaagggtttgctatattggg

SEQ ID NO: 52491 - DNA, 22 bp, Artificial Sequence
  primer
ataggttgtcttttggaaatgc

SEQ ID NO: 52492 - DNA, 38 bp, Artificial Sequence
  primer
gtaaaacgacggccagtttctaagtctccctgctgcct

SEQ ID NO: 52493 - DNA, 40 bp, Artificial Sequence
  primer
gtaaaacgacggccagttttggattctgagataagatggc

SEQ ID NO: 52494 - DNA, 38 bp, Artificial Sequence
  primer
gtaaaacgacggccagtagcagcagtttctctcattgc

SEQ ID NO: 52495 - DNA, 21 bp, Artificial Sequence
  primer
aaacggttgtcaaatcaggaa

SEQ ID NO: 52496 - DNA, 42 bp, Artificial Sequence
  primer
gtaaaacgacggccagttcaggaagaaatcatgaactagaaa

SEQ ID NO: 52497 - DNA, 38 bp, Artificial Sequence
  primer
gtaaaacgacggccagtctggcgtacaggagcctaaag

SEQ ID NO: 52498 - DNA, 24 bp, Artificial Sequence
  primer
tgttgaaaggtcctatgctagatg

SEQ ID NO: 52499 - DNA, 38 bp, Artificial Sequence
  primer
gtaaaacgacggccagtaccagctaatgacagggaagg

SEQ ID NO: 52500 - DNA, 21 bp, Artificial Sequence
  primer
accagctaatgacagggaagg

SEQ ID NO: 52501 - DNA, 38 bp, Artificial Sequence
  primer
gtaaaacgacggccagtagcccatggtcttcactgttg

SEQ ID NO: 52502 - DNA, 22 bp, Artificial Sequence
  primer
gttgtgtgcagtgctcaatttc

SEQ ID NO: 52503 - DNA, 21 bp, Artificial Sequence
  primer
tttctggccttgtgaaatgta

SEQ ID NO: 52504 - DNA, 42 bp, Artificial Sequence
  primer
gtaaaacgacggccagtttcttgttctacactttggaactgc

SEQ ID NO: 52505 - DNA, 21 bp, Artificial Sequence
  primer
atgcctggccctaaagtaaat

SEQ ID NO: 52506 - DNA, 38 bp, Artificial Sequence
  primer
gtaaaacgacggccagttccttgcagatccaaccttta

SEQ ID NO: 52507 - DNA, 21 bp, Artificial Sequence
  primer
tttctccactggcatcttagc

SEQ ID NO: 52508 - DNA, 38 bp, Artificial Sequence
  primer
gtaaaacgacggccagtagagctgcctactctccacag

SEQ ID NO: 52509 - DNA, 39 bp, Artificial Sequence
  primer
gtaaaacgacggccagtgggccttaagtagcatgctgta

SEQ ID NO: 52510 - DNA, 22 bp, Artificial Sequence
  primer
caccatggagggaataatgaag

SEQ ID NO: 52511 - DNA, 38 bp, Artificial Sequence
  primer
gtaaaacgacggccagttgctgttaacacaggcatgaa

SEQ ID NO: 52512 - DNA, 24 bp, Artificial Sequence
  primer
agaataattgacatgctgtggaac

SEQ ID NO: 52513 - DNA, 24 bp, Artificial Sequence
  primer
gcttcttctcttcatgatctttcc

SEQ ID NO: 52514 - DNA, 38 bp, Artificial Sequence
  primer
gtaaaacgacggccagtttcatgatctttccaatgctg

SEQ ID NO: 52515 - DNA, 38 bp, Artificial Sequence
  primer
gtaaaacgacggccagtggagagcaaactgcgtttagg

SEQ ID NO: 52516 - DNA, 21 bp, Artificial Sequence
  primer
actaccatgtgagaaaggcgg

SEQ ID NO: 52517 - DNA, 38 bp, Artificial Sequence
  primer
gtaaaacgacggccagtcaggagccatttgatagctga

SEQ ID NO: 52518 - DNA, 36 bp, Artificial Sequence
  primer
gtaaaacgacggccagtcacagcaccacctgcaaac

SEQ ID NO: 52519 - DNA, 38 bp, Artificial Sequence
  primer
gtaaaacgacggccagtcctttcgggacagttctcttc

SEQ ID NO: 52520 - DNA, 45 bp, Artificial Sequence
  primer
gtaaaacgacggccagtgcagtttagtacatatcatttgaaggtt

SEQ ID NO: 52521 - DNA, 20 bp, Artificial Sequence
  primer
atgtgcacgttcagctgttg

SEQ ID NO: 52522 - DNA, 21 bp, Artificial Sequence
  primer
gcatccttccataatcttgcc

SEQ ID NO: 52523 - DNA, 21 bp, Artificial Sequence
  primer
gatgattgagtgacctggtgg

SEQ ID NO: 52524 - DNA, 40 bp, Artificial Sequence
  primer
gtaaaacgacggccagtgggtgcaaatgactgtttaattc

SEQ ID NO: 52525 - DNA, 21 bp, Artificial Sequence
  primer
tctgtccggtcagtggtttac

SEQ ID NO: 52526 - DNA, 44 bp, Artificial Sequence
  primer
gtaaaacgacggccagtcattgatccatactgtgatagtgagtt

SEQ ID NO: 52527 - DNA, 26 bp, Artificial Sequence
  primer
gacaaagaagggtaatgtttagttgc

SEQ ID NO: 52528 - DNA, 23 bp, Artificial Sequence
  primer
cccagtaggcataatgctagaga

SEQ ID NO: 52529 - DNA, 41 bp, Artificial Sequence
  primer
gtaaaacgacggccagttgaagaaagaaatgtttcggataa

SEQ ID NO: 52530 - DNA, 42 bp, Artificial Sequence
  primer
gtaaaacgacggccagtgaatacccacaagttatgagactcg

SEQ ID NO: 52531 - DNA, 41 bp, Artificial Sequence
  primer
gtaaaacgacggccagttttactttgaaacctgcttcattt

SEQ ID NO: 52532 - DNA, 23 bp, Artificial Sequence
  primer
acagcatgatgtttacagttcca

SEQ ID NO: 52533 - DNA, 27 bp, Artificial Sequence
  primer
ttctgtagtgaaacaaattgtaggaac

SEQ ID NO: 52534 - DNA, 41 bp, Artificial Sequence
  primer
gtaaaacgacggccagtgccagcttgagagaagaattactg

SEQ ID NO: 52535 - DNA, 21 bp, Artificial Sequence
  primer
tatggaaaggccattcaggtc

SEQ ID NO: 52536 - DNA, 43 bp, Artificial Sequence
  primer
gtaaaacgacggccagtgggtaattgtcttgcatcattatctc

SEQ ID NO: 52537 - DNA, 21 bp, Artificial Sequence
  primer
aaaggttgttgctgttgcttt

SEQ ID NO: 52538 - DNA, 38 bp, Artificial Sequence
  primer
gtaaaacgacggccagttgcaggttacagaagagggaa

SEQ ID NO: 52539 - DNA, 22 bp, Artificial Sequence
  primer
tgaatggcatactttggacaag

SEQ ID NO: 52540 - DNA, 42 bp, Artificial Sequence
  primer
gtaaaacgacggccagtggcatctcttctacttaggaaggtc

SEQ ID NO: 52541 - DNA, 25 bp, Artificial Sequence
  primer
aatgctgatctccaaactttaactg

SEQ ID NO: 52542 - DNA, 26 bp, Artificial Sequence
  primer
gaagttaatcaatggaaccctaattc

SEQ ID NO: 52543 - DNA, 39 bp, Artificial Sequence
  primer
gtaaaacgacggccagttgaatgacttgatgagcaggag

SEQ ID NO: 52544 - DNA, 24 bp, Artificial Sequence
  primer
ggcagaggatttaactatgaagtg

SEQ ID NO: 52545 - DNA, 20 bp, Artificial Sequence
  primer
gtggacgagagagaacctgg

SEQ ID NO: 52546 - DNA, 21 bp, Artificial Sequence
  primer
ttgcccttgaatgtatttggg

SEQ ID NO: 52547 - DNA, 21 bp, Artificial Sequence
  primer
caggccaagggtctacaattc

SEQ ID NO: 52548 - DNA, 21 bp, Artificial Sequence
  primer
tccacatgaaagggaactttg

SEQ ID NO: 52549 - DNA, 38 bp, Artificial Sequence
  primer
gtaaaacgacggccagtttgcccttgaatgtatttggg

SEQ ID NO: 52550 - DNA, 20 bp, Artificial Sequence
  primer
gaggtgcaggatgcaagaag

SEQ ID NO: 52551 - DNA, 38 bp, Artificial Sequence
  primer
gtaaaacgacggccagtagcagcccttacagttcttcc

SEQ ID NO: 52552 - DNA, 38 bp, Artificial Sequence
  primer
gtaaaacgacggccagtctgcgtaagctctctgtggac

SEQ ID NO: 52553 - DNA, 38 bp, Artificial Sequence
  primer
gtaaaacgacggccagtatgcatagtgttcttggtggg

SEQ ID NO: 52554 - DNA, 21 bp, Artificial Sequence
  primer
actagcagatggtacccgtgg

SEQ ID NO: 52555 - DNA, 38 bp, Artificial Sequence
  primer
gtaaaacgacggccagtcctcagttgggtcctcttagc

SEQ ID NO: 52556 - DNA, 37 bp, Artificial Sequence
  primer
gtaaaacgacggccagtagtggctccaatgaggtgtg

SEQ ID NO: 52557 - DNA, 18 bp, Artificial Sequence
  primer
cccgtgtgtgtctccctg

SEQ ID NO: 52558 - DNA, 21 bp, Artificial Sequence
  primer
tctgctcttgaagcctgaacc

SEQ ID NO: 52559 - DNA, 36 bp, Artificial Sequence
  primer
gtaaaacgacggccagtatcacccatggctcctttg

SEQ ID NO: 52560 - DNA, 21 bp, Artificial Sequence
  primer
ttgtgtctttcccttccttcc

SEQ ID NO: 52561 - DNA, 37 bp, Artificial Sequence
  primer
gtaaaacgacggccagtctccctgccaggattaccag

SEQ ID NO: 52562 - DNA, 38 bp, Artificial Sequence
  primer
gtaaaacgacggccagttaaggtctctgtctccgtggg

SEQ ID NO: 52563 - DNA, 21 bp, Artificial Sequence
  primer
agtaacaagcggacagtgctc

SEQ ID NO: 52564 - DNA, 38 bp, Artificial Sequence
  primer
gtaaaacgacggccagtaactcacagccttcgaacacc

SEQ ID NO: 52565 - DNA, 21 bp, Artificial Sequence
  primer
gagaatttcaccttccgcaac

SEQ ID NO: 52566 - DNA, 38 bp, Artificial Sequence
  primer
gtaaaacgacggccagtcatgcccattgatatgtggag

SEQ ID NO: 52567 - DNA, 38 bp, Artificial Sequence
  primer
gtaaaacgacggccagtctcacagaaactgctggatgc

SEQ ID NO: 52568 - DNA, 19 bp, Artificial Sequence
  primer
gtctggctgtagcagacgc

SEQ ID NO: 52569 - DNA, 21 bp, Artificial Sequence
  primer
tcctccgtctttctttggaag

SEQ ID NO: 52570 - DNA, 38 bp, Artificial Sequence
  primer
gtaaaacgacggccagtatgatgtgccaggccctatac

SEQ ID NO: 52571 - DNA, 21 bp, Artificial Sequence
  primer
agtaacaagcggacagtgctc

SEQ ID NO: 52572 - DNA, 21 bp, Artificial Sequence
  primer
cacctgaacaagcaatgaagc

SEQ ID NO: 52573 - DNA, 38 bp, Artificial Sequence
  primer
gtaaaacgacggccagtgagaatttcaccttccgcaac

SEQ ID NO: 52574 - DNA, 38 bp, Artificial Sequence; identical to SEQ ID NO: 52566
  primer

SEQ ID NO: 52575 - DNA, 38 bp, Artificial Sequence; identical to SEQ ID NO: 52567
  primer

SEQ ID NO: 52576 - DNA, 38 bp, Artificial Sequence
  primer
gtaaaacgacggccagtccgtgttcttggtagcagatg

SEQ ID NO: 52577 - DNA, 39 bp, Artificial Sequence
  primer
gtaaaacgacggccagtccagttgtttgtattcagtgcc

SEQ ID NO: 52578 - DNA, 38 bp, Artificial Sequence
  primer
gtaaaacgacggccagttattcagttggaggagggagg

SEQ ID NO: 52579 - DNA, 39 bp, Artificial Sequence
  primer
gtaaaacgacggccagtagtcagatggcatcagtgactc

SEQ ID NO: 52580 - DNA, 38 bp, Artificial Sequence
  primer
gtaaaacgacggccagttttgtaggtccaaatgccaag

SEQ ID NO: 52581 - DNA, 38 bp, Artificial Sequence
  primer
gtaaaacgacggccagttttcatcgtcaagcagctgag

SEQ ID NO: 52582 - DNA, 38 bp, Artificial Sequence
  primer
gtaaaacgacggccagtaagtttgcccagtccatcttg

SEQ ID NO: 52583 - DNA, 38 bp, Artificial Sequence
  primer
gtaaaacgacggccagttcttccctggagaggatgaag

SEQ ID NO: 52584 - DNA, 21 bp, Artificial Sequence
  primer
ttggattagcaagtctgtccc

SEQ ID NO: 52585 - DNA, 21 bp, Artificial Sequence
  primer
gtgtctggtcgagagtacccg

SEQ ID NO: 52586 - DNA, 38 bp, Artificial Sequence
  primer
gtaaaacgacggccagtgacagatgcttcctttgggag

SEQ ID NO: 52587 - DNA, 36 bp, Artificial Sequence
  primer
gtaaaacgacggccagtgaagggatgccatcgtctg

SEQ ID NO: 52588 - DNA, 38 bp, Artificial Sequence
  primer
gtaaaacgacggccagtaggagtgagccataatctggg

SEQ ID NO: 52589 - DNA, 39 bp, Artificial Sequence
  primer
gtaaaacgacggccagtcaaagaggaggtgagagtgtgg

SEQ ID NO: 52590 - DNA, 38 bp, Artificial Sequence
  primer
gtaaaacgacggccagtgcctgctactagacggaaacc

SEQ ID NO: 52591 - DNA, 21 bp, Artificial Sequence
  primer
tatttgaactgggccctgaag

SEQ ID NO: 52592 - DNA, 38 bp, Artificial Sequence
  primer
gtaaaacgacggccagtagctgcacttccctttcactg

SEQ ID NO: 52593 - DNA, 38 bp, Artificial Sequence
  primer
gtaaaacgacggccagttctgggtttgctctgctactg

SEQ ID NO: 52594 - DNA, 38 bp, Artificial Sequence
  primer
gtaaaacgacggccagttaagcagcagcatcatgtgac

SEQ ID NO: 52595 - DNA, 25 bp, Artificial Sequence
  primer
tccattagttgtttccaggtacttt

SEQ ID NO: 52596 - DNA, 38 bp, Artificial Sequence
  primer
gtaaaacgacggccagtcacggtcatcgtttccactaa

SEQ ID NO: 52597 - DNA, 38 bp, Artificial Sequence
  primer
gtaaaacgacggccagttaagccaggagccagagattc

SEQ ID NO: 52598 - DNA, 38 bp, Artificial Sequence
  primer
gtaaaacgacggccagtgggttctcagggaatctgttg

SEQ ID NO: 52599 - DNA, 38 bp, Artificial Sequence
  primer
gtaaaacgacggccagtacgaaggtgaaccagacacag

SEQ ID NO: 52600 - DNA, 21 bp, Artificial Sequence
  primer
tgggtgactgtgtggtctagg

SEQ ID NO: 52601 - DNA, 21 bp, Artificial Sequence
  primer
gagccatattccttggtggag

SEQ ID NO: 52602 - DNA, 37 bp, Artificial Sequence
  primer
gtaaaacgacggccagtatgagtcttagggcccatgc

SEQ ID NO: 52603 - DNA, 38 bp, Artificial Sequence
  primer
gtaaaacgacggccagtcaagaagccagtggtgagatg

SEQ ID NO: 52604 - DNA, 38 bp, Artificial Sequence
  primer
gtaaaacgacggccagtggactaaactgctaggcgtgg

SEQ ID NO: 52605 - DNA, 21 bp, Artificial Sequence
  primer
tgttggcagttattgtttggg

SEQ ID NO: 52606 - DNA, 38 bp, Artificial Sequence
  primer
gtaaaacgacggccagtgactgcctgtgtttccaaatg

SEQ ID NO: 52607 - DNA, 38 bp, Artificial Sequence
  primer
gtaaaacgacggccagtcggatgagtcctttacctccc

SEQ ID NO: 52608 - DNA, 38 bp, Artificial Sequence
  primer
gtaaaacgacggccagtacgcggtagtaagtgtcggag

SEQ ID NO: 52609 - DNA, 21 bp, Artificial Sequence
  primer
gcttcttgctcaggtagtccc

SEQ ID NO: 52610 - DNA, 38 bp, Artificial Sequence
  primer
gtaaaacgacggccagttgtctctgcaaagattccctg

SEQ ID NO: 52611 - DNA, 21 bp, Artificial Sequence
  primer
accagaacatcacactgcctg

SEQ ID NO: 52612 - DNA, 21 bp, Artificial Sequence
  primer
tgcagtgtcttcatctctggg

SEQ ID NO: 52613 - DNA, 38 bp, Artificial Sequence
  primer
gtaaaacgacggccagtagcctgttcatgtaacccgtc

SEQ ID NO: 52614 - DNA, 21 bp, Artificial Sequence
  primer
actgacaggagctgcatctgg

SEQ ID NO: 52615 - DNA, 37 bp, Artificial Sequence
  primer
gtaaaacgacggccagtctgggtgcctgagagatgag

SEQ ID NO: 52616 - DNA, 21 bp, Artificial Sequence
  primer
ctttcttgggctacttgccac

SEQ ID NO: 52617 - DNA, 37 bp, Artificial Sequence
  primer
gtaaaacgacggccagtaggaggctggcactcttagc

SEQ ID NO: 52618 - DNA, 39 bp, Artificial Sequence
  primer
gtaaaacgacggccagtggttcagtagcagtgacaaggc

SEQ ID NO: 52619 - DNA, 37 bp, Artificial Sequence
  primer
gtaaaacgacggccagtctgctgtgagaacctggcac

SEQ ID NO: 52620 - DNA, 37 bp, Artificial Sequence
  primer
gtaaaacgacggccagtagtcagaggtcagctcacgg

SEQ ID NO: 52621 - DNA, 38 bp, Artificial Sequence
  primer
gtaaaacgacggccagtgagggtgtcagcctgctctac

SEQ ID NO: 52622 - DNA, 38 bp, Artificial Sequence
  primer
gtaaaacgacggccagttgtctttgctgaaaccgtgag

SEQ ID NO: 52623 - DNA, 38 bp, Artificial Sequence
  primer
gtaaaacgacggccagttctccaggaggtggtagatgg

SEQ ID NO: 52624 - DNA, 38 bp, Artificial Sequence
  primer
gtaaaacgacggccagtcttctgtctgggacttggagg

SEQ ID NO: 52625 - DNA, 21 bp, Artificial Sequence
  primer
tcaagagtctgtgaccatgcc

SEQ ID NO: 52626 - DNA, 21 bp, Artificial Sequence
  primer
gaagacaggaaggcaaaggtg

SEQ ID NO: 52627 - DNA, 21 bp, Artificial Sequence
  primer
aggctgagagttcagctttcg

SEQ ID NO: 52628 - DNA, 38 bp, Artificial Sequence
  primer
gtaaaacgacggccagtctagggacagactccacctcc

SEQ ID NO: 52629 - DNA, 21 bp, Artificial Sequence
  primer
ccacatggctctggagaagac

SEQ ID NO: 52630 - DNA, 21 bp, Artificial Sequence
  primer
aattcaccattctgtgggagg

SEQ ID NO: 52631 - DNA, 38 bp, Artificial Sequence
  primer
gtaaaacgacggccagtagcctagcatcccttctaccc

SEQ ID NO: 52632 - DNA, 38 bp, Artificial Sequence
  primer
gtaaaacgacggccagtgttggctcctcttagtggtgg

SEQ ID NO: 52633 - DNA, 21 bp, Artificial Sequence
  primer
tgcacttggcatttctttctg

SEQ ID NO: 52634 - DNA, 21 bp, Artificial Sequence
  primer
ggttcctcagaacatcaagcc

SEQ ID NO: 52635 - DNA, 21 bp, Artificial Sequence
  primer
tttctgctctttgggcttgac

SEQ ID NO: 52636 - DNA, 21 bp, Artificial Sequence
  primer
cttgtcttggtcccttggttg

SEQ ID NO: 52637 - DNA, 38 bp, Artificial Sequence
  primer
gtaaaacgacggccagtcacccttaggaaagccttgtg

SEQ ID NO: 52638 - DNA, 22 bp, Artificial Sequence
  primer
tcttgtttcctttcctttgctg

SEQ ID NO: 52639 - DNA, 37 bp, Artificial Sequence
  primer
gtaaaacgacggccagtatagcatgggaaagactggc

SEQ ID NO: 52640 - DNA, 38 bp, Artificial Sequence
  primer
gtaaaacgacggccagtacagcccacatctcaacttcc

SEQ ID NO: 52641 - DNA, 38 bp, Artificial Sequence
  primer
gtaaaacgacggccagtccaaggaaagaagactccctg

SEQ ID NO: 52642 - DNA, 38 bp, Artificial Sequence
  primer
gtaaaacgacggccagttctctgagcctccatttctcc

SEQ ID NO: 52643 - DNA, 21 bp, Artificial Sequence
  primer
aagcctggagctagtggacag

SEQ ID NO: 52644 - DNA, 21 bp, Artificial Sequence
  primer
ttagggcagtgaggctttctc

SEQ ID NO: 52645 - DNA, 38 bp, Artificial Sequence
  primer
gtaaaacgacggccagtagtcctcttggaccagtctgc

SEQ ID NO: 52646 - DNA, 21 bp, Artificial Sequence
  primer
ccttgtctgcctaagttgacg

SEQ ID NO: 52647 - DNA, 20 bp, Artificial Sequence
  primer
gggatctgtccttcccagtc

SEQ ID NO: 52648 - DNA, 21 bp, Artificial Sequence
  primer
gaagctggtgacagaggtgac

SEQ ID NO: 52649 - DNA, 21 bp, Artificial Sequence
  primer
tttctggcctggttactctcc

SEQ ID NO: 52650 - DNA, 38 bp, Artificial Sequence
  primer
gtaaaacgacggccagtcattggacctgctgttgagag

SEQ ID NO: 52651 - DNA, 38 bp, Artificial Sequence
  primer
gtaaaacgacggccagtacatggtatggatggcaagtg

SEQ ID NO: 52652 - DNA, 35 bp, Artificial Sequence
  primer
gtaaaacgacggccagtctggtcgggaccggatac

SEQ ID NO: 52653 - DNA, 20 bp, Artificial Sequence
  primer
gtgagcaaagcctggaagag

SEQ ID NO: 52654 - DNA, 38 bp, Artificial Sequence
  primer
gtaaaacgacggccagttggatagtcacgcatggagtc

SEQ ID NO: 52655 - DNA, 38 bp, Artificial Sequence
  primer
gtaaaacgacggccagttggcataaatttagtgggcct

SEQ ID NO: 52656 - DNA, 22 bp, Artificial Sequence
  primer
caaagaaatctcatcctgggtc

SEQ ID NO: 52657 - DNA, 41 bp, Artificial Sequence
  primer
gtaaaacgacggccagtcaatggcaagagtttagaggtatg

SEQ ID NO: 52658 - DNA, 43 bp, Artificial Sequence
  primer
gtaaaacgacggccagtggtgagctttgatgtgtaattacttt

SEQ ID NO: 52659 - DNA, 21 bp, Artificial Sequence
  primer
caatccactggaggaagatgg

SEQ ID NO: 52660 - DNA, 38 bp, Artificial Sequence
  primer
gtaaaacgacggccagtagagatggattcagtgcaggc

SEQ ID NO: 52661 - DNA, 18 bp, Artificial Sequence
  primer
aggtgtgcaccaccacag

SEQ ID NO: 52662 - DNA, 18 bp, Artificial Sequence
  primer
cctgggcaacagaaggag

SEQ ID NO: 52663 - DNA, 36 bp, Artificial Sequence
  primer
gtaaaacgacggccagtctggacgcccagaccttag

SEQ ID NO: 52664 - DNA, 37 bp, Artificial Sequence
  primer
gtaaaacgacggccagtttcaagcatggtaagaggcg

SEQ ID NO: 52665 - DNA, 39 bp, Artificial Sequence
  primer
gtaaaacgacggccagtccagaagcatgtctactacccg

SEQ ID NO: 52666 - DNA, 19 bp, Artificial Sequence
  primer
catcgacgtggacaaggtg

SEQ ID NO: 52667 - DNA, 21 bp, Artificial Sequence
  primer
gatctgcctaccttgacctcc

SEQ ID NO: 52668 - DNA, 41 bp, Artificial Sequence
  primer
gtaaaacgacggccagtcgtgttatcaacaggactgtaccc

SEQ ID NO: 52669 - DNA, 38 bp, Artificial Sequence
  primer
gtaaaacgacggccagtaatcattgtgcacagacctgc

SEQ ID NO: 52670 - DNA, 38 bp, Artificial Sequence
  primer
gtaaaacgacggccagtaacacagctatgtgctccctg

SEQ ID NO: 52671 - DNA, 37 bp, Artificial Sequence
  primer
gtaaaacgacggccagtccgagagccaaactgtttca

SEQ ID NO: 52672 - DNA, 20 bp, Artificial Sequence
  primer
gacttgatgcgcacggatag

SEQ ID NO: 52673 - DNA, 39 bp, Artificial Sequence
  primer
gtaaaacgacggccagttctgtccattatcccatgtgtg

SEQ ID NO: 52674 - DNA, 38 bp, Artificial Sequence
  primer
gtaaaacgacggccagtgtttgcggcatatttggctac

SEQ ID NO: 52675 - DNA, 22 bp, Artificial Sequence
  primer
ccatctatgactgattgcctca

SEQ ID NO: 52676 - DNA, 25 bp, Artificial Sequence
  primer
cttaagcattctgtattgtgctgag

SEQ ID NO: 52677 - DNA, 38 bp, Artificial Sequence
  primer
gtaaaacgacggccagtaggatggattgaaatgttggc

SEQ ID NO: 52678 - DNA, 38 bp, Artificial Sequence
  primer
gtaaaacgacggccagtgattgttcattgccacagcag

SEQ ID NO: 52679 - DNA, 22 bp, Artificial Sequence
  primer
ttggtccaactgagaatcacac

SEQ ID NO: 52680 - DNA, 39 bp, Artificial Sequence
  primer
gtaaaacgacggccagtccaccactttaagaggcacatc

SEQ ID NO: 52681 - DNA, 21 bp, Artificial Sequence
  primer
taggcagcatagcaagacctc

SEQ ID NO: 52682 - DNA, 24 bp, Artificial Sequence
  primer
tggttcagtgttagatgctcagtc

SEQ ID NO: 52683 - DNA, 38 bp, Artificial Sequence
  primer
gtaaaacgacggccagtagggttgggagatgaggattc

SEQ ID NO: 52684 - DNA, 21 bp, Artificial Sequence
  primer
caagagctcaggttagggagg

SEQ ID NO: 52685 - DNA, 38 bp, Artificial Sequence
  primer
gtaaaacgacggccagtacagtaggtgcagccacacac

SEQ ID NO: 52686 - DNA, 38 bp, Artificial Sequence
  primer
gtaaaacgacggccagtccaccttcaagtttcagcctc

SEQ ID NO: 52687 - DNA, 21 bp, Artificial Sequence
  primer
tgacatcattgccttgctcag

SEQ ID NO: 52688 - DNA, 38 bp, Artificial Sequence
  primer
gtaaaacgacggccagtaccgaggtatggctgattgac

SEQ ID NO: 52689 - DNA, 39 bp, Artificial Sequence
  primer
gtaaaacgacggccagttgcatagacaaggaggcctaag

SEQ ID NO: 52690 - DNA, 38 bp, Artificial Sequence
  primer
gtaaaacgacggccagttgggaggatgagttgggtaag

SEQ ID NO: 52691 - DNA, 36 bp, Artificial Sequence
  primer
gtaaaacgacggccagtgtctgcctacccatgagcc

SEQ ID NO: 52692 - DNA, 38 bp, Artificial Sequence
  primer
gtaaaacgacggccagtcacttgcctacaggtgctgag

SEQ ID NO: 52693 - DNA, 38 bp, Artificial Sequence
  primer
gtaaaacgacggccagttaggcagacactgctcaaagc

SEQ ID NO: 52694 - DNA, 21 bp, Artificial Sequence
  primer
ggttcaaggacttgccatctc

SEQ ID NO: 52695 - DNA, 38 bp, Artificial Sequence
  primer
gtaaaacgacggccagtgtgcaatctccaagtcctgag

SEQ ID NO: 52696 - DNA, 21 bp, Artificial Sequence
  primer
agcaggtgtgagaggcttagg

SEQ ID NO: 52697 - DNA, 21 bp, Artificial Sequence
  primer
agcacggagagggagtaattg

SEQ ID NO: 52698 - DNA, 21 bp, Artificial Sequence
  primer
cttgaagcgtggtgaagtttg

SEQ ID NO: 52699 - DNA, 38 bp, Artificial Sequence
  primer
gtaaaacgacggccagtctctatccacactggagcctg

SEQ ID NO: 52700 - DNA, 38 bp, Artificial Sequence
  primer
gtaaaacgacggccagttcttcccagtctgcatttgtc

SEQ ID NO: 52701 - DNA, 39 bp, Artificial Sequence
  primer
gtaaaacgacggccagttccttacagcattaaagggcag

SEQ ID NO: 52702 - DNA, 38 bp, Artificial Sequence
  primer
gtaaaacgacggccagtatggcacctaccaccattacc

SEQ ID NO: 52703 - DNA, 42 bp, Artificial Sequence
  primer
gtaaaacgacggccagttttaatgctttggctgatcttagaa

SEQ ID NO: 52704 - DNA, 22 bp, Artificial Sequence
  primer
ttacaaacgacattcatcggac

SEQ ID NO: 52705 - DNA, 21 bp, Artificial Sequence
  primer
tcctctttcttcctgggtcaa

SEQ ID NO: 52706 - DNA, 21 bp, Artificial Sequence
  primer
tgccctaatttctccagtttg

SEQ ID NO: 52707 - DNA, 21 bp, Artificial Sequence
  primer
tatttcatgccaatctgccac

SEQ ID NO: 52708 - DNA, 47 bp, Artificial Sequence
  primer
gtaaaacgacggccagtcctatacattgtttactttgaattagggaa

SEQ ID NO: 52709 - DNA, 23 bp, Artificial Sequence
  primer
ttggtgatctctgatttctgttg

SEQ ID NO: 52710 - DNA, 38 bp, Artificial Sequence
  primer
gtaaaacgacggccagtctttctctggagcagcaaatg

SEQ ID NO: 52711 - DNA, 43 bp, Artificial Sequence
  primer
gtaaaacgacggccagttttatattcactgtggcttcactctc

SEQ ID NO: 52712 - DNA, 23 bp, Artificial Sequence
  primer
tccaatgaaagtgacagtgtagg

SEQ ID NO: 52713 - DNA, 38 bp, Artificial Sequence
  primer
gtaaaacgacggccagtctaattgagcactggctgtgg

SEQ ID NO: 52714 - DNA, 21 bp, Artificial Sequence
  primer
atttgatgaggctatgccacc

SEQ ID NO: 52715 - DNA, 21 bp, Artificial Sequence
  primer
ttaaatgtgttccctgcaccc

SEQ ID NO: 52716 - DNA, 38 bp, Artificial Sequence
  primer
gtaaaacgacggccagtctggattgatgagcaaagctg

SEQ ID NO: 52717 - DNA, 21 bp, Artificial Sequence
  primer
ttagttccaggctggtgtttg

SEQ ID NO: 52718 - DNA, 24 bp, Artificial Sequence
  primer
catccatgtgtgtaagtgagcatc

SEQ ID NO: 52719 - DNA, 24 bp, Artificial Sequence
  primer
ccaatttagtagatcacaactgcc

SEQ ID NO: 52720 - DNA, 40 bp, Artificial Sequence
  primer
gtaaaacgacggccagtttgatcatgaacccttctaatgc

SEQ ID NO: 52721 - DNA, 24 bp, Artificial Sequence
  primer
agatggcaactttaaatccctttc

SEQ ID NO: 52722 - DNA, 20 bp, Artificial Sequence
  primer
aaaggaaaggcttgctcgtc

SEQ ID NO: 52723 - DNA, 41 bp, Artificial Sequence
  primer
gtaaaacgacggccagtggaccaggtataggagttcagttg

SEQ ID NO: 52724 - DNA, 43 bp, Artificial Sequence
  primer
gtaaaacgacggccagtcagtagggattgaacaatgtatcttc

SEQ ID NO: 52725 - DNA, 20 bp, Artificial Sequence
  primer
atatctgggaccaaggcacc

SEQ ID NO: 52726 - DNA, 40 bp, Artificial Sequence
  primer
gtaaaacgacggccagtgaaagcgtgatagacatgtttgg

SEQ ID NO: 52727 - DNA, 27 bp, Artificial Sequence
  primer
tgtttcttattaaccaataacgactcc

SEQ ID NO: 52728 - DNA, 24 bp, Artificial Sequence
  primer
cgccatattgctgtatgaatttag

SEQ ID NO: 52729 - DNA, 21 bp, Artificial Sequence
  primer
tgccagtacgcttcttcattg

SEQ ID NO: 52730 - DNA, 38 bp, Artificial Sequence
  primer
gtaaaacgacggccagttctcctttggtgggtacatcc

SEQ ID NO: 52731 - DNA, 24 bp, Artificial Sequence
  primer
cccgttctgtactaatgtttcagc

SEQ ID NO: 52732 - DNA, 38 bp, Artificial Sequence
  primer
gtaaaacgacggccagtcatgggaaggagccagtaatc

SEQ ID NO: 52733 - DNA, 21 bp, Artificial Sequence
  primer
gttggttggtaaccctgatgc

SEQ ID NO: 52734 - DNA, 34 bp, Artificial Sequence
  primer
gtaaaacgacggccagtggactttgcaggcagcg

SEQ ID NO: 52735 - DNA, 39 bp, Artificial Sequence
  primer
gtaaaacgacggccagttctccctcagtcacacactcag

SEQ ID NO: 52736 - DNA, 35 bp, Artificial Sequence
  primer
gtaaaacgacggccagtgaaggagctggctgtccc

SEQ ID NO: 52737 - DNA, 38 bp, Artificial Sequence
  primer
gtaaaacgacggccagtaggcaacagcagactctgtcc

SEQ ID NO: 52738 - DNA, 38 bp, Artificial Sequence
  primer
gtaaaacgacggccagttttgagtgggtaggaggttgg

SEQ ID NO: 52739 - DNA, 38 bp, Artificial Sequence
  primer
gtaaaacgacggccagtctcttcggaggtgagatctgg

SEQ ID NO: 52740 - DNA, 20 bp, Artificial Sequence
  primer
aggtgggtgatgggtaggtg

SEQ ID NO: 52741 - DNA, 18 bp, Artificial Sequence
  primer
aagcgctgctctctgctc

SEQ ID NO: 52742 - DNA, 21 bp, Artificial Sequence
  primer
aggactggcggtaaactgagg

SEQ ID NO: 52743 - DNA, 38 bp, Artificial Sequence
  primer
gtaaaacgacggccagtctaggtcaatggacgagggtc

SEQ ID NO: 52744 - DNA, 21 bp, Artificial Sequence
  primer
gaccactgatttccacaaccc

SEQ ID NO: 52745 - DNA, 38 bp, Artificial Sequence
  primer
gtaaaacgacggccagtgcttaggagaggtgggtgaag

SEQ ID NO: 52746 - DNA, 37 bp, Artificial Sequence
  primer
gtaaaacgacggccagtgagttggtctcagtgccagc

SEQ ID NO: 52747 - DNA, 21 bp, Artificial Sequence
  primer
ccagagaaccggaagtctgtc

SEQ ID NO: 52748 - DNA, 38 bp, Artificial Sequence
  primer
gtaaaacgacggccagtagacttggaaactccgactgc

SEQ ID NO: 52749 - DNA, 21 bp, Artificial Sequence
  primer
gatgagaaagggaatccagcc

SEQ ID NO: 52750 - DNA, 22 bp, Artificial Sequence
  primer
aatcctggctctagggaatgac

SEQ ID NO: 52751 - DNA, 21 bp, Artificial Sequence
  primer
ttgcttgactgcaaagacacc

SEQ ID NO: 52752 - DNA, 40 bp, Artificial Sequence
  primer
gtaaaacgacggccagttttacccaaaggatcatttctcc

SEQ ID NO: 52753 - DNA, 38 bp, Artificial Sequence; identical to SEQ ID NO: 18221
  primer

SEQ ID NO: 52754 - DNA, 37 bp, Artificial Sequence
  primer
gtaaaacgacggccagtccttaggctgtggtttgctg

SEQ ID NO: 52755 - DNA, 39 bp, Artificial Sequence
  primer
gtaaaacgacggccagtcgtctcattgtcattatttgcg

SEQ ID NO: 52756 - DNA, 37 bp, Artificial Sequence
  primer
gtaaaacgacggccagtacggaagcggaagcagtaac

SEQ ID NO: 52757 - DNA, 21 bp, Artificial Sequence
  primer
tccagattactcccttcccag

SEQ ID NO: 52758 - DNA, 38 bp, Artificial Sequence
  primer
gtaaaacgacggccagtagcatccagtggaagtgagtg

SEQ ID NO: 52759 - DNA, 21 bp, Artificial Sequence
  primer
cccttccactcttagcctgtg

SEQ ID NO: 52760 - DNA, 38 bp, Artificial Sequence
  primer
gtaaaacgacggccagtaggcccactgtctagttcctc

SEQ ID NO: 52761 - DNA, 36 bp, Artificial Sequence
  primer
gtaaaacgacggccagtacactgtggtcctgacccg

SEQ ID NO: 52762 - DNA, 37 bp, Artificial Sequence
  primer
gtaaaacgacggccagtgttccagcacagccagtttc

SEQ ID NO: 52763 - DNA, 21 bp, Artificial Sequence
  primer
ggtttagcaagtgaggccaac

SEQ ID NO: 52764 - DNA, 38 bp, Artificial Sequence
  primer
gtaaaacgacggccagttgttgtggcgcttatggtaac

SEQ ID NO: 52765 - DNA, 38 bp, Artificial Sequence
  primer
gtaaaacgacggccagtgatgtcctcagaaggtgggtg

SEQ ID NO: 52766 - DNA, 35 bp, Artificial Sequence
  primer
gtaaaacgacggccagtacccgcactaccgctctc

SEQ ID NO: 52767 - DNA, 39 bp, Artificial Sequence
  primer
gtaaaacgacggccagtgaacatgctcagctattgtccc

SEQ ID NO: 52768 - DNA, 21 bp, Artificial Sequence
  primer
gtacccagtcaccaaccagtc

SEQ ID NO: 52769 - DNA, 22 bp, Artificial Sequence
  primer
aaaggatgggaactcctttgtc

SEQ ID NO: 52770 - DNA, 41 bp, Artificial Sequence
  primer
gtaaaacgacggccagttctatgcagtaggttgtgtatccc

SEQ ID NO: 52771 - DNA, 40 bp, Artificial Sequence
  primer
gtaaaacgacggccagtagtccctaatagctttgcctgtc

SEQ ID NO: 52772 - DNA, 38 bp, Artificial Sequence
  primer
gtaaaacgacggccagtatgtgcatgtcagtcaagctg

SEQ ID NO: 52773 - DNA, 26 bp, Artificial Sequence
  primer
acacaagactttaatttggaatgatg

SEQ ID NO: 52774 - DNA, 18 bp, Artificial Sequence
  primer
ttaggtgctgggcccttg

SEQ ID NO: 52775 - DNA, 22 bp, Artificial Sequence
  primer
tcacttacacactggccacttc

SEQ ID NO: 52776 - DNA, 38 bp, Artificial Sequence
  primer
gtaaaacgacggccagtaaatgcccaggatgtgcttag

SEQ ID NO: 52777 - DNA, 23 bp, Artificial Sequence
  primer
ttcaagtcttagtgaatggtggg

SEQ ID NO: 52778 - DNA, 36 bp, Artificial Sequence
  primer
gtaaaacgacggccagtctggccattgccatttctc

SEQ ID NO: 52779 - DNA, 38 bp, Artificial Sequence
  primer
gtaaaacgacggccagtcaggccctcaaggaacttctc

SEQ ID NO: 52780 - DNA, 38 bp, Artificial Sequence
  primer
gtaaaacgacggccagtaagggtgatctttccatctgc

SEQ ID NO: 52781 - DNA, 38 bp, Artificial Sequence
  primer
gtaaaacgacggccagtgaggtttatatggcagccgag

SEQ ID NO: 52782 - DNA, 26 bp, Artificial Sequence
  primer
tccattacaattataggttcaaagcc

SEQ ID NO: 52783 - DNA, 18 bp, Artificial Sequence
  primer
tctccctgtgttgcccag

SEQ ID NO: 52784 - DNA, 38 bp, Artificial Sequence
  primer
gtaaaacgacggccagtctcattcttgatttggcatgg

SEQ ID NO: 52785 - DNA, 37 bp, Artificial Sequence
  primer
gtaaaacgacggccagtctgctgtggagagcctgaag

SEQ ID NO: 52786 - DNA, 18 bp, Artificial Sequence
  primer
agtgagctgggatcgtgc

SEQ ID NO: 52787 - DNA, 38 bp, Artificial Sequence
  primer
gtaaaacgacggccagtgccttctcagtttgggttcag

SEQ ID NO: 52788 - DNA, 20 bp, Artificial Sequence
  primer
cgtctttcagtgtcccttgc

SEQ ID NO: 52789 - DNA, 21 bp, Artificial Sequence
  primer
aagggctgcctttctactcag

SEQ ID NO: 52790 - DNA, 40 bp, Artificial Sequence
  primer
gtaaaacgacggccagtggagacagacacattaaacaggc

SEQ ID NO: 52791 - DNA, 38 bp, Artificial Sequence
  primer
gtaaaacgacggccagtctttaaggccacaccgctatc

SEQ ID NO: 52792 - DNA, 21 bp, Artificial Sequence
  primer
tgcagacctgcagaggatagg

SEQ ID NO: 52793 - DNA, 38 bp, Artificial Sequence
  primer
gtaaaacgacggccagtgagcaccacaagtcacacctc

SEQ ID NO: 52794 - DNA, 36 bp, Artificial Sequence
  primer
gtaaaacgacggccagttgtgttgagggctcagtgc

SEQ ID NO: 52795 - DNA, 21 bp, Artificial Sequence
  primer
aagaccttcaagacggtgagc

SEQ ID NO: 52796 - DNA, 19 bp, Artificial Sequence
  primer
accaagggctcactcatcc

SEQ ID NO: 52797 - DNA, 21 bp, Artificial Sequence
  primer
gtggttgtcagcaaagaggac

SEQ ID NO: 52798 - DNA, 19 bp, Artificial Sequence
  primer
cttcccacagggagagcag

SEQ ID NO: 52799 - DNA, 38 bp, Artificial Sequence
  primer
gtaaaacgacggccagttctgtttactgccttccctgg

SEQ ID NO: 52800 - DNA, 20 bp, Artificial Sequence
  primer
catagacagcagggagccag

SEQ ID NO: 52801 - DNA, 20 bp, Artificial Sequence
  primer
accatgctcagtcttgaccc

SEQ ID NO: 52802 - DNA, 38 bp, Artificial Sequence
  primer
gtaaaacgacggccagtgttcaagtgctacaagtgcgg

SEQ ID NO: 52803 - DNA, 38 bp, Artificial Sequence
  primer
gtaaaacgacggccagtatatcatcgaggtgggtgtgg

SEQ ID NO: 52804 - DNA, 19 bp, Artificial Sequence
  primer
gatgcggagaccagtgagg

SEQ ID NO: 52805 - DNA, 38 bp, Artificial Sequence
  primer
gtaaaacgacggccagtgctctccttgtcttccagagc

SEQ ID NO: 52806 - DNA, 38 bp, Artificial Sequence
  primer
gtaaaacgacggccagttcttaaatggagatgcccagg

SEQ ID NO: 52807 - DNA, 41 bp, Artificial Sequence
  primer
gtaaaacgacggccagtaagatttcatcaggtggagtcatc

SEQ ID NO: 52808 - DNA, 38 bp, Artificial Sequence
  primer
gtaaaacgacggccagtgtggtctggaaagaacatggg

SEQ ID NO: 52809 - DNA, 38 bp, Artificial Sequence
  primer
gtaaaacgacggccagtattgtgtctctggaaacaggc

SEQ ID NO: 52810 - DNA, 25 bp, Artificial Sequence
  primer
tctcctttgctctaccctaatatgc

SEQ ID NO: 52811 - DNA, 38 bp, Artificial Sequence
  primer
gtaaaacgacggccagtaatcagaacgtgagacgctcc

SEQ ID NO: 52812 - DNA, 39 bp, Artificial Sequence
  primer
gtaaaacgacggccagtcaggattctatggaagcatgag

SEQ ID NO: 52813 - DNA, 39 bp, Artificial Sequence
  primer
gtaaaacgacggccagtccagaatcaagatttcaaaggc

SEQ ID NO: 52814 - DNA, 37 bp, Artificial Sequence
  primer
gtaaaacgacggccagtacttcagcctcccaatatgc

SEQ ID NO: 52815 - DNA, 24 bp, Artificial Sequence
  primer
ttgaagtatggcttgatggtagaa

SEQ ID NO: 52816 - DNA, 38 bp, Artificial Sequence
  primer
gtaaaacgacggccagtgtaaacagaatcacgcttggg

SEQ ID NO: 52817 - DNA, 21 bp, Artificial Sequence
  primer
aggaactggagacactcagcc

SEQ ID NO: 52818 - DNA, 18 bp, Artificial Sequence
  primer
agggttcacgccgttctc

SEQ ID NO: 52819 - DNA, 38 bp, Artificial Sequence
  primer
gtaaaacgacggccagtgttatttcagcctttgccctg

SEQ ID NO: 52820 - DNA, 38 bp, Artificial Sequence
  primer
gtaaaacgacggccagtcctgagtagcagatggagcag

SEQ ID NO: 52821 - DNA, 21 bp, Artificial Sequence
  primer
aggccactggaattgtaatga

SEQ ID NO: 52822 - DNA, 21 bp, Artificial Sequence
  primer
tggcagttgtgcagtcttcta

SEQ ID NO: 52823 - DNA, 21 bp, Artificial Sequence
  primer
acccaccaacctacctctgtc

SEQ ID NO: 52824 - DNA, 38 bp, Artificial Sequence
  primer
gtaaaacgacggccagtgggttgcttacctaccctttg

SEQ ID NO: 52825 - DNA, 21 bp, Artificial Sequence
  primer
gggaaatagccctttctctgg

SEQ ID NO: 52826 - DNA, 36 bp, Artificial Sequence
  primer
gtaaaacgacggccagtcgtgagccaatgtgtcctg

SEQ ID NO: 52827 - DNA, 40 bp, Artificial Sequence
  primer
gtaaaacgacggccagtaggacattgtactaatgccaacc

SEQ ID NO: 52828 - DNA, 38 bp, Artificial Sequence
  primer
gtaaaacgacggccagtgttagcaaggaagaagcgtgg

SEQ ID NO: 52829 - DNA, 21 bp, Artificial Sequence
  primer
atggctggaataggcatgaag

SEQ ID NO: 52830 - DNA, 21 bp, Artificial Sequence
  primer
ccagctacttggaagacaggc

SEQ ID NO: 52831 - DNA, 21 bp, Artificial Sequence
  primer
ttcttctagcttgcgaaaggg

SEQ ID NO: 52832 - DNA, 38 bp, Artificial Sequence
  primer
gtaaaacgacggccagttactgggtgcctcaattcctc

SEQ ID NO: 52833 - DNA, 38 bp, Artificial Sequence
  primer
gtaaaacgacggccagtcaggcttgaacattggttgtg

SEQ ID NO: 52834 - DNA, 37 bp, Artificial Sequence
  primer
gtaaaacgacggccagtggcctgggaataatttctgc

SEQ ID NO: 52835 - DNA, 23 bp, Artificial Sequence
  primer
tttcaggacaggagtatgacttt

SEQ ID NO: 52836 - DNA, 44 bp, Artificial Sequence
  primer
gtaaaacgacggccagttttgtttataattctgagtcctaagcc

SEQ ID NO: 52837 - DNA, 27 bp, Artificial Sequence
  primer
tttgatctgtgatatgaaatgtatgtt

SEQ ID NO: 52838 - DNA, 23 bp, Artificial Sequence
  primer
tgatttgtacaacaattccctgg

SEQ ID NO: 52839 - DNA, 21 bp, Artificial Sequence
  primer
ggacagggtaaggaagctgag

SEQ ID NO: 52840 - DNA, 27 bp, Artificial Sequence
  primer
cttctatttcacaagtcacgttctaag

SEQ ID NO: 52841 - DNA, 21 bp, Artificial Sequence
  primer
agtgcgagttcatcgtctgag

SEQ ID NO: 52842 - DNA, 38 bp, Artificial Sequence
  primer
gtaaaacgacggccagtggttcgagtgtgtgtacaggg

SEQ ID NO: 52843 - DNA, 21 bp, Artificial Sequence
  primer
acaatttctgctgctaccgtg

SEQ ID NO: 52844 - DNA, 21 bp, Artificial Sequence
  primer
gagttccaatcagccttggag

SEQ ID NO: 52845 - DNA, 38 bp, Artificial Sequence
  primer
gtaaaacgacggccagtatgtctttggctcctcaaagc

SEQ ID NO: 52846 - DNA, 38 bp, Artificial Sequence
  primer
gtaaaacgacggccagtaatttgagccttctgtctgcc

SEQ ID NO: 52847 - DNA, 38 bp, Artificial Sequence
  primer
gtaaaacgacggccagtagagaatcgaatgcacaaccc

SEQ ID NO: 52848 - DNA, 38 bp, Artificial Sequence
  primer
gtaaaacgacggccagtcatgccaaagacccactcatc

SEQ ID NO: 52849 - DNA, 20 bp, Artificial Sequence
  primer
tcaggtcctaatgtggctgg

SEQ ID NO: 52850 - DNA, 21 bp, Artificial Sequence
  primer
cagtgtctttcacgcaggttc

SEQ ID NO: 52851 - DNA, 40 bp, Artificial Sequence
  primer
gtaaaacgacggccagtgacttcctggttatttccacacc

SEQ ID NO: 52852 - DNA, 37 bp, Artificial Sequence
  primer
gtaaaacgacggccagtagtgccttggcaaagtatgg

SEQ ID NO: 52853 - DNA, 21 bp, Artificial Sequence
  primer
caggtttgtcatgagggtcac

SEQ ID NO: 52854 - DNA, 38 bp, Artificial Sequence
  primer
gtaaaacgacggccagtcatgaatcacccaatcccttc

SEQ ID NO: 52855 - DNA, 38 bp, Artificial Sequence
  primer
gtaaaacgacggccagtgaattcagggaaggtttgtgc

SEQ ID NO: 52856 - DNA, 24 bp, Artificial Sequence
  primer
gagcaaatttgtggctaatagtcg

SEQ ID NO: 52857 - DNA, 35 bp, Artificial Sequence
  primer
gtaaaacgacggccagttggtgtatgtcgcgcctg

SEQ ID NO: 52858 - DNA, 36 bp, Artificial Sequence
  primer
gtaaaacgacggccagtacgaccatgaaggaggagc

SEQ ID NO: 52859 - DNA, 38 bp, Artificial Sequence
  primer
gtaaaacgacggccagtctaggaatcctgccatgtgtg

SEQ ID NO: 52860 - DNA, 21 bp, Artificial Sequence
  primer
ttacagacttcctgtgctccg

SEQ ID NO: 52861 - DNA, 21 bp, Artificial Sequence
  primer
taagtttagccgcagaacacg

SEQ ID NO: 52862 - DNA, 21 bp, Artificial Sequence
  primer
agagcctcttctcaatgtcgc

SEQ ID NO: 52863 - DNA, 38 bp, Artificial Sequence
  primer
gtaaaacgacggccagttgaaatttccttgtgctctgc

SEQ ID NO: 52864 - DNA, 21 bp, Artificial Sequence
  primer
aacatgctgatctacggttgc

SEQ ID NO: 52865 - DNA, 38 bp, Artificial Sequence
  primer
gtaaaacgacggccagtaagacgatggtccaatttgtg

SEQ ID NO: 52866 - DNA, 39 bp, Artificial Sequence
  primer
gtaaaacgacggccagtccttagagagcatcagagcagg

SEQ ID NO: 52867 - DNA, 38 bp, Artificial Sequence
  primer
gtaaaacgacggccagtggaactggtactgaagggcag

SEQ ID NO: 52868 - DNA, 38 bp, Artificial Sequence
  primer
gtaaaacgacggccagtggaagctctttgcccattaag

SEQ ID NO: 52869 - DNA, 21 bp, Artificial Sequence
  primer
gcacagggtcaattagcaatg

SEQ ID NO: 52870 - DNA, 22 bp, Artificial Sequence
  primer
tcaccctcccttcaaactgtag

SEQ ID NO: 52871 - DNA, 38 bp, Artificial Sequence
  primer
gtaaaacgacggccagtaccagcctcccagttgaatag

SEQ ID NO: 52872 - DNA, 38 bp, Artificial Sequence
  primer
gtaaaacgacggccagtttctgtttcctttgccagagc

SEQ ID NO: 52873 - DNA, 21 bp, Artificial Sequence
  primer
ctagacacctggaccaccacc

SEQ ID NO: 52874 - DNA, 21 bp, Artificial Sequence
  primer
atcggagatgccttgtgtagg

SEQ ID NO: 52875 - DNA, 38 bp, Artificial Sequence
  primer
gtaaaacgacggccagtgctcagacactcccactcctc

SEQ ID NO: 52876 - DNA, 21 bp, Artificial Sequence
  primer
agccaaagacattcgttccag

SEQ ID NO: 52877 - DNA, 38 bp, Artificial Sequence
  primer
gtaaaacgacggccagtgtcagacctgaaggaagtcgg

SEQ ID NO: 52878 - DNA, 38 bp, Artificial Sequence
  primer
gtaaaacgacggccagtcgaaagcctttattaggcacc

SEQ ID NO: 52879 - DNA, 37 bp, Artificial Sequence
  primer
gtaaaacgacggccagtctgttcctgcctctccttgg

SEQ ID NO: 52880 - DNA, 38 bp, Artificial Sequence
  primer
gtaaaacgacggccagtatggtggctcacaactactcg

SEQ ID NO: 52881 - DNA, 20 bp, Artificial Sequence
  primer
ctccgttgtgtggttctgtg

SEQ ID NO: 52882 - DNA, 38 bp, Artificial Sequence
  primer
gtaaaacgacggccagtcagtagctgtgagttgctggc

SEQ ID NO: 52883 - DNA, 21 bp, Artificial Sequence
  primer
atccgatgaatcccttgtcac

SEQ ID NO: 52884 - DNA, 38 bp, Artificial Sequence
  primer
gtaaaacgacggccagtcactttgtcccttcgcctaac

SEQ ID NO: 52885 - DNA, 38 bp, Artificial Sequence
  primer
gtaaaacgacggccagtgataactcatgattggcggtg

SEQ ID NO: 52886 - DNA, 38 bp, Artificial Sequence
  primer
gtaaaacgacggccagtaatctctggcttcactctggc

SEQ ID NO: 52887 - DNA, 19 bp, Artificial Sequence
  primer
tttcactgtgcgacttggg

SEQ ID NO: 52888 - DNA, 38 bp, Artificial Sequence
  primer
gtaaaacgacggccagttgttggagagcaggatgtgac

SEQ ID NO: 52889 - DNA, 38 bp, Artificial Sequence
  primer
gtaaaacgacggccagtgaaactgagagcattgctggg

SEQ ID NO: 52890 - DNA, 38 bp, Artificial Sequence
  primer
gtaaaacgacggccagttgatgtatctagcttccgggc

SEQ ID NO: 52891 - DNA, 22 bp, Artificial Sequence
  primer
ttcggtccatttacatttctca

SEQ ID NO: 52892 - DNA, 21 bp, Artificial Sequence
  primer
gtctgtcttcttgcagggacc

SEQ ID NO: 52893 - DNA, 21 bp, Artificial Sequence
  primer
tttgcctctgtcaatggagac

SEQ ID NO: 52894 - DNA, 41 bp, Artificial Sequence
  primer
gtaaaacgacggccagtcttggaaagtgctttggaatagag

SEQ ID NO: 52895 - DNA, 35 bp, Artificial Sequence
  primer
gtaaaacgacggccagtaatcagctccgctcctcc

SEQ ID NO: 52896 - DNA, 21 bp, Artificial Sequence
  primer
ggcaatgccatgtgtctacag

SEQ ID NO: 52897 - DNA, 38 bp, Artificial Sequence
  primer
gtaaaacgacggccagttgcagagagagtggcgattac

SEQ ID NO: 52898 - DNA, 20 bp, Artificial Sequence
  primer
atgccgccattacagacaag

SEQ ID NO: 52899 - DNA, 38 bp, Artificial Sequence
  primer
gtaaaacgacggccagttgacggaagtcaacttagccc

SEQ ID NO: 52900 - DNA, 38 bp, Artificial Sequence
  primer
gtaaaacgacggccagtggagcaatcataaccctttgg

SEQ ID NO: 52901 - DNA, 21 bp, Artificial Sequence
  primer
ggcttgggtaggagtaccatc

SEQ ID NO: 52902 - DNA, 20 bp, Artificial Sequence
  primer
agatggtgtctgccaagtgc

SEQ ID NO: 52903 - DNA, 38 bp, Artificial Sequence
  primer
gtaaaacgacggccagttttgttcaggtgtgagggttg

SEQ ID NO: 52904 - DNA, 21 bp, Artificial Sequence
  primer
gagcaggtaaggatgtcctgg

SEQ ID NO: 52905 - DNA, 37 bp, Artificial Sequence
  primer
gtaaaacgacggccagtaagcccttgaaataaggccc

SEQ ID NO: 52906 - DNA, 19 bp, Artificial Sequence
  primer
ctcctccttccaccttccc

SEQ ID NO: 52907 - DNA, 21 bp, Artificial Sequence
  primer
caaattgaaccctcgttctgg

SEQ ID NO: 52908 - DNA, 37 bp, Artificial Sequence
  primer
gtaaaacgacggccagtgtcactgtgagggcctttcc

SEQ ID NO: 52909 - DNA, 35 bp, Artificial Sequence
  primer
gtaaaacgacggccagttctcggtctcgggtgtcc

SEQ ID NO: 52910 - DNA, 38 bp, Artificial Sequence
  primer
gtaaaacgacggccagtaatctgtgggaaccagaccac

SEQ ID NO: 52911 - DNA, 20 bp, Artificial Sequence
  primer
ccaaatctgtgtggtcaggg

SEQ ID NO: 52912 - DNA, 21 bp, Artificial Sequence
  primer
cagctgagaacaccaaggctc

SEQ ID NO: 52913 - DNA, 21 bp, Artificial Sequence
  primer
cgatgaagaccaatcctttcc

SEQ ID NO: 52914 - DNA, 38 bp, Artificial Sequence
  primer
gtaaaacgacggccagtgacaggcaggaatgtgtcatc

SEQ ID NO: 52915 - DNA, 18 bp, Artificial Sequence
  primer
ctccctgtgccggacttg

SEQ ID NO: 52916 - DNA, 38 bp, Artificial Sequence
  primer
gtaaaacgacggccagtgtagaagcccgtcctagagcc

SEQ ID NO: 52917 - DNA, 21 bp, Artificial Sequence
  primer
cgtgcttagggagcagtaacc

SEQ ID NO: 52918 - DNA, 38 bp, Artificial Sequence
  primer
gtaaaacgacggccagttgctacctcccagcaagaaag

SEQ ID NO: 52919 - DNA, 38 bp, Artificial Sequence
  primer
gtaaaacgacggccagttctctggccatcattgttctg

SEQ ID NO: 52920 - DNA, 37 bp, Artificial Sequence
  primer
gtaaaacgacggccagtcccttggcccagactatgag

SEQ ID NO: 52921 - DNA, 38 bp, Artificial Sequence
  primer
gtaaaacgacggccagtcttaaccatgacagcccttgg

SEQ ID NO: 52922 - DNA, 21 bp, Artificial Sequence
  primer
taatgcccttattcccgatcc

SEQ ID NO: 52923 - DNA, 39 bp, Artificial Sequence
  primer
gtaaaacgacggccagtgggtcacatacctgagcaagag

SEQ ID NO: 52924 - DNA, 37 bp, Artificial Sequence
  primer
gtaaaacgacggccagtgatgaaccgcttctcaccag

SEQ ID NO: 52925 - DNA, 38 bp, Artificial Sequence
  primer
gtaaaacgacggccagtcgagtgcacatcaagaagagg

SEQ ID NO: 52926 - DNA, 35 bp, Artificial Sequence
  primer
gtaaaacgacggccagtagcagcccttccaccttg

SEQ ID NO: 52927 - DNA, 38 bp, Artificial Sequence
  primer
gtaaaacgacggccagtaacagtgccctgagctacgag

SEQ ID NO: 52928 - DNA, 21 bp, Artificial Sequence
  primer
tggcttcaccctctggtaatc

SEQ ID NO: 52929 - DNA, 38 bp, Artificial Sequence
  primer
gtaaaacgacggccagtcttgcagagtttgcctcttcc

SEQ ID NO: 52930 - DNA, 38 bp, Artificial Sequence
  primer
gtaaaacgacggccagtaaggagagaaaccgagcaagg

SEQ ID NO: 52931 - DNA, 38 bp, Artificial Sequence
  primer
gtaaaacgacggccagtgaggccttgagagaggagatg

SEQ ID NO: 52932 - DNA, 21 bp, Artificial Sequence
  primer
cagtagcagggacctacaggg

SEQ ID NO: 52933 - DNA, 39 bp, Artificial Sequence
  primer
gtaaaacgacggccagttcaagcagaagagatattgggc

SEQ ID NO: 52934 - DNA, 21 bp, Artificial Sequence
  primer
caggctacagcatacagtggg

SEQ ID NO: 52935 - DNA, 38 bp, Artificial Sequence
  primer
gtaaaacgacggccagtagcttccacatatgcctctcg

SEQ ID NO: 52936 - DNA, 21 bp, Artificial Sequence
  primer
gtgacagagaaaggccctctg

SEQ ID NO: 52937 - DNA, 38 bp, Artificial Sequence
  primer
gtaaaacgacggccagttggtgtttccttctcatcgtc

SEQ ID NO: 52938 - DNA, 38 bp, Artificial Sequence
  primer
gtaaaacgacggccagttttggatggatgagaagaccc

SEQ ID NO: 52939 - DNA, 21 bp, Artificial Sequence
  primer
agccaaactggcgctattatc

SEQ ID NO: 52940 - DNA, 21 bp, Artificial Sequence
  primer
atacccttgcaggaggtaggg

SEQ ID NO: 52941 - DNA, 19 bp, Artificial Sequence
  primer
cttctatgcccgcaaccac

SEQ ID NO: 52942 - DNA, 38 bp, Artificial Sequence
  primer
gtaaaacgacggccagtcttgggacattgatgtagccc

SEQ ID NO: 52943 - DNA, 37 bp, Artificial Sequence
  primer
gtaaaacgacggccagtagaacattgctgacaacggg

SEQ ID NO: 52944 - DNA, 39 bp, Artificial Sequence
  primer
gtaaaacgacggccagttggctgtagctgactctaaggc

SEQ ID NO: 52945 - DNA, 38 bp, Artificial Sequence
  primer
gtaaaacgacggccagtccctcatagtccctggtttcc

SEQ ID NO: 52946 - DNA, 39 bp, Artificial Sequence
  primer
gtaaaacgacggccagtcgatgagttccaagaggtcaag

SEQ ID NO: 52947 - DNA, 21 bp, Artificial Sequence
  primer
cccatgccaggacttctactc

SEQ ID NO: 52948 - DNA, 21 bp, Artificial Sequence
  primer
catggatgtctggttgctctc

SEQ ID NO: 52949 - DNA, 38 bp, Artificial Sequence
  primer
gtaaaacgacggccagttacctcgctcaggatgaggac

SEQ ID NO: 52950 - DNA, 38 bp, Artificial Sequence
  primer
gtaaaacgacggccagtcagcatacagggtgttcatgg

SEQ ID NO: 52951 - DNA, 22 bp, Artificial Sequence
  primer
gggactacagggtcatctctcc

SEQ ID NO: 52952 - DNA, 35 bp, Artificial Sequence
  primer
gtaaaacgacggccagtgttggcgggcacaggtag

SEQ ID NO: 52953 - DNA, 38 bp, Artificial Sequence
  primer
gtaaaacgacggccagtaaagtggtgcttaaaggcagg

SEQ ID NO: 52954 - DNA, 21 bp, Artificial Sequence
  primer
ctagtgctcccttccttggtg

SEQ ID NO: 52955 - DNA, 38 bp, Artificial Sequence
  primer
gtaaaacgacggccagtgacaaggagtatgaggtgggc

SEQ ID NO: 52956 - DNA, 21 bp, Artificial Sequence
  primer
ctcacagccatgcagatatgg

SEQ ID NO: 52957 - DNA, 22 bp, Artificial Sequence
  primer
ggaagctgtgatgtgagggtag

SEQ ID NO: 52958 - DNA, 21 bp, Artificial Sequence
  primer
ttcacatagcgcatgaggaag

SEQ ID NO: 52959 - DNA, 36 bp, Artificial Sequence
  primer
gtaaaacgacggccagtaggacaggcagtggagagg

SEQ ID NO: 52960 - DNA, 21 bp, Artificial Sequence
  primer
gggaggaaagagtagggttgg

SEQ ID NO: 52961 - DNA, 21 bp, Artificial Sequence
  primer
gggagggctacctagatggag

SEQ ID NO: 52962 - DNA, 21 bp, Artificial Sequence
  primer
gtcagaggtgatggtcctgtg

SEQ ID NO: 52963 - DNA, 21 bp, Artificial Sequence
  primer
ttgtccactccttgtgtttgg

SEQ ID NO: 52964 - DNA, 38 bp, Artificial Sequence
  primer
gtaaaacgacggccagttacctgggatatggtcgatgc

SEQ ID NO: 52965 - DNA, 38 bp, Artificial Sequence
  primer
gtaaaacgacggccagtgcataaggatggagagtgtgc

SEQ ID NO: 52966 - DNA, 37 bp, Artificial Sequence
  primer
gtaaaacgacggccagtaagtggccaagcaacatctg

SEQ ID NO: 52967 - DNA, 38 bp, Artificial Sequence
  primer
gtaaaacgacggccagtctctggaatcagaggaggcag

SEQ ID NO: 52968 - DNA, 36 bp, Artificial Sequence
  primer
gtaaaacgacggccagtaggagcacgtggctcagac

SEQ ID NO: 52969 - DNA, 37 bp, Artificial Sequence
  primer
gtaaaacgacggccagtgagagactttgggtccctgg

SEQ ID NO: 52970 - DNA, 21 bp, Artificial Sequence
  primer
caaggacaggtaccaacctcc

SEQ ID NO: 52971 - DNA, 21 bp, Artificial Sequence
  primer
gaaattgtgccaactgcactc

SEQ ID NO: 52972 - DNA, 38 bp, Artificial Sequence
  primer
gtaaaacgacggccagtcctgatactcaacccaccagg

SEQ ID NO: 52973 - DNA, 36 bp, Artificial Sequence
  primer
gtaaaacgacggccagtggctggagttcgaccaaga

SEQ ID NO: 52974 - DNA, 18 bp, Artificial Sequence
  primer
ccctgtgctcgggaagtc

SEQ ID NO: 52975 - DNA, 18 bp, Artificial Sequence
  primer
gacgtgggtcagaggctg

SEQ ID NO: 52976 - DNA, 37 bp, Artificial Sequence
  primer
gtaaaacgacggccagtgcccttagtaaagatggcgg

SEQ ID NO: 52977 - DNA, 41 bp, Artificial Sequence
  primer
gtaaaacgacggccagtgctgttatagcagatgtaggacgg

SEQ ID NO: 52978 - DNA, 20 bp, Artificial Sequence
  primer
gtctgacctgcagatcctgg

SEQ ID NO: 52979 - DNA, 21 bp, Artificial Sequence
  primer
aatccctcaccaagtcctgtg

SEQ ID NO: 52980 - DNA, 38 bp, Artificial Sequence
  primer
gtaaaacgacggccagttggtacctccgtgacatcatc

SEQ ID NO: 52981 - DNA, 37 bp, Artificial Sequence
  primer
gtaaaacgacggccagtagtctgcggctatcctcctg

SEQ ID NO: 52982 - DNA, 38 bp, Artificial Sequence
  primer
gtaaaacgacggccagttttcatggacgttgacattgc

SEQ ID NO: 52983 - DNA, 36 bp, Artificial Sequence
  primer
gtaaaacgacggccagtcaaggtcatcgggaaccag

SEQ ID NO: 52984 - DNA, 20 bp, Artificial Sequence
  primer
cacttcttcatctgcgggag

SEQ ID NO: 52985 - DNA, 21 bp, Artificial Sequence
  primer
atcacagccctcctctaaccc

SEQ ID NO: 52986 - DNA, 38 bp, Artificial Sequence
  primer
gtaaaacgacggccagtcaactcaacagaagggtccat

SEQ ID NO: 52987 - DNA, 20 bp, Artificial Sequence
  primer
gccagtgcagtaggcatttg

SEQ ID NO: 52988 - DNA, 40 bp, Artificial Sequence
  primer
gtaaaacgacggccagtcaagcttctgctatcctttgatg

SEQ ID NO: 52989 - DNA, 38 bp, Artificial Sequence
  primer
gtaaaacgacggccagtcaaatcacacagaggagctgg

SEQ ID NO: 52990 - DNA, 38 bp, Artificial Sequence
  primer
gtaaaacgacggccagttctggtcatctagggcagagg

SEQ ID NO: 52991 - DNA, 38 bp, Artificial Sequence
  primer
gtaaaacgacggccagttcagtgaggtaagaaagggcg

SEQ ID NO: 52992 - DNA, 38 bp, Artificial Sequence
  primer
gtaaaacgacggccagtggttcctggtgtttctccttc

SEQ ID NO: 52993 - DNA, 38 bp, Artificial Sequence
  primer
gtaaaacgacggccagtcaaaggcagagtctggagagg

SEQ ID NO: 52994 - DNA, 37 bp, Artificial Sequence
  primer
gtaaaacgacggccagtagtcttggctgagtcccagg

SEQ ID NO: 52995 - DNA, 38 bp, Artificial Sequence
  primer
gtaaaacgacggccagtcagggatcagagtctggcttc

SEQ ID NO: 52996 - DNA, 38 bp, Artificial Sequence
  primer
gtaaaacgacggccagtgtctgtaggcaatagggtggg

SEQ ID NO: 52997 - DNA, 21 bp, Artificial Sequence
  primer
cacggaggcttatacctttgc

SEQ ID NO: 52998 - DNA, 37 bp, Artificial Sequence
  primer
gtaaaacgacggccagtgagttccgtcgagttccgtc

SEQ ID NO: 52999 - DNA, 22 bp, Artificial Sequence
  primer
cctctaaattggcactaagccc

SEQ ID NO: 53000 - DNA, 38 bp, Artificial Sequence
  primer
gtaaaacgacggccagtgaagggaactaactgcccaac

SEQ ID NO: 53001 - DNA, 21 bp, Artificial Sequence
  primer
tggtagcccatgcctgtagtc

SEQ ID NO: 53002 - DNA, 36 bp, Artificial Sequence
  primer
gtaaaacgacggccagtagcaggtcattgagccgag

SEQ ID NO: 53003 - DNA, 18 bp, Artificial Sequence
  primer
agcgacccgctcactctg

SEQ ID NO: 53004 - DNA, 20 bp, Artificial Sequence
  primer
gggtcacactgtatccaccg

SEQ ID NO: 53005 - DNA, 21 bp, Artificial Sequence
  primer
tctggtgtgctctgaagttcc

SEQ ID NO: 53006 - DNA, 20 bp, Artificial Sequence
  primer
ttacaggatgtttgccagcc

SEQ ID NO: 53007 - DNA, 39 bp, Artificial Sequence
  primer
gtaaaacgacggccagtggacctagtctcagggcctatc

SEQ ID NO: 53008 - DNA, 37 bp, Artificial Sequence
  primer
gtaaaacgacggccagtcactcagcactcaggaaggg

SEQ ID NO: 53009 - DNA, 38 bp, Artificial Sequence
  primer
gtaaaacgacggccagtagttgtgcatgggtcagtgag

SEQ ID NO: 53010 - DNA, 21 bp, Artificial Sequence
  primer
gactggtagagagaggccgtg

SEQ ID NO: 53011 - DNA, 38 bp, Artificial Sequence
  primer
gtaaaacgacggccagtaagaagagctggtcctgaagc

SEQ ID NO: 53012 - DNA, 38 bp, Artificial Sequence
  primer
gtaaaacgacggccagtgcatctcgtgtcttgcttgtc

SEQ ID NO: 53013 - DNA, 20 bp, Artificial Sequence
  primer
gcttcacggctacaggacag

SEQ ID NO: 53014 - DNA, 38 bp, Artificial Sequence
  primer
gtaaaacgacggccagtctcagtgaccctccaggtttc

SEQ ID NO: 53015 - DNA, 40 bp, Artificial Sequence
  primer
gtaaaacgacggccagtcctctatcccactatggatcctg

SEQ ID NO: 53016 - DNA, 38 bp, Artificial Sequence
  primer
gtaaaacgacggccagtttctttcaatcctcccagctc

SEQ ID NO: 53017 - DNA, 38 bp, Artificial Sequence
  primer
gtaaaacgacggccagttgtgccaaacttgtggtaagg

SEQ ID NO: 53018 - DNA, 20 bp, Artificial Sequence
  primer
aatgagccgattctgtgagg

SEQ ID NO: 53019 - DNA, 21 bp, Artificial Sequence
  primer
ggacgataagggaagtcgatg

SEQ ID NO: 53020 - DNA, 39 bp, Artificial Sequence
  primer
gtaaaacgacggccagttggaaaccaaagagttctcacc

SEQ ID NO: 53021 - DNA, 39 bp, Artificial Sequence
  primer
gtaaaacgacggccagtgcagtagaagctgatgaaaggg

SEQ ID NO: 53022 - DNA, 38 bp, Artificial Sequence
  primer
gtaaaacgacggccagttgcctactgaggcatacaagc

SEQ ID NO: 53023 - DNA, 41 bp, Artificial Sequence
  primer
gtaaaacgacggccagtgcagtttgacttcacattgtgttt

SEQ ID NO: 53024 - DNA, 38 bp, Artificial Sequence
  primer
gtaaaacgacggccagtattccctccttagtcaccagg

SEQ ID NO: 53025 - DNA, 37 bp, Artificial Sequence
  primer
gtaaaacgacggccagttctgctacctcatccttgcg

SEQ ID NO: 53026 - DNA, 19 bp, Artificial Sequence
  primer
ctggcacaccagcaacaac

SEQ ID NO: 53027 - DNA, 24 bp, Artificial Sequence
  primer
tgagtattgctttctcctccagac

SEQ ID NO: 53028 - DNA, 40 bp, Artificial Sequence
  primer
gtaaaacgacggccagtgcctaaggaaggataggtttgtg

SEQ ID NO: 53029 - DNA, 38 bp, Artificial Sequence
  primer
gtaaaacgacggccagtaaataaaccggccatttcaca

SEQ ID NO: 53030 - DNA, 21 bp, Artificial Sequence
  primer
gcgtaacaaagtgagaccctg

SEQ ID NO: 53031 - DNA, 21 bp, Artificial Sequence
  primer
agcatcgagactggccttatc

SEQ ID NO: 53032 - DNA, 24 bp, Artificial Sequence
  primer
catttgaatctctgacgtagttgg

SEQ ID NO: 53033 - DNA, 39 bp, Artificial Sequence
  primer
gtaaaacgacggccagttccttctttctgcctttgtgag

SEQ ID NO: 53034 - DNA, 38 bp, Artificial Sequence
  primer
gtaaaacgacggccagtttctgtgaaatgcagtggagg

SEQ ID NO: 53035 - DNA, 38 bp, Artificial Sequence
  primer
gtaaaacgacggccagtccaagaggaccaagtctgagg

SEQ ID NO: 53036 - DNA, 38 bp, Artificial Sequence
  primer
gtaaaacgacggccagttgggtccttcatacactgtcg

SEQ ID NO: 53037 - DNA, 18 bp, Artificial Sequence
  primer
cagcgacgcagggataac

SEQ ID NO: 53038 - DNA, 38 bp, Artificial Sequence
  primer
gtaaaacgacggccagtcagcctgaattgtttgtcctg

SEQ ID NO: 53039 - DNA, 38 bp, Artificial Sequence
  primer
gtaaaacgacggccagtgtataacagggattcaccgca

SEQ ID NO: 53040 - DNA, 23 bp, Artificial Sequence
  primer
cggtaacagggagttactaaggg

SEQ ID NO: 53041 - DNA, 19 bp, Artificial Sequence
  primer
ttgcccaatgaccatgttt

SEQ ID NO: 53042 - DNA, 42 bp, Artificial Sequence
  primer
gtaaaacgacggccagtcctgctacaatatggtttctctttc

SEQ ID NO: 53043 - DNA, 27 bp, Artificial Sequence
  primer
ttaagccttatttagagagacagatgg

SEQ ID NO: 53044 - DNA, 38 bp, Artificial Sequence
  primer
gtaaaacgacggccagtgaaagttgaatggcaagaggg

SEQ ID NO: 53045 - DNA, 21 bp, Artificial Sequence
  primer
ggaaaggcggttgtttaactt

SEQ ID NO: 53046 - DNA, 24 bp, Artificial Sequence
  primer
tgattggaagatagtttgtctgtt

SEQ ID NO: 53047 - DNA, 44 bp, Artificial Sequence
  primer
gtaaaacgacggccagttttcaatagatagattatgccaagacc

SEQ ID NO: 53048 - DNA, 38 bp, Artificial Sequence
  primer
gtaaaacgacggccagtggcctgcttaatcacttcctg

SEQ ID NO: 53049 - DNA, 22 bp, Artificial Sequence
  primer
gatgaaagatgcactcaccttg

SEQ ID NO: 53050 - DNA, 23 bp, Artificial Sequence
  primer
gaattgcctggtagagtgtaggg

SEQ ID NO: 53051 - DNA, 38 bp, Artificial Sequence
  primer
gtaaaacgacggccagtttctggccttagcctatgaga

SEQ ID NO: 53052 - DNA, 45 bp, Artificial Sequence
  primer
gtaaaacgacggccagtatatcttgtgtctcctttatcactgtct

SEQ ID NO: 53053 - DNA, 40 bp, Artificial Sequence
  primer
gtaaaacgacggccagtccttgttgaagagaaagaatggg

SEQ ID NO: 53054 - DNA, 46 bp, Artificial Sequence
  primer
gtaaaacgacggccagtcatccactatgtcagattgtgactactaa

SEQ ID NO: 53055 - DNA, 37 bp, Artificial Sequence
  primer
gtaaaacgacggccagtagccacggagaaattccact

SEQ ID NO: 53056 - DNA, 22 bp, Artificial Sequence
  primer
agctgtatcaagatggacagca

SEQ ID NO: 53057 - DNA, 37 bp, Artificial Sequence
  primer
gtaaaacgacggccagtgctccataggcatggaaacc

SEQ ID NO: 53058 - DNA, 38 bp, Artificial Sequence
  primer
gtaaaacgacggccagttgaagtagatggatgcccagt

SEQ ID NO: 53059 - DNA, 28 bp, Artificial Sequence
  primer
ctctgcttataacaactttgtaacgaat

SEQ ID NO: 53060 - DNA, 39 bp, Artificial Sequence
  primer
gtaaaacgacggccagtgctctgagggaactaaacttgc

SEQ ID NO: 53061 - DNA, 23 bp, Artificial Sequence
  primer
gctttggtatccatgacccttac

SEQ ID NO: 53062 - DNA, 27 bp, Artificial Sequence
  primer
ttctaatcctgccacatagtacagtag

SEQ ID NO: 53063 - DNA, 28 bp, Artificial Sequence
  primer
aaagagtttagaattgtcagatgtcttg

SEQ ID NO: 53064 - DNA, 20 bp, Artificial Sequence
  primer
gcctgtcagaggtcgtgaac

SEQ ID NO: 53065 - DNA, 21 bp, Artificial Sequence
  primer
atgggctcaggctttagacac

SEQ ID NO: 53066 - DNA, 38 bp, Artificial Sequence
  primer
gtaaaacgacggccagttcaaatttgcagtgtcttggg

SEQ ID NO: 53067 - DNA, 18 bp, Artificial Sequence
  primer
attagcaggtcgcggtgg

SEQ ID NO: 53068 - DNA, 38 bp, Artificial Sequence
  primer
gtaaaacgacggccagtgctcaccaccactagctgctc

SEQ ID NO: 53069 - DNA, 38 bp, Artificial Sequence
  primer
gtaaaacgacggccagtgaaaccaggatggaaacatgg

SEQ ID NO: 53070 - DNA, 21 bp, Artificial Sequence
  primer
cctggcagctgctttacaaac

SEQ ID NO: 53071 - DNA, 21 bp, Artificial Sequence
  primer
ttctgtcaattcaccacaggg

SEQ ID NO: 53072 - DNA, 37 bp, Artificial Sequence
  primer
gtaaaacgacggccagtgttggcttcctcgtccctac

SEQ ID NO: 53073 - DNA, 38 bp, Artificial Sequence
  primer
gtaaaacgacggccagtacagtccacttgtcccacagg

SEQ ID NO: 53074 - DNA, 38 bp, Artificial Sequence
  primer
gtaaaacgacggccagttcttaggagctgctttcccag

SEQ ID NO: 53075 - DNA, 20 bp, Artificial Sequence
  primer
agcctgaggaagtccaggtc

SEQ ID NO: 53076 - DNA, 38 bp, Artificial Sequence
  primer
gtaaaacgacggccagttactcagtacccagtgcccag

SEQ ID NO: 53077 - DNA, 38 bp, Artificial Sequence
  primer
gtaaaacgacggccagtcagcttcagcttcatgtctgc

SEQ ID NO: 53078 - DNA, 38 bp, Artificial Sequence
  primer
gtaaaacgacggccagtccttcctatgtcaaccttggg

SEQ ID NO: 53079 - DNA, 38 bp, Artificial Sequence
  primer
gtaaaacgacggccagtgacaactcaggaaaccaaggc

SEQ ID NO: 53080 - DNA, 21 bp, Artificial Sequence
  primer
acagagcaggtgactgagtgg

SEQ ID NO: 53081 - DNA, 36 bp, Artificial Sequence
  primer
gtaaaacgacggccagttcagccatcactgcctcag

SEQ ID NO: 53082 - DNA, 21 bp, Artificial Sequence
  primer
cacctcagatttcagggttcc

SEQ ID NO: 53083 - DNA, 38 bp, Artificial Sequence
  primer
gtaaaacgacggccagtcatcctgaagacaaagccctc

SEQ ID NO: 53084 - DNA, 21 bp, Artificial Sequence
  primer
accatactgtgcttaccgtgg

SEQ ID NO: 53085 - DNA, 21 bp, Artificial Sequence
  primer
aaggtgcccagtaaacacctg

SEQ ID NO: 53086 - DNA, 37 bp, Artificial Sequence
  primer
gtaaaacgacggccagtgtctctggtgttgggcgtag

SEQ ID NO: 53087 - DNA, 21 bp, Artificial Sequence
  primer
ttaggtggctttctgcatgtt

SEQ ID NO: 53088 - DNA, 38 bp, Artificial Sequence
  primer
gtaaaacgacggccagtagacaaccagcgagcatcttc

SEQ ID NO: 53089 - DNA, 21 bp, Artificial Sequence
  primer
tcacccagccaatcctatttc

SEQ ID NO: 53090 - DNA, 39 bp, Artificial Sequence
  primer
gtaaaacgacggccagtaaccttgatttcattcctgtcg

SEQ ID NO: 53091 - DNA, 21 bp, Artificial Sequence
  primer
aggcagcatgtgacactgaac

SEQ ID NO: 53092 - DNA, 38 bp, Artificial Sequence
  primer
gtaaaacgacggccagtggagatgctgagttcacctcc

SEQ ID NO: 53093 - DNA, 21 bp, Artificial Sequence
  primer
taggcctcttgttgacctgtg

SEQ ID NO: 53094 - DNA, 21 bp, Artificial Sequence
  primer
ggataaagctggatccgtgtc

SEQ ID NO: 53095 - DNA, 35 bp, Artificial Sequence
  primer
gtaaaacgacggccagttgcttccctccatttggg

SEQ ID NO: 53096 - DNA, 38 bp, Artificial Sequence
  primer
gtaaaacgacggccagtttctcacctgggattaatggg

SEQ ID NO: 53097 - DNA, 25 bp, Artificial Sequence
  primer
tctggcatacagggagatataaatg

SEQ ID NO: 53098 - DNA, 21 bp, Artificial Sequence
  primer
aattgacagtgatgggcacag

SEQ ID NO: 53099 - DNA, 22 bp, Artificial Sequence
  primer
ttatgcaagcgatgattcacag

SEQ ID NO: 53100 - DNA, 20 bp, Artificial Sequence
  primer
ataaccagtgctctccagcc

SEQ ID NO: 53101 - DNA, 20 bp, Artificial Sequence
  primer
ttgagccaccacatcctgtc

SEQ ID NO: 53102 - DNA, 37 bp, Artificial Sequence
  primer
gtaaaacgacggccagtttcctcaggcgatgtcattc

SEQ ID NO: 53103 - DNA, 22 bp, Artificial Sequence
  primer
ttgcatcctgaagggtctttac

SEQ ID NO: 53104 - DNA, 38 bp, Artificial Sequence
  primer
gtaaaacgacggccagttggataccttgtaggctgtgc

SEQ ID NO: 53105 - DNA, 21 bp, Artificial Sequence
  primer
tggctgtcagcagtaaaggag

SEQ ID NO: 53106 - DNA, 24 bp, Artificial Sequence
  primer
ttctgaccttaaagatggccttag

SEQ ID NO: 53107 - DNA, 21 bp, Artificial Sequence
  primer
ctggagaaatgccagaaatgc

SEQ ID NO: 53108 - DNA, 24 bp, Artificial Sequence
  primer
aaacctaggaagcccagtactttc

SEQ ID NO: 53109 - DNA, 22 bp, Artificial Sequence
  primer
ttgaaagcatgcattgtgtacc

SEQ ID NO: 53110 - DNA, 42 bp, Artificial Sequence
  primer
gtaaaacgacggccagtaaactccaattcataaagcagtagc

SEQ ID NO: 53111 - DNA, 22 bp, Artificial Sequence
  primer
gcaaagctcagagtctgtctgg

SEQ ID NO: 53112 - DNA, 38 bp, Artificial Sequence
  primer
gtaaaacgacggccagtctgacccttcttctctcctgc

SEQ ID NO: 53113 - DNA, 39 bp, Artificial Sequence
  primer
gtaaaacgacggccagttggaatggcatgtatctgtttg

SEQ ID NO: 53114 - DNA, 27 bp, Artificial Sequence
  primer
aatctaatttggaaataaatatgcctg

SEQ ID NO: 53115 - DNA, 38 bp, Artificial Sequence
  primer
gtaaaacgacggccagtttggtaggccacctgaaattg

SEQ ID NO: 53116 - DNA, 23 bp, Artificial Sequence
  primer
ggcggaataaggaaataaatcac

SEQ ID NO: 53117 - DNA, 38 bp, Artificial Sequence
  primer
gtaaaacgacggccagttggagtgcttgcttgtaggac

SEQ ID NO: 53118 - DNA, 38 bp, Artificial Sequence
  primer
gtaaaacgacggccagtaatttgacctttggcttgcag

SEQ ID NO: 53119 - DNA, 38 bp, Artificial Sequence
  primer
gtaaaacgacggccagttgcagagcagggctagatacc

SEQ ID NO: 53120 - DNA, 40 bp, Artificial Sequence
  primer
gtaaaacgacggccagttctgttgagtgaaagaggctgtc

SEQ ID NO: 53121 - DNA, 40 bp, Artificial Sequence
  primer
gtaaaacgacggccagtttgtgtgtatgctaaggctttcc

SEQ ID NO: 53122 - DNA, 27 bp, Artificial Sequence
  primer
tcataaactgtatatttgctgtagccc

SEQ ID NO: 53123 - DNA, 21 bp, Artificial Sequence
  primer
gggctctctctggtttcagtg

SEQ ID NO: 53124 - DNA, 38 bp, Artificial Sequence
  primer
gtaaaacgacggccagtgttactctgccaaacagcagg

SEQ ID NO: 53125 - DNA, 38 bp, Artificial Sequence
  primer
gtaaaacgacggccagtaaacagccagtcctgaaggtg

SEQ ID NO: 53126 - DNA, 38 bp, Artificial Sequence
  primer
gtaaaacgacggccagtattatgtttgggtcgcaggag

SEQ ID NO: 53127 - DNA, 21 bp, Artificial Sequence
  primer
tatgtcaagcacattggcagg

SEQ ID NO: 53128 - DNA, 38 bp, Artificial Sequence
  primer
gtaaaacgacggccagtagtgtggaaatggcttcatcc

SEQ ID NO: 53129 - DNA, 24 bp, Artificial Sequence
  primer
gcatcaacacagatttgaaatgac

SEQ ID NO: 53130 - DNA, 35 bp, Artificial Sequence
  primer
gtaaaacgacggccagtcatctccgtctcggcctc

SEQ ID NO: 53131 - DNA, 38 bp, Artificial Sequence
  primer
gtaaaacgacggccagtcccacccttacgatattctgg

SEQ ID NO: 53132 - DNA, 41 bp, Artificial Sequence
  primer
gtaaaacgacggccagttgaatacaatctggcattctgttt

SEQ ID NO: 53133 - DNA, 38 bp, Artificial Sequence
  primer
gtaaaacgacggccagtgcttgggtaccacaattgacc

SEQ ID NO: 53134 - DNA, 42 bp, Artificial Sequence
  primer
gtaaaacgacggccagtcgtttacatattgacatactgctgc

SEQ ID NO: 53135 - DNA, 38 bp, Artificial Sequence
  primer
gtaaaacgacggccagtaagctgagcagcaggcttaac

SEQ ID NO: 53136 - DNA, 26 bp, Artificial Sequence
  primer
gaaattggttagatacattagcgacc

SEQ ID NO: 53137 - DNA, 25 bp, Artificial Sequence
  primer
ggttaaaggtctgttaccctaatcc

SEQ ID NO: 53138 - DNA, 38 bp, Artificial Sequence
  primer
gtaaaacgacggccagtatccatttgaagtgcctctgg

SEQ ID NO: 53139 - DNA, 21 bp, Artificial Sequence
  primer
ttgaagctccagaaagggaaa

SEQ ID NO: 53140 - DNA, 39 bp, Artificial Sequence
  primer
gtaaaacgacggccagtttgtcgggaacaagtagctatg

SEQ ID NO: 53141 - DNA, 39 bp, Artificial Sequence
  primer
gtaaaacgacggccagttgcaccttaaattccattctgc

SEQ ID NO: 53142 - DNA, 43 bp, Artificial Sequence
  primer
gtaaaacgacggccagttctgagaactccaattactttgttgt

SEQ ID NO: 53143 - DNA, 22 bp, Artificial Sequence
  primer
acaacacagatgctagggaagg

SEQ ID NO: 53144 - DNA, 43 bp, Artificial Sequence
  primer
gtaaaacgacggccagtataactgaacaacctatatgctctgg

SEQ ID NO: 53145 - DNA, 22 bp, Artificial Sequence
  primer
tgtttattccctgccaagtttc

SEQ ID NO: 53146 - DNA, 21 bp, Artificial Sequence
  primer
ttgtcagggagcctttagtcc

SEQ ID NO: 53147 - DNA, 42 bp, Artificial Sequence
  primer
gtaaaacgacggccagtttgaatgatttgagagaaccatttc

SEQ ID NO: 53148 - DNA, 21 bp, Artificial Sequence
  primer
tgctgaatagaaaggaggctg

SEQ ID NO: 53149 - DNA, 24 bp, Artificial Sequence
  primer
aagcaaatattgtcagagccaaag

SEQ ID NO: 53150 - DNA, 35 bp, Artificial Sequence
  primer
gtaaaacgacggccagttgatccacccaccttggc

SEQ ID NO: 53151 - DNA, 21 bp, Artificial Sequence
  primer
attcactatgccttccctccc

SEQ ID NO: 53152 - DNA, 41 bp, Artificial Sequence
  primer
gtaaaacgacggccagtttgtattaggaattagacgctccc

SEQ ID NO: 53153 - DNA, 40 bp, Artificial Sequence
  primer
gtaaaacgacggccagttgaggtatgaatgatccctttcc

SEQ ID NO: 53154 - DNA, 20 bp, Artificial Sequence
  primer
ggacgatgggctagttcctg

SEQ ID NO: 53155 - DNA, 36 bp, Artificial Sequence
  primer
gtaaaacgacggccagtcttctaccagcgctttccg

SEQ ID NO: 53156 - DNA, 38 bp, Artificial Sequence
  primer
gtaaaacgacggccagttgagcattctttccactctgg

SEQ ID NO: 53157 - DNA, 38 bp, Artificial Sequence
  primer
gtaaaacgacggccagtcatttaggtgacgtgactggg

SEQ ID NO: 53158 - DNA, 37 bp, Artificial Sequence
  primer
gtaaaacgacggccagttgacgtcaggcagttctgag

SEQ ID NO: 53159 - DNA, 37 bp, Artificial Sequence
  primer
gtaaaacgacggccagtaaggcagagggcagactctc

SEQ ID NO: 53160 - DNA, 38 bp, Artificial Sequence
  primer
gtaaaacgacggccagtccaaggataaaggtgctgagg

SEQ ID NO: 53161 - DNA, 38 bp, Artificial Sequence
  primer
gtaaaacgacggccagttacaatggctgcgttaggaac

SEQ ID NO: 53162 - DNA, 38 bp, Artificial Sequence
  primer
gtaaaacgacggccagtgggagggcatttatttgtctg

SEQ ID NO: 53163 - DNA, 21 bp, Artificial Sequence
  primer
tcaccatgatgtttgtcgatg

SEQ ID NO: 53164 - DNA, 38 bp, Artificial Sequence
  primer
gtaaaacgacggccagttaaatttgcaaacaacccagg

SEQ ID NO: 53165 - DNA, 38 bp, Artificial Sequence
  primer
gtaaaacgacggccagtgcccaagcaaattctactccc

SEQ ID NO: 53166 - DNA, 21 bp, Artificial Sequence
  primer
cagtgtacaggcagcttccac

SEQ ID NO: 53167 - DNA, 18 bp, Artificial Sequence
  primer
acgtccctcagacgagcc

SEQ ID NO: 53168 - DNA, 38 bp, Artificial Sequence
  primer
gtaaaacgacggccagttgctaactggctaacagcagg

SEQ ID NO: 53169 - DNA, 38 bp, Artificial Sequence
  primer
gtaaaacgacggccagtctggttaccgctttgaaatgg

SEQ ID NO: 53170 - DNA, 36 bp, Artificial Sequence
  primer
gtaaaacgacggccagtctctcactgcctctcgcac

SEQ ID NO: 53171 - DNA, 20 bp, Artificial Sequence
  primer
gagtgctcgtgtgctgagag

SEQ ID NO: 53172 - DNA, 36 bp, Artificial Sequence
  primer
gtaaaacgacggccagtaagctgctgttctcaggcg

SEQ ID NO: 53173 - DNA, 38 bp, Artificial Sequence
  primer
gtaaaacgacggccagtgaagccagtgaaggctctctc

SEQ ID NO: 53174 - DNA, 38 bp, Artificial Sequence
  primer
gtaaaacgacggccagtagacctgttggcaggagtagc

SEQ ID NO: 53175 - DNA, 21 bp, Artificial Sequence
  primer
atatcctcttctgcaccacgg

SEQ ID NO: 53176 - DNA, 21 bp, Artificial Sequence
  primer
tgcaaggtgaagacctgtgac

SEQ ID NO: 53177 - DNA, 38 bp, Artificial Sequence
  primer
gtaaaacgacggccagtttggccaatggtacttcacac

SEQ ID NO: 53178 - DNA, 41 bp, Artificial Sequence
  primer
gtaaaacgacggccagtcataatcacaagatggtatgcagg

SEQ ID NO: 53179 - DNA, 38 bp, Artificial Sequence
  primer
gtaaaacgacggccagtaccgaagtggaaagcatcttg

SEQ ID NO: 53180 - DNA, 38 bp, Artificial Sequence
  primer
gtaaaacgacggccagttgcaatcgagaggcacattac

SEQ ID NO: 53181 - DNA, 23 bp, Artificial Sequence
  primer
aaatcatttcactttatggtcgc

SEQ ID NO: 53182 - DNA, 38 bp, Artificial Sequence
  primer
gtaaaacgacggccagttttatcaatggtcgctccctc

SEQ ID NO: 53183 - DNA, 21 bp, Artificial Sequence
  primer
gcttcatcgtcttggagaacc

SEQ ID NO: 53184 - DNA, 21 bp, Artificial Sequence
  primer
gaagacgttcagcctgtctcc

SEQ ID NO: 53185 - DNA, 21 bp, Artificial Sequence
  primer
tgaccatcgtgatcctctacg

SEQ ID NO: 53186 - DNA, 38 bp, Artificial Sequence
  primer
gtaaaacgacggccagtttgagacccttgtccttcctg

SEQ ID NO: 53187 - DNA, 21 bp, Artificial Sequence
  primer
caacagtggcaaagagctcag

SEQ ID NO: 53188 - DNA, 38 bp, Artificial Sequence
  primer
gtaaaacgacggccagtctttcacttgagggctggttc

SEQ ID NO: 53189 - DNA, 38 bp, Artificial Sequence
  primer
gtaaaacgacggccagtagctctggagaccactccaac

SEQ ID NO: 53190 - DNA, 21 bp, Artificial Sequence
  primer
caggaaattgaatctcagccc

SEQ ID NO: 53191 - DNA, 38 bp, Artificial Sequence
  primer
gtaaaacgacggccagttcggcaatgtacctgtttctg

SEQ ID NO: 53192 - DNA, 21 bp, Artificial Sequence
  primer
ccactgtcctgcctctctacg

SEQ ID NO: 53193 - DNA, 20 bp, Artificial Sequence
  primer
cgtgctaggcgtctttatcg

SEQ ID NO: 53194 - DNA, 38 bp, Artificial Sequence
  primer
gtaaaacgacggccagtgggcaccttgaacataacagg

SEQ ID NO: 53195 - DNA, 21 bp, Artificial Sequence
  primer
aacatcacgctgagtgacctg

SEQ ID NO: 53196 - DNA, 21 bp, Artificial Sequence
  primer
aagcgctacatcctcttctgc

SEQ ID NO: 53197 - DNA, 20 bp, Artificial Sequence
  primer
agacggtgctgatgatcctg

SEQ ID NO: 53198 - DNA, 38 bp, Artificial Sequence
  primer
gtaaaacgacggccagtggacatttgcactgagacctg

SEQ ID NO: 53199 - DNA, 21 bp, Artificial Sequence
  primer
aatttagctgctgccgatttc

SEQ ID NO: 53200 - DNA, 21 bp, Artificial Sequence
  primer
aacatctctgcctgctcttcc

SEQ ID NO: 53201 - DNA, 21 bp, Artificial Sequence
  primer
ggctaaaggctgggagagaag

SEQ ID NO: 53202 - DNA, 21 bp, Artificial Sequence
  primer
tatcttgcctctccaacagcc

SEQ ID NO: 53203 - DNA, 38 bp, Artificial Sequence
  primer
gtaaaacgacggccagtaatctagccgtgttgttggtg

SEQ ID NO: 53204 - DNA, 20 bp, Artificial Sequence
  primer
cactgtcttgccgctctacg

SEQ ID NO: 53205 - DNA, 37 bp, Artificial Sequence
  primer
gtaaaacgacggccagtctctacgcgcgcatctactg

SEQ ID NO: 53206 - DNA, 21 bp, Artificial Sequence
  primer
gcacctgtcctgtactcctgc

SEQ ID NO: 53207 - DNA, 38 bp, Artificial Sequence
  primer
gtaaaacgacggccagtaacaaagcgctgaggaaagag

SEQ ID NO: 53208 - DNA, 21 bp, Artificial Sequence
  primer
ttgccaagggaacatccatag

SEQ ID NO: 53209 - DNA, 22 bp, Artificial Sequence
  primer
gggcttgtagttagtgtttgga

SEQ ID NO: 53210 - DNA, 21 bp, Artificial Sequence
  primer
caaacccaggccattagtctc

SEQ ID NO: 53211 - DNA, 39 bp, Artificial Sequence
  primer
gtaaaacgacggccagtcatgcctacacacacacaaagg

SEQ ID NO: 53212 - DNA, 22 bp, Artificial Sequence
  primer
aatagcatggtggtgcaaattc

SEQ ID NO: 53213 - DNA, 21 bp, Artificial Sequence
  primer
atctgcatatcgtgagaacgc

SEQ ID NO: 53214 - DNA, 42 bp, Artificial Sequence
  primer
gtaaaacgacggccagtcccaaataatgtaatctgttcttcg

SEQ ID NO: 53215 - DNA, 41 bp, Artificial Sequence
  primer
gtaaaacgacggccagttttctctttggaggaatgaatagc

SEQ ID NO: 53216 - DNA, 25 bp, Artificial Sequence
  primer
actacattaacccagtggcaatatc

SEQ ID NO: 53217 - DNA, 43 bp, Artificial Sequence
  primer
gtaaaacgacggccagtgacctatgaatgtctgcattaaacaa

SEQ ID NO: 53218 - DNA, 21 bp, Artificial Sequence
  primer
ctttgagatctgaggaacccg

SEQ ID NO: 53219 - DNA, 20 bp, Artificial Sequence
  primer
caggctgtgtgcttcatctg

SEQ ID NO: 53220 - DNA, 21 bp, Artificial Sequence
  primer
gatgctcccaagtgctatgtg

SEQ ID NO: 53221 - DNA, 21 bp, Artificial Sequence
  primer
acagcctcctgaactccttcc

SEQ ID NO: 53222 - DNA, 20 bp, Artificial Sequence
  primer
tttatcaaagagttgcggcg

SEQ ID NO: 53223 - DNA, 20 bp, Artificial Sequence
  primer
caccgaggcaatgagctatc

SEQ ID NO: 53224 - DNA, 21 bp, Artificial Sequence
  primer
ccctcgattatgcaagaggag

SEQ ID NO: 53225 - DNA, 21 bp, Artificial Sequence
  primer
acttcttgaggtcaagggctg

SEQ ID NO: 53226 - DNA, 37 bp, Artificial Sequence
  primer
gtaaaacgacggccagtgggtggaaatggatctgctc

SEQ ID NO: 53227 - DNA, 37 bp, Artificial Sequence
  primer
gtaaaacgacggccagtcagagaagcttcaacgcctg

SEQ ID NO: 53228 - DNA, 21 bp, Artificial Sequence
  primer
tttggtagaaatccacccacc

SEQ ID NO: 53229 - DNA, 21 bp, Artificial Sequence
  primer
cagttccaatcagggaacagg

SEQ ID NO: 53230 - DNA, 21 bp, Artificial Sequence
  primer
cagttccaatcagggaacagg

SEQ ID NO: 53231 - DNA, 36 bp, Artificial Sequence
  primer
gtaaaacgacggccagtaagtttatgaccgccgcag

SEQ ID NO: 53232 - DNA, 36 bp, Artificial Sequence
  primer
gtaaaacgacggccagtccctcctcaggtgtttggg

SEQ ID NO: 53233 - DNA, 39 bp, Artificial Sequence
  primer
gtaaaacgacggccagtgggttgtgaacaccagtttctg

SEQ ID NO: 53234 - DNA, 21 bp, Artificial Sequence
  primer
tttggtagaaatccacccacc

SEQ ID NO: 53235 - DNA, 21 bp, Artificial Sequence
  primer
cagttccaatcagggaacagg

SEQ ID NO: 53236 - DNA, 21 bp, Artificial Sequence
  primer
ctcaaatttgcctcaagatgg

SEQ ID NO: 53237 - DNA, 21 bp, Artificial Sequence
  primer
ctcaagatggaaaccctttgc

SEQ ID NO: 53238 - DNA, 42 bp, Artificial Sequence
  primer
gtaaaacgacggccagtaaatttagaagttgggacgcataac

SEQ ID NO: 53239 - DNA, 21 bp, Artificial Sequence
  primer
caatgaggaggaacttcccag

SEQ ID NO: 53240 - DNA, 20 bp, Artificial Sequence
  primer
ctaccagaggcacagcatgg

SEQ ID NO: 53241 - DNA, 21 bp, Artificial Sequence
  primer
gctgcccagaagcatcattag

SEQ ID NO: 53242 - DNA, 38 bp, Artificial Sequence
  primer
gtaaaacgacggccagtacccatacgaaatggcttctg

SEQ ID NO: 53243 - DNA, 38 bp, Artificial Sequence
  primer
gtaaaacgacggccagtaaggttcacttccctcgaatg

SEQ ID NO: 53244 - DNA, 21 bp, Artificial Sequence
  primer
catcaggaaggagtttcgacc

SEQ ID NO: 53245 - DNA, 21 bp, Artificial Sequence
  primer
ttctggagcaggtagcagatg

SEQ ID NO: 53246 - DNA, 38 bp, Artificial Sequence
  primer
gtaaaacgacggccagtcaatcccaacacactttcctg

SEQ ID NO: 53247 - DNA, 38 bp, Artificial Sequence
  primer
gtaaaacgacggccagttgggaatcactgtgctgagtc

SEQ ID NO: 53248 - DNA, 22 bp, Artificial Sequence
  primer
tggcctgaaagattctgtatga

SEQ ID NO: 53249 - DNA, 38 bp, Artificial Sequence
  primer
gtaaaacgacggccagtgtcacttcggttccacttcac

SEQ ID NO: 53250 - DNA, 40 bp, Artificial Sequence
  primer
gtaaaacgacggccagtcagagacaggcagagaatcattg

SEQ ID NO: 53251 - DNA, 38 bp, Artificial Sequence
  primer
gtaaaacgacggccagtagtcagaaccctggagaggag

SEQ ID NO: 53252 - DNA, 37 bp, Artificial Sequence
  primer
gtaaaacgacggccagtctagtcgttcgctcgctctc

SEQ ID NO: 53253 - DNA, 25 bp, Artificial Sequence
  primer
ggtttagattattaaatggccgatg

SEQ ID NO: 53254 - DNA, 21 bp, Artificial Sequence
  primer
cctaatggcaccattggtatg

SEQ ID NO: 53255 - DNA, 42 bp, Artificial Sequence
  primer
gtaaaacgacggccagtactagccatgatttcttaagaccag

SEQ ID NO: 53256 - DNA, 39 bp, Artificial Sequence
  primer
gtaaaacgacggccagtaagaggtccaagacctacaggc

SEQ ID NO: 53257 - DNA, 21 bp, Artificial Sequence
  primer
gctagtctgcctgctggtctc

SEQ ID NO: 53258 - DNA, 41 bp, Artificial Sequence
  primer
gtaaaacgacggccagttgatttgtaccttaagtgaagcag

SEQ ID NO: 53259 - DNA, 26 bp, Artificial Sequence
  primer
tggttatctaaggaatgtgaatttga

SEQ ID NO: 53260 - DNA, 38 bp, Artificial Sequence
  primer
gtaaaacgacggccagtgaggaagtggcttattgtggg

SEQ ID NO: 53261 - DNA, 42 bp, Artificial Sequence
  primer
gtaaaacgacggccagttggcagtataggtggtaggataaag

SEQ ID NO: 53262 - DNA, 41 bp, Artificial Sequence
  primer
gtaaaacgacggccagtccaaagattgtttgagtaattgga

SEQ ID NO: 53263 - DNA, 21 bp, Artificial Sequence
  primer
tgtttggaaagtaggtggtgc

SEQ ID NO: 53264 - DNA, 21 bp, Artificial Sequence
  primer
attacaggcatgagccactgt

SEQ ID NO: 53265 - DNA, 25 bp, Artificial Sequence
  primer
gcaggaggtcatattagagtgttag

SEQ ID NO: 53266 - DNA, 46 bp, Artificial Sequence
  primer
gtaaaacgacggccagtcataaagcactttaatattctcatggttc

SEQ ID NO: 53267 - DNA, 37 bp, Artificial Sequence
  primer
gtaaaacgacggccagtaaaggagtgtgcgttcaagc

SEQ ID NO: 53268 - DNA, 25 bp, Artificial Sequence
  primer
ctatgcaagaatttagttcatgtcg

SEQ ID NO: 53269 - DNA, 24 bp, Artificial Sequence
  primer
catgtataaagctttctgctgggt

SEQ ID NO: 53270 - DNA, 26 bp, Artificial Sequence
  primer
gtttcagaactcagtaattgtttgtg

SEQ ID NO: 53271 - DNA, 39 bp, Artificial Sequence
  primer
gtaaaacgacggccagttgtccctcctccattacttctg

SEQ ID NO: 53272 - DNA, 20 bp, Artificial Sequence
  primer
tctgtagccaacagcctcag

SEQ ID NO: 53273 - DNA, 40 bp, Artificial Sequence
  primer
gtaaaacgacggccagtccctattgaggtagaaatttggg

SEQ ID NO: 53274 - DNA, 19 bp, Artificial Sequence
  primer
tggaggctttggaattgct

SEQ ID NO: 53275 - DNA, 38 bp, Artificial Sequence
  primer
gtaaaacgacggccagtacagccaagaaccaagagagg

SEQ ID NO: 53276 - DNA, 40 bp, Artificial Sequence
  primer
gtaaaacgacggccagttggatttaaatgattgttgagca

SEQ ID NO: 53277 - DNA, 21 bp, Artificial Sequence
  primer
cgaagaagcaaattgccagta

SEQ ID NO: 53278 - DNA, 39 bp, Artificial Sequence
  primer
gtaaaacgacggccagtggagagcactactggaaaggtg

SEQ ID NO: 53279 - DNA, 24 bp, Artificial Sequence
  primer
tctggcagcaagttagaaataatc

SEQ ID NO: 53280 - DNA, 42 bp, Artificial Sequence
  primer
gtaaaacgacggccagttgtaccttcataatgtagttggtgg

SEQ ID NO: 53281 - DNA, 18 bp, Artificial Sequence
  primer
ggaaggagccaggaagcc

SEQ ID NO: 53282 - DNA, 39 bp, Artificial Sequence
  primer
gtaaaacgacggccagtttaggtcagtcagcatcttccc

SEQ ID NO: 53283 - DNA, 21 bp, Artificial Sequence
  primer
tgtgatttcagcctttggttg

SEQ ID NO: 53284 - DNA, 22 bp, Artificial Sequence
  primer
aaagattggaaatcgaaacgac

SEQ ID NO: 53285 - DNA, 21 bp, Artificial Sequence
  primer
aaccatgcccattcatttgta

SEQ ID NO: 53286 - DNA, 38 bp, Artificial Sequence
  primer
gtaaaacgacggccagttttcacctcaagtttgttggg

SEQ ID NO: 53287 - DNA, 21 bp, Artificial Sequence
  primer
gctcacaccactattgcattg

SEQ ID NO: 53288 - DNA, 41 bp, Artificial Sequence
  primer
gtaaaacgacggccagtttatggcctatttagatgaaaccc

SEQ ID NO: 53289 - DNA, 41 bp, Artificial Sequence
  primer
gtaaaacgacggccagtaggtggttggttatgtaggaacac

SEQ ID NO: 53290 - DNA, 25 bp, Artificial Sequence
  primer
gattaaccaggttctaagagctgtg

SEQ ID NO: 53291 - DNA, 38 bp, Artificial Sequence
  primer
gtaaaacgacggccagtatagccaagagcacagaggct

SEQ ID NO: 53292 - DNA, 23 bp, Artificial Sequence
  primer
tttcgtatgacttggaacatctg

SEQ ID NO: 53293 - DNA, 38 bp, Artificial Sequence; identical to SEQ ID NO: 53291
  primer

SEQ ID NO: 53294 - DNA, 21 bp, Artificial Sequence
  primer
tcaagcctcagacagtggttc

SEQ ID NO: 53295 - DNA, 38 bp, Artificial Sequence
  primer
gtaaaacgacggccagtgtggaaactgccaattaaggg

SEQ ID NO: 53296 - DNA, 21 bp, Artificial Sequence
  primer
tacagggacatctcaggttgg

SEQ ID NO: 53297 - DNA, 38 bp, Artificial Sequence
  primer
gtaaaacgacggccagtgccaagtgctaacgtaagtgg

SEQ ID NO: 53298 - DNA, 38 bp, Artificial Sequence
  primer
gtaaaacgacggccagtaaattggtggtaagttggctg

SEQ ID NO: 53299 - DNA, 38 bp, Artificial Sequence
  primer
gtaaaacgacggccagtggcttcactgctcaggtaaca

SEQ ID NO: 53300 - DNA, 21 bp, Artificial Sequence
  primer
ccacctttgggtaaggatgac

SEQ ID NO: 53301 - DNA, 36 bp, Artificial Sequence
  primer
gtaaaacgacggccagtcacagaatcactgcagccc

SEQ ID NO: 53302 - DNA, 37 bp, Artificial Sequence
  primer
gtaaaacgacggccagtctgtaacaagcagctcgcac

SEQ ID NO: 53303 - DNA, 37 bp, Artificial Sequence
  primer
gtaaaacgacggccagtgagaggcctggaagtgaggt

SEQ ID NO: 53304 - DNA, 38 bp, Artificial Sequence
  primer
gtaaaacgacggccagtagcagtactcctggaagcacc

SEQ ID NO: 53305 - DNA, 37 bp, Artificial Sequence
  primer
gtaaaacgacggccagtcaggctttgttggtttccag

SEQ ID NO: 53306 - DNA, 35 bp, Artificial Sequence
  primer
gtaaaacgacggccagtcctccagtcagcactccg

SEQ ID NO: 53307 - DNA, 19 bp, Artificial Sequence
  primer
ttcctctcttcagcgtggg

SEQ ID NO: 53308 - DNA, 21 bp, Artificial Sequence
  primer
aaagcattaaagcaaccctgc

SEQ ID NO: 53309 - DNA, 37 bp, Artificial Sequence
  primer
gtaaaacgacggccagttgacagtgtttacctgggcg

SEQ ID NO: 53310 - DNA, 21 bp, Artificial Sequence
  primer
gctgagttcgtgatggatttg

SEQ ID NO: 53311 - DNA, 41 bp, Artificial Sequence
  primer
gtaaaacgacggccagtcaaattgagatggatttgtttgtg

SEQ ID NO: 53312 - DNA, 21 bp, Artificial Sequence
  primer
catgtgagtttaggctttgcc

SEQ ID NO: 53313 - DNA, 38 bp, Artificial Sequence
  primer
gtaaaacgacggccagtcagcttcgtgtgagtgaaagg

SEQ ID NO: 53314 - DNA, 38 bp, Artificial Sequence
  primer
gtaaaacgacggccagttcatgtattgggaggcacttg

SEQ ID NO: 53315 - DNA, 38 bp, Artificial Sequence
  primer
gtaaaacgacggccagtgagaccgtgtgggaagacaag

SEQ ID NO: 53316 - DNA, 21 bp, Artificial Sequence
  primer
aacaagtcctccttcgaccag

SEQ ID NO: 53317 - DNA, 20 bp, Artificial Sequence
  primer
tctacgaggccctgtttgac

SEQ ID NO: 53318 - DNA, 38 bp, Artificial Sequence; identical to SEQ ID NO: 53313
  primer

SEQ ID NO: 53319 - DNA, 19 bp, Artificial Sequence
  primer
cctgtcgtcacagcctcag

SEQ ID NO: 53320 - DNA, 38 bp, Artificial Sequence
  primer
gtaaaacgacggccagtcttccgtgagttcctgcagtc

SEQ ID NO: 53321 - DNA, 20 bp, Artificial Sequence
  primer
gagaaccagagtctgcgtgg

SEQ ID NO: 53322 - DNA, 37 bp, Artificial Sequence
  primer
gtaaaacgacggccagtcagtcaaaggagggaggagg

SEQ ID NO: 53323 - DNA, 21 bp, Artificial Sequence
  primer
tagggtgcatgcaggtacttc

SEQ ID NO: 53324 - DNA, 38 bp, Artificial Sequence
  primer
gtaaaacgacggccagtcaagtttgaggagcacgtgag

SEQ ID NO: 53325 - DNA, 20 bp, Artificial Sequence
  primer
tctccacctgtctcacaccc

SEQ ID NO: 53326 - DNA, 21 bp, Artificial Sequence
  primer
aacacttgagggatttcgtgg

SEQ ID NO: 53327 - DNA, 21 bp, Artificial Sequence
  primer
aaatgaggtgactggcgtatt

SEQ ID NO: 53328 - DNA, 21 bp, Artificial Sequence
  primer
cagtgttcactgggctgaaac

SEQ ID NO: 53329 - DNA, 21 bp, Artificial Sequence
  primer
gccactggataccgaactgtc

SEQ ID NO: 53330 - DNA, 22 bp, Artificial Sequence
  primer
ggacttggttcaccagaggaag

SEQ ID NO: 53331 - DNA, 21 bp, Artificial Sequence
  primer
cagtttggctcctggtattgg

SEQ ID NO: 53332 - DNA, 38 bp, Artificial Sequence
  primer
gtaaaacgacggccagtgagaggataagtgtgagcggg

SEQ ID NO: 53333 - DNA, 40 bp, Artificial Sequence
  primer
gtaaaacgacggccagtgagggtgagctcagacttctagg

SEQ ID NO: 53334 - DNA, 38 bp, Artificial Sequence
  primer
gtaaaacgacggccagtaggtgagcactgggacttagg

SEQ ID NO: 53335 - DNA, 22 bp, Artificial Sequence
  primer
tcctctgttaccttgcttgctc

SEQ ID NO: 53336 - DNA, 38 bp, Artificial Sequence
  primer
gtaaaacgacggccagttgaaagcacccttcacttctc

SEQ ID NO: 53337 - DNA, 21 bp, Artificial Sequence
  primer
agaccttcatgagctgcaatc

SEQ ID NO: 53338 - DNA, 39 bp, Artificial Sequence
  primer
gtaaaacgacggccagttgacatgtgtttgagctggaag

SEQ ID NO: 53339 - DNA, 38 bp, Artificial Sequence
  primer
gtaaaacgacggccagtcgagatgcccagcttctattc

SEQ ID NO: 53340 - DNA, 37 bp, Artificial Sequence
  primer
gtaaaacgacggccagtggttcgtttggactgaacgc

SEQ ID NO: 53341 - DNA, 21 bp, Artificial Sequence
  primer
ttctgacagcatcccagactc

SEQ ID NO: 53342 - DNA, 21 bp, Artificial Sequence
  primer
tgtcaggtaagcagtgggtcc

SEQ ID NO: 53343 - DNA, 37 bp, Artificial Sequence
  primer
gtaaaacgacggccagtgaagaaagcctgcgtctgag

SEQ ID NO: 53344 - DNA, 37 bp, Artificial Sequence
  primer
gtaaaacgacggccagtgtgtgctattcacagcgtgg

SEQ ID NO: 53345 - DNA, 37 bp, Artificial Sequence
  primer
gtaaaacgacggccagtcttccaagcaggaagcagtg

SEQ ID NO: 53346 - DNA, 21 bp, Artificial Sequence
  primer
cttggcttcaagagaggaagc

SEQ ID NO: 53347 - DNA, 38 bp, Artificial Sequence
  primer
gtaaaacgacggccagtgatgacttcctgttgcccaag

SEQ ID NO: 53348 - DNA, 36 bp, Artificial Sequence
  primer
gtaaaacgacggccagtgtggaagccaccagtctgc

SEQ ID NO: 53349 - DNA, 38 bp, Artificial Sequence
  primer
gtaaaacgacggccagtggtccctagctaaagggaagc

SEQ ID NO: 53350 - DNA, 38 bp, Artificial Sequence
  primer
gtaaaacgacggccagttgattgacgtggctctaccag

SEQ ID NO: 53351 - DNA, 21 bp, Artificial Sequence
  primer
tagagggacctcatggtcctg

SEQ ID NO: 53352 - DNA, 38 bp, Artificial Sequence
  primer
gtaaaacgacggccagtcttgtggagatccaggtgagg

SEQ ID NO: 53353 - DNA, 21 bp, Artificial Sequence
  primer
aggctgaggaactagcctgag

SEQ ID NO: 53354 - DNA, 21 bp, Artificial Sequence
  primer
cttgtaggaccttcgcctctg

SEQ ID NO: 53355 - DNA, 21 bp, Artificial Sequence
  primer
gtgcctgtgagtgcagatagg

SEQ ID NO: 53356 - DNA, 38 bp, Artificial Sequence
  primer
gtaaaacgacggccagtgagtgggttggttctgaggtc

SEQ ID NO: 53357 - DNA, 38 bp, Artificial Sequence
  primer
gtaaaacgacggccagttggtgctgagacatagaaggg

SEQ ID NO: 53358 - DNA, 38 bp, Artificial Sequence
  primer
gtaaaacgacggccagtagacagggtcttgctgtcctg

SEQ ID NO: 53359 - DNA, 36 bp, Artificial Sequence
  primer
gtaaaacgacggccagtcaggcgagttcctctgagc

SEQ ID NO: 53360 - DNA, 20 bp, Artificial Sequence
  primer
acctaaggtggccacaggac

SEQ ID NO: 53361 - DNA, 38 bp, Artificial Sequence
  primer
gtaaaacgacggccagttatgtatgaggcccaccactg

SEQ ID NO: 53362 - DNA, 21 bp, Artificial Sequence
  primer
agggttagagggaacaacagg

SEQ ID NO: 53363 - DNA, 21 bp, Artificial Sequence
  primer
aactttagcctccaggtgctg

SEQ ID NO: 53364 - DNA, 21 bp, Artificial Sequence
  primer
agcagggtgttaggtaatggg

SEQ ID NO: 53365 - DNA, 38 bp, Artificial Sequence
  primer
gtaaaacgacggccagtgcagagaagggttccagtgtc

SEQ ID NO: 53366 - DNA, 38 bp, Artificial Sequence
  primer
gtaaaacgacggccagtccaggctcctgtgtagtaggg

SEQ ID NO: 53367 - DNA, 38 bp, Artificial Sequence
  primer
gtaaaacgacggccagttctcctccgctaatcacttcc

SEQ ID NO: 53368 - DNA, 38 bp, Artificial Sequence
  primer
gtaaaacgacggccagtgtagtgagatcttggcagccc

SEQ ID NO: 53369 - DNA, 37 bp, Artificial Sequence
  primer
gtaaaacgacggccagttcgtgaaccataggtggtgg

SEQ ID NO: 53370 - DNA, 38 bp, Artificial Sequence
  primer
gtaaaacgacggccagtaacgtcagggtgttcttctgg

SEQ ID NO: 53371 - DNA, 19 bp, Artificial Sequence
  primer
cctagaccacccactcgga

SEQ ID NO: 53372 - DNA, 37 bp, Artificial Sequence
  primer
gtaaaacgacggccagtactgcagtgctttgacctgg

SEQ ID NO: 53373 - DNA, 38 bp, Artificial Sequence
  primer
gtaaaacgacggccagtagaggatgctcactgcacttg

SEQ ID NO: 53374 - DNA, 20 bp, Artificial Sequence
  primer
cagccacattctctgccttc

SEQ ID NO: 53375 - DNA, 38 bp, Artificial Sequence
  primer
gtaaaacgacggccagtaggtagtcagggatttggctg

SEQ ID NO: 53376 - DNA, 38 bp, Artificial Sequence
  primer
gtaaaacgacggccagtacttcagccatgcaaggagac

SEQ ID NO: 53377 - DNA, 21 bp, Artificial Sequence
  primer
ttacagtgggccatgaaacag

SEQ ID NO: 53378 - DNA, 21 bp, Artificial Sequence
  primer
gaagggcccgttgttatagtg

SEQ ID NO: 53379 - DNA, 20 bp, Artificial Sequence
  primer
ctgattggctagggagggag

SEQ ID NO: 53380 - DNA, 21 bp, Artificial Sequence
  primer
agaggttagtggctttgccag

SEQ ID NO: 53381 - DNA, 38 bp, Artificial Sequence
  primer
gtaaaacgacggccagttggagatccctgcttcaagac

SEQ ID NO: 53382 - DNA, 38 bp, Artificial Sequence
  primer
gtaaaacgacggccagtgttgctgctcctctgaacctg

SEQ ID NO: 53383 - DNA, 38 bp, Artificial Sequence
  primer
gtaaaacgacggccagtgtccaagatctccggtgagtg

SEQ ID NO: 53384 - DNA, 21 bp, Artificial Sequence
  primer
cagtgaagtacagcacggagc

SEQ ID NO: 53385 - DNA, 37 bp, Artificial Sequence
  primer
gtaaaacgacggccagtgcagagccaggatttcacag

SEQ ID NO: 53386 - DNA, 21 bp, Artificial Sequence
  primer
acctgcttgtgaaacacctcc

SEQ ID NO: 53387 - DNA, 18 bp, Artificial Sequence
  primer
ggtctggagggacaaggc

SEQ ID NO: 53388 - DNA, 37 bp, Artificial Sequence
  primer
gtaaaacgacggccagttggagtggttgagtggttcc

SEQ ID NO: 53389 - DNA, 21 bp, Artificial Sequence
  primer
ggcaatatcggagtgatttgg

SEQ ID NO: 53390 - DNA, 38 bp, Artificial Sequence
  primer
gtaaaacgacggccagtaggaccatctctgtgagcagg

SEQ ID NO: 53391 - DNA, 37 bp, Artificial Sequence
  primer
gtaaaacgacggccagtgtgaactgtgcgtgttaggg

SEQ ID NO: 53392 - DNA, 22 bp, Artificial Sequence
  primer
cagaagatgtccttcttcgagc

SEQ ID NO: 53393 - DNA, 21 bp, Artificial Sequence
  primer
gctccatggctattaagctgg

SEQ ID NO: 53394 - DNA, 39 bp, Artificial Sequence
  primer
gtaaaacgacggccagtccctcctgaatttcttctgacc

SEQ ID NO: 53395 - DNA, 38 bp, Artificial Sequence
  primer
gtaaaacgacggccagtaaggaggctaagggcttcatc

SEQ ID NO: 53396 - DNA, 38 bp, Artificial Sequence
  primer
gtaaaacgacggccagtgagagggcaggatactcgttg

SEQ ID NO: 53397 - DNA, 38 bp, Artificial Sequence
  primer
gtaaaacgacggccagttctcctaagggtttgctgctg

SEQ ID NO: 53398 - DNA, 21 bp, Artificial Sequence
  primer
ttcgaggatgttctgatacgc

SEQ ID NO: 53399 - DNA, 37 bp, Artificial Sequence
  primer
gtaaaacgacggccagtcactgggcctcacgtatcac

SEQ ID NO: 53400 - DNA, 38 bp, Artificial Sequence
  primer
gtaaaacgacggccagtgggaaggaggatcttctaggg

SEQ ID NO: 53401 - DNA, 21 bp, Artificial Sequence
  primer
gaagtccttccttatgcctgc

SEQ ID NO: 53402 - DNA, 20 bp, Artificial Sequence
  primer
gaaggaggaggcgagagttg

SEQ ID NO: 53403 - DNA, 22 bp, Artificial Sequence
  primer
gaaagatctcaattgggaaacg

SEQ ID NO: 53404 - DNA, 38 bp, Artificial Sequence
  primer
gtaaaacgacggccagtgtacatgaacaagcgtttggg

SEQ ID NO: 53405 - DNA, 23 bp, Artificial Sequence
  primer
tctcaggaattatttgtccgaag

SEQ ID NO: 53406 - DNA, 26 bp, Artificial Sequence
  primer
tgagcagattgtcaccttatttagtc

SEQ ID NO: 53407 - DNA, 21 bp, Artificial Sequence
  primer
cccttctctccaccctctctc

SEQ ID NO: 53408 - DNA, 41 bp, Artificial Sequence
  primer
gtaaaacgacggccagtgagcatttacaagcagtcattctc

SEQ ID NO: 53409 - DNA, 39 bp, Artificial Sequence
  primer
gtaaaacgacggccagttgacactgcatctttccttcag

SEQ ID NO: 53410 - DNA, 22 bp, Artificial Sequence
  primer
ttggttcaatgttagccatgag

SEQ ID NO: 53411 - DNA, 37 bp, Artificial Sequence
  primer
gtaaaacgacggccagtaggaatgggatgggcagtag

SEQ ID NO: 53412 - DNA, 38 bp, Artificial Sequence
  primer
gtaaaacgacggccagtcatgcaggcaccttagattgt

SEQ ID NO: 53413 - DNA, 38 bp, Artificial Sequence
  primer
gtaaaacgacggccagtatcccaaactttgccatcttg

SEQ ID NO: 53414 - DNA, 39 bp, Artificial Sequence
  primer
gtaaaacgacggccagtgcctcaaatagtcaggaaatgg

SEQ ID NO: 53415 - DNA, 18 bp, Artificial Sequence
  primer
cacatacccctcccctcc

SEQ ID NO: 53416 - DNA, 21 bp, Artificial Sequence
  primer
tgcaacatccctcatcagttc

SEQ ID NO: 53417 - DNA, 38 bp, Artificial Sequence
  primer
gtaaaacgacggccagtgttctgtcagtcaggccattg

SEQ ID NO: 53418 - DNA, 38 bp, Artificial Sequence
  primer
gtaaaacgacggccagtagcaggcaggatgtgtgtttc

SEQ ID NO: 53419 - DNA, 38 bp, Artificial Sequence
  primer
gtaaaacgacggccagtcaaggagctgtgtggtaggtg

SEQ ID NO: 53420 - DNA, 38 bp, Artificial Sequence
  primer
gtaaaacgacggccagtaattcaccagcaccagctttc

SEQ ID NO: 53421 - DNA, 21 bp, Artificial Sequence
  primer
ttgcgtaataaatgcctgtgg

SEQ ID NO: 53422 - DNA, 21 bp, Artificial Sequence
  primer
agatgagcaagtttgatgccc

SEQ ID NO: 53423 - DNA, 37 bp, Artificial Sequence
  primer
gtaaaacgacggccagtcctgtaggccagagggagtc

SEQ ID NO: 53424 - DNA, 38 bp, Artificial Sequence
  primer
gtaaaacgacggccagtgggctcttgaggttctagtcc

SEQ ID NO: 53425 - DNA, 38 bp, Artificial Sequence
  primer
gtaaaacgacggccagtaggcagccgttgtgtatagtg

SEQ ID NO: 53426 - DNA, 21 bp, Artificial Sequence
  primer
aaagagaagctcactgcccac

SEQ ID NO: 53427 - DNA, 20 bp, Artificial Sequence
  primer
aatttcccttcccaggtgtg

SEQ ID NO: 53428 - DNA, 39 bp, Artificial Sequence
  primer
gtaaaacgacggccagttggaagttgagtatggtggagc

SEQ ID NO: 53429 - DNA, 21 bp, Artificial Sequence
  primer
tttagcacaaggattgttgcc

SEQ ID NO: 53430 - DNA, 21 bp, Artificial Sequence
  primer
agcaatgcactgacggatatg

SEQ ID NO: 53431 - DNA, 20 bp, Artificial Sequence
  primer
gaggatacctctgccttccg

SEQ ID NO: 53432 - DNA, 37 bp, Artificial Sequence
  primer
gtaaaacgacggccagttgagccaagaccaacatgac

SEQ ID NO: 53433 - DNA, 22 bp, Artificial Sequence
  primer
tgaatggcatgaacattgagtc

SEQ ID NO: 53434 - DNA, 21 bp, Artificial Sequence
  primer
tgttctccagtgagcttctgc

SEQ ID NO: 53435 - DNA, 25 bp, Artificial Sequence
  primer
caagtcacacagtagcaggaatagg

SEQ ID NO: 53436 - DNA, 37 bp, Artificial Sequence
  primer
gtaaaacgacggccagtccttgcaaacagaatctgcc

SEQ ID NO: 53437 - DNA, 39 bp, Artificial Sequence
  primer
gtaaaacgacggccagtcacgaaatccttgtcaagatcc

SEQ ID NO: 53438 - DNA, 38 bp, Artificial Sequence
  primer
gtaaaacgacggccagttgaaaccaagaagggaccaag

SEQ ID NO: 53439 - DNA, 38 bp, Artificial Sequence
  primer
gtaaaacgacggccagtatgtaatcatttgtgcagggc

SEQ ID NO: 53440 - DNA, 36 bp, Artificial Sequence
  primer
gtaaaacgacggccagtccggtacagggagttgagg

SEQ ID NO: 53441 - DNA, 37 bp, Artificial Sequence
  primer
gtaaaacgacggccagtaggctcaggccctagtcttg

SEQ ID NO: 53442 - DNA, 21 bp, Artificial Sequence
  primer
gccacacatctcagagaaggc

SEQ ID NO: 53443 - DNA, 21 bp, Artificial Sequence
  primer
ccaggctggtgaactcttacg

SEQ ID NO: 53444 - DNA, 38 bp, Artificial Sequence
  primer
gtaaaacgacggccagtattatgggtggtgaagccttg

SEQ ID NO: 53445 - DNA, 38 bp, Artificial Sequence
  primer
gtaaaacgacggccagtctaacaaccgctcctgtgttg

SEQ ID NO: 53446 - DNA, 38 bp, Artificial Sequence
  primer
gtaaaacgacggccagtcttgggaaatgtttgtgggac

SEQ ID NO: 53447 - DNA, 38 bp, Artificial Sequence
  primer
gtaaaacgacggccagtcctctgccaaggtacaggttg

SEQ ID NO: 53448 - DNA, 21 bp, Artificial Sequence
  primer
cctccctttgtagggtaggag

SEQ ID NO: 53449 - DNA, 21 bp, Artificial Sequence
  primer
atcgagggtgtcaaagagctg

SEQ ID NO: 53450 - DNA, 18 bp, Artificial Sequence
  primer
tcgcgagagttcccaagc

SEQ ID NO: 53451 - DNA, 38 bp, Artificial Sequence
  primer
gtaaaacgacggccagttgtcagatccaagcgtgaaag

SEQ ID NO: 53452 - DNA, 44 bp, Artificial Sequence
  primer
gtaaaacgacggccagttcatgattatggcttaaggatattagc

SEQ ID NO: 53453 - DNA, 39 bp, Artificial Sequence
  primer
gtaaaacgacggccagtcacagtgaagccctgtgtctac

SEQ ID NO: 53454 - DNA, 24 bp, Artificial Sequence
  primer
aaaccaaccatcacaacttcctta

SEQ ID NO: 53455 - DNA, 39 bp, Artificial Sequence
  primer
gtaaaacgacggccagtgccataacaccaaatatcagcc

SEQ ID NO: 53456 - DNA, 20 bp, Artificial Sequence
  primer
ggcgaaacttgcagtaagcc

SEQ ID NO: 53457 - DNA, 22 bp, Artificial Sequence
  primer
tttgttgttgttgttgttgctg

SEQ ID NO: 53458 - DNA, 37 bp, Artificial Sequence
  primer
gtaaaacgacggccagtcctgcttaccatcaggaggc

SEQ ID NO: 53459 - DNA, 38 bp, Artificial Sequence
  primer
gtaaaacgacggccagttgtgcacacagagagaaaggg

SEQ ID NO: 53460 - DNA, 37 bp, Artificial Sequence
  primer
gtaaaacgacggccagtattcgtcggcttatggtttg

SEQ ID NO: 53461 - DNA, 21 bp, Artificial Sequence
  primer
gtgctcagtctggttccactc

SEQ ID NO: 53462 - DNA, 20 bp, Artificial Sequence
  primer
cctcttccatgatcttcccg

SEQ ID NO: 53463 - DNA, 18 bp, Artificial Sequence
  primer
gctgcgaaggctcttgtg

SEQ ID NO: 53464 - DNA, 37 bp, Artificial Sequence
  primer
gtaaaacgacggccagttcacttctccaaagtgccag

SEQ ID NO: 53465 - DNA, 38 bp, Artificial Sequence
  primer
gtaaaacgacggccagtgctgtggagaaatgtttcctg

SEQ ID NO: 53466 - DNA, 38 bp, Artificial Sequence
  primer
gtaaaacgacggccagtagtggagaatttggcatggac

SEQ ID NO: 53467 - DNA, 23 bp, Artificial Sequence
  primer
tggatatctacaaaggcatgtgg

SEQ ID NO: 53468 - DNA, 23 bp, Artificial Sequence
  primer
tttctctcagtgctatgcaacaa

SEQ ID NO: 53469 - DNA, 21 bp, Artificial Sequence
  primer
tgttcttggtggatgaagctg

SEQ ID NO: 53470 - DNA, 38 bp, Artificial Sequence
  primer
gtaaaacgacggccagtagcataatgatttgcccttcc

SEQ ID NO: 53471 - DNA, 43 bp, Artificial Sequence
  primer
gtaaaacgacggccagttttcaaggttggttagatttaaagtg

SEQ ID NO: 53472 - DNA, 25 bp, Artificial Sequence
  primer
tctttgagaaatattgggtatccct

SEQ ID NO: 53473 - DNA, 41 bp, Artificial Sequence
  primer
gtaaaacgacggccagttcattctcatttacagggaggaac

SEQ ID NO: 53474 - DNA, 21 bp, Artificial Sequence
  primer
atagcaggcagcactacccag

SEQ ID NO: 53475 - DNA, 38 bp, Artificial Sequence
  primer
gtaaaacgacggccagtgattaatggaaggccatgttg

SEQ ID NO: 53476 - DNA, 35 bp, Artificial Sequence
  primer
gtaaaacgacggccagtccagccttccagcctctg

SEQ ID NO: 53477 - DNA, 37 bp, Artificial Sequence
  primer
gtaaaacgacggccagtgagcaggagagctcctttgg

SEQ ID NO: 53478 - DNA, 24 bp, Artificial Sequence
  primer
tcacagaattcctgtaactggatg

SEQ ID NO: 53479 - DNA, 40 bp, Artificial Sequence
  primer
gtaaaacgacggccagtcatgcacttaaggttgttggttg

SEQ ID NO: 53480 - DNA, 38 bp, Artificial Sequence
  primer
gtaaaacgacggccagttcccacaatcgtacagtctcc

SEQ ID NO: 53481 - DNA, 38 bp, Artificial Sequence
  primer
gtaaaacgacggccagttgttggctttgtgatctctcg

SEQ ID NO: 53482 - DNA, 40 bp, Artificial Sequence
  primer
gtaaaacgacggccagttgagaacatagtgtgcatcttgc

SEQ ID NO: 53483 - DNA, 39 bp, Artificial Sequence
  primer
gtaaaacgacggccagtcgccttatgtatatttggcagc

SEQ ID NO: 53484 - DNA, 40 bp, Artificial Sequence
  primer
gtaaaacgacggccagttcagtcattgttaatgcaagtgg

SEQ ID NO: 53485 - DNA, 23 bp, Artificial Sequence
  primer
tttctttcattcacagaggttgc

SEQ ID NO: 53486 - DNA, 39 bp, Artificial Sequence
  primer
gtaaaacgacggccagtccagcgtatttgactcctcttc

SEQ ID NO: 53487 - DNA, 21 bp, Artificial Sequence
  primer
catgccagctgtttccattag

SEQ ID NO: 53488 - DNA, 38 bp, Artificial Sequence
  primer
gtaaaacgacggccagtgtatgcacatgtgactggtgg

SEQ ID NO: 53489 - DNA, 21 bp, Artificial Sequence
  primer
agcacatgcacacacacaaat

SEQ ID NO: 53490 - DNA, 38 bp, Artificial Sequence
  primer
gtaaaacgacggccagtgtgggagttccggatgtttag

SEQ ID NO: 53491 - DNA, 22 bp, Artificial Sequence
  primer
gcccagccttaatgttggtaag

SEQ ID NO: 53492 - DNA, 38 bp, Artificial Sequence
  primer
gtaaaacgacggccagtaaatctccctgtgtggttctg

SEQ ID NO: 53493 - DNA, 20 bp, Artificial Sequence
  primer
gtgaactcctgcgtttcagg

SEQ ID NO: 53494 - DNA, 40 bp, Artificial Sequence
  primer
gtaaaacgacggccagtacataattgccaaagtagccaag

SEQ ID NO: 53495 - DNA, 21 bp, Artificial Sequence
  primer
ctggcagttgtgtgtcaagtc

SEQ ID NO: 53496 - DNA, 24 bp, Artificial Sequence
  primer
tcagcaatagtttctctgtagccc

SEQ ID NO: 53497 - DNA, 39 bp, Artificial Sequence
  primer
gtaaaacgacggccagtccctataggcatttaagttggc

SEQ ID NO: 53498 - DNA, 40 bp, Artificial Sequence
  primer
gtaaaacgacggccagtacctgtgaatttatcattggagg

SEQ ID NO: 53499 - DNA, 39 bp, Artificial Sequence
  primer
gtaaaacgacggccagtaagaactttggtcaccgagatg

SEQ ID NO: 53500 - DNA, 21 bp, Artificial Sequence
  primer
actgatttacaaaggctcggg

SEQ ID NO: 53501 - DNA, 36 bp, Artificial Sequence
  primer
gtaaaacgacggccagtcacgatccttctcgccaac

SEQ ID NO: 53502 - DNA, 43 bp, Artificial Sequence
  primer
gtaaaacgacggccagtttaagaatgtgacacaactttatgga

SEQ ID NO: 53503 - DNA, 21 bp, Artificial Sequence
  primer
attcgcatggctgatgtgtag

SEQ ID NO: 53504 - DNA, 38 bp, Artificial Sequence
  primer
gtaaaacgacggccagttgttgcgggaaagtattcagg

SEQ ID NO: 53505 - DNA, 18 bp, Artificial Sequence
  primer
agcagtcttcccgccttg

SEQ ID NO: 53506 - DNA, 37 bp, Artificial Sequence
  primer
gtaaaacgacggccagtgagtgccacctctatgccag

SEQ ID NO: 53507 - DNA, 26 bp, Artificial Sequence
  primer
tcagtaataaacatgctgaaatgtct

SEQ ID NO: 53508 - DNA, 26 bp, Artificial Sequence
  primer
tgaaccaatggtgattattaagtgag

SEQ ID NO: 53509 - DNA, 42 bp, Artificial Sequence
  primer
gtaaaacgacggccagtttcactttggacagtttatgcctac

SEQ ID NO: 53510 - DNA, 21 bp, Artificial Sequence
  primer
actcactgcctcattcttccc

SEQ ID NO: 53511 - DNA, 38 bp, Artificial Sequence
  primer
gtaaaacgacggccagtcagtgtgaagtccctttgctg

SEQ ID NO: 53512 - DNA, 21 bp, Artificial Sequence
  primer
cctgctgctcccaaattaaga

SEQ ID NO: 53513 - DNA, 21 bp, Artificial Sequence
  primer
gtaaggatggagtctggtggc

SEQ ID NO: 53514 - DNA, 21 bp, Artificial Sequence
  primer
tggagggtcagaagcaataag

SEQ ID NO: 53515 - DNA, 41 bp, Artificial Sequence
  primer
gtaaaacgacggccagtcactttgcaaataaactggtgttg

SEQ ID NO: 53516 - DNA, 37 bp, Artificial Sequence
  primer
gtaaaacgacggccagtctcggcggagtgttgtagag

SEQ ID NO: 53517 - DNA, 39 bp, Artificial Sequence
  primer
gtaaaacgacggccagtgccaaaggaattacatgtttcg

SEQ ID NO: 53518 - DNA, 39 bp, Artificial Sequence
  primer
gtaaaacgacggccagtcagagtgacttcagcttggacc

SEQ ID NO: 53519 - DNA, 38 bp, Artificial Sequence
  primer
gtaaaacgacggccagtctctaggtctgctgaatgggc

SEQ ID NO: 53520 - DNA, 38 bp, Artificial Sequence
  primer
gtaaaacgacggccagtgggagtgtcaggaagaggaag

SEQ ID NO: 53521 - DNA, 21 bp, Artificial Sequence
  primer
gttggtaggagatgccctctg

SEQ ID NO: 53522 - DNA, 21 bp, Artificial Sequence
  primer
attgtacagttgggcagaggc

SEQ ID NO: 53523 - DNA, 19 bp, Artificial Sequence
  primer
gtggagggcacccataatc

SEQ ID NO: 53524 - DNA, 19 bp, Artificial Sequence
  primer
ccagatctgtgagcccagc

SEQ ID NO: 53525 - DNA, 19 bp, Artificial Sequence
  primer
tcagaggcccaaggatctg

SEQ ID NO: 53526 - DNA, 38 bp, Artificial Sequence
  primer
gtaaaacgacggccagtaacattgggcaggaagttagc

SEQ ID NO: 53527 - DNA, 38 bp, Artificial Sequence
  primer
gtaaaacgacggccagtttcctccatctctatgctggg

SEQ ID NO: 53528 - DNA, 38 bp, Artificial Sequence
  primer
gtaaaacgacggccagtacaggaggtggctcctttacc

SEQ ID NO: 53529 - DNA, 34 bp, Artificial Sequence
  primer
gtaaaacgacggccagtgaggcggagaaggctgg

SEQ ID NO: 53530 - DNA, 35 bp, Artificial Sequence
  primer
gtaaaacgacggccagtgtccctcgtgctcctgtc

SEQ ID NO: 53531 - DNA, 21 bp, Artificial Sequence
  primer
caggagactgctgggaaacag

SEQ ID NO: 53532 - DNA, 35 bp, Artificial Sequence
  primer
gtaaaacgacggccagtatggcaccaagagggagc

SEQ ID NO: 53533 - DNA, 35 bp, Artificial Sequence
  primer
gtaaaacgacggccagtcagcagggagctgggaag

SEQ ID NO: 53534 - DNA, 36 bp, Artificial Sequence
  primer
gtaaaacgacggccagtggagcggtcagatggaaag

SEQ ID NO: 53535 - DNA, 39 bp, Artificial Sequence
  primer
gtaaaacgacggccagtggtgagaaatagagccgtcgag

SEQ ID NO: 53536 - DNA, 21 bp, Artificial Sequence
  primer
aggatgaaggtgttcgtctgc

SEQ ID NO: 53537 - DNA, 38 bp, Artificial Sequence
  primer
gtaaaacgacggccagtcttcctaccctgtgggtggtc

SEQ ID NO: 53538 - DNA, 38 bp, Artificial Sequence
  primer
gtaaaacgacggccagtctttccgcaacttccctcttc

SEQ ID NO: 53539 - DNA, 35 bp, Artificial Sequence
  primer
gtaaaacgacggccagttcctgagctgctccatcg

SEQ ID NO: 53540 - DNA, 21 bp, Artificial Sequence
  primer
ctgggagggtctgaaacagtc

SEQ ID NO: 53541 - DNA, 21 bp, Artificial Sequence
  primer
ggtcatagatcatgggaaggg

SEQ ID NO: 53542 - DNA, 38 bp, Artificial Sequence
  primer
gtaaaacgacggccagtctctctctgtccctttgcctg

SEQ ID NO: 53543 - DNA, 22 bp, Artificial Sequence
  primer
tggcttaaccactgattccaag

SEQ ID NO: 53544 - DNA, 44 bp, Artificial Sequence
  primer
gtaaaacgacggccagtttgttcaagtcaggaaagaatttattg

SEQ ID NO: 53545 - DNA, 21 bp, Artificial Sequence
  primer
gggaacaatattggcatttgg

SEQ ID NO: 53546 - DNA, 21 bp, Artificial Sequence
  primer
tggtggcacaaggttcattac

SEQ ID NO: 53547 - DNA, 36 bp, Artificial Sequence
  primer
gtaaaacgacggccagtagaagagcgacaccgaagc

SEQ ID NO: 53548 - DNA, 37 bp, Artificial Sequence
  primer
gtaaaacgacggccagtcttccctggttctggaatgg

SEQ ID NO: 53549 - DNA, 21 bp, Artificial Sequence
  primer
aagcagaatgggagtttctgg

SEQ ID NO: 53550 - DNA, 38 bp, Artificial Sequence
  primer
gtaaaacgacggccagtcagtatccaggccattcttgg

SEQ ID NO: 53551 - DNA, 21 bp, Artificial Sequence
  primer
tctgatggcaagcatggtaag

SEQ ID NO: 53552 - DNA, 38 bp, Artificial Sequence
  primer
gtaaaacgacggccagttcctgctcatcatcatcttcc

SEQ ID NO: 53553 - DNA, 38 bp, Artificial Sequence
  primer
gtaaaacgacggccagtgcattgcctggctatcttgta

SEQ ID NO: 53554 - DNA, 21 bp, Artificial Sequence
  primer
agtcagatagcatacgtgcgg

SEQ ID NO: 53555 - DNA, 22 bp, Artificial Sequence
  primer
tcattgctattcatgcctgttg

SEQ ID NO: 53556 - DNA, 21 bp, Artificial Sequence
  primer
atgaagcaagatcaagggctg

SEQ ID NO: 53557 - DNA, 21 bp, Artificial Sequence
  primer
ttctagcacagacggcaacag

SEQ ID NO: 53558 - DNA, 18 bp, Artificial Sequence
  primer
aagagccaggcagccaag

SEQ ID NO: 53559 - DNA, 38 bp, Artificial Sequence
  primer
gtaaaacgacggccagtgtgagggaaggaaagttctgg

SEQ ID NO: 53560 - DNA, 21 bp, Artificial Sequence
  primer
acatcattggtactgctgggc

SEQ ID NO: 53561 - DNA, 20 bp, Artificial Sequence
  primer
agtgggacaaagtgagtggg

SEQ ID NO: 53562 - DNA, 20 bp, Artificial Sequence
  primer
ttctgagcagagttcggagg

SEQ ID NO: 53563 - DNA, 19 bp, Artificial Sequence
  primer
ccaccagcaatgcaacctc

SEQ ID NO: 53564 - DNA, 37 bp, Artificial Sequence
  primer
gtaaaacgacggccagtgctagcctgcctctcatttg

SEQ ID NO: 53565 - DNA, 21 bp, Artificial Sequence
  primer
ggagctccgaagggttctaag

SEQ ID NO: 53566 - DNA, 21 bp, Artificial Sequence
  primer
aggtctctaagctcctcgcac

SEQ ID NO: 53567 - DNA, 21 bp, Artificial Sequence
  primer
tgatccctcaggtgtatgtgg

SEQ ID NO: 53568 - DNA, 38 bp, Artificial Sequence
  primer
gtaaaacgacggccagtgctccctatgatgtgcctctg

SEQ ID NO: 53569 - DNA, 21 bp, Artificial Sequence
  primer
tcaatttgtatgaagcacccg

SEQ ID NO: 53570 - DNA, 21 bp, Artificial Sequence
  primer
cttggccacaacacttgtacc

SEQ ID NO: 53571 - DNA, 21 bp, Artificial Sequence
  primer
aaagccttgtccgaaatcaag

SEQ ID NO: 53572 - DNA, 20 bp, Artificial Sequence
  primer
ctgatgtccagtacccaggc

SEQ ID NO: 53573 - DNA, 21 bp, Artificial Sequence
  primer
actgggttcttggtttaaggg

SEQ ID NO: 53574 - DNA, 25 bp, Artificial Sequence
  primer
tgtccttccagatgatattctgttc

SEQ ID NO: 53575 - DNA, 38 bp, Artificial Sequence
  primer
gtaaaacgacggccagtgcaacatagcaagaccctgtc

SEQ ID NO: 53576 - DNA, 21 bp, Artificial Sequence
  primer
tggaatggtagctctggattg

SEQ ID NO: 53577 - DNA, 40 bp, Artificial Sequence
  primer
gtaaaacgacggccagttgtagttctttgctactccgctg

SEQ ID NO: 53578 - DNA, 38 bp, Artificial Sequence
  primer
gtaaaacgacggccagttgcttaatgagcccaaactga

SEQ ID NO: 53579 - DNA, 38 bp, Artificial Sequence
  primer
gtaaaacgacggccagtacctcacttgttccctgtgtg

SEQ ID NO: 53580 - DNA, 21 bp, Artificial Sequence
  primer
tcccagaggaaagaacagtgg

SEQ ID NO: 53581 - DNA, 38 bp, Artificial Sequence
  primer
gtaaaacgacggccagtataatgttgggttccactgcc

SEQ ID NO: 53582 - DNA, 21 bp, Artificial Sequence
  primer
gcataaagcagtgttgccttg

SEQ ID NO: 53583 - DNA, 21 bp, Artificial Sequence
  primer
tctgccaactgtttgctcttg

SEQ ID NO: 53584 - DNA, 37 bp, Artificial Sequence
  primer
gtaaaacgacggccagtagccatgtcaatgcttgctg

SEQ ID NO: 53585 - DNA, 43 bp, Artificial Sequence
  primer
gtaaaacgacggccagtacgaaagatatcatattcactcctcc

SEQ ID NO: 53586 - DNA, 44 bp, Artificial Sequence
  primer
gtaaaacgacggccagttcaggtttacatgaaatgttgctatac

SEQ ID NO: 53587 - DNA, 37 bp, Artificial Sequence
  primer
gtaaaacgacggccagttttggaagcatttggctctg

SEQ ID NO: 53588 - DNA, 38 bp, Artificial Sequence
  primer
gtaaaacgacggccagttttcccttcagtagccagagc

SEQ ID NO: 53589 - DNA, 38 bp, Artificial Sequence
  primer
gtaaaacgacggccagtctacacaggagctttggatgc

SEQ ID NO: 53590 - DNA, 21 bp, Artificial Sequence
  primer
gactctgacgggctaatcacc

SEQ ID NO: 53591 - DNA, 38 bp, Artificial Sequence
  primer
gtaaaacgacggccagtaggacaacagcacaacaggag

SEQ ID NO: 53592 - DNA, 38 bp, Artificial Sequence
  primer
gtaaaacgacggccagtcttgtgttggttgtcattggg

SEQ ID NO: 53593 - DNA, 22 bp, Artificial Sequence
  primer
aagggtcagaggaggtaaatgc

SEQ ID NO: 53594 - DNA, 21 bp, Artificial Sequence
  primer
ctgtgaaggagctgctgaaac

SEQ ID NO: 53595 - DNA, 22 bp, Artificial Sequence
  primer
tgagacaatggatctggagcta

SEQ ID NO: 53596 - DNA, 21 bp, Artificial Sequence
  primer
agtttgcctccgtgagagatg

SEQ ID NO: 53597 - DNA, 36 bp, Artificial Sequence
  primer
gtaaaacgacggccagtcttgggaagcagaggttgc

SEQ ID NO: 53598 - DNA, 37 bp, Artificial Sequence
  primer
gtaaaacgacggccagtgtcaaggcaggaggatcacc

SEQ ID NO: 53599 - DNA, 38 bp, Artificial Sequence
  primer
gtaaaacgacggccagtttaacaaatggttgactcgcc

SEQ ID NO: 53600 - DNA, 38 bp, Artificial Sequence
  primer
gtaaaacgacggccagtatcctcttgcctgtcttcacc

SEQ ID NO: 53601 - DNA, 21 bp, Artificial Sequence
  primer
cgaatttagttgcaggtgtgc

SEQ ID NO: 53602 - DNA, 40 bp, Artificial Sequence
  primer
gtaaaacgacggccagtgcatttcagaaagaggagaaagg

SEQ ID NO: 53603 - DNA, 42 bp, Artificial Sequence
  primer
gtaaaacgacggccagtacatacagcgctatctcttcttctg

SEQ ID NO: 53604 - DNA, 20 bp, Artificial Sequence
  primer
ctttccttgaggcaggtgtg

SEQ ID NO: 53605 - DNA, 42 bp, Artificial Sequence
  primer
gtaaaacgacggccagttttagatacactgcatttctctccc

SEQ ID NO: 53606 - DNA, 22 bp, Artificial Sequence
  primer
gggatagcagggtgaggtttac

SEQ ID NO: 53607 - DNA, 39 bp, Artificial Sequence
  primer
gtaaaacgacggccagtaaggaagtggtggactgttctg

SEQ ID NO: 53608 - DNA, 37 bp, Artificial Sequence
  primer
gtaaaacgacggccagtttatgtccaagatgcagggc

SEQ ID NO: 53609 - DNA, 21 bp, Artificial Sequence
  primer
ctcttccaaaggctgtccaac

SEQ ID NO: 53610 - DNA, 44 bp, Artificial Sequence
  primer
gtaaaacgacggccagtggtctagctaggaaagtgaaactattg

SEQ ID NO: 53611 - DNA, 21 bp, Artificial Sequence
  primer
tggaaatgcagaggttgagag

SEQ ID NO: 53612 - DNA, 38 bp, Artificial Sequence
  primer
gtaaaacgacggccagtccctgatcatcactgagtggg

SEQ ID NO: 53613 - DNA, 40 bp, Artificial Sequence
  primer
gtaaaacgacggccagtggctcctcactgaatgttgaatc

SEQ ID NO: 53614 - DNA, 38 bp, Artificial Sequence
  primer
gtaaaacgacggccagtaccgtttagggtctgtcttgc

SEQ ID NO: 53615 - DNA, 21 bp, Artificial Sequence
  primer
ttcccaggaatccttaaccac

SEQ ID NO: 53616 - DNA, 21 bp, Artificial Sequence
  primer
cttcaggcaatcaagctgttc

SEQ ID NO: 53617 - DNA, 20 bp, Artificial Sequence
  primer
gaaacagcagttctgccagg

SEQ ID NO: 53618 - DNA, 23 bp, Artificial Sequence
  primer
gcatcatcgtataacatggtttc

SEQ ID NO: 53619 - DNA, 21 bp, Artificial Sequence
  primer
tttgggtaatggaattgtgct

SEQ ID NO: 53620 - DNA, 38 bp, Artificial Sequence
  primer
gtaaaacgacggccagtccttctccaggtaagaaccca

SEQ ID NO: 53621 - DNA, 28 bp, Artificial Sequence
  primer
aaagagatcattaagagcatacattgaa

SEQ ID NO: 53622 - DNA, 24 bp, Artificial Sequence
  primer
gggactgttgtatattgagagtga

SEQ ID NO: 53623 - DNA, 21 bp, Artificial Sequence
  primer
agagtgttgggctttgaggtc

SEQ ID NO: 53624 - DNA, 43 bp, Artificial Sequence
  primer
gtaaaacgacggccagtggtttcatcttagtagacagagaggc

SEQ ID NO: 53625 - DNA, 21 bp, Artificial Sequence
  primer
ccttcggtaggttctctgtgc

SEQ ID NO: 53626 - DNA, 38 bp, Artificial Sequence
  primer
gtaaaacgacggccagtacatggtggtctatggtgagg

SEQ ID NO: 53627 - DNA, 37 bp, Artificial Sequence
  primer
gtaaaacgacggccagtaatagaaggctgggctgtgg

SEQ ID NO: 53628 - DNA, 38 bp, Artificial Sequence
  primer
gtaaaacgacggccagtagaggagctagaggtccctgg

SEQ ID NO: 53629 - DNA, 38 bp, Artificial Sequence
  primer
gtaaaacgacggccagttgtatccacagcccttccttc

SEQ ID NO: 53630 - DNA, 36 bp, Artificial Sequence
  primer
gtaaaacgacggccagttccctaggcctggtgagtg

SEQ ID NO: 53631 - DNA, 21 bp, Artificial Sequence
  primer
gaagaaggttgggttgaccag

SEQ ID NO: 53632 - DNA, 37 bp, Artificial Sequence
  primer
gtaaaacgacggccagtggtacagggtgggtttggag

SEQ ID NO: 53633 - DNA, 38 bp, Artificial Sequence
  primer
gtaaaacgacggccagtcccttactttcagttagcgcc

SEQ ID NO: 53634 - DNA, 38 bp, Artificial Sequence
  primer
gtaaaacgacggccagtgagatggccttacagggacag

SEQ ID NO: 53635 - DNA, 19 bp, Artificial Sequence
  primer
agtgagtcaggctgggtgc

SEQ ID NO: 53636 - DNA, 37 bp, Artificial Sequence
  primer
gtaaaacgacggccagtactgacctgtgaggactgcc

SEQ ID NO: 53637 - DNA, 22 bp, Artificial Sequence
  primer
tccaaatttgtatttgcatccc

SEQ ID NO: 53638 - DNA, 21 bp, Artificial Sequence
  primer
tgatgcatggagttaccttgg

SEQ ID NO: 53639 - DNA, 21 bp, Artificial Sequence
  primer
ggtttagctgagccagtaggc

SEQ ID NO: 53640 - DNA, 19 bp, Artificial Sequence
  primer
ctgggtagggtgtgcttgg

SEQ ID NO: 53641 - DNA, 38 bp, Artificial Sequence
  primer
gtaaaacgacggccagtatttcccagtctcagattgcc

SEQ ID NO: 53642 - DNA, 21 bp, Artificial Sequence
  primer
ttcatcctggcgatgattatg

SEQ ID NO: 53643 - DNA, 21 bp, Artificial Sequence
  primer
aaccaggtacaggtgggagag

SEQ ID NO: 53644 - DNA, 37 bp, Artificial Sequence
  primer
gtaaaacgacggccagtgtctagggatggttgctccc

SEQ ID NO: 53645 - DNA, 38 bp, Artificial Sequence
  primer
gtaaaacgacggccagttactccagggaatggcaagag

SEQ ID NO: 53646 - DNA, 37 bp, Artificial Sequence
  primer
gtaaaacgacggccagtgctcgcttctacccacaagg

SEQ ID NO: 53647 - DNA, 20 bp, Artificial Sequence
  primer
gaagggagtggtcaccgaac

SEQ ID NO: 53648 - DNA, 38 bp, Artificial Sequence
  primer
gtaaaacgacggccagttggtttcagtccacacgtttc

SEQ ID NO: 53649 - DNA, 21 bp, Artificial Sequence
  primer
aagagggttaggattgggtgg

SEQ ID NO: 53650 - DNA, 20 bp, Artificial Sequence
  primer
ctgactggcatcatggtgtg

SEQ ID NO: 53651 - DNA, 37 bp, Artificial Sequence
  primer
gtaaaacgacggccagtctatgtccagcttgggatgc

SEQ ID NO: 53652 - DNA, 21 bp, Artificial Sequence
  primer
ggatgagaagcagcaggtgta

SEQ ID NO: 53653 - DNA, 37 bp, Artificial Sequence
  primer
gtaaaacgacggccagtggctggattcctgggttaag

SEQ ID NO: 53654 - DNA, 21 bp, Artificial Sequence
  primer
ggtgtggtctgggaagatacc

SEQ ID NO: 53655 - DNA, 21 bp, Artificial Sequence
  primer
catagggatactgggccagac

SEQ ID NO: 53656 - DNA, 21 bp, Artificial Sequence
  primer
gtagttggttgggtgctaggc

SEQ ID NO: 53657 - DNA, 37 bp, Artificial Sequence
  primer
gtaaaacgacggccagtttgaactcagcactttgggc

SEQ ID NO: 53658 - DNA, 37 bp, Artificial Sequence
  primer
gtaaaacgacggccagtgagtgggtaggagcctggac

SEQ ID NO: 53659 - DNA, 38 bp, Artificial Sequence
  primer
gtaaaacgacggccagtgtttcctcttctggcctgttg

SEQ ID NO: 53660 - DNA, 38 bp, Artificial Sequence
  primer
gtaaaacgacggccagtgcaaggtctacactgtggcag

SEQ ID NO: 53661 - DNA, 37 bp, Artificial Sequence
  primer
gtaaaacgacggccagtcagtgctaccgcctcatctc

SEQ ID NO: 53662 - DNA, 37 bp, Artificial Sequence
  primer
gtaaaacgacggccagtccaaattcaccaacgtggac

SEQ ID NO: 53663 - DNA, 36 bp, Artificial Sequence
  primer
gtaaaacgacggccagtagcaccatgccctcaagtc

SEQ ID NO: 53664 - DNA, 21 bp, Artificial Sequence
  primer
tcactctgtgtgctcctctgg

SEQ ID NO: 53665 - DNA, 20 bp, Artificial Sequence
  primer
catcactctcgagcccacag

SEQ ID NO: 53666 - DNA, 19 bp, Artificial Sequence
  primer
gtaactgcgagtggagcgg

SEQ ID NO: 53667 - DNA, 39 bp, Artificial Sequence
  primer
gtaaaacgacggccagtgggttcgttgaaattaaccagg

SEQ ID NO: 53668 - DNA, 21 bp, Artificial Sequence
  primer
ttcaaagggaggcagattgtc

SEQ ID NO: 53669 - DNA, 38 bp, Artificial Sequence
  primer
gtaaaacgacggccagtcccagttgtcctttccaagac

SEQ ID NO: 53670 - DNA, 21 bp, Artificial Sequence
  primer
tcaatggctcagaatttggtg

SEQ ID NO: 53671 - DNA, 38 bp, Artificial Sequence
  primer
gtaaaacgacggccagtagtagctgtgagtgtgcgtgc

SEQ ID NO: 53672 - DNA, 38 bp, Artificial Sequence
  primer
gtaaaacgacggccagttagtgcttggccctacagttg

SEQ ID NO: 53673 - DNA, 43 bp, Artificial Sequence
  primer
gtaaaacgacggccagttcattctggaagcattcacttactac

SEQ ID NO: 53674 - DNA, 22 bp, Artificial Sequence
  primer
ggaaatgttagggaaacactgc

SEQ ID NO: 53675 - DNA, 20 bp, Artificial Sequence
  primer
cgtgatctgcctacctcagc

SEQ ID NO: 53676 - DNA, 27 bp, Artificial Sequence
  primer
cagctttccctataggagactattgtt

SEQ ID NO: 53677 - DNA, 23 bp, Artificial Sequence
  primer
cagtatattcaatgtcgaagccg

SEQ ID NO: 53678 - DNA, 20 bp, Artificial Sequence
  primer
agggtctggctagctggaag

SEQ ID NO: 53679 - DNA, 20 bp, Artificial Sequence
  primer
gccacatgttcccatcattc

SEQ ID NO: 53680 - DNA, 38 bp, Artificial Sequence
  primer
gtaaaacgacggccagtccatcccttgaggagaagacc

SEQ ID NO: 53681 - DNA, 38 bp, Artificial Sequence
  primer
gtaaaacgacggccagtgtgttaggagggcgactgttc

SEQ ID NO: 53682 - DNA, 37 bp, Artificial Sequence
  primer
gtaaaacgacggccagttgagtgggtggttgtgaagg

SEQ ID NO: 53683 - DNA, 37 bp, Artificial Sequence
  primer
gtaaaacgacggccagtgtacttaggcggcatagccc

SEQ ID NO: 53684 - DNA, 21 bp, Artificial Sequence
  primer
tctagtggacacttggagccc

SEQ ID NO: 53685 - DNA, 37 bp, Artificial Sequence
  primer
gtaaaacgacggccagtcagtcagatctagctgggcg

SEQ ID NO: 53686 - DNA, 38 bp, Artificial Sequence
  primer
gtaaaacgacggccagtttggagggactagtgctggag

SEQ ID NO: 53687 - DNA, 21 bp, Artificial Sequence
  primer
gtagcctcttgagggaagtgg

SEQ ID NO: 53688 - DNA, 38 bp, Artificial Sequence
  primer
gtaaaacgacggccagtctgcagcacttacaggtgagg

SEQ ID NO: 53689 - DNA, 37 bp, Artificial Sequence
  primer
gtaaaacgacggccagtgaaggtgaggctgggtcttc

SEQ ID NO: 53690 - DNA, 21 bp, Artificial Sequence
  primer
atgtgggtgagtcagcttgtc

SEQ ID NO: 53691 - DNA, 21 bp, Artificial Sequence
  primer
gacctagtgctaggcgtggac

SEQ ID NO: 53692 - DNA, 38 bp, Artificial Sequence
  primer
gtaaaacgacggccagtaagcaggagattcacgagctg

SEQ ID NO: 53693 - DNA, 38 bp, Artificial Sequence
  primer
gtaaaacgacggccagtcattccctctttcctccaagc

SEQ ID NO: 53694 - DNA, 37 bp, Artificial Sequence
  primer
gtaaaacgacggccagtgtatccgtgccgctatctcc

SEQ ID NO: 53695 - DNA, 37 bp, Artificial Sequence
  primer
gtaaaacgacggccagttcctgccctagggttgagtc

SEQ ID NO: 53696 - DNA, 38 bp, Artificial Sequence
  primer
gtaaaacgacggccagtggctgtcatatgtcctcttgg

SEQ ID NO: 53697 - DNA, 37 bp, Artificial Sequence
  primer
gtaaaacgacggccagtgcgtggacaagtctggtctg

SEQ ID NO: 53698 - DNA, 21 bp, Artificial Sequence
  primer
aggtatttgaggctcggagtg

SEQ ID NO: 53699 - DNA, 21 bp, Artificial Sequence
  primer
catcaacctggatgactgtgc

SEQ ID NO: 53700 - DNA, 38 bp, Artificial Sequence
  primer
gtaaaacgacggccagttatggtggcaagacctgtgag

SEQ ID NO: 53701 - DNA, 18 bp, Artificial Sequence
  primer
agctagacgtccgggcag

SEQ ID NO: 53702 - DNA, 38 bp, Artificial Sequence
  primer
gtaaaacgacggccagttacctggaccttgagggattg

SEQ ID NO: 53703 - DNA, 38 bp, Artificial Sequence
  primer
gtaaaacgacggccagttgtgcattagggttcaactgg

SEQ ID NO: 53704 - DNA, 37 bp, Artificial Sequence
  primer
gtaaaacgacggccagtagcacatgcatccttcatgg

SEQ ID NO: 53705 - DNA, 38 bp, Artificial Sequence
  primer
gtaaaacgacggccagtgaatgtgcttaactcaggccc

SEQ ID NO: 53706 - DNA, 38 bp, Artificial Sequence
  primer
gtaaaacgacggccagtttcgttggaagcaaatgtgtc

SEQ ID NO: 53707 - DNA, 21 bp, Artificial Sequence
  primer
gtaacttgggctttctgacgg

SEQ ID NO: 53708 - DNA, 21 bp, Artificial Sequence
  primer
caaaggaggatggagcctttc

SEQ ID NO: 53709 - DNA, 21 bp, Artificial Sequence
  primer
atgaaggatgatgtggcagtg

SEQ ID NO: 53710 - DNA, 37 bp, Artificial Sequence
  primer
gtaaaacgacggccagtaactgcacctccatcagtgg

SEQ ID NO: 53711 - DNA, 20 bp, Artificial Sequence
  primer
ccctgcgcatgtacactcag

SEQ ID NO: 53712 - DNA, 38 bp, Artificial Sequence
  primer
gtaaaacgacggccagttcaatcaaaggtggtctggag

SEQ ID NO: 53713 - DNA, 38 bp, Artificial Sequence
  primer
gtaaaacgacggccagtatgtctgtgtcacccaaggtc

SEQ ID NO: 53714 - DNA, 38 bp, Artificial Sequence
  primer
gtaaaacgacggccagtctggagtcccaactccttgac

SEQ ID NO: 53715 - DNA, 21 bp, Artificial Sequence
  primer
atcaagcaggtgcaatcacag

SEQ ID NO: 53716 - DNA, 21 bp, Artificial Sequence
  primer
ccaccaatccaacatccagac

SEQ ID NO: 53717 - DNA, 21 bp, Artificial Sequence
  primer
tggaaacgttgccttagaagc

SEQ ID NO: 53718 - DNA, 21 bp, Artificial Sequence
  primer
tttgtccttccaaatgagctg

SEQ ID NO: 53719 - DNA, 21 bp, Artificial Sequence
  primer
caatatcagccttaggtgcgg

SEQ ID NO: 53720 - DNA, 37 bp, Artificial Sequence
  primer
gtaaaacgacggccagtattcatgcgtcttcacctgg

SEQ ID NO: 53721 - DNA, 38 bp, Artificial Sequence
  primer
gtaaaacgacggccagtttacatcttctttcatgcgcc

SEQ ID NO: 53722 - DNA, 21 bp, Artificial Sequence
  primer
ctcgtctgtgtgtgtcactcg

SEQ ID NO: 53723 - DNA, 37 bp, Artificial Sequence
  primer
gtaaaacgacggccagttgaagcaaattgcccaagac

SEQ ID NO: 53724 - DNA, 20 bp, Artificial Sequence
  primer
actggaagtgtcgcatcacc

SEQ ID NO: 53725 - DNA, 36 bp, Artificial Sequence
  primer
gtaaaacgacggccagtaggcacctgctggcaatag

SEQ ID NO: 53726 - DNA, 38 bp, Artificial Sequence
  primer
gtaaaacgacggccagttataccctccatgaggcacac

SEQ ID NO: 53727 - DNA, 38 bp, Artificial Sequence
  primer
gtaaaacgacggccagtggcctgcccaacctactaatc

SEQ ID NO: 53728 - DNA, 21 bp, Artificial Sequence
  primer
ttgttgaggacattcacaggg

SEQ ID NO: 53729 - DNA, 38 bp, Artificial Sequence
  primer
gtaaaacgacggccagtgaggtccagaaagtgattggg

SEQ ID NO: 53730 - DNA, 39 bp, Artificial Sequence
  primer
gtaaaacgacggccagtagaacagagacctggagagcag

SEQ ID NO: 53731 - DNA, 38 bp, Artificial Sequence
  primer
gtaaaacgacggccagtacaggccctattctctcagcc

SEQ ID NO: 53732 - DNA, 21 bp, Artificial Sequence
  primer
gctccttctactgctgcaagg

SEQ ID NO: 53733 - DNA, 18 bp, Artificial Sequence
  primer
gctcatcgctgttccagg

SEQ ID NO: 53734 - DNA, 21 bp, Artificial Sequence
  primer
atctgtgtggtggacgacttc

SEQ ID NO: 53735 - DNA, 42 bp, Artificial Sequence
  primer
gtaaaacgacggccagttgttcatcaacctatcttgtgttcc

SEQ ID NO: 53736 - DNA, 45 bp, Artificial Sequence
  primer
gtaaaacgacggccagttttattgagacgtatttgtgaataatcc

SEQ ID NO: 53737 - DNA, 37 bp, Artificial Sequence
  primer
gtaaaacgacggccagtctgatctgcagttcccttgc

SEQ ID NO: 53738 - DNA, 21 bp, Artificial Sequence
  primer
ttcagtggaatgcagtagcag

SEQ ID NO: 53739 - DNA, 37 bp, Artificial Sequence
  primer
gtaaaacgacggccagtcccaggagctgaggtttctg

SEQ ID NO: 53740 - DNA, 19 bp, Artificial Sequence
  primer
gctcgggtacgtaaggcac

SEQ ID NO: 53741 - DNA, 36 bp, Artificial Sequence
  primer
gtaaaacgacggccagtccagctgcatcaagtggag

SEQ ID NO: 53742 - DNA, 21 bp, Artificial Sequence
  primer
ccctaagtcaggctctccctc

SEQ ID NO: 53743 - DNA, 18 bp, Artificial Sequence
  primer
ccttcacccagcaaacgg

SEQ ID NO: 53744 - DNA, 21 bp, Artificial Sequence
  primer
ctggactatatcgtgccctgc

SEQ ID NO: 53745 - DNA, 37 bp, Artificial Sequence
  primer
gtaaaacgacggccagtaggagcttggaacccttgac

SEQ ID NO: 53746 - DNA, 37 bp, Artificial Sequence
  primer
gtaaaacgacggccagtatggtgatgcagtctctggg

SEQ ID NO: 53747 - DNA, 21 bp, Artificial Sequence
  primer
agcgacgaagtattgagaggg

SEQ ID NO: 53748 - DNA, 38 bp, Artificial Sequence
  primer
gtaaaacgacggccagttcttcatctctgcccaccttc

SEQ ID NO: 53749 - DNA, 38 bp, Artificial Sequence
  primer
gtaaaacgacggccagtgatcgtttccctctctggttg

SEQ ID NO: 53750 - DNA, 39 bp, Artificial Sequence
  primer
gtaaaacgacggccagtaaatgtcacgtaacacccaagg

SEQ ID NO: 53751 - DNA, 38 bp, Artificial Sequence
  primer
gtaaaacgacggccagtgagtggtggttagcagatggc

SEQ ID NO: 53752 - DNA, 35 bp, Artificial Sequence
  primer
gtaaaacgacggccagtgcctggcaacagagcaag

SEQ ID NO: 53753 - DNA, 22 bp, Artificial Sequence
  primer
tcaagagagaatcctttggcag

SEQ ID NO: 53754 - DNA, 18 bp, Artificial Sequence
  primer
gcctgcacgcttctcagt

SEQ ID NO: 53755 - DNA, 38 bp, Artificial Sequence
  primer
gtaaaacgacggccagtgtcctccagtgattgctttcc

SEQ ID NO: 53756 - DNA, 38 bp, Artificial Sequence
  primer
gtaaaacgacggccagttagtgagcatgaccaacccac

SEQ ID NO: 53757 - DNA, 39 bp, Artificial Sequence
  primer
gtaaaacgacggccagtgactacctgtttccacagcagc

SEQ ID NO: 53758 - DNA, 38 bp, Artificial Sequence
  primer
gtaaaacgacggccagtagctaccagtcccagctcatc

SEQ ID NO: 53759 - DNA, 21 bp, Artificial Sequence
  primer
gcaagaggcataccaagatcc

SEQ ID NO: 53760 - DNA, 38 bp, Artificial Sequence
  primer
gtaaaacgacggccagtataccatcccaggctcagtcc

SEQ ID NO: 53761 - DNA, 21 bp, Artificial Sequence
  primer
tccatactgtcaatgggttgc

SEQ ID NO: 53762 - DNA, 21 bp, Artificial Sequence
  primer
cccgtctctgcacctagaaac

SEQ ID NO: 53763 - DNA, 38 bp, Artificial Sequence
  primer
gtaaaacgacggccagttcctcctccttattctggctg

SEQ ID NO: 53764 - DNA, 21 bp, Artificial Sequence
  primer
gcctataacccacaccacctg

SEQ ID NO: 53765 - DNA, 21 bp, Artificial Sequence
  primer
gaccacctcaccacccatatc

SEQ ID NO: 53766 - DNA, 37 bp, Artificial Sequence
  primer
gtaaaacgacggccagtcctggaagctgcgttaggag

SEQ ID NO: 53767 - DNA, 18 bp, Artificial Sequence
  primer
cggatcggcttcactcac

SEQ ID NO: 53768 - DNA, 21 bp, Artificial Sequence
  primer
caagaccgtgacctacttggg

SEQ ID NO: 53769 - DNA, 38 bp, Artificial Sequence
  primer
gtaaaacgacggccagtgttggacagcaatctcttccc

SEQ ID NO: 53770 - DNA, 18 bp, Artificial Sequence
  primer
gttcggacgagctgaccc

SEQ ID NO: 53771 - DNA, 18 bp, Artificial Sequence
  primer
gcctaggtctgtgcgctg

SEQ ID NO: 53772 - DNA, 38 bp, Artificial Sequence
  primer
gtaaaacgacggccagtgcgtgtgcatgtttctatgtg

SEQ ID NO: 53773 - DNA, 21 bp, Artificial Sequence
  primer
gcggtagcttcttcattcagg

SEQ ID NO: 53774 - DNA, 20 bp, Artificial Sequence
  primer
ctgccttcaagggtccctac

SEQ ID NO: 53775 - DNA, 38 bp, Artificial Sequence
  primer
gtaaaacgacggccagtgccaacagactctatcccagc

SEQ ID NO: 53776 - DNA, 19 bp, Artificial Sequence
  primer
taaacctctggtggcggac

SEQ ID NO: 53777 - DNA, 18 bp, Artificial Sequence
  primer
gacgagctcaatcgccac

SEQ ID NO: 53778 - DNA, 40 bp, Artificial Sequence
  primer
gtaaaacgacggccagtccaagcatcatttcgagttgtag

SEQ ID NO: 53779 - DNA, 43 bp, Artificial Sequence
  primer
gtaaaacgacggccagttgtaacagtagctgctttatgtagcc

SEQ ID NO: 53780 - DNA, 42 bp, Artificial Sequence
  primer
gtaaaacgacggccagttttgtttcagggatactacataggg

SEQ ID NO: 53781 - DNA, 38 bp, Artificial Sequence
  primer
gtaaaacgacggccagtggctattctgcctctccattt

SEQ ID NO: 53782 - DNA, 27 bp, Artificial Sequence
  primer
gtgtgataggaatgtaataggagaagg

SEQ ID NO: 53783 - DNA, 43 bp, Artificial Sequence
  primer
gtaaaacgacggccagtgctctttactaattaagcatgccatt

SEQ ID NO: 53784 - DNA, 42 bp, Artificial Sequence
  primer
gtaaaacgacggccagttgattaaccaaacatctcctctttg

SEQ ID NO: 53785 - DNA, 40 bp, Artificial Sequence
  primer
gtaaaacgacggccagtttgcaggtattattcgtgtgaac

SEQ ID NO: 53786 - DNA, 21 bp, Artificial Sequence
  primer
ttgctttgctctttctcagcc

SEQ ID NO: 53787 - DNA, 21 bp, Artificial Sequence
  primer
ccaggttatcactggtttggg

SEQ ID NO: 53788 - DNA, 23 bp, Artificial Sequence
  primer
aaactgacatcaaagggttcaaa

SEQ ID NO: 53789 - DNA, 37 bp, Artificial Sequence
  primer
gtaaaacgacggccagtaggcagcgaaacgtgtaatc

SEQ ID NO: 53790 - DNA, 21 bp, Artificial Sequence
  primer
tccttcctttgaaggcatacg

SEQ ID NO: 53791 - DNA, 38 bp, Artificial Sequence
  primer
gtaaaacgacggccagttgaaggcatacgatggatttg

SEQ ID NO: 53792 - DNA, 21 bp, Artificial Sequence
  primer
gggagcctgaactacaacagc

SEQ ID NO: 53793 - DNA, 38 bp, Artificial Sequence
  primer
gtaaaacgacggccagtacagattcaacccaagcacag

SEQ ID NO: 53794 - DNA, 25 bp, Artificial Sequence
  primer
atttcagcagattgtctaacctttc

SEQ ID NO: 53795 - DNA, 21 bp, Artificial Sequence
  primer
ttataatgtgggccaagcacc

SEQ ID NO: 53796 - DNA, 38 bp, Artificial Sequence
  primer
gtaaaacgacggccagtcagtgattcagagacagcgtg

SEQ ID NO: 53797 - DNA, 27 bp, Artificial Sequence
  primer
tgtatacatcacatacaggcataggtt

SEQ ID NO: 53798 - DNA, 40 bp, Artificial Sequence
  primer
gtaaaacgacggccagtcagaacttgcagttgagctcttt

SEQ ID NO: 53799 - DNA, 25 bp, Artificial Sequence
  primer
tgttcagcaaagattctacagtcag

SEQ ID NO: 53800 - DNA, 25 bp, Artificial Sequence
  primer
cggtgtatttggttctctaggtaag

SEQ ID NO: 53801 - DNA, 21 bp, Artificial Sequence
  primer
gcatgccgaataataccacct

SEQ ID NO: 53802 - DNA, 41 bp, Artificial Sequence
  primer
gtaaaacgacggccagtttgtgtatcattcatttggagtgg

SEQ ID NO: 53803 - DNA, 20 bp, Artificial Sequence
  primer
caccacaacagccaaactcc

SEQ ID NO: 53804 - DNA, 38 bp, Artificial Sequence
  primer
gtaaaacgacggccagtagtgtgcggaaagttcaatcc

SEQ ID NO: 53805 - DNA, 35 bp, Artificial Sequence
  primer
gtaaaacgacggccagtctataaaggccgctccgc

SEQ ID NO: 53806 - DNA, 19 bp, Artificial Sequence
  primer
gtgtccggcagatgttcag

SEQ ID NO: 53807 - DNA, 38 bp, Artificial Sequence
  primer
gtaaaacgacggccagtgagaggaagccagagatggag

SEQ ID NO: 53808 - DNA, 38 bp, Artificial Sequence
  primer
gtaaaacgacggccagttcaggctgagaaataccaggc

SEQ ID NO: 53809 - DNA, 21 bp, Artificial Sequence
  primer
agctatgactttgcagccgtc

SEQ ID NO: 53810 - DNA, 21 bp, Artificial Sequence
  primer
atccttggagtgtccttggag

SEQ ID NO: 53811 - DNA, 38 bp, Artificial Sequence
  primer
gtaaaacgacggccagtgcactttatgcttgtgaagcc

SEQ ID NO: 53812 - DNA, 21 bp, Artificial Sequence
  primer
aggacttcagcaagttccagg

SEQ ID NO: 53813 - DNA, 37 bp, Artificial Sequence
  primer
gtaaaacgacggccagtacccatcctgtcacccagac

SEQ ID NO: 53814 - DNA, 20 bp, Artificial Sequence
  primer
gcaagaccagcttcatccag

SEQ ID NO: 53815 - DNA, 38 bp, Artificial Sequence
  primer
gtaaaacgacggccagtctttcttcgcccataaaggat

SEQ ID NO: 53816 - DNA, 38 bp, Artificial Sequence
  primer
gtaaaacgacggccagtctactgagaatggctggaggg

SEQ ID NO: 53817 - DNA, 35 bp, Artificial Sequence
  primer
gtaaaacgacggccagtggcctgcagcctgtgttt

SEQ ID NO: 53818 - DNA, 37 bp, Artificial Sequence
  primer
gtaaaacgacggccagtcgagcttctccagtgtcctg

SEQ ID NO: 53819 - DNA, 36 bp, Artificial Sequence
  primer
gtaaaacgacggccagtgagtgggtggtgaccaagg

SEQ ID NO: 53820 - DNA, 37 bp, Artificial Sequence
  primer
gtaaaacgacggccagtcggtcctacgggacatcttc

SEQ ID NO: 53821 - DNA, 38 bp, Artificial Sequence
  primer
gtaaaacgacggccagtctctgactcgcatgttgtctg

SEQ ID NO: 53822 - DNA, 20 bp, Artificial Sequence
  primer
acaggtggttggagtcatgc

SEQ ID NO: 53823 - DNA, 37 bp, Artificial Sequence
  primer
gtaaaacgacggccagtctaccacacccgactgcttc

SEQ ID NO: 53824 - DNA, 21 bp, Artificial Sequence
  primer
atcaaagccctcaagaaccac

SEQ ID NO: 53825 - DNA, 20 bp, Artificial Sequence
  primer
gaatgatgcaagagccatcc

SEQ ID NO: 53826 - DNA, 21 bp, Artificial Sequence
  primer
ttcgattaccacgtgatgtcc

SEQ ID NO: 53827 - DNA, 21 bp, Artificial Sequence
  primer
gtatcgatgatgctgagtggg

SEQ ID NO: 53828 - DNA, 36 bp, Artificial Sequence
  primer
gtaaaacgacggccagtagactggctgtggcagcac

SEQ ID NO: 53829 - DNA, 37 bp, Artificial Sequence
  primer
gtaaaacgacggccagtggtaatcccaggcagctttc

SEQ ID NO: 53830 - DNA, 38 bp, Artificial Sequence
  primer
gtaaaacgacggccagttggatggaggtgctatcaatc

SEQ ID NO: 53831 - DNA, 38 bp, Artificial Sequence
  primer
gtaaaacgacggccagtagagcgagactgttcctgagc

SEQ ID NO: 53832 - DNA, 21 bp, Artificial Sequence
  primer
gctatgacttctgccaggtcc

SEQ ID NO: 53833 - DNA, 21 bp, Artificial Sequence
  primer
cctggtttgtgtgggtacctg

SEQ ID NO: 53834 - DNA, 22 bp, Artificial Sequence
  primer
aaggcaggtgaaagaaggtttc

SEQ ID NO: 53835 - DNA, 21 bp, Artificial Sequence
  primer
acttcaccaaattccactcgc

SEQ ID NO: 53836 - DNA, 38 bp, Artificial Sequence
  primer
gtaaaacgacggccagtaatgggtggaaggacaaattc

SEQ ID NO: 53837 - DNA, 38 bp, Artificial Sequence
  primer
gtaaaacgacggccagttctggcagccaacagtacatc

SEQ ID NO: 53838 - DNA, 38 bp, Artificial Sequence
  primer
gtaaaacgacggccagtgcaaagatgccagttctgtcc

SEQ ID NO: 53839 - DNA, 21 bp, Artificial Sequence
  primer
tcccttgtctctgaggaccac

SEQ ID NO: 53840 - DNA, 21 bp, Artificial Sequence
  primer
actccctgacacttaaggccc

SEQ ID NO: 53841 - DNA, 38 bp, Artificial Sequence
  primer
gtaaaacgacggccagtgcacatactcaaaggtgccag

SEQ ID NO: 53842 - DNA, 22 bp, Artificial Sequence
  primer
tcctacttgcaggaagatgacc

SEQ ID NO: 53843 - DNA, 40 bp, Artificial Sequence
  primer
gtaaaacgacggccagttgaggtgaggagtttcatgtctc

SEQ ID NO: 53844 - DNA, 22 bp, Artificial Sequence
  primer
gcagcatgggagttaataaagg

SEQ ID NO: 53845 - DNA, 21 bp, Artificial Sequence
  primer
aaagtgaaagcacagtgcagg

SEQ ID NO: 53846 - DNA, 21 bp, Artificial Sequence
  primer
agtgtaagggcccaaagaggt

SEQ ID NO: 53847 - DNA, 37 bp, Artificial Sequence
  primer
gtaaaacgacggccagtagggaaacgcttgccttaac

SEQ ID NO: 53848 - DNA, 21 bp, Artificial Sequence
  primer
atccagacagacagcctttcc

SEQ ID NO: 53849 - DNA, 22 bp, Artificial Sequence
  primer
ttgtgctttgaatttgaacagg

SEQ ID NO: 53850 - DNA, 39 bp, Artificial Sequence
  primer
gtaaaacgacggccagtaatgccacattgtcacataagc

SEQ ID NO: 53851 - DNA, 39 bp, Artificial Sequence
  primer
gtaaaacgacggccagttcctgtgattgctgtagactcg

SEQ ID NO: 53852 - DNA, 38 bp, Artificial Sequence
  primer
gtaaaacgacggccagtcatctgtgaaggagcttggtg

SEQ ID NO: 53853 - DNA, 21 bp, Artificial Sequence
  primer
gcagcaaaccagaggaggtag

SEQ ID NO: 53854 - DNA, 38 bp, Artificial Sequence
  primer
gtaaaacgacggccagttcaatatgacaagccattggg

SEQ ID NO: 53855 - DNA, 21 bp, Artificial Sequence
  primer
tatgcttccacagttgggttg

SEQ ID NO: 53856 - DNA, 38 bp, Artificial Sequence
  primer
gtaaaacgacggccagtcactcgtttctttgttggcag

SEQ ID NO: 53857 - DNA, 21 bp, Artificial Sequence
  primer
acatcttaaataagccggccc

SEQ ID NO: 53858 - DNA, 21 bp, Artificial Sequence
  primer
tttccgcttgcagactttctc

SEQ ID NO: 53859 - DNA, 21 bp, Artificial Sequence
  primer
tctgtgaattgatcgtgaggg

SEQ ID NO: 53860 - DNA, 37 bp, Artificial Sequence
  primer
gtaaaacgacggccagtctcccagtcacccaagactc

SEQ ID NO: 53861 - DNA, 22 bp, Artificial Sequence
  primer
gatccgtcatctgccactaaag

SEQ ID NO: 53862 - DNA, 37 bp, Artificial Sequence
  primer
gtaaaacgacggccagtctttaagcgtgtgacccagc

SEQ ID NO: 53863 - DNA, 23 bp, Artificial Sequence
  primer
accatagtgggtttcaacttgtg

SEQ ID NO: 53864 - DNA, 20 bp, Artificial Sequence
  primer
ctgggtaatcaaccgcattg

SEQ ID NO: 53865 - DNA, 21 bp, Artificial Sequence
  primer
caggtgctcgataagtgcttg

SEQ ID NO: 53866 - DNA, 21 bp, Artificial Sequence
  primer
ctccttcttaacgatgcctgg

SEQ ID NO: 53867 - DNA, 36 bp, Artificial Sequence
  primer
gtaaaacgacggccagtgggcagtcagagtcggaac

SEQ ID NO: 53868 - DNA, 38 bp, Artificial Sequence
  primer
gtaaaacgacggccagttggctgtttatgtggaggatg

SEQ ID NO: 53869 - DNA, 39 bp, Artificial Sequence
  primer
gtaaaacgacggccagtggtcactgaaacagtgcagctc

SEQ ID NO: 53870 - DNA, 38 bp, Artificial Sequence
  primer
gtaaaacgacggccagtgtgggagtcctcattgctctg

SEQ ID NO: 53871 - DNA, 38 bp, Artificial Sequence
  primer
gtaaaacgacggccagtgaaacgaagtgccttccagag

SEQ ID NO: 53872 - DNA, 21 bp, Artificial Sequence
  primer
tgacagtgaatgtgggagagg

SEQ ID NO: 53873 - DNA, 37 bp, Artificial Sequence
  primer
gtaaaacgacggccagtaggctgcagtccaaattgtc

SEQ ID NO: 53874 - DNA, 21 bp, Artificial Sequence
  primer
ctaagaggccacacactcacg

SEQ ID NO: 53875 - DNA, 38 bp, Artificial Sequence
  primer
gtaaaacgacggccagttaagccacactgggcacttag

SEQ ID NO: 53876 - DNA, 21 bp, Artificial Sequence
  primer
acgcttcggatacagaaccag

SEQ ID NO: 53877 - DNA, 38 bp, Artificial Sequence
  primer
gtaaaacgacggccagttgttccctgcatgttcttctg

SEQ ID NO: 53878 - DNA, 20 bp, Artificial Sequence
  primer
gccacaggtcactggagaag

SEQ ID NO: 53879 - DNA, 39 bp, Artificial Sequence
  primer
gtaaaacgacggccagtggccttgccttaatttatctgg

SEQ ID NO: 53880 - DNA, 39 bp, Artificial Sequence
  primer
gtaaaacgacggccagttgttccatctgtttccagatcc

SEQ ID NO: 53881 - DNA, 38 bp, Artificial Sequence; identical to SEQ ID NO: 747
  primer

SEQ ID NO: 53882 - DNA, 38 bp, Artificial Sequence
  primer
gtaaaacgacggccagtaacattgggagaacatgaggc

SEQ ID NO: 53883 - DNA, 37 bp, Artificial Sequence
  primer
gtaaaacgacggccagtcctctcaaagtgaaccaccg

SEQ ID NO: 53884 - DNA, 38 bp, Artificial Sequence
  primer
gtaaaacgacggccagttctttgaattggaattgtggc

SEQ ID NO: 53885 - DNA, 36 bp, Artificial Sequence
  primer
gtaaaacgacggccagtgcggactagtggccttagc

SEQ ID NO: 53886 - DNA, 37 bp, Artificial Sequence
  primer
gtaaaacgacggccagtaatgagtcactgtgcccacc

SEQ ID NO: 53887 - DNA, 21 bp, Artificial Sequence
  primer
acaagaacgcgactccatctc

SEQ ID NO: 53888 - DNA, 39 bp, Artificial Sequence
  primer
gtaaaacgacggccagttctttagttgcctgttccatcc

SEQ ID NO: 53889 - DNA, 38 bp, Artificial Sequence
  primer
gtaaaacgacggccagtgcatcaaagcaagactccatc

SEQ ID NO: 53890 - DNA, 40 bp, Artificial Sequence
  primer
gtaaaacgacggccagtcatttgtcttgtctttccctgtg

SEQ ID NO: 53891 - DNA, 21 bp, Artificial Sequence
  primer
tacctcagagatacccgtggc

SEQ ID NO: 53892 - DNA, 21 bp, Artificial Sequence
  primer
gacgtagacccaaagctcctg

SEQ ID NO: 53893 - DNA, 39 bp, Artificial Sequence
  primer
gtaaaacgacggccagtactttctgtttctgttcgtggg

SEQ ID NO: 53894 - DNA, 19 bp, Artificial Sequence
  primer
gcctccagcacctacttgg

SEQ ID NO: 53895 - DNA, 21 bp, Artificial Sequence
  primer
ccaaaggaaattccaagaagg

SEQ ID NO: 53896 - DNA, 39 bp, Artificial Sequence
  primer
gtaaaacgacggccagtcccaactggtgcaactttattc

SEQ ID NO: 53897 - DNA, 19 bp, Artificial Sequence
  primer
tacaagggcatgccaccac

SEQ ID NO: 53898 - DNA, 23 bp, Artificial Sequence
  primer
tcccaagcttgttaatcattcag

SEQ ID NO: 53899 - DNA, 23 bp, Artificial Sequence
  primer
tcccatcttgacttagcagtgac

SEQ ID NO: 53900 - DNA, 39 bp, Artificial Sequence
  primer
gtaaaacgacggccagtgcctaaggaggtgaaagtctcc

SEQ ID NO: 53901 - DNA, 38 bp, Artificial Sequence
  primer
gtaaaacgacggccagtacaccaattcgctgtctccac

SEQ ID NO: 53902 - DNA, 21 bp, Artificial Sequence
  primer
ggaaggcctaccacacaaact

SEQ ID NO: 53903 - DNA, 18 bp, Artificial Sequence
  primer
tccaacctgggagacagc

SEQ ID NO: 53904 - DNA, 39 bp, Artificial Sequence
  primer
gtaaaacgacggccagtgcaagctttcatgatttaaccc

SEQ ID NO: 53905 - DNA, 26 bp, Artificial Sequence
  primer
tttccttaaatggtaaccaatatcat

SEQ ID NO: 53906 - DNA, 23 bp, Artificial Sequence
  primer
tgaagcctacatttgtcttgctc

SEQ ID NO: 53907 - DNA, 23 bp, Artificial Sequence
  primer
ccaaccatacaaggtaattgctg

SEQ ID NO: 53908 - DNA, 41 bp, Artificial Sequence
  primer
gtaaaacgacggccagttttatccctccctttgtttatcag

SEQ ID NO: 53909 - DNA, 39 bp, Artificial Sequence
  primer
gtaaaacgacggccagtggagtgtgccactaccaatgag

SEQ ID NO: 53910 - DNA, 40 bp, Artificial Sequence
  primer
gtaaaacgacggccagttttcatatgccaaagctatgttg

SEQ ID NO: 53911 - DNA, 46 bp, Artificial Sequence
  primer
gtaaaacgacggccagtaattaatctccttacttgagtttcacatt

SEQ ID NO: 53912 - DNA, 21 bp, Artificial Sequence
  primer
ttcaccctcgattcataccag

SEQ ID NO: 53913 - DNA, 21 bp, Artificial Sequence
  primer
cttgtctgataaagggcggag

SEQ ID NO: 53914 - DNA, 38 bp, Artificial Sequence
  primer
gtaaaacgacggccagtatcctccagcttccaggattc

SEQ ID NO: 53915 - DNA, 22 bp, Artificial Sequence
  primer
gccaagatagttgtcactgcac

SEQ ID NO: 53916 - DNA, 38 bp, Artificial Sequence
  primer
gtaaaacgacggccagttgtctgcttgctggtctgttc

SEQ ID NO: 53917 - DNA, 41 bp, Artificial Sequence
  primer
gtaaaacgacggccagttgtgaggttagtaatcctgtgagc

SEQ ID NO: 53918 - DNA, 21 bp, Artificial Sequence
  primer
gctcttagtccggctgacttc

SEQ ID NO: 53919 - DNA, 38 bp, Artificial Sequence
  primer
gtaaaacgacggccagtaccatatatctcatgcaccgc

SEQ ID NO: 53920 - DNA, 38 bp, Artificial Sequence
  primer
gtaaaacgacggccagtgttcctaacacgtgccatttg

SEQ ID NO: 53921 - DNA, 18 bp, Artificial Sequence
  primer
ttaagtgatctgcccgcc

SEQ ID NO: 53922 - DNA, 21 bp, Artificial Sequence
  primer
gcaaagagaagtccacacagg

SEQ ID NO: 53923 - DNA, 21 bp, Artificial Sequence
  primer
gtgctggtttgtgatggtttc

SEQ ID NO: 53924 - DNA, 38 bp, Artificial Sequence
  primer
gtaaaacgacggccagtgcttgctcctgagttccaaac

SEQ ID NO: 53925 - DNA, 38 bp, Artificial Sequence
  primer
gtaaaacgacggccagtagactggaccaacagaaacgg

SEQ ID NO: 53926 - DNA, 21 bp, Artificial Sequence
  primer
gtggaacacggaaatggaaac

SEQ ID NO: 53927 - DNA, 22 bp, Artificial Sequence
  primer
ttgtatgagagcgcctgtaatc

SEQ ID NO: 53928 - DNA, 38 bp, Artificial Sequence
  primer
gtaaaacgacggccagttgtctcctaaactgcattggg

SEQ ID NO: 53929 - DNA, 39 bp, Artificial Sequence
  primer
gtaaaacgacggccagttgtaggttcaaaccctcaaagg

SEQ ID NO: 53930 - DNA, 22 bp, Artificial Sequence
  primer
tccaagttgtctttcaaattgc

SEQ ID NO: 53931 - DNA, 21 bp, Artificial Sequence
  primer
tggtcaggcatgttactgagg

SEQ ID NO: 53932 - DNA, 22 bp, Artificial Sequence
  primer
cctagacaacagagccagatcc

SEQ ID NO: 53933 - DNA, 38 bp, Artificial Sequence
  primer
gtaaaacgacggccagtgtgtgagtcccaaagcaactc

SEQ ID NO: 53934 - DNA, 23 bp, Artificial Sequence
  primer
aagtgttgatacagggcttgatg

SEQ ID NO: 53935 - DNA, 21 bp, Artificial Sequence
  primer
tctgagcccagaatttcaaag

SEQ ID NO: 53936 - DNA, 40 bp, Artificial Sequence
  primer
gtaaaacgacggccagttgacattaaagggaaaggagtgg

SEQ ID NO: 53937 - DNA, 40 bp, Artificial Sequence
  primer
gtaaaacgacggccagtccacagcaatggtttaataaggg

SEQ ID NO: 53938 - DNA, 38 bp, Artificial Sequence
  primer
gtaaaacgacggccagtgtttcaccgtggtctcgatct

SEQ ID NO: 53939 - DNA, 21 bp, Artificial Sequence
  primer
tttggctacctgtgtaagggt

SEQ ID NO: 53940 - DNA, 21 bp, Artificial Sequence
  primer
cagaggattcagctattcggc

SEQ ID NO: 53941 - DNA, 20 bp, Artificial Sequence
  primer
agagagggaatcctgcttgc

SEQ ID NO: 53942 - DNA, 37 bp, Artificial Sequence
  primer
gtaaaacgacggccagtttcacagacctacgggatgg

SEQ ID NO: 53943 - DNA, 38 bp, Artificial Sequence
  primer
gtaaaacgacggccagttagcacgtccttgccttcttg

SEQ ID NO: 53944 - DNA, 37 bp, Artificial Sequence
  primer
gtaaaacgacggccagtaatagaggcctggacatggg

SEQ ID NO: 53945 - DNA, 21 bp, Artificial Sequence
  primer
tcaggatcaagactccagctc

SEQ ID NO: 53946 - DNA, 38 bp, Artificial Sequence
  primer
gtaaaacgacggccagttggaaatctccaaagtaaggc

SEQ ID NO: 53947 - DNA, 21 bp, Artificial Sequence
  primer
tcaggacaaagttcttgtggg

SEQ ID NO: 53948 - DNA, 22 bp, Artificial Sequence
  primer
ggctctcagcttgttctctgtg

SEQ ID NO: 53949 - DNA, 23 bp, Artificial Sequence
  primer
gcttcaagcatgtttcttctttg

SEQ ID NO: 53950 - DNA, 36 bp, Artificial Sequence
  primer
gtaaaacgacggccagtaagagctctgggccatttg

SEQ ID NO: 53951 - DNA, 27 bp, Artificial Sequence
  primer
aaaggaattaatgtgataagtcacagg

SEQ ID NO: 53952 - DNA, 38 bp, Artificial Sequence
  primer
gtaaaacgacggccagtgagggatagcagtgggaagat

SEQ ID NO: 53953 - DNA, 43 bp, Artificial Sequence
  primer
gtaaaacgacggccagtgtttgcttcatttatacaaacaggac

SEQ ID NO: 53954 - DNA, 39 bp, Artificial Sequence
  primer
gtaaaacgacggccagttgaacagccttcagtgttgtct

SEQ ID NO: 53955 - DNA, 38 bp, Artificial Sequence
  primer
gtaaaacgacggccagtaaacagagggtgcagttcagg

SEQ ID NO: 53956 - DNA, 21 bp, Artificial Sequence
  primer
cctccaggacagttgccttac

SEQ ID NO: 53957 - DNA, 21 bp, Artificial Sequence
  primer
ttctcctccaagaccaaccac

SEQ ID NO: 53958 - DNA, 26 bp, Artificial Sequence
  primer
ttctttactagcagtacttgtctggc

SEQ ID NO: 53959 - DNA, 41 bp, Artificial Sequence
  primer
gtaaaacgacggccagtaaactttgggattcaataatgctg

SEQ ID NO: 53960 - DNA, 21 bp, Artificial Sequence
  primer
tccttggatgtggaatctgtg

SEQ ID NO: 53961 - DNA, 38 bp, Artificial Sequence
  primer
gtaaaacgacggccagtgacggcagagctgagtagttg

SEQ ID NO: 53962 - DNA, 35 bp, Artificial Sequence
  primer
gtaaaacgacggccagtctgccttcttccttcgcc

SEQ ID NO: 53963 - DNA, 21 bp, Artificial Sequence
  primer
catctgaacgaatggaagctg

SEQ ID NO: 53964 - DNA, 21 bp, Artificial Sequence
  primer
actggagttgcagggatatgg

SEQ ID NO: 53965 - DNA, 39 bp, Artificial Sequence
  primer
gtaaaacgacggccagtttctgtagcctctcctgtttgg

SEQ ID NO: 53966 - DNA, 21 bp, Artificial Sequence
  primer
tgggaatgcctattgcgtaag

SEQ ID NO: 53967 - DNA, 38 bp, Artificial Sequence
  primer
gtaaaacgacggccagtgcacatccgtcactgcaaata

SEQ ID NO: 53968 - DNA, 21 bp, Artificial Sequence
  primer
tgtggagaagatgacaatggg

SEQ ID NO: 53969 - DNA, 37 bp, Artificial Sequence
  primer
gtaaaacgacggccagtgcgcatggtatccattgttg

SEQ ID NO: 53970 - DNA, 38 bp, Artificial Sequence
  primer
gtaaaacgacggccagtcaagttaatgttgactggccc

SEQ ID NO: 53971 - DNA, 21 bp, Artificial Sequence
  primer
tgtggtgcataaggtcctgag

SEQ ID NO: 53972 - DNA, 22 bp, Artificial Sequence
  primer
aaacccatagttaatgccttgg

SEQ ID NO: 53973 - DNA, 39 bp, Artificial Sequence
  primer
gtaaaacgacggccagtgcttccatcattgttggctatg

SEQ ID NO: 53974 - DNA, 21 bp, Artificial Sequence
  primer
ggcagtcaaagctttcttcag

SEQ ID NO: 53975 - DNA, 39 bp, Artificial Sequence
  primer
gtaaaacgacggccagtaacattgtgcgctactacaacg

SEQ ID NO: 53976 - DNA, 39 bp, Artificial Sequence
  primer
gtaaaacgacggccagttcatggtgtgatgtctgtagcc

SEQ ID NO: 53977 - DNA, 21 bp, Artificial Sequence
  primer
acttctccctaaggcaactgg

SEQ ID NO: 53978 - DNA, 21 bp, Artificial Sequence
  primer
aatggttatgttggagtgcca

SEQ ID NO: 53979 - DNA, 21 bp, Artificial Sequence
  primer
tggtctgtgggagaagacctc

SEQ ID NO: 53980 - DNA, 38 bp, Artificial Sequence
  primer
gtaaaacgacggccagtctgagagccttgcattagtgg

SEQ ID NO: 53981 - DNA, 22 bp, Artificial Sequence
  primer
tcatttggtacaatgcatgctc

SEQ ID NO: 53982 - DNA, 25 bp, Artificial Sequence
  primer
caatgcttatcctataattccctgg

SEQ ID NO: 53983 - DNA, 21 bp, Artificial Sequence
  primer
aagcgtcaggtttcaagaagg

SEQ ID NO: 53984 - DNA, 41 bp, Artificial Sequence
  primer
gtaaaacgacggccagttcagttaagtgcaagaatagtggc

SEQ ID NO: 53985 - DNA, 38 bp, Artificial Sequence
  primer
gtaaaacgacggccagttgtgttcaaagagggatggac

SEQ ID NO: 53986 - DNA, 22 bp, Artificial Sequence
  primer
tgacttcaatggtcccagtagc

SEQ ID NO: 53987 - DNA, 38 bp, Artificial Sequence
  primer
gtaaaacgacggccagtgggtgaactttatgggacagg

SEQ ID NO: 53988 - DNA, 21 bp, Artificial Sequence
  primer
gtcctcttgatcataccaccg

SEQ ID NO: 53989 - DNA, 40 bp, Artificial Sequence
  primer
gtaaaacgacggccagtgtgttaggatgacaaattggtgg

SEQ ID NO: 53990 - DNA, 21 bp, Artificial Sequence
  primer
aattcgcctggaaattgtgtc

SEQ ID NO: 53991 - DNA, 21 bp, Artificial Sequence
  primer
taatcgtagcatcccatgtgc

SEQ ID NO: 53992 - DNA, 21 bp, Artificial Sequence
  primer
tgatgctattgatgggaaaca

SEQ ID NO: 53993 - DNA, 21 bp, Artificial Sequence
  primer
atttgcatgtgtgcttgcttc

SEQ ID NO: 53994 - DNA, 38 bp, Artificial Sequence
  primer
gtaaaacgacggccagttttcaagaatgcccatcttcc

SEQ ID NO: 53995 - DNA, 38 bp, Artificial Sequence
  primer
gtaaaacgacggccagtgaattctatgcggcttcttgc

SEQ ID NO: 53996 - DNA, 38 bp, Artificial Sequence
  primer
gtaaaacgacggccagtctacatgccagttgcaccatc

SEQ ID NO: 53997 - DNA, 21 bp, Artificial Sequence
  primer
tcacgcccagctgaataaatc

SEQ ID NO: 53998 - DNA, 38 bp, Artificial Sequence
  primer
gtaaaacgacggccagtagcccttagaatcacgacagg

SEQ ID NO: 53999 - DNA, 39 bp, Artificial Sequence
  primer
gtaaaacgacggccagtccatttggaatcctttctaggc

SEQ ID NO: 54000 - DNA, 38 bp, Artificial Sequence
  primer
gtaaaacgacggccagtttcatactgctgcatttcacg

SEQ ID NO: 54001 - DNA, 38 bp, Artificial Sequence
  primer
gtaaaacgacggccagttgaagagggaaatgacactgg

SEQ ID NO: 54002 - DNA, 21 bp, Artificial Sequence
  primer
aaggcaacaaggaagcctatg

SEQ ID NO: 54003 - DNA, 38 bp, Artificial Sequence
  primer
gtaaaacgacggccagtctaatctgcggaagtggagtg

SEQ ID NO: 54004 - DNA, 38 bp, Artificial Sequence
  primer
gtaaaacgacggccagtgcatccctgaaaccaaatacc

SEQ ID NO: 54005 - DNA, 22 bp, Artificial Sequence
  primer
cagcagaaccctacctgtcttg

SEQ ID NO: 54006 - DNA, 38 bp, Artificial Sequence
  primer
gtaaaacgacggccagtctccgtaagtgcctgttctcc

SEQ ID NO: 54007 - DNA, 21 bp, Artificial Sequence
  primer
gcacctgctacaggatgtgag

SEQ ID NO: 54008 - DNA, 38 bp, Artificial Sequence
  primer
gtaaaacgacggccagttccaaagtattgggatctgcc

SEQ ID NO: 54009 - DNA, 21 bp, Artificial Sequence
  primer
gtctatcgcgtgttaagtgcg

SEQ ID NO: 54010 - DNA, 37 bp, Artificial Sequence
  primer
gtaaaacgacggccagtggaatacaggcatgcaccac

SEQ ID NO: 54011 - DNA, 20 bp, Artificial Sequence
  primer
actcacaccaaggccctacc

SEQ ID NO: 54012 - DNA, 22 bp, Artificial Sequence
  primer
tccactcaaacttgaggtttcc

SEQ ID NO: 54013 - DNA, 21 bp, Artificial Sequence
  primer
gagaggatcgagagcttcgtg

SEQ ID NO: 54014 - DNA, 21 bp, Artificial Sequence
  primer
agctgaacagcccttgttacc

SEQ ID NO: 54015 - DNA, 22 bp, Artificial Sequence
  primer
ttccgtatacgcgtaatgtgtg

SEQ ID NO: 54016 - DNA, 38 bp, Artificial Sequence
  primer
gtaaaacgacggccagtggcttccctacagcttaccag

SEQ ID NO: 54017 - DNA, 39 bp, Artificial Sequence
  primer
gtaaaacgacggccagtcacctctaccagtctgtgaccc

SEQ ID NO: 54018 - DNA, 38 bp, Artificial Sequence
  primer
gtaaaacgacggccagtcagaatttcctttcgaggctg

SEQ ID NO: 54019 - DNA, 21 bp, Artificial Sequence
  primer
aggcatgggagagttgtaagc

SEQ ID NO: 54020 - DNA, 24 bp, Artificial Sequence
  primer
tgcatttgacatagtgggtatcag

SEQ ID NO: 54021 - DNA, 44 bp, Artificial Sequence
  primer
gtaaaacgacggccagtaatctaattgaaataatggaaccactg

SEQ ID NO: 54022 - DNA, 39 bp, Artificial Sequence
  primer
gtaaaacgacggccagtgcacaattcaatgagaacaacc

SEQ ID NO: 54023 - DNA, 21 bp, Artificial Sequence
  primer
ttgtttccaagagcactgagc

SEQ ID NO: 54024 - DNA, 22 bp, Artificial Sequence
  primer
ccctcataaacttaccagtgcc

SEQ ID NO: 54025 - DNA, 39 bp, Artificial Sequence
  primer
gtaaaacgacggccagttcaatgccacatttgatctctg

SEQ ID NO: 54026 - DNA, 20 bp, Artificial Sequence
  primer
ggcaacatagcaagacctcg

SEQ ID NO: 54027 - DNA, 21 bp, Artificial Sequence
  primer
aaagagagggagagggagacc

SEQ ID NO: 54028 - DNA, 21 bp, Artificial Sequence
  primer
ccattagatcccagcttgagg

SEQ ID NO: 54029 - DNA, 38 bp, Artificial Sequence
  primer
gtaaaacgacggccagttagccattaactggactgccc

SEQ ID NO: 54030 - DNA, 20 bp, Artificial Sequence
  primer
gtgacaagagcgaaactcgg

SEQ ID NO: 54031 - DNA, 21 bp, Artificial Sequence
  primer
tagagggatgtggtgggagag

SEQ ID NO: 54032 - DNA, 21 bp, Artificial Sequence
  primer
ggaaattgtagtccgattggg

SEQ ID NO: 54033 - DNA, 21 bp, Artificial Sequence
  primer
ggctccggtctacacagtctc

SEQ ID NO: 54034 - DNA, 38 bp, Artificial Sequence
  primer
gtaaaacgacggccagttggatgtaagcttgcaacagg

SEQ ID NO: 54035 - DNA, 21 bp, Artificial Sequence
  primer
tagagggatgtggtgggagag

SEQ ID NO: 54036 - DNA, 38 bp, Artificial Sequence
  primer
gtaaaacgacggccagtgggacccagagttctgaattg

SEQ ID NO: 54037 - DNA, 38 bp, Artificial Sequence
  primer
gtaaaacgacggccagtaaggataggtgcttgggtcag

SEQ ID NO: 54038 - DNA, 38 bp, Artificial Sequence
  primer
gtaaaacgacggccagtgggaaatctgctagtgaaggg

SEQ ID NO: 54039 - DNA, 38 bp, Artificial Sequence
  primer
gtaaaacgacggccagttgtcacccaaggtcatctctg

SEQ ID NO: 54040 - DNA, 20 bp, Artificial Sequence
  primer
ctcgcccaatctttgtcttg

SEQ ID NO: 54041 - DNA, 38 bp, Artificial Sequence
  primer
gtaaaacgacggccagtgacttgtgccatctctgagcc

SEQ ID NO: 54042 - DNA, 38 bp, Artificial Sequence
  primer
gtaaaacgacggccagtccacttgcctttgggaataag

SEQ ID NO: 54043 - DNA, 24 bp, Artificial Sequence
  primer
aatgttgctgtcctgtaagtaggg

SEQ ID NO: 54044 - DNA, 39 bp, Artificial Sequence
  primer
gtaaaacgacggccagtctgtgaagacttgagagggagg

SEQ ID NO: 54045 - DNA, 21 bp, Artificial Sequence
  primer
ggctccggtctacacagtctc

SEQ ID NO: 54046 - DNA, 22 bp, Artificial Sequence
  primer
ccttcgttaattagtccatcgc

SEQ ID NO: 54047 - DNA, 22 bp, Artificial Sequence
  primer
caaaggcaggaacctgtttatc

SEQ ID NO: 54048 - DNA, 38 bp, Artificial Sequence
  primer
gtaaaacgacggccagtaagccatcgagaaggactgtg

SEQ ID NO: 54049 - DNA, 22 bp, Artificial Sequence
  primer
ggaacaagggttaaagaccagc

SEQ ID NO: 54050 - DNA, 21 bp, Artificial Sequence
  primer
acaatgtggtagtggctgtgg

SEQ ID NO: 54051 - DNA, 20 bp, Artificial Sequence
  primer
cactttaacccaggaggtgg

SEQ ID NO: 54052 - DNA, 39 bp, Artificial Sequence
  primer
gtaaaacgacggccagtgaatctttgtggcagtgagagg

SEQ ID NO: 54053 - DNA, 38 bp, Artificial Sequence
  primer
gtaaaacgacggccagtagctgtgctggtgtcagtcag

SEQ ID NO: 54054 - DNA, 21 bp, Artificial Sequence
  primer
agtcacactgagccagaaggg

SEQ ID NO: 54055 - DNA, 22 bp, Artificial Sequence
  primer
ggtgtgagactcaacaggtgtg

SEQ ID NO: 54056 - DNA, 21 bp, Artificial Sequence
  primer
cctttattcaggcagacaggg

SEQ ID NO: 54057 - DNA, 38 bp, Artificial Sequence
  primer
gtaaaacgacggccagtccagaggcttacgttcctcag

SEQ ID NO: 54058 - DNA, 38 bp, Artificial Sequence
  primer
gtaaaacgacggccagtgttccatccagattcctctcc

SEQ ID NO: 54059 - DNA, 21 bp, Artificial Sequence
  primer
caactcccaagtccctctgac

SEQ ID NO: 54060 - DNA, 38 bp, Artificial Sequence
  primer
gtaaaacgacggccagtatagagggatctgagggcctg

SEQ ID NO: 54061 - DNA, 21 bp, Artificial Sequence
  primer
tctagggtggttggtttctgg

SEQ ID NO: 54062 - DNA, 37 bp, Artificial Sequence
  primer
gtaaaacgacggccagtctctccattggcctttgttg

SEQ ID NO: 54063 - DNA, 20 bp, Artificial Sequence
  primer
gaggccttgttcctcctctg

SEQ ID NO: 54064 - DNA, 21 bp, Artificial Sequence
  primer
aatagatgggacattgcctgg

SEQ ID NO: 54065 - DNA, 38 bp, Artificial Sequence
  primer
gtaaaacgacggccagtaacagaagcactgagccaagg

SEQ ID NO: 54066 - DNA, 19 bp, Artificial Sequence
  primer
ctgcagggcagagagaagg

SEQ ID NO: 54067 - DNA, 38 bp, Artificial Sequence
  primer
gtaaaacgacggccagtccaatgccctttaaggaagag

SEQ ID NO: 54068 - DNA, 21 bp, Artificial Sequence
  primer
cttcaccaaggagatcaaggg

SEQ ID NO: 54069 - DNA, 38 bp, Artificial Sequence
  primer
gtaaaacgacggccagtcttcctgcacatcatattggg

SEQ ID NO: 54070 - DNA, 39 bp, Artificial Sequence
  primer
gtaaaacgacggccagtgctgacagccaaggtatctttc

SEQ ID NO: 54071 - DNA, 21 bp, Artificial Sequence
  primer
ctccttgatacccagagggtg

SEQ ID NO: 54072 - DNA, 38 bp, Artificial Sequence
  primer
gtaaaacgacggccagttggttgggttgtatagccagg

SEQ ID NO: 54073 - DNA, 21 bp, Artificial Sequence
  primer
gacagagcaccctgtctcaag

SEQ ID NO: 54074 - DNA, 20 bp, Artificial Sequence
  primer
ctcatacactgcctggcatc

SEQ ID NO: 54075 - DNA, 38 bp, Artificial Sequence
  primer
gtaaaacgacggccagtagagtgggtactggatggtgc

SEQ ID NO: 54076 - DNA, 21 bp, Artificial Sequence
  primer
agggctcactgagtctcaagc

SEQ ID NO: 54077 - DNA, 22 bp, Artificial Sequence
  primer
gcaactccttagttcagaaggg

SEQ ID NO: 54078 - DNA, 39 bp, Artificial Sequence
  primer
gtaaaacgacggccagttcagagtagaattgagccaggg

SEQ ID NO: 54079 - DNA, 38 bp, Artificial Sequence
  primer
gtaaaacgacggccagtgggtgaattatctacccagcc

SEQ ID NO: 54080 - DNA, 21 bp, Artificial Sequence
  primer
atcctgggttgggtttctctc

SEQ ID NO: 54081 - DNA, 21 bp, Artificial Sequence
  primer
cctggacgtgaatggaaacag

SEQ ID NO: 54082 - DNA, 18 bp, Artificial Sequence
  primer
ctgggccacaagagcaag

SEQ ID NO: 54083 - DNA, 37 bp, Artificial Sequence
  primer
gtaaaacgacggccagtcacccaggagtgtctggaag

SEQ ID NO: 54084 - DNA, 37 bp, Artificial Sequence
  primer
gtaaaacgacggccagtctctgatgagggtgtggtgg

SEQ ID NO: 54085 - DNA, 35 bp, Artificial Sequence
  primer
gtaaaacgacggccagtccctccaggactatgggc

SEQ ID NO: 54086 - DNA, 21 bp, Artificial Sequence
  primer
tcttgtaggtgagacggaccc

SEQ ID NO: 54087 - DNA, 38 bp, Artificial Sequence
  primer
gtaaaacgacggccagtaatgtttgctcctcacacgtc

SEQ ID NO: 54088 - DNA, 19 bp, Artificial Sequence
  primer
gatgaggcagagacggtcc

SEQ ID NO: 54089 - DNA, 38 bp, Artificial Sequence
  primer
gtaaaacgacggccagtaaacctctgatgcttggaacg

SEQ ID NO: 54090 - DNA, 38 bp, Artificial Sequence
  primer
gtaaaacgacggccagtttccctgagaagcagttgttg

SEQ ID NO: 54091 - DNA, 21 bp, Artificial Sequence
  primer
atgaaagtgctttgggctttg

SEQ ID NO: 54092 - DNA, 21 bp, Artificial Sequence
  primer
cttctatcaccgacctcggac

SEQ ID NO: 54093 - DNA, 37 bp, Artificial Sequence
  primer
gtaaaacgacggccagttggtggcacctactagcgtc

SEQ ID NO: 54094 - DNA, 37 bp, Artificial Sequence
  primer
gtaaaacgacggccagtccatcttcccgagagtccag

SEQ ID NO: 54095 - DNA, 38 bp, Artificial Sequence
  primer
gtaaaacgacggccagttgtctctcagaatcaccacgg

SEQ ID NO: 54096 - DNA, 38 bp, Artificial Sequence
  primer
gtaaaacgacggccagttcatttaacctggtggtcagc

SEQ ID NO: 54097 - DNA, 38 bp, Artificial Sequence
  primer
gtaaaacgacggccagtagcctccgtgtccagactatg

SEQ ID NO: 54098 - DNA, 21 bp, Artificial Sequence
  primer
actcttccctctcccaggttc

SEQ ID NO: 54099 - DNA, 21 bp, Artificial Sequence
  primer
ttcctctcgcctagtcctgtg

SEQ ID NO: 54100 - DNA, 26 bp, Artificial Sequence
  primer
ttctaatatactctggttgacaaggc

SEQ ID NO: 54101 - DNA, 40 bp, Artificial Sequence
  primer
gtaaaacgacggccagttttggtgtcttaagccaagattc

SEQ ID NO: 54102 - DNA, 21 bp, Artificial Sequence
  primer
tgcaatgacacataatgctgg

SEQ ID NO: 54103 - DNA, 40 bp, Artificial Sequence
  primer
gtaaaacgacggccagttgttaattgtgctctagtctccc

SEQ ID NO: 54104 - DNA, 24 bp, Artificial Sequence
  primer
gttatcctggagcctaagatgaag

SEQ ID NO: 54105 - DNA, 27 bp, Artificial Sequence
  primer
tggtgtttatatcatcttgcctgtatc

SEQ ID NO: 54106 - DNA, 19 bp, Artificial Sequence
  primer
gatggtgtgaggcagcttg

SEQ ID NO: 54107 - DNA, 24 bp, Artificial Sequence
  primer
cacgaaacaagttcatccataatc

SEQ ID NO: 54108 - DNA, 22 bp, Artificial Sequence
  primer
gcaccattgattagacctgttg

SEQ ID NO: 54109 - DNA, 39 bp, Artificial Sequence
  primer
gtaaaacgacggccagtggaggacgggtaaagtctcttg

SEQ ID NO: 54110 - DNA, 38 bp, Artificial Sequence
  primer
gtaaaacgacggccagtttccattcccttcccaaactt

SEQ ID NO: 54111 - DNA, 23 bp, Artificial Sequence
  primer
gcatcgccttagtactgtattgg

SEQ ID NO: 54112 - DNA, 21 bp, Artificial Sequence
  primer
cgttgcaattgtgtgaaacag

SEQ ID NO: 54113 - DNA, 43 bp, Artificial Sequence
  primer
gtaaaacgacggccagttttcaaagtaaacagtgatgaacagg

SEQ ID NO: 54114 - DNA, 21 bp, Artificial Sequence
  primer
gaatgtgtatgccttgcttgc

SEQ ID NO: 54115 - DNA, 22 bp, Artificial Sequence
  primer
aactaggacctgcgtagtctgc

SEQ ID NO: 54116 - DNA, 18 bp, Artificial Sequence
  primer
cccagaggtggaggttgc

SEQ ID NO: 54117 - DNA, 39 bp, Artificial Sequence
  primer
gtaaaacgacggccagttgattgaagctgagtgatggac

SEQ ID NO: 54118 - DNA, 23 bp, Artificial Sequence
  primer
tggagcctaagatgaagtttctg

SEQ ID NO: 54119 - DNA, 38 bp, Artificial Sequence
  primer
gtaaaacgacggccagtccaatattccggagatcaagc

SEQ ID NO: 54120 - DNA, 18 bp, Artificial Sequence
  primer
accctgggtgaaagagcg

SEQ ID NO: 54121 - DNA, 40 bp, Artificial Sequence
  primer
gtaaaacgacggccagttttccaagtaatactgaaccgaa

SEQ ID NO: 54122 - DNA, 26 bp, Artificial Sequence
  primer
catgtatcatactgcatattcttggg

SEQ ID NO: 54123 - DNA, 39 bp, Artificial Sequence
  primer
gtaaaacgacggccagtcaaatttgatttcagctcccag

SEQ ID NO: 54124 - DNA, 21 bp, Artificial Sequence
  primer
tccaataactctttgggctgg

SEQ ID NO: 54125 - DNA, 23 bp, Artificial Sequence
  primer
gcctataacgatgaaattgtccc

SEQ ID NO: 54126 - DNA, 18 bp, Artificial Sequence
  primer
cggaggttgagatcacgc

SEQ ID NO: 54127 - DNA, 21 bp, Artificial Sequence
  primer
tgccaatttgctgatctcttg

SEQ ID NO: 54128 - DNA, 22 bp, Artificial Sequence
  primer
gactggtcagtaaggcatggtc

SEQ ID NO: 54129 - DNA, 20 bp, Artificial Sequence
  primer
tgccactgctgaatttaccc

SEQ ID NO: 54130 - DNA, 21 bp, Artificial Sequence
  primer
attgcaattgccagtccattt

SEQ ID NO: 54131 - DNA, 37 bp, Artificial Sequence
  primer
gtaaaacgacggccagtagggcctatccaaacacagg

SEQ ID NO: 54132 - DNA, 23 bp, Artificial Sequence
  primer
ccaatgggcttaagtctttgttc

SEQ ID NO: 54133 - DNA, 38 bp, Artificial Sequence
  primer
gtaaaacgacggccagttcattatccctgttgcccttc

SEQ ID NO: 54134 - DNA, 22 bp, Artificial Sequence
  primer
ccaacttgctcccaattaacac

SEQ ID NO: 54135 - DNA, 22 bp, Artificial Sequence
  primer
ctgtgaaccaagatcgtaccac

SEQ ID NO: 54136 - DNA, 23 bp, Artificial Sequence
  primer
gaaacgtgtgaagtttgaagtgg

SEQ ID NO: 54137 - DNA, 38 bp, Artificial Sequence
  primer
gtaaaacgacggccagtttctttcagtggcaggatgtg

SEQ ID NO: 54138 - DNA, 23 bp, Artificial Sequence
  primer
cttaatttggtcttcaaagctgg

SEQ ID NO: 54139 - DNA, 22 bp, Artificial Sequence
  primer
ccagaggaggaaacaagttcag

SEQ ID NO: 54140 - DNA, 39 bp, Artificial Sequence
  primer
gtaaaacgacggccagttgcattgttccatagtgtttgg

SEQ ID NO: 54141 - DNA, 38 bp, Artificial Sequence
  primer
gtaaaacgacggccagtatctgccacgtgtttgatttc

SEQ ID NO: 54142 - DNA, 38 bp, Artificial Sequence
  primer
gtaaaacgacggccagtattgccaattctgtaggaccc

SEQ ID NO: 54143 - DNA, 28 bp, Artificial Sequence
  primer
tgaacagatatgacagagttgttagaaa

SEQ ID NO: 54144 - DNA, 36 bp, Artificial Sequence
  primer
gtaaaacgacggccagtgtgggagaggtatcggcag

SEQ ID NO: 54145 - DNA, 39 bp, Artificial Sequence
  primer
gtaaaacgacggccagtgtaacaagaaggttgggtggac

SEQ ID NO: 54146 - DNA, 43 bp, Artificial Sequence
  primer
gtaaaacgacggccagttgattaattgctgaactatgtttgtg

SEQ ID NO: 54147 - DNA, 20 bp, Artificial Sequence
  primer
ggaggatctcttgaggccag

SEQ ID NO: 54148 - DNA, 20 bp, Artificial Sequence
  primer
gcagctgtggaagggaagac

SEQ ID NO: 54149 - DNA, 38 bp, Artificial Sequence
  primer
gtaaaacgacggccagtaatgaaccaaatgctggttgg

SEQ ID NO: 54150 - DNA, 21 bp, Artificial Sequence
  primer
tggcttgagctcaggagtttg

SEQ ID NO: 54151 - DNA, 21 bp, Artificial Sequence
  primer
agattgaaggtgcagtgagcc

SEQ ID NO: 54152 - DNA, 21 bp, Artificial Sequence
  primer
ctgggcttgtggagttctttg

SEQ ID NO: 54153 - DNA, 21 bp, Artificial Sequence
  primer
gaatagctccagcaacttcgc

SEQ ID NO: 54154 - DNA, 37 bp, Artificial Sequence
  primer
gtaaaacgacggccagtgaaagctgtgcagatggtgg

SEQ ID NO: 54155 - DNA, 38 bp, Artificial Sequence
  primer
gtaaaacgacggccagttcttgaccttgtgatccaccc

SEQ ID NO: 54156 - DNA, 24 bp, Artificial Sequence
  primer
aggtaagctgtgtactgtggaacg

SEQ ID NO: 54157 - DNA, 21 bp, Artificial Sequence
  primer
gaaacgacaagccctgtaacc

SEQ ID NO: 54158 - DNA, 37 bp, Artificial Sequence
  primer
gtaaaacgacggccagtctctttatggatttgcccgc

SEQ ID NO: 54159 - DNA, 38 bp, Artificial Sequence
  primer
gtaaaacgacggccagttccactttccacttgttgctg

SEQ ID NO: 54160 - DNA, 41 bp, Artificial Sequence
  primer
gtaaaacgacggccagtcctttggtataaatctcaaatggc

SEQ ID NO: 54161 - DNA, 35 bp, Artificial Sequence
  primer
gtaaaacgacggccagtacacatgtgagccaccgc

SEQ ID NO: 54162 - DNA, 38 bp, Artificial Sequence
  primer
gtaaaacgacggccagtgcacctggccaactaattcac

SEQ ID NO: 54163 - DNA, 25 bp, Artificial Sequence
  primer
tcagtgggtgccaaataaactatac

SEQ ID NO: 54164 - DNA, 21 bp, Artificial Sequence
  primer
tttctttatggaggagcaggc

SEQ ID NO: 54165 - DNA, 21 bp, Artificial Sequence
  primer
aacgagagcaaacccagtgac

SEQ ID NO: 54166 - DNA, 38 bp, Artificial Sequence
  primer
gtaaaacgacggccagtctcgctagctctccctctcac

SEQ ID NO: 54167 - DNA, 23 bp, Artificial Sequence
  primer
ttcttattcttggttagggcagc

SEQ ID NO: 54168 - DNA, 21 bp, Artificial Sequence
  primer
cactgtttgaagctgggaaag

SEQ ID NO: 54169 - DNA, 24 bp, Artificial Sequence
  primer
tgtttagaagaatgcctgaaacag

SEQ ID NO: 54170 - DNA, 41 bp, Artificial Sequence
  primer
gtaaaacgacggccagtaaacgacagggttattcagatagc

SEQ ID NO: 54171 - DNA, 23 bp, Artificial Sequence
  primer
gaggagaaattcatggtcctttc

SEQ ID NO: 54172 - DNA, 22 bp, Artificial Sequence
  primer
ttggagagactgactctgggag

SEQ ID NO: 54173 - DNA, 37 bp, Artificial Sequence
  primer
gtaaaacgacggccagtgtgggaccttacgctggttc

SEQ ID NO: 54174 - DNA, 27 bp, Artificial Sequence
  primer
catatttcaacacagtacaggtctttc

SEQ ID NO: 54175 - DNA, 21 bp, Artificial Sequence
  primer
tgccgaagaacttacctttcg

SEQ ID NO: 54176 - DNA, 21 bp, Artificial Sequence
  primer
ttgtgggaagaatttgcactg

SEQ ID NO: 54177 - DNA, 23 bp, Artificial Sequence
  primer
aatgatgagtttggtgaatcctg

SEQ ID NO: 54178 - DNA, 23 bp, Artificial Sequence
  primer
tgagtctgctctgtctacttccc

SEQ ID NO: 54179 - DNA, 38 bp, Artificial Sequence
  primer
gtaaaacgacggccagtctgtcactagcacgccttacc

SEQ ID NO: 54180 - DNA, 41 bp, Artificial Sequence
  primer
gtaaaacgacggccagtcacggtaggttaatgtgcatagtg

SEQ ID NO: 54181 - DNA, 41 bp, Artificial Sequence
  primer
gtaaaacgacggccagttgtatttctttgcattggatgatg

SEQ ID NO: 54182 - DNA, 21 bp, Artificial Sequence
  primer
gtctgggattagcattctggc

SEQ ID NO: 54183 - DNA, 21 bp, Artificial Sequence
  primer
gcccttgagggctagaaagac

SEQ ID NO: 54184 - DNA, 40 bp, Artificial Sequence
  primer
gtaaaacgacggccagtcatagaaaggcagtacatcagga

SEQ ID NO: 54185 - DNA, 40 bp, Artificial Sequence
  primer
gtaaaacgacggccagtttatggtcaaatggaaataaggc

SEQ ID NO: 54186 - DNA, 23 bp, Artificial Sequence
  primer
aagaaggtaaatgaaagggttgg

SEQ ID NO: 54187 - DNA, 23 bp, Artificial Sequence
  primer
gggacctattgacatggatgtag

SEQ ID NO: 54188 - DNA, 38 bp, Artificial Sequence
  primer
gtaaaacgacggccagtttgtgctgagaggttgctttc

SEQ ID NO: 54189 - DNA, 42 bp, Artificial Sequence
  primer
gtaaaacgacggccagtttgactatgttctgtcctgtagctg

SEQ ID NO: 54190 - DNA, 21 bp, Artificial Sequence
  primer
tcggtttgtaaggccacctac

SEQ ID NO: 54191 - DNA, 37 bp, Artificial Sequence
  primer
gtaaaacgacggccagtattaaaggtgcgagccactg

SEQ ID NO: 54192 - DNA, 21 bp, Artificial Sequence
  primer
gataggttctctcgtcgtggg

SEQ ID NO: 54193 - DNA, 38 bp, Artificial Sequence
  primer
gtaaaacgacggccagttgatgaggacagaggaccaag

SEQ ID NO: 54194 - DNA, 22 bp, Artificial Sequence
  primer
caacgtctattcatgattgcca

SEQ ID NO: 54195 - DNA, 35 bp, Artificial Sequence
  primer
gtaaaacgacggccagtcccagcttggactggatg

SEQ ID NO: 54196 - DNA, 28 bp, Artificial Sequence
  primer
ttgtatgagctttcattatgatttctgt

SEQ ID NO: 54197 - DNA, 38 bp, Artificial Sequence
  primer
gtaaaacgacggccagtctagagcctttccctttaccg

SEQ ID NO: 54198 - DNA, 38 bp, Artificial Sequence
  primer
gtaaaacgacggccagtagtggccagtgccagatttag

SEQ ID NO: 54199 - DNA, 38 bp, Artificial Sequence
  primer
gtaaaacgacggccagtttacacagctgggaagcactg

SEQ ID NO: 54200 - DNA, 38 bp, Artificial Sequence
  primer
gtaaaacgacggccagtcctgcaggagaaataagctgg

SEQ ID NO: 54201 - DNA, 39 bp, Artificial Sequence
  primer
gtaaaacgacggccagtcacttgagcccagaaattcaag

SEQ ID NO: 54202 - DNA, 21 bp, Artificial Sequence
  primer
taagtccctctctgaggctgg

SEQ ID NO: 54203 - DNA, 38 bp, Artificial Sequence
  primer
gtaaaacgacggccagttcctgagccatgactctgttg

SEQ ID NO: 54204 - DNA, 21 bp, Artificial Sequence
  primer
tgcctttgtgatggtaactgg

SEQ ID NO: 54205 - DNA, 38 bp, Artificial Sequence
  primer
gtaaaacgacggccagtggttagagggtggatgtggag

SEQ ID NO: 54206 - DNA, 38 bp, Artificial Sequence
  primer
gtaaaacgacggccagttttccggtcttactcacgttg

SEQ ID NO: 54207 - DNA, 38 bp, Artificial Sequence
  primer
gtaaaacgacggccagtgaagggaggagaatccaggag

SEQ ID NO: 54208 - DNA, 38 bp, Artificial Sequence
  primer
gtaaaacgacggccagtggctgaacagggagatgattc

SEQ ID NO: 54209 - DNA, 38 bp, Artificial Sequence
  primer
gtaaaacgacggccagtagtttgggtcactggagcaag

SEQ ID NO: 54210 - DNA, 38 bp, Artificial Sequence
  primer
gtaaaacgacggccagtagatgggctaccagtgctttg

SEQ ID NO: 54211 - DNA, 38 bp, Artificial Sequence
  primer
gtaaaacgacggccagttgctgtctcagctttcatttg

SEQ ID NO: 54212 - DNA, 21 bp, Artificial Sequence
  primer
acgacatccagttatccaggg

SEQ ID NO: 54213 - DNA, 38 bp, Artificial Sequence
  primer
gtaaaacgacggccagtccctacctttggtatcctccc

SEQ ID NO: 54214 - DNA, 38 bp, Artificial Sequence
  primer
gtaaaacgacggccagttagccaggcatctgtaatccc

SEQ ID NO: 54215 - DNA, 37 bp, Artificial Sequence
  primer
gtaaaacgacggccagtctaagcctgggttgggtctc

SEQ ID NO: 54216 - DNA, 38 bp, Artificial Sequence
  primer
gtaaaacgacggccagtaggataccgcctggaaagaag

SEQ ID NO: 54217 - DNA, 25 bp, Artificial Sequence
  primer
gggtaaaggaaaggatttgtaagac

SEQ ID NO: 54218 - DNA, 43 bp, Artificial Sequence
  primer
gtaaaacgacggccagttcctgttccctattgctaataaattg

SEQ ID NO: 54219 - DNA, 22 bp, Artificial Sequence
  primer
tctgcttcaagttgtgttctgg

SEQ ID NO: 54220 - DNA, 23 bp, Artificial Sequence
  primer
gaaacaaagatcttggatagggc

SEQ ID NO: 54221 - DNA, 28 bp, Artificial Sequence
  primer
cggtatggaaagtttagtaacaagttga

SEQ ID NO: 54222 - DNA, 21 bp, Artificial Sequence
  primer
ggttctgctggttgtgtaggg

SEQ ID NO: 54223 - DNA, 40 bp, Artificial Sequence
  primer
gtaaaacgacggccagtctccatgtaattgagagtggaca

SEQ ID NO: 54224 - DNA, 21 bp, Artificial Sequence
  primer
agcgcccagtagcatacacag

SEQ ID NO: 54225 - DNA, 21 bp, Artificial Sequence
  primer
ggagactttgagtgagtcggc

SEQ ID NO: 54226 - DNA, 36 bp, Artificial Sequence
  primer
gtaaaacgacggccagtagggatctcccatccttgc

SEQ ID NO: 54227 - DNA, 38 bp, Artificial Sequence
  primer
gtaaaacgacggccagtgacaaatgtgtcaccagcgag

SEQ ID NO: 54228 - DNA, 23 bp, Artificial Sequence
  primer
acaagatagatgaggatggcaag

SEQ ID NO: 54229 - DNA, 38 bp, Artificial Sequence
  primer
gtaaaacgacggccagtcttgaggaggatgaagatggg

SEQ ID NO: 54230 - DNA, 20 bp, Artificial Sequence
  primer
caccagcaaagaggtaagcg

SEQ ID NO: 54231 - DNA, 38 bp, Artificial Sequence
  primer
gtaaaacgacggccagtatggtgtcagcttctcaggtg

SEQ ID NO: 54232 - DNA, 19 bp, Artificial Sequence
  primer
agagctagagccggtgcag

SEQ ID NO: 54233 - DNA, 21 bp, Artificial Sequence
  primer
cctggctaaggacaagaccac

SEQ ID NO: 54234 - DNA, 37 bp, Artificial Sequence
  primer
gtaaaacgacggccagtagatgccacttgggtgtctg

SEQ ID NO: 54235 - DNA, 20 bp, Artificial Sequence
  primer
atgaatgctgtcatttccgc

SEQ ID NO: 54236 - DNA, 21 bp, Artificial Sequence
  primer
gatgcaccggactaaacttgg

SEQ ID NO: 54237 - DNA, 39 bp, Artificial Sequence
  primer
gtaaaacgacggccagtcatttgtacgtacttcctgggc

SEQ ID NO: 54238 - DNA, 38 bp, Artificial Sequence
  primer
gtaaaacgacggccagtgaagtgtccggtaccctgaag

SEQ ID NO: 54239 - DNA, 38 bp, Artificial Sequence
  primer
gtaaaacgacggccagtccttgagagccatattcctgc

SEQ ID NO: 54240 - DNA, 21 bp, Artificial Sequence
  primer
agaccatctctttcctggtgg

SEQ ID NO: 54241 - DNA, 38 bp, Artificial Sequence
  primer
gtaaaacgacggccagttgtgctgatgaaatggtaggg

SEQ ID NO: 54242 - DNA, 38 bp, Artificial Sequence
  primer
gtaaaacgacggccagtcacagctgtcctcatacccag

SEQ ID NO: 54243 - DNA, 21 bp, Artificial Sequence
  primer
agagggatctgtttccgtcac

SEQ ID NO: 54244 - DNA, 39 bp, Artificial Sequence
  primer
gtaaaacgacggccagtgcttgccattattacaagaggg

SEQ ID NO: 54245 - DNA, 21 bp, Artificial Sequence
  primer
gagtagcccatggcatatgaa

SEQ ID NO: 54246 - DNA, 23 bp, Artificial Sequence
  primer
aaggccttaccttagttgtggtg

SEQ ID NO: 54247 - DNA, 45 bp, Artificial Sequence
  primer
gtaaaacgacggccagtacattagaagttggtgacttaaacattc

SEQ ID NO: 54248 - DNA, 39 bp, Artificial Sequence
  primer
gtaaaacgacggccagtgtaggctagagggatacatggg

SEQ ID NO: 54249 - DNA, 39 bp, Artificial Sequence
  primer
gtaaaacgacggccagtggaatgtcgagggatcatgtag

SEQ ID NO: 54250 - DNA, 42 bp, Artificial Sequence
  primer
gtaaaacgacggccagtttcttaagtgtttgcagtcttaggc

SEQ ID NO: 54251 - DNA, 38 bp, Artificial Sequence
  primer
gtaaaacgacggccagtaaggtgtggtctggaatcagg

SEQ ID NO: 54252 - DNA, 43 bp, Artificial Sequence
  primer
gtaaaacgacggccagtgcagataaagtatttgattcacgttt

SEQ ID NO: 54253 - DNA, 21 bp, Artificial Sequence
  primer
tggtgaatggaataggtcgtg

SEQ ID NO: 54254 - DNA, 37 bp, Artificial Sequence
  primer
gtaaaacgacggccagtgcgcaaaggtatgtcatgct

SEQ ID NO: 54255 - DNA, 41 bp, Artificial Sequence
  primer
gtaaaacgacggccagtgatcttagaatggtttggcaagag

SEQ ID NO: 54256 - DNA, 36 bp, Artificial Sequence
  primer
gtaaaacgacggccagtgtctcagatggccagaggc

SEQ ID NO: 54257 - DNA, 21 bp, Artificial Sequence
  primer
gcaggcacagtgtcttattcg

SEQ ID NO: 54258 - DNA, 37 bp, Artificial Sequence
  primer
gtaaaacgacggccagtgtggtcttgccatttcgttc

SEQ ID NO: 54259 - DNA, 21 bp, Artificial Sequence
  primer
ctaagcctgggtcctcatctg

SEQ ID NO: 54260 - DNA, 38 bp, Artificial Sequence
  primer
gtaaaacgacggccagtcaccaaagagctaaagctgcc

SEQ ID NO: 54261 - DNA, 38 bp, Artificial Sequence
  primer
gtaaaacgacggccagtatcatcatccctgctctgagg

SEQ ID NO: 54262 - DNA, 39 bp, Artificial Sequence
  primer
gtaaaacgacggccagtaattacaaagcattctgcagcc

SEQ ID NO: 54263 - DNA, 37 bp, Artificial Sequence
  primer
gtaaaacgacggccagttttcagcattgtggacatgg

SEQ ID NO: 54264 - DNA, 37 bp, Artificial Sequence
  primer
gtaaaacgacggccagtgctggcagtaggtgagatgc

SEQ ID NO: 54265 - DNA, 38 bp, Artificial Sequence
  primer
gtaaaacgacggccagtctggatagttgagggcctctg

SEQ ID NO: 54266 - DNA, 21 bp, Artificial Sequence
  primer
tggctggtatgaaacaactgg

SEQ ID NO: 54267 - DNA, 21 bp, Artificial Sequence
  primer
atgagagcattcacctccagc

SEQ ID NO: 54268 - DNA, 37 bp, Artificial Sequence
  primer
gtaaaacgacggccagtgtggctcctgggttagatgg

SEQ ID NO: 54269 - DNA, 39 bp, Artificial Sequence
  primer
gtaaaacgacggccagtcagctgggaatctgacctagtg

SEQ ID NO: 54270 - DNA, 43 bp, Artificial Sequence
  primer
gtaaaacgacggccagtgagtgtcgtggaattaatgaaatatg

SEQ ID NO: 54271 - DNA, 38 bp, Artificial Sequence
  primer
gtaaaacgacggccagtgtggctgctactctcgagtcc

SEQ ID NO: 54272 - DNA, 38 bp, Artificial Sequence
  primer
gtaaaacgacggccagtagcaaggctttagactggtgc

SEQ ID NO: 54273 - DNA, 38 bp, Artificial Sequence
  primer
gtaaaacgacggccagtccaaagacctcccacttgttc

SEQ ID NO: 54274 - DNA, 38 bp, Artificial Sequence
  primer
gtaaaacgacggccagtagtatgcaccgtctgggtctc

SEQ ID NO: 54275 - DNA, 21 bp, Artificial Sequence
  primer
caggatctcgtgtcactcagg

SEQ ID NO: 54276 - DNA, 21 bp, Artificial Sequence
  primer
gcactgaggattcgtctctcc

SEQ ID NO: 54277 - DNA, 38 bp, Artificial Sequence
  primer
gtaaaacgacggccagtgcaaaggagttctttcccatc

SEQ ID NO: 54278 - DNA, 39 bp, Artificial Sequence
  primer
gtaaaacgacggccagtggacttgtgttgtttgcctctc

SEQ ID NO: 54279 - DNA, 38 bp, Artificial Sequence
  primer
gtaaaacgacggccagtcatcaggtgctaacagttggg

SEQ ID NO: 54280 - DNA, 21 bp, Artificial Sequence
  primer
gtaggtcacctctctggtggg

SEQ ID NO: 54281 - DNA, 38 bp, Artificial Sequence
  primer
gtaaaacgacggccagtctagggagttccttctctgcc

SEQ ID NO: 54282 - DNA, 39 bp, Artificial Sequence
  primer
gtaaaacgacggccagttgacatttgatcccaagtgttg

SEQ ID NO: 54283 - DNA, 38 bp, Artificial Sequence
  primer
gtaaaacgacggccagtcacagtccagcagaggttcag

SEQ ID NO: 54284 - DNA, 36 bp, Artificial Sequence
  primer
gtaaaacgacggccagtgtcctctcagggtcgttcg

SEQ ID NO: 54285 - DNA, 18 bp, Artificial Sequence
  primer
agccctgcgagtaggcag

SEQ ID NO: 54286 - DNA, 18 bp, Artificial Sequence
  primer
agtccgaggtgaggaccg

SEQ ID NO: 54287 - DNA, 24 bp, Artificial Sequence
  primer
tgctcacagtgaaagcatttagac

SEQ ID NO: 54288 - DNA, 21 bp, Artificial Sequence
  primer
cagcacagatactcctggcac

SEQ ID NO: 54289 - DNA, 38 bp, Artificial Sequence
  primer
gtaaaacgacggccagtcctccctgttatgccagtcac

SEQ ID NO: 54290 - DNA, 21 bp, Artificial Sequence
  primer
gaggttagggtgtgacttggg

SEQ ID NO: 54291 - DNA, 18 bp, Artificial Sequence
  primer
agcctgggagacagcgag

SEQ ID NO: 54292 - DNA, 21 bp, Artificial Sequence
  primer
tgacaccagaatgaacaagcg

SEQ ID NO: 54293 - DNA, 38 bp, Artificial Sequence
  primer
gtaaaacgacggccagtgaccctcaggccataatcatc

SEQ ID NO: 54294 - DNA, 38 bp, Artificial Sequence
  primer
gtaaaacgacggccagtttcactgtcacgctctgtgtg

SEQ ID NO: 54295 - DNA, 36 bp, Artificial Sequence
  primer
gtaaaacgacggccagtagtggctgtgcagagggag

SEQ ID NO: 54296 - DNA, 21 bp, Artificial Sequence
  primer
ggcatgcacactgaatctttc

SEQ ID NO: 54297 - DNA, 37 bp, Artificial Sequence
  primer
gtaaaacgacggccagtaatgtgcacctttcctgctg

SEQ ID NO: 54298 - DNA, 38 bp, Artificial Sequence
  primer
gtaaaacgacggccagtgaggtggtccagcattaccag

SEQ ID NO: 54299 - DNA, 38 bp, Artificial Sequence
  primer
gtaaaacgacggccagttgcttgtttccatgttaacgc

SEQ ID NO: 54300 - DNA, 21 bp, Artificial Sequence
  primer
atacccaggaccttgttcagc

SEQ ID NO: 54301 - DNA, 38 bp, Artificial Sequence
  primer
gtaaaacgacggccagtgtgttctgtgaatggctttgg

SEQ ID NO: 54302 - DNA, 21 bp, Artificial Sequence
  primer
tgtatgctgtccttctggcac

SEQ ID NO: 54303 - DNA, 38 bp, Artificial Sequence
  primer
gtaaaacgacggccagtctggagttgcgaggaggtaac

SEQ ID NO: 54304 - DNA, 38 bp, Artificial Sequence
  primer
gtaaaacgacggccagtaggaactaacgtcatgccgag

SEQ ID NO: 54305 - DNA, 21 bp, Artificial Sequence
  primer
gcctgtcttcagaaagggtca

SEQ ID NO: 54306 - DNA, 38 bp, Artificial Sequence
  primer
gtaaaacgacggccagtagggaggagggttgtaagctc

SEQ ID NO: 54307 - DNA, 38 bp, Artificial Sequence
  primer
gtaaaacgacggccagttgggaaggtagtttgtgagcc

SEQ ID NO: 54308 - DNA, 21 bp, Artificial Sequence
  primer
tttgccacctattgacagcac

SEQ ID NO: 54309 - DNA, 21 bp, Artificial Sequence
  primer
ctacttcccagggctgttgtc

SEQ ID NO: 54310 - DNA, 21 bp, Artificial Sequence
  primer
tttaggtgtggctagggaagg

SEQ ID NO: 54311 - DNA, 38 bp, Artificial Sequence
  primer
gtaaaacgacggccagtccaagaagttcatgagggacc

SEQ ID NO: 54312 - DNA, 21 bp, Artificial Sequence
  primer
tcgagatttcactgtatccgc

SEQ ID NO: 54313 - DNA, 39 bp, Artificial Sequence
  primer
gtaaaacgacggccagttctcaggaaagtagcagcttgg

SEQ ID NO: 54314 - DNA, 38 bp, Artificial Sequence
  primer
gtaaaacgacggccagtgcgtagatctggaacactccc

SEQ ID NO: 54315 - DNA, 21 bp, Artificial Sequence
  primer
tccagcgaccctgtaatatcg

SEQ ID NO: 54316 - DNA, 37 bp, Artificial Sequence
  primer
gtaaaacgacggccagtagggctatgcgcttaaggtg

SEQ ID NO: 54317 - DNA, 21 bp, Artificial Sequence
  primer
aacggttgtggatcttgaagc

SEQ ID NO: 54318 - DNA, 39 bp, Artificial Sequence
  primer
gtaaaacgacggccagttccaaatggaatacatggtgtg

SEQ ID NO: 54319 - DNA, 38 bp, Artificial Sequence
  primer
gtaaaacgacggccagttaccttgcagcagttaggtcg

SEQ ID NO: 54320 - DNA, 21 bp, Artificial Sequence
  primer
cccgggagagtgtttgatatg

SEQ ID NO: 54321 - DNA, 38 bp, Artificial Sequence
  primer
gtaaaacgacggccagtaagacagagacgcttggcttc

SEQ ID NO: 54322 - DNA, 38 bp, Artificial Sequence
  primer
gtaaaacgacggccagtaagtgctaggatcccaaaggg

SEQ ID NO: 54323 - DNA, 37 bp, Artificial Sequence
  primer
gtaaaacgacggccagtagtgctgtgttgtcgttccc

SEQ ID NO: 54324 - DNA, 38 bp, Artificial Sequence
  primer
gtaaaacgacggccagtccaacttgggctatttggaag

SEQ ID NO: 54325 - DNA, 38 bp, Artificial Sequence
  primer
gtaaaacgacggccagttggtggttaacaagtggatcg

SEQ ID NO: 54326 - DNA, 38 bp, Artificial Sequence
  primer
gtaaaacgacggccagttgtagccctacgtaaagcgtg

SEQ ID NO: 54327 - DNA, 39 bp, Artificial Sequence
  primer
gtaaaacgacggccagttgaggagcgtccatgttatttc

SEQ ID NO: 54328 - DNA, 40 bp, Artificial Sequence
  primer
gtaaaacgacggccagtaacatgggtcctcttgttctatg

SEQ ID NO: 54329 - DNA, 23 bp, Artificial Sequence
  primer
cctgagacaaccatgttcttgtg

SEQ ID NO: 54330 - DNA, 38 bp, Artificial Sequence
  primer
gtaaaacgacggccagtacgttcaaggtcactcaaggg

SEQ ID NO: 54331 - DNA, 20 bp, Artificial Sequence
  primer
tgggatgacagtgtgacgtg

SEQ ID NO: 54332 - DNA, 39 bp, Artificial Sequence
  primer
gtaaaacgacggccagtccacccttcccaaattattagc

SEQ ID NO: 54333 - DNA, 20 bp, Artificial Sequence
  primer
gatcgctatgatgaccgagg

SEQ ID NO: 54334 - DNA, 22 bp, Artificial Sequence
  primer
tctgagaaatctggctttcagc

SEQ ID NO: 54335 - DNA, 20 bp, Artificial Sequence
  primer
gggtcagcatgggtctaagg

SEQ ID NO: 54336 - DNA, 21 bp, Artificial Sequence
  primer
tccacactgttgagatcctgg

SEQ ID NO: 54337 - DNA, 41 bp, Artificial Sequence
  primer
gtaaaacgacggccagtactgctttcattgtaatctttccc

SEQ ID NO: 54338 - DNA, 38 bp, Artificial Sequence
  primer
gtaaaacgacggccagttcaggaaggaagtctgggttg

SEQ ID NO: 54339 - DNA, 38 bp, Artificial Sequence
  primer
gtaaaacgacggccagttgttcagtgccttgaaactgc

SEQ ID NO: 54340 - DNA, 39 bp, Artificial Sequence
  primer
gtaaaacgacggccagtccattgccaaaggatcagtatc

SEQ ID NO: 54341 - DNA, 20 bp, Artificial Sequence
  primer
ctctcgttactcacgcagcc

SEQ ID NO: 54342 - DNA, 18 bp, Artificial Sequence
  primer
gagccaagatcgcacgac

SEQ ID NO: 54343 - DNA, 37 bp, Artificial Sequence
  primer
gtaaaacgacggccagtacaggtgggttgcttctacc

SEQ ID NO: 54344 - DNA, 28 bp, Artificial Sequence
  primer
aaattgactccttagaaacaagtaaaca

SEQ ID NO: 54345 - DNA, 24 bp, Artificial Sequence
  primer
gcctctggctttaagtcttatgtg

SEQ ID NO: 54346 - DNA, 24 bp, Artificial Sequence
  primer
tgcaaatacagaagagacatttgc

SEQ ID NO: 54347 - DNA, 24 bp, Artificial Sequence
  primer
tgaagagtaaattgtgctgaaagg

SEQ ID NO: 54348 - DNA, 20 bp, Artificial Sequence
  primer
gagatagccgcttccaaacc

SEQ ID NO: 54349 - DNA, 38 bp, Artificial Sequence
  primer
gtaaaacgacggccagttagttcgtatgacctggtggc

SEQ ID NO: 54350 - DNA, 22 bp, Artificial Sequence
  primer
tgtggaggtggtaaggattgac

SEQ ID NO: 54351 - DNA, 38 bp, Artificial Sequence
  primer
gtaaaacgacggccagttcttccctcacaacaccacac

SEQ ID NO: 54352 - DNA, 23 bp, Artificial Sequence
  primer
cccatttcttctctccctagtcc

SEQ ID NO: 54353 - DNA, 38 bp, Artificial Sequence
  primer
gtaaaacgacggccagtggtttcttgtgttgcctttgc

SEQ ID NO: 54354 - DNA, 21 bp, Artificial Sequence
  primer
ctgctagaaagactggcctgc

SEQ ID NO: 54355 - DNA, 41 bp, Artificial Sequence
  primer
gtaaaacgacggccagtgcagcataataaatcaatactggg

SEQ ID NO: 54356 - DNA, 19 bp, Artificial Sequence
  primer
acagagcgagcctgtctca

SEQ ID NO: 54357 - DNA, 22 bp, Artificial Sequence
  primer
tgtttgcacctaggatttggag

SEQ ID NO: 54358 - DNA, 21 bp, Artificial Sequence
  primer
cactgacttgctttcctccag

SEQ ID NO: 54359 - DNA, 21 bp, Artificial Sequence
  primer
ggtgtttgagttcttgccaac

SEQ ID NO: 54360 - DNA, 36 bp, Artificial Sequence
  primer
gtaaaacgacggccagtgcggactacaaatcccagg

SEQ ID NO: 54361 - DNA, 39 bp, Artificial Sequence
  primer
gtaaaacgacggccagtgagaatctgctgcctctactgc

SEQ ID NO: 54362 - DNA, 21 bp, Artificial Sequence
  primer
tagcaatgaaagaatggcctc

SEQ ID NO: 54363 - DNA, 18 bp, Artificial Sequence
  primer
acgagggaacgggaggaa

SEQ ID NO: 54364 - DNA, 41 bp, Artificial Sequence
  primer
gtaaaacgacggccagtaggcagagaggttagagattatgc

SEQ ID NO: 54365 - DNA, 22 bp, Artificial Sequence
  primer
tcagattaagaccagccaaagc

SEQ ID NO: 54366 - DNA, 37 bp, Artificial Sequence
  primer
gtaaaacgacggccagtcttcctagcagatagggcgg

SEQ ID NO: 54367 - DNA, 21 bp, Artificial Sequence
  primer
agaattgtcccagcctttgag

SEQ ID NO: 54368 - DNA, 26 bp, Artificial Sequence
  primer
tgagtaccaatgattctatctccaag

SEQ ID NO: 54369 - DNA, 38 bp, Artificial Sequence
  primer
gtaaaacgacggccagtctgcttgagcttgtgagaacc

SEQ ID NO: 54370 - DNA, 20 bp, Artificial Sequence
  primer
tagcaagatgtggtggtggg

SEQ ID NO: 54371 - DNA, 38 bp, Artificial Sequence
  primer
gtaaaacgacggccagttgactctcttccaaccatccc

SEQ ID NO: 54372 - DNA, 24 bp, Artificial Sequence
  primer
ttgaacattacaacgaagaccttg

SEQ ID NO: 54373 - DNA, 37 bp, Artificial Sequence
  primer
gtaaaacgacggccagttacctgcacgagaagtctgc

SEQ ID NO: 54374 - DNA, 38 bp, Artificial Sequence
  primer
gtaaaacgacggccagtagaaattacccaggatggagg

SEQ ID NO: 54375 - DNA, 18 bp, Artificial Sequence
  primer
tcgcttgaaactggcagg

SEQ ID NO: 54376 - DNA, 44 bp, Artificial Sequence
  primer
gtaaaacgacggccagttttcatcttatctgtcatactagccaa

SEQ ID NO: 54377 - DNA, 38 bp, Artificial Sequence
  primer
gtaaaacgacggccagtagcggaacacgttggtctaag

SEQ ID NO: 54378 - DNA, 38 bp, Artificial Sequence
  primer
gtaaaacgacggccagttgagggagatccatcttgtgg

SEQ ID NO: 54379 - DNA, 21 bp, Artificial Sequence
  primer
gttgaggtccacatagcccac

SEQ ID NO: 54380 - DNA, 42 bp, Artificial Sequence
  primer
gtaaaacgacggccagttcagcttctgcttaacatacctttc

SEQ ID NO: 54381 - DNA, 38 bp, Artificial Sequence
  primer
gtaaaacgacggccagtgcctaaatgcttgggaaattg

SEQ ID NO: 54382 - DNA, 38 bp, Artificial Sequence
  primer
gtaaaacgacggccagtttggcctatgctaccaatgtg

SEQ ID NO: 54383 - DNA, 23 bp, Artificial Sequence
  primer
gatttattagaccagtgggaggc

SEQ ID NO: 54384 - DNA, 39 bp, Artificial Sequence
  primer
gtaaaacgacggccagtcgcagagcccttcattcttaac

SEQ ID NO: 54385 - DNA, 39 bp, Artificial Sequence
  primer
gtaaaacgacggccagtttggatagggtttgaatgaagc

SEQ ID NO: 54386 - DNA, 21 bp, Artificial Sequence
  primer
ctcttggcatctctgggactc

SEQ ID NO: 54387 - DNA, 38 bp, Artificial Sequence
  primer
gtaaaacgacggccagttggattgttaaggctcttgcc

SEQ ID NO: 54388 - DNA, 21 bp, Artificial Sequence
  primer
gtggtcttggaaggattggtc

SEQ ID NO: 54389 - DNA, 21 bp, Artificial Sequence
  primer
ttggcttgtcttgtcttgacc

SEQ ID NO: 54390 - DNA, 22 bp, Artificial Sequence
  primer
tgacagacacctaattccctgg

SEQ ID NO: 54391 - DNA, 21 bp, Artificial Sequence
  primer
gctgaaagtggaactcaaggg

SEQ ID NO: 54392 - DNA, 38 bp, Artificial Sequence
  primer
gtaaaacgacggccagtgatgtctgttctgccctggac

SEQ ID NO: 54393 - DNA, 21 bp, Artificial Sequence
  primer
tggtggagtgacttgaactgg

SEQ ID NO: 54394 - DNA, 21 bp, Artificial Sequence
  primer
ctgagcctaatctcgcagtcc

SEQ ID NO: 54395 - DNA, 21 bp, Artificial Sequence
  primer
cacttagcaaaccggttccag

SEQ ID NO: 54396 - DNA, 21 bp, Artificial Sequence
  primer
cttaagcccagtcagtgagcc

SEQ ID NO: 54397 - DNA, 38 bp, Artificial Sequence
  primer
gtaaaacgacggccagttttggctgctttctatttccc

SEQ ID NO: 54398 - DNA, 38 bp, Artificial Sequence
  primer
gtaaaacgacggccagtgccttcaaggaggtaagggag

SEQ ID NO: 54399 - DNA, 21 bp, Artificial Sequence
  primer
gaaagggttgagaatggcttg

SEQ ID NO: 54400 - DNA, 38 bp, Artificial Sequence
  primer
gtaaaacgacggccagttggtgctggacaaggttagtg

SEQ ID NO: 54401 - DNA, 38 bp, Artificial Sequence
  primer
gtaaaacgacggccagttggaggcgtgtagtagtggtg

SEQ ID NO: 54402 - DNA, 38 bp, Artificial Sequence
  primer
gtaaaacgacggccagtgcatctgtcatgcctaagtcc

SEQ ID NO: 54403 - DNA, 21 bp, Artificial Sequence
  primer
agttaaaggctcttggagggc

SEQ ID NO: 54404 - DNA, 40 bp, Artificial Sequence
  primer
gtaaaacgacggccagttgagtgcttattgctaggtttgg

SEQ ID NO: 54405 - DNA, 38 bp, Artificial Sequence
  primer
gtaaaacgacggccagtggtagaggtccttgcatctgg

SEQ ID NO: 54406 - DNA, 37 bp, Artificial Sequence
  primer
gtaaaacgacggccagttgctgcctccagtttctgac

SEQ ID NO: 54407 - DNA, 38 bp, Artificial Sequence
  primer
gtaaaacgacggccagttgacttcctgttagtgccacg

SEQ ID NO: 54408 - DNA, 38 bp, Artificial Sequence
  primer
gtaaaacgacggccagtgtttggttgcatatggtggtg

SEQ ID NO: 54409 - DNA, 38 bp, Artificial Sequence
  primer
gtaaaacgacggccagtgggcaatagaggaggtttgtg

SEQ ID NO: 54410 - DNA, 38 bp, Artificial Sequence
  primer
gtaaaacgacggccagtgctaagaacaaggcccaacag

SEQ ID NO: 54411 - DNA, 21 bp, Artificial Sequence
  primer
agtctgggagaggaatggagg

SEQ ID NO: 54412 - DNA, 38 bp, Artificial Sequence
  primer
gtaaaacgacggccagtatgaaagtaggcagtgggagc

SEQ ID NO: 54413 - DNA, 38 bp, Artificial Sequence
  primer
gtaaaacgacggccagtaggacacagaggtggccttag

SEQ ID NO: 54414 - DNA, 21 bp, Artificial Sequence
  primer
accagaggaaaggtggtaggg

SEQ ID NO: 54415 - DNA, 21 bp, Artificial Sequence
  primer
accagaccgtaggaatggaag

SEQ ID NO: 54416 - DNA, 38 bp, Artificial Sequence
  primer
gtaaaacgacggccagtattctagcatttgaggctggc

SEQ ID NO: 54417 - DNA, 38 bp, Artificial Sequence
  primer
gtaaaacgacggccagtgggtgttcgactggatagagg

SEQ ID NO: 54418 - DNA, 38 bp, Artificial Sequence
  primer
gtaaaacgacggccagtctgacagacaagtggagggag

SEQ ID NO: 54419 - DNA, 38 bp, Artificial Sequence
  primer
gtaaaacgacggccagtttgaacagtggaacttgggag

SEQ ID NO: 54420 - DNA, 22 bp, Artificial Sequence
  primer
tgacagacacctaattccctgg

SEQ ID NO: 54421 - DNA, 38 bp, Artificial Sequence
  primer
gtaaaacgacggccagtacagcacttctaccctagccg

SEQ ID NO: 54422 - DNA, 38 bp, Artificial Sequence
  primer
gtaaaacgacggccagtgccaggatctgaaatacgttg

SEQ ID NO: 54423 - DNA, 21 bp, Artificial Sequence
  primer
ttgggtccgagttcagtcttc

SEQ ID NO: 54424 - DNA, 38 bp, Artificial Sequence
  primer
gtaaaacgacggccagtcagagttggctttcttggagg

SEQ ID NO: 54425 - DNA, 38 bp, Artificial Sequence
  primer
gtaaaacgacggccagttttatttcagcatccctttgg

SEQ ID NO: 54426 - DNA, 38 bp, Artificial Sequence
  primer
gtaaaacgacggccagtgactcccaggagatggatgtg

SEQ ID NO: 54427 - DNA, 38 bp, Artificial Sequence
  primer
gtaaaacgacggccagtgaagcaaagcaccgtaagtgg

SEQ ID NO: 54428 - DNA, 21 bp, Artificial Sequence
  primer
ttcagacgcctcctaatttcc

SEQ ID NO: 54429 - DNA, 39 bp, Artificial Sequence
  primer
gtaaaacgacggccagtggaactgtgaatgagtcagtgc

SEQ ID NO: 54430 - DNA, 38 bp, Artificial Sequence
  primer
gtaaaacgacggccagtgccaaggtacgtgtgtagctg

SEQ ID NO: 54431 - DNA, 38 bp, Artificial Sequence
  primer
gtaaaacgacggccagttcagtactttgcccgaatgtg

SEQ ID NO: 54432 - DNA, 18 bp, Artificial Sequence
  primer
gtgagccatcatgcccag

SEQ ID NO: 54433 - DNA, 38 bp, Artificial Sequence
  primer
gtaaaacgacggccagtaacaatggttgcgttaagctg

SEQ ID NO: 54434 - DNA, 38 bp, Artificial Sequence
  primer
gtaaaacgacggccagtggctcatccctttggtacttg

SEQ ID NO: 54435 - DNA, 44 bp, Artificial Sequence
  primer
gtaaaacgacggccagtttaaacctgttaatgtggagtaccttc

SEQ ID NO: 54436 - DNA, 21 bp, Artificial Sequence
  primer
cactcaaacaccacctctggg

SEQ ID NO: 54437 - DNA, 36 bp, Artificial Sequence
  primer
gtaaaacgacggccagtaaagccaccaccgtcaaag

SEQ ID NO: 54438 - DNA, 38 bp, Artificial Sequence
  primer
gtaaaacgacggccagtgggatagccacaagtgacaac

SEQ ID NO: 54439 - DNA, 38 bp, Artificial Sequence
  primer
gtaaaacgacggccagtaagctctgctctctggacagg

SEQ ID NO: 54440 - DNA, 42 bp, Artificial Sequence
  primer
gtaaaacgacggccagtgaagcgtaggagactaagagttgtc

SEQ ID NO: 54441 - DNA, 21 bp, Artificial Sequence
  primer
agtgccctgtatgctctccag

SEQ ID NO: 54442 - DNA, 38 bp, Artificial Sequence
  primer
gtaaaacgacggccagtagctctgtgttgtcccaaatc

SEQ ID NO: 54443 - DNA, 19 bp, Artificial Sequence
  primer
cgggtgacagagcaagacc

SEQ ID NO: 54444 - DNA, 20 bp, Artificial Sequence
  primer
tttgggaacccagcaatagg

SEQ ID NO: 54445 - DNA, 21 bp, Artificial Sequence
  primer
taatgtgtttgacccaatcgc

SEQ ID NO: 54446 - DNA, 37 bp, Artificial Sequence
  primer
gtaaaacgacggccagtgggattgtgcagagacacag

SEQ ID NO: 54447 - DNA, 38 bp, Artificial Sequence
  primer
gtaaaacgacggccagtgacaggtttcccagtttgcac

SEQ ID NO: 54448 - DNA, 38 bp, Artificial Sequence
  primer
gtaaaacgacggccagtcttccctacttgcttgggttc

SEQ ID NO: 54449 - DNA, 21 bp, Artificial Sequence
  primer
agacattgaaagaattggccc

SEQ ID NO: 54450 - DNA, 21 bp, Artificial Sequence
  primer
ttgcacagaaacatcagaccc

SEQ ID NO: 54451 - DNA, 21 bp, Artificial Sequence
  primer
tgccattgactcttgaattgg

SEQ ID NO: 54452 - DNA, 42 bp, Artificial Sequence
  primer
gtaaaacgacggccagtcagccaactatttgtttggtatagg

SEQ ID NO: 54453 - DNA, 25 bp, Artificial Sequence
  primer
tctaataccacatgctgaacacaga

SEQ ID NO: 54454 - DNA, 24 bp, Artificial Sequence
  primer
agtttgttattgatcgaaacatcg

SEQ ID NO: 54455 - DNA, 38 bp, Artificial Sequence
  primer
gtaaaacgacggccagtggttccaaagctggtgcttac

SEQ ID NO: 54456 - DNA, 38 bp, Artificial Sequence
  primer
gtaaaacgacggccagttgcttggcgtagtcatcagac

SEQ ID NO: 54457 - DNA, 26 bp, Artificial Sequence
  primer
tttctgtcactagttcacagtccttg

SEQ ID NO: 54458 - DNA, 22 bp, Artificial Sequence
  primer
gcttacctgtggttcagtcagc

SEQ ID NO: 54459 - DNA, 38 bp, Artificial Sequence
  primer
gtaaaacgacggccagtttgctatcagattctcacggg

SEQ ID NO: 54460 - DNA, 38 bp, Artificial Sequence
  primer
gtaaaacgacggccagtgagcctgagaggttgaagctg

SEQ ID NO: 54461 - DNA, 22 bp, Artificial Sequence
  primer
cctgttctttgtatccattggc

SEQ ID NO: 54462 - DNA, 38 bp, Artificial Sequence
  primer
gtaaaacgacggccagttcctgccatgggattaaagat

SEQ ID NO: 54463 - DNA, 39 bp, Artificial Sequence
  primer
gtaaaacgacggccagtccacatggatcccagtttaatg

SEQ ID NO: 54464 - DNA, 38 bp, Artificial Sequence
  primer
gtaaaacgacggccagtgcttgttaggaatgcctggtc

SEQ ID NO: 54465 - DNA, 42 bp, Artificial Sequence
  primer
gtaaaacgacggccagtggtgcctcacacatctaatgttatc

SEQ ID NO: 54466 - DNA, 38 bp, Artificial Sequence
  primer
gtaaaacgacggccagtcttcatctttgaagcaatggg

SEQ ID NO: 54467 - DNA, 39 bp, Artificial Sequence
  primer
gtaaaacgacggccagttgtcctgttcatggaagtttct

SEQ ID NO: 54468 - DNA, 40 bp, Artificial Sequence
  primer
gtaaaacgacggccagtccagtcactttgtggctagactg

SEQ ID NO: 54469 - DNA, 19 bp, Artificial Sequence
  primer
gtcctggagctttggcttg

SEQ ID NO: 54470 - DNA, 21 bp, Artificial Sequence
  primer
gggtttgcactgtttgacttc

SEQ ID NO: 54471 - DNA, 21 bp, Artificial Sequence
  primer
ggatgacagagcaagaccctg

SEQ ID NO: 54472 - DNA, 38 bp, Artificial Sequence
  primer
gtaaaacgacggccagtgcctcaagtgatcctcctgtc

SEQ ID NO: 54473 - DNA, 21 bp, Artificial Sequence
  primer
gggcaatagagtgaggctctg

SEQ ID NO: 54474 - DNA, 23 bp, Artificial Sequence
  primer
tcaagagcaagtatggtgaattg

SEQ ID NO: 54475 - DNA, 39 bp, Artificial Sequence
  primer
gtaaaacgacggccagttgtcatcccttcttctccagac

SEQ ID NO: 54476 - DNA, 38 bp, Artificial Sequence
  primer
gtaaaacgacggccagtatgtctgtcaatgtcaaccgc

SEQ ID NO: 54477 - DNA, 41 bp, Artificial Sequence
  primer
gtaaaacgacggccagtggtgttcgtacaaatgtgagtgag

SEQ ID NO: 54478 - DNA, 38 bp, Artificial Sequence
  primer
gtaaaacgacggccagtttgcatgtgaagctgtctgtg

SEQ ID NO: 54479 - DNA, 21 bp, Artificial Sequence
  primer
aaacgttaatgatgggcaatg

SEQ ID NO: 54480 - DNA, 38 bp, Artificial Sequence
  primer
gtaaaacgacggccagttggatggagatggacttgatg

SEQ ID NO: 54481 - DNA, 37 bp, Artificial Sequence
  primer
gtaaaacgacggccagtggactggctggtgtcttgag

SEQ ID NO: 54482 - DNA, 38 bp, Artificial Sequence
  primer
gtaaaacgacggccagtggcccttacaaagtaacaggg

SEQ ID NO: 54483 - DNA, 21 bp, Artificial Sequence
  primer
gacttgttaggacccagtccc

SEQ ID NO: 54484 - DNA, 38 bp, Artificial Sequence
  primer
gtaaaacgacggccagtgcataacagagctgttccgtg

SEQ ID NO: 54485 - DNA, 38 bp, Artificial Sequence
  primer
gtaaaacgacggccagttgggatagattggaggtcctg

SEQ ID NO: 54486 - DNA, 38 bp, Artificial Sequence
  primer
gtaaaacgacggccagtctggttcaattccaacactcc

SEQ ID NO: 54487 - DNA, 38 bp, Artificial Sequence
  primer
gtaaaacgacggccagtagagcttgtgctgggagagag

SEQ ID NO: 54488 - DNA, 39 bp, Artificial Sequence
  primer
gtaaaacgacggccagtcgactgtggagaagagatcctg

SEQ ID NO: 54489 - DNA, 38 bp, Artificial Sequence
  primer
gtaaaacgacggccagtatgagacgtttccctgcctac

SEQ ID NO: 54490 - DNA, 39 bp, Artificial Sequence
  primer
gtaaaacgacggccagtcagcattggtattgtgctcttg

SEQ ID NO: 54491 - DNA, 21 bp, Artificial Sequence
  primer
ggaagtaccgggaggagtaaa

SEQ ID NO: 54492 - DNA, 25 bp, Artificial Sequence
  primer
ggaagttgtcttacaaaccactctg

SEQ ID NO: 54493 - DNA, 19 bp, Artificial Sequence
  primer
agtcagccgggagacagtg

SEQ ID NO: 54494 - DNA, 38 bp, Artificial Sequence
  primer
gtaaaacgacggccagtgaagcagatgtagggaggctg

SEQ ID NO: 54495 - DNA, 20 bp, Artificial Sequence
  primer
ccaaagaacaggagcctcaa

SEQ ID NO: 54496 - DNA, 21 bp, Artificial Sequence
  primer
ccaacctctcttgcttgtttg

SEQ ID NO: 54497 - DNA, 38 bp, Artificial Sequence
  primer
gtaaaacgacggccagtaagaagtgggatgggtcagag

SEQ ID NO: 54498 - DNA, 21 bp, Artificial Sequence
  primer
gaagatgatgacgcctccttc

SEQ ID NO: 54499 - DNA, 21 bp, Artificial Sequence
  primer
atggtccttgaattgtggttg

SEQ ID NO: 54500 - DNA, 41 bp, Artificial Sequence
  primer
gtaaaacgacggccagtcagattgctcgatacataagttgc

SEQ ID NO: 54501 - DNA, 39 bp, Artificial Sequence
  primer
gtaaaacgacggccagttgtggtgaatgaaatgctatcc

SEQ ID NO: 54502 - DNA, 18 bp, Artificial Sequence
  primer
gcaggtgcctgtaatccc

SEQ ID NO: 54503 - DNA, 19 bp, Artificial Sequence
  primer
gggcatctgtagtcccagc

SEQ ID NO: 54504 - DNA, 43 bp, Artificial Sequence
  primer
gtaaaacgacggccagtccctgctttaaagtctcttatcttga

SEQ ID NO: 54505 - DNA, 21 bp, Artificial Sequence
  primer
tggatgcaggttgtagcattc

SEQ ID NO: 54506 - DNA, 19 bp, Artificial Sequence
  primer
cgtacttgggcatgtggac

SEQ ID NO: 54507 - DNA, 24 bp, Artificial Sequence
  primer
ctttgctggttaactcactgtttc

SEQ ID NO: 54508 - DNA, 38 bp, Artificial Sequence
  primer
gtaaaacgacggccagtggtagatgagcctttggcaag

SEQ ID NO: 54509 - DNA, 21 bp, Artificial Sequence
  primer
taagagcaggtgccgataagc

SEQ ID NO: 54510 - DNA, 41 bp, Artificial Sequence
  primer
gtaaaacgacggccagtgcttctagtgaggcacacctattc

SEQ ID NO: 54511 - DNA, 21 bp, Artificial Sequence
  primer
gcacaggtgatggaggtaatg

SEQ ID NO: 54512 - DNA, 21 bp, Artificial Sequence
  primer
accggtttgttagttggtgtg

SEQ ID NO: 54513 - DNA, 21 bp, Artificial Sequence
  primer
cacaggttctgtgatgccttg

SEQ ID NO: 54514 - DNA, 20 bp, Artificial Sequence
  primer
aagtgaatggtggttggtcg

SEQ ID NO: 54515 - DNA, 20 bp, Artificial Sequence
  primer
tgttggaacatgaccctcag

SEQ ID NO: 54516 - DNA, 38 bp, Artificial Sequence
  primer
gtaaaacgacggccagtaatgggagaagcctgatgttc

SEQ ID NO: 54517 - DNA, 21 bp, Artificial Sequence
  primer
gtggtgccagcctagtttacc

SEQ ID NO: 54518 - DNA, 38 bp, Artificial Sequence
  primer
gtaaaacgacggccagttttagtacagtgagagcgggc

SEQ ID NO: 54519 - DNA, 37 bp, Artificial Sequence
  primer
gtaaaacgacggccagtctgccagttggcaagaagac

SEQ ID NO: 54520 - DNA, 21 bp, Artificial Sequence
  primer
acattcctcaaagcacaatcg

SEQ ID NO: 54521 - DNA, 38 bp, Artificial Sequence
  primer
gtaaaacgacggccagttaggctcaactgatcctcctg

SEQ ID NO: 54522 - DNA, 21 bp, Artificial Sequence
  primer
cttgagcctgggagtttgaag

SEQ ID NO: 54523 - DNA, 38 bp, Artificial Sequence
  primer
gtaaaacgacggccagtaatgcttagagagggccagtg

SEQ ID NO: 54524 - DNA, 21 bp, Artificial Sequence
  primer
tcagctttcacgagagtttgg

SEQ ID NO: 54525 - DNA, 21 bp, Artificial Sequence
  primer
aatttcacaaccagagacggg

SEQ ID NO: 54526 - DNA, 39 bp, Artificial Sequence
  primer
gtaaaacgacggccagttgtcaacttcccataaacccag

SEQ ID NO: 54527 - DNA, 38 bp, Artificial Sequence
  primer
gtaaaacgacggccagtctcccagcacagggctataag

SEQ ID NO: 54528 - DNA, 35 bp, Artificial Sequence
  primer
gtaaaacgacggccagttccctttgcctctccgtg

SEQ ID NO: 54529 - DNA, 35 bp, Artificial Sequence
  primer
gtaaaacgacggccagtgagcaccttcgccctcag

SEQ ID NO: 54530 - DNA, 38 bp, Artificial Sequence
  primer
gtaaaacgacggccagtaccacagtggaacctgagatg

SEQ ID NO: 54531 - DNA, 36 bp, Artificial Sequence
  primer
gtaaaacgacggccagtgggacttcccaaccctgac

SEQ ID NO: 54532 - DNA, 20 bp, Artificial Sequence
  primer
cccatcttgcgtgctcttac

SEQ ID NO: 54533 - DNA, 22 bp, Artificial Sequence
  primer
tggagtttcaaagaattggagc

SEQ ID NO: 54534 - DNA, 37 bp, Artificial Sequence
  primer
gtaaaacgacggccagtggtgctgccttaagttgtgc

SEQ ID NO: 54535 - DNA, 39 bp, Artificial Sequence
  primer
gtaaaacgacggccagtgccagttacttgggtctatccc

SEQ ID NO: 54536 - DNA, 38 bp, Artificial Sequence
  primer
gtaaaacgacggccagtagatgacaaggtctccaagcc

SEQ ID NO: 54537 - DNA, 21 bp, Artificial Sequence
  primer
taagacgggtccatcacttcc

SEQ ID NO: 54538 - DNA, 38 bp, Artificial Sequence
  primer
gtaaaacgacggccagtatgaccacaagggtcagcttc

SEQ ID NO: 54539 - DNA, 21 bp, Artificial Sequence
  primer
ggacagagacaggaaactgcc

SEQ ID NO: 54540 - DNA, 20 bp, Artificial Sequence
  primer
catcttgcgtgctcctagtg

SEQ ID NO: 54541 - DNA, 39 bp, Artificial Sequence
  primer
gtaaaacgacggccagttggagtttcaaagaattggagc

SEQ ID NO: 54542 - DNA, 38 bp, Artificial Sequence
  primer
gtaaaacgacggccagtcgttcttgggaaactggagtg

SEQ ID NO: 54543 - DNA, 38 bp, Artificial Sequence
  primer
gtaaaacgacggccagtaagcagccagttacttgggtc

SEQ ID NO: 54544 - DNA, 38 bp, Artificial Sequence; identical to SEQ ID NO: 54536
  primer

SEQ ID NO: 54545 - DNA, 21 bp, Artificial Sequence
  primer
ggatggaagatggtaacaggg

SEQ ID NO: 54546 - DNA, 38 bp, Artificial Sequence
  primer
gtaaaacgacggccagtcaaggaccagcttcagaggac

SEQ ID NO: 54547 - DNA, 21 bp, Artificial Sequence
  primer
tactgtagtgtgggctgcctg

SEQ ID NO: 54548 - DNA, 21 bp, Artificial Sequence
  primer
ctttggctgtcacttgtccat

SEQ ID NO: 54549 - DNA, 21 bp, Artificial Sequence
  primer
tggttactgaggtccagaggg

SEQ ID NO: 54550 - DNA, 39 bp, Artificial Sequence
  primer
gtaaaacgacggccagttgcacaacctatacagccattg

SEQ ID NO: 54551 - DNA, 38 bp, Artificial Sequence
  primer
gtaaaacgacggccagtagttctctaccctgtccctgc

SEQ ID NO: 54552 - DNA, 38 bp, Artificial Sequence
  primer
gtaaaacgacggccagtctcagaggtggaatagcctgg

SEQ ID NO: 54553 - DNA, 38 bp, Artificial Sequence
  primer
gtaaaacgacggccagtaagaactgtgggccttgaatg

SEQ ID NO: 54554 - DNA, 21 bp, Artificial Sequence
  primer
gcagagcgagactccatctaa

SEQ ID NO: 54555 - DNA, 21 bp, Artificial Sequence
  primer
agagaggtcaatccctctccc

SEQ ID NO: 54556 - DNA, 38 bp, Artificial Sequence
  primer
gtaaaacgacggccagtcctccatctgcagtgagtgag

SEQ ID NO: 54557 - DNA, 21 bp, Artificial Sequence
  primer
ctggaaagccctgctctagtt

SEQ ID NO: 54558 - DNA, 38 bp, Artificial Sequence
  primer
gtaaaacgacggccagttggagaatcagaatgtgaccc

SEQ ID NO: 54559 - DNA, 38 bp, Artificial Sequence; identical to SEQ ID NO: 54551
  primer

SEQ ID NO: 54560 - DNA, 37 bp, Artificial Sequence
  primer
gtaaaacgacggccagtgcatctcagaggcggaatag

SEQ ID NO: 54561 - DNA, 37 bp, Artificial Sequence
  primer
gtaaaacgacggccagtcagagcagaagaactgtgcg

SEQ ID NO: 54562 - DNA, 22 bp, Artificial Sequence
  primer
caggtaatgtcggagtttctcg

SEQ ID NO: 54563 - DNA, 21 bp, Artificial Sequence
  primer
tctaaattcatgctggccatt

SEQ ID NO: 54564 - DNA, 40 bp, Artificial Sequence
  primer
gtaaaacgacggccagtgagaccaagaatccagactgttc

SEQ ID NO: 54565 - DNA, 21 bp, Artificial Sequence
  primer
accacctggtgaaataaagcc

SEQ ID NO: 54566 - DNA, 37 bp, Artificial Sequence
  primer
gtaaaacgacggccagtctatggccctgtagggcttc

SEQ ID NO: 54567 - DNA, 21 bp, Artificial Sequence
  primer
atgcatgggaaatgtttcaag

SEQ ID NO: 54568 - DNA, 21 bp, Artificial Sequence
  primer
atattgggtgactgctctggg

SEQ ID NO: 54569 - DNA, 20 bp, Artificial Sequence
  primer
ctattggatgagcagcctcg

SEQ ID NO: 54570 - DNA, 21 bp, Artificial Sequence
  primer
aatgtggctcggtagtccaac

SEQ ID NO: 54571 - DNA, 38 bp, Artificial Sequence
  primer
gtaaaacgacggccagttcagtctcttgctttcggagg

SEQ ID NO: 54572 - DNA, 21 bp, Artificial Sequence
  primer
tgctctgtacatcttccctgg

SEQ ID NO: 54573 - DNA, 39 bp, Artificial Sequence
  primer
gtaaaacgacggccagtcctgctatatccttggcatctg

SEQ ID NO: 54574 - DNA, 21 bp, Artificial Sequence
  primer
caattcagttgctcgtggttg

SEQ ID NO: 54575 - DNA, 38 bp, Artificial Sequence
  primer
gtaaaacgacggccagtttcccatgtatgaacgtctgg

SEQ ID NO: 54576 - DNA, 22 bp, Artificial Sequence
  primer
tgtcttcagcctttgtattggg

SEQ ID NO: 54577 - DNA, 18 bp, Artificial Sequence
  primer
tctccacgttggtcaggc

SEQ ID NO: 54578 - DNA, 20 bp, Artificial Sequence
  primer
cttggtgctcaaagcaaagg

SEQ ID NO: 54579 - DNA, 38 bp, Artificial Sequence
  primer
gtaaaacgacggccagtaccagaagggtgttgatggtg

SEQ ID NO: 54580 - DNA, 21 bp, Artificial Sequence
  primer
agatacaggaatcccacgtcc

SEQ ID NO: 54581 - DNA, 39 bp, Artificial Sequence
  primer
gtaaaacgacggccagtgggcaagtcactgaactgtttg

SEQ ID NO: 54582 - DNA, 21 bp, Artificial Sequence
  primer
aaggtagtgtctcagaccggc

SEQ ID NO: 54583 - DNA, 21 bp, Artificial Sequence
  primer
gaacttcctgcagattgtccc

SEQ ID NO: 54584 - DNA, 21 bp, Artificial Sequence
  primer
cactcaaaccattgcaccttc

SEQ ID NO: 54585 - DNA, 38 bp, Artificial Sequence
  primer
gtaaaacgacggccagtcttcttggtcctgtccaaagc

SEQ ID NO: 54586 - DNA, 38 bp, Artificial Sequence
  primer
gtaaaacgacggccagtcaactcctgcaagagagaggg

SEQ ID NO: 54587 - DNA, 21 bp, Artificial Sequence
  primer
tcagcggtttacacatcatcc

SEQ ID NO: 54588 - DNA, 37 bp, Artificial Sequence
  primer
gtaaaacgacggccagtgcctagaggctttggtttgg

SEQ ID NO: 54589 - DNA, 21 bp, Artificial Sequence
  primer
gattgatcagttcgctgttgc

SEQ ID NO: 54590 - DNA, 37 bp, Artificial Sequence
  primer
gtaaaacgacggccagtaaacagcacgtgactgaggc

SEQ ID NO: 54591 - DNA, 37 bp, Artificial Sequence
  primer
gtaaaacgacggccagtctgtgccactgtctgctttg

SEQ ID NO: 54592 - DNA, 37 bp, Artificial Sequence
  primer
gtaaaacgacggccagtcatcccttccagctcctgtc

SEQ ID NO: 54593 - DNA, 18 bp, Artificial Sequence
  primer
tgaacctgggacgcagag

SEQ ID NO: 54594 - DNA, 38 bp, Artificial Sequence
  primer
gtaaaacgacggccagttgtaatcccatttcccaaagg

SEQ ID NO: 54595 - DNA, 38 bp, Artificial Sequence
  primer
gtaaaacgacggccagtctaacccagcattcaacaccc

SEQ ID NO: 54596 - DNA, 38 bp, Artificial Sequence
  primer
gtaaaacgacggccagtctagcctggcccacagtagac

SEQ ID NO: 54597 - DNA, 37 bp, Artificial Sequence
  primer
gtaaaacgacggccagtgtctcaaccgtgagcacctc

SEQ ID NO: 54598 - DNA, 42 bp, Artificial Sequence
  primer
gtaaaacgacggccagtggatggagtctctaataggttgtga

SEQ ID NO: 54599 - DNA, 39 bp, Artificial Sequence
  primer
gtaaaacgacggccagtctgttgaggaaatatgctggtg

SEQ ID NO: 54600 - DNA, 38 bp, Artificial Sequence
  primer
gtaaaacgacggccagtctgttcatgggaaagttaccg

SEQ ID NO: 54601 - DNA, 26 bp, Artificial Sequence
  primer
tttgtgggaaatgttatatgtaggtg

SEQ ID NO: 54602 - DNA, 21 bp, Artificial Sequence
  primer
ggaagatggcagtaatgagcc

SEQ ID NO: 54603 - DNA, 27 bp, Artificial Sequence
  primer
aggtatacgttcattgctataaccaac

SEQ ID NO: 54604 - DNA, 18 bp, Artificial Sequence
  primer
cgctccctctttccatcc

SEQ ID NO: 54605 - DNA, 21 bp, Artificial Sequence
  primer
catggctaattcatcaccacc

SEQ ID NO: 54606 - DNA, 21 bp, Artificial Sequence
  primer
aacaggaaggtggaaacttgg

SEQ ID NO: 54607 - DNA, 38 bp, Artificial Sequence
  primer
gtaaaacgacggccagtagacatggcctcactctctcc

SEQ ID NO: 54608 - DNA, 37 bp, Artificial Sequence
  primer
gtaaaacgacggccagtaagcagggaagggagaagtg

SEQ ID NO: 54609 - DNA, 18 bp, Artificial Sequence
  primer
aggcagtgtctagccggg

SEQ ID NO: 54610 - DNA, 38 bp, Artificial Sequence
  primer
gtaaaacgacggccagtgggtcataaaggtgtgaaggg

SEQ ID NO: 54611 - DNA, 36 bp, Artificial Sequence
  primer
gtaaaacgacggccagtgtgtgaagggtcacaacgg

SEQ ID NO: 54612 - DNA, 20 bp, Artificial Sequence
  primer
ccaatttcagcaaggctctg

SEQ ID NO: 54613 - DNA, 21 bp, Artificial Sequence
  primer
cagtctcttgctccatcttgc

SEQ ID NO: 54614 - DNA, 20 bp, Artificial Sequence
  primer
actgcagtgggaagtgttgc

SEQ ID NO: 54615 - DNA, 38 bp, Artificial Sequence
  primer
gtaaaacgacggccagtcttggttgtggactcagcatc

SEQ ID NO: 54616 - DNA, 38 bp, Artificial Sequence
  primer
gtaaaacgacggccagtaggacccatctcttcccaaag

SEQ ID NO: 54617 - DNA, 38 bp, Artificial Sequence
  primer
gtaaaacgacggccagtccggtggatagactcctaagc

SEQ ID NO: 54618 - DNA, 38 bp, Artificial Sequence
  primer
gtaaaacgacggccagtatgaacatgccctagccagtc

SEQ ID NO: 54619 - DNA, 20 bp, Artificial Sequence
  primer
aactgggtggtgcatctttg

SEQ ID NO: 54620 - DNA, 37 bp, Artificial Sequence
  primer
gtaaaacgacggccagttccacagacagagctgaggg

SEQ ID NO: 54621 - DNA, 45 bp, Artificial Sequence
  primer
gtaaaacgacggccagttgcctagaaagattatagagatacagcc

SEQ ID NO: 54622 - DNA, 40 bp, Artificial Sequence
  primer
gtaaaacgacggccagttctggttctagagataagcggtg

SEQ ID NO: 54623 - DNA, 20 bp, Artificial Sequence
  primer
gtgcctggactggtttaggg

SEQ ID NO: 54624 - DNA, 21 bp, Artificial Sequence
  primer
tttggcacttgaaatttaggg

SEQ ID NO: 54625 - DNA, 45 bp, Artificial Sequence
  primer
gtaaaacgacggccagttcacccatactaactaaattatgtcacc

SEQ ID NO: 54626 - DNA, 24 bp, Artificial Sequence
  primer
tgattgattgatgaaattgtctgc

SEQ ID NO: 54627 - DNA, 21 bp, Artificial Sequence
  primer
tccatcgctatcttcatcagc

SEQ ID NO: 54628 - DNA, 21 bp, Artificial Sequence
  primer
tccatagcactcagcagatgg

SEQ ID NO: 54629 - DNA, 38 bp, Artificial Sequence
  primer
gtaaaacgacggccagtcaagccattccatcatcacag

SEQ ID NO: 54630 - DNA, 38 bp, Artificial Sequence
  primer
gtaaaacgacggccagttcctccttcaattgtcttggg

SEQ ID NO: 54631 - DNA, 36 bp, Artificial Sequence
  primer
gtaaaacgacggccagtgcgtgagtgtgtgtcggtc

SEQ ID NO: 54632 - DNA, 22 bp, Artificial Sequence
  primer
tcttaacacacctcgcctcttc

SEQ ID NO: 54633 - DNA, 38 bp, Artificial Sequence
  primer
gtaaaacgacggccagttaacactggcaaccatcagtg

SEQ ID NO: 54634 - DNA, 42 bp, Artificial Sequence
  primer
gtaaaacgacggccagttgctcgagactgtattagttcaagg

SEQ ID NO: 54635 - DNA, 44 bp, Artificial Sequence
  primer
gtaaaacgacggccagtagacgaatagatatcaatggcttagag

SEQ ID NO: 54636 - DNA, 23 bp, Artificial Sequence
  primer
tccacataagaaacattgatggg

SEQ ID NO: 54637 - DNA, 39 bp, Artificial Sequence
  primer
gtaaaacgacggccagtcagaaagtctgctaatcgtgcc

SEQ ID NO: 54638 - DNA, 21 bp, Artificial Sequence
  primer
gacagagcaagactccgtctc

SEQ ID NO: 54639 - DNA, 40 bp, Artificial Sequence
  primer
gtaaaacgacggccagtccaggttccaacttgattcctac

SEQ ID NO: 54640 - DNA, 21 bp, Artificial Sequence
  primer
gcaaaggttgaaggacagagg

SEQ ID NO: 54641 - DNA, 20 bp, Artificial Sequence
  primer
gtcaaacatcagggattgcc

SEQ ID NO: 54642 - DNA, 21 bp, Artificial Sequence
  primer
tgcacagtgtcaactgcagac

SEQ ID NO: 54643 - DNA, 21 bp, Artificial Sequence
  primer
gggagtgtaaggagaggaccc

SEQ ID NO: 54644 - DNA, 21 bp, Artificial Sequence
  primer
ccagcctaggtgacaggagtg

SEQ ID NO: 54645 - DNA, 21 bp, Artificial Sequence
  primer
gctgagtcgagttcagtgtgg

SEQ ID NO: 54646 - DNA, 38 bp, Artificial Sequence
  primer
gtaaaacgacggccagtaattgcagcaggtcatcagac

SEQ ID NO: 54647 - DNA, 20 bp, Artificial Sequence
  primer
tctggcaggaacaggaacag

SEQ ID NO: 54648 - DNA, 38 bp, Artificial Sequence
  primer
gtaaaacgacggccagtgtcccatttagcaatgcacag

SEQ ID NO: 54649 - DNA, 36 bp, Artificial Sequence
  primer
gtaaaacgacggccagtctctggagaggcttgctgc

SEQ ID NO: 54650 - DNA, 38 bp, Artificial Sequence
  primer
gtaaaacgacggccagtaggctcagcttagtcaggcag

SEQ ID NO: 54651 - DNA, 21 bp, Artificial Sequence
  primer
cctgggtattgtcccttcatc

SEQ ID NO: 54652 - DNA, 38 bp, Artificial Sequence
  primer
gtaaaacgacggccagtaaggacagtccctgatgaacc

SEQ ID NO: 54653 - DNA, 38 bp, Artificial Sequence
  primer
gtaaaacgacggccagtttaccaccatcctttcttcgg

SEQ ID NO: 54654 - DNA, 38 bp, Artificial Sequence
  primer
gtaaaacgacggccagtcttggaacctacccgtctctc

SEQ ID NO: 54655 - DNA, 20 bp, Artificial Sequence
  primer
atgttgcagtgctaccctgg

SEQ ID NO: 54656 - DNA, 38 bp, Artificial Sequence
  primer
gtaaaacgacggccagtaggtatggacagctgggactc

SEQ ID NO: 54657 - DNA, 21 bp, Artificial Sequence
  primer
tgacatatcctttcccttgcc

SEQ ID NO: 54658 - DNA, 38 bp, Artificial Sequence
  primer
gtaaaacgacggccagtaaagaggcatactggccaaag

SEQ ID NO: 54659 - DNA, 37 bp, Artificial Sequence
  primer
gtaaaacgacggccagtcgacaaacaccttcagctcc

SEQ ID NO: 54660 - DNA, 38 bp, Artificial Sequence
  primer
gtaaaacgacggccagtcaacatccacctaggagtggc

SEQ ID NO: 54661 - DNA, 21 bp, Artificial Sequence
  primer
gtcctcctcctatgttcaggg

SEQ ID NO: 54662 - DNA, 21 bp, Artificial Sequence
  primer
ctcgtaggtgacactaggcgg

SEQ ID NO: 54663 - DNA, 21 bp, Artificial Sequence
  primer
gtgacactgagaagcccacag

SEQ ID NO: 54664 - DNA, 21 bp, Artificial Sequence
  primer
ctcgtaggtgacactaggcgg

SEQ ID NO: 54665 - DNA, 38 bp, Artificial Sequence
  primer
gtaaaacgacggccagtttattggctgaggaatgagga

SEQ ID NO: 54666 - DNA, 21 bp, Artificial Sequence
  primer
gtcactccacttccctccaac

SEQ ID NO: 54667 - DNA, 38 bp, Artificial Sequence
  primer
gtaaaacgacggccagtcctgccacctagtaatcaccc

SEQ ID NO: 54668 - DNA, 18 bp, Artificial Sequence
  primer
gcaccattgctctccagc

SEQ ID NO: 54669 - DNA, 38 bp, Artificial Sequence
  primer
gtaaaacgacggccagttttgagctgagaatggtgagg

SEQ ID NO: 54670 - DNA, 39 bp, Artificial Sequence
  primer
gtaaaacgacggccagtcctatgtccacagcctctcaac

SEQ ID NO: 54671 - DNA, 38 bp, Artificial Sequence
  primer
gtaaaacgacggccagtcctttcctctaaggccctctg

SEQ ID NO: 54672 - DNA, 21 bp, Artificial Sequence
  primer
atgtcctgttggaggacttgc

SEQ ID NO: 54673 - DNA, 38 bp, Artificial Sequence
  primer
gtaaaacgacggccagtgagaatccttgtggtcccaac

SEQ ID NO: 54674 - DNA, 38 bp, Artificial Sequence
  primer
gtaaaacgacggccagtgtgtgagtgggaaatctgtgg

SEQ ID NO: 54675 - DNA, 38 bp, Artificial Sequence
  primer
gtaaaacgacggccagtccaggtaggatcctctttccc

SEQ ID NO: 54676 - DNA, 20 bp, Artificial Sequence
  primer
gacagctgagttgcccattc

SEQ ID NO: 54677 - DNA, 38 bp, Artificial Sequence
  primer
gtaaaacgacggccagttccaacttcattcctccttcc

SEQ ID NO: 54678 - DNA, 21 bp, Artificial Sequence
  primer
atcatcaagaaggtgatcggg

SEQ ID NO: 54679 - DNA, 21 bp, Artificial Sequence
  primer
atcaagacggagaagctggag

SEQ ID NO: 54680 - DNA, 38 bp, Artificial Sequence
  primer
gtaaaacgacggccagtcctctctctgctgctctgttg

SEQ ID NO: 54681 - DNA, 39 bp, Artificial Sequence
  primer
gtaaaacgacggccagtggtgatgagagaaatggactgc

SEQ ID NO: 54682 - DNA, 44 bp, Artificial Sequence
  primer
gtaaaacgacggccagtagtgcatgacatacagtgttaaatagg

SEQ ID NO: 54683 - DNA, 21 bp, Artificial Sequence
  primer
tgaacatggatccaatgacag

SEQ ID NO: 54684 - DNA, 38 bp, Artificial Sequence
  primer
gtaaaacgacggccagtaagacctctagccgcaatgac

SEQ ID NO: 54685 - DNA, 38 bp, Artificial Sequence
  primer
gtaaaacgacggccagttggcccaagtatttctccatc

SEQ ID NO: 54686 - DNA, 21 bp, Artificial Sequence
  primer
cacccagacatcgacacagac

SEQ ID NO: 54687 - DNA, 21 bp, Artificial Sequence
  primer
atttggagtggaggatagggc

SEQ ID NO: 54688 - DNA, 38 bp, Artificial Sequence
  primer
gtaaaacgacggccagttcatgataaacagccactgcc

SEQ ID NO: 54689 - DNA, 21 bp, Artificial Sequence
  primer
tgaacatggatccaatgacag

SEQ ID NO: 54690 - DNA, 38 bp, Artificial Sequence; identical to SEQ ID NO: 54684
  primer

SEQ ID NO: 54691 - DNA, 21 bp, Artificial Sequence
  primer
aacctcccagaacaccttcac

SEQ ID NO: 54692 - DNA, 38 bp, Artificial Sequence
  primer
gtaaaacgacggccagtcacccagacatcgacacagac

SEQ ID NO: 54693 - DNA, 19 bp, Artificial Sequence
  primer
acgagcagtgatccaagcc

SEQ ID NO: 54694 - DNA, 21 bp, Artificial Sequence
  primer
actgttggtttggtcggactc

SEQ ID NO: 54695 - DNA, 21 bp, Artificial Sequence
  primer
agaacaccatcttcaccctgc

SEQ ID NO: 54696 - DNA, 21 bp, Artificial Sequence
  primer
gactcatgcaggaagatgcag

SEQ ID NO: 54697 - DNA, 21 bp, Artificial Sequence
  primer
attgcctgagatggtgttgac

SEQ ID NO: 54698 - DNA, 21 bp, Artificial Sequence
  primer
agtctcaaacctctgggcacc

SEQ ID NO: 54699 - DNA, 21 bp, Artificial Sequence
  primer
tctgtctcccactgtctctgc

SEQ ID NO: 54700 - DNA, 21 bp, Artificial Sequence
  primer
gaagtcctcctttgggtgaag

SEQ ID NO: 54701 - DNA, 37 bp, Artificial Sequence
  primer
gtaaaacgacggccagtagcacagcagcgctttagac

SEQ ID NO: 54702 - DNA, 38 bp, Artificial Sequence
  primer
gtaaaacgacggccagtcagcctcctgatttcatcgac

SEQ ID NO: 54703 - DNA, 38 bp, Artificial Sequence
  primer
gtaaaacgacggccagttatgtccctccagcagcaaag

SEQ ID NO: 54704 - DNA, 38 bp, Artificial Sequence
  primer
gtaaaacgacggccagtaacatagcagcctcttctggg

SEQ ID NO: 54705 - DNA, 38 bp, Artificial Sequence
  primer
gtaaaacgacggccagttgttacttggccttgtccttg

SEQ ID NO: 54706 - DNA, 36 bp, Artificial Sequence
  primer
gtaaaacgacggccagtaccacaaccctccttgctg

SEQ ID NO: 54707 - DNA, 38 bp, Artificial Sequence
  primer
gtaaaacgacggccagttgcctggcccaaataacatag

SEQ ID NO: 54708 - DNA, 23 bp, Artificial Sequence
  primer
agattccttgaattgtttggtca

SEQ ID NO: 54709 - DNA, 22 bp, Artificial Sequence
  primer
gattgcaaacttagttgggctg

SEQ ID NO: 54710 - DNA, 38 bp, Artificial Sequence
  primer
gtaaaacgacggccagtgaattgtggaaactgaggtgc

SEQ ID NO: 54711 - DNA, 41 bp, Artificial Sequence
  primer
gtaaaacgacggccagttcagtgtaaatcctaaaggttgcc

SEQ ID NO: 54712 - DNA, 21 bp, Artificial Sequence
  primer
gtgttaaggtgggaagggaag

SEQ ID NO: 54713 - DNA, 39 bp, Artificial Sequence
  primer
gtaaaacgacggccagtgcttaagcatgaagaaagcgtg

SEQ ID NO: 54714 - DNA, 38 bp, Artificial Sequence
  primer
gtaaaacgacggccagtagcccgaatatctcacctgac

SEQ ID NO: 54715 - DNA, 22 bp, Artificial Sequence
  primer
tgtattccttgctcactgttgc

SEQ ID NO: 54716 - DNA, 21 bp, Artificial Sequence
  primer
atgtttggaggagtgacctgg

SEQ ID NO: 54717 - DNA, 37 bp, Artificial Sequence
  primer
gtaaaacgacggccagtatagctgttgccacattgcc

SEQ ID NO: 54718 - DNA, 26 bp, Artificial Sequence
  primer
gataaagcaggtaggtatcatcactg

SEQ ID NO: 54719 - DNA, 38 bp, Artificial Sequence
  primer
gtaaaacgacggccagtaccaaaccctgaacagaggag

SEQ ID NO: 54720 - DNA, 37 bp, Artificial Sequence
  primer
gtaaaacgacggccagtccacctctccaagtgaagcc

SEQ ID NO: 54721 - DNA, 38 bp, Artificial Sequence
  primer
gtaaaacgacggccagtcttacttacggactggctccc

SEQ ID NO: 54722 - DNA, 21 bp, Artificial Sequence
  primer
gaaagggtttgtggaaagtgg

SEQ ID NO: 54723 - DNA, 38 bp, Artificial Sequence
  primer
gtaaaacgacggccagtcagaaattgcagggagttgtg

SEQ ID NO: 54724 - DNA, 38 bp, Artificial Sequence
  primer
gtaaaacgacggccagtgaagctttggcattgtcttcc

SEQ ID NO: 54725 - DNA, 22 bp, Artificial Sequence
  primer
cccagcctaggagaaattcttg

SEQ ID NO: 54726 - DNA, 38 bp, Artificial Sequence
  primer
gtaaaacgacggccagtattgggagcaagaagatgagg

SEQ ID NO: 54727 - DNA, 21 bp, Artificial Sequence
  primer
tacctcctgtgagttccttgc

SEQ ID NO: 54728 - DNA, 22 bp, Artificial Sequence
  primer
atctcctgacctcgttatctgc

SEQ ID NO: 54729 - DNA, 38 bp, Artificial Sequence
  primer
gtaaaacgacggccagttaagacaaggtctgggaacgg

SEQ ID NO: 54730 - DNA, 38 bp, Artificial Sequence
  primer
gtaaaacgacggccagttaccaccacgcctactcacag

SEQ ID NO: 54731 - DNA, 21 bp, Artificial Sequence
  primer
ttcttccctttcaacgcaaac

SEQ ID NO: 54732 - DNA, 21 bp, Artificial Sequence
  primer
atgcctttggttgtcttcctg

SEQ ID NO: 54733 - DNA, 38 bp, Artificial Sequence
  primer
gtaaaacgacggccagtaggtatagacacgtgtggccg

SEQ ID NO: 54734 - DNA, 21 bp, Artificial Sequence
  primer
tttggtggtgacagctggtag

SEQ ID NO: 54735 - DNA, 22 bp, Artificial Sequence
  primer
ttgctttaggaactgcattgtg

SEQ ID NO: 54736 - DNA, 23 bp, Artificial Sequence
  primer
tgggtttgtattcacttcctttg

SEQ ID NO: 54737 - DNA, 38 bp, Artificial Sequence
  primer
gtaaaacgacggccagtttgaagcctgtcgttgagatg

SEQ ID NO: 54738 - DNA, 22 bp, Artificial Sequence
  primer
gcaaatgcaactggttaatgac

SEQ ID NO: 54739 - DNA, 39 bp, Artificial Sequence
  primer
gtaaaacgacggccagttcccagaactttcttgcttctg

SEQ ID NO: 54740 - DNA, 38 bp, Artificial Sequence
  primer
gtaaaacgacggccagtatcctcagtgcctggtgtttc

SEQ ID NO: 54741 - DNA, 21 bp, Artificial Sequence
  primer
tttctaggccctgcctttctc

SEQ ID NO: 54742 - DNA, 21 bp, Artificial Sequence
  primer
tgccagatatctttcctttgc

SEQ ID NO: 54743 - DNA, 23 bp, Artificial Sequence
  primer
aagactgtgagagccttcttgag

SEQ ID NO: 54744 - DNA, 21 bp, Artificial Sequence
  primer
agtggtctgcaaagccctaac

SEQ ID NO: 54745 - DNA, 40 bp, Artificial Sequence
  primer
gtaaaacgacggccagttgcatccacctcagtaggtttac

SEQ ID NO: 54746 - DNA, 38 bp, Artificial Sequence
  primer
gtaaaacgacggccagtgagggttgtcaaagatttggg

SEQ ID NO: 54747 - DNA, 38 bp, Artificial Sequence
  primer
gtaaaacgacggccagtccaaagatacctccgcttgtc

SEQ ID NO: 54748 - DNA, 38 bp, Artificial Sequence
  primer
gtaaaacgacggccagtgaagcagggagcccttaactc

SEQ ID NO: 54749 - DNA, 41 bp, Artificial Sequence
  primer
gtaaaacgacggccagtgcaccaagttggaggtattagatg

SEQ ID NO: 54750 - DNA, 21 bp, Artificial Sequence
  primer
tgaactgcttgtttcctccag

SEQ ID NO: 54751 - DNA, 38 bp, Artificial Sequence
  primer
gtaaaacgacggccagttgcagtagtttctgggaatgg

SEQ ID NO: 54752 - DNA, 38 bp, Artificial Sequence
  primer
gtaaaacgacggccagtgctagacaagctggccctatg

SEQ ID NO: 54753 - DNA, 38 bp, Artificial Sequence
  primer
gtaaaacgacggccagtcttagcgcacagcctactgag

SEQ ID NO: 54754 - DNA, 38 bp, Artificial Sequence; identical to SEQ ID NO: 54748
  primer

SEQ ID NO: 54755 - DNA, 38 bp, Artificial Sequence
  primer
gtaaaacgacggccagtttgtcccatttcttcttgctg

SEQ ID NO: 54756 - DNA, 21 bp, Artificial Sequence
  primer
acgagcaacaggaaggctaag

SEQ ID NO: 54757 - DNA, 21 bp, Artificial Sequence
  primer
tgtattccaaataggccaccc

SEQ ID NO: 54758 - DNA, 21 bp, Artificial Sequence
  primer
ctttgccaaggaataagcagg

SEQ ID NO: 54759 - DNA, 38 bp, Artificial Sequence
  primer
gtaaaacgacggccagtaagggcctctgtgagctatcc

SEQ ID NO: 54760 - DNA, 21 bp, Artificial Sequence
  primer
cagttgcatcgactgatttcc

SEQ ID NO: 54761 - DNA, 38 bp, Artificial Sequence
  primer
gtaaaacgacggccagtaagcagagagagcttcaaggg

SEQ ID NO: 54762 - DNA, 19 bp, Artificial Sequence
  primer
caagagcatgcccactttg

SEQ ID NO: 54763 - DNA, 38 bp, Artificial Sequence
  primer
gtaaaacgacggccagttttgacatcaccttcctctcg

SEQ ID NO: 54764 - DNA, 38 bp, Artificial Sequence
  primer
gtaaaacgacggccagttcccttcccaacatacattcc

SEQ ID NO: 54765 - DNA, 38 bp, Artificial Sequence
  primer
gtaaaacgacggccagttgcctcctaagggattgattg

SEQ ID NO: 54766 - DNA, 38 bp, Artificial Sequence
  primer
gtaaaacgacggccagtgtgctgagtggtagcagcatc

SEQ ID NO: 54767 - DNA, 38 bp, Artificial Sequence
  primer
gtaaaacgacggccagtgctaaagtccaccaggacacc

SEQ ID NO: 54768 - DNA, 21 bp, Artificial Sequence
  primer
tttggtgcaaagtttccagac

SEQ ID NO: 54769 - DNA, 38 bp, Artificial Sequence
  primer
gtaaaacgacggccagtccttggtgctccataataggc

SEQ ID NO: 54770 - DNA, 21 bp, Artificial Sequence
  primer
gtcaggatgacttccagtccc

SEQ ID NO: 54771 - DNA, 38 bp, Artificial Sequence
  primer
gtaaaacgacggccagtgaaggcaaggtgagaggagac

SEQ ID NO: 54772 - DNA, 38 bp, Artificial Sequence
  primer
gtaaaacgacggccagtcactgagctcatacagcagcc

SEQ ID NO: 54773 - DNA, 38 bp, Artificial Sequence
  primer
gtaaaacgacggccagttctttgatgtgacttgggcag

SEQ ID NO: 54774 - DNA, 44 bp, Artificial Sequence
  primer
gtaaaacgacggccagtgaaggatcacctcctaatttatctttg

SEQ ID NO: 54775 - DNA, 38 bp, Artificial Sequence
  primer
gtaaaacgacggccagtgtgggctgcagagtaacagtc

SEQ ID NO: 54776 - DNA, 21 bp, Artificial Sequence
  primer
tgggctccagatactaggcac

SEQ ID NO: 54777 - DNA, 37 bp, Artificial Sequence
  primer
gtaaaacgacggccagtctttgtgaggaaggtgggtg

SEQ ID NO: 54778 - DNA, 36 bp, Artificial Sequence
  primer
gtaaaacgacggccagtcctggataggctgctggtg

SEQ ID NO: 54779 - DNA, 18 bp, Artificial Sequence
  primer
actacaggctcccgccac

SEQ ID NO: 54780 - DNA, 38 bp, Artificial Sequence
  primer
gtaaaacgacggccagtaggaaccttcgccagttcatc

SEQ ID NO: 54781 - DNA, 38 bp, Artificial Sequence
  primer
gtaaaacgacggccagtaggtgtgtgtctttggtgagg

SEQ ID NO: 54782 - DNA, 36 bp, Artificial Sequence
  primer
gtaaaacgacggccagtgagagttccgcaaactggg

SEQ ID NO: 54783 - DNA, 22 bp, Artificial Sequence
  primer
tgttgtacttctccagaaacgc

SEQ ID NO: 54784 - DNA, 19 bp, Artificial Sequence
  primer
ctgtgagtggcctggactg

SEQ ID NO: 54785 - DNA, 38 bp, Artificial Sequence
  primer
gtaaaacgacggccagtgagcttccacgagctcttctg

SEQ ID NO: 54786 - DNA, 38 bp, Artificial Sequence
  primer
gtaaaacgacggccagttcctagccctaccttccttgg

SEQ ID NO: 54787 - DNA, 37 bp, Artificial Sequence
  primer
gtaaaacgacggccagtctcttccgcaagatcagcag

SEQ ID NO: 54788 - DNA, 38 bp, Artificial Sequence
  primer
gtaaaacgacggccagtctgcagtacggagacatggag

SEQ ID NO: 54789 - DNA, 38 bp, Artificial Sequence
  primer
gtaaaacgacggccagtactcctgacaggcaaggactg

SEQ ID NO: 54790 - DNA, 38 bp, Artificial Sequence
  primer
gtaaaacgacggccagtgagttggccttctcaatcagc

SEQ ID NO: 54791 - DNA, 39 bp, Artificial Sequence
  primer
gtaaaacgacggccagtcagaatgttgatccaggtatgc

SEQ ID NO: 54792 - DNA, 39 bp, Artificial Sequence
  primer
gtaaaacgacggccagtcggtaagcctgagacaaagaag

SEQ ID NO: 54793 - DNA, 38 bp, Artificial Sequence
  primer
gtaaaacgacggccagttgtttgaagcctctatcccag

SEQ ID NO: 54794 - DNA, 23 bp, Artificial Sequence
  primer
gatcatctttgagcaatttcctg

SEQ ID NO: 54795 - DNA, 24 bp, Artificial Sequence
  primer
tttgcaaagctcctcctaataatg

SEQ ID NO: 54796 - DNA, 21 bp, Artificial Sequence
  primer
gttccctggaggagctgaaac

SEQ ID NO: 54797 - DNA, 22 bp, Artificial Sequence
  primer
aagaagtcagggaccaagtgag

SEQ ID NO: 54798 - DNA, 37 bp, Artificial Sequence
  primer
gtaaaacgacggccagtgtttggcctttagggctgtc

SEQ ID NO: 54799 - DNA, 21 bp, Artificial Sequence
  primer
acactgtcgtggcactggtag

SEQ ID NO: 54800 - DNA, 21 bp, Artificial Sequence
  primer
gcttggttcagcatcttcctc

SEQ ID NO: 54801 - DNA, 25 bp, Artificial Sequence
  primer
gccattgaatagtttgagtacattg

SEQ ID NO: 54802 - DNA, 38 bp, Artificial Sequence
  primer
gtaaaacgacggccagtgaggttggtgtcacctctttg

SEQ ID NO: 54803 - DNA, 39 bp, Artificial Sequence
  primer
gtaaaacgacggccagtaaactggttgaaacaaactggg

SEQ ID NO: 54804 - DNA, 38 bp, Artificial Sequence
  primer
gtaaaacgacggccagtaaactgaaagccaggaaatgc

SEQ ID NO: 54805 - DNA, 20 bp, Artificial Sequence
  primer
atgggaataaatgtgctgcg

SEQ ID NO: 54806 - DNA, 40 bp, Artificial Sequence
  primer
gtaaaacgacggccagttcagaagcatttgtgaatcactg

SEQ ID NO: 54807 - DNA, 44 bp, Artificial Sequence
  primer
gtaaaacgacggccagttcaatactgtgttaaacctgaagtcac

SEQ ID NO: 54808 - DNA, 41 bp, Artificial Sequence
  primer
gtaaaacgacggccagtctttgtaaagatgagacggtttga

SEQ ID NO: 54809 - DNA, 37 bp, Artificial Sequence
  primer
gtaaaacgacggccagtccgacgaggcaacaattagg

SEQ ID NO: 54810 - DNA, 38 bp, Artificial Sequence
  primer
gtaaaacgacggccagtctgctctggagacaagcaatg

SEQ ID NO: 54811 - DNA, 22 bp, Artificial Sequence
  primer
ccaaggtcacgtagttaggcag

SEQ ID NO: 54812 - DNA, 21 bp, Artificial Sequence
  primer
ttgaggctgagactctgggac

SEQ ID NO: 54813 - DNA, 38 bp, Artificial Sequence
  primer
gtaaaacgacggccagtcttagggaccagcctagggac

SEQ ID NO: 54814 - DNA, 38 bp, Artificial Sequence
  primer
gtaaaacgacggccagtgaagagcctccaatgtgcttc

SEQ ID NO: 54815 - DNA, 37 bp, Artificial Sequence
  primer
gtaaaacgacggccagtgtgcccagtctgaaggtgag

SEQ ID NO: 54816 - DNA, 37 bp, Artificial Sequence
  primer
gtaaaacgacggccagtttccttacgcaatgcctcac

SEQ ID NO: 54817 - DNA, 38 bp, Artificial Sequence
  primer
gtaaaacgacggccagtgatgacttccgaaactcgtgg

SEQ ID NO: 54818 - DNA, 38 bp, Artificial Sequence
  primer
gtaaaacgacggccagtaaacaggtcctttctccaccc

SEQ ID NO: 54819 - DNA, 20 bp, Artificial Sequence
  primer
agagcgaaactccatctccg

SEQ ID NO: 54820 - DNA, 21 bp, Artificial Sequence
  primer
tgacccatgatggagattcag

SEQ ID NO: 54821 - DNA, 21 bp, Artificial Sequence
  primer
ctcaagctttagcacctgtgg

SEQ ID NO: 54822 - DNA, 21 bp, Artificial Sequence
  primer
gtgcagactcaggacagcttg

SEQ ID NO: 54823 - DNA, 21 bp, Artificial Sequence
  primer
catgtcagtggattggctctc

SEQ ID NO: 54824 - DNA, 37 bp, Artificial Sequence
  primer
gtaaaacgacggccagtgtctaagtggccatcctgcc

SEQ ID NO: 54825 - DNA, 21 bp, Artificial Sequence
  primer
ggagggtccttgggaaactac

SEQ ID NO: 54826 - DNA, 38 bp, Artificial Sequence
  primer
gtaaaacgacggccagtctgcattcaggaccaactgtc

SEQ ID NO: 54827 - DNA, 21 bp, Artificial Sequence
  primer
gtatacagatgggcaggtggg

SEQ ID NO: 54828 - DNA, 20 bp, Artificial Sequence
  primer
tttcccaatccatcagcatc

SEQ ID NO: 54829 - DNA, 38 bp, Artificial Sequence
  primer
gtaaaacgacggccagtaagagctttaaacacggctcg

SEQ ID NO: 54830 - DNA, 21 bp, Artificial Sequence
  primer
cagagatgggtttggtttgtc

SEQ ID NO: 54831 - DNA, 21 bp, Artificial Sequence
  primer
cccagcaagggaaagtaactg

SEQ ID NO: 54832 - DNA, 20 bp, Artificial Sequence
  primer
tgagtcaatgagcctgaggg

SEQ ID NO: 54833 - DNA, 38 bp, Artificial Sequence
  primer
gtaaaacgacggccagtctctgggactaggctcagctc

SEQ ID NO: 54834 - DNA, 36 bp, Artificial Sequence
  primer
gtaaaacgacggccagtgctctctagaggaggcggc

SEQ ID NO: 54835 - DNA, 38 bp, Artificial Sequence
  primer
gtaaaacgacggccagtacttcctgtccactgctcctc

SEQ ID NO: 54836 - DNA, 38 bp, Artificial Sequence
  primer
gtaaaacgacggccagtagacccatcgttcagaaatgg

SEQ ID NO: 54837 - DNA, 38 bp, Artificial Sequence
  primer
gtaaaacgacggccagtgcttctgaccaggcactgtag

SEQ ID NO: 54838 - DNA, 21 bp, Artificial Sequence
  primer
aggcgaaggagtgagactctg

SEQ ID NO: 54839 - DNA, 38 bp, Artificial Sequence
  primer
gtaaaacgacggccagtagaacccagcagggatatcag

SEQ ID NO: 54840 - DNA, 21 bp, Artificial Sequence
  primer
aggtgatcccagacagaggtc

SEQ ID NO: 54841 - DNA, 38 bp, Artificial Sequence
  primer
gtaaaacgacggccagtccatgacttggcttctcttgg

SEQ ID NO: 54842 - DNA, 38 bp, Artificial Sequence
  primer
gtaaaacgacggccagtcattgcaggtgtcttgtctgg

SEQ ID NO: 54843 - DNA, 38 bp, Artificial Sequence
  primer
gtaaaacgacggccagtaacccttgatcctgtgacctg

SEQ ID NO: 54844 - DNA, 21 bp, Artificial Sequence
  primer
gagcatggcatttctcctttc

SEQ ID NO: 54845 - DNA, 38 bp, Artificial Sequence
  primer
gtaaaacgacggccagttggtggtctaatccacatccc

SEQ ID NO: 54846 - DNA, 21 bp, Artificial Sequence
  primer
ccaagttcattgagctgatgg

SEQ ID NO: 54847 - DNA, 38 bp, Artificial Sequence
  primer
gtaaaacgacggccagtgtgaaggccactatgggaaag

SEQ ID NO: 54848 - DNA, 38 bp, Artificial Sequence
  primer
gtaaaacgacggccagtcccatctctccctactcaacg

SEQ ID NO: 54849 - DNA, 21 bp, Artificial Sequence
  primer
ctgggaccctttgaaagtctg

SEQ ID NO: 54850 - DNA, 21 bp, Artificial Sequence
  primer
gagttgttccctgttgtgctg

SEQ ID NO: 54851 - DNA, 22 bp, Artificial Sequence
  primer
ttgatttcagttcaacagcagg

SEQ ID NO: 54852 - DNA, 38 bp, Artificial Sequence
  primer
gtaaaacgacggccagtactggagacaaggacaccagg

SEQ ID NO: 54853 - DNA, 39 bp, Artificial Sequence
  primer
gtaaaacgacggccagttggtgaatcctagaactggcac

SEQ ID NO: 54854 - DNA, 22 bp, Artificial Sequence
  primer
tgacagattgaaactctgcctc

SEQ ID NO: 54855 - DNA, 37 bp, Artificial Sequence
  primer
gtaaaacgacggccagtcccaggagttccttctgtcc

SEQ ID NO: 54856 - DNA, 21 bp, Artificial Sequence
  primer
actccaacccagagcactcac

SEQ ID NO: 54857 - DNA, 38 bp, Artificial Sequence
  primer
gtaaaacgacggccagtggaggtggtagagcttggaac

SEQ ID NO: 54858 - DNA, 21 bp, Artificial Sequence
  primer
tttctcccgtgtccctacatc

SEQ ID NO: 54859 - DNA, 19 bp, Artificial Sequence
  primer
ctttctcccgggaaccttg

SEQ ID NO: 54860 - DNA, 21 bp, Artificial Sequence
  primer
tttgttgggactcaaaggaca

SEQ ID NO: 54861 - DNA, 40 bp, Artificial Sequence
  primer
gtaaaacgacggccagtgcacagtaacttctagcaatcgg

SEQ ID NO: 54862 - DNA, 22 bp, Artificial Sequence
  primer
ccattaatgattccatgccttg

SEQ ID NO: 54863 - DNA, 22 bp, Artificial Sequence
  primer
ctgtgaaagtcctttgcatttg

SEQ ID NO: 54864 - DNA, 37 bp, Artificial Sequence
  primer
gtaaaacgacggccagtatgaggagctagccatggga

SEQ ID NO: 54865 - DNA, 25 bp, Artificial Sequence
  primer
aaggaactgaacttaaccttgtctg

SEQ ID NO: 54866 - DNA, 20 bp, Artificial Sequence
  primer
catgcctcctctcctgattg

SEQ ID NO: 54867 - DNA, 20 bp, Artificial Sequence
  primer
aggaaggtctctgagggcag

SEQ ID NO: 54868 - DNA, 38 bp, Artificial Sequence
  primer
gtaaaacgacggccagtgcttctccgagttgacatcag

SEQ ID NO: 54869 - DNA, 21 bp, Artificial Sequence
  primer
agctccgttggaagtcatctc

SEQ ID NO: 54870 - DNA, 36 bp, Artificial Sequence
  primer
gtaaaacgacggccagtaaagtctgcctggtgtggg

SEQ ID NO: 54871 - DNA, 40 bp, Artificial Sequence
  primer
gtaaaacgacggccagtgaggacttgacctcaggagtttc

SEQ ID NO: 54872 - DNA, 21 bp, Artificial Sequence
  primer
tagctgagaggctgggagaag

SEQ ID NO: 54873 - DNA, 41 bp, Artificial Sequence
  primer
gtaaaacgacggccagtagtgcttacaaagaggagaactgg

SEQ ID NO: 54874 - DNA, 44 bp, Artificial Sequence
  primer
gtaaaacgacggccagtcagtcttctaagtatggttgatgtgag

SEQ ID NO: 54875 - DNA, 21 bp, Artificial Sequence
  primer
ttgcctcctgtgtgtgaagag

SEQ ID NO: 54876 - DNA, 38 bp, Artificial Sequence
  primer
gtaaaacgacggccagtatcaccacatcactgtgctcc

SEQ ID NO: 54877 - DNA, 38 bp, Artificial Sequence
  primer
gtaaaacgacggccagtttatgcatttgccttcagtgg

SEQ ID NO: 54878 - DNA, 22 bp, Artificial Sequence
  primer
ggatctgggtgctcagttaaag

SEQ ID NO: 54879 - DNA, 21 bp, Artificial Sequence
  primer
tcatcccaagagatgagcatt

SEQ ID NO: 54880 - DNA, 22 bp, Artificial Sequence
  primer
agaaagcagaattgtagctggg

SEQ ID NO: 54881 - DNA, 42 bp, Artificial Sequence
  primer
gtaaaacgacggccagtgatatgaaatactttgcactttgcc

SEQ ID NO: 54882 - DNA, 26 bp, Artificial Sequence
  primer
cgctaatttactttctcaggttcata

SEQ ID NO: 54883 - DNA, 21 bp, Artificial Sequence
  primer
gcactttgggagtgcataaac

SEQ ID NO: 54884 - DNA, 38 bp, Artificial Sequence
  primer
gtaaaacgacggccagtgcctgctaccctgttagttgc

SEQ ID NO: 54885 - DNA, 40 bp, Artificial Sequence
  primer
gtaaaacgacggccagttgaacttgagctattcatttggc

SEQ ID NO: 54886 - DNA, 38 bp, Artificial Sequence
  primer
gtaaaacgacggccagttttctggtactcaagggtggg

SEQ ID NO: 54887 - DNA, 38 bp, Artificial Sequence
  primer
gtaaaacgacggccagtattcctctccttccttccgag

SEQ ID NO: 54888 - DNA, 38 bp, Artificial Sequence
  primer
gtaaaacgacggccagtttggagatggtagatgcttgg

SEQ ID NO: 54889 - DNA, 21 bp, Artificial Sequence
  primer
attaatgcgggtacaagccac

SEQ ID NO: 54890 - DNA, 24 bp, Artificial Sequence
  primer
cattctccctccttatttgagttg

SEQ ID NO: 54891 - DNA, 22 bp, Artificial Sequence
  primer
ccgaagcacagaggttaatagc

SEQ ID NO: 54892 - DNA, 22 bp, Artificial Sequence
  primer
gccatcccaatgctttactttc

SEQ ID NO: 54893 - DNA, 37 bp, Artificial Sequence
  primer
gtaaaacgacggccagtgggttgagatttcaccctcg

SEQ ID NO: 54894 - DNA, 21 bp, Artificial Sequence
  primer
tttgcctctgatttcctggtc

SEQ ID NO: 54895 - DNA, 19 bp, Artificial Sequence
  primer
ccagggtttggtggagagg

SEQ ID NO: 54896 - DNA, 26 bp, Artificial Sequence
  primer
ttggtgctatttgagagtagacaagt

SEQ ID NO: 54897 - DNA, 24 bp, Artificial Sequence
  primer
tgtacctttggtaggattgaatgg

SEQ ID NO: 54898 - DNA, 38 bp, Artificial Sequence
  primer
gtaaaacgacggccagtgtgtaaggctgagggaagcac

SEQ ID NO: 54899 - DNA, 38 bp, Artificial Sequence
  primer
gtaaaacgacggccagttcctattggttacgagagccg

SEQ ID NO: 54900 - DNA, 40 bp, Artificial Sequence
  primer
gtaaaacgacggccagtgcctttccttcataaagcctaac

SEQ ID NO: 54901 - DNA, 38 bp, Artificial Sequence
  primer
gtaaaacgacggccagtatgagtgtgcttgctgtttga

SEQ ID NO: 54902 - DNA, 42 bp, Artificial Sequence
  primer
gtaaaacgacggccagttttctttaaattccagtttattgct

SEQ ID NO: 54903 - DNA, 46 bp, Artificial Sequence
  primer
gtaaaacgacggccagtaaataataaaggttgttgtatgcttcttt

SEQ ID NO: 54904 - DNA, 44 bp, Artificial Sequence
  primer
gtaaaacgacggccagtcactgagcaagttataataaggcattg

SEQ ID NO: 54905 - DNA, 26 bp, Artificial Sequence
  primer
gacattgtctccctgatgttataaag

SEQ ID NO: 54906 - DNA, 39 bp, Artificial Sequence
  primer
gtaaaacgacggccagtttaagggcatatttccatccag

SEQ ID NO: 54907 - DNA, 30 bp, Artificial Sequence
  primer
gattctgctataagactgtttaatttatgc

SEQ ID NO: 54908 - DNA, 21 bp, Artificial Sequence
  primer
taggtgcttgaacaaacaggg

SEQ ID NO: 54909 - DNA, 38 bp, Artificial Sequence
  primer
gtaaaacgacggccagtttcctgtcgcttgatttgttg

SEQ ID NO: 54910 - DNA, 21 bp, Artificial Sequence
  primer
gtacggtttctgtgatggctg

SEQ ID NO: 54911 - DNA, 20 bp, Artificial Sequence
  primer
caggtgtgagctaccatgcc

SEQ ID NO: 54912 - DNA, 38 bp, Artificial Sequence
  primer
gtaaaacgacggccagtgagccaaaccaagactcatcc

SEQ ID NO: 54913 - DNA, 39 bp, Artificial Sequence
  primer
gtaaaacgacggccagttgtctgtcctgtcctatgatgg

SEQ ID NO: 54914 - DNA, 21 bp, Artificial Sequence
  primer
tttaatgggataaagcgtggc

SEQ ID NO: 54915 - DNA, 38 bp, Artificial Sequence
  primer
gtaaaacgacggccagtaaatctagggtgggcctgaag

SEQ ID NO: 54916 - DNA, 38 bp, Artificial Sequence
  primer
gtaaaacgacggccagttcctggctggacataatcaag

SEQ ID NO: 54917 - DNA, 27 bp, Artificial Sequence
  primer
tgtatgtaaatgagctaaccgttattg

SEQ ID NO: 54918 - DNA, 41 bp, Artificial Sequence
  primer
gtaaaacgacggccagttcagatcacaagtatcaaatgcaa

SEQ ID NO: 54919 - DNA, 39 bp, Artificial Sequence
  primer
gtaaaacgacggccagttttgcagcttgaataatggatg

SEQ ID NO: 54920 - DNA, 38 bp, Artificial Sequence
  primer
gtaaaacgacggccagtgtggttgcctaacccaagttc

SEQ ID NO: 54921 - DNA, 43 bp, Artificial Sequence
  primer
gtaaaacgacggccagtcaagcaaactaaacttacttggacag

SEQ ID NO: 54922 - DNA, 22 bp, Artificial Sequence
  primer
ttccatgattggttctcttcag

SEQ ID NO: 54923 - DNA, 42 bp, Artificial Sequence
  primer
gtaaaacgacggccagttcaagtgaaatatgaattaaaccgc

SEQ ID NO: 54924 - DNA, 22 bp, Artificial Sequence
  primer
tgccagattcgttaaggtatga

SEQ ID NO: 54925 - DNA, 20 bp, Artificial Sequence
  primer
tgacaccttgccttgcagtc

SEQ ID NO: 54926 - DNA, 24 bp, Artificial Sequence
  primer
cacaactagcaagcattggttaag

SEQ ID NO: 54927 - DNA, 37 bp, Artificial Sequence
  primer
gtaaaacgacggccagtgctttgcagagtggctgttc

SEQ ID NO: 54928 - DNA, 38 bp, Artificial Sequence
  primer
gtaaaacgacggccagtagttgcctccctgaagtgttg

SEQ ID NO: 54929 - DNA, 38 bp, Artificial Sequence
  primer
gtaaaacgacggccagttgatgtgtgctggttatgagg

SEQ ID NO: 54930 - DNA, 21 bp, Artificial Sequence
  primer
tttggaggtttgcttgacatc

SEQ ID NO: 54931 - DNA, 37 bp, Artificial Sequence
  primer
gtaaaacgacggccagtcaccctgtgggttaaccagg

SEQ ID NO: 54932 - DNA, 37 bp, Artificial Sequence
  primer
gtaaaacgacggccagtcatgcccagcctcttctctc

SEQ ID NO: 54933 - DNA, 38 bp, Artificial Sequence
  primer
gtaaaacgacggccagtgtgtgtctggcacaaacttgg

SEQ ID NO: 54934 - DNA, 21 bp, Artificial Sequence
  primer
tgactctccatgatggctttc

SEQ ID NO: 54935 - DNA, 25 bp, Artificial Sequence
  primer
gatcctgtagatactgagagccaac

SEQ ID NO: 54936 - DNA, 21 bp, Artificial Sequence
  primer
attcagctctatccaggccac

SEQ ID NO: 54937 - DNA, 38 bp, Artificial Sequence
  primer
gtaaaacgacggccagtgaagtctgtcaggaaatgggc

SEQ ID NO: 54938 - DNA, 21 bp, Artificial Sequence
  primer
tggatgaagttcttggtttgg

SEQ ID NO: 54939 - DNA, 21 bp, Artificial Sequence
  primer
cctccagcttgagtgacacag

SEQ ID NO: 54940 - DNA, 38 bp, Artificial Sequence
  primer
gtaaaacgacggccagtttctcccatctcatccacttg

SEQ ID NO: 54941 - DNA, 21 bp, Artificial Sequence
  primer
ttgactgtatttgcatgtggc

SEQ ID NO: 54942 - DNA, 37 bp, Artificial Sequence
  primer
gtaaaacgacggccagtctcgatctcctgacctggtg

SEQ ID NO: 54943 - DNA, 38 bp, Artificial Sequence
  primer
gtaaaacgacggccagttatgggtatgattgggatggg

SEQ ID NO: 54944 - DNA, 21 bp, Artificial Sequence
  primer
gtggaaactgaatggctgaag

SEQ ID NO: 54945 - DNA, 39 bp, Artificial Sequence
  primer
gtaaaacgacggccagttctgataacacagcagcaaacc

SEQ ID NO: 54946 - DNA, 40 bp, Artificial Sequence
  primer
gtaaaacgacggccagtttgttcagaatgagcttgagttg

SEQ ID NO: 54947 - DNA, 38 bp, Artificial Sequence
  primer
gtaaaacgacggccagttcctttctgtttgcttccttg

SEQ ID NO: 54948 - DNA, 36 bp, Artificial Sequence
  primer
gtaaaacgacggccagtcacacagccaagggtcatc

SEQ ID NO: 54949 - DNA, 22 bp, Artificial Sequence
  primer
tgtggctcaaagcaactttacc

SEQ ID NO: 54950 - DNA, 42 bp, Artificial Sequence
  primer
gtaaaacgacggccagtcataatgtgtcccactaaattggtc

SEQ ID NO: 54951 - DNA, 39 bp, Artificial Sequence
  primer
gtaaaacgacggccagtaatcatctcagctgttggaacc

SEQ ID NO: 54952 - DNA, 40 bp, Artificial Sequence
  primer
gtaaaacgacggccagttcatctcagttgactgttcaagc

SEQ ID NO: 54953 - DNA, 38 bp, Artificial Sequence
  primer
gtaaaacgacggccagtagctcccagcattagaaggag

SEQ ID NO: 54954 - DNA, 21 bp, Artificial Sequence
  primer
ctaatggtttccaggtttggg

SEQ ID NO: 54955 - DNA, 38 bp, Artificial Sequence
  primer
gtaaaacgacggccagttggcgagtttgaattcatcag

SEQ ID NO: 54956 - DNA, 24 bp, Artificial Sequence
  primer
tgaaagcactaagcagtccctaag

SEQ ID NO: 54957 - DNA, 35 bp, Artificial Sequence
  primer
gtaaaacgacggccagtagggactctggacacccg

SEQ ID NO: 54958 - DNA, 24 bp, Artificial Sequence
  primer
ccatctgatgtaagtcagtaggga

SEQ ID NO: 54959 - DNA, 24 bp, Artificial Sequence
  primer
gaaattgtcaatgaaacactgctg

SEQ ID NO: 54960 - DNA, 38 bp, Artificial Sequence
  primer
gtaaaacgacggccagtattctttcctctgcagccact

SEQ ID NO: 54961 - DNA, 25 bp, Artificial Sequence
  primer
ccttccatttctatacattggagac

SEQ ID NO: 54962 - DNA, 43 bp, Artificial Sequence
  primer
gtaaaacgacggccagtcctctcacaaactttaatatgccttt

SEQ ID NO: 54963 - DNA, 39 bp, Artificial Sequence
  primer
gtaaaacgacggccagttctctccttcattccaaacagg

SEQ ID NO: 54964 - DNA, 39 bp, Artificial Sequence
  primer
gtaaaacgacggccagttggtaacagctcctcttcaagc

SEQ ID NO: 54965 - DNA, 38 bp, Artificial Sequence
  primer
gtaaaacgacggccagtagattggatccctcacttccc

SEQ ID NO: 54966 - DNA, 38 bp, Artificial Sequence
  primer
gtaaaacgacggccagtccatttgctaataaggccctg

SEQ ID NO: 54967 - DNA, 41 bp, Artificial Sequence
  primer
gtaaaacgacggccagttggttgcaaattcacattctactg

SEQ ID NO: 54968 - DNA, 37 bp, Artificial Sequence
  primer
gtaaaacgacggccagtaaggagaatgccagtccacc

SEQ ID NO: 54969 - DNA, 41 bp, Artificial Sequence
  primer
gtaaaacgacggccagtacaagaaagttaatgtccctccac

SEQ ID NO: 54970 - DNA, 40 bp, Artificial Sequence
  primer
gtaaaacgacggccagtttaccacctgaaacaattgtgag

SEQ ID NO: 54971 - DNA, 39 bp, Artificial Sequence
  primer
gtaaaacgacggccagttttgaatctgcaaagaaatccc

SEQ ID NO: 54972 - DNA, 22 bp, Artificial Sequence
  primer
gctgtttccttaaatgagggtg

SEQ ID NO: 54973 - DNA, 38 bp, Artificial Sequence
  primer
gtaaaacgacggccagttcatgctttggctcacttacc

SEQ ID NO: 54974 - DNA, 38 bp, Artificial Sequence
  primer
gtaaaacgacggccagtatacctgaggaaatggcttgg

SEQ ID NO: 54975 - DNA, 21 bp, Artificial Sequence
  primer
gacaaagttcttgccatggag

SEQ ID NO: 54976 - DNA, 21 bp, Artificial Sequence
  primer
acctatcccacccaggacttc

SEQ ID NO: 54977 - DNA, 20 bp, Artificial Sequence
  primer
gacaacgattcggctgtgac

SEQ ID NO: 54978 - DNA, 37 bp, Artificial Sequence
  primer
gtaaaacgacggccagtggcctgtagtaggtacgcgg

SEQ ID NO: 54979 - DNA, 19 bp, Artificial Sequence
  primer
agagcggcactggagaaag

SEQ ID NO: 54980 - DNA, 21 bp, Artificial Sequence
  primer
gcagccttaggagggagaaac

SEQ ID NO: 54981 - DNA, 21 bp, Artificial Sequence
  primer
ttggactgagggacatgacag

SEQ ID NO: 54982 - DNA, 38 bp, Artificial Sequence
  primer
gtaaaacgacggccagttgcaaggataggtgcgtagtg

SEQ ID NO: 54983 - DNA, 38 bp, Artificial Sequence
  primer
gtaaaacgacggccagtttccagattgaatgtgttggg

SEQ ID NO: 54984 - DNA, 21 bp, Artificial Sequence
  primer
tgcctttctgaagaaggaacc

SEQ ID NO: 54985 - DNA, 21 bp, Artificial Sequence
  primer
tccaaagatccctgaagttcc

SEQ ID NO: 54986 - DNA, 20 bp, Artificial Sequence
  primer
ggttaccaggatgaaagccc

SEQ ID NO: 54987 - DNA, 21 bp, Artificial Sequence
  primer
ttgccacagtgacttcattcc

SEQ ID NO: 54988 - DNA, 38 bp, Artificial Sequence
  primer
gtaaaacgacggccagttgctcaatacctgctgacctc

SEQ ID NO: 54989 - DNA, 36 bp, Artificial Sequence
  primer
gtaaaacgacggccagtgggatgctctggtccagtc

SEQ ID NO: 54990 - DNA, 21 bp, Artificial Sequence
  primer
gggtgtggctttagtggacag

SEQ ID NO: 54991 - DNA, 38 bp, Artificial Sequence
  primer
gtaaaacgacggccagtcacctcttccaaggtcagtgg

SEQ ID NO: 54992 - DNA, 38 bp, Artificial Sequence
  primer
gtaaaacgacggccagtcagtgttgctaatgctgaccc

SEQ ID NO: 54993 - DNA, 35 bp, Artificial Sequence
  primer
gtaaaacgacggccagtcggaagtcaccggaagag

SEQ ID NO: 54994 - DNA, 37 bp, Artificial Sequence
  primer
gtaaaacgacggccagtggtttgtgccgaatggagac

SEQ ID NO: 54995 - DNA, 38 bp, Artificial Sequence
  primer
gtaaaacgacggccagtgggaacactgggcttctgtag

SEQ ID NO: 54996 - DNA, 37 bp, Artificial Sequence
  primer
gtaaaacgacggccagttttcaggcttgctgttctgc

SEQ ID NO: 54997 - DNA, 38 bp, Artificial Sequence
  primer
gtaaaacgacggccagtcctacctgtggtaccgctcac

SEQ ID NO: 54998 - DNA, 37 bp, Artificial Sequence
  primer
gtaaaacgacggccagtgggcagctatcagctgtgtg

SEQ ID NO: 54999 - DNA, 21 bp, Artificial Sequence
  primer
acctcaaggtagtggtgcctc

SEQ ID NO: 55000 - DNA, 35 bp, Artificial Sequence
  primer
gtaaaacgacggccagtctcctccaagccctccag

SEQ ID NO: 55001 - DNA, 38 bp, Artificial Sequence
  primer
gtaaaacgacggccagtgcaagacagcaagtcatctcc

SEQ ID NO: 55002 - DNA, 38 bp, Artificial Sequence
  primer
gtaaaacgacggccagtgggcctgagaatttgcctaac

SEQ ID NO: 55003 - DNA, 21 bp, Artificial Sequence
  primer
agcctctgtatggaagggttg

SEQ ID NO: 55004 - DNA, 38 bp, Artificial Sequence
  primer
gtaaaacgacggccagttagccatatgcttggcaactg

SEQ ID NO: 55005 - DNA, 24 bp, Artificial Sequence
  primer
tggtctccatctagctctgaactc

SEQ ID NO: 55006 - DNA, 38 bp, Artificial Sequence
  primer
gtaaaacgacggccagtctgctgccataattggaagtc

SEQ ID NO: 55007 - DNA, 20 bp, Artificial Sequence
  primer
tcacccatcctcctggagtc

SEQ ID NO: 55008 - DNA, 39 bp, Artificial Sequence
  primer
gtaaaacgacggccagtcctggaagctctaggtttgtcc

SEQ ID NO: 55009 - DNA, 21 bp, Artificial Sequence
  primer
acccagatacattgcctctcc

SEQ ID NO: 55010 - DNA, 38 bp, Artificial Sequence
  primer
gtaaaacgacggccagtcccagagactgaagggttctg

SEQ ID NO: 55011 - DNA, 20 bp, Artificial Sequence
  primer
aaatttgccatgtgtggtgg

SEQ ID NO: 55012 - DNA, 21 bp, Artificial Sequence
  primer
atagagagtgtgagggtcccg

SEQ ID NO: 55013 - DNA, 21 bp, Artificial Sequence
  primer
gtggagaactaggtgctgtgc

SEQ ID NO: 55014 - DNA, 37 bp, Artificial Sequence
  primer
gtaaaacgacggccagtcagaggtggcaggtgaagac

SEQ ID NO: 55015 - DNA, 38 bp, Artificial Sequence
  primer
gtaaaacgacggccagttccaacaccttcactgagacc

SEQ ID NO: 55016 - DNA, 38 bp, Artificial Sequence
  primer
gtaaaacgacggccagttatggtgaagaacccagaggc

SEQ ID NO: 55017 - DNA, 21 bp, Artificial Sequence
  primer
cactggacccaaaggaatctc

SEQ ID NO: 55018 - DNA, 21 bp, Artificial Sequence
  primer
ctttccgttgccttcaatcag

SEQ ID NO: 55019 - DNA, 38 bp, Artificial Sequence
  primer
gtaaaacgacggccagtcctcacctggtcttgttctgg

SEQ ID NO: 55020 - DNA, 21 bp, Artificial Sequence
  primer
cacagctctgcagccagatac

SEQ ID NO: 55021 - DNA, 37 bp, Artificial Sequence
  primer
gtaaaacgacggccagtcacacatttccagctcgcac

SEQ ID NO: 55022 - DNA, 21 bp, Artificial Sequence
  primer
gagacagagggtctcagtggg

SEQ ID NO: 55023 - DNA, 20 bp, Artificial Sequence
  primer
catttgcacagccagtgaac

SEQ ID NO: 55024 - DNA, 38 bp, Artificial Sequence
  primer
gtaaaacgacggccagtgagatttctctgcttgcctgc

SEQ ID NO: 55025 - DNA, 21 bp, Artificial Sequence
  primer
gatgtcagaaggaggagaggg

SEQ ID NO: 55026 - DNA, 37 bp, Artificial Sequence
  primer
gtaaaacgacggccagtgcctgtttagggagtcccag

SEQ ID NO: 55027 - DNA, 38 bp, Artificial Sequence
  primer
gtaaaacgacggccagtcaaccctgtttctttcaaggc

SEQ ID NO: 55028 - DNA, 38 bp, Artificial Sequence
  primer
gtaaaacgacggccagtatatgaagctgaccgacctgg

SEQ ID NO: 55029 - DNA, 38 bp, Artificial Sequence
  primer
gtaaaacgacggccagtccaaaccctcctttacttccc

SEQ ID NO: 55030 - DNA, 38 bp, Artificial Sequence
  primer
gtaaaacgacggccagttcctctcccttcctcttctgc

SEQ ID NO: 55031 - DNA, 21 bp, Artificial Sequence
  primer
aagcacttacagccaaccctg

SEQ ID NO: 55032 - DNA, 38 bp, Artificial Sequence
  primer
gtaaaacgacggccagtttatttgcagtggtgagggtg

SEQ ID NO: 55033 - DNA, 20 bp, Artificial Sequence
  primer
aatgggtcaatggacaggtg

SEQ ID NO: 55034 - DNA, 38 bp, Artificial Sequence
  primer
gtaaaacgacggccagtggctatcagaaggaaactggg

SEQ ID NO: 55035 - DNA, 37 bp, Artificial Sequence
  primer
gtaaaacgacggccagtctttggagccttcttcagcc

SEQ ID NO: 55036 - DNA, 38 bp, Artificial Sequence
  primer
gtaaaacgacggccagttggacagtaagagggacccag

SEQ ID NO: 55037 - DNA, 19 bp, Artificial Sequence
  primer
ccctctgccttctgccttc

SEQ ID NO: 55038 - DNA, 37 bp, Artificial Sequence
  primer
gtaaaacgacggccagtggtgcatgaaaccctcaatg

SEQ ID NO: 55039 - DNA, 21 bp, Artificial Sequence
  primer
gctcagtgacagtgctgagtg

SEQ ID NO: 55040 - DNA, 21 bp, Artificial Sequence
  primer
gatctgttggaggagcaggtg

SEQ ID NO: 55041 - DNA, 20 bp, Artificial Sequence
  primer
cacgctggagggattacaag

SEQ ID NO: 55042 - DNA, 38 bp, Artificial Sequence
  primer
gtaaaacgacggccagtgcagagttcacactacggctg

SEQ ID NO: 55043 - DNA, 38 bp, Artificial Sequence
  primer
gtaaaacgacggccagttcactgaatgagctccagacc

SEQ ID NO: 55044 - DNA, 38 bp, Artificial Sequence
  primer
gtaaaacgacggccagtcaaagctccacctgttccatc

SEQ ID NO: 55045 - DNA, 38 bp, Artificial Sequence
  primer
gtaaaacgacggccagtgcagttgaacagaatggaccc

SEQ ID NO: 55046 - DNA, 38 bp, Artificial Sequence
  primer
gtaaaacgacggccagttggagggagaagtgactaggg

SEQ ID NO: 55047 - DNA, 21 bp, Artificial Sequence
  primer
agaagtaggaacgagaagccg

SEQ ID NO: 55048 - DNA, 19 bp, Artificial Sequence
  primer
ttctttcccgtcttggtcg

SEQ ID NO: 55049 - DNA, 39 bp, Artificial Sequence
  primer
gtaaaacgacggccagtccctgagtcctctttatttggg

SEQ ID NO: 55050 - DNA, 38 bp, Artificial Sequence
  primer
gtaaaacgacggccagtgcagagccagaatgcaagtag

SEQ ID NO: 55051 - DNA, 38 bp, Artificial Sequence
  primer
gtaaaacgacggccagtgacggttcttgacctccagtc

SEQ ID NO: 55052 - DNA, 38 bp, Artificial Sequence
  primer
gtaaaacgacggccagtaaggaatctggcatgaaggac

SEQ ID NO: 55053 - DNA, 21 bp, Artificial Sequence
  primer
ggagaaggaaacaagcctgag

SEQ ID NO: 55054 - DNA, 38 bp, Artificial Sequence
  primer
gtaaaacgacggccagttacattgaggaaacccttcgg

SEQ ID NO: 55055 - DNA, 38 bp, Artificial Sequence
  primer
gtaaaacgacggccagtaatctctcaacgacacgatgc

SEQ ID NO: 55056 - DNA, 38 bp, Artificial Sequence
  primer
gtaaaacgacggccagtgttgcagagccaggtcatctc

SEQ ID NO: 55057 - DNA, 19 bp, Artificial Sequence
  primer
agtcagggctgaggtttcc

SEQ ID NO: 55058 - DNA, 38 bp, Artificial Sequence
  primer
gtaaaacgacggccagtgctggtacaaatgtgcctctg

SEQ ID NO: 55059 - DNA, 38 bp, Artificial Sequence
  primer
gtaaaacgacggccagtagtttgcttcaccactttggg

SEQ ID NO: 55060 - DNA, 19 bp, Artificial Sequence
  primer
ccaggcccaggttaatcac

SEQ ID NO: 55061 - DNA, 20 bp, Artificial Sequence
  primer
atgctaatccgcaaagagcc

SEQ ID NO: 55062 - DNA, 38 bp, Artificial Sequence
  primer
gtaaaacgacggccagtacatgggagtttggagtcctg

SEQ ID NO: 55063 - DNA, 21 bp, Artificial Sequence
  primer
acccagccttatgcaagtgtc

SEQ ID NO: 55064 - DNA, 37 bp, Artificial Sequence
  primer
gtaaaacgacggccagttctttcccagaaggaaaggc

SEQ ID NO: 55065 - DNA, 21 bp, Artificial Sequence
  primer
tatggtaccctcagtggcctg

SEQ ID NO: 55066 - DNA, 21 bp, Artificial Sequence
  primer
ctgctggaggagtacgtggac

SEQ ID NO: 55067 - DNA, 38 bp, Artificial Sequence
  primer
gtaaaacgacggccagtagcttacgaggctctctgctg

SEQ ID NO: 55068 - DNA, 37 bp, Artificial Sequence
  primer
gtaaaacgacggccagtcttacgaggctctctgctgc

SEQ ID NO: 55069 - DNA, 21 bp, Artificial Sequence
  primer
gtctcactggagacttcgtgc

SEQ ID NO: 55070 - DNA, 38 bp, Artificial Sequence
  primer
gtaaaacgacggccagtcttcaaggcgagatcactctg

SEQ ID NO: 55071 - DNA, 21 bp, Artificial Sequence
  primer
cccagaaacttcagcacacag

SEQ ID NO: 55072 - DNA, 38 bp, Artificial Sequence
  primer
gtaaaacgacggccagttgtgtgcgtcctgcaatttac

SEQ ID NO: 55073 - DNA, 25 bp, Artificial Sequence
  primer
gcttaagagcagtatctgtagtccg

SEQ ID NO: 55074 - DNA, 38 bp, Artificial Sequence
  primer
gtaaaacgacggccagtctaacaggcagttgaggaccc

SEQ ID NO: 55075 - DNA, 37 bp, Artificial Sequence
  primer
gtaaaacgacggccagttttgatctccgttgctaggc

SEQ ID NO: 55076 - DNA, 38 bp, Artificial Sequence
  primer
gtaaaacgacggccagttttgcagtgaaattggtggtg

SEQ ID NO: 55077 - DNA, 42 bp, Artificial Sequence
  primer
gtaaaacgacggccagtaaggctagagaggataaagcatttg

SEQ ID NO: 55078 - DNA, 22 bp, Artificial Sequence
  primer
tgcctgttgaataaagctgatg

SEQ ID NO: 55079 - DNA, 21 bp, Artificial Sequence
  primer
tcgtggtgctcagagaatttg

SEQ ID NO: 55080 - DNA, 38 bp, Artificial Sequence
  primer
gtaaaacgacggccagtacaaagtccgagttactgccc

SEQ ID NO: 55081 - DNA, 37 bp, Artificial Sequence
  primer
gtaaaacgacggccagtcaatgattgcaccactgcac

SEQ ID NO: 55082 - DNA, 38 bp, Artificial Sequence
  primer
gtaaaacgacggccagttagcaagatggattcaatggg

SEQ ID NO: 55083 - DNA, 21 bp, Artificial Sequence
  primer
gacactatccagcttgggacc

SEQ ID NO: 55084 - DNA, 38 bp, Artificial Sequence
  primer
gtaaaacgacggccagtctcacggacaatattgcgttt

SEQ ID NO: 55085 - DNA, 22 bp, Artificial Sequence
  primer
ggccagctgtggtatctatgtg

SEQ ID NO: 55086 - DNA, 37 bp, Artificial Sequence
  primer
gtaaaacgacggccagtgaagtcagcatgaagcctcg

SEQ ID NO: 55087 - DNA, 21 bp, Artificial Sequence
  primer
gaaacgcagcattcattcaag

SEQ ID NO: 55088 - DNA, 38 bp, Artificial Sequence
  primer
gtaaaacgacggccagttgaatgaaagctgggaacaag

SEQ ID NO: 55089 - DNA, 21 bp, Artificial Sequence
  primer
ggcagctaccgttatcctttg

SEQ ID NO: 55090 - DNA, 37 bp, Artificial Sequence
  primer
gtaaaacgacggccagtgacagtggacctgtcgcttc

SEQ ID NO: 55091 - DNA, 21 bp, Artificial Sequence
  primer
aacagacttggacggagatgg

SEQ ID NO: 55092 - DNA, 38 bp, Artificial Sequence
  primer
gtaaaacgacggccagtttcatgttcaggaccgttcag

SEQ ID NO: 55093 - DNA, 38 bp, Artificial Sequence
  primer
gtaaaacgacggccagtaattcaagcactttcccatcc

SEQ ID NO: 55094 - DNA, 37 bp, Artificial Sequence
  primer
gtaaaacgacggccagtccgagtccatgttctcaacc

SEQ ID NO: 55095 - DNA, 20 bp, Artificial Sequence
  primer
tcgtgctgtgtgatctttgg

SEQ ID NO: 55096 - DNA, 21 bp, Artificial Sequence
  primer
gctactgggtctttgcctctc

SEQ ID NO: 55097 - DNA, 35 bp, Artificial Sequence
  primer
gtaaaacgacggccagtgaatggcatgaacccagg

SEQ ID NO: 55098 - DNA, 21 bp, Artificial Sequence
  primer
tgaatgtcctgggtctctgtg

SEQ ID NO: 55099 - DNA, 21 bp, Artificial Sequence
  primer
agggaaggtaatggaagggag

SEQ ID NO: 55100 - DNA, 20 bp, Artificial Sequence
  primer
ctactgtgcccagcctgaag

SEQ ID NO: 55101 - DNA, 38 bp, Artificial Sequence
  primer
gtaaaacgacggccagtgtttagggcagtcctgtgagg

SEQ ID NO: 55102 - DNA, 21 bp, Artificial Sequence
  primer
acgcagagccttaccctaaac

SEQ ID NO: 55103 - DNA, 38 bp, Artificial Sequence
  primer
gtaaaacgacggccagtaaagtgggtgagaatggatgg

SEQ ID NO: 55104 - DNA, 20 bp, Artificial Sequence
  primer
ctgcaggaagtggaggtgag

SEQ ID NO: 55105 - DNA, 21 bp, Artificial Sequence
  primer
atttgccttgagtcacacacc

SEQ ID NO: 55106 - DNA, 21 bp, Artificial Sequence
  primer
tgacaggaggaatggtttctg

SEQ ID NO: 55107 - DNA, 21 bp, Artificial Sequence
  primer
tccctctgatccctcccttag

SEQ ID NO: 55108 - DNA, 19 bp, Artificial Sequence
  primer
ctcagagctcttggcaggg

SEQ ID NO: 55109 - DNA, 38 bp, Artificial Sequence
  primer
gtaaaacgacggccagtcaaaggcctgtgtatccttcc

SEQ ID NO: 55110 - DNA, 38 bp, Artificial Sequence
  primer
gtaaaacgacggccagttagcctcctctgtcttggacc

SEQ ID NO: 55111 - DNA, 38 bp, Artificial Sequence
  primer
gtaaaacgacggccagtgtcggaacaaattaaggtggc

SEQ ID NO: 55112 - DNA, 38 bp, Artificial Sequence
  primer
gtaaaacgacggccagtaaagaaccgggtcaagacaag

SEQ ID NO: 55113 - DNA, 37 bp, Artificial Sequence
  primer
gtaaaacgacggccagtacctagagaacgagcgggtc

SEQ ID NO: 55114 - DNA, 40 bp, Artificial Sequence
  primer
gtaaaacgacggccagttttgtaagtcttatgtgggatgg

SEQ ID NO: 55115 - DNA, 24 bp, Artificial Sequence
  primer
agacagtatcatgtgctgcatacc

SEQ ID NO: 55116 - DNA, 27 bp, Artificial Sequence
  primer
cagtgcaaattgtattagctgtatgac

SEQ ID NO: 55117 - DNA, 38 bp, Artificial Sequence
  primer
gtaaaacgacggccagttcatccaggcagtctttcaac

SEQ ID NO: 55118 - DNA, 40 bp, Artificial Sequence
  primer
gtaaaacgacggccagtcactgtttagatgctcttgtggg

SEQ ID NO: 55119 - DNA, 39 bp, Artificial Sequence
  primer
gtaaaacgacggccagttgggtatctgaggaaggtgttc

SEQ ID NO: 55120 - DNA, 38 bp, Artificial Sequence
  primer
gtaaaacgacggccagtttacacgtgtgagcactctgc

SEQ ID NO: 55121 - DNA, 39 bp, Artificial Sequence
  primer
gtaaaacgacggccagttgatgattgtttgatttgctga

SEQ ID NO: 55122 - DNA, 27 bp, Artificial Sequence
  primer
tgtacctgtagtgcataggattaaatg

SEQ ID NO: 55123 - DNA, 38 bp, Artificial Sequence
  primer
gtaaaacgacggccagttggaaataacctggagggatg

SEQ ID NO: 55124 - DNA, 43 bp, Artificial Sequence
  primer
gtaaaacgacggccagtaatcttgccctatcgttaattgtaag

SEQ ID NO: 55125 - DNA, 23 bp, Artificial Sequence
  primer
gcaaataccataattacatgcgg

SEQ ID NO: 55126 - DNA, 25 bp, Artificial Sequence
  primer
ccctaaactttactacctgctttgc

SEQ ID NO: 55127 - DNA, 21 bp, Artificial Sequence
  primer
caaatttgggctttcgtcata

SEQ ID NO: 55128 - DNA, 22 bp, Artificial Sequence
  primer
acgaggaacatttaatgatggc

SEQ ID NO: 55129 - DNA, 36 bp, Artificial Sequence
  primer
gtaaaacgacggccagtctcaccactctgccagcat

SEQ ID NO: 55130 - DNA, 21 bp, Artificial Sequence
  primer
ccagcgttatgacaaagcaag

SEQ ID NO: 55131 - DNA, 38 bp, Artificial Sequence
  primer
gtaaaacgacggccagtaggcctgtaagcatctccaag

SEQ ID NO: 55132 - DNA, 38 bp, Artificial Sequence
  primer
gtaaaacgacggccagtagggtgtgacactgcttcctc

SEQ ID NO: 55133 - DNA, 22 bp, Artificial Sequence
  primer
gggaggaatatgatagatgggc

SEQ ID NO: 55134 - DNA, 25 bp, Artificial Sequence
  primer
tgatttgaatgaagaacagtgtgag

SEQ ID NO: 55135 - DNA, 21 bp, Artificial Sequence
  primer
aaattggattgcccatttcac

SEQ ID NO: 55136 - DNA, 21 bp, Artificial Sequence
  primer
cacaagtacagtgcccacagc

SEQ ID NO: 55137 - DNA, 37 bp, Artificial Sequence
  primer
gtaaaacgacggccagtcgaaacgagatgcacctgac

SEQ ID NO: 55138 - DNA, 35 bp, Artificial Sequence
  primer
gtaaaacgacggccagtgaacttggcgggatggag

SEQ ID NO: 55139 - DNA, 43 bp, Artificial Sequence
  primer
gtaaaacgacggccagtcaaggtgaaatacattcagcctttat

SEQ ID NO: 55140 - DNA, 37 bp, Artificial Sequence
  primer
gtaaaacgacggccagtgagtttgggccatttggtct

SEQ ID NO: 55141 - DNA, 42 bp, Artificial Sequence
  primer
gtaaaacgacggccagtatagcatcaaagtattgggaatgtt

SEQ ID NO: 55142 - DNA, 21 bp, Artificial Sequence
  primer
tgaagttcaaatccacaaggg

SEQ ID NO: 55143 - DNA, 21 bp, Artificial Sequence
  primer
gcatagggatttgtctgcctc

SEQ ID NO: 55144 - DNA, 39 bp, Artificial Sequence
  primer
gtaaaacgacggccagtagaatttcttgccacacaacag

SEQ ID NO: 55145 - DNA, 22 bp, Artificial Sequence
  primer
cacttgatacagcttcacggtc

SEQ ID NO: 55146 - DNA, 44 bp, Artificial Sequence
  primer
gtaaaacgacggccagtctatgttctcagtacagtttaggcttg

SEQ ID NO: 55147 - DNA, 27 bp, Artificial Sequence
  primer
tcagatagaaggatgatacagtggttc

SEQ ID NO: 55148 - DNA, 38 bp, Artificial Sequence
  primer
gtaaaacgacggccagtggcttgtctccatgtcaactg

SEQ ID NO: 55149 - DNA, 21 bp, Artificial Sequence
  primer
tttgtttgttctttccgaggg

SEQ ID NO: 55150 - DNA, 22 bp, Artificial Sequence
  primer
ccaaagggtacctacttctccc

SEQ ID NO: 55151 - DNA, 21 bp, Artificial Sequence
  primer
cctggaaacactgagcctagc

SEQ ID NO: 55152 - DNA, 21 bp, Artificial Sequence
  primer
caggtgcgatgagagcagata

SEQ ID NO: 55153 - DNA, 39 bp, Artificial Sequence
  primer
gtaaaacgacggccagtgcccaaacctgagagataagtg

SEQ ID NO: 55154 - DNA, 23 bp, Artificial Sequence
  primer
cacatcactgattgagacacctg

SEQ ID NO: 55155 - DNA, 26 bp, Artificial Sequence
  primer
agctaattcctgttctttacaagctg

SEQ ID NO: 55156 - DNA, 44 bp, Artificial Sequence
  primer
gtaaaacgacggccagtagcttaattggcaatatatacactgtt

SEQ ID NO: 55157 - DNA, 25 bp, Artificial Sequence
  primer
tgtggagctaaagttgttacagagg

SEQ ID NO: 55158 - DNA, 36 bp, Artificial Sequence
  primer
gtaaaacgacggccagtcaccacacctggcccatac

SEQ ID NO: 55159 - DNA, 43 bp, Artificial Sequence
  primer
gtaaaacgacggccagttttatgaaacagctaagatttctcca

SEQ ID NO: 55160 - DNA, 27 bp, Artificial Sequence
  primer
tcttactataagttgactgcagcagaa

SEQ ID NO: 55161 - DNA, 21 bp, Artificial Sequence
  primer
cagcaattagtaggctctggg

SEQ ID NO: 55162 - DNA, 26 bp, Artificial Sequence
  primer
ccttaacaggtttaggaattggtatc

SEQ ID NO: 55163 - DNA, 44 bp, Artificial Sequence
  primer
gtaaaacgacggccagtttgttgaacatctttgtatccaattta

SEQ ID NO: 55164 - DNA, 43 bp, Artificial Sequence
  primer
gtaaaacgacggccagttcaatgtttaaaccaatgtgacataa

SEQ ID NO: 55165 - DNA, 38 bp, Artificial Sequence
  primer
gtaaaacgacggccagtgtgacaagacacctctctggg

SEQ ID NO: 55166 - DNA, 41 bp, Artificial Sequence
  primer
gtaaaacgacggccagttcttggaatcagactaccttgtga

SEQ ID NO: 55167 - DNA, 38 bp, Artificial Sequence
  primer
gtaaaacgacggccagttgtggcacttggaatcttcag

SEQ ID NO: 55168 - DNA, 25 bp, Artificial Sequence
  primer
ttgaaatgagtgccttctcttacag

SEQ ID NO: 55169 - DNA, 41 bp, Artificial Sequence
  primer
gtaaaacgacggccagtttggtacacatttgtccatgtttc

SEQ ID NO: 55170 - DNA, 26 bp, Artificial Sequence
  primer
catgtattgctaggtagtagagcagg

SEQ ID NO: 55171 - DNA, 22 bp, Artificial Sequence
  primer
cacgatgcatgctctttgtatc

SEQ ID NO: 55172 - DNA, 26 bp, Artificial Sequence
  primer
cctcaaattgccatagaaagtttaca

SEQ ID NO: 55173 - DNA, 39 bp, Artificial Sequence
  primer
gtaaaacgacggccagtctctgaaagcaggtcaataggg

SEQ ID NO: 55174 - DNA, 21 bp, Artificial Sequence
  primer
atgggacagtgagactttggg

SEQ ID NO: 55175 - DNA, 41 bp, Artificial Sequence
  primer
gtaaaacgacggccagtttcatgtaacccagacaatctcag

SEQ ID NO: 55176 - DNA, 38 bp, Artificial Sequence
  primer
gtaaaacgacggccagtgcttctcaactcctccctttg

SEQ ID NO: 55177 - DNA, 40 bp, Artificial Sequence
  primer
gtaaaacgacggccagtttcaggtctccaaacaacttacc

SEQ ID NO: 55178 - DNA, 20 bp, Artificial Sequence
  primer
ctgcggtgctaactccctac

SEQ ID NO: 55179 - DNA, 38 bp, Artificial Sequence
  primer
gtaaaacgacggccagtctcagcccatgaagagcagac

SEQ ID NO: 55180 - DNA, 21 bp, Artificial Sequence
  primer
tgttagcagatagcccacacg

SEQ ID NO: 55181 - DNA, 38 bp, Artificial Sequence
  primer
gtaaaacgacggccagttatttccgcccacagataagc

SEQ ID NO: 55182 - DNA, 21 bp, Artificial Sequence
  primer
tgacccagtgctgacaatagg

SEQ ID NO: 55183 - DNA, 39 bp, Artificial Sequence
  primer
gtaaaacgacggccagttcctgtttagggacaaacaagc

SEQ ID NO: 55184 - DNA, 21 bp, Artificial Sequence
  primer
caccttctcccaaagttccag

SEQ ID NO: 55185 - DNA, 22 bp, Artificial Sequence
  primer
gcaattctcacatgtgttgcag

SEQ ID NO: 55186 - DNA, 38 bp, Artificial Sequence
  primer
gtaaaacgacggccagttgcctcctgtcacacctactc

SEQ ID NO: 55187 - DNA, 38 bp, Artificial Sequence
  primer
gtaaaacgacggccagtgtcttcaactctggccgtatg

SEQ ID NO: 55188 - DNA, 38 bp, Artificial Sequence
  primer
gtaaaacgacggccagtgggttataggcgtgagtgtgc

SEQ ID NO: 55189 - DNA, 38 bp, Artificial Sequence
  primer
gtaaaacgacggccagtcacagtctgcctgaccctatc

SEQ ID NO: 55190 - DNA, 37 bp, Artificial Sequence
  primer
gtaaaacgacggccagtagggtcacatggtgagcaag

SEQ ID NO: 55191 - DNA, 38 bp, Artificial Sequence
  primer
gtaaaacgacggccagtggaaagaaccacaactcccag

SEQ ID NO: 55192 - DNA, 38 bp, Artificial Sequence
  primer
gtaaaacgacggccagtcattgagcaactctgactccg

SEQ ID NO: 55193 - DNA, 20 bp, Artificial Sequence
  primer
ggccaagccaggagtaattt

SEQ ID NO: 55194 - DNA, 38 bp, Artificial Sequence
  primer
gtaaaacgacggccagtccataacagtcacctccaccc

SEQ ID NO: 55195 - DNA, 21 bp, Artificial Sequence
  primer
gaagtgcatatgggatgggag

SEQ ID NO: 55196 - DNA, 39 bp, Artificial Sequence
  primer
gtaaaacgacggccagttgggtggatatctatcagtggg

SEQ ID NO: 55197 - DNA, 21 bp, Artificial Sequence
  primer
atatgtcccactgtgtgcctg

SEQ ID NO: 55198 - DNA, 38 bp, Artificial Sequence
  primer
gtaaaacgacggccagtacctcacctagatgcagaggg

SEQ ID NO: 55199 - DNA, 22 bp, Artificial Sequence
  primer
ggagtggaatgtagaggtgagc

SEQ ID NO: 55200 - DNA, 38 bp, Artificial Sequence
  primer
gtaaaacgacggccagtcgggaggacatgaaatcagac

SEQ ID NO: 55201 - DNA, 23 bp, Artificial Sequence
  primer
gggctttatgggctaatttgtag

SEQ ID NO: 55202 - DNA, 21 bp, Artificial Sequence
  primer
ggatggactcccagcctattc

SEQ ID NO: 55203 - DNA, 21 bp, Artificial Sequence
  primer
ctaaggctccagctgggttac

SEQ ID NO: 55204 - DNA, 23 bp, Artificial Sequence
  primer
tgaggtgcatgactctctctctc

SEQ ID NO: 55205 - DNA, 21 bp, Artificial Sequence
  primer
tgttcccagtgactcttgagg

SEQ ID NO: 55206 - DNA, 38 bp, Artificial Sequence
  primer
gtaaaacgacggccagtataactcttcttcccgcctgg

SEQ ID NO: 55207 - DNA, 20 bp, Artificial Sequence
  primer
gaatttccagccgaggagtc

SEQ ID NO: 55208 - DNA, 39 bp, Artificial Sequence
  primer
gtaaaacgacggccagtcatcatctgagtctcacctccc

SEQ ID NO: 55209 - DNA, 21 bp, Artificial Sequence
  primer
gtgattacaggcatccaccac

SEQ ID NO: 55210 - DNA, 38 bp, Artificial Sequence
  primer
gtaaaacgacggccagtagaccattcctggaagtgtgg

SEQ ID NO: 55211 - DNA, 20 bp, Artificial Sequence
  primer
ctcaacggccaggtgtgtag

SEQ ID NO: 55212 - DNA, 21 bp, Artificial Sequence
  primer
ccctgtagacatgacccttgg

SEQ ID NO: 55213 - DNA, 38 bp, Artificial Sequence; identical to SEQ ID NO: 29917
  primer

SEQ ID NO: 55214 - DNA, 37 bp, Artificial Sequence
  primer
gtaaaacgacggccagtgagcagacagtggtgccttc

SEQ ID NO: 55215 - DNA, 20 bp, Artificial Sequence
  primer
tattgtgctttcctgctggc

SEQ ID NO: 55216 - DNA, 38 bp, Artificial Sequence
  primer
gtaaaacgacggccagtactctctggctttgagcatcc

SEQ ID NO: 55217 - DNA, 21 bp, Artificial Sequence
  primer
gaagcagaaagcacagtccac

SEQ ID NO: 55218 - DNA, 38 bp, Artificial Sequence
  primer
gtaaaacgacggccagtgtgcagtgcaacttgagatcc

SEQ ID NO: 55219 - DNA, 38 bp, Artificial Sequence
  primer
gtaaaacgacggccagtaggtatgacctggccctagaa

SEQ ID NO: 55220 - DNA, 21 bp, Artificial Sequence
  primer
actgcatccgtctccttgttc

SEQ ID NO: 55221 - DNA, 37 bp, Artificial Sequence
  primer
gtaaaacgacggccagtgctgagcggttggagtcttc

SEQ ID NO: 55222 - DNA, 23 bp, Artificial Sequence
  primer
gttgctcacactattctcttccg

SEQ ID NO: 55223 - DNA, 37 bp, Artificial Sequence
  primer
gtaaaacgacggccagtggcagaggaactctggtgtg

SEQ ID NO: 55224 - DNA, 35 bp, Artificial Sequence
  primer
gtaaaacgacggccagttccacctgcttcagcctc

SEQ ID NO: 55225 - DNA, 21 bp, Artificial Sequence
  primer
tcacaaatttacctggctccc

SEQ ID NO: 55226 - DNA, 38 bp, Artificial Sequence
  primer
gtaaaacgacggccagtcccaacaacatggtacaggag

SEQ ID NO: 55227 - DNA, 21 bp, Artificial Sequence
  primer
gagccaaccacagaccctatc

SEQ ID NO: 55228 - DNA, 20 bp, Artificial Sequence
  primer
agtgagctgagattgcaccg

SEQ ID NO: 55229 - DNA, 38 bp, Artificial Sequence
  primer
gtaaaacgacggccagtccatgggcacagatgaaatag

SEQ ID NO: 55230 - DNA, 21 bp, Artificial Sequence
  primer
tcatcttcctggtgtactgcc

SEQ ID NO: 55231 - DNA, 20 bp, Artificial Sequence
  primer
ggcacatgcctctaatcctg

SEQ ID NO: 55232 - DNA, 37 bp, Artificial Sequence
  primer
gtaaaacgacggccagtataacccagcgtccacctct

SEQ ID NO: 55233 - DNA, 20 bp, Artificial Sequence
  primer
ggcagaggaactctggtgtg

SEQ ID NO: 55234 - DNA, 37 bp, Artificial Sequence
  primer
gtaaaacgacggccagtgagtctgatggcgaaagagg

SEQ ID NO: 55235 - DNA, 19 bp, Artificial Sequence
  primer
gctgggtccaacagtggtc

SEQ ID NO: 55236 - DNA, 39 bp, Artificial Sequence
  primer
gtaaaacgacggccagtgctaggattataggcatgcacc

SEQ ID NO: 55237 - DNA, 21 bp, Artificial Sequence
  primer
actgatttgtctcggaaagcc

SEQ ID NO: 55238 - DNA, 19 bp, Artificial Sequence
  primer
agcctaggtcgcaccattg

SEQ ID NO: 55239 - DNA, 38 bp, Artificial Sequence
  primer
gtaaaacgacggccagtagcctgctttctcatgctttc

SEQ ID NO: 55240 - DNA, 38 bp, Artificial Sequence
  primer
gtaaaacgacggccagtcaccatgtcctgttcctatgc

SEQ ID NO: 55241 - DNA, 18 bp, Artificial Sequence
  primer
tagccaggcatggtggtg

SEQ ID NO: 55242 - DNA, 21 bp, Artificial Sequence
  primer
attagcctggtgtggtactgc

SEQ ID NO: 55243 - DNA, 21 bp, Artificial Sequence
  primer
ttggtgcctgtgtctaggatg

SEQ ID NO: 55244 - DNA, 38 bp, Artificial Sequence
  primer
gtaaaacgacggccagtggtctgatgtcaggtgctctg

SEQ ID NO: 55245 - DNA, 21 bp, Artificial Sequence
  primer
tctcaagctcctgacttcgtg

SEQ ID NO: 55246 - DNA, 38 bp, Artificial Sequence
  primer
gtaaaacgacggccagtacctgctaccaattcagtccc

SEQ ID NO: 55247 - DNA, 39 bp, Artificial Sequence
  primer
gtaaaacgacggccagttcacaagatcacacaggtagcc

SEQ ID NO: 55248 - DNA, 38 bp, Artificial Sequence
  primer
gtaaaacgacggccagtttcctgactcaccgacctttc

SEQ ID NO: 55249 - DNA, 38 bp, Artificial Sequence
  primer
gtaaaacgacggccagttaggagatcatgccatccttg

SEQ ID NO: 55250 - DNA, 18 bp, Artificial Sequence
  primer
gtcgctcgctcacacacc

SEQ ID NO: 55251 - DNA, 22 bp, Artificial Sequence
  primer
ttaccatagagtccttggtggc

SEQ ID NO: 55252 - DNA, 20 bp, Artificial Sequence
  primer
gcgtgtcaaggaatggagag

SEQ ID NO: 55253 - DNA, 38 bp, Artificial Sequence
  primer
gtaaaacgacggccagtgtcttcccatcaggctctcag

SEQ ID NO: 55254 - DNA, 37 bp, Artificial Sequence
  primer
gtaaaacgacggccagtgtttggtgcaagattctcgg

SEQ ID NO: 55255 - DNA, 18 bp, Artificial Sequence
  primer
gcttcaccatcgagtcgc

SEQ ID NO: 55256 - DNA, 21 bp, Artificial Sequence
  primer
cccataaatccgttcctcaac

SEQ ID NO: 55257 - DNA, 18 bp, Artificial Sequence
  primer
ctatgcgaaggccctgag

SEQ ID NO: 55258 - DNA, 38 bp, Artificial Sequence
  primer
gtaaaacgacggccagtggtgaaaggatcaggcacttg

SEQ ID NO: 55259 - DNA, 19 bp, Artificial Sequence
  primer
gccgagcatggaagaacag

SEQ ID NO: 55260 - DNA, 20 bp, Artificial Sequence
  primer
catcgacaacatcctgaggc

SEQ ID NO: 55261 - DNA, 21 bp, Artificial Sequence
  primer
gcaggtagagaccctgtccac

SEQ ID NO: 55262 - DNA, 21 bp, Artificial Sequence
  primer
tattctcacggcttcctttgc

SEQ ID NO: 55263 - DNA, 37 bp, Artificial Sequence
  primer
gtaaaacgacggccagtgcgacttgtaggacctcagc

SEQ ID NO: 55264 - DNA, 21 bp, Artificial Sequence
  primer
cgcatcaccaacttcttcatc

SEQ ID NO: 55265 - DNA, 18 bp, Artificial Sequence
  primer
agcgactctccgggtgac

SEQ ID NO: 55266 - DNA, 21 bp, Artificial Sequence
  primer
aatccttacccggtgcctatt

SEQ ID NO: 55267 - DNA, 18 bp, Artificial Sequence
  primer
gaaggaggagccggacac

SEQ ID NO: 55268 - DNA, 38 bp, Artificial Sequence
  primer
gtaaaacgacggccagttgactcctaggtttgtgtggc

SEQ ID NO: 55269 - DNA, 22 bp, Artificial Sequence
  primer
caatcagcatttgttgacatcc

SEQ ID NO: 55270 - DNA, 39 bp, Artificial Sequence
  primer
gtaaaacgacggccagtttgcagtctttcatttgctctg

SEQ ID NO: 55271 - DNA, 21 bp, Artificial Sequence
  primer
agcattcagccaatatgatgc

SEQ ID NO: 55272 - DNA, 21 bp, Artificial Sequence
  primer
agaaagggaaaggctggagag

SEQ ID NO: 55273 - DNA, 38 bp, Artificial Sequence
  primer
gtaaaacgacggccagtcctcgcatcactctcacactg

SEQ ID NO: 55274 - DNA, 21 bp, Artificial Sequence
  primer
ctgcgtaccttcccacataaa

SEQ ID NO: 55275 - DNA, 26 bp, Artificial Sequence
  primer
tttcattgcattcttggtgatagtag

SEQ ID NO: 55276 - DNA, 20 bp, Artificial Sequence
  primer
agatacaggccgtggaaatg

SEQ ID NO: 55277 - DNA, 21 bp, Artificial Sequence
  primer
gggaagatggttgaagacagg

SEQ ID NO: 55278 - DNA, 38 bp, Artificial Sequence
  primer
gtaaaacgacggccagtggtctggcattgtgcaaatta

SEQ ID NO: 55279 - DNA, 22 bp, Artificial Sequence
  primer
tcctttacatgcctcctgagaa

SEQ ID NO: 55280 - DNA, 39 bp, Artificial Sequence
  primer
gtaaaacgacggccagttttaaatctggtgttgggttgg

SEQ ID NO: 55281 - DNA, 21 bp, Artificial Sequence
  primer
aataagccaggattgggaagg

SEQ ID NO: 55282 - DNA, 38 bp, Artificial Sequence
  primer
gtaaaacgacggccagttgtgcaatgaaagatgcaaag

SEQ ID NO: 55283 - DNA, 38 bp, Artificial Sequence
  primer
gtaaaacgacggccagtccaacagatgcagccatacag

SEQ ID NO: 55284 - DNA, 39 bp, Artificial Sequence
  primer
gtaaaacgacggccagtagtatggtcatggaaaccaagg

SEQ ID NO: 55285 - DNA, 21 bp, Artificial Sequence
  primer
tttggatatcatggctttggg

SEQ ID NO: 55286 - DNA, 38 bp, Artificial Sequence
  primer
gtaaaacgacggccagtagaaagtccaggcacagaacc

SEQ ID NO: 55287 - DNA, 38 bp, Artificial Sequence
  primer
gtaaaacgacggccagtaagtcaaatcccatggagacc

SEQ ID NO: 55288 - DNA, 21 bp, Artificial Sequence
  primer
atgcaggaaatccagcaaatc

SEQ ID NO: 55289 - DNA, 22 bp, Artificial Sequence
  primer
aaagtcccaaattctgatggac

SEQ ID NO: 55290 - DNA, 21 bp, Artificial Sequence
  primer
accctgaggaaatcccttctc

SEQ ID NO: 55291 - DNA, 40 bp, Artificial Sequence
  primer
gtaaaacgacggccagtccttagaggcaatacatgggatg

SEQ ID NO: 55292 - DNA, 19 bp, Artificial Sequence
  primer
gcttcaaaggaggcccaac

SEQ ID NO: 55293 - DNA, 21 bp, Artificial Sequence
  primer
acgttaataatgccgctggac

SEQ ID NO: 55294 - DNA, 38 bp, Artificial Sequence
  primer
gtaaaacgacggccagtccctaacttcatcccaccaag

SEQ ID NO: 55295 - DNA, 38 bp, Artificial Sequence
  primer
gtaaaacgacggccagttgaagccagttcccttcaatc

SEQ ID NO: 55296 - DNA, 21 bp, Artificial Sequence
  primer
tcctgagcagcttgttattgg

SEQ ID NO: 55297 - DNA, 21 bp, Artificial Sequence
  primer
cttccgggtagttgtctctgg

SEQ ID NO: 55298 - DNA, 38 bp, Artificial Sequence
  primer
gtaaaacgacggccagtcatgcagtcgctactttgagg

SEQ ID NO: 55299 - DNA, 21 bp, Artificial Sequence
  primer
cagcaacttccaaaccatcag

SEQ ID NO: 55300 - DNA, 38 bp, Artificial Sequence
  primer
gtaaaacgacggccagtaattgtggaagaggccatcag

SEQ ID NO: 55301 - DNA, 38 bp, Artificial Sequence
  primer
gtaaaacgacggccagtagcactgcctgtatgtggttg

SEQ ID NO: 55302 - DNA, 21 bp, Artificial Sequence
  primer
cttaccagtggaccaaggtgg

SEQ ID NO: 55303 - DNA, 21 bp, Artificial Sequence
  primer
ctcctctaacctgtgggcttg

SEQ ID NO: 55304 - DNA, 21 bp, Artificial Sequence
  primer
atgaacgtcaccctcttccac

SEQ ID NO: 55305 - DNA, 36 bp, Artificial Sequence
  primer
gtaaaacgacggccagtctgcagttccacgatgtgc

SEQ ID NO: 55306 - DNA, 38 bp, Artificial Sequence
  primer
gtaaaacgacggccagttcatctcgagtgatgagctgg

SEQ ID NO: 55307 - DNA, 21 bp, Artificial Sequence
  primer
cttatcatggatgaggccctg

SEQ ID NO: 55308 - DNA, 21 bp, Artificial Sequence
  primer
tggagaactgcctctatgtgg

SEQ ID NO: 55309 - DNA, 21 bp, Artificial Sequence
  primer
tgtccaaggtccagtgctatg

SEQ ID NO: 55310 - DNA, 19 bp, Artificial Sequence
  primer
ggaggtcacgctatcgtcc

SEQ ID NO: 55311 - DNA, 21 bp, Artificial Sequence
  primer
agtcgtacgtgctgtgctacg

SEQ ID NO: 55312 - DNA, 21 bp, Artificial Sequence
  primer
tctatcagccctgggtttcag

SEQ ID NO: 55313 - DNA, 37 bp, Artificial Sequence
  primer
gtaaaacgacggccagtgaggacagatcagggaaggc

SEQ ID NO: 55314 - DNA, 19 bp, Artificial Sequence
  primer
catcccggtttgtcaccag

SEQ ID NO: 55315 - DNA, 21 bp, Artificial Sequence
  primer
gacttctgagccagtcctttg

SEQ ID NO: 55316 - DNA, 21 bp, Artificial Sequence
  primer
accagcttgccttgcttagag

SEQ ID NO: 55317 - DNA, 38 bp, Artificial Sequence
  primer
gtaaaacgacggccagtttgcccttaagctttgtgttg

SEQ ID NO: 55318 - DNA, 23 bp, Artificial Sequence
  primer
ggaattgatatgatttgctgctg

SEQ ID NO: 55319 - DNA, 39 bp, Artificial Sequence
  primer
gtaaaacgacggccagtcattagaacagagtgggatggc

SEQ ID NO: 55320 - DNA, 38 bp, Artificial Sequence
  primer
gtaaaacgacggccagttataaggtaatcctggcccgc

SEQ ID NO: 55321 - DNA, 37 bp, Artificial Sequence
  primer
gtaaaacgacggccagtcatccttcggacagcaactc

SEQ ID NO: 55322 - DNA, 38 bp, Artificial Sequence
  primer
gtaaaacgacggccagtccctaggagacgtttggaaag

SEQ ID NO: 55323 - DNA, 21 bp, Artificial Sequence
  primer
catccaaatcatcactgcctg

SEQ ID NO: 55324 - DNA, 38 bp, Artificial Sequence
  primer
gtaaaacgacggccagtgcctctttctctcagccaatg

SEQ ID NO: 55325 - DNA, 38 bp, Artificial Sequence
  primer
gtaaaacgacggccagtaccactatctttggctgtggg

SEQ ID NO: 55326 - DNA, 38 bp, Artificial Sequence
  primer
gtaaaacgacggccagtccctatcccataaacccacac

SEQ ID NO: 55327 - DNA, 21 bp, Artificial Sequence
  primer
aaggacaaatcacctatgccc

SEQ ID NO: 55328 - DNA, 21 bp, Artificial Sequence
  primer
gaagagcctgagaatcgcttg

SEQ ID NO: 55329 - DNA, 37 bp, Artificial Sequence
  primer
gtaaaacgacggccagtgtggtcagtccttggtgctg

SEQ ID NO: 55330 - DNA, 38 bp, Artificial Sequence
  primer
gtaaaacgacggccagtgccattggttggcttagtctc

SEQ ID NO: 55331 - DNA, 21 bp, Artificial Sequence
  primer
agagtcaggcaactccacagg

SEQ ID NO: 55332 - DNA, 38 bp, Artificial Sequence
  primer
gtaaaacgacggccagtatatttgaaggcagcaggtgg

SEQ ID NO: 55333 - DNA, 21 bp, Artificial Sequence
  primer
caggaaacatttcagcagcag

SEQ ID NO: 55334 - DNA, 21 bp, Artificial Sequence
  primer
ggttcagagaagtcgagggtc

SEQ ID NO: 55335 - DNA, 38 bp, Artificial Sequence
  primer
gtaaaacgacggccagtctagtccacgaacctcggaag

SEQ ID NO: 55336 - DNA, 38 bp, Artificial Sequence
  primer
gtaaaacgacggccagtagcccagagcgtttaattcac

SEQ ID NO: 55337 - DNA, 21 bp, Artificial Sequence
  primer
ttgtgtggctctaaccctctg

SEQ ID NO: 55338 - DNA, 21 bp, Artificial Sequence
  primer
accatcaaagcaagcagaagg

SEQ ID NO: 55339 - DNA, 38 bp, Artificial Sequence
  primer
gtaaaacgacggccagtagtgaaatggaggtgtgatgg

SEQ ID NO: 55340 - DNA, 38 bp, Artificial Sequence
  primer
gtaaaacgacggccagtattgggatggtaggaccagag

SEQ ID NO: 55341 - DNA, 38 bp, Artificial Sequence
  primer
gtaaaacgacggccagttgtgtagcagctgttgaaggg

SEQ ID NO: 55342 - DNA, 36 bp, Artificial Sequence
  primer
gtaaaacgacggccagtaggcgagcagcaagtcaag

SEQ ID NO: 55343 - DNA, 38 bp, Artificial Sequence
  primer
gtaaaacgacggccagttggagggctttagccattaac

SEQ ID NO: 55344 - DNA, 38 bp, Artificial Sequence
  primer
gtaaaacgacggccagtctctgacaccacaccctctcc

SEQ ID NO: 55345 - DNA, 21 bp, Artificial Sequence
  primer
ctgtgttctcaacttcccagg

SEQ ID NO: 55346 - DNA, 37 bp, Artificial Sequence
  primer
gtaaaacgacggccagtcattgatctcaggctccacc

SEQ ID NO: 55347 - DNA, 38 bp, Artificial Sequence
  primer
gtaaaacgacggccagtagctagatgtggtaggcaggc

SEQ ID NO: 55348 - DNA, 38 bp, Artificial Sequence
  primer
gtaaaacgacggccagtcttaggcaaaggtgaggtccc

SEQ ID NO: 55349 - DNA, 21 bp, Artificial Sequence
  primer
gtgagcttgggtgtgaatgag

SEQ ID NO: 55350 - DNA, 21 bp, Artificial Sequence
  primer
ctctctgccgtttccaatctc

SEQ ID NO: 55351 - DNA, 38 bp, Artificial Sequence
  primer
gtaaaacgacggccagttcttgggttaacactcctggg

SEQ ID NO: 55352 - DNA, 36 bp, Artificial Sequence
  primer
gtaaaacgacggccagtgaacagccctccacctctg

SEQ ID NO: 55353 - DNA, 21 bp, Artificial Sequence
  primer
gcatgttcctgcctgatgtag

SEQ ID NO: 55354 - DNA, 21 bp, Artificial Sequence
  primer
acagttctctcacctctgccc

SEQ ID NO: 55355 - DNA, 38 bp, Artificial Sequence
  primer
gtaaaacgacggccagttctccttccaggtgtttgagg

SEQ ID NO: 55356 - DNA, 21 bp, Artificial Sequence
  primer
gatggcctgattgacaaatcc

SEQ ID NO: 55357 - DNA, 38 bp, Artificial Sequence
  primer
gtaaaacgacggccagtttaaagggcaagggatttctg

SEQ ID NO: 55358 - DNA, 37 bp, Artificial Sequence
  primer
gtaaaacgacggccagtagacggtttcgccatgttag

SEQ ID NO: 55359 - DNA, 38 bp, Artificial Sequence
  primer
gtaaaacgacggccagttgcacaatgggtagaggactg

SEQ ID NO: 55360 - DNA, 38 bp, Artificial Sequence
  primer
gtaaaacgacggccagttaggagtcctgaaggctgtgg

SEQ ID NO: 55361 - DNA, 38 bp, Artificial Sequence
  primer
gtaaaacgacggccagttcttcatgctcagtggtttgg

SEQ ID NO: 55362 - DNA, 35 bp, Artificial Sequence
  primer
gtaaaacgacggccagtgaagccaggtttccaccc

SEQ ID NO: 55363 - DNA, 21 bp, Artificial Sequence
  primer
tcctggagaacaatgagggtc

SEQ ID NO: 55364 - DNA, 39 bp, Artificial Sequence
  primer
gtaaaacgacggccagtgaggctccttctgacctctagc

SEQ ID NO: 55365 - DNA, 38 bp, Artificial Sequence
  primer
gtaaaacgacggccagtacttagtcactgccctccctg

SEQ ID NO: 55366 - DNA, 38 bp, Artificial Sequence
  primer
gtaaaacgacggccagtttgaggttaatgctcccttgg

SEQ ID NO: 55367 - DNA, 38 bp, Artificial Sequence
  primer
gtaaaacgacggccagtaccctccaaattcttcttccc

SEQ ID NO: 55368 - DNA, 36 bp, Artificial Sequence
  primer
gtaaaacgacggccagtcctctatgccctgacggtg

SEQ ID NO: 55369 - DNA, 20 bp, Artificial Sequence
  primer
ctgtggcattgtctgtcctc

SEQ ID NO: 55370 - DNA, 21 bp, Artificial Sequence
  primer
cctcatctcaagtggtcctcc

SEQ ID NO: 55371 - DNA, 38 bp, Artificial Sequence
  primer
gtaaaacgacggccagtcacacctggctcatttctctg

SEQ ID NO: 55372 - DNA, 20 bp, Artificial Sequence
  primer
ccagcattagagctgccaac

SEQ ID NO: 55373 - DNA, 38 bp, Artificial Sequence
  primer
gtaaaacgacggccagtcataagccagggagactgagg

SEQ ID NO: 55374 - DNA, 21 bp, Artificial Sequence
  primer
ggaagctttctgggatacacg

SEQ ID NO: 55375 - DNA, 21 bp, Artificial Sequence
  primer
tgatcacctgggtttgacatc

SEQ ID NO: 55376 - DNA, 21 bp, Artificial Sequence
  primer
cagcaatgactgacttcctgg

SEQ ID NO: 55377 - DNA, 37 bp, Artificial Sequence
  primer
gtaaaacgacggccagtctgcagaaactccagatgcc

SEQ ID NO: 55378 - DNA, 38 bp, Artificial Sequence
  primer
gtaaaacgacggccagtgcactgagtgacagcatttcc

SEQ ID NO: 55379 - DNA, 37 bp, Artificial Sequence
  primer
gtaaaacgacggccagtagatacacagagccctcccg

SEQ ID NO: 55380 - DNA, 38 bp, Artificial Sequence
  primer
gtaaaacgacggccagtttattggcatagagtggctgc

SEQ ID NO: 55381 - DNA, 38 bp, Artificial Sequence
  primer
gtaaaacgacggccagtccagaaagttccctttcaccc

SEQ ID NO: 55382 - DNA, 21 bp, Artificial Sequence
  primer
agtggtactcgctccttctgc

SEQ ID NO: 55383 - DNA, 22 bp, Artificial Sequence
  primer
ttaattgcctctggcttagacg

SEQ ID NO: 55384 - DNA, 35 bp, Artificial Sequence
  primer
gtaaaacgacggccagtcaggatctcccggctctc

SEQ ID NO: 55385 - DNA, 22 bp, Artificial Sequence
  primer
gggagctgtgacaatcttcttg

SEQ ID NO: 55386 - DNA, 38 bp, Artificial Sequence
  primer
gtaaaacgacggccagtgaaacatgtggccattctctg

SEQ ID NO: 55387 - DNA, 21 bp, Artificial Sequence
  primer
aacccagtccactacgacctg

SEQ ID NO: 55388 - DNA, 25 bp, Artificial Sequence
  primer
tgaatgaaatatctgaagcaatctg

SEQ ID NO: 55389 - DNA, 38 bp, Artificial Sequence
  primer
gtaaaacgacggccagtgggcaaccgtttatttgtttg

SEQ ID NO: 55390 - DNA, 21 bp, Artificial Sequence
  primer
ctccaaagcccactttctttc

SEQ ID NO: 55391 - DNA, 39 bp, Artificial Sequence
  primer
gtaaaacgacggccagtgcattaggactgaaatgttcgc

SEQ ID NO: 55392 - DNA, 38 bp, Artificial Sequence
  primer
gtaaaacgacggccagtattggcacggacaaataaatg

SEQ ID NO: 55393 - DNA, 25 bp, Artificial Sequence
  primer
aagaagggcatgaaatcaatatagc

SEQ ID NO: 55394 - DNA, 42 bp, Artificial Sequence
  primer
gtaaaacgacggccagtgcagaatcatcttgaggaactaatc

SEQ ID NO: 55395 - DNA, 21 bp, Artificial Sequence
  primer
aatatcaatgcaacagccgtg

SEQ ID NO: 55396 - DNA, 38 bp, Artificial Sequence
  primer
gtaaaacgacggccagtgcagcactggaagaggtaagg

SEQ ID NO: 55397 - DNA, 27 bp, Artificial Sequence
  primer
tgagaacagttacacagcttatcttca

SEQ ID NO: 55398 - DNA, 38 bp, Artificial Sequence
  primer
gtaaaacgacggccagtttgccctctgggtctaatttc

SEQ ID NO: 55399 - DNA, 20 bp, Artificial Sequence
  primer
cgctctccttgaaccacaag

SEQ ID NO: 55400 - DNA, 20 bp, Artificial Sequence
  primer
acatggaatgctttgatcgc

SEQ ID NO: 55401 - DNA, 38 bp, Artificial Sequence
  primer
gtaaaacgacggccagtaaggacaagcgcaaagttctc

SEQ ID NO: 55402 - DNA, 21 bp, Artificial Sequence
  primer
gctggagaccatgtcacaaag

SEQ ID NO: 55403 - DNA, 38 bp, Artificial Sequence
  primer
gtaaaacgacggccagtagccttgaacaatgcttcctc

SEQ ID NO: 55404 - DNA, 38 bp, Artificial Sequence
  primer
gtaaaacgacggccagtgaattgaattgctggcatgaa

SEQ ID NO: 55405 - DNA, 39 bp, Artificial Sequence
  primer
gtaaaacgacggccagtgggtcgtgtcaatttgtctacc

SEQ ID NO: 55406 - DNA, 20 bp, Artificial Sequence
  primer
gccagaggtgtagctcaacg

SEQ ID NO: 55407 - DNA, 18 bp, Artificial Sequence
  primer
ggcctattaaaggcgcgg

SEQ ID NO: 55408 - DNA, 38 bp, Artificial Sequence
  primer
gtaaaacgacggccagtatgccaggatttcgaggttac

SEQ ID NO: 55409 - DNA, 23 bp, Artificial Sequence
  primer
aaatcacaaaccaggcacataag

SEQ ID NO: 55410 - DNA, 39 bp, Artificial Sequence
  primer
gtaaaacgacggccagtcatggtagtggcagattctgtg

SEQ ID NO: 55411 - DNA, 40 bp, Artificial Sequence
  primer
gtaaaacgacggccagtaatgtgtctcacaagcatcacaa

SEQ ID NO: 55412 - DNA, 21 bp, Artificial Sequence
  primer
aatcttcactggacctgtgcc

SEQ ID NO: 55413 - DNA, 24 bp, Artificial Sequence
  primer
tttacgtgatttagactgctgtgg

SEQ ID NO: 55414 - DNA, 26 bp, Artificial Sequence
  primer
ataattccatgtagcttcagttatcg

SEQ ID NO: 55415 - DNA, 38 bp, Artificial Sequence
  primer
gtaaaacgacggccagtaagtgctgaagcttgttgacc

SEQ ID NO: 55416 - DNA, 25 bp, Artificial Sequence
  primer
gatgcgaaatagcatttagtagctc

SEQ ID NO: 55417 - DNA, 26 bp, Artificial Sequence
  primer
aaactttgctatttgctatgatgttt

SEQ ID NO: 55418 - DNA, 21 bp, Artificial Sequence
  primer
attgtagttgcatccactggc

SEQ ID NO: 55419 - DNA, 23 bp, Artificial Sequence
  primer
gagtgctacacccatgtttaacg

SEQ ID NO: 55420 - DNA, 39 bp, Artificial Sequence
  primer
gtaaaacgacggccagtgggtgatccctaaaggtctgtc

SEQ ID NO: 55421 - DNA, 20 bp, Artificial Sequence
  primer
gccagctgatgaaatgtttg

SEQ ID NO: 55422 - DNA, 40 bp, Artificial Sequence
  primer
gtaaaacgacggccagttttaccgttgtgttggtttaaca

SEQ ID NO: 55423 - DNA, 37 bp, Artificial Sequence
  primer
gtaaaacgacggccagttcccacaaagtccactgagc

SEQ ID NO: 55424 - DNA, 43 bp, Artificial Sequence
  primer
gtaaaacgacggccagtaaagtaaagatcatggcacaagtcta

SEQ ID NO: 55425 - DNA, 20 bp, Artificial Sequence
  primer
cctgggtgaaagagcaacac

SEQ ID NO: 55426 - DNA, 26 bp, Artificial Sequence
  primer
tttatgcttctaccctttgtaatcag

SEQ ID NO: 55427 - DNA, 42 bp, Artificial Sequence
  primer
gtaaaacgacggccagtgctgacagctagagcttcataattt

SEQ ID NO: 55428 - DNA, 21 bp, Artificial Sequence
  primer
tttcccttgaccctgtacttg

SEQ ID NO: 55429 - DNA, 22 bp, Artificial Sequence
  primer
cctgggtgatatagcacgactc

SEQ ID NO: 55430 - DNA, 40 bp, Artificial Sequence
  primer
gtaaaacgacggccagtcaatctggcagagtatgttgagg

SEQ ID NO: 55431 - DNA, 39 bp, Artificial Sequence
  primer
gtaaaacgacggccagtccacttcagagctgaaatctcg

SEQ ID NO: 55432 - DNA, 38 bp, Artificial Sequence
  primer
gtaaaacgacggccagtcccaggtgggattgcttatag

SEQ ID NO: 55433 - DNA, 38 bp, Artificial Sequence
  primer
gtaaaacgacggccagtgccatttgaatcacctttgtg

SEQ ID NO: 55434 - DNA, 38 bp, Artificial Sequence
  primer
gtaaaacgacggccagtaatggagccagtgttctcctc

SEQ ID NO: 55435 - DNA, 38 bp, Artificial Sequence
  primer
gtaaaacgacggccagtcctgtaagcaattgtggcttc

SEQ ID NO: 55436 - DNA, 21 bp, Artificial Sequence
  primer
tggaattgtgagcttcaaggc

SEQ ID NO: 55437 - DNA, 18 bp, Artificial Sequence
  primer
agcgtaagccatcacgcc

SEQ ID NO: 55438 - DNA, 38 bp, Artificial Sequence
  primer
gtaaaacgacggccagtggctttgagatctatgggcac

SEQ ID NO: 55439 - DNA, 41 bp, Artificial Sequence
  primer
gtaaaacgacggccagtgctcaaacagatacacagtgaagg

SEQ ID NO: 55440 - DNA, 42 bp, Artificial Sequence
  primer
gtaaaacgacggccagttcactagaatcatagcaggagcttt

SEQ ID NO: 55441 - DNA, 39 bp, Artificial Sequence
  primer
gtaaaacgacggccagttcttctgtggaagaggttgagc

SEQ ID NO: 55442 - DNA, 21 bp, Artificial Sequence
  primer
gattcctgaaggtggttccag

SEQ ID NO: 55443 - DNA, 21 bp, Artificial Sequence
  primer
cccagatgggaaagtgtaagc

SEQ ID NO: 55444 - DNA, 38 bp, Artificial Sequence
  primer
gtaaaacgacggccagtcagacaaagctctgcctctgg

SEQ ID NO: 55445 - DNA, 39 bp, Artificial Sequence
  primer
gtaaaacgacggccagtgatgcctggatgttatctttcg

SEQ ID NO: 55446 - DNA, 38 bp, Artificial Sequence
  primer
gtaaaacgacggccagtccacttgcttagctgcatgtc

SEQ ID NO: 55447 - DNA, 24 bp, Artificial Sequence
  primer
tcactcattaacctttggttaggc

SEQ ID NO: 55448 - DNA, 38 bp, Artificial Sequence
  primer
gtaaaacgacggccagttgacttcagttcacaggtcgc

SEQ ID NO: 55449 - DNA, 39 bp, Artificial Sequence
  primer
gtaaaacgacggccagtaatggtggtgtgagtgaagttg

SEQ ID NO: 55450 - DNA, 21 bp, Artificial Sequence
  primer
agacccatagaaggtgaaggg

SEQ ID NO: 55451 - DNA, 21 bp, Artificial Sequence
  primer
ggtgctaagtcgacagaaggg

SEQ ID NO: 55452 - DNA, 21 bp, Artificial Sequence
  primer
agcttgacccatggttaggtg

SEQ ID NO: 55453 - DNA, 37 bp, Artificial Sequence
  primer
gtaaaacgacggccagtgcataggagaagccagaggg

SEQ ID NO: 55454 - DNA, 25 bp, Artificial Sequence
  primer
tcatttacttcatgttgtttggacc

SEQ ID NO: 55455 - DNA, 40 bp, Artificial Sequence
  primer
gtaaaacgacggccagtgcatgcatcctagagagaatttg

SEQ ID NO: 55456 - DNA, 43 bp, Artificial Sequence
  primer
gtaaaacgacggccagtgacttaggcaatattcattgatcacc

SEQ ID NO: 55457 - DNA, 23 bp, Artificial Sequence
  primer
tggagtaaactgaccatttggag

SEQ ID NO: 55458 - DNA, 42 bp, Artificial Sequence
  primer
gtaaaacgacggccagtaaagtcaggcacagctatgtaactc

SEQ ID NO: 55459 - DNA, 21 bp, Artificial Sequence
  primer
ttgttggatctggtatctggc

SEQ ID NO: 55460 - DNA, 38 bp, Artificial Sequence
  primer
gtaaaacgacggccagttgtgtgcttccactgcttagg

SEQ ID NO: 55461 - DNA, 20 bp, Artificial Sequence
  primer
ctgccacctggctagtgaag

SEQ ID NO: 55462 - DNA, 38 bp, Artificial Sequence
  primer
gtaaaacgacggccagttttgcagaggaaagattgctg

SEQ ID NO: 55463 - DNA, 22 bp, Artificial Sequence
  primer
aaatgacagtgtctggctatgg

SEQ ID NO: 55464 - DNA, 21 bp, Artificial Sequence
  primer
cctggaatggaggaagcttag

SEQ ID NO: 55465 - DNA, 21 bp, Artificial Sequence
  primer
cccaagccatttactagcagg

SEQ ID NO: 55466 - DNA, 38 bp, Artificial Sequence
  primer
gtaaaacgacggccagtaaagggagagaggaaccatcc

SEQ ID NO: 55467 - DNA, 44 bp, Artificial Sequence
  primer
gtaaaacgacggccagtcctttgaataatactgaataccttcca

SEQ ID NO: 55468 - DNA, 38 bp, Artificial Sequence
  primer
gtaaaacgacggccagtggtctgaacaaggaggaggag

SEQ ID NO: 55469 - DNA, 36 bp, Artificial Sequence
  primer
gtaaaacgacggccagtgctgggctctgaggttctg

SEQ ID NO: 55470 - DNA, 38 bp, Artificial Sequence
  primer
gtaaaacgacggccagtccctcaaacatgacccttctc

SEQ ID NO: 55471 - DNA, 39 bp, Artificial Sequence
  primer
gtaaaacgacggccagtttcacctgagtggttcacattc

SEQ ID NO: 55472 - DNA, 40 bp, Artificial Sequence
  primer
gtaaaacgacggccagttgtattagccaagctgaaatccc

SEQ ID NO: 55473 - DNA, 26 bp, Artificial Sequence
  primer
tgttccattatggttatgaatttgag

SEQ ID NO: 55474 - DNA, 21 bp, Artificial Sequence
  primer
ttgggattggtacaacattgc

SEQ ID NO: 55475 - DNA, 21 bp, Artificial Sequence
  primer
ttgtttcttcccatctcccac

SEQ ID NO: 55476 - DNA, 41 bp, Artificial Sequence
  primer
gtaaaacgacggccagtggctagcttctttggcagtataac

SEQ ID NO: 55477 - DNA, 25 bp, Artificial Sequence
  primer
cttggccaacttacttatgtaaacc

SEQ ID NO: 55478 - DNA, 21 bp, Artificial Sequence
  primer
ctcattgcttgcgtagacctg

SEQ ID NO: 55479 - DNA, 39 bp, Artificial Sequence
  primer
gtaaaacgacggccagttgcctgcattattaacaacctc

SEQ ID NO: 55480 - DNA, 37 bp, Artificial Sequence
  primer
gtaaaacgacggccagtttacccaatcatcactggca

SEQ ID NO: 55481 - DNA, 21 bp, Artificial Sequence
  primer
tcctttggtggagtcagattt

SEQ ID NO: 55482 - DNA, 44 bp, Artificial Sequence
  primer
gtaaaacgacggccagtgctgtatcaaattaagatttaaggagg

SEQ ID NO: 55483 - DNA, 37 bp, Artificial Sequence
  primer
gtaaaacgacggccagtttggttctctcctcctgtgg

SEQ ID NO: 55484 - DNA, 21 bp, Artificial Sequence
  primer
ttgctgtccttcaacgtgttc

SEQ ID NO: 55485 - DNA, 20 bp, Artificial Sequence
  primer
tggtggaatgaggcagtacc

SEQ ID NO: 55486 - DNA, 21 bp, Artificial Sequence
  primer
gctaaacaattcgaacccacc

SEQ ID NO: 55487 - DNA, 22 bp, Artificial Sequence
  primer
aaagtccaccatggtaatccac

SEQ ID NO: 55488 - DNA, 38 bp, Artificial Sequence
  primer
gtaaaacgacggccagtcatcaggttgacaagtggtgg

SEQ ID NO: 55489 - DNA, 20 bp, Artificial Sequence
  primer
atttctagctgcccacggac

SEQ ID NO: 55490 - DNA, 40 bp, Artificial Sequence
  primer
gtaaaacgacggccagttgacataattcttccaggctgtg

SEQ ID NO: 55491 - DNA, 38 bp, Artificial Sequence
  primer
gtaaaacgacggccagtgctgcactgagtctttcaacc

SEQ ID NO: 55492 - DNA, 22 bp, Artificial Sequence
  primer
aagcgacaccaatatggatcac

SEQ ID NO: 55493 - DNA, 38 bp, Artificial Sequence
  primer
gtaaaacgacggccagtttcacctccgtagcaagtctg

SEQ ID NO: 55494 - DNA, 37 bp, Artificial Sequence
  primer
gtaaaacgacggccagtagccactgttggcctgtaag

SEQ ID NO: 55495 - DNA, 20 bp, Artificial Sequence
  primer
acctcctcaatatcaccgcc

SEQ ID NO: 55496 - DNA, 21 bp, Artificial Sequence
  primer
aacttgactcaggaaggccag

SEQ ID NO: 55497 - DNA, 38 bp, Artificial Sequence
  primer
gtaaaacgacggccagtcttcctaaacgagcacgaatg

SEQ ID NO: 55498 - DNA, 39 bp, Artificial Sequence
  primer
gtaaaacgacggccagtgtgtttgcttcctgaaataggc

SEQ ID NO: 55499 - DNA, 39 bp, Artificial Sequence
  primer
gtaaaacgacggccagtcaccttcagagagtgctatggg

SEQ ID NO: 55500 - DNA, 42 bp, Artificial Sequence
  primer
gtaaaacgacggccagtgcctttctcctatcatttgtagttg

SEQ ID NO: 55501 - DNA, 22 bp, Artificial Sequence
  primer
ttggcaatttctttctttggtc

SEQ ID NO: 55502 - DNA, 20 bp, Artificial Sequence
  primer
tgggtcagtctgggtcagtc

SEQ ID NO: 55503 - DNA, 38 bp, Artificial Sequence
  primer
gtaaaacgacggccagtcacctgcagcctgaatgtaat

SEQ ID NO: 55504 - DNA, 20 bp, Artificial Sequence
  primer
cctgggactttgtcctcctc

SEQ ID NO: 55505 - DNA, 21 bp, Artificial Sequence
  primer
agtgcaggaggaagtctgctc

SEQ ID NO: 55506 - DNA, 38 bp, Artificial Sequence
  primer
gtaaaacgacggccagtgaggagtcctgtctttcacgc

SEQ ID NO: 55507 - DNA, 21 bp, Artificial Sequence
  primer
ggttgaattccacaagttccc

SEQ ID NO: 55508 - DNA, 38 bp, Artificial Sequence
  primer
gtaaaacgacggccagtatagggtggatagggtaggcg

SEQ ID NO: 55509 - DNA, 21 bp, Artificial Sequence
  primer
tactgagcagggctatgaagg

SEQ ID NO: 55510 - DNA, 38 bp, Artificial Sequence
  primer
gtaaaacgacggccagtagcaaccctagtgacaggagc

SEQ ID NO: 55511 - DNA, 20 bp, Artificial Sequence
  primer
agtgggtggatttccaggag

SEQ ID NO: 55512 - DNA, 38 bp, Artificial Sequence
  primer
gtaaaacgacggccagtaaagatccgagtgtgcatgag

SEQ ID NO: 55513 - DNA, 21 bp, Artificial Sequence
  primer
gagactgggttggagttcagg

SEQ ID NO: 55514 - DNA, 20 bp, Artificial Sequence
  primer
caacatagcgaggctccatc

SEQ ID NO: 55515 - DNA, 38 bp, Artificial Sequence; identical to SEQ ID NO: 55512
  primer

SEQ ID NO: 55516 - DNA, 38 bp, Artificial Sequence
  primer
gtaaaacgacggccagtgttgggtcgtttgtcactcag

SEQ ID NO: 55517 - DNA, 20 bp, Artificial Sequence
  primer
agtgggtggatttccaggag

SEQ ID NO: 55518 - DNA, 21 bp, Artificial Sequence
  primer
gacagggtttgaggttccttc

SEQ ID NO: 55519 - DNA, 39 bp, Artificial Sequence
  primer
gtaaaacgacggccagttccaggtagccattacaagacc

SEQ ID NO: 55520 - DNA, 21 bp, Artificial Sequence
  primer
ccgttctagcagggttgttgt

SEQ ID NO: 55521 - DNA, 21 bp, Artificial Sequence
  primer
tcctctcaaggctaggtccag

SEQ ID NO: 55522 - DNA, 38 bp, Artificial Sequence
  primer
gtaaaacgacggccagttggatgctgtagctgaaatgg

SEQ ID NO: 55523 - DNA, 38 bp, Artificial Sequence
  primer
gtaaaacgacggccagtctttgccttaggaaatccctg

SEQ ID NO: 55524 - DNA, 20 bp, Artificial Sequence
  primer
taccaagtggtgggatgttg

SEQ ID NO: 55525 - DNA, 21 bp, Artificial Sequence
  primer
actcagcagaactttccaggc

SEQ ID NO: 55526 - DNA, 38 bp, Artificial Sequence
  primer
gtaaaacgacggccagtctctggaagaggccaaccttc

SEQ ID NO: 55527 - DNA, 39 bp, Artificial Sequence
  primer
gtaaaacgacggccagtgaactcttccaatgcatgatcc

SEQ ID NO: 55528 - DNA, 21 bp, Artificial Sequence
  primer
aacttcacgtttggtgtcagg

SEQ ID NO: 55529 - DNA, 20 bp, Artificial Sequence
  primer
ctcactctcctggcctacgg

SEQ ID NO: 55530 - DNA, 36 bp, Artificial Sequence
  primer
gtaaaacgacggccagtgatggcctttggctgtgac

SEQ ID NO: 55531 - DNA, 21 bp, Artificial Sequence
  primer
gagaacttcatcaaggtgggc

SEQ ID NO: 55532 - DNA, 19 bp, Artificial Sequence
  primer
tgtggtggtctctggcctc

SEQ ID NO: 55533 - DNA, 36 bp, Artificial Sequence
  primer
gtaaaacgacggccagttccagaagaaggtgggctg

SEQ ID NO: 55534 - DNA, 19 bp, Artificial Sequence
  primer
tgtggtggtctctggcctc

SEQ ID NO: 55535 - DNA, 37 bp, Artificial Sequence
  primer
gtaaaacgacggccagttttgtcttaacctgggctcg

SEQ ID NO: 55536 - DNA, 38 bp, Artificial Sequence
  primer
gtaaaacgacggccagtgggccagtccatcaattctac

SEQ ID NO: 55537 - DNA, 38 bp, Artificial Sequence
  primer
gtaaaacgacggccagtgcgaagcagtgtggattaagg

SEQ ID NO: 55538 - DNA, 38 bp, Artificial Sequence
  primer
gtaaaacgacggccagttgaccatacgggacttaccac

SEQ ID NO: 55539 - DNA, 37 bp, Artificial Sequence
  primer
gtaaaacgacggccagtcagggagacggtgaagtttg

SEQ ID NO: 55540 - DNA, 38 bp, Artificial Sequence
  primer
gtaaaacgacggccagttaataggagacgaggcttggg

SEQ ID NO: 55541 - DNA, 38 bp, Artificial Sequence
  primer
gtaaaacgacggccagtgacatttgggttgattccaag

SEQ ID NO: 55542 - DNA, 38 bp, Artificial Sequence
  primer
gtaaaacgacggccagtccaccttcttattcctcaccc

SEQ ID NO: 55543 - DNA, 42 bp, Artificial Sequence
  primer
gtaaaacgacggccagtcacaatggttagaacaatatttggc

SEQ ID NO: 55544 - DNA, 39 bp, Artificial Sequence
  primer
gtaaaacgacggccagtagcagtatgactccggtatgtg

SEQ ID NO: 55545 - DNA, 39 bp, Artificial Sequence
  primer
gtaaaacgacggccagtgtggttggatttaagcacacac

SEQ ID NO: 55546 - DNA, 38 bp, Artificial Sequence
  primer
gtaaaacgacggccagtgaaatccaggtagctcaagcc

SEQ ID NO: 55547 - DNA, 42 bp, Artificial Sequence
  primer
gtaaaacgacggccagttgtattgatgttatagtggtgctgc

SEQ ID NO: 55548 - DNA, 41 bp, Artificial Sequence
  primer
gtaaaacgacggccagtgtgtaatgtgtagcatgatttccc

SEQ ID NO: 55549 - DNA, 22 bp, Artificial Sequence
  primer
cgtagttaaggaatgcttgcag

SEQ ID NO: 55550 - DNA, 38 bp, Artificial Sequence
  primer
gtaaaacgacggccagtttcttggaaagccatttggag

SEQ ID NO: 55551 - DNA, 38 bp, Artificial Sequence
  primer
gtaaaacgacggccagtgggtttgcctgaatatgcttg

SEQ ID NO: 55552 - DNA, 37 bp, Artificial Sequence
  primer
gtaaaacgacggccagttgggaagtgcagaagcagac

SEQ ID NO: 55553 - DNA, 37 bp, Artificial Sequence
  primer
gtaaaacgacggccagtcactggtttgcagccacttc

SEQ ID NO: 55554 - DNA, 21 bp, Artificial Sequence
  primer
tgtgtgtcttgccatttgttg

SEQ ID NO: 55555 - DNA, 21 bp, Artificial Sequence
  primer
cagagggaaggattgtgtgtg

SEQ ID NO: 55556 - DNA, 35 bp, Artificial Sequence
  primer
gtaaaacgacggccagtcctgtgcaccctttccac

SEQ ID NO: 55557 - DNA, 39 bp, Artificial Sequence
  primer
gtaaaacgacggccagtcctataagcctctgcaggtgtg

SEQ ID NO: 55558 - DNA, 21 bp, Artificial Sequence
  primer
acagagacagagcccagcatc

SEQ ID NO: 55559 - DNA, 38 bp, Artificial Sequence
  primer
gtaaaacgacggccagttatgccacctccctcttcttg

SEQ ID NO: 55560 - DNA, 21 bp, Artificial Sequence
  primer
ttgcaagaaactggtaatggc

SEQ ID NO: 55561 - DNA, 21 bp, Artificial Sequence
  primer
gggccaggaataaacagaagg

SEQ ID NO: 55562 - DNA, 22 bp, Artificial Sequence
  primer
gggagcagtggagtatgtatgg

SEQ ID NO: 55563 - DNA, 21 bp, Artificial Sequence
  primer
tcactgttcagaatcccttcg

SEQ ID NO: 55564 - DNA, 39 bp, Artificial Sequence
  primer
gtaaaacgacggccagtccaaactgtgcagaaattaccc

SEQ ID NO: 55565 - DNA, 21 bp, Artificial Sequence
  primer
acctcactggcttcttgcttg

SEQ ID NO: 55566 - DNA, 38 bp, Artificial Sequence
  primer
gtaaaacgacggccagtctgctgttccctcattgtctc

SEQ ID NO: 55567 - DNA, 21 bp, Artificial Sequence
  primer
tgacctcgttatctgccttcc

SEQ ID NO: 55568 - DNA, 21 bp, Artificial Sequence
  primer
ggattacagcggtacaccacc

SEQ ID NO: 55569 - DNA, 38 bp, Artificial Sequence
  primer
gtaaaacgacggccagttgcccatgtggatattctttg

SEQ ID NO: 55570 - DNA, 22 bp, Artificial Sequence
  primer
gagcagccaatgaaacttgaac

SEQ ID NO: 55571 - DNA, 20 bp, Artificial Sequence
  primer
gggacgtctgactctccttg

SEQ ID NO: 55572 - DNA, 24 bp, Artificial Sequence
  primer
tttagacaaggaatagctgaaggg

SEQ ID NO: 55573 - DNA, 21 bp, Artificial Sequence
  primer
aggaattcaaggctgcaaatg

SEQ ID NO: 55574 - DNA, 20 bp, Artificial Sequence
  primer
ttcttctccacccacactgc

SEQ ID NO: 55575 - DNA, 21 bp, Artificial Sequence
  primer
tgatctgaaggctgggtgtag

SEQ ID NO: 55576 - DNA, 21 bp, Artificial Sequence
  primer
tggagccattactcttgtccc

SEQ ID NO: 55577 - DNA, 38 bp, Artificial Sequence
  primer
gtaaaacgacggccagttcatttaattggctgcacctg

SEQ ID NO: 55578 - DNA, 39 bp, Artificial Sequence
  primer
gtaaaacgacggccagtaagctcactaactgccttgctg

SEQ ID NO: 55579 - DNA, 37 bp, Artificial Sequence
  primer
gtaaaacgacggccagtagtggacctggaagccactc

SEQ ID NO: 55580 - DNA, 22 bp, Artificial Sequence
  primer
tcaggtcagagtctcaagtccc

SEQ ID NO: 55581 - DNA, 37 bp, Artificial Sequence
  primer
gtaaaacgacggccagtacaccacatcacccagaagc

SEQ ID NO: 55582 - DNA, 20 bp, Artificial Sequence
  primer
gcctgtagtgggtggaattg

SEQ ID NO: 55583 - DNA, 38 bp, Artificial Sequence
  primer
gtaaaacgacggccagtggcctagaaccacttctccag

SEQ ID NO: 55584 - DNA, 38 bp, Artificial Sequence
  primer
gtaaaacgacggccagtgtaggagatgcctgggacaag

SEQ ID NO: 55585 - DNA, 42 bp, Artificial Sequence
  primer
gtaaaacgacggccagtcaagaacatttagacttctgttggc

SEQ ID NO: 55586 - DNA, 38 bp, Artificial Sequence
  primer
gtaaaacgacggccagtcaaatgaagtaagtgagggcg

SEQ ID NO: 55587 - DNA, 38 bp, Artificial Sequence
  primer
gtaaaacgacggccagtagagtctgggtaatgggaggg

SEQ ID NO: 55588 - DNA, 38 bp, Artificial Sequence
  primer
gtaaaacgacggccagtgggctggacaagtagatgagg

SEQ ID NO: 55589 - DNA, 37 bp, Artificial Sequence
  primer
gtaaaacgacggccagtgaagccctaagggagaggtg

SEQ ID NO: 55590 - DNA, 21 bp, Artificial Sequence
  primer
cacataatcctcccaccttgg

SEQ ID NO: 55591 - DNA, 23 bp, Artificial Sequence
  primer
tgaagcctcgtgtattagcaatg

SEQ ID NO: 55592 - DNA, 44 bp, Artificial Sequence
  primer
gtaaaacgacggccagtgcacattgtgtttcttagactaggttg

SEQ ID NO: 55593 - DNA, 21 bp, Artificial Sequence
  primer
ttcctttgtcagctggtagcc

SEQ ID NO: 55594 - DNA, 21 bp, Artificial Sequence
  primer
acggagtggcttattgcaaag

SEQ ID NO: 55595 - DNA, 25 bp, Artificial Sequence
  primer
cctttcaaatcagtaaatgtctccc

SEQ ID NO: 55596 - DNA, 21 bp, Artificial Sequence
  primer
agatgcctctaaggcaagtgg

SEQ ID NO: 55597 - DNA, 37 bp, Artificial Sequence
  primer
gtaaaacgacggccagtacagacatcaaggtgcgtcc

SEQ ID NO: 55598 - DNA, 37 bp, Artificial Sequence
  primer
gtaaaacgacggccagtgaggtggtcatgtctttggg

SEQ ID NO: 55599 - DNA, 36 bp, Artificial Sequence
  primer
gtaaaacgacggccagtaagccatggtctcagccag

SEQ ID NO: 55600 - DNA, 35 bp, Artificial Sequence
  primer
gtaaaacgacggccagtgggacgctggtcaaggtg

SEQ ID NO: 55601 - DNA, 35 bp, Artificial Sequence
  primer
gtaaaacgacggccagtgagggcgcacagggtatg

SEQ ID NO: 55602 - DNA, 37 bp, Artificial Sequence
  primer
gtaaaacgacggccagtaccctcttgttgtctgcgtg

SEQ ID NO: 55603 - DNA, 21 bp, Artificial Sequence
  primer
agttccgaaagcaggtgactg

SEQ ID NO: 55604 - DNA, 37 bp, Artificial Sequence
  primer
gtaaaacgacggccagtgcagccgaagagtgtggtag

SEQ ID NO: 55605 - DNA, 38 bp, Artificial Sequence
  primer
gtaaaacgacggccagttgcctgcctagaggatttagc

SEQ ID NO: 55606 - DNA, 37 bp, Artificial Sequence
  primer
gtaaaacgacggccagttttgtaactggaaggcaggg

SEQ ID NO: 55607 - DNA, 43 bp, Artificial Sequence
  primer
gtaaaacgacggccagtaacatgatcttaacccttcctctatg

SEQ ID NO: 55608 - DNA, 23 bp, Artificial Sequence
  primer
tgcatttaggcattggatagttc

SEQ ID NO: 55609 - DNA, 38 bp, Artificial Sequence
  primer
gtaaaacgacggccagtaggagagggcttctgggttag

SEQ ID NO: 55610 - DNA, 20 bp, Artificial Sequence
  primer
gtgagctcagtgaacctgcc

SEQ ID NO: 55611 - DNA, 20 bp, Artificial Sequence
  primer
atgcttagtgacaccgacgc

SEQ ID NO: 55612 - DNA, 21 bp, Artificial Sequence
  primer
ctactccatggacagcctgag

SEQ ID NO: 55613 - DNA, 38 bp, Artificial Sequence
  primer
gtaaaacgacggccagtcgagcggtactacctccagtc

SEQ ID NO: 55614 - DNA, 38 bp, Artificial Sequence
  primer
gtaaaacgacggccagtaaatgtgttccgaccctatcc

SEQ ID NO: 55615 - DNA, 38 bp, Artificial Sequence
  primer
gtaaaacgacggccagtaagagacatccctccgctttc

SEQ ID NO: 55616 - DNA, 23 bp, Artificial Sequence
  primer
aaacaaagctgttagtgaggagc

SEQ ID NO: 55617 - DNA, 38 bp, Artificial Sequence
  primer
gtaaaacgacggccagtacttgaatgagccctcaaaga

SEQ ID NO: 55618 - DNA, 38 bp, Artificial Sequence
  primer
gtaaaacgacggccagttgtagcatgtaccaccgcttc

SEQ ID NO: 55619 - DNA, 38 bp, Artificial Sequence
  primer
gtaaaacgacggccagtaatcccatcagattgtccctg

SEQ ID NO: 55620 - DNA, 21 bp, Artificial Sequence
  primer
tatggcattaaatccttgccc

SEQ ID NO: 55621 - DNA, 20 bp, Artificial Sequence
  primer
tttctatcgagtccgcatcc

SEQ ID NO: 55622 - DNA, 38 bp, Artificial Sequence
  primer
gtaaaacgacggccagtcttgggaggctgagatggtag

SEQ ID NO: 55623 - DNA, 21 bp, Artificial Sequence
  primer
cctcaatatgggagttggtgg

SEQ ID NO: 55624 - DNA, 37 bp, Artificial Sequence
  primer
gtaaaacgacggccagttcacgttgcccaagctgtag

SEQ ID NO: 55625 - DNA, 21 bp, Artificial Sequence
  primer
tggtttatgcattccctgtgt

SEQ ID NO: 55626 - DNA, 21 bp, Artificial Sequence
  primer
ctttgtgcaaattgcttaccc

SEQ ID NO: 55627 - DNA, 23 bp, Artificial Sequence
  primer
tggaagacaagatccacatactc

SEQ ID NO: 55628 - DNA, 22 bp, Artificial Sequence
  primer
ggtgcttcaaatcagcctttac

SEQ ID NO: 55629 - DNA, 38 bp, Artificial Sequence
  primer
gtaaaacgacggccagtccctgcctagctccttaatgc

SEQ ID NO: 55630 - DNA, 26 bp, Artificial Sequence
  primer
agagtcatttcttatattgtgaacgg

SEQ ID NO: 55631 - DNA, 38 bp, Artificial Sequence
  primer
gtaaaacgacggccagttggcaccagttcttaatgcag

SEQ ID NO: 55632 - DNA, 37 bp, Artificial Sequence
  primer
gtaaaacgacggccagtcaacaaatccacttggaggc

SEQ ID NO: 55633 - DNA, 21 bp, Artificial Sequence
  primer
agaatggtgtgaacccaggtg

SEQ ID NO: 55634 - DNA, 21 bp, Artificial Sequence
  primer
gcctgacgttaggagcatttg

SEQ ID NO: 55635 - DNA, 38 bp, Artificial Sequence
  primer
gtaaaacgacggccagttgtccaaagatacatgcccag

SEQ ID NO: 55636 - DNA, 21 bp, Artificial Sequence
  primer
atgtctagttcttcctgcccg

SEQ ID NO: 55637 - DNA, 22 bp, Artificial Sequence
  primer
ggtggctaattctgctatcctg

SEQ ID NO: 55638 - DNA, 21 bp, Artificial Sequence
  primer
tgcatgagaaagggtgttcag

SEQ ID NO: 55639 - DNA, 36 bp, Artificial Sequence
  primer
gtaaaacgacggccagtgctgtctgaaacaaagcgg

SEQ ID NO: 55640 - DNA, 40 bp, Artificial Sequence
  primer
gtaaaacgacggccagtgggaatatagacaggccagaaac

SEQ ID NO: 55641 - DNA, 22 bp, Artificial Sequence
  primer
tcaggaactgaattagcccatc

SEQ ID NO: 55642 - DNA, 18 bp, Artificial Sequence
  primer
gcttcgttgcttggcttg

SEQ ID NO: 55643 - DNA, 21 bp, Artificial Sequence
  primer
ttcctgggttctccatttctg

SEQ ID NO: 55644 - DNA, 39 bp, Artificial Sequence
  primer
gtaaaacgacggccagttgtctttgtcagaagtcatggg

SEQ ID NO: 55645 - DNA, 40 bp, Artificial Sequence
  primer
gtaaaacgacggccagtccaatttatatgcccttcatgtt

SEQ ID NO: 55646 - DNA, 22 bp, Artificial Sequence
  primer
gattagcatgttccctgcactc

SEQ ID NO: 55647 - DNA, 38 bp, Artificial Sequence
  primer
gtaaaacgacggccagtcaggcatgaaagcaaggtatc

SEQ ID NO: 55648 - DNA, 38 bp, Artificial Sequence
  primer
gtaaaacgacggccagtcaaagagcctgggagagtgag

SEQ ID NO: 55649 - DNA, 44 bp, Artificial Sequence
  primer
gtaaaacgacggccagtggtatctatatcaactccaacttgtgg

SEQ ID NO: 55650 - DNA, 42 bp, Artificial Sequence
  primer
gtaaaacgacggccagtgcttaggtataaagtctctgccagc

SEQ ID NO: 55651 - DNA, 40 bp, Artificial Sequence
  primer
gtaaaacgacggccagtgggagatattctgtgctattccc

SEQ ID NO: 55652 - DNA, 21 bp, Artificial Sequence
  primer
ccatggtgggataattgcttg

SEQ ID NO: 55653 - DNA, 35 bp, Artificial Sequence
  primer
gtaaaacgacggccagtgggcagagctgaagaggc

SEQ ID NO: 55654 - DNA, 21 bp, Artificial Sequence
  primer
ggccttggcttagatgatgag

SEQ ID NO: 55655 - DNA, 39 bp, Artificial Sequence
  primer
gtaaaacgacggccagttgcctaaacatcaagcagaagc

SEQ ID NO: 55656 - DNA, 21 bp, Artificial Sequence
  primer
atagcatgccaccctacttgc

SEQ ID NO: 55657 - DNA, 21 bp, Artificial Sequence
  primer
gaaatggcaatgcagattcag

SEQ ID NO: 55658 - DNA, 38 bp, Artificial Sequence
  primer
gtaaaacgacggccagtaacctttgaacatggctccac

SEQ ID NO: 55659 - DNA, 21 bp, Artificial Sequence
  primer
ctaatccacaacccatccctg

SEQ ID NO: 55660 - DNA, 38 bp, Artificial Sequence
  primer
gtaaaacgacggccagtatgccttcacaattccgagac

SEQ ID NO: 55661 - DNA, 38 bp, Artificial Sequence
  primer
gtaaaacgacggccagtactccttcagcaacagatggg

SEQ ID NO: 55662 - DNA, 38 bp, Artificial Sequence
  primer
gtaaaacgacggccagtctgtcgtttgaatcagatgcg

SEQ ID NO: 55663 - DNA, 38 bp, Artificial Sequence
  primer
gtaaaacgacggccagtacagaagggaggtgatcatgc

SEQ ID NO: 55664 - DNA, 38 bp, Artificial Sequence
  primer
gtaaaacgacggccagtgatgaataggagccctgcaac

SEQ ID NO: 55665 - DNA, 19 bp, Artificial Sequence
  primer
gaggaagcagtgcctggac

SEQ ID NO: 55666 - DNA, 20 bp, Artificial Sequence
  primer
gaaggaggtcgatgtttggg

SEQ ID NO: 55667 - DNA, 21 bp, Artificial Sequence
  primer
tcaggttgttgcttgtccttg

SEQ ID NO: 55668 - DNA, 38 bp, Artificial Sequence
  primer
gtaaaacgacggccagtgtgtgagtgtggtgggtcttg

SEQ ID NO: 55669 - DNA, 36 bp, Artificial Sequence
  primer
gtaaaacgacggccagtcgctcaggtatttggcacc

SEQ ID NO: 55670 - DNA, 38 bp, Artificial Sequence
  primer
gtaaaacgacggccagtaaactgggaccttgtgctttc

SEQ ID NO: 55671 - DNA, 21 bp, Artificial Sequence
  primer
ccaccctaagagcatacgagg

SEQ ID NO: 55672 - DNA, 38 bp, Artificial Sequence
  primer
gtaaaacgacggccagtcattgtttcagggttagcgtg

SEQ ID NO: 55673 - DNA, 21 bp, Artificial Sequence
  primer
ggctgctgctgaaagtcatag

SEQ ID NO: 55674 - DNA, 37 bp, Artificial Sequence
  primer
gtaaaacgacggccagtagcattgatcatgtcctcgc

SEQ ID NO: 55675 - DNA, 38 bp, Artificial Sequence
  primer
gtaaaacgacggccagttacacttccagtttcctgccc

SEQ ID NO: 55676 - DNA, 36 bp, Artificial Sequence
  primer
gtaaaacgacggccagtgtggttctcctggctgctg

SEQ ID NO: 55677 - DNA, 22 bp, Artificial Sequence
  primer
cccatttatccaggtagcattg

SEQ ID NO: 55678 - DNA, 37 bp, Artificial Sequence
  primer
gtaaaacgacggccagtcttgggtgacctagcgagac

SEQ ID NO: 55679 - DNA, 39 bp, Artificial Sequence
  primer
gtaaaacgacggccagttctggtcagacacagtgctagg

SEQ ID NO: 55680 - DNA, 38 bp, Artificial Sequence
  primer
gtaaaacgacggccagtagctttgggaagtgtgtgtcc

SEQ ID NO: 55681 - DNA, 39 bp, Artificial Sequence
  primer
gtaaaacgacggccagtcatttgcggtgtcaaattactg

SEQ ID NO: 55682 - DNA, 21 bp, Artificial Sequence
  primer
taggttgggttctgccatttc

SEQ ID NO: 55683 - DNA, 38 bp, Artificial Sequence
  primer
gtaaaacgacggccagtgatggtgagggtgggactatg

SEQ ID NO: 55684 - DNA, 21 bp, Artificial Sequence
  primer
tagggccctgccatagaaatc

SEQ ID NO: 55685 - DNA, 36 bp, Artificial Sequence
  primer
gtaaaacgacggccagtcatgaggtggcctgtcctc

SEQ ID NO: 55686 - DNA, 39 bp, Artificial Sequence
  primer
gtaaaacgacggccagtttctcatttgagagacggtgtg

SEQ ID NO: 55687 - DNA, 40 bp, Artificial Sequence
  primer
gtaaaacgacggccagttttctgtggtgcttcagtttatg

SEQ ID NO: 55688 - DNA, 21 bp, Artificial Sequence
  primer
actgtttggaagtgcctggag

SEQ ID NO: 55689 - DNA, 38 bp, Artificial Sequence
  primer
gtaaaacgacggccagtctggtggaggatgaggacttg

SEQ ID NO: 55690 - DNA, 20 bp, Artificial Sequence
  primer
catatgtgggaaatcacggg

SEQ ID NO: 55691 - DNA, 21 bp, Artificial Sequence
  primer
caggactggttaggatctgcc

SEQ ID NO: 55692 - DNA, 38 bp, Artificial Sequence
  primer
gtaaaacgacggccagttgcagttcgactcaggtatgc

SEQ ID NO: 55693 - DNA, 21 bp, Artificial Sequence
  primer
ggcctgctgtgggattatttc

SEQ ID NO: 55694 - DNA, 37 bp, Artificial Sequence
  primer
gtaaaacgacggccagtccacgaaggcatgttctgag

SEQ ID NO: 55695 - DNA, 21 bp, Artificial Sequence
  primer
tggaatcgcatggtgttagtg

SEQ ID NO: 55696 - DNA, 40 bp, Artificial Sequence
  primer
gtaaaacgacggccagtgagtgggtgattatagtggaggc

SEQ ID NO: 55697 - DNA, 39 bp, Artificial Sequence
  primer
gtaaaacgacggccagtgaggagctagctgacttcatgg

SEQ ID NO: 55698 - DNA, 38 bp, Artificial Sequence
  primer
gtaaaacgacggccagtagacaacagggaaacctggag

SEQ ID NO: 55699 - DNA, 39 bp, Artificial Sequence
  primer
gtaaaacgacggccagttgtttggcttgttcaaagtctg

SEQ ID NO: 55700 - DNA, 38 bp, Artificial Sequence
  primer
gtaaaacgacggccagttctccctttgtgtctgtgtgg

SEQ ID NO: 55701 - DNA, 21 bp, Artificial Sequence
  primer
gcctgacctgtttcctttgtc

SEQ ID NO: 55702 - DNA, 21 bp, Artificial Sequence
  primer
gagtctttggcaagagggaag

SEQ ID NO: 55703 - DNA, 21 bp, Artificial Sequence
  primer
gtttagcctcagattcccacc

SEQ ID NO: 55704 - DNA, 38 bp, Artificial Sequence
  primer
gtaaaacgacggccagtacacacccagctgtacacgag

SEQ ID NO: 55705 - DNA, 38 bp, Artificial Sequence
  primer
gtaaaacgacggccagtacattgggcaccttgctttac

SEQ ID NO: 55706 - DNA, 38 bp, Artificial Sequence
  primer
gtaaaacgacggccagttgactgtgacttcatccaggg

SEQ ID NO: 55707 - DNA, 21 bp, Artificial Sequence
  primer
tgtgaatgtcgtggagtttgg

SEQ ID NO: 55708 - DNA, 39 bp, Artificial Sequence
  primer
gtaaaacgacggccagtaacatcagttactgggacgagc

SEQ ID NO: 55709 - DNA, 21 bp, Artificial Sequence
  primer
ctgctctgagtgtgaacagcc

SEQ ID NO: 55710 - DNA, 37 bp, Artificial Sequence
  primer
gtaaaacgacggccagtagctttctctgccacacgtc

SEQ ID NO: 55711 - DNA, 38 bp, Artificial Sequence
  primer
gtaaaacgacggccagtgggtggcttaggaacaagatg

SEQ ID NO: 55712 - DNA, 39 bp, Artificial Sequence
  primer
gtaaaacgacggccagttgggccactttaaactttgttg

SEQ ID NO: 55713 - DNA, 39 bp, Artificial Sequence
  primer
gtaaaacgacggccagtaagggatggcttacttgtctcc

SEQ ID NO: 55714 - DNA, 37 bp, Artificial Sequence
  primer
gtaaaacgacggccagtctgggaggtaggctggaaag

SEQ ID NO: 55715 - DNA, 38 bp, Artificial Sequence
  primer
gtaaaacgacggccagtaactgaggacagaaagggagg

SEQ ID NO: 55716 - DNA, 21 bp, Artificial Sequence
  primer
tgaagtttctcgagtcctccc

SEQ ID NO: 55717 - DNA, 21 bp, Artificial Sequence
  primer
ctcccagtcacctttctccac

SEQ ID NO: 55718 - DNA, 38 bp, Artificial Sequence
  primer
gtaaaacgacggccagttgtgtgtggctcagacaactg

SEQ ID NO: 55719 - DNA, 20 bp, Artificial Sequence
  primer
atccctggcaaatgcctatc

SEQ ID NO: 55720 - DNA, 38 bp, Artificial Sequence
  primer
gtaaaacgacggccagtaacccaattcagtctcctccc

SEQ ID NO: 55721 - DNA, 21 bp, Artificial Sequence
  primer
ccacaggtgctaagagagcag

SEQ ID NO: 55722 - DNA, 38 bp, Artificial Sequence
  primer
gtaaaacgacggccagtagtcccaggtgtagggtaacg

SEQ ID NO: 55723 - DNA, 37 bp, Artificial Sequence
  primer
gtaaaacgacggccagttgtttgatttgccttctggg

SEQ ID NO: 55724 - DNA, 38 bp, Artificial Sequence
  primer
gtaaaacgacggccagtctgcagattagactgccctcc

SEQ ID NO: 55725 - DNA, 21 bp, Artificial Sequence
  primer
gagggtttccatgcatctagg

SEQ ID NO: 55726 - DNA, 38 bp, Artificial Sequence
  primer
gtaaaacgacggccagtatgccttccagaccctcttag

SEQ ID NO: 55727 - DNA, 38 bp, Artificial Sequence
  primer
gtaaaacgacggccagttgtggtggaatggaattgaac

SEQ ID NO: 55728 - DNA, 38 bp, Artificial Sequence
  primer
gtaaaacgacggccagttgcttgagatgaatggctctg

SEQ ID NO: 55729 - DNA, 21 bp, Artificial Sequence
  primer
tcctcctggacaagtttcagc

SEQ ID NO: 55730 - DNA, 37 bp, Artificial Sequence
  primer
gtaaaacgacggccagtcatcacaggcatcagcattg

SEQ ID NO: 55731 - DNA, 21 bp, Artificial Sequence
  primer
ccagcatagcccttagggaac

SEQ ID NO: 55732 - DNA, 20 bp, Artificial Sequence
  primer
gaaagggatgctagggcttc

SEQ ID NO: 55733 - DNA, 38 bp, Artificial Sequence
  primer
gtaaaacgacggccagtgacaccactgaaggagcagag

SEQ ID NO: 55734 - DNA, 40 bp, Artificial Sequence
  primer
gtaaaacgacggccagtgatgtcatggatatgtagcctgc

SEQ ID NO: 55735 - DNA, 36 bp, Artificial Sequence
  primer
gtaaaacgacggccagtttgagcccaggaggttgag

SEQ ID NO: 55736 - DNA, 20 bp, Artificial Sequence
  primer
ttcatgttggcatatgctgc

SEQ ID NO: 55737 - DNA, 38 bp, Artificial Sequence
  primer
gtaaaacgacggccagttcagcgtatttcacaaccagc

SEQ ID NO: 55738 - DNA, 39 bp, Artificial Sequence
  primer
gtaaaacgacggccagtgggtttgaattctgtttgttgg

SEQ ID NO: 55739 - DNA, 21 bp, Artificial Sequence
  primer
attcacagcaccaacagaagg

SEQ ID NO: 55740 - DNA, 21 bp, Artificial Sequence
  primer
aaagtctttagggcatttggg

SEQ ID NO: 55741 - DNA, 21 bp, Artificial Sequence
  primer
ttcaacccaaatgtcagggtc

SEQ ID NO: 55742 - DNA, 21 bp, Artificial Sequence
  primer
tagatcacgcttcacgctacg

SEQ ID NO: 55743 - DNA, 26 bp, Artificial Sequence
  primer
gagaaataatagcgcaatgaactacc

SEQ ID NO: 55744 - DNA, 21 bp, Artificial Sequence
  primer
tacaggcagtgatgggttctg

SEQ ID NO: 55745 - DNA, 38 bp, Artificial Sequence
  primer
gtaaaacgacggccagtctctaagccctgctctccagg

SEQ ID NO: 55746 - DNA, 39 bp, Artificial Sequence
  primer
gtaaaacgacggccagttctgtggcaccatatttctctg

SEQ ID NO: 55747 - DNA, 23 bp, Artificial Sequence
  primer
ggaaaccctgagaattgtgaaac

SEQ ID NO: 55748 - DNA, 38 bp, Artificial Sequence
  primer
gtaaaacgacggccagttttgcctggtgactttgaaat

SEQ ID NO: 55749 - DNA, 37 bp, Artificial Sequence
  primer
gtaaaacgacggccagtacgggttgcccttgattatg

SEQ ID NO: 55750 - DNA, 39 bp, Artificial Sequence
  primer
gtaaaacgacggccagtttaggcagggtaaacacctttg

SEQ ID NO: 55751 - DNA, 37 bp, Artificial Sequence
  primer
gtaaaacgacggccagttttgcatcagaatgtgcagc

SEQ ID NO: 55752 - DNA, 21 bp, Artificial Sequence
  primer
cgcaagcattcctcctatctc

SEQ ID NO: 55753 - DNA, 38 bp, Artificial Sequence
  primer
gtaaaacgacggccagtaaatgatgaccactgccttcc

SEQ ID NO: 55754 - DNA, 20 bp, Artificial Sequence
  primer
tgccctgtgactctttgtcc

SEQ ID NO: 55755 - DNA, 38 bp, Artificial Sequence
  primer
gtaaaacgacggccagtggtagcgactttcattctggg

SEQ ID NO: 55756 - DNA, 38 bp, Artificial Sequence
  primer
gtaaaacgacggccagtatcccttaggactcagagggc

SEQ ID NO: 55757 - DNA, 21 bp, Artificial Sequence
  primer
aagaggcttagccaaggaagg

SEQ ID NO: 55758 - DNA, 21 bp, Artificial Sequence
  primer
atgttccagccttcctgattg

SEQ ID NO: 55759 - DNA, 38 bp, Artificial Sequence
  primer
gtaaaacgacggccagtagcgccaatgtctacaaacac

SEQ ID NO: 55760 - DNA, 38 bp, Artificial Sequence
  primer
gtaaaacgacggccagtgtacaccctcctgctctgagg

SEQ ID NO: 55761 - DNA, 38 bp, Artificial Sequence
  primer
gtaaaacgacggccagtggctctaaccctgttcctgag

SEQ ID NO: 55762 - DNA, 22 bp, Artificial Sequence
  primer
gagcccaggaattcaaggttac

SEQ ID NO: 55763 - DNA, 38 bp, Artificial Sequence
  primer
gtaaaacgacggccagtaaaggccagctgtggtctaac

SEQ ID NO: 55764 - DNA, 37 bp, Artificial Sequence
  primer
gtaaaacgacggccagtctgggctggttctctgtctg

SEQ ID NO: 55765 - DNA, 38 bp, Artificial Sequence
  primer
gtaaaacgacggccagttctgactacctcactgccctg

SEQ ID NO: 55766 - DNA, 37 bp, Artificial Sequence
  primer
gtaaaacgacggccagtcttgccctggtttgtctctg

SEQ ID NO: 55767 - DNA, 38 bp, Artificial Sequence
  primer
gtaaaacgacggccagtgtgtgagaccctcagaaaggg

SEQ ID NO: 55768 - DNA, 21 bp, Artificial Sequence
  primer
cgaggagaaagtcaaaccacc

SEQ ID NO: 55769 - DNA, 38 bp, Artificial Sequence
  primer
gtaaaacgacggccagtgtacccttccagagatgtggc

SEQ ID NO: 55770 - DNA, 38 bp, Artificial Sequence
  primer
gtaaaacgacggccagttgtgatttggtctgtgtgcag

SEQ ID NO: 55771 - DNA, 38 bp, Artificial Sequence
  primer
gtaaaacgacggccagtcaaccttgtggtcgtgatagc

SEQ ID NO: 55772 - DNA, 21 bp, Artificial Sequence
  primer
ttcgaaacgtcaccttcacag

SEQ ID NO: 55773 - DNA, 21 bp, Artificial Sequence
  primer
gtaactgctggttctcagccc

SEQ ID NO: 55774 - DNA, 38 bp, Artificial Sequence
  primer
gtaaaacgacggccagtagagggcttgctgttcttcac

SEQ ID NO: 55775 - DNA, 20 bp, Artificial Sequence
  primer
cacctcagcctcccaagtag

SEQ ID NO: 55776 - DNA, 38 bp, Artificial Sequence; identical to SEQ ID NO: 55755
  primer

SEQ ID NO: 55777 - DNA, 21 bp, Artificial Sequence
  primer
tcatctttccttaccatgccc

SEQ ID NO: 55778 - DNA, 38 bp, Artificial Sequence
  primer
gtaaaacgacggccagttaggaacagatgcaaccaagg

SEQ ID NO: 55779 - DNA, 22 bp, Artificial Sequence
  primer
ttgctgggatgtagtttctttg

SEQ ID NO: 55780 - DNA, 35 bp, Artificial Sequence
  primer
gtaaaacgacggccagtagggtgggagggctaaag

SEQ ID NO: 55781 - DNA, 22 bp, Artificial Sequence
  primer
ctgataggtgcaagttgctttg

SEQ ID NO: 55782 - DNA, 29 bp, Artificial Sequence
  primer
actctttaatggtggcttatttatgtaat

SEQ ID NO: 55783 - DNA, 36 bp, Artificial Sequence
  primer
gtaaaacgacggccagtccaaggagcaagttgaggc

SEQ ID NO: 55784 - DNA, 38 bp, Artificial Sequence
  primer
gtaaaacgacggccagttctgagcacagacactcctcc

SEQ ID NO: 55785 - DNA, 38 bp, Artificial Sequence
  primer
gtaaaacgacggccagtttcctgatcatgatttgaggg

SEQ ID NO: 55786 - DNA, 21 bp, Artificial Sequence
  primer
atgtgagccgttgttacttgc

SEQ ID NO: 55787 - DNA, 21 bp, Artificial Sequence
  primer
aaagctgtgtgtgtaggaggg

SEQ ID NO: 55788 - DNA, 39 bp, Artificial Sequence
  primer
gtaaaacgacggccagttgctgcctgtttatctcctgta

SEQ ID NO: 55789 - DNA, 21 bp, Artificial Sequence
  primer
acatctcatgactgctgcctg

SEQ ID NO: 55790 - DNA, 23 bp, Artificial Sequence
  primer
tcattgaagaagtacgcattgac

SEQ ID NO: 55791 - DNA, 21 bp, Artificial Sequence
  primer
tctccatgacatgaatctgcc

SEQ ID NO: 55792 - DNA, 21 bp, Artificial Sequence
  primer
gatatcacctgggagtggtcc

SEQ ID NO: 55793 - DNA, 43 bp, Artificial Sequence
  primer
gtaaaacgacggccagtttatttgtgaaggttccattaaacac

SEQ ID NO: 55794 - DNA, 38 bp, Artificial Sequence
  primer
gtaaaacgacggccagttactgcaaacacgcaaaccac

SEQ ID NO: 55795 - DNA, 21 bp, Artificial Sequence
  primer
cacaggtctaggtggactccc

SEQ ID NO: 55796 - DNA, 21 bp, Artificial Sequence
  primer
aagtgagtgcctcttggcttg

SEQ ID NO: 55797 - DNA, 22 bp, Artificial Sequence
  primer
ttcttgcagagggaaggtagtg

SEQ ID NO: 55798 - DNA, 42 bp, Artificial Sequence
  primer
gtaaaacgacggccagtcctctcctctatgaaatagaaagca

SEQ ID NO: 55799 - DNA, 22 bp, Artificial Sequence
  primer
tgatcacactgttggtcactcc

SEQ ID NO: 55800 - DNA, 38 bp, Artificial Sequence
  primer
gtaaaacgacggccagtcttcccacgaccactaactcc

SEQ ID NO: 55801 - DNA, 21 bp, Artificial Sequence
  primer
gttaaggcagttctggccatc

SEQ ID NO: 55802 - DNA, 37 bp, Artificial Sequence
  primer
gtaaaacgacggccagtggagaaattatttgcccacg

SEQ ID NO: 55803 - DNA, 38 bp, Artificial Sequence
  primer
gtaaaacgacggccagtctggtgcctccataggacttc

SEQ ID NO: 55804 - DNA, 24 bp, Artificial Sequence
  primer
tttctgtcgtggatgcttaaatac

SEQ ID NO: 55805 - DNA, 25 bp, Artificial Sequence
  primer
gcataaagtggctatttatacctgc

SEQ ID NO: 55806 - DNA, 38 bp, Artificial Sequence
  primer
gtaaaacgacggccagtctgcaagttgtgcgttaaatg

SEQ ID NO: 55807 - DNA, 20 bp, Artificial Sequence
  primer
gtccctgcagcactgatttg

SEQ ID NO: 55808 - DNA, 38 bp, Artificial Sequence
  primer
gtaaaacgacggccagtggattgcccacaaataccttc

SEQ ID NO: 55809 - DNA, 21 bp, Artificial Sequence
  primer
tctttcacatcatcacctggg

SEQ ID NO: 55810 - DNA, 21 bp, Artificial Sequence
  primer
agctccgtaggaggtgtaagg

SEQ ID NO: 55811 - DNA, 38 bp, Artificial Sequence
  primer
gtaaaacgacggccagtttgatgacacctagctctggc

SEQ ID NO: 55812 - DNA, 38 bp, Artificial Sequence
  primer
gtaaaacgacggccagtagtggcatccatatgcaagag

SEQ ID NO: 55813 - DNA, 21 bp, Artificial Sequence
  primer
tgtttgtggtagtgccatgag

SEQ ID NO: 55814 - DNA, 37 bp, Artificial Sequence
  primer
gtaaaacgacggccagtctcctccctgtctcctctgc

SEQ ID NO: 55815 - DNA, 39 bp, Artificial Sequence
  primer
gtaaaacgacggccagttgaacctttggtttatggatgg

SEQ ID NO: 55816 - DNA, 21 bp, Artificial Sequence
  primer
tggaatagagacggaacccac

SEQ ID NO: 55817 - DNA, 21 bp, Artificial Sequence
  primer
gcatgttgtatgcctcattcc

SEQ ID NO: 55818 - DNA, 39 bp, Artificial Sequence
  primer
gtaaaacgacggccagttgacagttacctgtggttgcac

SEQ ID NO: 55819 - DNA, 38 bp, Artificial Sequence
  primer
gtaaaacgacggccagtgaatgatgtcagcatcttcgg

SEQ ID NO: 55820 - DNA, 38 bp, Artificial Sequence
  primer
gtaaaacgacggccagtagtccagcatgtattccgaag

SEQ ID NO: 55821 - DNA, 38 bp, Artificial Sequence
  primer
gtaaaacgacggccagttaaattaatgcatcgcgcttg

SEQ ID NO: 55822 - DNA, 39 bp, Artificial Sequence
  primer
gtaaaacgacggccagtcatggtctgatacaattgctgc

SEQ ID NO: 55823 - DNA, 21 bp, Artificial Sequence
  primer
aacttctggcctcaagcagtc

SEQ ID NO: 55824 - DNA, 39 bp, Artificial Sequence
  primer
gtaaaacgacggccagtcgaggtcctatcgtcacagttc

SEQ ID NO: 55825 - DNA, 21 bp, Artificial Sequence
  primer
ttagcgacaaccgtgtattgc

SEQ ID NO: 55826 - DNA, 22 bp, Artificial Sequence
  primer
tgctaccatccgtatatgctca

SEQ ID NO: 55827 - DNA, 38 bp, Artificial Sequence
  primer
gtaaaacgacggccagttttgtcaccaagaagcaaagg

SEQ ID NO: 55828 - DNA, 43 bp, Artificial Sequence
  primer
gtaaaacgacggccagttctagctttctaggctgatgtctttc

SEQ ID NO: 55829 - DNA, 38 bp, Artificial Sequence
  primer
gtaaaacgacggccagttttccactggatacttccctg

SEQ ID NO: 55830 - DNA, 25 bp, Artificial Sequence
  primer
cgtccaaactatctattgtcatggg

SEQ ID NO: 55831 - DNA, 44 bp, Artificial Sequence
  primer
gtaaaacgacggccagttttataaagtttgtgttaggagaaggg

SEQ ID NO: 55832 - DNA, 22 bp, Artificial Sequence
  primer
tctccatatttggcagatgttc

SEQ ID NO: 55833 - DNA, 22 bp, Artificial Sequence
  primer
cctccaatttattgggtgattc

SEQ ID NO: 55834 - DNA, 21 bp, Artificial Sequence
  primer
acccaaaggtacttgctggag

SEQ ID NO: 55835 - DNA, 21 bp, Artificial Sequence
  primer
tatgaataggtctgggctgcg

SEQ ID NO: 55836 - DNA, 38 bp, Artificial Sequence
  primer
gtaaaacgacggccagttgggacgtgttgtatgtaggg

SEQ ID NO: 55837 - DNA, 22 bp, Artificial Sequence
  primer
acagctcttgatgtttggattg

SEQ ID NO: 55838 - DNA, 28 bp, Artificial Sequence
  primer
acttctgagggtttatatatgcttacct

SEQ ID NO: 55839 - DNA, 38 bp, Artificial Sequence
  primer
gtaaaacgacggccagtctctccctgtccagtctttcc

SEQ ID NO: 55840 - DNA, 37 bp, Artificial Sequence
  primer
gtaaaacgacggccagtaaactcacctgccgattgtg

SEQ ID NO: 55841 - DNA, 41 bp, Artificial Sequence
  primer
gtaaaacgacggccagtttgtgaaatttaagtcactcaggc

SEQ ID NO: 55842 - DNA, 38 bp, Artificial Sequence
  primer
gtaaaacgacggccagttcggaagtgaagtaagtgggc

SEQ ID NO: 55843 - DNA, 39 bp, Artificial Sequence
  primer
gtaaaacgacggccagtaagagcagcttggtttctgatg

SEQ ID NO: 55844 - DNA, 25 bp, Artificial Sequence
  primer
tgctattatgtggcatttgagtttc

SEQ ID NO: 55845 - DNA, 38 bp, Artificial Sequence
  primer
gtaaaacgacggccagtgaggagggtaactgtgagggc

SEQ ID NO: 55846 - DNA, 38 bp, Artificial Sequence
  primer
gtaaaacgacggccagtcccagttatgctgtcctgatg

SEQ ID NO: 55847 - DNA, 21 bp, Artificial Sequence
  primer
gaggagatgcttccaccaaag

SEQ ID NO: 55848 - DNA, 21 bp, Artificial Sequence
  primer
tgtagtgcaagtcgcttgttg

SEQ ID NO: 55849 - DNA, 21 bp, Artificial Sequence
  primer
gtatcacccaacagggaggac

SEQ ID NO: 55850 - DNA, 38 bp, Artificial Sequence
  primer
gtaaaacgacggccagtacgttccatagtaaggccgtg

SEQ ID NO: 55851 - DNA, 38 bp, Artificial Sequence
  primer
gtaaaacgacggccagttcagggtaagaactgtgtgcg

SEQ ID NO: 55852 - DNA, 20 bp, Artificial Sequence
  primer
agttgcgctgaaacttctgg

SEQ ID NO: 55853 - DNA, 38 bp, Artificial Sequence
  primer
gtaaaacgacggccagtatgatgatcaggtaggcctgg

SEQ ID NO: 55854 - DNA, 37 bp, Artificial Sequence
  primer
gtaaaacgacggccagtacgtacgttggagctcttgg

SEQ ID NO: 55855 - DNA, 38 bp, Artificial Sequence
  primer
gtaaaacgacggccagtaaggagaagtagccaccatgc

SEQ ID NO: 55856 - DNA, 22 bp, Artificial Sequence
  primer
caagtgaaagttgctgtctggg

SEQ ID NO: 55857 - DNA, 38 bp, Artificial Sequence
  primer
gtaaaacgacggccagtgatgccaggaacagacaaagc

SEQ ID NO: 55858 - DNA, 38 bp, Artificial Sequence
  primer
gtaaaacgacggccagtcattcacatggctcatggttc

SEQ ID NO: 55859 - DNA, 42 bp, Artificial Sequence
  primer
gtaaaacgacggccagttttctttcagtgtttaatgcctaga

SEQ ID NO: 55860 - DNA, 38 bp, Artificial Sequence
  primer
gtaaaacgacggccagtcagctgatgcatactgaaggc

SEQ ID NO: 55861 - DNA, 21 bp, Artificial Sequence
  primer
tcctcaccctatttcacgagg

SEQ ID NO: 55862 - DNA, 21 bp, Artificial Sequence
  primer
tacctctttggtccacttgcc

SEQ ID NO: 55863 - DNA, 21 bp, Artificial Sequence
  primer
tgagaaagcagtccctatggc

SEQ ID NO: 55864 - DNA, 39 bp, Artificial Sequence
  primer
gtaaaacgacggccagtgagtattggatcctgcaagctg

SEQ ID NO: 55865 - DNA, 38 bp, Artificial Sequence
  primer
gtaaaacgacggccagtcagtgtagaggagaggctggg

SEQ ID NO: 55866 - DNA, 21 bp, Artificial Sequence
  primer
tctgtcttgcactgtgctgtc

SEQ ID NO: 55867 - DNA, 21 bp, Artificial Sequence
  primer
acacgagtgatgaaggctctg

SEQ ID NO: 55868 - DNA, 38 bp, Artificial Sequence
  primer
gtaaaacgacggccagtaaggcttagggagcaactgac

SEQ ID NO: 55869 - DNA, 21 bp, Artificial Sequence
  primer
gagatcaggaaagaacctggg

SEQ ID NO: 55870 - DNA, 21 bp, Artificial Sequence
  primer
ttgactgactgcaagttgtgg

SEQ ID NO: 55871 - DNA, 39 bp, Artificial Sequence
  primer
gtaaaacgacggccagtttatgcattatctgccacatgc

SEQ ID NO: 55872 - DNA, 38 bp, Artificial Sequence
  primer
gtaaaacgacggccagtttgtgaagtatttccttgcgg

SEQ ID NO: 55873 - DNA, 21 bp, Artificial Sequence
  primer
gatgcatttggctctgaactg

SEQ ID NO: 55874 - DNA, 26 bp, Artificial Sequence
  primer
cccacgtatactgacttgatccttac

SEQ ID NO: 55875 - DNA, 38 bp, Artificial Sequence
  primer
gtaaaacgacggccagtgctgttgggttaaatttgtgc

SEQ ID NO: 55876 - DNA, 44 bp, Artificial Sequence
  primer
gtaaaacgacggccagttttggagacttgtctgagtattatgaa

SEQ ID NO: 55877 - DNA, 38 bp, Artificial Sequence
  primer
gtaaaacgacggccagtacaggtatctggcgtttgacc

SEQ ID NO: 55878 - DNA, 23 bp, Artificial Sequence
  primer
tgggagtgtaactacccactttc

SEQ ID NO: 55879 - DNA, 21 bp, Artificial Sequence
  primer
tgcaagttacgtttaccgtcc

SEQ ID NO: 55880 - DNA, 21 bp, Artificial Sequence
  primer
aacttgatttcagctctgccc

SEQ ID NO: 55881 - DNA, 21 bp, Artificial Sequence
  primer
ggagaacctgaatgtggactg

SEQ ID NO: 55882 - DNA, 21 bp, Artificial Sequence
  primer
ctgggcaacagtagtgagacc

SEQ ID NO: 55883 - DNA, 26 bp, Artificial Sequence
  primer
tccaatgaataaacagttgtgaagta

SEQ ID NO: 55884 - DNA, 21 bp, Artificial Sequence
  primer
tttgtaaaggaaaccggtgct

SEQ ID NO: 55885 - DNA, 39 bp, Artificial Sequence
  primer
gtaaaacgacggccagtgtggtggaaattgcagatacag

SEQ ID NO: 55886 - DNA, 21 bp, Artificial Sequence
  primer
tgctgcagatatagggtggtg

SEQ ID NO: 55887 - DNA, 39 bp, Artificial Sequence
  primer
gtaaaacgacggccagtgcctgaaataagatatggctgc

SEQ ID NO: 55888 - DNA, 43 bp, Artificial Sequence
  primer
gtaaaacgacggccagtacactgctggtatttccatagataag

SEQ ID NO: 55889 - DNA, 39 bp, Artificial Sequence
  primer
gtaaaacgacggccagttctttcctaagccctttctttg

SEQ ID NO: 55890 - DNA, 40 bp, Artificial Sequence
  primer
gtaaaacgacggccagtcaaccatgatttatgagtgtccc

SEQ ID NO: 55891 - DNA, 38 bp, Artificial Sequence
  primer
gtaaaacgacggccagttgccctcctagaatggatttc

SEQ ID NO: 55892 - DNA, 21 bp, Artificial Sequence
  primer
gcttgatttggagctgaagtg

SEQ ID NO: 55893 - DNA, 21 bp, Artificial Sequence
  primer
atctcattgccaggttaggtg

SEQ ID NO: 55894 - DNA, 38 bp, Artificial Sequence
  primer
gtaaaacgacggccagttgtctggaagacagaaagccc

SEQ ID NO: 55895 - DNA, 40 bp, Artificial Sequence
  primer
gtaaaacgacggccagttctgactccagaatctctgcttg

SEQ ID NO: 55896 - DNA, 21 bp, Artificial Sequence
  primer
gatgggcctcatttctaggtg

SEQ ID NO: 55897 - DNA, 38 bp, Artificial Sequence
  primer
gtaaaacgacggccagtcctgcagccaaacctaatctc

SEQ ID NO: 55898 - DNA, 38 bp, Artificial Sequence
  primer
gtaaaacgacggccagtaaggacgagatgatgaggctg

SEQ ID NO: 55899 - DNA, 39 bp, Artificial Sequence
  primer
gtaaaacgacggccagtggttggagtactgtgatgagcc

SEQ ID NO: 55900 - DNA, 21 bp, Artificial Sequence
  primer
ttggctgccacttctaggttc

SEQ ID NO: 55901 - DNA, 38 bp, Artificial Sequence
  primer
gtaaaacgacggccagtctggaacaacaacagctctgc

SEQ ID NO: 55902 - DNA, 21 bp, Artificial Sequence
  primer
agtgctcacctctgaccttgg

SEQ ID NO: 55903 - DNA, 38 bp, Artificial Sequence
  primer
gtaaaacgacggccagttgagcagaagtgggtaaatgg

SEQ ID NO: 55904 - DNA, 39 bp, Artificial Sequence
  primer
gtaaaacgacggccagtgccctgagtcctttgtattgtg

SEQ ID NO: 55905 - DNA, 38 bp, Artificial Sequence
  primer
gtaaaacgacggccagtgcttggcagagatgaggaaac

SEQ ID NO: 55906 - DNA, 21 bp, Artificial Sequence
  primer
ggaaggatcaaagtcactggg

SEQ ID NO: 55907 - DNA, 36 bp, Artificial Sequence
  primer
gtaaaacgacggccagtagcctgacacgctgtcctc

SEQ ID NO: 55908 - DNA, 35 bp, Artificial Sequence
  primer
gtaaaacgacggccagtgaacggctgcagaaggtg

SEQ ID NO: 55909 - DNA, 38 bp, Artificial Sequence
  primer
gtaaaacgacggccagtgtctagctagcagggccagtg

SEQ ID NO: 55910 - DNA, 38 bp, Artificial Sequence
  primer
gtaaaacgacggccagtgatccaagaaagcagaggtgg

SEQ ID NO: 55911 - DNA, 21 bp, Artificial Sequence
  primer
gcaccatcagtaggtccttgg

SEQ ID NO: 55912 - DNA, 38 bp, Artificial Sequence
  primer
gtaaaacgacggccagtccatcatctccattctcctgg

SEQ ID NO: 55913 - DNA, 38 bp, Artificial Sequence
  primer
gtaaaacgacggccagtaggatagcatgtcacagcagc

SEQ ID NO: 55914 - DNA, 38 bp, Artificial Sequence
  primer
gtaaaacgacggccagtcagaggctgtgccatgtaaac

SEQ ID NO: 55915 - DNA, 21 bp, Artificial Sequence
  primer
atgtttgtgccactgaactcc

SEQ ID NO: 55916 - DNA, 21 bp, Artificial Sequence
  primer
ccagtgaggttgctgtctcag

SEQ ID NO: 55917 - DNA, 21 bp, Artificial Sequence
  primer
gcaccagggaacgtctaaatc

SEQ ID NO: 55918 - DNA, 38 bp, Artificial Sequence
  primer
gtaaaacgacggccagttcagggagtgagactggaagc

SEQ ID NO: 55919 - DNA, 20 bp, Artificial Sequence
  primer
agagcagcagaagctgggtc

SEQ ID NO: 55920 - DNA, 21 bp, Artificial Sequence
  primer
gtgttgaagatgggagggatg

SEQ ID NO: 55921 - DNA, 37 bp, Artificial Sequence
  primer
gtaaaacgacggccagtcaaggaagatgccctggatg

SEQ ID NO: 55922 - DNA, 35 bp, Artificial Sequence
  primer
gtaaaacgacggccagtcccggttctccatgatcc

SEQ ID NO: 55923 - DNA, 26 bp, Artificial Sequence
  primer
gaggaaatattcagtgtttctgacaa

SEQ ID NO: 55924 - DNA, 39 bp, Artificial Sequence
  primer
gtaaaacgacggccagtgcttagattgtttgcgactctg

SEQ ID NO: 55925 - DNA, 38 bp, Artificial Sequence
  primer
gtaaaacgacggccagttcctcaagtttcccatttgtt

SEQ ID NO: 55926 - DNA, 38 bp, Artificial Sequence
  primer
gtaaaacgacggccagtgatttcctggtgatctgtgct

SEQ ID NO: 55927 - DNA, 26 bp, Artificial Sequence
  primer
aatctcaccacatatacacacaaggt

SEQ ID NO: 55928 - DNA, 37 bp, Artificial Sequence
  primer
gtaaaacgacggccagtatgctttcatggaggccaac

SEQ ID NO: 55929 - DNA, 37 bp, Artificial Sequence
  primer
gtaaaacgacggccagtcgaagaacctctctcccagg

SEQ ID NO: 55930 - DNA, 23 bp, Artificial Sequence
  primer
aaagcaggctgtcagtactatgc

SEQ ID NO: 55931 - DNA, 22 bp, Artificial Sequence
  primer
ttggtgctttgtaatggaagtg

SEQ ID NO: 55932 - DNA, 21 bp, Artificial Sequence
  primer
tgtttcaccatctggatttgg

SEQ ID NO: 55933 - DNA, 42 bp, Artificial Sequence
  primer
gtaaaacgacggccagtttcatttggaagtgatctttagcag

SEQ ID NO: 55934 - DNA, 38 bp, Artificial Sequence
  primer
gtaaaacgacggccagtacaaattcagcaacagcaagc

SEQ ID NO: 55935 - DNA, 42 bp, Artificial Sequence
  primer
gtaaaacgacggccagtaaatagaaagatttcagtggtttgc

SEQ ID NO: 55936 - DNA, 21 bp, Artificial Sequence
  primer
agatgaaggatgatgtggtgc

SEQ ID NO: 55937 - DNA, 40 bp, Artificial Sequence
  primer
gtaaaacgacggccagtcctctacttgctagcttgttccc

SEQ ID NO: 55938 - DNA, 37 bp, Artificial Sequence
  primer
gtaaaacgacggccagtctatctaccgcggcaaggac

SEQ ID NO: 55939 - DNA, 25 bp, Artificial Sequence
  primer
tgacaatgtaactgtaggtctttgg

SEQ ID NO: 55940 - DNA, 39 bp, Artificial Sequence
  primer
gtaaaacgacggccagtttgtggataccttctcctgagc

SEQ ID NO: 55941 - DNA, 43 bp, Artificial Sequence
  primer
gtaaaacgacggccagttgttagtagttattgaaactggtcgc

SEQ ID NO: 55942 - DNA, 24 bp, Artificial Sequence
  primer
tgagtgtcgagagatacttgcttg

SEQ ID NO: 55943 - DNA, 40 bp, Artificial Sequence
  primer
gtaaaacgacggccagtccaaatccctgtttctttattcc

SEQ ID NO: 55944 - DNA, 42 bp, Artificial Sequence
  primer
gtaaaacgacggccagtcatgtttcaatttatgaacacagaa

SEQ ID NO: 55945 - DNA, 41 bp, Artificial Sequence
  primer
gtaaaacgacggccagtccaatgccatctagacttaacctg

SEQ ID NO: 55946 - DNA, 24 bp, Artificial Sequence
  primer
cctgattaatagtcaatgaagccc

SEQ ID NO: 55947 - DNA, 40 bp, Artificial Sequence
  primer
gtaaaacgacggccagttgctatctggaacagaagacaaa

SEQ ID NO: 55948 - DNA, 43 bp, Artificial Sequence
  primer
gtaaaacgacggccagttgtaattgctttcatcttaattgtgg

SEQ ID NO: 55949 - DNA, 38 bp, Artificial Sequence
  primer
gtaaaacgacggccagtaaggttagaaaggcaacagcc

SEQ ID NO: 55950 - DNA, 38 bp, Artificial Sequence
  primer
gtaaaacgacggccagtttggagagaccagtgtgtgaa

SEQ ID NO: 55951 - DNA, 24 bp, Artificial Sequence
  primer
ggaattaatggaatttctgagctg

SEQ ID NO: 55952 - DNA, 38 bp, Artificial Sequence
  primer
gtaaaacgacggccagtcacttctcagcacagtctccc

SEQ ID NO: 55953 - DNA, 21 bp, Artificial Sequence
  primer
gaagggacaggaagcactttg

SEQ ID NO: 55954 - DNA, 38 bp, Artificial Sequence
  primer
gtaaaacgacggccagttatgcaggttgtttcatgtgc

SEQ ID NO: 55955 - DNA, 38 bp, Artificial Sequence
  primer
gtaaaacgacggccagtgtactcaaggccaccaaacac

SEQ ID NO: 55956 - DNA, 19 bp, Artificial Sequence
  primer
cagaggctttctgctgctg

SEQ ID NO: 55957 - DNA, 22 bp, Artificial Sequence
  primer
atgttgccctagtcacgttatg

SEQ ID NO: 55958 - DNA, 38 bp, Artificial Sequence
  primer
gtaaaacgacggccagttttaaaggacacagcaccacc

SEQ ID NO: 55959 - DNA, 21 bp, Artificial Sequence
  primer
ggctttcatttggtatttgcc

SEQ ID NO: 55960 - DNA, 38 bp, Artificial Sequence
  primer
gtaaaacgacggccagttagcaagtttctttcctgccc

SEQ ID NO: 55961 - DNA, 38 bp, Artificial Sequence
  primer
gtaaaacgacggccagtgaaatccctggagctcttcac

SEQ ID NO: 55962 - DNA, 38 bp, Artificial Sequence
  primer
gtaaaacgacggccagtacacagctgcttctccatcag

SEQ ID NO: 55963 - DNA, 38 bp, Artificial Sequence
  primer
gtaaaacgacggccagtgctcagtgttcatggttgtgg

SEQ ID NO: 55964 - DNA, 21 bp, Artificial Sequence
  primer
ccttctacccagtaaccacgg

SEQ ID NO: 55965 - DNA, 21 bp, Artificial Sequence
  primer
tttccagtagaagggattggg

SEQ ID NO: 55966 - DNA, 19 bp, Artificial Sequence
  primer
atcgagaattgggtggtgg

SEQ ID NO: 55967 - DNA, 38 bp, Artificial Sequence
  primer
gtaaaacgacggccagtaccacagaacaaactgatggg

SEQ ID NO: 55968 - DNA, 37 bp, Artificial Sequence
  primer
gtaaaacgacggccagtccatgtgctctgatgctgtc

SEQ ID NO: 55969 - DNA, 21 bp, Artificial Sequence
  primer
cgacctgatgcacactgaaag

SEQ ID NO: 55970 - DNA, 38 bp, Artificial Sequence
  primer
gtaaaacgacggccagtattgtagccgtcatctttggg

SEQ ID NO: 55971 - DNA, 38 bp, Artificial Sequence
  primer
gtaaaacgacggccagtaaacagggaggtgtggagaag

SEQ ID NO: 55972 - DNA, 38 bp, Artificial Sequence
  primer
gtaaaacgacggccagtagctccagactctgaccttcc

SEQ ID NO: 55973 - DNA, 20 bp, Artificial Sequence
  primer
aaaccactggaagtggaggg

SEQ ID NO: 55974 - DNA, 38 bp, Artificial Sequence
  primer
gtaaaacgacggccagtaggagggcagaggactagctg

SEQ ID NO: 55975 - DNA, 19 bp, Artificial Sequence
  primer
tgcactgcagcctagcaac

SEQ ID NO: 55976 - DNA, 21 bp, Artificial Sequence
  primer
gatcctcccactgtgatcgtc

SEQ ID NO: 55977 - DNA, 37 bp, Artificial Sequence
  primer
gtaaaacgacggccagtaacttcagtgctggctgctg

SEQ ID NO: 55978 - DNA, 38 bp, Artificial Sequence
  primer
gtaaaacgacggccagtagctgaccgctgagtaaggag

SEQ ID NO: 55979 - DNA, 21 bp, Artificial Sequence
  primer
gattggttcccatggatgatg

SEQ ID NO: 55980 - DNA, 21 bp, Artificial Sequence
  primer
tccttccctactgactgtggc

SEQ ID NO: 55981 - DNA, 21 bp, Artificial Sequence
  primer
ctgcatcttacaatttccggg

SEQ ID NO: 55982 - DNA, 38 bp, Artificial Sequence
  primer
gtaaaacgacggccagtacctgcaaggagaccttcaac

SEQ ID NO: 55983 - DNA, 21 bp, Artificial Sequence
  primer
gtgcgcgtctactacaagcag

SEQ ID NO: 55984 - DNA, 38 bp, Artificial Sequence
  primer
gtaaaacgacggccagtaacttccattaaggactcggg

SEQ ID NO: 55985 - DNA, 38 bp, Artificial Sequence
  primer
gtaaaacgacggccagtctcgctctgtctgagagttgg

SEQ ID NO: 55986 - DNA, 38 bp, Artificial Sequence
  primer
gtaaaacgacggccagtttcctagtgccctactctgcc

SEQ ID NO: 55987 - DNA, 21 bp, Artificial Sequence
  primer
cctgcaaggagactttcaacc

SEQ ID NO: 55988 - DNA, 21 bp, Artificial Sequence
  primer
tgagggaatgagacagtcacg

SEQ ID NO: 55989 - DNA, 18 bp, Artificial Sequence
  primer
gtcagggtggcgtgactg

SEQ ID NO: 55990 - DNA, 21 bp, Artificial Sequence
  primer
gaaagaatctgggctgtggag

SEQ ID NO: 55991 - DNA, 37 bp, Artificial Sequence
  primer
gtaaaacgacggccagttgctaacaaaggcaagccac

SEQ ID NO: 55992 - DNA, 21 bp, Artificial Sequence
  primer
cgcttgaccgtctatgaaatg

SEQ ID NO: 55993 - DNA, 37 bp, Artificial Sequence
  primer
gtaaaacgacggccagtgaccaaagtagggccaggag

SEQ ID NO: 55994 - DNA, 21 bp, Artificial Sequence
  primer
ctcctctgactccagagcacc

SEQ ID NO: 55995 - DNA, 37 bp, Artificial Sequence
  primer
gtaaaacgacggccagtatccatcctgtgtcactcgg

SEQ ID NO: 55996 - DNA, 21 bp, Artificial Sequence
  primer
cacctctcctacacctgtgcc

SEQ ID NO: 55997 - DNA, 38 bp, Artificial Sequence
  primer
gtaaaacgacggccagtgttccttcgggtaaggatgtg

SEQ ID NO: 55998 - DNA, 38 bp, Artificial Sequence
  primer
gtaaaacgacggccagtcacctgtaggagtccagggag

SEQ ID NO: 55999 - DNA, 38 bp, Artificial Sequence
  primer
gtaaaacgacggccagttttctgggatgttcctgttcc

SEQ ID NO: 56000 - DNA, 37 bp, Artificial Sequence
  primer
gtaaaacgacggccagtaggttagggagcagcaggtg

SEQ ID NO: 56001 - DNA, 20 bp, Artificial Sequence
  primer
ctctccaccctcctcctctg

SEQ ID NO: 56002 - DNA, 37 bp, Artificial Sequence
  primer
gtaaaacgacggccagtaaacttgacatcagcctgcg

SEQ ID NO: 56003 - DNA, 42 bp, Artificial Sequence
  primer
gtaaaacgacggccagtcaacaacagacaatgtgaactcaac

SEQ ID NO: 56004 - DNA, 38 bp, Artificial Sequence
  primer
gtaaaacgacggccagtggctctgacacccttatgttg

SEQ ID NO: 56005 - DNA, 38 bp, Artificial Sequence
  primer
gtaaaacgacggccagttgcaaggagacattcaacctg

SEQ ID NO: 56006 - DNA, 24 bp, Artificial Sequence
  primer
tttgcttctgtaaattcttggagg

SEQ ID NO: 56007 - DNA, 27 bp, Artificial Sequence
  primer
cctcattcagttccattgtaaattatc

SEQ ID NO: 56008 - DNA, 21 bp, Artificial Sequence
  primer
tgttcccttctccctctgttc

SEQ ID NO: 56009 - DNA, 23 bp, Artificial Sequence
  primer
aatcaggtttgagtggttcactg

SEQ ID NO: 56010 - DNA, 25 bp, Artificial Sequence
  primer
tgaatcaatcaactgttccatgtag

SEQ ID NO: 56011 - DNA, 18 bp, Artificial Sequence
  primer
gcagctttccagggttcc

SEQ ID NO: 56012 - DNA, 21 bp, Artificial Sequence
  primer
acacagtccaatgtcactgcc

SEQ ID NO: 56013 - DNA, 38 bp, Artificial Sequence
  primer
gtaaaacgacggccagttacatcttgcaggtcaaaggc

SEQ ID NO: 56014 - DNA, 40 bp, Artificial Sequence
  primer
gtaaaacgacggccagttgttctggaaaccaatcttctcc

SEQ ID NO: 56015 - DNA, 24 bp, Artificial Sequence
  primer
tgccacatatctttgtcttgagtg

SEQ ID NO: 56016 - DNA, 39 bp, Artificial Sequence
  primer
gtaaaacgacggccagtgagaaattctgtccggtttcag

SEQ ID NO: 56017 - DNA, 24 bp, Artificial Sequence
  primer
ccaaatttgctctatcatttaaca

SEQ ID NO: 56018 - DNA, 21 bp, Artificial Sequence
  primer
ggaagttcctgccgatgttag

SEQ ID NO: 56019 - DNA, 21 bp, Artificial Sequence
  primer
ggtccggacataacacagatg

SEQ ID NO: 56020 - DNA, 36 bp, Artificial Sequence
  primer
gtaaaacgacggccagtagcccgctgctctcctaac

SEQ ID NO: 56021 - DNA, 38 bp, Artificial Sequence
  primer
gtaaaacgacggccagttcagcacatatggaaacgctc

SEQ ID NO: 56022 - DNA, 21 bp, Artificial Sequence
  primer
aaggaactgccgagaactcac

SEQ ID NO: 56023 - DNA, 38 bp, Artificial Sequence
  primer
gtaaaacgacggccagtgaactgattggatcacccgag

SEQ ID NO: 56024 - DNA, 38 bp, Artificial Sequence
  primer
gtaaaacgacggccagtcgacaaagagcgtttcatcag

SEQ ID NO: 56025 - DNA, 21 bp, Artificial Sequence
  primer
cttctgaaacaaggaggtggc

SEQ ID NO: 56026 - DNA, 20 bp, Artificial Sequence
  primer
gtttgccttgctttggagag

SEQ ID NO: 56027 - DNA, 23 bp, Artificial Sequence
  primer
tgctgtggaaatggtactacagg

SEQ ID NO: 56028 - DNA, 38 bp, Artificial Sequence
  primer
gtaaaacgacggccagttccaagagaatacaggctcca

SEQ ID NO: 56029 - DNA, 39 bp, Artificial Sequence
  primer
gtaaaacgacggccagtttctctctccaagtggcttcag

SEQ ID NO: 56030 - DNA, 41 bp, Artificial Sequence
  primer
gtaaaacgacggccagtcctgcctgacttacagtagcaaag

SEQ ID NO: 56031 - DNA, 41 bp, Artificial Sequence
  primer
gtaaaacgacggccagttgtcaagaccgtacagctaacttg

SEQ ID NO: 56032 - DNA, 20 bp, Artificial Sequence
  primer
caaacagcctggcgtgtaac

SEQ ID NO: 56033 - DNA, 21 bp, Artificial Sequence
  primer
agaccttgtcaacaagccacc

SEQ ID NO: 56034 - DNA, 39 bp, Artificial Sequence
  primer
gtaaaacgacggccagttgcataccggatacagataccc

SEQ ID NO: 56035 - DNA, 38 bp, Artificial Sequence
  primer
gtaaaacgacggccagttgcttggctagcaggaactac

SEQ ID NO: 56036 - DNA, 38 bp, Artificial Sequence
  primer
gtaaaacgacggccagtaagaaacatgccagtcggaag

SEQ ID NO: 56037 - DNA, 38 bp, Artificial Sequence
  primer
gtaaaacgacggccagtttgcctatttgaggcaatcag

SEQ ID NO: 56038 - DNA, 38 bp, Artificial Sequence
  primer
gtaaaacgacggccagtattgtggctgattcaaacgtg

SEQ ID NO: 56039 - DNA, 21 bp, Artificial Sequence
  primer
atccgtggttcctacatttgg

SEQ ID NO: 56040 - DNA, 26 bp, Artificial Sequence
  primer
aaattagggtaatgatttgctttcag

SEQ ID NO: 56041 - DNA, 21 bp, Artificial Sequence
  primer
gaaatgcatggttccttcctg

SEQ ID NO: 56042 - DNA, 21 bp, Artificial Sequence
  primer
atctccaatgaaggtgcttcc

SEQ ID NO: 56043 - DNA, 21 bp, Artificial Sequence
  primer
ttctgtggtacgacacttggc

SEQ ID NO: 56044 - DNA, 40 bp, Artificial Sequence
  primer
gtaaaacgacggccagtttgaaattgatgcaaagattgtg

SEQ ID NO: 56045 - DNA, 25 bp, Artificial Sequence
  primer
caggaattggtgtgataaataatgc

SEQ ID NO: 56046 - DNA, 45 bp, Artificial Sequence
  primer
gtaaaacgacggccagttgccaatatacgtaataaacataacagg

SEQ ID NO: 56047 - DNA, 21 bp, Artificial Sequence
  primer
aagacatgtattccggatggg

SEQ ID NO: 56048 - DNA, 39 bp, Artificial Sequence
  primer
gtaaaacgacggccagtggaaatttcagctaagtgtggg

SEQ ID NO: 56049 - DNA, 23 bp, Artificial Sequence
  primer
tcttaatttgaaaggcactgtgg

SEQ ID NO: 56050 - DNA, 38 bp, Artificial Sequence
  primer
gtaaaacgacggccagtagttgtgcttcatgcttctgg

SEQ ID NO: 56051 - DNA, 39 bp, Artificial Sequence
  primer
gtaaaacgacggccagtttgcagtttgaatacttccagg

SEQ ID NO: 56052 - DNA, 44 bp, Artificial Sequence
  primer
gtaaaacgacggccagtaagccttagtagtctaagagggcatac

SEQ ID NO: 56053 - DNA, 38 bp, Artificial Sequence
  primer
gtaaaacgacggccagttgggtaagctttgccagataa

SEQ ID NO: 56054 - DNA, 25 bp, Artificial Sequence
  primer
gtcaccaagttagccatatacttcc

SEQ ID NO: 56055 - DNA, 38 bp, Artificial Sequence
  primer
gtaaaacgacggccagtttcagtgaggcaacactgtcc

SEQ ID NO: 56056 - DNA, 27 bp, Artificial Sequence
  primer
tgcaagagtaaggataagaaaggataa

SEQ ID NO: 56057 - DNA, 42 bp, Artificial Sequence
  primer
gtaaaacgacggccagtctcaaagatccattgaatatgagtt

SEQ ID NO: 56058 - DNA, 38 bp, Artificial Sequence
  primer
gtaaaacgacggccagtgtgtctgcactatgtttgccc

SEQ ID NO: 56059 - DNA, 37 bp, Artificial Sequence
  primer
gtaaaacgacggccagtaagctaaacgtggagcagcc

SEQ ID NO: 56060 - DNA, 38 bp, Artificial Sequence
  primer
gtaaaacgacggccagtagggtgttcatttcaccattg

SEQ ID NO: 56061 - DNA, 38 bp, Artificial Sequence
  primer
gtaaaacgacggccagttttgccagcataggaatcaac

SEQ ID NO: 56062 - DNA, 21 bp, Artificial Sequence
  primer
aacaactggctgcggactaac

SEQ ID NO: 56063 - DNA, 21 bp, Artificial Sequence
  primer
tcttgcctttcaggatgtagg

SEQ ID NO: 56064 - DNA, 25 bp, Artificial Sequence
  primer
tcacatttaatatttgattccttgc

SEQ ID NO: 56065 - DNA, 21 bp, Artificial Sequence
  primer
tgagccactagcttaatgccc

SEQ ID NO: 56066 - DNA, 38 bp, Artificial Sequence
  primer
gtaaaacgacggccagtccttaatgaaactggcacagc

SEQ ID NO: 56067 - DNA, 38 bp, Artificial Sequence
  primer
gtaaaacgacggccagtttgaaacagttggctgtcaaa

SEQ ID NO: 56068 - DNA, 47 bp, Artificial Sequence
  primer
gtaaaacgacggccagtaatatgtgaaagtattgtccttacaagttc

SEQ ID NO: 56069 - DNA, 25 bp, Artificial Sequence
  primer
tttgtaaattgaaccttgtggattc

SEQ ID NO: 56070 - DNA, 37 bp, Artificial Sequence
  primer
gtaaaacgacggccagttgaaattcctgggctgactg

SEQ ID NO: 56071 - DNA, 40 bp, Artificial Sequence
  primer
gtaaaacgacggccagttgtaactcacagggctttaccaa

SEQ ID NO: 56072 - DNA, 22 bp, Artificial Sequence
  primer
catgaccatcttccaagcagac

SEQ ID NO: 56073 - DNA, 38 bp, Artificial Sequence
  primer
gtaaaacgacggccagtcaaattgctagcacgcagata

SEQ ID NO: 56074 - DNA, 21 bp, Artificial Sequence
  primer
gatgctgctgaactaccaacc

SEQ ID NO: 56075 - DNA, 38 bp, Artificial Sequence
  primer
gtaaaacgacggccagttttgcctaccaggaaatttgg

SEQ ID NO: 56076 - DNA, 37 bp, Artificial Sequence
  primer
gtaaaacgacggccagttggcctcctggatgctttag

SEQ ID NO: 56077 - DNA, 37 bp, Artificial Sequence
  primer
gtaaaacgacggccagtaattctgatctgctgcaggg

SEQ ID NO: 56078 - DNA, 35 bp, Artificial Sequence
  primer
gtaaaacgacggccagtctcggtgctgattggctc

SEQ ID NO: 56079 - DNA, 38 bp, Artificial Sequence
  primer
gtaaaacgacggccagtgaccagtgtagctgggtcagg

SEQ ID NO: 56080 - DNA, 38 bp, Artificial Sequence
  primer
gtaaaacgacggccagtcacagaacacagggtcattgg

SEQ ID NO: 56081 - DNA, 38 bp, Artificial Sequence; identical to SEQ ID NO: 55982
  primer

SEQ ID NO: 56082 - DNA, 21 bp, Artificial Sequence
  primer
actgggcagtgtgaaggtctg

SEQ ID NO: 56083 - DNA, 40 bp, Artificial Sequence
  primer
gtaaaacgacggccagtcccaggtctgatgataggaagac

SEQ ID NO: 56084 - DNA, 21 bp, Artificial Sequence
  primer
atttgttgggagaactggagg

SEQ ID NO: 56085 - DNA, 38 bp, Artificial Sequence
  primer
gtaaaacgacggccagtactacgagaaggtaccacggg

SEQ ID NO: 56086 - DNA, 37 bp, Artificial Sequence
  primer
gtaaaacgacggccagtgggaacagaggaggaactgg

SEQ ID NO: 56087 - DNA, 38 bp, Artificial Sequence
  primer
gtaaaacgacggccagtagagaagccatgactcgttcc

SEQ ID NO: 56088 - DNA, 21 bp, Artificial Sequence
  primer
ccagagactcccagagacacc

SEQ ID NO: 56089 - DNA, 35 bp, Artificial Sequence
  primer
gtaaaacgacggccagtagagggagcgtgtgaccc

SEQ ID NO: 56090 - DNA, 38 bp, Artificial Sequence
  primer
gtaaaacgacggccagtctgaccctgtcctcttggttc

SEQ ID NO: 56091 - DNA, 38 bp, Artificial Sequence
  primer
gtaaaacgacggccagtatgggaggtgttcctgttcac

SEQ ID NO: 56092 - DNA, 21 bp, Artificial Sequence
  primer
ctccttccttcgtctccacag

SEQ ID NO: 56093 - DNA, 38 bp, Artificial Sequence
  primer
gtaaaacgacggccagtctactggaacatgaccaaccg

SEQ ID NO: 56094 - DNA, 38 bp, Artificial Sequence
  primer
gtaaaacgacggccagtttcctcagcctgcttcttctg

SEQ ID NO: 56095 - DNA, 21 bp, Artificial Sequence
  primer
gatactcctctctgggcatgg

SEQ ID NO: 56096 - DNA, 37 bp, Artificial Sequence
  primer
gtaaaacgacggccagtcgaaaggataccgagaagcc

SEQ ID NO: 56097 - DNA, 21 bp, Artificial Sequence
  primer
tatctgagccttgggcttcac

SEQ ID NO: 56098 - DNA, 38 bp, Artificial Sequence
  primer
gtaaaacgacggccagttcaatctgctggactggtgag

SEQ ID NO: 56099 - DNA, 38 bp, Artificial Sequence
  primer
gtaaaacgacggccagtcgcttcactgtgagagactgc

SEQ ID NO: 56100 - DNA, 38 bp, Artificial Sequence
  primer
gtaaaacgacggccagttgtcattgccaccaagaagtc

SEQ ID NO: 56101 - DNA, 23 bp, Artificial Sequence
  primer
tcctcaaccttagatctcccttg

SEQ ID NO: 56102 - DNA, 37 bp, Artificial Sequence
  primer
gtaaaacgacggccagtatgcaccagaggcagacaag

SEQ ID NO: 56103 - DNA, 20 bp, Artificial Sequence
  primer
gtacctctggaagatggccc

SEQ ID NO: 56104 - DNA, 38 bp, Artificial Sequence
  primer
gtaaaacgacggccagtatgcaggaccaagaaatgatg

SEQ ID NO: 56105 - DNA, 21 bp, Artificial Sequence
  primer
agttcccagattctgtcacgg

SEQ ID NO: 56106 - DNA, 21 bp, Artificial Sequence
  primer
gtccctaatcctgggagatgc

SEQ ID NO: 56107 - DNA, 38 bp, Artificial Sequence
  primer
gtaaaacgacggccagtaagttgcagcctggtgtgtag

SEQ ID NO: 56108 - DNA, 38 bp, Artificial Sequence
  primer
gtaaaacgacggccagtggcaccattgttctccattag

SEQ ID NO: 56109 - DNA, 21 bp, Artificial Sequence
  primer
acagaagctgacaagcagcag

SEQ ID NO: 56110 - DNA, 37 bp, Artificial Sequence
  primer
gtaaaacgacggccagtggaagaatgtgcatgccaag

SEQ ID NO: 56111 - DNA, 38 bp, Artificial Sequence
  primer
gtaaaacgacggccagtaatccattacagcggaaggtg

SEQ ID NO: 56112 - DNA, 38 bp, Artificial Sequence
  primer
gtaaaacgacggccagttccatgaagtcagctgtcagg

SEQ ID NO: 56113 - DNA, 38 bp, Artificial Sequence
  primer
gtaaaacgacggccagtgctacttcccaagaacatggc

SEQ ID NO: 56114 - DNA, 38 bp, Artificial Sequence
  primer
gtaaaacgacggccagtgagaacctggacttgaggtgg

SEQ ID NO: 56115 - DNA, 21 bp, Artificial Sequence
  primer
ttccacctcacaccatagtcg

SEQ ID NO: 56116 - DNA, 20 bp, Artificial Sequence
  primer
ctggatggctcattctgctg

SEQ ID NO: 56117 - DNA, 37 bp, Artificial Sequence
  primer
gtaaaacgacggccagtagggcccaacagaaagattg

SEQ ID NO: 56118 - DNA, 21 bp, Artificial Sequence
  primer
gcagagtctgtgtcttccacc

SEQ ID NO: 56119 - DNA, 21 bp, Artificial Sequence
  primer
gagaatccatgggtgaaggtg

SEQ ID NO: 56120 - DNA, 21 bp, Artificial Sequence
  primer
cctggagacttcaaacccttc

SEQ ID NO: 56121 - DNA, 20 bp, Artificial Sequence
  primer
ggcacagagtggtcacatgg

SEQ ID NO: 56122 - DNA, 20 bp, Artificial Sequence
  primer
gagtacctctgagggtgggc

SEQ ID NO: 56123 - DNA, 38 bp, Artificial Sequence
  primer
gtaaaacgacggccagttgtttatccaatggccagacc

SEQ ID NO: 56124 - DNA, 38 bp, Artificial Sequence
  primer
gtaaaacgacggccagtatgggcatgtaacaggtgctc

SEQ ID NO: 56125 - DNA, 38 bp, Artificial Sequence; identical to SEQ ID NO: 56114
  primer

SEQ ID NO: 56126 - DNA, 21 bp, Artificial Sequence
  primer
ggagttgcccagttcttatgg

SEQ ID NO: 56127 - DNA, 20 bp, Artificial Sequence
  primer
tgacagggaacaggaaggtg

SEQ ID NO: 56128 - DNA, 38 bp, Artificial Sequence
  primer
gtaaaacgacggccagtcaaagcatctgagtccttccc

SEQ ID NO: 56129 - DNA, 38 bp, Artificial Sequence
  primer
gtaaaacgacggccagtaagctgcatggtaagtttggg

SEQ ID NO: 56130 - DNA, 38 bp, Artificial Sequence
  primer
gtaaaacgacggccagttcagacgtgcaatgtactggg

SEQ ID NO: 56131 - DNA, 37 bp, Artificial Sequence
  primer
gtaaaacgacggccagtacgtgcacattcacgcatac

SEQ ID NO: 56132 - DNA, 21 bp, Artificial Sequence
  primer
ttccacctcacaccatagtcg

SEQ ID NO: 56133 - DNA, 38 bp, Artificial Sequence
  primer
gtaaaacgacggccagttggaggtttgacattcacctg

SEQ ID NO: 56134 - DNA, 36 bp, Artificial Sequence
  primer
gtaaaacgacggccagttcctggatctcctgggacc

SEQ ID NO: 56135 - DNA, 37 bp, Artificial Sequence
  primer
gtaaaacgacggccagtagccacttcgctcatctgtg

SEQ ID NO: 56136 - DNA, 38 bp, Artificial Sequence
  primer
gtaaaacgacggccagtaatcacacagcaggcagagag

SEQ ID NO: 56137 - DNA, 38 bp, Artificial Sequence
  primer
gtaaaacgacggccagttgcaaggagaccttcaacctc

SEQ ID NO: 56138 - DNA, 38 bp, Artificial Sequence
  primer
gtaaaacgacggccagtccacagtctaggaggtggagg

SEQ ID NO: 56139 - DNA, 38 bp, Artificial Sequence
  primer
gtaaaacgacggccagtcagattggagtgtgctggaac

SEQ ID NO: 56140 - DNA, 38 bp, Artificial Sequence
  primer
gtaaaacgacggccagttttctcctggatgaggtgtcc

SEQ ID NO: 56141 - DNA, 36 bp, Artificial Sequence
  primer
gtaaaacgacggccagtaaggccttgggtatggagg

SEQ ID NO: 56142 - DNA, 20 bp, Artificial Sequence
  primer
gccgagtttgagaccacaag

SEQ ID NO: 56143 - DNA, 38 bp, Artificial Sequence
  primer
gtaaaacgacggccagtaccaccaattgtgggactagg

SEQ ID NO: 56144 - DNA, 38 bp, Artificial Sequence
  primer
gtaaaacgacggccagtattagggcagcaacacagagg

SEQ ID NO: 56145 - DNA, 39 bp, Artificial Sequence
  primer
gtaaaacgacggccagtgggcacagtagagatgagaagc

SEQ ID NO: 56146 - DNA, 38 bp, Artificial Sequence
  primer
gtaaaacgacggccagtggacatggttgcaggagagac

SEQ ID NO: 56147 - DNA, 21 bp, Artificial Sequence
  primer
ccctccgatcctacctacacc

SEQ ID NO: 56148 - DNA, 38 bp, Artificial Sequence
  primer
gtaaaacgacggccagtcaggatgtgagtgaggctacg

SEQ ID NO: 56149 - DNA, 39 bp, Artificial Sequence
  primer
gtaaaacgacggccagttgggttagtacctctgcctctg

SEQ ID NO: 56150 - DNA, 38 bp, Artificial Sequence
  primer
gtaaaacgacggccagtcggtacaaggagagcttcgtc

SEQ ID NO: 56151 - DNA, 36 bp, Artificial Sequence
  primer
gtaaaacgacggccagtgcccagggagagtcagacc

SEQ ID NO: 56152 - DNA, 20 bp, Artificial Sequence
  primer
ccatgcctaccagatgttgg

SEQ ID NO: 56153 - DNA, 25 bp, Artificial Sequence
  primer
tccctctcactttataggattcacc

SEQ ID NO: 56154 - DNA, 38 bp, Artificial Sequence
  primer
gtaaaacgacggccagtgagctgggaagaacacaacag

SEQ ID NO: 56155 - DNA, 21 bp, Artificial Sequence
  primer
atgggatctcgatatgttgcc

SEQ ID NO: 56156 - DNA, 35 bp, Artificial Sequence
  primer
gtaaaacgacggccagtctgctggtgcctccattg

SEQ ID NO: 56157 - DNA, 20 bp, Artificial Sequence
  primer
ggtgatagagcacgactccg

SEQ ID NO: 56158 - DNA, 37 bp, Artificial Sequence
  primer
gtaaaacgacggccagtagttgcaaggcaggctagtg

SEQ ID NO: 56159 - DNA, 38 bp, Artificial Sequence
  primer
gtaaaacgacggccagtaaacccactgtttgttccctg

SEQ ID NO: 56160 - DNA, 20 bp, Artificial Sequence
  primer
ctgggtgctacaggacaagc

SEQ ID NO: 56161 - DNA, 36 bp, Artificial Sequence
  primer
gtaaaacgacggccagtagctatgagccgagcctcc

SEQ ID NO: 56162 - DNA, 21 bp, Artificial Sequence
  primer
gaccctaatgaggctgtgagg

SEQ ID NO: 56163 - DNA, 21 bp, Artificial Sequence
  primer
tgagctatgatggcaccactg

SEQ ID NO: 56164 - DNA, 22 bp, Artificial Sequence
  primer
gagttggagagtaggaggcttg

SEQ ID NO: 56165 - DNA, 37 bp, Artificial Sequence
  primer
gtaaaacgacggccagttccaagtcaccatttcctgg

SEQ ID NO: 56166 - DNA, 21 bp, Artificial Sequence
  primer
agtgtccgttcattggtgttg

SEQ ID NO: 56167 - DNA, 20 bp, Artificial Sequence
  primer
gaggctaggaccgtctcagg

SEQ ID NO: 56168 - DNA, 21 bp, Artificial Sequence
  primer
gtgtctcctcaggaagcaagc

SEQ ID NO: 56169 - DNA, 38 bp, Artificial Sequence
  primer
gtaaaacgacggccagttcaataaagggaaaggcatgg

SEQ ID NO: 56170 - DNA, 21 bp, Artificial Sequence
  primer
ttctgaacctgaatcccttgg

SEQ ID NO: 56171 - DNA, 21 bp, Artificial Sequence
  primer
ggttgcagacacactttgtgg

SEQ ID NO: 56172 - DNA, 20 bp, Artificial Sequence
  primer
gcttctacgtggccttccag

SEQ ID NO: 56173 - DNA, 38 bp, Artificial Sequence
  primer
gtaaaacgacggccagtatacctgcctgctgtgtgttg

SEQ ID NO: 56174 - DNA, 37 bp, Artificial Sequence
  primer
gtaaaacgacggccagtccttctctccctgacccatc

SEQ ID NO: 56175 - DNA, 21 bp, Artificial Sequence
  primer
gacctgctcttcaatgtcgtg

SEQ ID NO: 56176 - DNA, 38 bp, Artificial Sequence
  primer
gtaaaacgacggccagttccctactcctgatctccagc

SEQ ID NO: 56177 - DNA, 37 bp, Artificial Sequence
  primer
gtaaaacgacggccagtctgagagccctgtcaaccag

SEQ ID NO: 56178 - DNA, 20 bp, Artificial Sequence
  primer
catgttgtgtgtgcctgtgg

SEQ ID NO: 56179 - DNA, 38 bp, Artificial Sequence
  primer
gtaaaacgacggccagtagcagtctggagggtgacaag

SEQ ID NO: 56180 - DNA, 37 bp, Artificial Sequence
  primer
gtaaaacgacggccagtagctccttggcacaaccttc

SEQ ID NO: 56181 - DNA, 38 bp, Artificial Sequence
  primer
gtaaaacgacggccagtcagagtcccatccaaacacag

SEQ ID NO: 56182 - DNA, 37 bp, Artificial Sequence
  primer
gtaaaacgacggccagtatggtctccgtccttccttc

SEQ ID NO: 56183 - DNA, 40 bp, Artificial Sequence
  primer
gtaaaacgacggccagttgctccataaacgtgactattgc

SEQ ID NO: 56184 - DNA, 38 bp, Artificial Sequence
  primer
gtaaaacgacggccagtccaccctcttacccaacaaag

SEQ ID NO: 56185 - DNA, 38 bp, Artificial Sequence
  primer
gtaaaacgacggccagtgaaagccagggagggtagatg

SEQ ID NO: 56186 - DNA, 38 bp, Artificial Sequence
  primer
gtaaaacgacggccagtagagtaagcagggagtggtgg

SEQ ID NO: 56187 - DNA, 37 bp, Artificial Sequence
  primer
gtaaaacgacggccagtgagtctctgggctgtcaggg

SEQ ID NO: 56188 - DNA, 38 bp, Artificial Sequence
  primer
gtaaaacgacggccagtctcccagagggcagtatcttg

SEQ ID NO: 56189 - DNA, 21 bp, Artificial Sequence
  primer
acctggagcacagtgtgagtg

SEQ ID NO: 56190 - DNA, 38 bp, Artificial Sequence
  primer
gtaaaacgacggccagtggattccttcttgcctctgtg

SEQ ID NO: 56191 - DNA, 20 bp, Artificial Sequence
  primer
tccgccatctctcctctctc

SEQ ID NO: 56192 - DNA, 20 bp, Artificial Sequence
  primer
agtgccacacatcacacctg

SEQ ID NO: 56193 - DNA, 21 bp, Artificial Sequence
  primer
acacgttgcatgaggtctgag

SEQ ID NO: 56194 - DNA, 35 bp, Artificial Sequence
  primer
gtaaaacgacggccagttgggccagctgatctcac

SEQ ID NO: 56195 - DNA, 20 bp, Artificial Sequence
  primer
ccagagtccagccttaaccc

SEQ ID NO: 56196 - DNA, 39 bp, Artificial Sequence
  primer
gtaaaacgacggccagtaacagtgtctgtttccatgtgc

SEQ ID NO: 56197 - DNA, 38 bp, Artificial Sequence
  primer
gtaaaacgacggccagtttccagtgggtatgtgtccag

SEQ ID NO: 56198 - DNA, 21 bp, Artificial Sequence
  primer
tgtcagaggtgttcatgggtc

SEQ ID NO: 56199 - DNA, 21 bp, Artificial Sequence
  primer
gaagtggctgaagccagtagg

SEQ ID NO: 56200 - DNA, 21 bp, Artificial Sequence
  primer
caggagggagaatggagtctg

SEQ ID NO: 56201 - DNA, 38 bp, Artificial Sequence
  primer
gtaaaacgacggccagtaatccagcaacggactgaaac

SEQ ID NO: 56202 - DNA, 37 bp, Artificial Sequence
  primer
gtaaaacgacggccagtgatggagggaagcaaagagg

SEQ ID NO: 56203 - DNA, 21 bp, Artificial Sequence
  primer
aagcttgacattggtcttggc

SEQ ID NO: 56204 - DNA, 21 bp, Artificial Sequence
  primer
agttcagcccatcataaaggc

SEQ ID NO: 56205 - DNA, 38 bp, Artificial Sequence
  primer
gtaaaacgacggccagtgctggctatttgtgttgaggg

SEQ ID NO: 56206 - DNA, 38 bp, Artificial Sequence
  primer
gtaaaacgacggccagtctgcaaagtcctttctggctc

SEQ ID NO: 56207 - DNA, 38 bp, Artificial Sequence
  primer
gtaaaacgacggccagtcatctataaacctgcctcccg

SEQ ID NO: 56208 - DNA, 38 bp, Artificial Sequence
  primer
gtaaaacgacggccagtagtctgcgtggtactcagagg

SEQ ID NO: 56209 - DNA, 38 bp, Artificial Sequence
  primer
gtaaaacgacggccagtcaagttcagatggtctgcgag

SEQ ID NO: 56210 - DNA, 21 bp, Artificial Sequence
  primer
cagtggagtcctgtgtccttg

SEQ ID NO: 56211 - DNA, 21 bp, Artificial Sequence
  primer
gttcggcagatacaacgtcag

SEQ ID NO: 56212 - DNA, 21 bp, Artificial Sequence
  primer
gcaaccgtgactgtaccttcc

SEQ ID NO: 56213 - DNA, 39 bp, Artificial Sequence
  primer
gtaaaacgacggccagtggcttagccactcatgtcactc

SEQ ID NO: 56214 - DNA, 41 bp, Artificial Sequence
  primer
gtaaaacgacggccagttgctagtctgttacaatttggtgc

SEQ ID NO: 56215 - DNA, 21 bp, Artificial Sequence
  primer
cgataccagtgtgagaatggg

SEQ ID NO: 56216 - DNA, 21 bp, Artificial Sequence
  primer
gaaagctgctgtctagggacc

SEQ ID NO: 56217 - DNA, 38 bp, Artificial Sequence
  primer
gtaaaacgacggccagtggaatttgaagtcaggcttgg

SEQ ID NO: 56218 - DNA, 39 bp, Artificial Sequence
  primer
gtaaaacgacggccagtgcatgtcttgcatgtcactttc

SEQ ID NO: 56219 - DNA, 21 bp, Artificial Sequence
  primer
ccgatttcctttctgcagttg

SEQ ID NO: 56220 - DNA, 38 bp, Artificial Sequence
  primer
gtaaaacgacggccagtctgtggctccatgtcctcttc

SEQ ID NO: 56221 - DNA, 19 bp, Artificial Sequence
  primer
ttgattgctttgcactggc

SEQ ID NO: 56222 - DNA, 39 bp, Artificial Sequence
  primer
gtaaaacgacggccagtaactatcccaaatcccagaagg

SEQ ID NO: 56223 - DNA, 35 bp, Artificial Sequence
  primer
gtaaaacgacggccagtatccatccgcctcggact

SEQ ID NO: 56224 - DNA, 38 bp, Artificial Sequence
  primer
gtaaaacgacggccagttctaccacaccactgccaatc

SEQ ID NO: 56225 - DNA, 19 bp, Artificial Sequence
  primer
actcgaacccgggaggtag

SEQ ID NO: 56226 - DNA, 38 bp, Artificial Sequence
  primer
gtaaaacgacggccagttgtctgaaacagcagtggacc

SEQ ID NO: 56227 - DNA, 21 bp, Artificial Sequence
  primer
ctacggaacagcagcactgag

SEQ ID NO: 56228 - DNA, 21 bp, Artificial Sequence
  primer
tgggcacctgtgaatgtgtag

SEQ ID NO: 56229 - DNA, 37 bp, Artificial Sequence
  primer
gtaaaacgacggccagtagctatgatcgtgccactgc

SEQ ID NO: 56230 - DNA, 21 bp, Artificial Sequence
  primer
atttgacccgaggcttcttag

SEQ ID NO: 56231 - DNA, 21 bp, Artificial Sequence
  primer
tgttctggtgcccgttatttc

SEQ ID NO: 56232 - DNA, 37 bp, Artificial Sequence
  primer
gtaaaacgacggccagtcctggtgttggaaggatctg

SEQ ID NO: 56233 - DNA, 21 bp, Artificial Sequence
  primer
ttgactgaccagctaagggag

SEQ ID NO: 56234 - DNA, 38 bp, Artificial Sequence
  primer
gtaaaacgacggccagtcaacccgtgctttgtgttatg

SEQ ID NO: 56235 - DNA, 21 bp, Artificial Sequence
  primer
accacacaaggatctatgggc

SEQ ID NO: 56236 - DNA, 21 bp, Artificial Sequence
  primer
cctcctgaagacgaaatcagc

SEQ ID NO: 56237 - DNA, 38 bp, Artificial Sequence
  primer
gtaaaacgacggccagtttcactgaaggaaagaagccg

SEQ ID NO: 56238 - DNA, 25 bp, Artificial Sequence
  primer
agctctttacaaattcctaccgttc

SEQ ID NO: 56239 - DNA, 38 bp, Artificial Sequence
  primer
gtaaaacgacggccagtttcctgtgccagacttaaagg

SEQ ID NO: 56240 - DNA, 38 bp, Artificial Sequence
  primer
gtaaaacgacggccagtctgtgatttcaggctgtgctg

SEQ ID NO: 56241 - DNA, 37 bp, Artificial Sequence
  primer
gtaaaacgacggccagttctcaggctcctcctcttcc

SEQ ID NO: 56242 - DNA, 21 bp, Artificial Sequence
  primer
agcaagatggaagtcgacgag

SEQ ID NO: 56243 - DNA, 39 bp, Artificial Sequence
  primer
gtaaaacgacggccagttgtataccagtgcatggaggtg

SEQ ID NO: 56244 - DNA, 38 bp, Artificial Sequence
  primer
gtaaaacgacggccagtcctattctcttgccttggacg

SEQ ID NO: 56245 - DNA, 38 bp, Artificial Sequence
  primer
gtaaaacgacggccagtaccacgacccatactttgagg

SEQ ID NO: 56246 - DNA, 38 bp, Artificial Sequence
  primer
gtaaaacgacggccagttgtgactttggcttcttggtg

SEQ ID NO: 56247 - DNA, 26 bp, Artificial Sequence
  primer
tttggaatgaatacagaatcaaagac

SEQ ID NO: 56248 - DNA, 21 bp, Artificial Sequence
  primer
atgtcccatttgtgtttccag

SEQ ID NO: 56249 - DNA, 35 bp, Artificial Sequence
  primer
gtaaaacgacggccagtgtcgcaggcagtctctgg

SEQ ID NO: 56250 - DNA, 21 bp, Artificial Sequence
  primer
cttggcctgcagaggttgtag

SEQ ID NO: 56251 - DNA, 37 bp, Artificial Sequence
  primer
gtaaaacgacggccagtatcccatcgaatccttcagc

SEQ ID NO: 56252 - DNA, 18 bp, Artificial Sequence
  primer
ccagcttggtccctgtcc

SEQ ID NO: 56253 - DNA, 38 bp, Artificial Sequence
  primer
gtaaaacgacggccagtacagatttggaggcaatggtc

SEQ ID NO: 56254 - DNA, 38 bp, Artificial Sequence
  primer
gtaaaacgacggccagtcaatggcacaacaggtactgg

SEQ ID NO: 56255 - DNA, 21 bp, Artificial Sequence
  primer
atgatggcctatactgctccc

SEQ ID NO: 56256 - DNA, 37 bp, Artificial Sequence
  primer
gtaaaacgacggccagtcacatgctggatggacacag

SEQ ID NO: 56257 - DNA, 21 bp, Artificial Sequence
  primer
ctctaggtcatggcttccagc

SEQ ID NO: 56258 - DNA, 21 bp, Artificial Sequence
  primer
attgccgacctgacctacaac

SEQ ID NO: 56259 - DNA, 21 bp, Artificial Sequence
  primer
tcagggtcagaatgtggtcag

SEQ ID NO: 56260 - DNA, 38 bp, Artificial Sequence
  primer
gtaaaacgacggccagtagatgggaatggaatgtggtc

SEQ ID NO: 56261 - DNA, 39 bp, Artificial Sequence
  primer
gtaaaacgacggccagtttctgggtacacacacatttgg

SEQ ID NO: 56262 - DNA, 21 bp, Artificial Sequence
  primer
agggcttcactggaggaagag

SEQ ID NO: 56263 - DNA, 21 bp, Artificial Sequence
  primer
gcttccttaccagggttgttg

SEQ ID NO: 56264 - DNA, 39 bp, Artificial Sequence
  primer
gtaaaacgacggccagtaattctcctccatgaggtaggg

SEQ ID NO: 56265 - DNA, 38 bp, Artificial Sequence
  primer
gtaaaacgacggccagtcatgactggctgtgtgtcgtc

SEQ ID NO: 56266 - DNA, 36 bp, Artificial Sequence
  primer
gtaaaacgacggccagtcatgcagtccctgacctgg

SEQ ID NO: 56267 - DNA, 38 bp, Artificial Sequence
  primer
gtaaaacgacggccagtccaggcctcatttagttggtc

SEQ ID NO: 56268 - DNA, 20 bp, Artificial Sequence
  primer
tcgctgacctgaccttcaac

SEQ ID NO: 56269 - DNA, 37 bp, Artificial Sequence
  primer
gtaaaacgacggccagttcttgagcctcagcttcctg

SEQ ID NO: 56270 - DNA, 21 bp, Artificial Sequence
  primer
caggcctatactgcccttctg

SEQ ID NO: 56271 - DNA, 38 bp, Artificial Sequence
  primer
gtaaaacgacggccagtctgcactctctcgactccagc

SEQ ID NO: 56272 - DNA, 38 bp, Artificial Sequence
  primer
gtaaaacgacggccagtgaatgaactggcattagcctg

SEQ ID NO: 56273 - DNA, 37 bp, Artificial Sequence
  primer
gtaaaacgacggccagtaacttgggctgggtaactgg

SEQ ID NO: 56274 - DNA, 21 bp, Artificial Sequence
  primer
aggacagcttctctggaaagg

SEQ ID NO: 56275 - DNA, 37 bp, Artificial Sequence
  primer
gtaaaacgacggccagtagcagcctctgtcctcttcc

SEQ ID NO: 56276 - DNA, 38 bp, Artificial Sequence
  primer
gtaaaacgacggccagtcttcttcccaacttccacgac

SEQ ID NO: 56277 - DNA, 37 bp, Artificial Sequence
  primer
gtaaaacgacggccagtaaaggaaggagctgactggg

SEQ ID NO: 56278 - DNA, 26 bp, Artificial Sequence
  primer
ggacacccagtagtgtcattattaag

SEQ ID NO: 56279 - DNA, 23 bp, Artificial Sequence
  primer
caccaaattagaacaagtctgcc

SEQ ID NO: 56280 - DNA, 20 bp, Artificial Sequence
  primer
acctcaccaccagcatgaag

SEQ ID NO: 56281 - DNA, 24 bp, Artificial Sequence
  primer
caaagttaaatagcacaacttgcc

SEQ ID NO: 56282 - DNA, 43 bp, Artificial Sequence
  primer
gtaaaacgacggccagtaaagcctgagaaataaggacttgtag

SEQ ID NO: 56283 - DNA, 38 bp, Artificial Sequence
  primer
gtaaaacgacggccagtagctcaaatcactgagggacc

SEQ ID NO: 56284 - DNA, 22 bp, Artificial Sequence
  primer
gcctctccataaggattcaagg

SEQ ID NO: 56285 - DNA, 35 bp, Artificial Sequence
  primer
gtaaaacgacggccagttttgtgaggcatctgggc

SEQ ID NO: 56286 - DNA, 38 bp, Artificial Sequence
  primer
gtaaaacgacggccagtacctgcagatgttaatctggg

SEQ ID NO: 56287 - DNA, 38 bp, Artificial Sequence
  primer
gtaaaacgacggccagttgggaagctaatgattcaggg

SEQ ID NO: 56288 - DNA, 21 bp, Artificial Sequence
  primer
gcacacatgcagataacagcc

SEQ ID NO: 56289 - DNA, 38 bp, Artificial Sequence
  primer
gtaaaacgacggccagtggagaagtggatgctggtagc

SEQ ID NO: 56290 - DNA, 38 bp, Artificial Sequence
  primer
gtaaaacgacggccagtgttgggaagctagacactgcc

SEQ ID NO: 56291 - DNA, 38 bp, Artificial Sequence
  primer
gtaaaacgacggccagtttctgtttgctcagcttggtg

SEQ ID NO: 56292 - DNA, 38 bp, Artificial Sequence
  primer
gtaaaacgacggccagtgggagaagggtcttgctaagg

SEQ ID NO: 56293 - DNA, 38 bp, Artificial Sequence
  primer
gtaaaacgacggccagtccgccaggcacttatctctac

SEQ ID NO: 56294 - DNA, 21 bp, Artificial Sequence
  primer
agtaaggcgagaaacttgccc

SEQ ID NO: 56295 - DNA, 21 bp, Artificial Sequence
  primer
gacgaaggaacaccttgtcac

SEQ ID NO: 56296 - DNA, 38 bp, Artificial Sequence
  primer
gtaaaacgacggccagtaggtaagtgctctgggaatgg

SEQ ID NO: 56297 - DNA, 20 bp, Artificial Sequence
  primer
ctgattggctcagttccacc

SEQ ID NO: 56298 - DNA, 37 bp, Artificial Sequence
  primer
gtaaaacgacggccagtgtatggctgagccgagcttc

SEQ ID NO: 56299 - DNA, 39 bp, Artificial Sequence
  primer
gtaaaacgacggccagtggaccaagtgtatctgtgcctc

SEQ ID NO: 56300 - DNA, 38 bp, Artificial Sequence
  primer
gtaaaacgacggccagtacccacaagggtaacttccag

SEQ ID NO: 56301 - DNA, 20 bp, Artificial Sequence
  primer
ctgcttccctggaagtcctc

SEQ ID NO: 56302 - DNA, 38 bp, Artificial Sequence
  primer
gtaaaacgacggccagtctggtggcagtgtggacatag

SEQ ID NO: 56303 - DNA, 21 bp, Artificial Sequence
  primer
ctacgccgtctgtttctaggg

SEQ ID NO: 56304 - DNA, 21 bp, Artificial Sequence
  primer
tctccagccgtctcttagacc

SEQ ID NO: 56305 - DNA, 38 bp, Artificial Sequence
  primer
gtaaaacgacggccagtaactgcctgctgaaggtaagg

SEQ ID NO: 56306 - DNA, 21 bp, Artificial Sequence
  primer
acacaggaagtaccagggtgg

SEQ ID NO: 56307 - DNA, 38 bp, Artificial Sequence
  primer
gtaaaacgacggccagttagcacaggttggattcgttg

SEQ ID NO: 56308 - DNA, 39 bp, Artificial Sequence
  primer
gtaaaacgacggccagtggaacaagagtgctggtttctg

SEQ ID NO: 56309 - DNA, 21 bp, Artificial Sequence
  primer
ggctgagattcccagatcaac

SEQ ID NO: 56310 - DNA, 37 bp, Artificial Sequence
  primer
gtaaaacgacggccagtcacaccttgcctcctccttc

SEQ ID NO: 56311 - DNA, 19 bp, Artificial Sequence
  primer
ggctctgctagaggcccag

SEQ ID NO: 56312 - DNA, 20 bp, Artificial Sequence
  primer
agaagctggccctctttcag

SEQ ID NO: 56313 - DNA, 18 bp, Artificial Sequence
  primer
gggagacatggcacaagc

SEQ ID NO: 56314 - DNA, 37 bp, Artificial Sequence
  primer
gtaaaacgacggccagtagctgctggaaaggtgtgtg

SEQ ID NO: 56315 - DNA, 35 bp, Artificial Sequence
  primer
gtaaaacgacggccagtccgcagtggacgtgagtg

SEQ ID NO: 56316 - DNA, 38 bp, Artificial Sequence
  primer
gtaaaacgacggccagtgtgggtagacgaggcagtcag

SEQ ID NO: 56317 - DNA, 35 bp, Artificial Sequence
  primer
gtaaaacgacggccagtggtctgtccagcacgcag

SEQ ID NO: 56318 - DNA, 19 bp, Artificial Sequence
  primer
cttcctgccactctcaggg

SEQ ID NO: 56319 - DNA, 37 bp, Artificial Sequence
  primer
gtaaaacgacggccagtctgggagctgctcttctctg

SEQ ID NO: 56320 - DNA, 36 bp, Artificial Sequence
  primer
gtaaaacgacggccagttttctgggctgagggacac

SEQ ID NO: 56321 - DNA, 38 bp, Artificial Sequence
  primer
gtaaaacgacggccagtaacgcctgagcatctatgagg

SEQ ID NO: 56322 - DNA, 21 bp, Artificial Sequence
  primer
tgtcactggctacactgaccc

SEQ ID NO: 56323 - DNA, 38 bp, Artificial Sequence
  primer
gtaaaacgacggccagttgctgaacttgatcctgttgg

SEQ ID NO: 56324 - DNA, 20 bp, Artificial Sequence
  primer
ccggtatcattgaccagcag

SEQ ID NO: 56325 - DNA, 19 bp, Artificial Sequence
  primer
gcctctaccaggccatgag

SEQ ID NO: 56326 - DNA, 38 bp, Artificial Sequence
  primer
gtaaaacgacggccagtcttctctgggaagcaggtgtc

SEQ ID NO: 56327 - DNA, 18 bp, Artificial Sequence
  primer
agcaggtccagaggagcc

SEQ ID NO: 56328 - DNA, 38 bp, Artificial Sequence
  primer
gtaaaacgacggccagtcagaggtgggtacaggagacc

SEQ ID NO: 56329 - DNA, 18 bp, Artificial Sequence
  primer
gtgagggatggcctcctg

SEQ ID NO: 56330 - DNA, 38 bp, Artificial Sequence
  primer
gtaaaacgacggccagtgatccctactctagggcctcc

SEQ ID NO: 56331 - DNA, 37 bp, Artificial Sequence
  primer
gtaaaacgacggccagtgacctaccagcagctcaggg

SEQ ID NO: 56332 - DNA, 21 bp, Artificial Sequence
  primer
tgtagcgtgtcactctgggac

SEQ ID NO: 56333 - DNA, 21 bp, Artificial Sequence
  primer
tgttcgggaaagaaacctacg

SEQ ID NO: 56334 - DNA, 19 bp, Artificial Sequence
  primer
ctaccgctgcggctacttc

SEQ ID NO: 56335 - DNA, 21 bp, Artificial Sequence
  primer
gtgtacatcaatgaggccacg

SEQ ID NO: 56336 - DNA, 38 bp, Artificial Sequence
  primer
gtaaaacgacggccagtgacctgttcaactccagggtc

SEQ ID NO: 56337 - DNA, 20 bp, Artificial Sequence
  primer
aggctcctgaaggctgaaag

SEQ ID NO: 56338 - DNA, 21 bp, Artificial Sequence
  primer
atgaggaaacggtttgtggac

SEQ ID NO: 56339 - DNA, 18 bp, Artificial Sequence
  primer
aggagatgaaccgcgtcc

SEQ ID NO: 56340 - DNA, 21 bp, Artificial Sequence
  primer
gttgcatcttcttcctttcgc

SEQ ID NO: 56341 - DNA, 42 bp, Artificial Sequence
  primer
gtaaaacgacggccagtcatcctgattgctttatgattcaag

SEQ ID NO: 56342 - DNA, 38 bp, Artificial Sequence
  primer
gtaaaacgacggccagttgggcaacaagagtgaaactg

SEQ ID NO: 56343 - DNA, 42 bp, Artificial Sequence
  primer
gtaaaacgacggccagttttaggcaatcagaatttagtccac

SEQ ID NO: 56344 - DNA, 39 bp, Artificial Sequence
  primer
gtaaaacgacggccagtcccatggacacagagagctaac

SEQ ID NO: 56345 - DNA, 42 bp, Artificial Sequence
  primer
gtaaaacgacggccagtcttgggtaccaattagaaggacttt

SEQ ID NO: 56346 - DNA, 40 bp, Artificial Sequence
  primer
gtaaaacgacggccagtttgcttaaatgcagtatcaaggg

SEQ ID NO: 56347 - DNA, 37 bp, Artificial Sequence
  primer
gtaaaacgacggccagtaatgacgcatttgctcttgg

SEQ ID NO: 56348 - DNA, 23 bp, Artificial Sequence
  primer
tgactcattgttctcaaaggctg

SEQ ID NO: 56349 - DNA, 38 bp, Artificial Sequence
  primer
gtaaaacgacggccagtctgttccttgaatttgggctc

SEQ ID NO: 56350 - DNA, 21 bp, Artificial Sequence
  primer
tttggagaaaggcagctgaag

SEQ ID NO: 56351 - DNA, 43 bp, Artificial Sequence
  primer
gtaaaacgacggccagtcaagaaagccagttagtattcctgtg

SEQ ID NO: 56352 - DNA, 25 bp, Artificial Sequence
  primer
tgaatgtataaatttgcatactggg

SEQ ID NO: 56353 - DNA, 38 bp, Artificial Sequence
  primer
gtaaaacgacggccagttctggcatgttagaagctcaa

SEQ ID NO: 56354 - DNA, 39 bp, Artificial Sequence
  primer
gtaaaacgacggccagtcacttcaccgtttcattgtgtg

SEQ ID NO: 56355 - DNA, 19 bp, Artificial Sequence
  primer
acttgaacgcaggaggtgg

SEQ ID NO: 56356 - DNA, 41 bp, Artificial Sequence
  primer
gtaaaacgacggccagtggtacctctatctttgtttacgcc

SEQ ID NO: 56357 - DNA, 22 bp, Artificial Sequence
  primer
tctcttggtagacctctgctcc

SEQ ID NO: 56358 - DNA, 24 bp, Artificial Sequence
  primer
ttaacttatgggaatgatttgctg

SEQ ID NO: 56359 - DNA, 42 bp, Artificial Sequence
  primer
gtaaaacgacggccagtaagaaagctttgagcattgtatttg

SEQ ID NO: 56360 - DNA, 21 bp, Artificial Sequence
  primer
gagacaggatcacaccattgc

SEQ ID NO: 56361 - DNA, 44 bp, Artificial Sequence
  primer
gtaaaacgacggccagttggttatcatactcttgccacttatac

SEQ ID NO: 56362 - DNA, 21 bp, Artificial Sequence
  primer
cacagtgaacagcagcgacta

SEQ ID NO: 56363 - DNA, 39 bp, Artificial Sequence
  primer
gtaaaacgacggccagtgctggtttagctgttacatccc

SEQ ID NO: 56364 - DNA, 20 bp, Artificial Sequence
  primer
cagagcaagaccctgtctcc

SEQ ID NO: 56365 - DNA, 40 bp, Artificial Sequence
  primer
gtaaaacgacggccagtaagttcacactggctgctttaac

SEQ ID NO: 56366 - DNA, 38 bp, Artificial Sequence
  primer
gtaaaacgacggccagttagccactggtaggtttcgac

SEQ ID NO: 56367 - DNA, 44 bp, Artificial Sequence
  primer
gtaaaacgacggccagttttatggtagctaaagccatgaattac

SEQ ID NO: 56368 - DNA, 41 bp, Artificial Sequence
  primer
gtaaaacgacggccagtgctcacaatagtgcaatgataagg

SEQ ID NO: 56369 - DNA, 21 bp, Artificial Sequence
  primer
tgggagatttgagggtactgc

SEQ ID NO: 56370 - DNA, 38 bp, Artificial Sequence
  primer
gtaaaacgacggccagtaccactgccaggtaaacctaa

SEQ ID NO: 56371 - DNA, 36 bp, Artificial Sequence
  primer
gtaaaacgacggccagtgggagggaagttgtggaag

SEQ ID NO: 56372 - DNA, 38 bp, Artificial Sequence
  primer
gtaaaacgacggccagttattctctgtctcacgctccc

SEQ ID NO: 56373 - DNA, 37 bp, Artificial Sequence
  primer
gtaaaacgacggccagtaaagccaggtcccaaatcac

SEQ ID NO: 56374 - DNA, 39 bp, Artificial Sequence
  primer
gtaaaacgacggccagtattaccagagagcctgaggttg

SEQ ID NO: 56375 - DNA, 36 bp, Artificial Sequence
  primer
gtaaaacgacggccagtcactgtgcctggccctaag

SEQ ID NO: 56376 - DNA, 38 bp, Artificial Sequence
  primer
gtaaaacgacggccagtgtcctgtgtgcattgagatcc

SEQ ID NO: 56377 - DNA, 20 bp, Artificial Sequence
  primer
aagaatgggcaacaccagac

SEQ ID NO: 56378 - DNA, 36 bp, Artificial Sequence
  primer
gtaaaacgacggccagtgaggccatatgggcatgag

SEQ ID NO: 56379 - DNA, 21 bp, Artificial Sequence
  primer
tgcctttgacattgcaagaac

SEQ ID NO: 56380 - DNA, 26 bp, Artificial Sequence
  primer
tgatggatattgtaatggattgaaag

SEQ ID NO: 56381 - DNA, 21 bp, Artificial Sequence
  primer
acctgcaagttggtgtgactg

SEQ ID NO: 56382 - DNA, 39 bp, Artificial Sequence
  primer
gtaaaacgacggccagtttcggagaatttaagggaaatg

SEQ ID NO: 56383 - DNA, 39 bp, Artificial Sequence
  primer
gtaaaacgacggccagtaaagcgattcaggattaggagg

SEQ ID NO: 56384 - DNA, 22 bp, Artificial Sequence
  primer
catgtccaaggacagatttgag

SEQ ID NO: 56385 - DNA, 21 bp, Artificial Sequence
  primer
ttgagcccaggagtttgaatc

SEQ ID NO: 56386 - DNA, 20 bp, Artificial Sequence
  primer
acctagcccgtcaggaagtg

SEQ ID NO: 56387 - DNA, 22 bp, Artificial Sequence
  primer
tgatgcttgatgacaccatttc

SEQ ID NO: 56388 - DNA, 40 bp, Artificial Sequence
  primer
gtaaaacgacggccagttttcaaagcatgtgtatgacctg

SEQ ID NO: 56389 - DNA, 38 bp, Artificial Sequence
  primer
gtaaaacgacggccagtaccctcccagtactcttgtgg

SEQ ID NO: 56390 - DNA, 18 bp, Artificial Sequence
  primer
ggtgggaatgcagacgtg

SEQ ID NO: 56391 - DNA, 44 bp, Artificial Sequence
  primer
gtaaaacgacggccagtgttagtaagattgcagatcactatggg

SEQ ID NO: 56392 - DNA, 20 bp, Artificial Sequence
  primer
cgtaccactgctcttgaggc

SEQ ID NO: 56393 - DNA, 37 bp, Artificial Sequence
  primer
gtaaaacgacggccagtattggaccctgaatgcaaag

SEQ ID NO: 56394 - DNA, 23 bp, Artificial Sequence
  primer
tgaggacaaattgttggtgtagc

SEQ ID NO: 56395 - DNA, 25 bp, Artificial Sequence
  primer
aaccagactatttccagagtccttc

SEQ ID NO: 56396 - DNA, 21 bp, Artificial Sequence
  primer
gaacaacgttggaaggaggag

SEQ ID NO: 56397 - DNA, 21 bp, Artificial Sequence
  primer
tgaatggaaattgacactggg

SEQ ID NO: 56398 - DNA, 38 bp, Artificial Sequence
  primer
gtaaaacgacggccagttgtcagcggatagttagcgtg

SEQ ID NO: 56399 - DNA, 38 bp, Artificial Sequence
  primer
gtaaaacgacggccagttgaattggcttcttcatctgc

SEQ ID NO: 56400 - DNA, 39 bp, Artificial Sequence
  primer
gtaaaacgacggccagtcctgaagcctgctgttagagac

SEQ ID NO: 56401 - DNA, 21 bp, Artificial Sequence
  primer
aaggatttgtttggacatccg

SEQ ID NO: 56402 - DNA, 37 bp, Artificial Sequence
  primer
gtaaaacgacggccagtcacttggctttcggtcagag

SEQ ID NO: 56403 - DNA, 26 bp, Artificial Sequence
  primer
ctggtagttgacagtacttcacaggt

SEQ ID NO: 56404 - DNA, 35 bp, Artificial Sequence
  primer
gtaaaacgacggccagtctgccctctgccttctcc

SEQ ID NO: 56405 - DNA, 21 bp, Artificial Sequence
  primer
tgcatggaagtgctttaatcg

SEQ ID NO: 56406 - DNA, 38 bp, Artificial Sequence
  primer
gtaaaacgacggccagtgtgaagtagggaaggagctgg

SEQ ID NO: 56407 - DNA, 20 bp, Artificial Sequence
  primer
cttggctgcccaggtatttc

SEQ ID NO: 56408 - DNA, 21 bp, Artificial Sequence
  primer
gacttctgccagcacacagag

SEQ ID NO: 56409 - DNA, 19 bp, Artificial Sequence
  primer
acagtgggtggtttcggag

SEQ ID NO: 56410 - DNA, 38 bp, Artificial Sequence
  primer
gtaaaacgacggccagtgtccctggcttagcttgtttc

SEQ ID NO: 56411 - DNA, 21 bp, Artificial Sequence
  primer
aggtcaggagctcaaggctac

SEQ ID NO: 56412 - DNA, 41 bp, Artificial Sequence
  primer
gtaaaacgacggccagtcatgctactcaaagtggaaatgtg

SEQ ID NO: 56413 - DNA, 22 bp, Artificial Sequence
  primer
tttgagggcaggtggatagtag

SEQ ID NO: 56414 - DNA, 39 bp, Artificial Sequence
  primer
gtaaaacgacggccagttcatgtaaacggcatcattctg

SEQ ID NO: 56415 - DNA, 21 bp, Artificial Sequence
  primer
atctgcaggagggttgatctg

SEQ ID NO: 56416 - DNA, 37 bp, Artificial Sequence
  primer
gtaaaacgacggccagtagccttcctgagtctcctgg

SEQ ID NO: 56417 - DNA, 21 bp, Artificial Sequence
  primer
tctgttcagtggacatccgtc

SEQ ID NO: 56418 - DNA, 22 bp, Artificial Sequence
  primer
tccagcctgttagccaagttac

SEQ ID NO: 56419 - DNA, 23 bp, Artificial Sequence
  primer
actataattcctggcagcaacac

SEQ ID NO: 56420 - DNA, 39 bp, Artificial Sequence
  primer
gtaaaacgacggccagtcgtggtgattatagtgcattgg

SEQ ID NO: 56421 - DNA, 43 bp, Artificial Sequence
  primer
gtaaaacgacggccagttttagagatagccacatgataccaac

SEQ ID NO: 56422 - DNA, 40 bp, Artificial Sequence
  primer
gtaaaacgacggccagtgctagctgacctcaggttatttg

SEQ ID NO: 56423 - DNA, 38 bp, Artificial Sequence
  primer
gtaaaacgacggccagtacagagctgtgagcctgattg

SEQ ID NO: 56424 - DNA, 39 bp, Artificial Sequence
  primer
gtaaaacgacggccagtgattcagacaaggaacaatccc

SEQ ID NO: 56425 - DNA, 39 bp, Artificial Sequence
  primer
gtaaaacgacggccagtggaaatccttattgtcccttga

SEQ ID NO: 56426 - DNA, 38 bp, Artificial Sequence
  primer
gtaaaacgacggccagtgtatccagtggaggtgttccc

SEQ ID NO: 56427 - DNA, 21 bp, Artificial Sequence
  primer
aaacttgaaattggcatgtgg

SEQ ID NO: 56428 - DNA, 44 bp, Artificial Sequence
  primer
gtaaaacgacggccagtcttcaaactttacagacataaatgtgg

SEQ ID NO: 56429 - DNA, 39 bp, Artificial Sequence
  primer
gtaaaacgacggccagtctgaatctggtggtaaagaccg

SEQ ID NO: 56430 - DNA, 21 bp, Artificial Sequence
  primer
tgggcaagttgatttgacaag

SEQ ID NO: 56431 - DNA, 20 bp, Artificial Sequence
  primer
tttgggtggatggaagacag

SEQ ID NO: 56432 - DNA, 24 bp, Artificial Sequence
  primer
gagtggtgaaagtttcttgaacag

SEQ ID NO: 56433 - DNA, 39 bp, Artificial Sequence
  primer
gtaaaacgacggccagtggatttggcttgtctcagtgtt

SEQ ID NO: 56434 - DNA, 44 bp, Artificial Sequence
  primer
gtaaaacgacggccagtagtgtaattcctgagaatcattcaatc

SEQ ID NO: 56435 - DNA, 39 bp, Artificial Sequence
  primer
gtaaaacgacggccagtagccaacaatgtcctatcaaag

SEQ ID NO: 56436 - DNA, 41 bp, Artificial Sequence
  primer
gtaaaacgacggccagtgggtcaaggattatagagattggg

SEQ ID NO: 56437 - DNA, 21 bp, Artificial Sequence
  primer
tccagggtatggaacgcttag

SEQ ID NO: 56438 - DNA, 38 bp, Artificial Sequence
  primer
gtaaaacgacggccagtaaaggcctggtgagtgaattg

SEQ ID NO: 56439 - DNA, 38 bp, Artificial Sequence
  primer
gtaaaacgacggccagtctgggaaggaagttctggaag

SEQ ID NO: 56440 - DNA, 39 bp, Artificial Sequence
  primer
gtaaaacgacggccagtggaattagaggctcctactggc

SEQ ID NO: 56441 - DNA, 19 bp, Artificial Sequence
  primer
gcccagcctacctgtcttc

SEQ ID NO: 56442 - DNA, 38 bp, Artificial Sequence
  primer
gtaaaacgacggccagtctggactcctaggtttgaggg

SEQ ID NO: 56443 - DNA, 38 bp, Artificial Sequence
  primer
gtaaaacgacggccagttcctggaggaggtgtggttag

SEQ ID NO: 56444 - DNA, 39 bp, Artificial Sequence
  primer
gtaaaacgacggccagtaacagggctgttatccctaacc

SEQ ID NO: 56445 - DNA, 38 bp, Artificial Sequence
  primer
gtaaaacgacggccagtttagggcagggacaggtgtag

SEQ ID NO: 56446 - DNA, 38 bp, Artificial Sequence
  primer
gtaaaacgacggccagtgagcctgtgtgtctcgttctg

SEQ ID NO: 56447 - DNA, 21 bp, Artificial Sequence
  primer
ataggtgctcaggttcagggc

SEQ ID NO: 56448 - DNA, 38 bp, Artificial Sequence
  primer
gtaaaacgacggccagtgtgtccacctctctctgcctg

SEQ ID NO: 56449 - DNA, 38 bp, Artificial Sequence
  primer
gtaaaacgacggccagtagatcaagtacgccttcagcc

SEQ ID NO: 56450 - DNA, 20 bp, Artificial Sequence
  primer
ctctgcagatggtgagaccc

SEQ ID NO: 56451 - DNA, 38 bp, Artificial Sequence
  primer
gtaaaacgacggccagtaatcgttggaatacagcgagc

SEQ ID NO: 56452 - DNA, 39 bp, Artificial Sequence
  primer
gtaaaacgacggccagttgagaaacagctacagcacgag

SEQ ID NO: 56453 - DNA, 21 bp, Artificial Sequence
  primer
atggaatcgatggtgggatag

SEQ ID NO: 56454 - DNA, 38 bp, Artificial Sequence
  primer
gtaaaacgacggccagttactggaggttagaggagcgg

SEQ ID NO: 56455 - DNA, 37 bp, Artificial Sequence
  primer
gtaaaacgacggccagtaccagatcctgggaacaagg

SEQ ID NO: 56456 - DNA, 21 bp, Artificial Sequence
  primer
gctcagaaagagcaaagggac

SEQ ID NO: 56457 - DNA, 38 bp, Artificial Sequence
  primer
gtaaaacgacggccagtcaacattgtgattggtgggtg

SEQ ID NO: 56458 - DNA, 38 bp, Artificial Sequence
  primer
gtaaaacgacggccagtacgtgtgtacagccaggtcac

SEQ ID NO: 56459 - DNA, 21 bp, Artificial Sequence
  primer
tgatcgactgtcaactgggac

SEQ ID NO: 56460 - DNA, 37 bp, Artificial Sequence
  primer
gtaaaacgacggccagtaagacaccatgagccagtcc

SEQ ID NO: 56461 - DNA, 38 bp, Artificial Sequence
  primer
gtaaaacgacggccagttcctgatttcacacccacatc

SEQ ID NO: 56462 - DNA, 36 bp, Artificial Sequence
  primer
gtaaaacgacggccagtctacccagggttggctgtg

SEQ ID NO: 56463 - DNA, 21 bp, Artificial Sequence
  primer
ggcctagtcctcatctttggg

SEQ ID NO: 56464 - DNA, 38 bp, Artificial Sequence
  primer
gtaaaacgacggccagtcacttcttccactgcgatgag

SEQ ID NO: 56465 - DNA, 36 bp, Artificial Sequence
  primer
gtaaaacgacggccagtgccgcagaccctgaagtag

SEQ ID NO: 56466 - DNA, 19 bp, Artificial Sequence
  primer
agtccatcctgcctcctcc

SEQ ID NO: 56467 - DNA, 37 bp, Artificial Sequence
  primer
gtaaaacgacggccagtgacactggtccttgctgtcc

SEQ ID NO: 56468 - DNA, 19 bp, Artificial Sequence
  primer
gaaggtccagcccacacag

SEQ ID NO: 56469 - DNA, 38 bp, Artificial Sequence
  primer
gtaaaacgacggccagtgattaacttgctggtgggtcc

SEQ ID NO: 56470 - DNA, 35 bp, Artificial Sequence
  primer
gtaaaacgacggccagtcagcctgtggagctacgg

SEQ ID NO: 56471 - DNA, 35 bp, Artificial Sequence
  primer
gtaaaacgacggccagttagggcagggcagagcag

SEQ ID NO: 56472 - DNA, 38 bp, Artificial Sequence
  primer
gtaaaacgacggccagttcagtcacaggacattagccc

SEQ ID NO: 56473 - DNA, 19 bp, Artificial Sequence
  primer
aaagaggcagccagtcgtg

SEQ ID NO: 56474 - DNA, 19 bp, Artificial Sequence
  primer
cggagagaatggagcgaag

SEQ ID NO: 56475 - DNA, 36 bp, Artificial Sequence
  primer
gtaaaacgacggccagtagaaggaaagggctggtcc

SEQ ID NO: 56476 - DNA, 20 bp, Artificial Sequence
  primer
gtgagaggtgctgcttcgag

SEQ ID NO: 56477 - DNA, 36 bp, Artificial Sequence
  primer
gtaaaacgacggccagttcacctacgagtcgggtcc

SEQ ID NO: 56478 - DNA, 38 bp, Artificial Sequence
  primer
gtaaaacgacggccagtttctccctcaacaaggaggag

SEQ ID NO: 56479 - DNA, 38 bp, Artificial Sequence
  primer
gtaaaacgacggccagtctgtgcctggtacacctttcc

SEQ ID NO: 56480 - DNA, 38 bp, Artificial Sequence
  primer
gtaaaacgacggccagtcagcagcagagccatttactg

SEQ ID NO: 56481 - DNA, 21 bp, Artificial Sequence
  primer
aagcctggaacctcctacctc

SEQ ID NO: 56482 - DNA, 37 bp, Artificial Sequence
  primer
gtaaaacgacggccagtaaagggctaggatgagctgg

SEQ ID NO: 56483 - DNA, 21 bp, Artificial Sequence
  primer
actctgctcttccagtgccag

SEQ ID NO: 56484 - DNA, 21 bp, Artificial Sequence
  primer
gactcctggagagaggtggtg

SEQ ID NO: 56485 - DNA, 38 bp, Artificial Sequence
  primer
gtaaaacgacggccagtctatggagcaggcacgctatc

SEQ ID NO: 56486 - DNA, 38 bp, Artificial Sequence
  primer
gtaaaacgacggccagttgtttatactccaggctgggc

SEQ ID NO: 56487 - DNA, 38 bp, Artificial Sequence
  primer
gtaaaacgacggccagtcagggaggtgagtactgaggg

SEQ ID NO: 56488 - DNA, 38 bp, Artificial Sequence
  primer
gtaaaacgacggccagttgctgtctggactcaaccatc

SEQ ID NO: 56489 - DNA, 21 bp, Artificial Sequence
  primer
ccaaggctctaagggagacag

SEQ ID NO: 56490 - DNA, 39 bp, Artificial Sequence
  primer
gtaaaacgacggccagttggaccatgtcacctattagcc

SEQ ID NO: 56491 - DNA, 38 bp, Artificial Sequence
  primer
gtaaaacgacggccagtgataggaggcagctgtgtgtg

SEQ ID NO: 56492 - DNA, 21 bp, Artificial Sequence
  primer
aggttagggagcacctcacac

SEQ ID NO: 56493 - DNA, 21 bp, Artificial Sequence
  primer
agggtaggaaagagctggagg

SEQ ID NO: 56494 - DNA, 38 bp, Artificial Sequence
  primer
gtaaaacgacggccagtgagaacaagaccagctccctg

SEQ ID NO: 56495 - DNA, 37 bp, Artificial Sequence
  primer
gtaaaacgacggccagtcaaagagccctgtctctgcc

SEQ ID NO: 56496 - DNA, 38 bp, Artificial Sequence
  primer
gtaaaacgacggccagtgtgctcctgggtgagagagag

SEQ ID NO: 56497 - DNA, 21 bp, Artificial Sequence
  primer
aatctcagggctgggacatag

SEQ ID NO: 56498 - DNA, 21 bp, Artificial Sequence
  primer
gactcctggagagaggtggtg

SEQ ID NO: 56499 - DNA, 38 bp, Artificial Sequence
  primer
gtaaaacgacggccagtggaatcccatcttgagactcg

SEQ ID NO: 56500 - DNA, 39 bp, Artificial Sequence
  primer
gtaaaacgacggccagtgacatcaagattgtgaggtccc

SEQ ID NO: 56501 - DNA, 38 bp, Artificial Sequence
  primer
gtaaaacgacggccagtacctggaagccttgttcactc

SEQ ID NO: 56502 - DNA, 25 bp, Artificial Sequence
  primer
cctctttctatccagctctttcttc

SEQ ID NO: 56503 - DNA, 38 bp, Artificial Sequence
  primer
gtaaaacgacggccagtaaagacagaaatttcacgggc

SEQ ID NO: 56504 - DNA, 21 bp, Artificial Sequence
  primer
cagggagtaccatcttggagc

SEQ ID NO: 56505 - DNA, 39 bp, Artificial Sequence
  primer
gtaaaacgacggccagtctgctacaccttgttctcaacg

SEQ ID NO: 56506 - DNA, 22 bp, Artificial Sequence
  primer
gcttggtgtactgtgacaaccc

SEQ ID NO: 56507 - DNA, 25 bp, Artificial Sequence
  primer
gctattctgtttgactaagccacag

SEQ ID NO: 56508 - DNA, 21 bp, Artificial Sequence
  primer
gcaccagctccagtaaagagg

SEQ ID NO: 56509 - DNA, 38 bp, Artificial Sequence
  primer
gtaaaacgacggccagtcataagagcgttctttgcagg

SEQ ID NO: 56510 - DNA, 38 bp, Artificial Sequence
  primer
gtaaaacgacggccagtagctggaggaagtgagaggtc

SEQ ID NO: 56511 - DNA, 38 bp, Artificial Sequence
  primer
gtaaaacgacggccagtgggcactgacccaggtaatag

SEQ ID NO: 56512 - DNA, 21 bp, Artificial Sequence
  primer
tttcctgttggtagagcctcc

SEQ ID NO: 56513 - DNA, 38 bp, Artificial Sequence
  primer
gtaaaacgacggccagttgggaggagagagggtaaagg

SEQ ID NO: 56514 - DNA, 38 bp, Artificial Sequence
  primer
gtaaaacgacggccagtacaagtaccgcaccatcactg

SEQ ID NO: 56515 - DNA, 38 bp, Artificial Sequence
  primer
gtaaaacgacggccagttcctgggttggctctaatacc

SEQ ID NO: 56516 - DNA, 38 bp, Artificial Sequence
  primer
gtaaaacgacggccagtgaggtggaagatgacggagag

SEQ ID NO: 56517 - DNA, 21 bp, Artificial Sequence
  primer
tcagcacagctgaagagatgg

SEQ ID NO: 56518 - DNA, 38 bp, Artificial Sequence
  primer
gtaaaacgacggccagttctgggctttgtatctccacc

SEQ ID NO: 56519 - DNA, 38 bp, Artificial Sequence
  primer
gtaaaacgacggccagtcttggcatcatgtgataaccc

SEQ ID NO: 56520 - DNA, 20 bp, Artificial Sequence
  primer
tctgcccaatattgactggc

SEQ ID NO: 56521 - DNA, 21 bp, Artificial Sequence
  primer
aagtacctggcacacaacagg

SEQ ID NO: 56522 - DNA, 38 bp, Artificial Sequence
  primer
gtaaaacgacggccagttttggaaaggagatagccctg

SEQ ID NO: 56523 - DNA, 21 bp, Artificial Sequence
  primer
atgtgagagttggtgctgtgg

SEQ ID NO: 56524 - DNA, 38 bp, Artificial Sequence
  primer
gtaaaacgacggccagttctcctactcgctggttcgtc

SEQ ID NO: 56525 - DNA, 38 bp, Artificial Sequence
  primer
gtaaaacgacggccagttaggtgacttcaacctggtgc

SEQ ID NO: 56526 - DNA, 38 bp, Artificial Sequence
  primer
gtaaaacgacggccagttgcagggaagtcaacactctc

SEQ ID NO: 56527 - DNA, 22 bp, Artificial Sequence
  primer
ggtagcctctctctgacttccc

SEQ ID NO: 56528 - DNA, 38 bp, Artificial Sequence
  primer
gtaaaacgacggccagtaggtaatggtggtggaattgg

SEQ ID NO: 56529 - DNA, 38 bp, Artificial Sequence
  primer
gtaaaacgacggccagttggcctttcattccttggtag

SEQ ID NO: 56530 - DNA, 21 bp, Artificial Sequence
  primer
tgaacaaggtgagcactaccc

SEQ ID NO: 56531 - DNA, 38 bp, Artificial Sequence
  primer
gtaaaacgacggccagtgaagacagccctcaaatttcc

SEQ ID NO: 56532 - DNA, 21 bp, Artificial Sequence
  primer
gaagctcctagaacacctgcc

SEQ ID NO: 56533 - DNA, 21 bp, Artificial Sequence
  primer
tcctgtgctcaaaggatcttc

SEQ ID NO: 56534 - DNA, 21 bp, Artificial Sequence
  primer
tagcatgcaaattggaaggtg

SEQ ID NO: 56535 - DNA, 21 bp, Artificial Sequence
  primer
ctgcctgagtacaaggctgtg

SEQ ID NO: 56536 - DNA, 20 bp, Artificial Sequence
  primer
ggaaggagttgaccctggac

SEQ ID NO: 56537 - DNA, 22 bp, Artificial Sequence
  primer
gacttggagtgagtttggatgg

SEQ ID NO: 56538 - DNA, 20 bp, Artificial Sequence
  primer
gaacaggactgctcagtggc

SEQ ID NO: 56539 - DNA, 39 bp, Artificial Sequence
  primer
gtaaaacgacggccagtgatagctttctctcctccctgg

SEQ ID NO: 56540 - DNA, 21 bp, Artificial Sequence
  primer
gggttctctgtcttgtctccc

SEQ ID NO: 56541 - DNA, 38 bp, Artificial Sequence
  primer
gtaaaacgacggccagtggataacaggcttgggatgtc

SEQ ID NO: 56542 - DNA, 21 bp, Artificial Sequence
  primer
tttgtgcccaatgtgctctac

SEQ ID NO: 56543 - DNA, 38 bp, Artificial Sequence
  primer
gtaaaacgacggccagtatgcgtggtagggcatttaag

SEQ ID NO: 56544 - DNA, 21 bp, Artificial Sequence
  primer
tgggacctagtctctgccttc

SEQ ID NO: 56545 - DNA, 38 bp, Artificial Sequence
  primer
gtaaaacgacggccagttttgagtgaaggcattcatgg

SEQ ID NO: 56546 - DNA, 38 bp, Artificial Sequence
  primer
gtaaaacgacggccagtcagagcagctccaagtgtttg

SEQ ID NO: 56547 - DNA, 37 bp, Artificial Sequence
  primer
gtaaaacgacggccagtagtctgcagagtgtgctggg

SEQ ID NO: 56548 - DNA, 37 bp, Artificial Sequence
  primer
gtaaaacgacggccagtctagctgggtcctacctgcc

SEQ ID NO: 56549 - DNA, 37 bp, Artificial Sequence
  primer
gtaaaacgacggccagtcaactgcagccagttccttc

SEQ ID NO: 56550 - DNA, 21 bp, Artificial Sequence
  primer
ccaactaagggcctgatccta

SEQ ID NO: 56551 - DNA, 21 bp, Artificial Sequence
  primer
gttgttgtgaggctggaaagg

SEQ ID NO: 56552 - DNA, 38 bp, Artificial Sequence
  primer
gtaaaacgacggccagtatgccaaacaccttcatgtcc

SEQ ID NO: 56553 - DNA, 38 bp, Artificial Sequence
  primer
gtaaaacgacggccagtagatccggaagtacacgatgc

SEQ ID NO: 56554 - DNA, 38 bp, Artificial Sequence
  primer
gtaaaacgacggccagtggtgaaggatgtttggaggac

SEQ ID NO: 56555 - DNA, 21 bp, Artificial Sequence
  primer
gtggtttgtgatggttgggag

SEQ ID NO: 56556 - DNA, 20 bp, Artificial Sequence
  primer
attgccaaggtatgcacctg

SEQ ID NO: 56557 - DNA, 38 bp, Artificial Sequence
  primer
gtaaaacgacggccagtctgggtggagtggtgtctagc

SEQ ID NO: 56558 - DNA, 21 bp, Artificial Sequence
  primer
actcctgagcagaacctctgg

SEQ ID NO: 56559 - DNA, 21 bp, Artificial Sequence
  primer
ctctaccacctgagggctttg

SEQ ID NO: 56560 - DNA, 38 bp, Artificial Sequence
  primer
gtaaaacgacggccagtgggaaggagagatgagtccag

SEQ ID NO: 56561 - DNA, 38 bp, Artificial Sequence
  primer
gtaaaacgacggccagtcctgtcaccttccatggagtc

SEQ ID NO: 56562 - DNA, 37 bp, Artificial Sequence
  primer
gtaaaacgacggccagtcagagagactgatgggcagg

SEQ ID NO: 56563 - DNA, 22 bp, Artificial Sequence
  primer
gggctgcttgaggaagtataag

SEQ ID NO: 56564 - DNA, 22 bp, Artificial Sequence
  primer
gacttggagtgagtttggatgg

SEQ ID NO: 56565 - DNA, 39 bp, Artificial Sequence
  primer
gtaaaacgacggccagttggcaggagaagtgtttatctg

SEQ ID NO: 56566 - DNA, 37 bp, Artificial Sequence
  primer
gtaaaacgacggccagtcaatgaggcatctttcctgg

SEQ ID NO: 56567 - DNA, 25 bp, Artificial Sequence
  primer
tgatgttgtcagttcatctagttcc

SEQ ID NO: 56568 - DNA, 41 bp, Artificial Sequence
  primer
gtaaaacgacggccagttggctcattcatagttgactgttt

SEQ ID NO: 56569 - DNA, 22 bp, Artificial Sequence
  primer
tctggaggattgatactttggg

SEQ ID NO: 56570 - DNA, 42 bp, Artificial Sequence
  primer
gtaaaacgacggccagtctcattatttgtattctggcttgtg

SEQ ID NO: 56571 - DNA, 39 bp, Artificial Sequence
  primer
gtaaaacgacggccagtggttattagaaattcccagggc

SEQ ID NO: 56572 - DNA, 25 bp, Artificial Sequence
  primer
aactacctgggagtcttctttcttg

SEQ ID NO: 56573 - DNA, 38 bp, Artificial Sequence
  primer
gtaaaacgacggccagttgggattgggagtggtatctc

SEQ ID NO: 56574 - DNA, 27 bp, Artificial Sequence
  primer
tgatagacaaacctacttattggtgaa

SEQ ID NO: 56575 - DNA, 44 bp, Artificial Sequence
  primer
gtaaaacgacggccagtgaagaggttcttaaatgctttcttatg

SEQ ID NO: 56576 - DNA, 41 bp, Artificial Sequence
  primer
gtaaaacgacggccagttttaggttgaaccctcattcattt

SEQ ID NO: 56577 - DNA, 25 bp, Artificial Sequence
  primer
ttgtttgtaacctgcacattgatac

SEQ ID NO: 56578 - DNA, 42 bp, Artificial Sequence
  primer
gtaaaacgacggccagtttctaatttcttgcattgaccattc

SEQ ID NO: 56579 - DNA, 41 bp, Artificial Sequence
  primer
gtaaaacgacggccagtttcacagttatccctatgagcttg

SEQ ID NO: 56580 - DNA, 20 bp, Artificial Sequence
  primer
tggaagttggcaaattgctt

SEQ ID NO: 56581 - DNA, 38 bp, Artificial Sequence
  primer
gtaaaacgacggccagtcagtcttggaaggactggttg

SEQ ID NO: 56582 - DNA, 38 bp, Artificial Sequence
  primer
gtaaaacgacggccagttgccatttgtcatcactgaaa

SEQ ID NO: 56583 - DNA, 25 bp, Artificial Sequence
  primer
ttgaatgttgaagagcgattagttc

SEQ ID NO: 56584 - DNA, 39 bp, Artificial Sequence
  primer
gtaaaacgacggccagtaaagaggaaactgagcacttgg

SEQ ID NO: 56585 - DNA, 21 bp, Artificial Sequence
  primer
ggtccagttggatctgttgtg

SEQ ID NO: 56586 - DNA, 38 bp, Artificial Sequence
  primer
gtaaaacgacggccagtaaatcataatcccgaagagcc

SEQ ID NO: 56587 - DNA, 38 bp, Artificial Sequence
  primer
gtaaaacgacggccagttagtgtgtcctccacagcctc

SEQ ID NO: 56588 - DNA, 22 bp, Artificial Sequence
  primer
aatgctccaagaagaaatccaa

SEQ ID NO: 56589 - DNA, 38 bp, Artificial Sequence
  primer
gtaaaacgacggccagttgtttgcttggacttaaccaa

SEQ ID NO: 56590 - DNA, 38 bp, Artificial Sequence
  primer
gtaaaacgacggccagtatatttgcatggtgtggagga

SEQ ID NO: 56591 - DNA, 36 bp, Artificial Sequence
  primer
gtaaaacgacggccagttgggtagggcctgtgaatc

SEQ ID NO: 56592 - DNA, 23 bp, Artificial Sequence
  primer
gagtctttaatgcctgaaggagg

SEQ ID NO: 56593 - DNA, 38 bp, Artificial Sequence
  primer
gtaaaacgacggccagtctcttgcctcgatgtcctagc

SEQ ID NO: 56594 - DNA, 21 bp, Artificial Sequence
  primer
tgtaactggaagagggcaacc

SEQ ID NO: 56595 - DNA, 20 bp, Artificial Sequence
  primer
gcaacaagagcgtaactccg

SEQ ID NO: 56596 - DNA, 38 bp, Artificial Sequence
  primer
gtaaaacgacggccagtttggatgggtggagaggtaag

SEQ ID NO: 56597 - DNA, 21 bp, Artificial Sequence
  primer
gttgacaggtccacttgagcc

SEQ ID NO: 56598 - DNA, 38 bp, Artificial Sequence
  primer
gtaaaacgacggccagtgctttcatatcccttcctccc

SEQ ID NO: 56599 - DNA, 21 bp, Artificial Sequence
  primer
attgcctgggttctgaaattg

SEQ ID NO: 56600 - DNA, 38 bp, Artificial Sequence
  primer
gtaaaacgacggccagtgagcaagggttccattggtag

SEQ ID NO: 56601 - DNA, 21 bp, Artificial Sequence
  primer
tatgtcccaaaggtgggtagg

SEQ ID NO: 56602 - DNA, 38 bp, Artificial Sequence
  primer
gtaaaacgacggccagtttgtttgcacaagatgctctg

SEQ ID NO: 56603 - DNA, 20 bp, Artificial Sequence
  primer
aaccactggcataaattgcg

SEQ ID NO: 56604 - DNA, 21 bp, Artificial Sequence
  primer
gggtttcagagtttcacgagg

SEQ ID NO: 56605 - DNA, 21 bp, Artificial Sequence
  primer
ctattctgccctagacgtggg

SEQ ID NO: 56606 - DNA, 21 bp, Artificial Sequence
  primer
ttggtgggattgaggtaggag

SEQ ID NO: 56607 - DNA, 38 bp, Artificial Sequence
  primer
gtaaaacgacggccagtaatgtctgggttggtctttgc

SEQ ID NO: 56608 - DNA, 38 bp, Artificial Sequence
  primer
gtaaaacgacggccagtatgtcttgggatcagctctgg

SEQ ID NO: 56609 - DNA, 21 bp, Artificial Sequence
  primer
ttaggttggtcccttcagtgc

SEQ ID NO: 56610 - DNA, 38 bp, Artificial Sequence
  primer
gtaaaacgacggccagtcaggactaacggtgcttcctc

SEQ ID NO: 56611 - DNA, 38 bp, Artificial Sequence
  primer
gtaaaacgacggccagttggaactgtgcacaaagtgag

SEQ ID NO: 56612 - DNA, 20 bp, Artificial Sequence
  primer
agcagggtcctgtgcttctc

SEQ ID NO: 56613 - DNA, 40 bp, Artificial Sequence
  primer
gtaaaacgacggccagtgagaggtaccttcaagatttggg

SEQ ID NO: 56614 - DNA, 18 bp, Artificial Sequence
  primer
agaatggcgtgaacccag

SEQ ID NO: 56615 - DNA, 38 bp, Artificial Sequence
  primer
gtaaaacgacggccagttagatcaggttctgccttccc

SEQ ID NO: 56616 - DNA, 21 bp, Artificial Sequence
  primer
atagctgggactttaggcgtg

SEQ ID NO: 56617 - DNA, 22 bp, Artificial Sequence
  primer
ccacggtatctggtcataaagg

SEQ ID NO: 56618 - DNA, 38 bp, Artificial Sequence
  primer
gtaaaacgacggccagtgagccctcacaaaccctacag

SEQ ID NO: 56619 - DNA, 21 bp, Artificial Sequence
  primer
aaggcagtgaacaacccaata

SEQ ID NO: 56620 - DNA, 38 bp, Artificial Sequence
  primer
gtaaaacgacggccagttacacacctcaaaggtgcctg

SEQ ID NO: 56621 - DNA, 21 bp, Artificial Sequence
  primer
tcagacctcagtgcctctctg

SEQ ID NO: 56622 - DNA, 20 bp, Artificial Sequence
  primer
ggaaatagctgcacagtccg

SEQ ID NO: 56623 - DNA, 21 bp, Artificial Sequence
  primer
agaactgggataggcttgtgg

SEQ ID NO: 56624 - DNA, 44 bp, Artificial Sequence
  primer
gtaaaacgacggccagtaagccaattctttagaatatgatatgg

SEQ ID NO: 56625 - DNA, 24 bp, Artificial Sequence
  primer
tcttggctattagcaacatgactc

SEQ ID NO: 56626 - DNA, 40 bp, Artificial Sequence
  primer
gtaaaacgacggccagtaaatcctcataaaggagcaggag

SEQ ID NO: 56627 - DNA, 40 bp, Artificial Sequence
  primer
gtaaaacgacggccagttgaattgagtcaaagacagggtg

SEQ ID NO: 56628 - DNA, 25 bp, Artificial Sequence
  primer
tttggaaacacacatgactcttaaa

SEQ ID NO: 56629 - DNA, 21 bp, Artificial Sequence
  primer
gtggagcagtaaccaagcaag

SEQ ID NO: 56630 - DNA, 25 bp, Artificial Sequence
  primer
aaagcagaaccagtagtgaatgttg

SEQ ID NO: 56631 - DNA, 38 bp, Artificial Sequence
  primer
gtaaaacgacggccagtcctcctccacatctagcacag

SEQ ID NO: 56632 - DNA, 39 bp, Artificial Sequence
  primer
gtaaaacgacggccagtcctttctcacttcccaactttc

SEQ ID NO: 56633 - DNA, 43 bp, Artificial Sequence
  primer
gtaaaacgacggccagtttgattcagtttccatttatacacca

SEQ ID NO: 56634 - DNA, 38 bp, Artificial Sequence
  primer
gtaaaacgacggccagttaggccaccaaagtcatttgc

SEQ ID NO: 56635 - DNA, 38 bp, Artificial Sequence
  primer
gtaaaacgacggccagttgatgctcctggcacatagag

SEQ ID NO: 56636 - DNA, 22 bp, Artificial Sequence
  primer
tcttagaggaagatttgccacc

SEQ ID NO: 56637 - DNA, 20 bp, Artificial Sequence
  primer
gcttcccatgttcttcctcc

SEQ ID NO: 56638 - DNA, 25 bp, Artificial Sequence
  primer
tgtggataatgtcttgtacaactgc

SEQ ID NO: 56639 - DNA, 20 bp, Artificial Sequence
  primer
ggttgtcaaggcaaaccaag

SEQ ID NO: 56640 - DNA, 23 bp, Artificial Sequence
  primer
aagcagacaacaaagttgcagag

SEQ ID NO: 56641 - DNA, 40 bp, Artificial Sequence
  primer
gtaaaacgacggccagttcagcaccattagtacaatccaa

SEQ ID NO: 56642 - DNA, 39 bp, Artificial Sequence
  primer
gtaaaacgacggccagtgcacttccaactgaaggctaag

SEQ ID NO: 56643 - DNA, 35 bp, Artificial Sequence
  primer
gtaaaacgacggccagtaggccagcccaaagactc

SEQ ID NO: 56644 - DNA, 21 bp, Artificial Sequence
  primer
tgattggtgtttggattgacc

SEQ ID NO: 56645 - DNA, 41 bp, Artificial Sequence
  primer
gtaaaacgacggccagtgagtcgtttctttcactagcttgc

SEQ ID NO: 56646 - DNA, 21 bp, Artificial Sequence
  primer
taggtttcttaatggccggtg

SEQ ID NO: 56647 - DNA, 22 bp, Artificial Sequence
  primer
tgcttaggaagcttcactgttg

SEQ ID NO: 56648 - DNA, 21 bp, Artificial Sequence
  primer
tggctttgatatccttgtggc

SEQ ID NO: 56649 - DNA, 23 bp, Artificial Sequence
  primer
ccatatgcagaagagacaaatgc

SEQ ID NO: 56650 - DNA, 21 bp, Artificial Sequence
  primer
tgaatccagtggaggagaacc

SEQ ID NO: 56651 - DNA, 20 bp, Artificial Sequence
  primer
ctgacgctatggagctctcg

SEQ ID NO: 56652 - DNA, 38 bp, Artificial Sequence
  primer
gtaaaacgacggccagtgaactcacagggcctcagatg

SEQ ID NO: 56653 - DNA, 21 bp, Artificial Sequence
  primer
ggatcagaggatcagggactg

SEQ ID NO: 56654 - DNA, 22 bp, Artificial Sequence
  primer
tcttcttggaagagtgacctgg

SEQ ID NO: 56655 - DNA, 21 bp, Artificial Sequence
  primer
ttggcatcctgagctactgtg

SEQ ID NO: 56656 - DNA, 35 bp, Artificial Sequence
  primer
gtaaaacgacggccagtctgcctgcctcatcatcc

SEQ ID NO: 56657 - DNA, 20 bp, Artificial Sequence
  primer
gcccagcctgagatgacttt

SEQ ID NO: 56658 - DNA, 38 bp, Artificial Sequence
  primer
gtaaaacgacggccagttgtcacccatttccttccatc

SEQ ID NO: 56659 - DNA, 21 bp, Artificial Sequence
  primer
caatggataaatgcttgaggg

SEQ ID NO: 56660 - DNA, 38 bp, Artificial Sequence; identical to SEQ ID NO: 56658
  primer

SEQ ID NO: 56661 - DNA, 37 bp, Artificial Sequence
  primer
gtaaaacgacggccagtcagtatcccgattggctctg

SEQ ID NO: 56662 - DNA, 38 bp, Artificial Sequence
  primer
gtaaaacgacggccagtatagcgaggagacactgaggg

SEQ ID NO: 56663 - DNA, 21 bp, Artificial Sequence
  primer
tcctgctgttctgagttggtg

SEQ ID NO: 56664 - DNA, 38 bp, Artificial Sequence
  primer
gtaaaacgacggccagtagagtgagtgatgcgctgaac

SEQ ID NO: 56665 - DNA, 21 bp, Artificial Sequence
  primer
ggtaagctgggactcatcctg

SEQ ID NO: 56666 - DNA, 38 bp, Artificial Sequence
  primer
gtaaaacgacggccagttgtggagaccagggtttgaag

SEQ ID NO: 56667 - DNA, 38 bp, Artificial Sequence
  primer
gtaaaacgacggccagtcagtaccagcatgacaccagc

SEQ ID NO: 56668 - DNA, 38 bp, Artificial Sequence
  primer
gtaaaacgacggccagtgtgagtctgcctgtctgcatc

SEQ ID NO: 56669 - DNA, 21 bp, Artificial Sequence
  primer
gacctggtgtccaaggaactg

SEQ ID NO: 56670 - DNA, 37 bp, Artificial Sequence
  primer
gtaaaacgacggccagtctgcagaagacggtgctcag

SEQ ID NO: 56671 - DNA, 21 bp, Artificial Sequence
  primer
tctccgcaggatcaaagagac

SEQ ID NO: 56672 - DNA, 20 bp, Artificial Sequence
  primer
cactgagtgctcattggctg

SEQ ID NO: 56673 - DNA, 38 bp, Artificial Sequence
  primer
gtaaaacgacggccagtgagagggaatgactgagtggg

SEQ ID NO: 56674 - DNA, 21 bp, Artificial Sequence
  primer
atcatcatcgagccctttgac

SEQ ID NO: 56675 - DNA, 38 bp, Artificial Sequence
  primer
gtaaaacgacggccagttcctagtccctgacctccctc

SEQ ID NO: 56676 - DNA, 38 bp, Artificial Sequence
  primer
gtaaaacgacggccagtagcttagaacagcaccagcag

SEQ ID NO: 56677 - DNA, 21 bp, Artificial Sequence
  primer
gtgacttcaggaagtggcaag

SEQ ID NO: 56678 - DNA, 37 bp, Artificial Sequence
  primer
gtaaaacgacggccagtacaattccaccctccctcac

SEQ ID NO: 56679 - DNA, 38 bp, Artificial Sequence
  primer
gtaaaacgacggccagtaagtaccaggaggtgggtgtg

SEQ ID NO: 56680 - DNA, 21 bp, Artificial Sequence
  primer
agagctctctggaacacctgc

SEQ ID NO: 56681 - DNA, 38 bp, Artificial Sequence
  primer
gtaaaacgacggccagttctacacacagagccgcattc

SEQ ID NO: 56682 - DNA, 38 bp, Artificial Sequence
  primer
gtaaaacgacggccagtaggctgtttcccgttcatttc

SEQ ID NO: 56683 - DNA, 21 bp, Artificial Sequence
  primer
aaacatcctgtccctactggc

SEQ ID NO: 56684 - DNA, 21 bp, Artificial Sequence
  primer
gaaatgaacagtggaggaccc

SEQ ID NO: 56685 - DNA, 36 bp, Artificial Sequence
  primer
gtaaaacgacggccagtaggtgaaatgctgccaagc

SEQ ID NO: 56686 - DNA, 20 bp, Artificial Sequence
  primer
tatgggcaagagcccagtag

SEQ ID NO: 56687 - DNA, 38 bp, Artificial Sequence
  primer
gtaaaacgacggccagtcagaattacccaggcaagagg

SEQ ID NO: 56688 - DNA, 38 bp, Artificial Sequence
  primer
gtaaaacgacggccagtatggtacagatttggcgaagg

SEQ ID NO: 56689 - DNA, 21 bp, Artificial Sequence
  primer
gcacttacaacctagcagccc

SEQ ID NO: 56690 - DNA, 20 bp, Artificial Sequence
  primer
tctgtgctttatcccggttg

SEQ ID NO: 56691 - DNA, 38 bp, Artificial Sequence
  primer
gtaaaacgacggccagtgagtcattctgcctgtccctg

SEQ ID NO: 56692 - DNA, 21 bp, Artificial Sequence
  primer
cagcctgggcaatataatgag

SEQ ID NO: 56693 - DNA, 18 bp, Artificial Sequence
  primer
tgagccactgcacctgac

SEQ ID NO: 56694 - DNA, 39 bp, Artificial Sequence
  primer
gtaaaacgacggccagttgacgagggctttctacttgag

SEQ ID NO: 56695 - DNA, 21 bp, Artificial Sequence
  primer
cctgcatcagatagaccctgg

SEQ ID NO: 56696 - DNA, 21 bp, Artificial Sequence
  primer
gacccttagctcttggcattc

SEQ ID NO: 56697 - DNA, 21 bp, Artificial Sequence
  primer
gctggtctctggaatgctagg

SEQ ID NO: 56698 - DNA, 38 bp, Artificial Sequence
  primer
gtaaaacgacggccagtcaatgcctgagacagtaagcg

SEQ ID NO: 56699 - DNA, 38 bp, Artificial Sequence
  primer
gtaaaacgacggccagttgagttcggcctactctccac

SEQ ID NO: 56700 - DNA, 40 bp, Artificial Sequence
  primer
gtaaaacgacggccagtaaatgtagactggttggctgaag

SEQ ID NO: 56701 - DNA, 38 bp, Artificial Sequence
  primer
gtaaaacgacggccagtcgtggctatatgcccagtcta

SEQ ID NO: 56702 - DNA, 39 bp, Artificial Sequence
  primer
gtaaaacgacggccagtgggtgttaaaccaagaccagaa

SEQ ID NO: 56703 - DNA, 23 bp, Artificial Sequence
  primer
gaaatgttctagccacttccttg

SEQ ID NO: 56704 - DNA, 38 bp, Artificial Sequence
  primer
gtaaaacgacggccagtacaggatgacagccagttacg

SEQ ID NO: 56705 - DNA, 39 bp, Artificial Sequence
  primer
gtaaaacgacggccagtggcatatgtactgatgctcgtg

SEQ ID NO: 56706 - DNA, 38 bp, Artificial Sequence
  primer
gtaaaacgacggccagtcccttcgggtgaaggaataag

SEQ ID NO: 56707 - DNA, 21 bp, Artificial Sequence
  primer
atatcactcttggagcggagg

SEQ ID NO: 56708 - DNA, 22 bp, Artificial Sequence
  primer
aacgggcttctaccaaagaaag

SEQ ID NO: 56709 - DNA, 21 bp, Artificial Sequence
  primer
acgagacctttaacaggtggg

SEQ ID NO: 56710 - DNA, 22 bp, Artificial Sequence
  primer
tttacccatcatttgtcttggc

SEQ ID NO: 56711 - DNA, 21 bp, Artificial Sequence
  primer
tgtggatatgcgtgaatttcg

SEQ ID NO: 56712 - DNA, 38 bp, Artificial Sequence
  primer
gtaaaacgacggccagtatgcgtgaatttcgaagtgag

SEQ ID NO: 56713 - DNA, 21 bp, Artificial Sequence
  primer
aggagctgaaacaaagcaagc

SEQ ID NO: 56714 - DNA, 39 bp, Artificial Sequence
  primer
gtaaaacgacggccagtgccatctttgttgtgtaggagc

SEQ ID NO: 56715 - DNA, 43 bp, Artificial Sequence
  primer
gtaaaacgacggccagttgttcaacgtttggataatatcagtt

SEQ ID NO: 56716 - DNA, 38 bp, Artificial Sequence
  primer
gtaaaacgacggccagtaggaggaaatgctaaagcagc

SEQ ID NO: 56717 - DNA, 37 bp, Artificial Sequence
  primer
gtaaaacgacggccagtaggtcaggtccctgttcacc

SEQ ID NO: 56718 - DNA, 38 bp, Artificial Sequence
  primer
gtaaaacgacggccagttaacgagcagagccttgcata

SEQ ID NO: 56719 - DNA, 23 bp, Artificial Sequence
  primer
gcaactgtgtttagccaattgtt

SEQ ID NO: 56720 - DNA, 37 bp, Artificial Sequence
  primer
gtaaaacgacggccagtgttctttgttccctgttggg

SEQ ID NO: 56721 - DNA, 22 bp, Artificial Sequence
  primer
gacgtgaagtcatctccatgtg

SEQ ID NO: 56722 - DNA, 21 bp, Artificial Sequence
  primer
cacctgctgctgtagacgaag

SEQ ID NO: 56723 - DNA, 38 bp, Artificial Sequence
  primer
gtaaaacgacggccagttactgcaacacttgcgtcatc

SEQ ID NO: 56724 - DNA, 38 bp, Artificial Sequence
  primer
gtaaaacgacggccagtagacatagtgacgcacctggg

SEQ ID NO: 56725 - DNA, 39 bp, Artificial Sequence
  primer
gtaaaacgacggccagtgaaagctcttgatgattgcagg

SEQ ID NO: 56726 - DNA, 21 bp, Artificial Sequence
  primer
tactggctgggatagactccg

SEQ ID NO: 56727 - DNA, 38 bp, Artificial Sequence
  primer
gtaaaacgacggccagtatgaagtggtaggcactgctc

SEQ ID NO: 56728 - DNA, 26 bp, Artificial Sequence
  primer
tttaaagctatgagaatggatgaaac

SEQ ID NO: 56729 - DNA, 21 bp, Artificial Sequence
  primer
taacacagtgccaagcacaga

SEQ ID NO: 56730 - DNA, 38 bp, Artificial Sequence
  primer
gtaaaacgacggccagtcaagaatgggttctttggacc

SEQ ID NO: 56731 - DNA, 21 bp, Artificial Sequence
  primer
attcactgggagagaactggg

SEQ ID NO: 56732 - DNA, 38 bp, Artificial Sequence
  primer
gtaaaacgacggccagtcagctccgaattgattccttc

SEQ ID NO: 56733 - DNA, 20 bp, Artificial Sequence
  primer
gagaacagctgcgaaagagc

SEQ ID NO: 56734 - DNA, 21 bp, Artificial Sequence
  primer
tttggtggctggctttcttag

SEQ ID NO: 56735 - DNA, 21 bp, Artificial Sequence
  primer
tcaagcaagaaagtggtggtg

SEQ ID NO: 56736 - DNA, 41 bp, Artificial Sequence
  primer
gtaaaacgacggccagttgtggccaataagggtatgtattc

SEQ ID NO: 56737 - DNA, 21 bp, Artificial Sequence
  primer
tgcccatgtatttaagggctc

SEQ ID NO: 56738 - DNA, 36 bp, Artificial Sequence
  primer
gtaaaacgacggccagtccctcggaaagtttcatgc

SEQ ID NO: 56739 - DNA, 21 bp, Artificial Sequence
  primer
acccagatccctcagaaacag

SEQ ID NO: 56740 - DNA, 21 bp, Artificial Sequence
  primer
cagaagagggctttgcagttc

SEQ ID NO: 56741 - DNA, 21 bp, Artificial Sequence
  primer
gaaatgaattgagatggctgg

SEQ ID NO: 56742 - DNA, 37 bp, Artificial Sequence
  primer
gtaaaacgacggccagtacatcccgcatgtttctctg

SEQ ID NO: 56743 - DNA, 25 bp, Artificial Sequence
  primer
ttgatgaatgagattatggagattt

SEQ ID NO: 56744 - DNA, 41 bp, Artificial Sequence
  primer
gtaaaacgacggccagttgcatgttatgtttgtatttgtgc

SEQ ID NO: 56745 - DNA, 40 bp, Artificial Sequence
  primer
gtaaaacgacggccagtaaataatttgcagaggagcgttt

SEQ ID NO: 56746 - DNA, 20 bp, Artificial Sequence
  primer
tgcaatcatttcccactgac

SEQ ID NO: 56747 - DNA, 21 bp, Artificial Sequence
  primer
tgagcagggtatggtgagaag

SEQ ID NO: 56748 - DNA, 38 bp, Artificial Sequence
  primer
gtaaaacgacggccagtaggttaaacagcctccttgcc

SEQ ID NO: 56749 - DNA, 38 bp, Artificial Sequence
  primer
gtaaaacgacggccagtgcctgagctttggctgtttac

SEQ ID NO: 56750 - DNA, 21 bp, Artificial Sequence
  primer
aatatgtggaggcagaggctg

SEQ ID NO: 56751 - DNA, 21 bp, Artificial Sequence
  primer
tgggagtgacaggtagtgacc

SEQ ID NO: 56752 - DNA, 22 bp, Artificial Sequence
  primer
cattcatgcagcagctgttatc

SEQ ID NO: 56753 - DNA, 37 bp, Artificial Sequence
  primer
gtaaaacgacggccagtgcatcccagagcactgaaac

SEQ ID NO: 56754 - DNA, 39 bp, Artificial Sequence
  primer
gtaaaacgacggccagtggcttggagaagagacaaatgc

SEQ ID NO: 56755 - DNA, 21 bp, Artificial Sequence
  primer
aaagagaaagacccagccagg

SEQ ID NO: 56756 - DNA, 26 bp, Artificial Sequence
  primer
ttagctggctattgtttgtaaatagg

SEQ ID NO: 56757 - DNA, 22 bp, Artificial Sequence
  primer
ggcatggctgtgaaagaataag

SEQ ID NO: 56758 - DNA, 38 bp, Artificial Sequence
  primer
gtaaaacgacggccagttggcacatgtgttgtcttgtg

SEQ ID NO: 56759 - DNA, 21 bp, Artificial Sequence
  primer
tgattctgccagagcgtttag

SEQ ID NO: 56760 - DNA, 39 bp, Artificial Sequence
  primer
gtaaaacgacggccagtgactgaccaatgggagactctg

SEQ ID NO: 56761 - DNA, 27 bp, Artificial Sequence
  primer
tgcatgtaattgttactactgctgata

SEQ ID NO: 56762 - DNA, 21 bp, Artificial Sequence
  primer
ttgccgtcttgtttctgtcac

SEQ ID NO: 56763 - DNA, 37 bp, Artificial Sequence
  primer
gtaaaacgacggccagtaggcatgtgatctcggtttg

SEQ ID NO: 56764 - DNA, 41 bp, Artificial Sequence
  primer
gtaaaacgacggccagttgacaggatttcaaattatcaagg

SEQ ID NO: 56765 - DNA, 21 bp, Artificial Sequence
  primer
tgcaactgcttgcaaatctat

SEQ ID NO: 56766 - DNA, 40 bp, Artificial Sequence
  primer
gtaaaacgacggccagtcctcactttcttcagaatcaggc

SEQ ID NO: 56767 - DNA, 38 bp, Artificial Sequence
  primer
gtaaaacgacggccagttaacgagacctctgtgtgcca

SEQ ID NO: 56768 - DNA, 45 bp, Artificial Sequence
  primer
gtaaaacgacggccagtaatctgaagggttggttaagtataatct

SEQ ID NO: 56769 - DNA, 21 bp, Artificial Sequence
  primer
gtcattggcccttgttctgtc

SEQ ID NO: 56770 - DNA, 39 bp, Artificial Sequence
  primer
gtaaaacgacggccagtgcattggcctagtttctttagg

SEQ ID NO: 56771 - DNA, 24 bp, Artificial Sequence
  primer
ttggataaagtctggtgttgtctg

SEQ ID NO: 56772 - DNA, 38 bp, Artificial Sequence
  primer
gtaaaacgacggccagtacagttgagctcacttgcctg

SEQ ID NO: 56773 - DNA, 40 bp, Artificial Sequence
  primer
gtaaaacgacggccagtttgatggaccaaatctgtgaaac

SEQ ID NO: 56774 - DNA, 39 bp, Artificial Sequence
  primer
gtaaaacgacggccagttgacagattggcatctgacttg

SEQ ID NO: 56775 - DNA, 44 bp, Artificial Sequence
  primer
gtaaaacgacggccagttttgaaatcctctttacaatctttagc

SEQ ID NO: 56776 - DNA, 21 bp, Artificial Sequence
  primer
tgctaatgtgcctttggagtc

SEQ ID NO: 56777 - DNA, 38 bp, Artificial Sequence
  primer
gtaaaacgacggccagtagtgcgatattaacccgggag

SEQ ID NO: 56778 - DNA, 35 bp, Artificial Sequence
  primer
gtaaaacgacggccagtctgggatgggacccagag

SEQ ID NO: 56779 - DNA, 38 bp, Artificial Sequence
  primer
gtaaaacgacggccagtgtggcctacgttcctcagttg

SEQ ID NO: 56780 - DNA, 38 bp, Artificial Sequence
  primer
gtaaaacgacggccagtcctttgggaaccacacctaag

SEQ ID NO: 56781 - DNA, 21 bp, Artificial Sequence
  primer
gccttgacactgtctcccttc

SEQ ID NO: 56782 - DNA, 18 bp, Artificial Sequence
  primer
ggtcctggatccctgctg

SEQ ID NO: 56783 - DNA, 21 bp, Artificial Sequence
  primer
cacacccaaagcgtctacaac

SEQ ID NO: 56784 - DNA, 37 bp, Artificial Sequence
  primer
gtaaaacgacggccagtaccacagatcaaggtggagc

SEQ ID NO: 56785 - DNA, 38 bp, Artificial Sequence
  primer
gtaaaacgacggccagttcctgtcggactagggttctc

SEQ ID NO: 56786 - DNA, 39 bp, Artificial Sequence
  primer
gtaaaacgacggccagttgtggtcccagttagaaaggac

SEQ ID NO: 56787 - DNA, 21 bp, Artificial Sequence
  primer
cttgcccttctttggttctct

SEQ ID NO: 56788 - DNA, 35 bp, Artificial Sequence
  primer
gtaaaacgacggccagtaaatcccacgtggatggg

SEQ ID NO: 56789 - DNA, 21 bp, Artificial Sequence
  primer
tgatgttagtgtgggagtggg

SEQ ID NO: 56790 - DNA, 21 bp, Artificial Sequence
  primer
ggaaagctctgggagaatctg

SEQ ID NO: 56791 - DNA, 41 bp, Artificial Sequence
  primer
gtaaaacgacggccagtccgtgagatgcttctgagttagac

SEQ ID NO: 56792 - DNA, 21 bp, Artificial Sequence
  primer
aggcagttgatttggagttgg

SEQ ID NO: 56793 - DNA, 38 bp, Artificial Sequence
  primer
gtaaaacgacggccagtgttctctggagaagtgggtgg

SEQ ID NO: 56794 - DNA, 21 bp, Artificial Sequence
  primer
attagcagtggccagatccag

SEQ ID NO: 56795 - DNA, 38 bp, Artificial Sequence
  primer
gtaaaacgacggccagttagcacaatctcatccgctct

SEQ ID NO: 56796 - DNA, 38 bp, Artificial Sequence
  primer
gtaaaacgacggccagtggtgcacctgtctgtttctcc

SEQ ID NO: 56797 - DNA, 19 bp, Artificial Sequence
  primer
tttgtcagggcatgaatgg

SEQ ID NO: 56798 - DNA, 44 bp, Artificial Sequence
  primer
gtaaaacgacggccagttctatagtatgcattcaaatggaagtt

SEQ ID NO: 56799 - DNA, 41 bp, Artificial Sequence
  primer
gtaaaacgacggccagtgaaatgcaattcaagttctaatcg

SEQ ID NO: 56800 - DNA, 26 bp, Artificial Sequence
  primer
tccacctaagctatataaggctactg

SEQ ID NO: 56801 - DNA, 44 bp, Artificial Sequence
  primer
gtaaaacgacggccagtcaacacttaagtttatgtttcctgctc

SEQ ID NO: 56802 - DNA, 21 bp, Artificial Sequence
  primer
tgctttcaaggaaatgaccaa

SEQ ID NO: 56803 - DNA, 24 bp, Artificial Sequence
  primer
tcctctggttagagttgaagaacc

SEQ ID NO: 56804 - DNA, 39 bp, Artificial Sequence
  primer
gtaaaacgacggccagtcctccagcagtttattgcattg

SEQ ID NO: 56805 - DNA, 24 bp, Artificial Sequence
  primer
ggatgtaaaccagtctgtaccaag

SEQ ID NO: 56806 - DNA, 20 bp, Artificial Sequence
  primer
gagccaccacatccagctaa

SEQ ID NO: 56807 - DNA, 21 bp, Artificial Sequence
  primer
tttacagtagggcttcagggc

SEQ ID NO: 56808 - DNA, 40 bp, Artificial Sequence
  primer
gtaaaacgacggccagttggaagtgaataatgcaaactgc

SEQ ID NO: 56809 - DNA, 40 bp, Artificial Sequence
  primer
gtaaaacgacggccagtttggttactagaaaggattgccc

SEQ ID NO: 56810 - DNA, 36 bp, Artificial Sequence
  primer
gtaaaacgacggccagtgcgaggattggctgttagc

SEQ ID NO: 56811 - DNA, 39 bp, Artificial Sequence
  primer
gtaaaacgacggccagtggatgaggattataggcatggg

SEQ ID NO: 56812 - DNA, 21 bp, Artificial Sequence
  primer
aagccactacacctgacctgg

SEQ ID NO: 56813 - DNA, 38 bp, Artificial Sequence
  primer
gtaaaacgacggccagtgcacatctatgccatcattgg

SEQ ID NO: 56814 - DNA, 38 bp, Artificial Sequence
  primer
gtaaaacgacggccagttactttagtcagctgggctgg

SEQ ID NO: 56815 - DNA, 21 bp, Artificial Sequence
  primer
ctgtagggacaatctgggtgg

SEQ ID NO: 56816 - DNA, 38 bp, Artificial Sequence
  primer
gtaaaacgacggccagtttgggtgacagacatcagctc

SEQ ID NO: 56817 - DNA, 21 bp, Artificial Sequence
  primer
ctcttcagagaacattccggg

SEQ ID NO: 56818 - DNA, 20 bp, Artificial Sequence
  primer
cagtgcacaggatggaggag

SEQ ID NO: 56819 - DNA, 38 bp, Artificial Sequence
  primer
gtaaaacgacggccagtccatcttctaccagctcctgc

SEQ ID NO: 56820 - DNA, 20 bp, Artificial Sequence
  primer
gccttggtccacaagtgttc

SEQ ID NO: 56821 - DNA, 38 bp, Artificial Sequence
  primer
gtaaaacgacggccagtaaccctgtagagaggctgtgc

SEQ ID NO: 56822 - DNA, 21 bp, Artificial Sequence
  primer
gggttataccctctgtcacgc

SEQ ID NO: 56823 - DNA, 20 bp, Artificial Sequence
  primer
ctcttcctcatcccttccca

SEQ ID NO: 56824 - DNA, 21 bp, Artificial Sequence
  primer
gaggtgatggagagtgttggg

SEQ ID NO: 56825 - DNA, 22 bp, Artificial Sequence
  primer
cccgcttacctgtagtgacaag

SEQ ID NO: 56826 - DNA, 37 bp, Artificial Sequence
  primer
gtaaaacgacggccagtagaggtggacaggtccaagg

SEQ ID NO: 56827 - DNA, 21 bp, Artificial Sequence
  primer
cttgtgggttggagtgatgag

SEQ ID NO: 56828 - DNA, 38 bp, Artificial Sequence
  primer
gtaaaacgacggccagttgctcttgcaaactcttctgg

SEQ ID NO: 56829 - DNA, 38 bp, Artificial Sequence
  primer
gtaaaacgacggccagtagaggccctccttctgatttg

SEQ ID NO: 56830 - DNA, 39 bp, Artificial Sequence
  primer
gtaaaacgacggccagtcctgttgccctaatatttgcag

SEQ ID NO: 56831 - DNA, 21 bp, Artificial Sequence
  primer
ggctaatgacagtgatggcag

SEQ ID NO: 56832 - DNA, 38 bp, Artificial Sequence
  primer
gtaaaacgacggccagtggaaggttactgcctcacctg

SEQ ID NO: 56833 - DNA, 21 bp, Artificial Sequence
  primer
ctgcctagtcagttctgcgtc

SEQ ID NO: 56834 - DNA, 38 bp, Artificial Sequence
  primer
gtaaaacgacggccagtgggtctgtgattgtacatgcc

SEQ ID NO: 56835 - DNA, 37 bp, Artificial Sequence
  primer
gtaaaacgacggccagttaccggtacaacttggcctg

SEQ ID NO: 56836 - DNA, 38 bp, Artificial Sequence
  primer
gtaaaacgacggccagttattcctccatcatgggtttg

SEQ ID NO: 56837 - DNA, 22 bp, Artificial Sequence
  primer
tcatctgcaaagtgcttctctc

SEQ ID NO: 56838 - DNA, 38 bp, Artificial Sequence
  primer
gtaaaacgacggccagtgcatcttggctgctagtttgg

SEQ ID NO: 56839 - DNA, 38 bp, Artificial Sequence
  primer
gtaaaacgacggccagtttggcctacagtttagggagg

SEQ ID NO: 56840 - DNA, 38 bp, Artificial Sequence
  primer
gtaaaacgacggccagtagcctgccacaagagtagagg

SEQ ID NO: 56841 - DNA, 38 bp, Artificial Sequence
  primer
gtaaaacgacggccagtgggttaatgtggtcatccctg

SEQ ID NO: 56842 - DNA, 37 bp, Artificial Sequence
  primer
gtaaaacgacggccagttcacctttcaggacagtggc

SEQ ID NO: 56843 - DNA, 21 bp, Artificial Sequence
  primer
gggtagcacctgttgcctaag

SEQ ID NO: 56844 - DNA, 22 bp, Artificial Sequence
  primer
gattgcttctcttgattgctgg

SEQ ID NO: 56845 - DNA, 36 bp, Artificial Sequence
  primer
gtaaaacgacggccagtcactgggacctgtcccttc

SEQ ID NO: 56846 - DNA, 38 bp, Artificial Sequence
  primer
gtaaaacgacggccagtctatggagaatccctgccttc

SEQ ID NO: 56847 - DNA, 38 bp, Artificial Sequence
  primer
gtaaaacgacggccagtaggcagtaggtgaatgctgtg

SEQ ID NO: 56848 - DNA, 21 bp, Artificial Sequence
  primer
atcaaagaaagtgagccgagg

SEQ ID NO: 56849 - DNA, 21 bp, Artificial Sequence
  primer
gtctgacgaggacacattccc

SEQ ID NO: 56850 - DNA, 38 bp, Artificial Sequence
  primer
gtaaaacgacggccagtgtcagctgattctcccaggac

SEQ ID NO: 56851 - DNA, 38 bp, Artificial Sequence
  primer
gtaaaacgacggccagtgtgaggactcacctctttggc

SEQ ID NO: 56852 - DNA, 38 bp, Artificial Sequence
  primer
gtaaaacgacggccagttactgagtcccagtcgcacag

SEQ ID NO: 56853 - DNA, 38 bp, Artificial Sequence
  primer
gtaaaacgacggccagtccaactccctaatcccaggac

SEQ ID NO: 56854 - DNA, 39 bp, Artificial Sequence
  primer
gtaaaacgacggccagttcacattctgtctcttccttgc

SEQ ID NO: 56855 - DNA, 21 bp, Artificial Sequence
  primer
ctgcctagtcagttctgcgtc

SEQ ID NO: 56856 - DNA, 38 bp, Artificial Sequence
  primer
gtaaaacgacggccagttgaggactccaggaactgatg

SEQ ID NO: 56857 - DNA, 20 bp, Artificial Sequence
  primer
gagtgacaccagcacgttcc

SEQ ID NO: 56858 - DNA, 38 bp, Artificial Sequence
  primer
gtaaaacgacggccagtcccaccttacctctctgatcc

SEQ ID NO: 56859 - DNA, 22 bp, Artificial Sequence
  primer
tggctctggatgtgatataggg

SEQ ID NO: 56860 - DNA, 21 bp, Artificial Sequence
  primer
attggttgctatggaaatggg

SEQ ID NO: 56861 - DNA, 21 bp, Artificial Sequence
  primer
gaggcagggatctaagtcgtg

SEQ ID NO: 56862 - DNA, 21 bp, Artificial Sequence
  primer
gttcacaggcttccaggtctc

SEQ ID NO: 56863 - DNA, 22 bp, Artificial Sequence
  primer
tctcatgtccagataaccctcc

SEQ ID NO: 56864 - DNA, 21 bp, Artificial Sequence
  primer
cggtggtctcagggtctaaag

SEQ ID NO: 56865 - DNA, 38 bp, Artificial Sequence
  primer
gtaaaacgacggccagtccctggtggtaagaagtggtc

SEQ ID NO: 56866 - DNA, 38 bp, Artificial Sequence
  primer
gtaaaacgacggccagtgctcattggtgagatcctctg

SEQ ID NO: 56867 - DNA, 21 bp, Artificial Sequence
  primer
cacgtttcccaccatacacag

SEQ ID NO: 56868 - DNA, 21 bp, Artificial Sequence
  primer
gtgaggccatctcagtcacag

SEQ ID NO: 56869 - DNA, 38 bp, Artificial Sequence
  primer
gtaaaacgacggccagtcttgctcttacccactgcacc

SEQ ID NO: 56870 - DNA, 20 bp, Artificial Sequence
  primer
gtgagccaccatgtttgtcc

SEQ ID NO: 56871 - DNA, 38 bp, Artificial Sequence
  primer
gtaaaacgacggccagtagttccactacattgccctgg

SEQ ID NO: 56872 - DNA, 38 bp, Artificial Sequence
  primer
gtaaaacgacggccagtcacataggtacccgcacttcc

SEQ ID NO: 56873 - DNA, 21 bp, Artificial Sequence
  primer
tcagcccatgggagaatttag

SEQ ID NO: 56874 - DNA, 38 bp, Artificial Sequence
  primer
gtaaaacgacggccagtagtctttatcgccaggcaaac

SEQ ID NO: 56875 - DNA, 21 bp, Artificial Sequence
  primer
agggacagcagtaccaagctc

SEQ ID NO: 56876 - DNA, 38 bp, Artificial Sequence
  primer
gtaaaacgacggccagttagaggccatactcaggtggg

SEQ ID NO: 56877 - DNA, 39 bp, Artificial Sequence
  primer
gtaaaacgacggccagttgaggaacaaggtatgtgttgg

SEQ ID NO: 56878 - DNA, 35 bp, Artificial Sequence
  primer
gtaaaacgacggccagtgcacgggcttcatctgag

SEQ ID NO: 56879 - DNA, 38 bp, Artificial Sequence
  primer
gtaaaacgacggccagtaggagggaggataaggactgg

SEQ ID NO: 56880 - DNA, 38 bp, Artificial Sequence
  primer
gtaaaacgacggccagtctggcaacagataggtggaag

SEQ ID NO: 56881 - DNA, 20 bp, Artificial Sequence
  primer
tcctagtggccaaatacggg

SEQ ID NO: 56882 - DNA, 38 bp, Artificial Sequence
  primer
gtaaaacgacggccagtaccgtacctggcctgattatg

SEQ ID NO: 56883 - DNA, 38 bp, Artificial Sequence
  primer
gtaaaacgacggccagtttggagcagtggatgaatctc

SEQ ID NO: 56884 - DNA, 38 bp, Artificial Sequence
  primer
gtaaaacgacggccagtgtggtgcgttagaatcaatgg

SEQ ID NO: 56885 - DNA, 38 bp, Artificial Sequence
  primer
gtaaaacgacggccagtatagccaccctcccttaaagc

SEQ ID NO: 56886 - DNA, 38 bp, Artificial Sequence
  primer
gtaaaacgacggccagtttgcagtcacgaatgtctcac

SEQ ID NO: 56887 - DNA, 40 bp, Artificial Sequence
  primer
gtaaaacgacggccagtttggcacaaatttgctataatgc

SEQ ID NO: 56888 - DNA, 23 bp, Artificial Sequence
  primer
ttggcacaaatttgctataatgc

SEQ ID NO: 56889 - DNA, 44 bp, Artificial Sequence
  primer
gtaaaacgacggccagtaaatgaaattaacttctataggcatga

SEQ ID NO: 56890 - DNA, 38 bp, Artificial Sequence
  primer
gtaaaacgacggccagttttgaacaaattggatttggg

SEQ ID NO: 56891 - DNA, 40 bp, Artificial Sequence
  primer
gtaaaacgacggccagttgttaggcacatagaacctgctc

SEQ ID NO: 56892 - DNA, 41 bp, Artificial Sequence
  primer
gtaaaacgacggccagtttcaagaattatggattgtgttgg

SEQ ID NO: 56893 - DNA, 19 bp, Artificial Sequence
  primer
gtgaatcactgcacctggc

SEQ ID NO: 56894 - DNA, 37 bp, Artificial Sequence
  primer
gtaaaacgacggccagtagtgcagacctctgaccctg

SEQ ID NO: 56895 - DNA, 39 bp, Artificial Sequence
  primer
gtaaaacgacggccagtgagaaatgttcttccaaatggg

SEQ ID NO: 56896 - DNA, 38 bp, Artificial Sequence
  primer
gtaaaacgacggccagtctgaaccttataggtgccacg

SEQ ID NO: 56897 - DNA, 24 bp, Artificial Sequence
  primer
aatgcttgatgaaatagagcaatg

SEQ ID NO: 56898 - DNA, 43 bp, Artificial Sequence
  primer
gtaaaacgacggccagtattgattattctgccaatagaaactg

SEQ ID NO: 56899 - DNA, 27 bp, Artificial Sequence
  primer
cactaatagcagaattgtgacatcatc

SEQ ID NO: 56900 - DNA, 21 bp, Artificial Sequence
  primer
cctttgagtagtccggtttgc

SEQ ID NO: 56901 - DNA, 20 bp, Artificial Sequence
  primer
ccagcctgggtgactaagtg

SEQ ID NO: 56902 - DNA, 39 bp, Artificial Sequence
  primer
gtaaaacgacggccagtctcagtgaccaaggtttgtgat

SEQ ID NO: 56903 - DNA, 36 bp, Artificial Sequence
  primer
gtaaaacgacggccagtcaccatgccctgcagaaag

SEQ ID NO: 56904 - DNA, 41 bp, Artificial Sequence
  primer
gtaaaacgacggccagtgcctacatactgaacctccttgag

SEQ ID NO: 56905 - DNA, 23 bp, Artificial Sequence
  primer
acatctatgcgcaaattatcttt

SEQ ID NO: 56906 - DNA, 22 bp, Artificial Sequence
  primer
ttaacagccatctgtgtcttgc

SEQ ID NO: 56907 - DNA, 35 bp, Artificial Sequence
  primer
gtaaaacgacggccagtcggcatgcgcctataatc

SEQ ID NO: 56908 - DNA, 38 bp, Artificial Sequence
  primer
gtaaaacgacggccagtcctaactggcataacagtggc

SEQ ID NO: 56909 - DNA, 21 bp, Artificial Sequence
  primer
aagtaacaggcttcctttgcc

SEQ ID NO: 56910 - DNA, 35 bp, Artificial Sequence
  primer
gtaaaacgacggccagtgtcgctaaggagcgacgg

SEQ ID NO: 56911 - DNA, 38 bp, Artificial Sequence
  primer
gtaaaacgacggccagtggattacaagtgtgagccacc

SEQ ID NO: 56912 - DNA, 21 bp, Artificial Sequence
  primer
caaaccacatccaaaccaaag

SEQ ID NO: 56913 - DNA, 38 bp, Artificial Sequence
  primer
gtaaaacgacggccagtcctcctcatctgcttctggag

SEQ ID NO: 56914 - DNA, 38 bp, Artificial Sequence
  primer
gtaaaacgacggccagttgtggccaggttactagggag

SEQ ID NO: 56915 - DNA, 38 bp, Artificial Sequence
  primer
gtaaaacgacggccagtcctaacaggaagctgccattg

SEQ ID NO: 56916 - DNA, 21 bp, Artificial Sequence
  primer
cccagcctacagtggtcattt

SEQ ID NO: 56917 - DNA, 38 bp, Artificial Sequence
  primer
gtaaaacgacggccagtttgcctcctaagactgatccc

SEQ ID NO: 56918 - DNA, 20 bp, Artificial Sequence
  primer
aggacctgaagcctgacctc

SEQ ID NO: 56919 - DNA, 38 bp, Artificial Sequence
  primer
gtaaaacgacggccagtgtgcttacgggaactcctctg

SEQ ID NO: 56920 - DNA, 21 bp, Artificial Sequence
  primer
ttgactccattgtgatggacc

SEQ ID NO: 56921 - DNA, 21 bp, Artificial Sequence
  primer
cctgctcttcaaacaacaacc

SEQ ID NO: 56922 - DNA, 38 bp, Artificial Sequence
  primer
gtaaaacgacggccagtaaatcataaatcccatggccc

SEQ ID NO: 56923 - DNA, 38 bp, Artificial Sequence
  primer
gtaaaacgacggccagttcctggaggacttggagtcac

SEQ ID NO: 56924 - DNA, 38 bp, Artificial Sequence
  primer
gtaaaacgacggccagtcaggccatatgtttcaatccc

SEQ ID NO: 56925 - DNA, 38 bp, Artificial Sequence
  primer
gtaaaacgacggccagttacacaaccaactcccaatgc

SEQ ID NO: 56926 - DNA, 21 bp, Artificial Sequence
  primer
tgcactaggtactggcattgg

SEQ ID NO: 56927 - DNA, 21 bp, Artificial Sequence
  primer
agaggagcttcgaaacactgg

SEQ ID NO: 56928 - DNA, 21 bp, Artificial Sequence
  primer
ttaaagcgactttcctcgctc

SEQ ID NO: 56929 - DNA, 38 bp, Artificial Sequence
  primer
gtaaaacgacggccagtggagagtggctgagcctgtag

SEQ ID NO: 56930 - DNA, 21 bp, Artificial Sequence
  primer
cactgggaggtctggtgagtc

SEQ ID NO: 56931 - DNA, 21 bp, Artificial Sequence
  primer
gtgactcccagagggtcaaag

SEQ ID NO: 56932 - DNA, 37 bp, Artificial Sequence
  primer
gtaaaacgacggccagtgagagtgggattggagaggg

SEQ ID NO: 56933 - DNA, 19 bp, Artificial Sequence
  primer
agtgtgcaggcagaggtgg

SEQ ID NO: 56934 - DNA, 38 bp, Artificial Sequence
  primer
gtaaaacgacggccagttagctagtcagcattcacgcc

SEQ ID NO: 56935 - DNA, 21 bp, Artificial Sequence
  primer
tacaaggtcatcaaaggcagc

SEQ ID NO: 56936 - DNA, 21 bp, Artificial Sequence
  primer
ttaaccggagatcacaaaggc

SEQ ID NO: 56937 - DNA, 22 bp, Artificial Sequence
  primer
cgaaacctgtgcctgtaacttc

SEQ ID NO: 56938 - DNA, 21 bp, Artificial Sequence
  primer
gctctgtgaagaaattgctgg

SEQ ID NO: 56939 - DNA, 20 bp, Artificial Sequence
  primer
aaccacagaaagggctcctg

SEQ ID NO: 56940 - DNA, 21 bp, Artificial Sequence
  primer
tgatggtgagagggtagcttg

SEQ ID NO: 56941 - DNA, 22 bp, Artificial Sequence
  primer
agtatgagacagcctttctgcc

SEQ ID NO: 56942 - DNA, 20 bp, Artificial Sequence
  primer
catgaacccaggaggcaaag

SEQ ID NO: 56943 - DNA, 21 bp, Artificial Sequence
  primer
tgttatatgccgtggatcagg

SEQ ID NO: 56944 - DNA, 25 bp, Artificial Sequence
  primer
gagagaaattagcttgccttgtacc

SEQ ID NO: 56945 - DNA, 21 bp, Artificial Sequence
  primer
gccctgcttggaataaagttg

SEQ ID NO: 56946 - DNA, 21 bp, Artificial Sequence
  primer
aatgtcataaccgcctcaacc

SEQ ID NO: 56947 - DNA, 27 bp, Artificial Sequence
  primer
caaattgtatttgacaggttattccag

SEQ ID NO: 56948 - DNA, 38 bp, Artificial Sequence
  primer
gtaaaacgacggccagtaggagagcaatgtcgaggaag

SEQ ID NO: 56949 - DNA, 37 bp, Artificial Sequence
  primer
gtaaaacgacggccagttggccaacacatagaaatcg

SEQ ID NO: 56950 - DNA, 21 bp, Artificial Sequence
  primer
acctgcattgctctcaacaag

SEQ ID NO: 56951 - DNA, 21 bp, Artificial Sequence
  primer
catcagcaaatcaaggctcac

SEQ ID NO: 56952 - DNA, 21 bp, Artificial Sequence
  primer
ataattccaatgctcctcggg

SEQ ID NO: 56953 - DNA, 21 bp, Artificial Sequence
  primer
gatctgctgggattcattcac

SEQ ID NO: 56954 - DNA, 38 bp, Artificial Sequence
  primer
gtaaaacgacggccagtccatggaattacctttgcctc

SEQ ID NO: 56955 - DNA, 21 bp, Artificial Sequence
  primer
taaatggctgctttctttccc

SEQ ID NO: 56956 - DNA, 20 bp, Artificial Sequence
  primer
gcctggcctgatctcatttc

SEQ ID NO: 56957 - DNA, 21 bp, Artificial Sequence
  primer
agcttgttgaggccagatacc

SEQ ID NO: 56958 - DNA, 21 bp, Artificial Sequence
  primer
cctcccaggtgtctcaatttc

SEQ ID NO: 56959 - DNA, 24 bp, Artificial Sequence
  primer
tgctatgggacacactagaatttg

SEQ ID NO: 56960 - DNA, 38 bp, Artificial Sequence
  primer
gtaaaacgacggccagtttaggtggatggttccctttg

SEQ ID NO: 56961 - DNA, 24 bp, Artificial Sequence
  primer
aatgcatgtatgagcgttaatcag

SEQ ID NO: 56962 - DNA, 22 bp, Artificial Sequence
  primer
ggctcaggttggtttagatcag

SEQ ID NO: 56963 - DNA, 35 bp, Artificial Sequence
  primer
gtaaaacgacggccagttgtccgtctccgtctccc

SEQ ID NO: 56964 - DNA, 22 bp, Artificial Sequence
  primer
gctcacaacatttggtgaacag

SEQ ID NO: 56965 - DNA, 22 bp, Artificial Sequence
  primer
catggtctgcctgaggatttag

SEQ ID NO: 56966 - DNA, 38 bp, Artificial Sequence
  primer
gtaaaacgacggccagtcctgcaatctaagccagcaat

SEQ ID NO: 56967 - DNA, 37 bp, Artificial Sequence
  primer
gtaaaacgacggccagtaaagcctggcaagtcagatt

SEQ ID NO: 56968 - DNA, 41 bp, Artificial Sequence
  primer
gtaaaacgacggccagtggctatgtttagaagctaggcaga

SEQ ID NO: 56969 - DNA, 38 bp, Artificial Sequence
  primer
gtaaaacgacggccagtggctcagctaccagtttggac

SEQ ID NO: 56970 - DNA, 37 bp, Artificial Sequence
  primer
gtaaaacgacggccagttatgcacccagggctgttag

SEQ ID NO: 56971 - DNA, 41 bp, Artificial Sequence
  primer
gtaaaacgacggccagtgagcagtgaatacagttagcatgg

SEQ ID NO: 56972 - DNA, 38 bp, Artificial Sequence
  primer
gtaaaacgacggccagtctgatgtgattctttgcctcc

SEQ ID NO: 56973 - DNA, 38 bp, Artificial Sequence
  primer
gtaaaacgacggccagtctacctctttcctgcctttgc

SEQ ID NO: 56974 - DNA, 21 bp, Artificial Sequence
  primer
ttgtcttactgcggaatgctg

SEQ ID NO: 56975 - DNA, 21 bp, Artificial Sequence
  primer
ggttcctcactttgcttctcc

SEQ ID NO: 56976 - DNA, 21 bp, Artificial Sequence
  primer
tgagagagggagctcttctgg

SEQ ID NO: 56977 - DNA, 37 bp, Artificial Sequence
  primer
gtaaaacgacggccagtaggactccgggtcagtcttc

SEQ ID NO: 56978 - DNA, 39 bp, Artificial Sequence
  primer
gtaaaacgacggccagtgactaggctcatagggtttggg

SEQ ID NO: 56979 - DNA, 38 bp, Artificial Sequence
  primer
gtaaaacgacggccagtagctgatctctgctgcctctc

SEQ ID NO: 56980 - DNA, 23 bp, Artificial Sequence
  primer
tgtacctattgcatgcatatccc

SEQ ID NO: 56981 - DNA, 22 bp, Artificial Sequence
  primer
tttaaagccatgactggaaacc

SEQ ID NO: 56982 - DNA, 38 bp, Artificial Sequence
  primer
gtaaaacgacggccagtagctctcccttcatcttgtgg

SEQ ID NO: 56983 - DNA, 37 bp, Artificial Sequence
  primer
gtaaaacgacggccagtaacaatcctcccacctcagc

SEQ ID NO: 56984 - DNA, 21 bp, Artificial Sequence
  primer
agggcagaggatgttatggag

SEQ ID NO: 56985 - DNA, 21 bp, Artificial Sequence
  primer
tacagtccaaggtcccaaagg

SEQ ID NO: 56986 - DNA, 38 bp, Artificial Sequence
  primer
gtaaaacgacggccagtggccacccttatttactccag

SEQ ID NO: 56987 - DNA, 21 bp, Artificial Sequence
  primer
ctgcttctcagggtcaggaac

SEQ ID NO: 56988 - DNA, 38 bp, Artificial Sequence
  primer
gtaaaacgacggccagtaggctttgctgccttagtagc

SEQ ID NO: 56989 - DNA, 21 bp, Artificial Sequence
  primer
ttggactatggtgagtctggg

SEQ ID NO: 56990 - DNA, 38 bp, Artificial Sequence
  primer
gtaaaacgacggccagtgaaggactcaggtagcttggc

SEQ ID NO: 56991 - DNA, 21 bp, Artificial Sequence
  primer
actcagcacctggactctgtg

SEQ ID NO: 56992 - DNA, 21 bp, Artificial Sequence
  primer
caacttcctgtcccattcacc

SEQ ID NO: 56993 - DNA, 38 bp, Artificial Sequence
  primer
gtaaaacgacggccagtcatacacactgttggcactgg

SEQ ID NO: 56994 - DNA, 38 bp, Artificial Sequence
  primer
gtaaaacgacggccagtaatcttccagggtcctgtgtg

SEQ ID NO: 56995 - DNA, 21 bp, Artificial Sequence
  primer
caagcagtaagtgctgccaag

SEQ ID NO: 56996 - DNA, 39 bp, Artificial Sequence
  primer
gtaaaacgacggccagtgtgggagatgagatagggactg

SEQ ID NO: 56997 - DNA, 21 bp, Artificial Sequence
  primer
cgagtctgtctccatcacctg

SEQ ID NO: 56998 - DNA, 21 bp, Artificial Sequence
  primer
aagggagagcaccttgacctc

SEQ ID NO: 56999 - DNA, 39 bp, Artificial Sequence
  primer
gtaaaacgacggccagtgctgctcacattctgtgttgag

SEQ ID NO: 57000 - DNA, 22 bp, Artificial Sequence
  primer
cgtaagacagacatgcacattg

SEQ ID NO: 57001 - DNA, 39 bp, Artificial Sequence
  primer
gtaaaacgacggccagtaacagggaaagggaagaaactg

SEQ ID NO: 57002 - DNA, 38 bp, Artificial Sequence
  primer
gtaaaacgacggccagtatagccaccttgtcttggtcc

SEQ ID NO: 57003 - DNA, 38 bp, Artificial Sequence
  primer
gtaaaacgacggccagtaatggctcagacatggaaagg

SEQ ID NO: 57004 - DNA, 38 bp, Artificial Sequence
  primer
gtaaaacgacggccagtgcgaagacaagaagacgtgtg

SEQ ID NO: 57005 - DNA, 38 bp, Artificial Sequence
  primer
gtaaaacgacggccagtgtatcaccatgggttgctttg

SEQ ID NO: 57006 - DNA, 38 bp, Artificial Sequence
  primer
gtaaaacgacggccagtcattggttcaatcctctccac

SEQ ID NO: 57007 - DNA, 35 bp, Artificial Sequence
  primer
gtaaaacgacggccagtgcaagaacacgtgcatgg

SEQ ID NO: 57008 - DNA, 36 bp, Artificial Sequence
  primer
gtaaaacgacggccagtattgctgaatgaggcctgg

SEQ ID NO: 57009 - DNA, 35 bp, Artificial Sequence
  primer
gtaaaacgacggccagtactctccctgccgtccag

SEQ ID NO: 57010 - DNA, 36 bp, Artificial Sequence
  primer
gtaaaacgacggccagtcacagcccagtcatcgtgt

SEQ ID NO: 57011 - DNA, 20 bp, Artificial Sequence
  primer
gagatctcggctgacctgtg

SEQ ID NO: 57012 - DNA, 38 bp, Artificial Sequence
  primer
gtaaaacgacggccagtatgactgagtaggaccctggc

SEQ ID NO: 57013 - DNA, 21 bp, Artificial Sequence
  primer
gtttccaggtggtggagagtc

SEQ ID NO: 57014 - DNA, 36 bp, Artificial Sequence
  primer
gtaaaacgacggccagtctcttctggcctcagtggg

SEQ ID NO: 57015 - DNA, 36 bp, Artificial Sequence
  primer
gtaaaacgacggccagtcagctgagctcctgtgacg

SEQ ID NO: 57016 - DNA, 37 bp, Artificial Sequence
  primer
gtaaaacgacggccagttgggaaccatgttcctaacg

SEQ ID NO: 57017 - DNA, 37 bp, Artificial Sequence
  primer
gtaaaacgacggccagtaggacctgggatctggagag

SEQ ID NO: 57018 - DNA, 37 bp, Artificial Sequence
  primer
gtaaaacgacggccagtcacagtgttctcaggcatcg

SEQ ID NO: 57019 - DNA, 38 bp, Artificial Sequence
  primer
gtaaaacgacggccagttgtcacacagatgtgcatcaa

SEQ ID NO: 57020 - DNA, 21 bp, Artificial Sequence
  primer
ctgtgaccctgactccttcag

SEQ ID NO: 57021 - DNA, 21 bp, Artificial Sequence
  primer
cagccttaacctcccactcac

SEQ ID NO: 57022 - DNA, 20 bp, Artificial Sequence
  primer
atctgctgcatctcccagag

SEQ ID NO: 57023 - DNA, 40 bp, Artificial Sequence
  primer
gtaaaacgacggccagtgggagcaacatagtaaggctgag

SEQ ID NO: 57024 - DNA, 21 bp, Artificial Sequence
  primer
agctcacctgtgcttgaaagt

SEQ ID NO: 57025 - DNA, 38 bp, Artificial Sequence
  primer
gtaaaacgacggccagtccttgtcagttcaaatccctg

SEQ ID NO: 57026 - DNA, 22 bp, Artificial Sequence
  primer
tgaatgtgaaccctttcatgtc

SEQ ID NO: 57027 - DNA, 21 bp, Artificial Sequence
  primer
atcccatgaacactctgggtc

SEQ ID NO: 57028 - DNA, 38 bp, Artificial Sequence
  primer
gtaaaacgacggccagttttggagttcctcttccttcc

SEQ ID NO: 57029 - DNA, 38 bp, Artificial Sequence
  primer
gtaaaacgacggccagtaatggacctttgtgcctcttc

SEQ ID NO: 57030 - DNA, 20 bp, Artificial Sequence
  primer
tgctgtatcagatttccggg

SEQ ID NO: 57031 - DNA, 22 bp, Artificial Sequence
  primer
atcagtgttgttgaccaggaag

SEQ ID NO: 57032 - DNA, 25 bp, Artificial Sequence
  primer
cgaccatagtaatctttggtacgtg

SEQ ID NO: 57033 - DNA, 21 bp, Artificial Sequence
  primer
agttctgagccgaggtcgtag

SEQ ID NO: 57034 - DNA, 21 bp, Artificial Sequence
  primer
ggtgtggtctcattaacaccc

SEQ ID NO: 57035 - DNA, 38 bp, Artificial Sequence
  primer
gtaaaacgacggccagttgtcaaagcaacccagatcac

SEQ ID NO: 57036 - DNA, 21 bp, Artificial Sequence
  primer
tgtaggtgtgtggtgggacac

SEQ ID NO: 57037 - DNA, 18 bp, Artificial Sequence
  primer
cagggtgtctcccatccc

SEQ ID NO: 57038 - DNA, 36 bp, Artificial Sequence
  primer
gtaaaacgacggccagtctgctctccctttcctccc

SEQ ID NO: 57039 - DNA, 36 bp, Artificial Sequence
  primer
gtaaaacgacggccagtgtgaggcctgggagttctg

SEQ ID NO: 57040 - DNA, 38 bp, Artificial Sequence
  primer
gtaaaacgacggccagtcactgtgggaagatgcttgac

SEQ ID NO: 57041 - DNA, 35 bp, Artificial Sequence
  primer
gtaaaacgacggccagtagctgggccaagagcatc

SEQ ID NO: 57042 - DNA, 21 bp, Artificial Sequence
  primer
catccagcagtgctcaagata

SEQ ID NO: 57043 - DNA, 21 bp, Artificial Sequence
  primer
ccttagcatagagcccttccc

SEQ ID NO: 57044 - DNA, 20 bp, Artificial Sequence
  primer
caagtagctgcctggtccac

SEQ ID NO: 57045 - DNA, 38 bp, Artificial Sequence
  primer
gtaaaacgacggccagtgggatgcgccattactgttag

SEQ ID NO: 57046 - DNA, 38 bp, Artificial Sequence
  primer
gtaaaacgacggccagtaacccaactttgcttcctgac

SEQ ID NO: 57047 - DNA, 39 bp, Artificial Sequence
  primer
gtaaaacgacggccagttcttacgctacacagggaaagc

SEQ ID NO: 57048 - DNA, 22 bp, Artificial Sequence
  primer
gagtcccagctctgtcattagc

SEQ ID NO: 57049 - DNA, 21 bp, Artificial Sequence
  primer
tatcatggctctgagctgtcc

SEQ ID NO: 57050 - DNA, 21 bp, Artificial Sequence
  primer
cagaggtttggtgtagctccc

SEQ ID NO: 57051 - DNA, 38 bp, Artificial Sequence
  primer
gtaaaacgacggccagtcggagtctagtttccctggtg

SEQ ID NO: 57052 - DNA, 25 bp, Artificial Sequence
  primer
gacttgaaatggatttgtatgaagc

SEQ ID NO: 57053 - DNA, 40 bp, Artificial Sequence
  primer
gtaaaacgacggccagttttaacagtgattatggaagcgg

SEQ ID NO: 57054 - DNA, 21 bp, Artificial Sequence
  primer
gtgccctactttatgcacacg

SEQ ID NO: 57055 - DNA, 39 bp, Artificial Sequence
  primer
gtaaaacgacggccagttgctattctaccaggttggtgc

SEQ ID NO: 57056 - DNA, 21 bp, Artificial Sequence
  primer
acctgaaatagggcaggaacc

SEQ ID NO: 57057 - DNA, 21 bp, Artificial Sequence
  primer
ttgactaacactgccaggtgc

SEQ ID NO: 57058 - DNA, 38 bp, Artificial Sequence
  primer
gtaaaacgacggccagtattcacaaacaaggagcaggg

SEQ ID NO: 57059 - DNA, 43 bp, Artificial Sequence
  primer
gtaaaacgacggccagtggtgaagtttaacattaggagcattc

SEQ ID NO: 57060 - DNA, 39 bp, Artificial Sequence
  primer
gtaaaacgacggccagtttgggcttaagacaaagtgagg

SEQ ID NO: 57061 - DNA, 21 bp, Artificial Sequence
  primer
gccctttgttgtaaccctgtc

SEQ ID NO: 57062 - DNA, 21 bp, Artificial Sequence
  primer
gattccagctgttcgtccttc

SEQ ID NO: 57063 - DNA, 21 bp, Artificial Sequence
  primer
tatgatgactgctccagcacc

SEQ ID NO: 57064 - DNA, 38 bp, Artificial Sequence
  primer
gtaaaacgacggccagtaccatgtttgttctccttgcc

SEQ ID NO: 57065 - DNA, 38 bp, Artificial Sequence
  primer
gtaaaacgacggccagtggcaagtttgatttagccacc

SEQ ID NO: 57066 - DNA, 41 bp, Artificial Sequence
  primer
gtaaaacgacggccagtgccataattggaatatttagcgtt

SEQ ID NO: 57067 - DNA, 38 bp, Artificial Sequence
  primer
gtaaaacgacggccagtctgatgcagaagccagctacc

SEQ ID NO: 57068 - DNA, 41 bp, Artificial Sequence
  primer
gtaaaacgacggccagtgaaatgcaagactctgaacaaatc

SEQ ID NO: 57069 - DNA, 38 bp, Artificial Sequence
  primer
gtaaaacgacggccagtctcaacaccacaggcagaaac

SEQ ID NO: 57070 - DNA, 38 bp, Artificial Sequence
  primer
gtaaaacgacggccagtgtgtgctgctaaagaaggcag

SEQ ID NO: 57071 - DNA, 38 bp, Artificial Sequence
  primer
gtaaaacgacggccagtgatgggagtttgggaatgatg

SEQ ID NO: 57072 - DNA, 38 bp, Artificial Sequence
  primer
gtaaaacgacggccagtgttggctaccctcctttcttg

SEQ ID NO: 57073 - DNA, 37 bp, Artificial Sequence
  primer
gtaaaacgacggccagtatcatgactgaatgctgccc

SEQ ID NO: 57074 - DNA, 18 bp, Artificial Sequence
  primer
gggtctcatggcccagtt

SEQ ID NO: 57075 - DNA, 21 bp, Artificial Sequence
  primer
agtttcgcgagatttggtagc

SEQ ID NO: 57076 - DNA, 38 bp, Artificial Sequence
  primer
gtaaaacgacggccagtcctctagaatcgtgtcccagc

SEQ ID NO: 57077 - DNA, 21 bp, Artificial Sequence
  primer
atgactccttgccctcagttc

SEQ ID NO: 57078 - DNA, 38 bp, Artificial Sequence
  primer
gtaaaacgacggccagtaacagggtaagggagggtgag

SEQ ID NO: 57079 - DNA, 38 bp, Artificial Sequence
  primer
gtaaaacgacggccagtctggatgagtgtgtctctgcc

SEQ ID NO: 57080 - DNA, 21 bp, Artificial Sequence
  primer
taccttccttccaggctcttg

SEQ ID NO: 57081 - DNA, 37 bp, Artificial Sequence
  primer
gtaaaacgacggccagtagacaaccagtgttgcctgc

SEQ ID NO: 57082 - DNA, 38 bp, Artificial Sequence
  primer
gtaaaacgacggccagttgtacatggaagctgaggctg

SEQ ID NO: 57083 - DNA, 38 bp, Artificial Sequence
  primer
gtaaaacgacggccagtttctgcagttggtgcagtagg

SEQ ID NO: 57084 - DNA, 38 bp, Artificial Sequence
  primer
gtaaaacgacggccagtgcagcatcccatagtcctttc

SEQ ID NO: 57085 - DNA, 37 bp, Artificial Sequence
  primer
gtaaaacgacggccagtgtggttggaattgatggtgc

SEQ ID NO: 57086 - DNA, 21 bp, Artificial Sequence
  primer
agcagtacagtgcagccattg

SEQ ID NO: 57087 - DNA, 38 bp, Artificial Sequence
  primer
gtaaaacgacggccagtggcagaaagagccgtaagttc

SEQ ID NO: 57088 - DNA, 21 bp, Artificial Sequence
  primer
agtgaaggctttgaatcggac

SEQ ID NO: 57089 - DNA, 37 bp, Artificial Sequence
  primer
gtaaaacgacggccagtcacagagctgaggcctgttc

SEQ ID NO: 57090 - DNA, 21 bp, Artificial Sequence
  primer
tctgaacataggccagatccc

SEQ ID NO: 57091 - DNA, 21 bp, Artificial Sequence
  primer
gataattcccaaagggaaggg

SEQ ID NO: 57092 - DNA, 38 bp, Artificial Sequence
  primer
gtaaaacgacggccagttagaggctctgggccttagtg

SEQ ID NO: 57093 - DNA, 21 bp, Artificial Sequence
  primer
ttgttcagagtgcagtggaag

SEQ ID NO: 57094 - DNA, 21 bp, Artificial Sequence
  primer
catagagccaccttgagcacc

SEQ ID NO: 57095 - DNA, 38 bp, Artificial Sequence
  primer
gtaaaacgacggccagttttcagagaactttgggagcc

SEQ ID NO: 57096 - DNA, 21 bp, Artificial Sequence
  primer
cttgtctccagaagccctgac

SEQ ID NO: 57097 - DNA, 20 bp, Artificial Sequence
  primer
cctggagatcctggtgtttg

SEQ ID NO: 57098 - DNA, 21 bp, Artificial Sequence
  primer
atggtgtggaatagggacgag

SEQ ID NO: 57099 - DNA, 37 bp, Artificial Sequence
  primer
gtaaaacgacggccagtctatatagggcgcgcaagtg

SEQ ID NO: 57100 - DNA, 38 bp, Artificial Sequence
  primer
gtaaaacgacggccagtcagtgatattggctaccgcag

SEQ ID NO: 57101 - DNA, 38 bp, Artificial Sequence
  primer
gtaaaacgacggccagtagaaacttaccgtgacctcgc

SEQ ID NO: 57102 - DNA, 18 bp, Artificial Sequence
  primer
ccaaagtgctgagccgag

SEQ ID NO: 57103 - DNA, 38 bp, Artificial Sequence
  primer
gtaaaacgacggccagtgaccactagcacatctgagcc

SEQ ID NO: 57104 - DNA, 37 bp, Artificial Sequence
  primer
gtaaaacgacggccagtttatgctgctcctgctctgg

SEQ ID NO: 57105 - DNA, 21 bp, Artificial Sequence
  primer
tcatctggtgccacaactacc

SEQ ID NO: 57106 - DNA, 38 bp, Artificial Sequence
  primer
gtaaaacgacggccagttttctccaggattgtcagtgg

SEQ ID NO: 57107 - DNA, 21 bp, Artificial Sequence
  primer
ctgtcattggtttgccttctg

SEQ ID NO: 57108 - DNA, 19 bp, Artificial Sequence
  primer
gatcccaaggcacagttgg

SEQ ID NO: 57109 - DNA, 21 bp, Artificial Sequence
  primer
ctaggcaatggagtgagaccc

SEQ ID NO: 57110 - DNA, 38 bp, Artificial Sequence
  primer
gtaaaacgacggccagtggaattgctgctgctggtaag

SEQ ID NO: 57111 - DNA, 21 bp, Artificial Sequence
  primer
ggagactgaattccatctggg

SEQ ID NO: 57112 - DNA, 21 bp, Artificial Sequence
  primer
gtaagcagcccttgtaccgtg

SEQ ID NO: 57113 - DNA, 21 bp, Artificial Sequence
  primer
gttgatagagaggtgcccagg

SEQ ID NO: 57114 - DNA, 39 bp, Artificial Sequence
  primer
gtaaaacgacggccagttcccaaagtgttcgtttactgg

SEQ ID NO: 57115 - DNA, 21 bp, Artificial Sequence
  primer
tcacattatgctctgcttggg

SEQ ID NO: 57116 - DNA, 37 bp, Artificial Sequence
  primer
gtaaaacgacggccagttccttggtggtaactcaggc

SEQ ID NO: 57117 - DNA, 38 bp, Artificial Sequence
  primer
gtaaaacgacggccagtctgtcttcaagtgatctgccc

SEQ ID NO: 57118 - DNA, 38 bp, Artificial Sequence
  primer
gtaaaacgacggccagttgtgagttccaggtgtccttg

SEQ ID NO: 57119 - DNA, 37 bp, Artificial Sequence
  primer
gtaaaacgacggccagttgctgttgccctactcatcc

SEQ ID NO: 57120 - DNA, 23 bp, Artificial Sequence
  primer
cggttcaggtaattatctctggg

SEQ ID NO: 57121 - DNA, 22 bp, Artificial Sequence
  primer
tcgggaacctctgagaatgtta

SEQ ID NO: 57122 - DNA, 23 bp, Artificial Sequence
  primer
tgctatctcccaacttcctattg

SEQ ID NO: 57123 - DNA, 27 bp, Artificial Sequence
  primer
aagaagaacttatgaaactggctaaac

SEQ ID NO: 57124 - DNA, 24 bp, Artificial Sequence
  primer
tggaagagctagatgtgattcaag

SEQ ID NO: 57125 - DNA, 20 bp, Artificial Sequence
  primer
accaaattgctgaagcagcc

SEQ ID NO: 57126 - DNA, 38 bp, Artificial Sequence
  primer
gtaaaacgacggccagttcgacatgcctgaactctttc

SEQ ID NO: 57127 - DNA, 41 bp, Artificial Sequence
  primer
gtaaaacgacggccagttctgaaaggaagtcagctttgaac

SEQ ID NO: 57128 - DNA, 20 bp, Artificial Sequence
  primer
ggaatgatccctcatttgcc

SEQ ID NO: 57129 - DNA, 21 bp, Artificial Sequence
  primer
cgaacatggagccaaactaac

SEQ ID NO: 57130 - DNA, 22 bp, Artificial Sequence
  primer
aatcaaagcatttgaatccagg

SEQ ID NO: 57131 - DNA, 21 bp, Artificial Sequence
  primer
cagatgaagctcagagcaacc

SEQ ID NO: 57132 - DNA, 38 bp, Artificial Sequence
  primer
gtaaaacgacggccagttggcaaatctgggtgattaaa

SEQ ID NO: 57133 - DNA, 37 bp, Artificial Sequence
  primer
gtaaaacgacggccagttaaggcacagggagggaaag

SEQ ID NO: 57134 - DNA, 20 bp, Artificial Sequence
  primer
gggcatctccctgtagcttg

SEQ ID NO: 57135 - DNA, 38 bp, Artificial Sequence
  primer
gtaaaacgacggccagtgacttaaaggatcaggcaggg

SEQ ID NO: 57136 - DNA, 21 bp, Artificial Sequence
  primer
gcatggtgagtggagtgaaag

SEQ ID NO: 57137 - DNA, 40 bp, Artificial Sequence
  primer
gtaaaacgacggccagttgaacgtttagttaagggaatgg

SEQ ID NO: 57138 - DNA, 38 bp, Artificial Sequence
  primer
gtaaaacgacggccagtgattaaattgggctccttccc

SEQ ID NO: 57139 - DNA, 25 bp, Artificial Sequence
  primer
cggtgaaatgcaactacttattctg

SEQ ID NO: 57140 - DNA, 38 bp, Artificial Sequence
  primer
gtaaaacgacggccagtagagattgagtccctgagccc

SEQ ID NO: 57141 - DNA, 21 bp, Artificial Sequence
  primer
gagagtgataggtgggcaagg

SEQ ID NO: 57142 - DNA, 20 bp, Artificial Sequence
  primer
ggataggtgattgacgcagc

SEQ ID NO: 57143 - DNA, 38 bp, Artificial Sequence
  primer
gtaaaacgacggccagtgcattaggtgactggctgagg

SEQ ID NO: 57144 - DNA, 27 bp, Artificial Sequence
  primer
agtggtacagtgatagacacaaatagc

SEQ ID NO: 57145 - DNA, 37 bp, Artificial Sequence
  primer
gtaaaacgacggccagttcttgactccggtgatctgc

SEQ ID NO: 57146 - DNA, 21 bp, Artificial Sequence
  primer
acaaaggcctacttccaggtg

SEQ ID NO: 57147 - DNA, 21 bp, Artificial Sequence
  primer
gtgtatccaaaggtgcacacg

SEQ ID NO: 57148 - DNA, 39 bp, Artificial Sequence
  primer
gtaaaacgacggccagtaattccaagcatcaaaggagtg

SEQ ID NO: 57149 - DNA, 38 bp, Artificial Sequence
  primer
gtaaaacgacggccagttacagctaatgtggcaaaggc

SEQ ID NO: 57150 - DNA, 24 bp, Artificial Sequence
  primer
gaggaggtgacatgcttaatatgg

SEQ ID NO: 57151 - DNA, 21 bp, Artificial Sequence
  primer
catgcagaagagttaagccca

SEQ ID NO: 57152 - DNA, 22 bp, Artificial Sequence
  primer
ttgctaacagcaaacactttgg

SEQ ID NO: 57153 - DNA, 21 bp, Artificial Sequence
  primer
ctgagatgggctagatgtggg

SEQ ID NO: 57154 - DNA, 38 bp, Artificial Sequence
  primer
gtaaaacgacggccagttcgtgcctcaacagtgatttg

SEQ ID NO: 57155 - DNA, 21 bp, Artificial Sequence
  primer
cctctcgattggtcctctgtc

SEQ ID NO: 57156 - DNA, 37 bp, Artificial Sequence
  primer
gtaaaacgacggccagtctttccaggctgtcgttgtc

SEQ ID NO: 57157 - DNA, 38 bp, Artificial Sequence
  primer
gtaaaacgacggccagttctagacagaggcctgaatgg

SEQ ID NO: 57158 - DNA, 37 bp, Artificial Sequence
  primer
gtaaaacgacggccagttcgctccctcattcattcac

SEQ ID NO: 57159 - DNA, 38 bp, Artificial Sequence
  primer
gtaaaacgacggccagtctgtgagaagtttcgcgtgtc

SEQ ID NO: 57160 - DNA, 19 bp, Artificial Sequence
  primer
cagagcgagaaggaggtgg

SEQ ID NO: 57161 - DNA, 24 bp, Artificial Sequence
  primer
ttaagcctgacatgagctaaattg

SEQ ID NO: 57162 - DNA, 41 bp, Artificial Sequence
  primer
gtaaaacgacggccagtaaacacagggagaatttccataaa

SEQ ID NO: 57163 - DNA, 25 bp, Artificial Sequence
  primer
catctcagacagagaaaggattcac

SEQ ID NO: 57164 - DNA, 41 bp, Artificial Sequence
  primer
gtaaaacgacggccagttgaaagtgtgaccatcaatgtagc

SEQ ID NO: 57165 - DNA, 21 bp, Artificial Sequence
  primer
ctcatcaaggttgtggcattg

SEQ ID NO: 57166 - DNA, 26 bp, Artificial Sequence
  primer
catttgcactgtctcttctacatctg

SEQ ID NO: 57167 - DNA, 22 bp, Artificial Sequence
  primer
gcccagccttctttgatatttg

SEQ ID NO: 57168 - DNA, 41 bp, Artificial Sequence
  primer
gtaaaacgacggccagtactgcacatagtgctccaaatact

SEQ ID NO: 57169 - DNA, 38 bp, Artificial Sequence
  primer
gtaaaacgacggccagtttcagcctttccctacagctc

SEQ ID NO: 57170 - DNA, 20 bp, Artificial Sequence
  primer
cagtgagccatgatcacacc

SEQ ID NO: 57171 - DNA, 41 bp, Artificial Sequence
  primer
gtaaaacgacggccagttgagggctagtcatatttctttgg

SEQ ID NO: 57172 - DNA, 26 bp, Artificial Sequence
  primer
ggtcttcataatctctatgggtaagc

SEQ ID NO: 57173 - DNA, 37 bp, Artificial Sequence
  primer
gtaaaacgacggccagttttctgggtctcaaagcgtc

SEQ ID NO: 57174 - DNA, 22 bp, Artificial Sequence
  primer
tcagtctggactacttggcctc

SEQ ID NO: 57175 - DNA, 20 bp, Artificial Sequence
  primer
gtcagtggaatgggaagctg

SEQ ID NO: 57176 - DNA, 37 bp, Artificial Sequence
  primer
gtaaaacgacggccagtttgtgtgtcacagctttgcg

SEQ ID NO: 57177 - DNA, 38 bp, Artificial Sequence
  primer
gtaaaacgacggccagtacacgaaggagagggtttagc

SEQ ID NO: 57178 - DNA, 38 bp, Artificial Sequence
  primer
gtaaaacgacggccagttaaagtgcttgagcctgctgt

SEQ ID NO: 57179 - DNA, 38 bp, Artificial Sequence
  primer
gtaaaacgacggccagtaggatttctgggtctccagtg

SEQ ID NO: 57180 - DNA, 39 bp, Artificial Sequence
  primer
gtaaaacgacggccagtcgttaactcaagtccagatgcc

SEQ ID NO: 57181 - DNA, 21 bp, Artificial Sequence
  primer
agttcagctgctgtccagacc

SEQ ID NO: 57182 - DNA, 23 bp, Artificial Sequence
  primer
ggcatgttatatgaattaagggc

SEQ ID NO: 57183 - DNA, 39 bp, Artificial Sequence
  primer
gtaaaacgacggccagtcaagaagattcgggagactgac

SEQ ID NO: 57184 - DNA, 24 bp, Artificial Sequence
  primer
cagtatgtgcgattaaattgaagg

SEQ ID NO: 57185 - DNA, 41 bp, Artificial Sequence
  primer
gtaaaacgacggccagtgcatgtaatcaagcacgtacaatg

SEQ ID NO: 57186 - DNA, 21 bp, Artificial Sequence
  primer
aacatgcagtattccagccaa

SEQ ID NO: 57187 - DNA, 40 bp, Artificial Sequence
  primer
gtaaaacgacggccagttggtgcatggagttgatttagag

SEQ ID NO: 57188 - DNA, 23 bp, Artificial Sequence
  primer
aaaccagcttagaggactgagtg

SEQ ID NO: 57189 - DNA, 18 bp, Artificial Sequence
  primer
agctcgcgcctgagtcat

SEQ ID NO: 57190 - DNA, 20 bp, Artificial Sequence
  primer
caaatgagcacctcctgctg

SEQ ID NO: 57191 - DNA, 38 bp, Artificial Sequence
  primer
gtaaaacgacggccagtctatctggccaggaggaaatg

SEQ ID NO: 57192 - DNA, 21 bp, Artificial Sequence
  primer
agacagagggagtgatgaggc

SEQ ID NO: 57193 - DNA, 39 bp, Artificial Sequence
  primer
gtaaaacgacggccagttggatggatgaatggaagtagc

SEQ ID NO: 57194 - DNA, 38 bp, Artificial Sequence
  primer
gtaaaacgacggccagtaaggagatgggagtttgaggg

SEQ ID NO: 57195 - DNA, 21 bp, Artificial Sequence
  primer
aaatgctgtgcagtgacttgg

SEQ ID NO: 57196 - DNA, 37 bp, Artificial Sequence
  primer
gtaaaacgacggccagtggaagaaagtcggatttccc

SEQ ID NO: 57197 - DNA, 21 bp, Artificial Sequence
  primer
tcagcttgccttcttacagcc

SEQ ID NO: 57198 - DNA, 38 bp, Artificial Sequence
  primer
gtaaaacgacggccagtagtgtcctctctgaggcttgg

SEQ ID NO: 57199 - DNA, 38 bp, Artificial Sequence
  primer
gtaaaacgacggccagtttagacaaggccacagtcagg

SEQ ID NO: 57200 - DNA, 38 bp, Artificial Sequence
  primer
gtaaaacgacggccagtagcttgtcccacatcataggg

SEQ ID NO: 57201 - DNA, 19 bp, Artificial Sequence
  primer
cctctcccttcttccgtcc

SEQ ID NO: 57202 - DNA, 21 bp, Artificial Sequence
  primer
gagaagagggatgtgggagtg

SEQ ID NO: 57203 - DNA, 22 bp, Artificial Sequence
  primer
gggtcaccatgaatgggtatag

SEQ ID NO: 57204 - DNA, 38 bp, Artificial Sequence
  primer
gtaaaacgacggccagtagctgtagaactcagccagga

SEQ ID NO: 57205 - DNA, 21 bp, Artificial Sequence
  primer
tattggtaggattgcccacag

SEQ ID NO: 57206 - DNA, 21 bp, Artificial Sequence
  primer
aaggaatcatgccaaggtttg

SEQ ID NO: 57207 - DNA, 22 bp, Artificial Sequence
  primer
ggtgtatgtcggtacttggtgc

SEQ ID NO: 57208 - DNA, 38 bp, Artificial Sequence
  primer
gtaaaacgacggccagtactccgtgcatctcatcattc

SEQ ID NO: 57209 - DNA, 38 bp, Artificial Sequence
  primer
gtaaaacgacggccagtgagtgctcacctgtcatttgc

SEQ ID NO: 57210 - DNA, 38 bp, Artificial Sequence
  primer
gtaaaacgacggccagtgttggtgatgctatggtcgtg

SEQ ID NO: 57211 - DNA, 38 bp, Artificial Sequence
  primer
gtaaaacgacggccagttgtcaccaacaccttgagtgc

SEQ ID NO: 57212 - DNA, 39 bp, Artificial Sequence
  primer
gtaaaacgacggccagttgcctcagaatcataatcaggg

SEQ ID NO: 57213 - DNA, 38 bp, Artificial Sequence
  primer
gtaaaacgacggccagtgatcctgaggaaatctccagc

SEQ ID NO: 57214 - DNA, 21 bp, Artificial Sequence
  primer
aactctccctgcctgcttaac

SEQ ID NO: 57215 - DNA, 21 bp, Artificial Sequence
  primer
tgaattctggtatccctgagc

SEQ ID NO: 57216 - DNA, 21 bp, Artificial Sequence
  primer
ggaatacacctgccatcatcc

SEQ ID NO: 57217 - DNA, 24 bp, Artificial Sequence
  primer
tctgctactgaaattcatcaaacg

SEQ ID NO: 57218 - DNA, 26 bp, Artificial Sequence
  primer
ttctggatttaaacaacaatagcaac

SEQ ID NO: 57219 - DNA, 25 bp, Artificial Sequence
  primer
gctggtatcatgttcgttcactaag

SEQ ID NO: 57220 - DNA, 38 bp, Artificial Sequence
  primer
gtaaaacgacggccagtctgcaccctgtccattgataa

SEQ ID NO: 57221 - DNA, 38 bp, Artificial Sequence
  primer
gtaaaacgacggccagtctgaaaggtggtggcagagtc

SEQ ID NO: 57222 - DNA, 38 bp, Artificial Sequence
  primer
gtaaaacgacggccagttgcccataaagtggttgattg

SEQ ID NO: 57223 - DNA, 40 bp, Artificial Sequence
  primer
gtaaaacgacggccagtcaggaaatccagattacgatagc

SEQ ID NO: 57224 - DNA, 26 bp, Artificial Sequence
  primer
catcctttcctgtatattaaaccacg

SEQ ID NO: 57225 - DNA, 38 bp, Artificial Sequence
  primer
gtaaaacgacggccagtctccaagtgtcaccagctcac

SEQ ID NO: 57226 - DNA, 37 bp, Artificial Sequence
  primer
gtaaaacgacggccagtgccataactcccagtccctg

SEQ ID NO: 57227 - DNA, 38 bp, Artificial Sequence
  primer
gtaaaacgacggccagtgtgccagggttgagagcttag

SEQ ID NO: 57228 - DNA, 20 bp, Artificial Sequence
  primer
cagctgggactgttctgtgg

SEQ ID NO: 57229 - DNA, 38 bp, Artificial Sequence
  primer
gtaaaacgacggccagtacccggacctctagatcattg

SEQ ID NO: 57230 - DNA, 38 bp, Artificial Sequence
  primer
gtaaaacgacggccagtctcaaccaacccagtctccac

SEQ ID NO: 57231 - DNA, 21 bp, Artificial Sequence
  primer
gggagtagcagtttggaggtg

SEQ ID NO: 57232 - DNA, 38 bp, Artificial Sequence
  primer
gtaaaacgacggccagtattctgagcagtggaatgtgc

SEQ ID NO: 57233 - DNA, 38 bp, Artificial Sequence
  primer
gtaaaacgacggccagtttgttggtctcagtggctacc

SEQ ID NO: 57234 - DNA, 38 bp, Artificial Sequence
  primer
gtaaaacgacggccagtcagtgagtcggagaagtttcg

SEQ ID NO: 57235 - DNA, 38 bp, Artificial Sequence
  primer
gtaaaacgacggccagtagtgccctacaccttcagcag

SEQ ID NO: 57236 - DNA, 37 bp, Artificial Sequence
  primer
gtaaaacgacggccagttctcggtccctactcccaag

SEQ ID NO: 57237 - DNA, 38 bp, Artificial Sequence
  primer
gtaaaacgacggccagtaaggctgttggtcctttcttg

SEQ ID NO: 57238 - DNA, 38 bp, Artificial Sequence
  primer
gtaaaacgacggccagtagaaggtatcagaagccctgc

SEQ ID NO: 57239 - DNA, 21 bp, Artificial Sequence
  primer
ctagggctgagtctgtggctc

SEQ ID NO: 57240 - DNA, 37 bp, Artificial Sequence
  primer
gtaaaacgacggccagtgcctaggagtaacaggctcg

SEQ ID NO: 57241 - DNA, 38 bp, Artificial Sequence
  primer
gtaaaacgacggccagtacctgggcaaagaacagtcac

SEQ ID NO: 57242 - DNA, 21 bp, Artificial Sequence
  primer
tacctccacacagagggcttc

SEQ ID NO: 57243 - DNA, 38 bp, Artificial Sequence
  primer
gtaaaacgacggccagttttcattgttgcaagagggtg

SEQ ID NO: 57244 - DNA, 21 bp, Artificial Sequence
  primer
agagctagcttggcactttgc

SEQ ID NO: 57245 - DNA, 21 bp, Artificial Sequence
  primer
tgcctgtactggtagaagggc

SEQ ID NO: 57246 - DNA, 21 bp, Artificial Sequence
  primer
gcattggtgtgtaaagcttgc

SEQ ID NO: 57247 - DNA, 40 bp, Artificial Sequence
  primer
gtaaaacgacggccagttccctctccaatatgagtcttcc

SEQ ID NO: 57248 - DNA, 38 bp, Artificial Sequence
  primer
gtaaaacgacggccagtcacagatctggctcacgattc

SEQ ID NO: 57249 - DNA, 38 bp, Artificial Sequence
  primer
gtaaaacgacggccagtagctgaaggcaagtttcatgg

SEQ ID NO: 57250 - DNA, 21 bp, Artificial Sequence
  primer
tttgcagaaggaagcattgtg

SEQ ID NO: 57251 - DNA, 21 bp, Artificial Sequence
  primer
tgcaaactagctttctgctgg

SEQ ID NO: 57252 - DNA, 41 bp, Artificial Sequence
  primer
gtaaaacgacggccagtgactcaagagcttcgaaatacaca

SEQ ID NO: 57253 - DNA, 38 bp, Artificial Sequence
  primer
gtaaaacgacggccagtaaagccagaaagacatgaccc

SEQ ID NO: 57254 - DNA, 38 bp, Artificial Sequence
  primer
gtaaaacgacggccagttgcctaagccctcttgaagtc

SEQ ID NO: 57255 - DNA, 38 bp, Artificial Sequence
  primer
gtaaaacgacggccagtagccatgactctcttcccaag

SEQ ID NO: 57256 - DNA, 21 bp, Artificial Sequence
  primer
tcattgaccaaagcagtcagg

SEQ ID NO: 57257 - DNA, 21 bp, Artificial Sequence
  primer
ggaatacctcgttctcttccc

SEQ ID NO: 57258 - DNA, 20 bp, Artificial Sequence
  primer
cttaaatgaccgcgtctggc

SEQ ID NO: 57259 - DNA, 21 bp, Artificial Sequence
  primer
ccgagatggtctcatacctcc

SEQ ID NO: 57260 - DNA, 22 bp, Artificial Sequence
  primer
gaccttctccctttattccagc

SEQ ID NO: 57261 - DNA, 38 bp, Artificial Sequence
  primer
gtaaaacgacggccagttgcgctccaattgtatctttg

SEQ ID NO: 57262 - DNA, 21 bp, Artificial Sequence
  primer
tcctccatttaccgcctgtag

SEQ ID NO: 57263 - DNA, 21 bp, Artificial Sequence
  primer
caccaggagtcctaccctctg

SEQ ID NO: 57264 - DNA, 21 bp, Artificial Sequence
  primer
caagctaggcagaagcagttg

SEQ ID NO: 57265 - DNA, 19 bp, Artificial Sequence
  primer
taatagctcccgcagtgcc

SEQ ID NO: 57266 - DNA, 20 bp, Artificial Sequence
  primer
gggttcagtagctctccagc

SEQ ID NO: 57267 - DNA, 21 bp, Artificial Sequence
  primer
aaggatagcgattaccggagc

SEQ ID NO: 57268 - DNA, 21 bp, Artificial Sequence
  primer
gttgatgcagtcttctggtgg

SEQ ID NO: 57269 - DNA, 38 bp, Artificial Sequence
  primer
gtaaaacgacggccagtagatgaagtgttcagggtggg

SEQ ID NO: 57270 - DNA, 38 bp, Artificial Sequence
  primer
gtaaaacgacggccagtagggttgagaaacagcctgac

SEQ ID NO: 57271 - DNA, 38 bp, Artificial Sequence
  primer
gtaaaacgacggccagtaccattgagggattgagttgg

SEQ ID NO: 57272 - DNA, 38 bp, Artificial Sequence
  primer
gtaaaacgacggccagtaggcttccaagagtgcctttc

SEQ ID NO: 57273 - DNA, 38 bp, Artificial Sequence
  primer
gtaaaacgacggccagtctgtccagtccaccctactcc

SEQ ID NO: 57274 - DNA, 21 bp, Artificial Sequence
  primer
aaccgggtgaacatgacctac

SEQ ID NO: 57275 - DNA, 20 bp, Artificial Sequence
  primer
agtcacaggcacaggtgagg

SEQ ID NO: 57276 - DNA, 39 bp, Artificial Sequence
  primer
gtaaaacgacggccagtttctgggtgaagtaagtttggg

SEQ ID NO: 57277 - DNA, 20 bp, Artificial Sequence
  primer
ctggtgtttcacttccgctc

SEQ ID NO: 57278 - DNA, 24 bp, Artificial Sequence
  primer
tgttacttcgaagaccacactttg

SEQ ID NO: 57279 - DNA, 38 bp, Artificial Sequence
  primer
gtaaaacgacggccagttggcaccagtttagctctgtg

SEQ ID NO: 57280 - DNA, 37 bp, Artificial Sequence
  primer
gtaaaacgacggccagtactgcacaggccagaaagtc

SEQ ID NO: 57281 - DNA, 38 bp, Artificial Sequence
  primer
gtaaaacgacggccagtaagcttgagaagcacagaggc

SEQ ID NO: 57282 - DNA, 38 bp, Artificial Sequence
  primer
gtaaaacgacggccagtaaatgtgcctatcatggtccc

SEQ ID NO: 57283 - DNA, 36 bp, Artificial Sequence
  primer
gtaaaacgacggccagtggcagaccttcctgtgagc

SEQ ID NO: 57284 - DNA, 38 bp, Artificial Sequence
  primer
gtaaaacgacggccagtaaacctggagtgagcgtaagg

SEQ ID NO: 57285 - DNA, 42 bp, Artificial Sequence
  primer
gtaaaacgacggccagttttataatcggagttcctttccttc

SEQ ID NO: 57286 - DNA, 39 bp, Artificial Sequence
  primer
gtaaaacgacggccagttgggtcaaacctcatgtacaac

SEQ ID NO: 57287 - DNA, 38 bp, Artificial Sequence
  primer
gtaaaacgacggccagttgaattgtaattcccgagcac

SEQ ID NO: 57288 - DNA, 21 bp, Artificial Sequence
  primer
gttaatgaccctggtggcttc

SEQ ID NO: 57289 - DNA, 21 bp, Artificial Sequence
  primer
acaggagaaagcatgagggtc

SEQ ID NO: 57290 - DNA, 21 bp, Artificial Sequence
  primer
ctgtgaaagccatgtgacagc

SEQ ID NO: 57291 - DNA, 21 bp, Artificial Sequence
  primer
tctccttgtgtcttgtgggag

SEQ ID NO: 57292 - DNA, 21 bp, Artificial Sequence
  primer
atgcacaatcctagcaagcag

SEQ ID NO: 57293 - DNA, 20 bp, Artificial Sequence
  primer
ggtgattccaacctgcttcc

SEQ ID NO: 57294 - DNA, 37 bp, Artificial Sequence
  primer
gtaaaacgacggccagtcagaggccacctctttctgc

SEQ ID NO: 57295 - DNA, 38 bp, Artificial Sequence
  primer
gtaaaacgacggccagtaggtggaagatctgaaccagg

SEQ ID NO: 57296 - DNA, 38 bp, Artificial Sequence
  primer
gtaaaacgacggccagtcactcttggagagctggtgtg

SEQ ID NO: 57297 - DNA, 20 bp, Artificial Sequence
  primer
cactttgatggagaggcagc

SEQ ID NO: 57298 - DNA, 38 bp, Artificial Sequence
  primer
gtaaaacgacggccagtaattcactcacgtggagaggg

SEQ ID NO: 57299 - DNA, 38 bp, Artificial Sequence
  primer
gtaaaacgacggccagtgtgtgaggctgcaagaagttg

SEQ ID NO: 57300 - DNA, 38 bp, Artificial Sequence
  primer
gtaaaacgacggccagtctcctacccaaggagggaaac

SEQ ID NO: 57301 - DNA, 39 bp, Artificial Sequence
  primer
gtaaaacgacggccagtgcatgtcctctccatgtgagtc

SEQ ID NO: 57302 - DNA, 40 bp, Artificial Sequence
  primer
gtaaaacgacggccagtccttccatgtaccctgtagtctg

SEQ ID NO: 57303 - DNA, 23 bp, Artificial Sequence
  primer
ggtgtaagctcatgtccacattc

SEQ ID NO: 57304 - DNA, 38 bp, Artificial Sequence
  primer
gtaaaacgacggccagtcttcctggatgcctaatgtgc

SEQ ID NO: 57305 - DNA, 37 bp, Artificial Sequence
  primer
gtaaaacgacggccagtcttggaaccactgaagccag

SEQ ID NO: 57306 - DNA, 38 bp, Artificial Sequence
  primer
gtaaaacgacggccagtatttcacacggcctccagtag

SEQ ID NO: 57307 - DNA, 21 bp, Artificial Sequence
  primer
gcactgaggaagttcaggctc

SEQ ID NO: 57308 - DNA, 37 bp, Artificial Sequence
  primer
gtaaaacgacggccagttgattgggtgctcagactgc

SEQ ID NO: 57309 - DNA, 39 bp, Artificial Sequence
  primer
gtaaaacgacggccagtcagagctttgaaagacctttgg

SEQ ID NO: 57310 - DNA, 22 bp, Artificial Sequence
  primer
cacatgtgcctgtacacattgc

SEQ ID NO: 57311 - DNA, 20 bp, Artificial Sequence
  primer
agcctttgttacaggcaggg

SEQ ID NO: 57312 - DNA, 38 bp, Artificial Sequence
  primer
gtaaaacgacggccagttggagatgaatgttcaggcac

SEQ ID NO: 57313 - DNA, 21 bp, Artificial Sequence
  primer
tccaaatgtgagattgttggg

SEQ ID NO: 57314 - DNA, 20 bp, Artificial Sequence
  primer
ctcaggaccctgaccctttc

SEQ ID NO: 57315 - DNA, 38 bp, Artificial Sequence
  primer
gtaaaacgacggccagtgagctttgcatctctggcttc

SEQ ID NO: 57316 - DNA, 38 bp, Artificial Sequence
  primer
gtaaaacgacggccagtcttctcttgacctgcaaagcc

SEQ ID NO: 57317 - DNA, 21 bp, Artificial Sequence
  primer
aggctgtttgttctcctccac

SEQ ID NO: 57318 - DNA, 38 bp, Artificial Sequence
  primer
gtaaaacgacggccagtttgtagcaagacacccaggag

SEQ ID NO: 57319 - DNA, 21 bp, Artificial Sequence
  primer
tctgaggaaaccctccttgac

SEQ ID NO: 57320 - DNA, 40 bp, Artificial Sequence
  primer
gtaaaacgacggccagtggacagaatgtcctcagaatgtg

SEQ ID NO: 57321 - DNA, 20 bp, Artificial Sequence
  primer
tacaggtgcccactaccacg

SEQ ID NO: 57322 - DNA, 21 bp, Artificial Sequence
  primer
caaggagggattctcttggag

SEQ ID NO: 57323 - DNA, 38 bp, Artificial Sequence
  primer
gtaaaacgacggccagttctttcctgattccatccacc

SEQ ID NO: 57324 - DNA, 39 bp, Artificial Sequence
  primer
gtaaaacgacggccagttttggtaagattggctggtttg

SEQ ID NO: 57325 - DNA, 39 bp, Artificial Sequence
  primer
gtaaaacgacggccagtgctcttccctccttctcagttc

SEQ ID NO: 57326 - DNA, 36 bp, Artificial Sequence
  primer
gtaaaacgacggccagttgagtcatcccgggtcttc

SEQ ID NO: 57327 - DNA, 21 bp, Artificial Sequence
  primer
gacatttgtcaggttggttgc

SEQ ID NO: 57328 - DNA, 20 bp, Artificial Sequence
  primer
ccaaggcatttcacttcctg

SEQ ID NO: 57329 - DNA, 38 bp, Artificial Sequence
  primer
gtaaaacgacggccagtaccacaggcctcctttgatac

SEQ ID NO: 57330 - DNA, 38 bp, Artificial Sequence
  primer
gtaaaacgacggccagtaagtggcagtgacctggaaac

SEQ ID NO: 57331 - DNA, 39 bp, Artificial Sequence
  primer
gtaaaacgacggccagttccagcattctctcaatcaatg

SEQ ID NO: 57332 - DNA, 21 bp, Artificial Sequence
  primer
tcaccactaagcgaaaggatg

SEQ ID NO: 57333 - DNA, 39 bp, Artificial Sequence
  primer
gtaaaacgacggccagtttcccagaaacctaccattgac

SEQ ID NO: 57334 - DNA, 22 bp, Artificial Sequence
  primer
tctgctttgctgtaagatttgc

SEQ ID NO: 57335 - DNA, 21 bp, Artificial Sequence
  primer
gatgtccttggtttgccagag

SEQ ID NO: 57336 - DNA, 36 bp, Artificial Sequence
  primer
gtaaaacgacggccagtctgctgtgtggcatgagtg

SEQ ID NO: 57337 - DNA, 43 bp, Artificial Sequence
  primer
gtaaaacgacggccagtttggaattgaaatcttaattgtgtga

SEQ ID NO: 57338 - DNA, 44 bp, Artificial Sequence
  primer
gtaaaacgacggccagttgatcaaattcataaggagtgagtttc

SEQ ID NO: 57339 - DNA, 25 bp, Artificial Sequence
  primer
aaatctaaactgttgttgggaagac

SEQ ID NO: 57340 - DNA, 43 bp, Artificial Sequence
  primer
gtaaaacgacggccagtttgcagatacaatatgaagtttgtca

SEQ ID NO: 57341 - DNA, 21 bp, Artificial Sequence
  primer
ctaggcactaaaggccagcag

SEQ ID NO: 57342 - DNA, 39 bp, Artificial Sequence
  primer
gtaaaacgacggccagtcagtgacttgggcctttaattg

SEQ ID NO: 57343 - DNA, 38 bp, Artificial Sequence
  primer
gtaaaacgacggccagtgagaaggaattcagggtagcg

SEQ ID NO: 57344 - DNA, 38 bp, Artificial Sequence
  primer
gtaaaacgacggccagtaaactatacccgtctgtgggc

SEQ ID NO: 57345 - DNA, 21 bp, Artificial Sequence
  primer
cgtcagcaacagtccttcaac

SEQ ID NO: 57346 - DNA, 38 bp, Artificial Sequence; identical to SEQ ID NO: 57343
  primer

SEQ ID NO: 57347 - DNA, 38 bp, Artificial Sequence; identical to SEQ ID NO: 57344
  primer

SEQ ID NO: 57348 - DNA, 21 bp, Artificial Sequence
  primer
cgtcagcaacagtccttcaac

SEQ ID NO: 57349 - DNA, 38 bp, Artificial Sequence
  primer
gtaaaacgacggccagtgtccaaatgctgtatgatggg

SEQ ID NO: 57350 - DNA, 38 bp, Artificial Sequence
  primer
gtaaaacgacggccagtgagaagcagtcacagcctacc

SEQ ID NO: 57351 - DNA, 21 bp, Artificial Sequence
  primer
acacaacagggaatcctttgg

SEQ ID NO: 57352 - DNA, 21 bp, Artificial Sequence
  primer
ccacacaaccaacatcaactg

SEQ ID NO: 57353 - DNA, 21 bp, Artificial Sequence
  primer
cttacaccctggaaaccaagc

SEQ ID NO: 57354 - DNA, 20 bp, Artificial Sequence
  primer
ttacaccctggaaaccaagc

SEQ ID NO: 57355 - DNA, 20 bp, Artificial Sequence
  primer
taaatgggtggatcccagtg

SEQ ID NO: 57356 - DNA, 40 bp, Artificial Sequence
  primer
gtaaaacgacggccagtgctggatattagggtattgttgc

SEQ ID NO: 57357 - DNA, 43 bp, Artificial Sequence
  primer
gtaaaacgacggccagtaaagctctaagtatcatcaatgcctc

SEQ ID NO: 57358 - DNA, 38 bp, Artificial Sequence
  primer
gtaaaacgacggccagtacccttgacttacagggttcc

SEQ ID NO: 57359 - DNA, 21 bp, Artificial Sequence
  primer
aacaatgtttgtggttggctg

SEQ ID NO: 57360 - DNA, 38 bp, Artificial Sequence
  primer
gtaaaacgacggccagtagccactgtcccagatgtttc

SEQ ID NO: 57361 - DNA, 40 bp, Artificial Sequence
  primer
gtaaaacgacggccagtcgtgtatgtctgctttagggttg

SEQ ID NO: 57362 - DNA, 22 bp, Artificial Sequence
  primer
ccagcccataatttcttgaatg

SEQ ID NO: 57363 - DNA, 26 bp, Artificial Sequence
  primer
tttctcacatcaaatatctccaagtt

SEQ ID NO: 57364 - DNA, 21 bp, Artificial Sequence
  primer
gccctgccttctgtgtatttc

SEQ ID NO: 57365 - DNA, 42 bp, Artificial Sequence
  primer
gtaaaacgacggccagtaatattgggtagatggaacttctcc

SEQ ID NO: 57366 - DNA, 40 bp, Artificial Sequence
  primer
gtaaaacgacggccagtaaaccactggctcttgtgtattt

SEQ ID NO: 57367 - DNA, 20 bp, Artificial Sequence
  primer
tcacaggcctgaaataagcg

SEQ ID NO: 57368 - DNA, 38 bp, Artificial Sequence
  primer
gtaaaacgacggccagtgcctcagccttgaatgacttg

SEQ ID NO: 57369 - DNA, 38 bp, Artificial Sequence
  primer
gtaaaacgacggccagttatggatgctgccttagaccc

SEQ ID NO: 57370 - DNA, 40 bp, Artificial Sequence
  primer
gtaaaacgacggccagttcaggtgattaaagggtatgtgc

SEQ ID NO: 57371 - DNA, 40 bp, Artificial Sequence
  primer
gtaaaacgacggccagtgcatcttcttccttaaacatgga

SEQ ID NO: 57372 - DNA, 36 bp, Artificial Sequence
  primer
gtaaaacgacggccagtgtggaccagaggcaggaag

SEQ ID NO: 57373 - DNA, 38 bp, Artificial Sequence
  primer
gtaaaacgacggccagttccctggtgtcctctaagacc

SEQ ID NO: 57374 - DNA, 38 bp, Artificial Sequence
  primer
gtaaaacgacggccagtgagttctgtgccatgcttgag

SEQ ID NO: 57375 - DNA, 38 bp, Artificial Sequence
  primer
gtaaaacgacggccagtcccaaaggaaggagaagttcc

SEQ ID NO: 57376 - DNA, 21 bp, Artificial Sequence
  primer
gacacagggaccaacagtgtg

SEQ ID NO: 57377 - DNA, 18 bp, Artificial Sequence
  primer
gcaggtccaggaaggctc

SEQ ID NO: 57378 - DNA, 21 bp, Artificial Sequence
  primer
tggttcctcacactgttcctg

SEQ ID NO: 57379 - DNA, 21 bp, Artificial Sequence
  primer
tgctccacaaacactgaggac

SEQ ID NO: 57380 - DNA, 21 bp, Artificial Sequence
  primer
ccaagaagatgaagaggtcgg

SEQ ID NO: 57381 - DNA, 21 bp, Artificial Sequence
  primer
cagaacgtaagatgctggctg

SEQ ID NO: 57382 - DNA, 21 bp, Artificial Sequence
  primer
ctattcctgcctgtcacccac

SEQ ID NO: 57383 - DNA, 37 bp, Artificial Sequence
  primer
gtaaaacgacggccagtacctctaggccctgagcatc

SEQ ID NO: 57384 - DNA, 38 bp, Artificial Sequence
  primer
gtaaaacgacggccagtcagagctcaggaggaaacgtg

SEQ ID NO: 57385 - DNA, 36 bp, Artificial Sequence
  primer
gtaaaacgacggccagtaggagctctcggacacctg

SEQ ID NO: 57386 - DNA, 21 bp, Artificial Sequence
  primer
gaacttgagacgcaggtggac

SEQ ID NO: 57387 - DNA, 18 bp, Artificial Sequence
  primer
ctcctgacctgctcctgc

SEQ ID NO: 57388 - DNA, 19 bp, Artificial Sequence
  primer
ctggagatccaggtgatcg

SEQ ID NO: 57389 - DNA, 35 bp, Artificial Sequence
  primer
gtaaaacgacggccagtacaggcctgggtgtcgtc

SEQ ID NO: 57390 - DNA, 38 bp, Artificial Sequence
  primer
gtaaaacgacggccagtctgatcaacataggctggtgg

SEQ ID NO: 57391 - DNA, 38 bp, Artificial Sequence
  primer
gtaaaacgacggccagttgtcaagtagcaattggcctc

SEQ ID NO: 57392 - DNA, 22 bp, Artificial Sequence
  primer
cagtatacttgctccatcgcag

SEQ ID NO: 57393 - DNA, 21 bp, Artificial Sequence
  primer
tgatgcacaggtgtgagtgag

SEQ ID NO: 57394 - DNA, 38 bp, Artificial Sequence
  primer
gtaaaacgacggccagtcctctgttaagtggaggcagc

SEQ ID NO: 57395 - DNA, 21 bp, Artificial Sequence
  primer
agctgtttctcatccctttgg

SEQ ID NO: 57396 - DNA, 38 bp, Artificial Sequence
  primer
gtaaaacgacggccagtctgctgccataggattcacac

SEQ ID NO: 57397 - DNA, 37 bp, Artificial Sequence
  primer
gtaaaacgacggccagtggaggcagaagagttctggg

SEQ ID NO: 57398 - DNA, 38 bp, Artificial Sequence
  primer
gtaaaacgacggccagtgtgttcattgggaacatttgg

SEQ ID NO: 57399 - DNA, 38 bp, Artificial Sequence
  primer
gtaaaacgacggccagtgactgagaacaaggtgccagg

SEQ ID NO: 57400 - DNA, 38 bp, Artificial Sequence
  primer
gtaaaacgacggccagtagaagcctgtgtcctcgattc

SEQ ID NO: 57401 - DNA, 21 bp, Artificial Sequence
  primer
ctgaagcaagcagcctctatg

SEQ ID NO: 57402 - DNA, 37 bp, Artificial Sequence
  primer
gtaaaacgacggccagtcacgaggagacaagggtgac

SEQ ID NO: 57403 - DNA, 38 bp, Artificial Sequence
  primer
gtaaaacgacggccagtggaacagggacacataccagg

SEQ ID NO: 57404 - DNA, 37 bp, Artificial Sequence
  primer
gtaaaacgacggccagttagctgaccagccagtgagg

SEQ ID NO: 57405 - DNA, 38 bp, Artificial Sequence
  primer
gtaaaacgacggccagtagccttctgcagagagagacc

SEQ ID NO: 57406 - DNA, 38 bp, Artificial Sequence
  primer
gtaaaacgacggccagtaggttggctagcatagctggg

SEQ ID NO: 57407 - DNA, 38 bp, Artificial Sequence
  primer
gtaaaacgacggccagtgagaaggagtgagtggagctg

SEQ ID NO: 57408 - DNA, 38 bp, Artificial Sequence
  primer
gtaaaacgacggccagtatgaccaagtccacttctccg

SEQ ID NO: 57409 - DNA, 38 bp, Artificial Sequence
  primer
gtaaaacgacggccagttaggtgagcctggaggatgtc

SEQ ID NO: 57410 - DNA, 21 bp, Artificial Sequence
  primer
gccaataccgagacctactgg

SEQ ID NO: 57411 - DNA, 35 bp, Artificial Sequence
  primer
gtaaaacgacggccagtagtacgaggtcggctggc

SEQ ID NO: 57412 - DNA, 36 bp, Artificial Sequence
  primer
gtaaaacgacggccagtgaaccagctggaggacgac

SEQ ID NO: 57413 - DNA, 38 bp, Artificial Sequence
  primer
gtaaaacgacggccagtggcttaggttcagctggtttg

SEQ ID NO: 57414 - DNA, 38 bp, Artificial Sequence
  primer
gtaaaacgacggccagttgaaggacaggtatggtgtgg

SEQ ID NO: 57415 - DNA, 38 bp, Artificial Sequence
  primer
gtaaaacgacggccagttactcttgtccctgttccagc

SEQ ID NO: 57416 - DNA, 21 bp, Artificial Sequence
  primer
ctcccggtaggtctgtgtagg

SEQ ID NO: 57417 - DNA, 38 bp, Artificial Sequence
  primer
gtaaaacgacggccagtggttagggaccatcactctgg

SEQ ID NO: 57418 - DNA, 38 bp, Artificial Sequence
  primer
gtaaaacgacggccagtcgcagagttagggtatcctgg

SEQ ID NO: 57419 - DNA, 37 bp, Artificial Sequence
  primer
gtaaaacgacggccagtccctcaacagcgtgaagaac

SEQ ID NO: 57420 - DNA, 20 bp, Artificial Sequence
  primer
gtcagcgagctgcaggtaag

SEQ ID NO: 57421 - DNA, 38 bp, Artificial Sequence
  primer
gtaaaacgacggccagtcatctctgaattcccagggtc

SEQ ID NO: 57422 - DNA, 38 bp, Artificial Sequence
  primer
gtaaaacgacggccagtgaggcactggctagaggagag

SEQ ID NO: 57423 - DNA, 38 bp, Artificial Sequence
  primer
gtaaaacgacggccagtctgactctgggttcttccctg

SEQ ID NO: 57424 - DNA, 37 bp, Artificial Sequence
  primer
gtaaaacgacggccagtcctgcaagagagcatccaag

SEQ ID NO: 57425 - DNA, 39 bp, Artificial Sequence
  primer
gtaaaacgacggccagtcactttctaatgcaaaccaggc

SEQ ID NO: 57426 - DNA, 38 bp, Artificial Sequence
  primer
gtaaaacgacggccagtcctctctgcaaaggagctcag

SEQ ID NO: 57427 - DNA, 21 bp, Artificial Sequence
  primer
gctggaaagcaagaggaagac

SEQ ID NO: 57428 - DNA, 21 bp, Artificial Sequence
  primer
aggagaaggtcgtggtgaaag

SEQ ID NO: 57429 - DNA, 35 bp, Artificial Sequence
  primer
gtaaaacgacggccagtaggtggagcaggacccag

SEQ ID NO: 57430 - DNA, 21 bp, Artificial Sequence
  primer
gacagagcaggagatcactcg

SEQ ID NO: 57431 - DNA, 18 bp, Artificial Sequence
  primer
agctcgtcaacagccacg

SEQ ID NO: 57432 - DNA, 21 bp, Artificial Sequence
  primer
gtgtacgagctgcagagcaag

SEQ ID NO: 57433 - DNA, 38 bp, Artificial Sequence
  primer
gtaaaacgacggccagtctagagcttgaggtgcagcag

SEQ ID NO: 57434 - DNA, 21 bp, Artificial Sequence
  primer
atggaggaagtggtcaagctg

SEQ ID NO: 57435 - DNA, 21 bp, Artificial Sequence
  primer
aaatcgcaggagaagaccatc

SEQ ID NO: 57436 - DNA, 38 bp, Artificial Sequence
  primer
gtaaaacgacggccagtgaagctgctcagccagaagac

SEQ ID NO: 57437 - DNA, 21 bp, Artificial Sequence
  primer
gcgagaaggaccagatctacg

SEQ ID NO: 57438 - DNA, 38 bp, Artificial Sequence
  primer
gtaaaacgacggccagtgagtgtgactgggaggaggtc

SEQ ID NO: 57439 - DNA, 38 bp, Artificial Sequence
  primer
gtaaaacgacggccagttctctcccagcttctctctcg

SEQ ID NO: 57440 - DNA, 21 bp, Artificial Sequence
  primer
tgatcgagaacacctccacac

SEQ ID NO: 57441 - DNA, 38 bp, Artificial Sequence
  primer
gtaaaacgacggccagttagaaagaagagggcaatggg

SEQ ID NO: 57442 - DNA, 21 bp, Artificial Sequence
  primer
catggttgtgtttctggatgg

SEQ ID NO: 57443 - DNA, 21 bp, Artificial Sequence
  primer
caaatcaccctcccaccttag

SEQ ID NO: 57444 - DNA, 19 bp, Artificial Sequence
  primer
tctctacccggctggtgtc

SEQ ID NO: 57445 - DNA, 38 bp, Artificial Sequence
  primer
gtaaaacgacggccagtacttacatgatgagccatgcg

SEQ ID NO: 57446 - DNA, 21 bp, Artificial Sequence
  primer
acgagtaagcggtggttcatc

SEQ ID NO: 57447 - DNA, 37 bp, Artificial Sequence
  primer
gtaaaacgacggccagtcctgccacgtgaattctttc

SEQ ID NO: 57448 - DNA, 20 bp, Artificial Sequence
  primer
cctgccacgtgaattctttc

SEQ ID NO: 57449 - DNA, 23 bp, Artificial Sequence
  primer
aagctgtgaatgacattgcctac

SEQ ID NO: 57450 - DNA, 21 bp, Artificial Sequence
  primer
agtttgttgctactcttgcgg

SEQ ID NO: 57451 - DNA, 22 bp, Artificial Sequence
  primer
caagcaaatatagttggaccga

SEQ ID NO: 57452 - DNA, 22 bp, Artificial Sequence
  primer
tctgtgtcacatggtgtgaatg

SEQ ID NO: 57453 - DNA, 21 bp, Artificial Sequence
  primer
ttggttagtgccttggaattg

SEQ ID NO: 57454 - DNA, 40 bp, Artificial Sequence
  primer
gtaaaacgacggccagtgatgagagagatgcattgtttgg

SEQ ID NO: 57455 - DNA, 21 bp, Artificial Sequence
  primer
gcaaaccctagcaaacctttc

SEQ ID NO: 57456 - DNA, 38 bp, Artificial Sequence
  primer
gtaaaacgacggccagtttgctgtcaaggacagtttgg

SEQ ID NO: 57457 - DNA, 21 bp, Artificial Sequence
  primer
cggagaaacggtgacatttag

SEQ ID NO: 57458 - DNA, 38 bp, Artificial Sequence
  primer
gtaaaacgacggccagtcagacctaatgcatctgggag

SEQ ID NO: 57459 - DNA, 37 bp, Artificial Sequence
  primer
gtaaaacgacggccagtgaaacacgggacaggtgatg

SEQ ID NO: 57460 - DNA, 21 bp, Artificial Sequence
  primer
atgaccctgatggctggttag

SEQ ID NO: 57461 - DNA, 38 bp, Artificial Sequence
  primer
gtaaaacgacggccagtagagcagcttccacagtgtcc

SEQ ID NO: 57462 - DNA, 38 bp, Artificial Sequence
  primer
gtaaaacgacggccagtttgtgatagtggttgggagga

SEQ ID NO: 57463 - DNA, 39 bp, Artificial Sequence
  primer
gtaaaacgacggccagtcaaaccaatttctgcattggac

SEQ ID NO: 57464 - DNA, 21 bp, Artificial Sequence
  primer
tggctcgtaagtatccaaggc

SEQ ID NO: 57465 - DNA, 21 bp, Artificial Sequence
  primer
tgggttaatgttctcaagggc

SEQ ID NO: 57466 - DNA, 38 bp, Artificial Sequence
  primer
gtaaaacgacggccagttgggtttgaaacaggaagttg

SEQ ID NO: 57467 - DNA, 41 bp, Artificial Sequence
  primer
gtaaaacgacggccagtctcctgtctttcagtgttatggtg

SEQ ID NO: 57468 - DNA, 42 bp, Artificial Sequence
  primer
gtaaaacgacggccagttgaatgtaaatcaatcagccttgag

SEQ ID NO: 57469 - DNA, 38 bp, Artificial Sequence
  primer
gtaaaacgacggccagtcaccaactcctgcagagacag

SEQ ID NO: 57470 - DNA, 42 bp, Artificial Sequence
  primer
gtaaaacgacggccagtgttattcaaggacagctgtttcatc

SEQ ID NO: 57471 - DNA, 42 bp, Artificial Sequence
  primer
gtaaaacgacggccagtgggatataaactgaagttaaggcca

SEQ ID NO: 57472 - DNA, 21 bp, Artificial Sequence
  primer
caaacaaagtgagcatccagc

SEQ ID NO: 57473 - DNA, 38 bp, Artificial Sequence
  primer
gtaaaacgacggccagtgttggtctggaggtcttggag

SEQ ID NO: 57474 - DNA, 39 bp, Artificial Sequence
  primer
gtaaaacgacggccagttggcaaatatcatcctttccat

SEQ ID NO: 57475 - DNA, 18 bp, Artificial Sequence
  primer
aggcaggagaatggcgtc

SEQ ID NO: 57476 - DNA, 22 bp, Artificial Sequence
  primer
gcccagcacctacactgaatag

SEQ ID NO: 57477 - DNA, 21 bp, Artificial Sequence
  primer
agccaatgcttgtctcagttg

SEQ ID NO: 57478 - DNA, 23 bp, Artificial Sequence
  primer
cggatgtttgaagaaactcaaat

SEQ ID NO: 57479 - DNA, 38 bp, Artificial Sequence
  primer
gtaaaacgacggccagtagtcagacaataggccagacg

SEQ ID NO: 57480 - DNA, 21 bp, Artificial Sequence
  primer
tcagccatgatgtgggaaata

SEQ ID NO: 57481 - DNA, 21 bp, Artificial Sequence
  primer
agggctccgaaagtcttgtag

SEQ ID NO: 57482 - DNA, 21 bp, Artificial Sequence
  primer
cttagactggtgtctgctggg

SEQ ID NO: 57483 - DNA, 41 bp, Artificial Sequence
  primer
gtaaaacgacggccagttttgtttctagtgcccagttacac

SEQ ID NO: 57484 - DNA, 22 bp, Artificial Sequence
  primer
caatgtgcttcagcgatttaag

SEQ ID NO: 57485 - DNA, 36 bp, Artificial Sequence
  primer
gtaaaacgacggccagtctggtgcctcttagccctc

SEQ ID NO: 57486 - DNA, 38 bp, Artificial Sequence
  primer
gtaaaacgacggccagtgagccatctcacctagccaag

SEQ ID NO: 57487 - DNA, 21 bp, Artificial Sequence
  primer
agagtggagcaattgagcaag

SEQ ID NO: 57488 - DNA, 39 bp, Artificial Sequence
  primer
gtaaaacgacggccagtggctattcctagtgcatgttgg

SEQ ID NO: 57489 - DNA, 23 bp, Artificial Sequence
  primer
ttcatgggaattgtacgtaaagg

SEQ ID NO: 57490 - DNA, 38 bp, Artificial Sequence
  primer
gtaaaacgacggccagtagacatccattactgcccagg

SEQ ID NO: 57491 - DNA, 38 bp, Artificial Sequence
  primer
gtaaaacgacggccagtctgtagctcgtaagctccgtg

SEQ ID NO: 57492 - DNA, 24 bp, Artificial Sequence
  primer
tattctttgcctactttcatcgag

SEQ ID NO: 57493 - DNA, 21 bp, Artificial Sequence
  primer
atcgtgtgtctgttccattcc

SEQ ID NO: 57494 - DNA, 36 bp, Artificial Sequence
  primer
gtaaaacgacggccagtcagtaggcccactcttcgc

SEQ ID NO: 57495 - DNA, 39 bp, Artificial Sequence
  primer
gtaaaacgacggccagtcacaacaccacaccactaatga

SEQ ID NO: 57496 - DNA, 20 bp, Artificial Sequence
  primer
agaacgcaccatttgcactc

SEQ ID NO: 57497 - DNA, 21 bp, Artificial Sequence
  primer
gcaaagcattggatattgacg

SEQ ID NO: 57498 - DNA, 24 bp, Artificial Sequence
  primer
tgagaacggactaatacaatgacc

SEQ ID NO: 57499 - DNA, 41 bp, Artificial Sequence
  primer
gtaaaacgacggccagttggaaatactcctttcaccatttg

SEQ ID NO: 57500 - DNA, 40 bp, Artificial Sequence
  primer
gtaaaacgacggccagttcaacatcagtaatgcctttcaa

SEQ ID NO: 57501 - DNA, 37 bp, Artificial Sequence
  primer
gtaaaacgacggccagtcaggctggagacccttaacc

SEQ ID NO: 57502 - DNA, 39 bp, Artificial Sequence
  primer
gtaaaacgacggccagtcatatttccttgcttcactggc

SEQ ID NO: 57503 - DNA, 37 bp, Artificial Sequence
  primer
gtaaaacgacggccagtttcagctgccttctccacac

SEQ ID NO: 57504 - DNA, 38 bp, Artificial Sequence
  primer
gtaaaacgacggccagttaccgtcctaacaactcctgc

SEQ ID NO: 57505 - DNA, 21 bp, Artificial Sequence
  primer
ttcctgaacttgaccctcctg

SEQ ID NO: 57506 - DNA, 21 bp, Artificial Sequence
  primer
gagagctgcaaatgaccacag

SEQ ID NO: 57507 - DNA, 38 bp, Artificial Sequence
  primer
gtaaaacgacggccagtatgaccctcatccatggctac

SEQ ID NO: 57508 - DNA, 21 bp, Artificial Sequence
  primer
agcaaactggctttgttcctc

SEQ ID NO: 57509 - DNA, 38 bp, Artificial Sequence
  primer
gtaaaacgacggccagtgaaacagtctcggcacacttg

SEQ ID NO: 57510 - DNA, 21 bp, Artificial Sequence
  primer
caggtaattggcatgaccctc

SEQ ID NO: 57511 - DNA, 38 bp, Artificial Sequence
  primer
gtaaaacgacggccagtatgccagttagcagatggagg

SEQ ID NO: 57512 - DNA, 38 bp, Artificial Sequence
  primer
gtaaaacgacggccagtgctcatccggtcagatgttag

SEQ ID NO: 57513 - DNA, 21 bp, Artificial Sequence
  primer
caactgccagaccttcaagtg

SEQ ID NO: 57514 - DNA, 38 bp, Artificial Sequence
  primer
gtaaaacgacggccagttagcaaagatgcacggaagtg

SEQ ID NO: 57515 - DNA, 19 bp, Artificial Sequence
  primer
ctcctctgcggtgagatgc

SEQ ID NO: 57516 - DNA, 37 bp, Artificial Sequence
  primer
gtaaaacgacggccagtgtgaagagggaggttcccag

SEQ ID NO: 57517 - DNA, 36 bp, Artificial Sequence
  primer
gtaaaacgacggccagtgtggtgaagccgtgagtcc

SEQ ID NO: 57518 - DNA, 20 bp, Artificial Sequence
  primer
gtatgaggcggtgacaatgg

SEQ ID NO: 57519 - DNA, 26 bp, Artificial Sequence
  primer
ttccagttggtcattaatactgttct

SEQ ID NO: 57520 - DNA, 39 bp, Artificial Sequence
  primer
gtaaaacgacggccagtcatgatcatttcaagctcaagg

SEQ ID NO: 57521 - DNA, 23 bp, Artificial Sequence
  primer
aaacaggatgaggagtaaacagc

SEQ ID NO: 57522 - DNA, 20 bp, Artificial Sequence
  primer
tttagggaagggactgtggg

SEQ ID NO: 57523 - DNA, 40 bp, Artificial Sequence
  primer
gtaaaacgacggccagtacagatggttctcgtatctcctg

SEQ ID NO: 57524 - DNA, 38 bp, Artificial Sequence
  primer
gtaaaacgacggccagtagtcagaccctggaaagctca

SEQ ID NO: 57525 - DNA, 21 bp, Artificial Sequence
  primer
ccaacaggtgttgctattggc

SEQ ID NO: 57526 - DNA, 38 bp, Artificial Sequence
  primer
gtaaaacgacggccagtaaagcagtgccaggaggtaac

SEQ ID NO: 57527 - DNA, 43 bp, Artificial Sequence
  primer
gtaaaacgacggccagtgattggattgtaagtcagaaaggttc

SEQ ID NO: 57528 - DNA, 39 bp, Artificial Sequence
  primer
gtaaaacgacggccagtcccagagtttaagaaatggtgg

SEQ ID NO: 57529 - DNA, 21 bp, Artificial Sequence
  primer
aggtctcttggctattggtcc

SEQ ID NO: 57530 - DNA, 26 bp, Artificial Sequence
  primer
tcatacctgaaacactgactacatcc

SEQ ID NO: 57531 - DNA, 38 bp, Artificial Sequence
  primer
gtaaaacgacggccagtatggtgaacattgggcataaa

SEQ ID NO: 57532 - DNA, 22 bp, Artificial Sequence
  primer
ttaagtggtcctcttccttccc

SEQ ID NO: 57533 - DNA, 42 bp, Artificial Sequence
  primer
gtaaaacgacggccagtaaagagtttcatggtgataggaaat

SEQ ID NO: 57534 - DNA, 23 bp, Artificial Sequence
  primer
tcattggtgtatcctactgtgcc

SEQ ID NO: 57535 - DNA, 27 bp, Artificial Sequence
  primer
cactagtaagtcccacctgacagtatg

SEQ ID NO: 57536 - DNA, 36 bp, Artificial Sequence
  primer
gtaaaacgacggccagtaagagcggaagtgggtgtg

SEQ ID NO: 57537 - DNA, 20 bp, Artificial Sequence
  primer
ctactcatggaggaggcagg

SEQ ID NO: 57538 - DNA, 38 bp, Artificial Sequence
  primer
gtaaaacgacggccagtccgaaggtgggtgtgtagaag

SEQ ID NO: 57539 - DNA, 21 bp, Artificial Sequence
  primer
tctggacaacacagtgagacg

SEQ ID NO: 57540 - DNA, 19 bp, Artificial Sequence
  primer
agacagagctggcacaggc

SEQ ID NO: 57541 - DNA, 38 bp, Artificial Sequence
  primer
gtaaaacgacggccagtttgacaggtagacatggtggg

SEQ ID NO: 57542 - DNA, 20 bp, Artificial Sequence
  primer
ctgccagaacagtcagcctc

SEQ ID NO: 57543 - DNA, 21 bp, Artificial Sequence
  primer
gactcttgcagccctcaactc

SEQ ID NO: 57544 - DNA, 38 bp, Artificial Sequence
  primer
gtaaaacgacggccagtcatggaagcagcttaggaagg

SEQ ID NO: 57545 - DNA, 37 bp, Artificial Sequence
  primer
gtaaaacgacggccagtaagccctctgaagtgggaag

SEQ ID NO: 57546 - DNA, 38 bp, Artificial Sequence
  primer
gtaaaacgacggccagttactggtggaagggactcagc

SEQ ID NO: 57547 - DNA, 38 bp, Artificial Sequence
  primer
gtaaaacgacggccagtatagagggcagctctgggttc

SEQ ID NO: 57548 - DNA, 38 bp, Artificial Sequence
  primer
gtaaaacgacggccagtctttggaaccacaacctgacc

SEQ ID NO: 57549 - DNA, 39 bp, Artificial Sequence
  primer
gtaaaacgacggccagtcatagagcttgtggagtttggg

SEQ ID NO: 57550 - DNA, 38 bp, Artificial Sequence
  primer
gtaaaacgacggccagtagttgtgacccacatcccttc

SEQ ID NO: 57551 - DNA, 21 bp, Artificial Sequence
  primer
agagagcaaaggatgcatgtg

SEQ ID NO: 57552 - DNA, 38 bp, Artificial Sequence
  primer
gtaaaacgacggccagtgagcggcagattatcaaggag

SEQ ID NO: 57553 - DNA, 38 bp, Artificial Sequence
  primer
gtaaaacgacggccagtggatttaggcagcagatccag

SEQ ID NO: 57554 - DNA, 21 bp, Artificial Sequence
  primer
gccgatagtgacagtgagtgc

SEQ ID NO: 57555 - DNA, 38 bp, Artificial Sequence
  primer
gtaaaacgacggccagtacgtctaccagaactaccggc

SEQ ID NO: 57556 - DNA, 21 bp, Artificial Sequence
  primer
acctagtggaatacgatgcgg

SEQ ID NO: 57557 - DNA, 38 bp, Artificial Sequence
  primer
gtaaaacgacggccagtccatgaaggacatgttcaagc

SEQ ID NO: 57558 - DNA, 39 bp, Artificial Sequence
  primer
gtaaaacgacggccagtaaagaactaagggccaaagtgg

SEQ ID NO: 57559 - DNA, 21 bp, Artificial Sequence
  primer
gccatgtcttctttaccagcc

SEQ ID NO: 57560 - DNA, 38 bp, Artificial Sequence
  primer
gtaaaacgacggccagtaactgggtgatatcggactgg

SEQ ID NO: 57561 - DNA, 37 bp, Artificial Sequence
  primer
gtaaaacgacggccagtgggtaacctgggaaatggag

SEQ ID NO: 57562 - DNA, 22 bp, Artificial Sequence
  primer
tcccgtacagagtcctggatag

SEQ ID NO: 57563 - DNA, 21 bp, Artificial Sequence
  primer
cctcctggtcctcctatttcc

SEQ ID NO: 57564 - DNA, 37 bp, Artificial Sequence
  primer
gtaaaacgacggccagtcccagtttattgctgcctcc

SEQ ID NO: 57565 - DNA, 20 bp, Artificial Sequence
  primer
attccagctgcttgagaggc

SEQ ID NO: 57566 - DNA, 38 bp, Artificial Sequence
  primer
gtaaaacgacggccagtggctttaccagaagcgttcac

SEQ ID NO: 57567 - DNA, 20 bp, Artificial Sequence
  primer
agcctggttaacggagcaag

SEQ ID NO: 57568 - DNA, 38 bp, Artificial Sequence
  primer
gtaaaacgacggccagtttcagtaggaagcttggtggc

SEQ ID NO: 57569 - DNA, 20 bp, Artificial Sequence
  primer
caggcttcccaacctaatcg

SEQ ID NO: 57570 - DNA, 38 bp, Artificial Sequence
  primer
gtaaaacgacggccagtcagggcctagattagattggg

SEQ ID NO: 57571 - DNA, 38 bp, Artificial Sequence
  primer
gtaaaacgacggccagttgtgttgggaacagtctgagc

SEQ ID NO: 57572 - DNA, 38 bp, Artificial Sequence
  primer
gtaaaacgacggccagtaaagagttgcagtgaggcaag

SEQ ID NO: 57573 - DNA, 38 bp, Artificial Sequence
  primer
gtaaaacgacggccagtgaatgaatgacctttgcgatg

SEQ ID NO: 57574 - DNA, 21 bp, Artificial Sequence
  primer
ggctacagtgagctgtgcttg

SEQ ID NO: 57575 - DNA, 43 bp, Artificial Sequence
  primer
gtaaaacgacggccagttgaaataagctctttgtaaagggaag

SEQ ID NO: 57576 - DNA, 37 bp, Artificial Sequence
  primer
gtaaaacgacggccagtgccgtgtagtagcccaagag

SEQ ID NO: 57577 - DNA, 22 bp, Artificial Sequence
  primer
tttctgtgagttcacctgttgg

SEQ ID NO: 57578 - DNA, 38 bp, Artificial Sequence
  primer
gtaaaacgacggccagtagatgggacagcggagactac

SEQ ID NO: 57579 - DNA, 38 bp, Artificial Sequence
  primer
gtaaaacgacggccagtgtcccagcacccaaggaatag

SEQ ID NO: 57580 - DNA, 38 bp, Artificial Sequence
  primer
gtaaaacgacggccagttgtctggccaggttctagttc

SEQ ID NO: 57581 - DNA, 22 bp, Artificial Sequence
  primer
tcgcagggaagatgaaagttac

SEQ ID NO: 57582 - DNA, 21 bp, Artificial Sequence
  primer
ctggcctgacatcagtgtttc

SEQ ID NO: 57583 - DNA, 22 bp, Artificial Sequence
  primer
tttggaatccttcctattgtgc

SEQ ID NO: 57584 - DNA, 38 bp, Artificial Sequence
  primer
gtaaaacgacggccagtcagccagtgcaagtacacctc

SEQ ID NO: 57585 - DNA, 22 bp, Artificial Sequence
  primer
tggtgggcacctgtaatcttag

SEQ ID NO: 57586 - DNA, 38 bp, Artificial Sequence
  primer
gtaaaacgacggccagtctgttgctctcttgcttgcat

SEQ ID NO: 57587 - DNA, 22 bp, Artificial Sequence
  primer
cctggaggacagtagcactttg

SEQ ID NO: 57588 - DNA, 20 bp, Artificial Sequence
  primer
gaggaatcagccgtgacaac

SEQ ID NO: 57589 - DNA, 21 bp, Artificial Sequence
  primer
cttaccacttaggcagctggg

SEQ ID NO: 57590 - DNA, 21 bp, Artificial Sequence
  primer
catttatgtgagccatgagcc

SEQ ID NO: 57591 - DNA, 21 bp, Artificial Sequence
  primer
gctagaatctttggccacctg

SEQ ID NO: 57592 - DNA, 23 bp, Artificial Sequence
  primer
tctgcatgattaagatttgcacc

SEQ ID NO: 57593 - DNA, 38 bp, Artificial Sequence
  primer
gtaaaacgacggccagtgccaattgtaaacatggcctc

SEQ ID NO: 57594 - DNA, 38 bp, Artificial Sequence
  primer
gtaaaacgacggccagtctggagaaggagcactgaagg

SEQ ID NO: 57595 - DNA, 20 bp, Artificial Sequence
  primer
ggctttcaccctgttgaacc

SEQ ID NO: 57596 - DNA, 37 bp, Artificial Sequence
  primer
gtaaaacgacggccagtaccacatctggccttactgg

SEQ ID NO: 57597 - DNA, 38 bp, Artificial Sequence
  primer
gtaaaacgacggccagttgcttgaatattgtggttggc

SEQ ID NO: 57598 - DNA, 21 bp, Artificial Sequence
  primer
attgttgagcctggaccattg

SEQ ID NO: 57599 - DNA, 22 bp, Artificial Sequence
  primer
ggcgacagcaattataaacagg

SEQ ID NO: 57600 - DNA, 21 bp, Artificial Sequence
  primer
tttgtgaatttctgtggctgg

SEQ ID NO: 57601 - DNA, 38 bp, Artificial Sequence
  primer
gtaaaacgacggccagttttatgtttggattggcttgg

SEQ ID NO: 57602 - DNA, 21 bp, Artificial Sequence
  primer
atgtcatcacgtgccttgttc

SEQ ID NO: 57603 - DNA, 21 bp, Artificial Sequence
  primer
gaaacggaaagtcctcaaggg

SEQ ID NO: 57604 - DNA, 21 bp, Artificial Sequence
  primer
ccacaaaggacttgctgaagg

SEQ ID NO: 57605 - DNA, 38 bp, Artificial Sequence
  primer
gtaaaacgacggccagttgatgcctgtgagaaagaacc

SEQ ID NO: 57606 - DNA, 38 bp, Artificial Sequence
  primer
gtaaaacgacggccagtatgtcatcacgtgccttgttc

SEQ ID NO: 57607 - DNA, 38 bp, Artificial Sequence
  primer
gtaaaacgacggccagtacctccggaaaccgtagattc

SEQ ID NO: 57608 - DNA, 38 bp, Artificial Sequence
  primer
gtaaaacgacggccagtcttgctgaggcattgaaagtg

SEQ ID NO: 57609 - DNA, 38 bp, Artificial Sequence
  primer
gtaaaacgacggccagtatctatgtgcaggtgagccag

SEQ ID NO: 57610 - DNA, 21 bp, Artificial Sequence
  primer
agccagattgttggtaaacgc

SEQ ID NO: 57611 - DNA, 38 bp, Artificial Sequence
  primer
gtaaaacgacggccagtatcagtaccaacaaatggcgg

SEQ ID NO: 57612 - DNA, 21 bp, Artificial Sequence
  primer
ctttctgggaatttgggtgag

SEQ ID NO: 57613 - DNA, 19 bp, Artificial Sequence
  primer
tgggcaacaagagcgaaac

SEQ ID NO: 57614 - DNA, 37 bp, Artificial Sequence
  primer
gtaaaacgacggccagtgtttctggcctcaagcagtg

SEQ ID NO: 57615 - DNA, 21 bp, Artificial Sequence
  primer
aggttaagggagtcaggtggg

SEQ ID NO: 57616 - DNA, 21 bp, Artificial Sequence
  primer
agatgtacgacctggtggtgg

SEQ ID NO: 57617 - DNA, 18 bp, Artificial Sequence
  primer
aggagaagcccatcgagc

SEQ ID NO: 57618 - DNA, 38 bp, Artificial Sequence
  primer
gtaaaacgacggccagtaaatgggtgagtccgtttagg

SEQ ID NO: 57619 - DNA, 21 bp, Artificial Sequence
  primer
ctcacctcctccaaagaccac

SEQ ID NO: 57620 - DNA, 21 bp, Artificial Sequence
  primer
atgccatcctttcctcatctc

SEQ ID NO: 57621 - DNA, 22 bp, Artificial Sequence
  primer
aaagcagtgtcctttaactggg

SEQ ID NO: 57622 - DNA, 39 bp, Artificial Sequence
  primer
gtaaaacgacggccagtggcatagcgtgtctttctcttg

SEQ ID NO: 57623 - DNA, 38 bp, Artificial Sequence
  primer
gtaaaacgacggccagtttgcctggtgtagagattccc

SEQ ID NO: 57624 - DNA, 22 bp, Artificial Sequence
  primer
cctctaaggcagatggaatgtg

SEQ ID NO: 57625 - DNA, 21 bp, Artificial Sequence
  primer
gaaacctagaaaggcgtctgg

SEQ ID NO: 57626 - DNA, 40 bp, Artificial Sequence
  primer
gtaaaacgacggccagttcaccacacttaagatctttgcc

SEQ ID NO: 57627 - DNA, 21 bp, Artificial Sequence
  primer
gtttcagaaccgtggaacctc

SEQ ID NO: 57628 - DNA, 43 bp, Artificial Sequence
  primer
gtaaaacgacggccagtgaaatattcataagcaactgagaggg

SEQ ID NO: 57629 - DNA, 42 bp, Artificial Sequence
  primer
gtaaaacgacggccagtaagctgatatttgatagagccttcc

SEQ ID NO: 57630 - DNA, 18 bp, Artificial Sequence
  primer
gcctggcaacagagcaag

SEQ ID NO: 57631 - DNA, 38 bp, Artificial Sequence
  primer
gtaaaacgacggccagtagccagttcattgcagatgtc

SEQ ID NO: 57632 - DNA, 39 bp, Artificial Sequence
  primer
gtaaaacgacggccagttgtttaaccaagggttctgtgg

SEQ ID NO: 57633 - DNA, 23 bp, Artificial Sequence
  primer
gggcaagttaaatagagggaaag

SEQ ID NO: 57634 - DNA, 18 bp, Artificial Sequence
  primer
tagctgggtgtgatggcg

SEQ ID NO: 57635 - DNA, 44 bp, Artificial Sequence
  primer
gtaaaacgacggccagtgagactgtaccctgatttacattatcc

SEQ ID NO: 57636 - DNA, 23 bp, Artificial Sequence
  primer
caggtttcctgtgaacttgtgtc

SEQ ID NO: 57637 - DNA, 21 bp, Artificial Sequence
  primer
atcgggcaacagaaggtattc

SEQ ID NO: 57638 - DNA, 25 bp, Artificial Sequence
  primer
cccacatagtatttcagatgtttgg

SEQ ID NO: 57639 - DNA, 20 bp, Artificial Sequence
  primer
acatcttgccattgcactcc

SEQ ID NO: 57640 - DNA, 38 bp, Artificial Sequence
  primer
gtaaaacgacggccagtttcagtgacccaaatccgtag

SEQ ID NO: 57641 - DNA, 38 bp, Artificial Sequence
  primer
gtaaaacgacggccagtgtgtctgtggcctcttctgtg

SEQ ID NO: 57642 - DNA, 28 bp, Artificial Sequence
  primer
ttactcttgttaggcataataaattggt

SEQ ID NO: 57643 - DNA, 38 bp, Artificial Sequence
  primer
gtaaaacgacggccagtgggcacacttgaatcaatctt

SEQ ID NO: 57644 - DNA, 20 bp, Artificial Sequence
  primer
aggtaatccacctgcctcag

SEQ ID NO: 57645 - DNA, 40 bp, Artificial Sequence
  primer
gtaaaacgacggccagttggatgccagtcttactcatagc

SEQ ID NO: 57646 - DNA, 21 bp, Artificial Sequence
  primer
gtctttacaggcgggaagatg

SEQ ID NO: 57647 - DNA, 37 bp, Artificial Sequence
  primer
gtaaaacgacggccagtgagatgccaactccagcatc

SEQ ID NO: 57648 - DNA, 21 bp, Artificial Sequence
  primer
atttatattccggcacttggc

SEQ ID NO: 57649 - DNA, 38 bp, Artificial Sequence
  primer
gtaaaacgacggccagtcgagttgctttgcgtaaattc

SEQ ID NO: 57650 - DNA, 38 bp, Artificial Sequence
  primer
gtaaaacgacggccagtgtccaggattcatgcagtgtc

SEQ ID NO: 57651 - DNA, 40 bp, Artificial Sequence
  primer
gtaaaacgacggccagtgctagaagccaaatgctatgaag

SEQ ID NO: 57652 - DNA, 21 bp, Artificial Sequence
  primer
ggattgagcatcatcctttcc

SEQ ID NO: 57653 - DNA, 21 bp, Artificial Sequence
  primer
tcatccaggagggaacatttg

SEQ ID NO: 57654 - DNA, 38 bp, Artificial Sequence
  primer
gtaaaacgacggccagtttctgaggttgtgtgggaatg

SEQ ID NO: 57655 - DNA, 38 bp, Artificial Sequence
  primer
gtaaaacgacggccagtgagattccttcggtgttgagg

SEQ ID NO: 57656 - DNA, 37 bp, Artificial Sequence
  primer
gtaaaacgacggccagttaatgtttcgccacagtccc

SEQ ID NO: 57657 - DNA, 40 bp, Artificial Sequence
  primer
gtaaaacgacggccagttgtttagggattcaaagaatggg

SEQ ID NO: 57658 - DNA, 37 bp, Artificial Sequence
  primer
gtaaaacgacggccagtttgctcatttgcctgactcc

SEQ ID NO: 57659 - DNA, 38 bp, Artificial Sequence
  primer
gtaaaacgacggccagttggtggtcacagttacttggg

SEQ ID NO: 57660 - DNA, 38 bp, Artificial Sequence
  primer
gtaaaacgacggccagtattatgtgtgcgtcggtcaag

SEQ ID NO: 57661 - DNA, 21 bp, Artificial Sequence
  primer
atgaagaccaagcaccgaatc

SEQ ID NO: 57662 - DNA, 38 bp, Artificial Sequence
  primer
gtaaaacgacggccagtgttgggatttccaggagtttg

SEQ ID NO: 57663 - DNA, 20 bp, Artificial Sequence
  primer
gatagaacgcagctgatggc

SEQ ID NO: 57664 - DNA, 22 bp, Artificial Sequence
  primer
aatcagtggaggtgaagactgg

SEQ ID NO: 57665 - DNA, 21 bp, Artificial Sequence
  primer
ggcgtcaacccttgtagaaac

SEQ ID NO: 57666 - DNA, 21 bp, Artificial Sequence
  primer
ttgggatgttgtttctgcttg

SEQ ID NO: 57667 - DNA, 40 bp, Artificial Sequence
  primer
gtaaaacgacggccagtccctacaactttgggaataaagg

SEQ ID NO: 57668 - DNA, 38 bp, Artificial Sequence
  primer
gtaaaacgacggccagttgagcagttgcttagctctgg

SEQ ID NO: 57669 - DNA, 39 bp, Artificial Sequence
  primer
gtaaaacgacggccagtgctgattctcccatctcatttg

SEQ ID NO: 57670 - DNA, 39 bp, Artificial Sequence
  primer
gtaaaacgacggccagttctccagaatcccattatgacc

SEQ ID NO: 57671 - DNA, 22 bp, Artificial Sequence
  primer
tgaccatattgaacatgcttgg

SEQ ID NO: 57672 - DNA, 38 bp, Artificial Sequence
  primer
gtaaaacgacggccagtatgcagtgtggtgtcacaagc

SEQ ID NO: 57673 - DNA, 21 bp, Artificial Sequence
  primer
agaacctgggagcagactgtg

SEQ ID NO: 57674 - DNA, 38 bp, Artificial Sequence
  primer
gtaaaacgacggccagttgacagcacaggactagcagg

SEQ ID NO: 57675 - DNA, 21 bp, Artificial Sequence
  primer
cagaagatgccgtttcacctc

SEQ ID NO: 57676 - DNA, 38 bp, Artificial Sequence
  primer
gtaaaacgacggccagtaaggtattcgtgtacccagcg

SEQ ID NO: 57677 - DNA, 21 bp, Artificial Sequence
  primer
ttacacatttgggagtgtggg

SEQ ID NO: 57678 - DNA, 21 bp, Artificial Sequence
  primer
gctactgacttggaactgggc

SEQ ID NO: 57679 - DNA, 21 bp, Artificial Sequence
  primer
gagtgcagtggcacgaatatg

SEQ ID NO: 57680 - DNA, 20 bp, Artificial Sequence
  primer
tctggagcaacatcatggag

SEQ ID NO: 57681 - DNA, 39 bp, Artificial Sequence
  primer
gtaaaacgacggccagtccttctactacctgcaacaggg

SEQ ID NO: 57682 - DNA, 38 bp, Artificial Sequence
  primer
gtaaaacgacggccagtactaacccttctcccatgtgc

SEQ ID NO: 57683 - DNA, 21 bp, Artificial Sequence
  primer
tctacactgtgcctgaatggc

SEQ ID NO: 57684 - DNA, 38 bp, Artificial Sequence
  primer
gtaaaacgacggccagtacacttccagccaattccaag

SEQ ID NO: 57685 - DNA, 21 bp, Artificial Sequence
  primer
caaagggagaggtgaggtcag

SEQ ID NO: 57686 - DNA, 38 bp, Artificial Sequence
  primer
gtaaaacgacggccagtttccagtctttcttgctgcac

SEQ ID NO: 57687 - DNA, 38 bp, Artificial Sequence
  primer
gtaaaacgacggccagttcaaggcttatggacaatggc

SEQ ID NO: 57688 - DNA, 38 bp, Artificial Sequence
  primer
gtaaaacgacggccagtgtaacaagcagggcaagaagg

SEQ ID NO: 57689 - DNA, 22 bp, Artificial Sequence
  primer
catttctactccaggtgttgcc

SEQ ID NO: 57690 - DNA, 24 bp, Artificial Sequence
  primer
ttcccttcaggcagttatacaatc

SEQ ID NO: 57691 - DNA, 21 bp, Artificial Sequence
  primer
agatgtttgggttgtgatgcc

SEQ ID NO: 57692 - DNA, 39 bp, Artificial Sequence
  primer
gtaaaacgacggccagtggatttgttcctagaaagcacg

SEQ ID NO: 57693 - DNA, 21 bp, Artificial Sequence
  primer
agggtcagagaccatttcagc

SEQ ID NO: 57694 - DNA, 38 bp, Artificial Sequence
  primer
gtaaaacgacggccagtatcgcccactattacctcacc

SEQ ID NO: 57695 - DNA, 21 bp, Artificial Sequence
  primer
ccaagctgaatctgaagatcg

SEQ ID NO: 57696 - DNA, 38 bp, Artificial Sequence
  primer
gtaaaacgacggccagtgcttcccggtctacgtctatg

SEQ ID NO: 57697 - DNA, 21 bp, Artificial Sequence
  primer
gaagcagttgtattccctgcc

SEQ ID NO: 57698 - DNA, 21 bp, Artificial Sequence
  primer
acagacctggctttgacttgg

SEQ ID NO: 57699 - DNA, 38 bp, Artificial Sequence
  primer
gtaaaacgacggccagtggaattgctgaagctctccac

SEQ ID NO: 57700 - DNA, 38 bp, Artificial Sequence
  primer
gtaaaacgacggccagtaccgtgctggctatgattagg

SEQ ID NO: 57701 - DNA, 21 bp, Artificial Sequence
  primer
tacgcctcacccagatacctc

SEQ ID NO: 57702 - DNA, 38 bp, Artificial Sequence
  primer
gtaaaacgacggccagtgtaaatccagccatggtctcc

SEQ ID NO: 57703 - DNA, 39 bp, Artificial Sequence
  primer
gtaaaacgacggccagtggtggaggcaataactgtgaac

SEQ ID NO: 57704 - DNA, 38 bp, Artificial Sequence
  primer
gtaaaacgacggccagtgttactgccacacccaaacag

SEQ ID NO: 57705 - DNA, 19 bp, Artificial Sequence
  primer
gagtgtgggatcggctcag

SEQ ID NO: 57706 - DNA, 38 bp, Artificial Sequence
  primer
gtaaaacgacggccagtttagcgcattaaatggtggtg

SEQ ID NO: 57707 - DNA, 45 bp, Artificial Sequence
  primer
gtaaaacgacggccagttgcttatgatatatgttcagttagggaa

SEQ ID NO: 57708 - DNA, 21 bp, Artificial Sequence
  primer
atctccgcaggtcacaaagac

SEQ ID NO: 57709 - DNA, 38 bp, Artificial Sequence
  primer
gtaaaacgacggccagttgtggttgttaatcggtttgc

SEQ ID NO: 57710 - DNA, 41 bp, Artificial Sequence
  primer
gtaaaacgacggccagtgttaaacggttgtggaagtgtatg

SEQ ID NO: 57711 - DNA, 24 bp, Artificial Sequence
  primer
tccttggaaatttaaacctctttg

SEQ ID NO: 57712 - DNA, 40 bp, Artificial Sequence
  primer
gtaaaacgacggccagtaaggctcagaaacccaaacatac

SEQ ID NO: 57713 - DNA, 38 bp, Artificial Sequence
  primer
gtaaaacgacggccagtaacctgttgcctctcaccttc

SEQ ID NO: 57714 - DNA, 40 bp, Artificial Sequence
  primer
gtaaaacgacggccagttttcattcatcttccgtttcaag

SEQ ID NO: 57715 - DNA, 22 bp, Artificial Sequence
  primer
caagactgccacctactgattg

SEQ ID NO: 57716 - DNA, 39 bp, Artificial Sequence
  primer
gtaaaacgacggccagttgaatgtgaagtgaccatctcc

SEQ ID NO: 57717 - DNA, 41 bp, Artificial Sequence
  primer
gtaaaacgacggccagtaaatgttaattacttgcaaagccg

SEQ ID NO: 57718 - DNA, 36 bp, Artificial Sequence
  primer
gtaaaacgacggccagtgcaatgctcgtgcttgttc

SEQ ID NO: 57719 - DNA, 38 bp, Artificial Sequence
  primer
gtaaaacgacggccagtgtggcacatacaacccaagtg

SEQ ID NO: 57720 - DNA, 21 bp, Artificial Sequence
  primer
tggaattggcattcaagtcac

SEQ ID NO: 57721 - DNA, 38 bp, Artificial Sequence
  primer
gtaaaacgacggccagtattgtcgttctcagccatgtg

SEQ ID NO: 57722 - DNA, 41 bp, Artificial Sequence; identical to SEQ ID NO: 57710
  primer

SEQ ID NO: 57723 - DNA, 39 bp, Artificial Sequence
  primer
gtaaaacgacggccagtcaatgcctgcttcctcttaatg

SEQ ID NO: 57724 - DNA, 38 bp, Artificial Sequence
  primer
gtaaaacgacggccagtaactgggtgtattctccagcg

SEQ ID NO: 57725 - DNA, 38 bp, Artificial Sequence
  primer
gtaaaacgacggccagtagcatctgtggtggagaaagc

SEQ ID NO: 57726 - DNA, 23 bp, Artificial Sequence
  primer
tctgctctggaaagagtagaacc

SEQ ID NO: 57727 - DNA, 21 bp, Artificial Sequence
  primer
aaattgcatgctgtcttgacc

SEQ ID NO: 57728 - DNA, 38 bp, Artificial Sequence
  primer
gtaaaacgacggccagtctaggaaccagagcttctgcc

SEQ ID NO: 57729 - DNA, 38 bp, Artificial Sequence
  primer
gtaaaacgacggccagtgaagacagtttctgcccacag

SEQ ID NO: 57730 - DNA, 21 bp, Artificial Sequence
  primer
cccactgctttggagctagac

SEQ ID NO: 57731 - DNA, 39 bp, Artificial Sequence
  primer
gtaaaacgacggccagtgacacagataaggttggatggg

SEQ ID NO: 57732 - DNA, 38 bp, Artificial Sequence
  primer
gtaaaacgacggccagtagtgagatcccggaagctgta

SEQ ID NO: 57733 - DNA, 21 bp, Artificial Sequence
  primer
ctagaacccgagcctgatgac

SEQ ID NO: 57734 - DNA, 21 bp, Artificial Sequence
  primer
taatgaaagctgtggtcctgc

SEQ ID NO: 57735 - DNA, 39 bp, Artificial Sequence
  primer
gtaaaacgacggccagtgagagaagccactggattgaag

SEQ ID NO: 57736 - DNA, 38 bp, Artificial Sequence
  primer
gtaaaacgacggccagtcatagcctccaagcctaccag

SEQ ID NO: 57737 - DNA, 21 bp, Artificial Sequence
  primer
aacgaaatgatgaataccggg

SEQ ID NO: 57738 - DNA, 38 bp, Artificial Sequence
  primer
gtaaaacgacggccagtaaatggttggccatactggtg

SEQ ID NO: 57739 - DNA, 22 bp, Artificial Sequence
  primer
gaactcacgtagaaagcttggg

SEQ ID NO: 57740 - DNA, 30 bp, Artificial Sequence
  primer
cctagtaaacattctgtctaccttgagtaa

SEQ ID NO: 57741 - DNA, 38 bp, Artificial Sequence
  primer
gtaaaacgacggccagtgcctaggaggaaatgggtttg

SEQ ID NO: 57742 - DNA, 39 bp, Artificial Sequence
  primer
gtaaaacgacggccagtctggtgtccaagctgtattctg

SEQ ID NO: 57743 - DNA, 23 bp, Artificial Sequence
  primer
tctttgctgttagtggtggtagc

SEQ ID NO: 57744 - DNA, 42 bp, Artificial Sequence
  primer
gtaaaacgacggccagtaaacctactggctgatatttgaaag

SEQ ID NO: 57745 - DNA, 39 bp, Artificial Sequence
  primer
gtaaaacgacggccagtaacgagtgtttgtttcctttgc

SEQ ID NO: 57746 - DNA, 38 bp, Artificial Sequence
  primer
gtaaaacgacggccagtgggagaagaaagcctcttgtg

SEQ ID NO: 57747 - DNA, 38 bp, Artificial Sequence
  primer
gtaaaacgacggccagtgtccactaaccctcttcctgc

SEQ ID NO: 57748 - DNA, 38 bp, Artificial Sequence
  primer
gtaaaacgacggccagtttgacgcattggttgtttagg

SEQ ID NO: 57749 - DNA, 21 bp, Artificial Sequence
  primer
agtttgaagcacagttgggag

SEQ ID NO: 57750 - DNA, 38 bp, Artificial Sequence
  primer
gtaaaacgacggccagtaagaggaattggacagcaagg

SEQ ID NO: 57751 - DNA, 21 bp, Artificial Sequence
  primer
ccaagaacccaaccaaatagc

SEQ ID NO: 57752 - DNA, 21 bp, Artificial Sequence
  primer
tgtactccactgctgaccctg

SEQ ID NO: 57753 - DNA, 21 bp, Artificial Sequence
  primer
ttggcacatacgaattcttgc

SEQ ID NO: 57754 - DNA, 37 bp, Artificial Sequence
  primer
gtaaaacgacggccagtacctagcagcagccctcttc

SEQ ID NO: 57755 - DNA, 39 bp, Artificial Sequence
  primer
gtaaaacgacggccagtgtgttgaggaaagagtatgggc

SEQ ID NO: 57756 - DNA, 39 bp, Artificial Sequence
  primer
gtaaaacgacggccagtgccaacacaaagtaatcccatc

SEQ ID NO: 57757 - DNA, 43 bp, Artificial Sequence
  primer
gtaaaacgacggccagtgatcattaattgcatcagatatggag

SEQ ID NO: 57758 - DNA, 21 bp, Artificial Sequence
  primer
gtatttggcagctgttcatgg

SEQ ID NO: 57759 - DNA, 23 bp, Artificial Sequence
  primer
ttattacaaaccggttatgaggc

SEQ ID NO: 57760 - DNA, 38 bp, Artificial Sequence
  primer
gtaaaacgacggccagtaaaccagtgcaagcattgaag

SEQ ID NO: 57761 - DNA, 38 bp, Artificial Sequence
  primer
gtaaaacgacggccagtaaatgcatgcccgtttagaag

SEQ ID NO: 57762 - DNA, 40 bp, Artificial Sequence
  primer
gtaaaacgacggccagtaaagtgtttaggcagctgtttcc

SEQ ID NO: 57763 - DNA, 39 bp, Artificial Sequence
  primer
gtaaaacgacggccagtgggtttcactgaatctaggctg

SEQ ID NO: 57764 - DNA, 38 bp, Artificial Sequence
  primer
gtaaaacgacggccagtggtaatcctgctggctggtag

SEQ ID NO: 57765 - DNA, 21 bp, Artificial Sequence
  primer
caagagggagagagctaagcc

SEQ ID NO: 57766 - DNA, 21 bp, Artificial Sequence
  primer
gtggactcagaaacaaatggg

SEQ ID NO: 57767 - DNA, 21 bp, Artificial Sequence
  primer
actgacttgtgtgtgcttggg

SEQ ID NO: 57768 - DNA, 21 bp, Artificial Sequence
  primer
aattcctgctcctcaggcttt

SEQ ID NO: 57769 - DNA, 37 bp, Artificial Sequence
  primer
gtaaaacgacggccagtttctccctcttccaccacag

SEQ ID NO: 57770 - DNA, 38 bp, Artificial Sequence
  primer
gtaaaacgacggccagttgccatcttctggtggtagtc

SEQ ID NO: 57771 - DNA, 38 bp, Artificial Sequence
  primer
gtaaaacgacggccagttcctacagaaattcggctgtg

SEQ ID NO: 57772 - DNA, 41 bp, Artificial Sequence
  primer
gtaaaacgacggccagtttccagacagaagggaatctaaac

SEQ ID NO: 57773 - DNA, 38 bp, Artificial Sequence
  primer
gtaaaacgacggccagttctgccattattggaggagtg

SEQ ID NO: 57774 - DNA, 38 bp, Artificial Sequence
  primer
gtaaaacgacggccagtgcagtggctggaagaataagc

SEQ ID NO: 57775 - DNA, 21 bp, Artificial Sequence
  primer
tcatcccgcctttaaactctc

SEQ ID NO: 57776 - DNA, 38 bp, Artificial Sequence
  primer
gtaaaacgacggccagttaaacccagaggttgtgagcc

SEQ ID NO: 57777 - DNA, 42 bp, Artificial Sequence
  primer
gtaaaacgacggccagttttaatgggaatgaaagcataattg

SEQ ID NO: 57778 - DNA, 21 bp, Artificial Sequence
  primer
tgggtgacaacagagcaagac

SEQ ID NO: 57779 - DNA, 21 bp, Artificial Sequence
  primer
caagtgatctgcctgtcttgg

SEQ ID NO: 57780 - DNA, 39 bp, Artificial Sequence
  primer
gtaaaacgacggccagttcaagcaacaaacaaagctcag

SEQ ID NO: 57781 - DNA, 38 bp, Artificial Sequence
  primer
gtaaaacgacggccagttgtgacatatctgggcctctg

SEQ ID NO: 57782 - DNA, 20 bp, Artificial Sequence
  primer
gtgagccacctcacatccag

SEQ ID NO: 57783 - DNA, 36 bp, Artificial Sequence
  primer
gtaaaacgacggccagtctcccttggcagaccgtag

SEQ ID NO: 57784 - DNA, 21 bp, Artificial Sequence
  primer
tgctttgcatgatagggacag

SEQ ID NO: 57785 - DNA, 43 bp, Artificial Sequence
  primer
gtaaaacgacggccagttgttaagcagctctcattgttatatg

SEQ ID NO: 57786 - DNA, 37 bp, Artificial Sequence
  primer
gtaaaacgacggccagttgcctggcctaaagataggg

SEQ ID NO: 57787 - DNA, 38 bp, Artificial Sequence
  primer
gtaaaacgacggccagttgactgatgagaggcttggtc

SEQ ID NO: 57788 - DNA, 38 bp, Artificial Sequence
  primer
gtaaaacgacggccagtaccaaagtcgtcctgttgagg

SEQ ID NO: 57789 - DNA, 21 bp, Artificial Sequence
  primer
tgttaggaccagcctcctctg

SEQ ID NO: 57790 - DNA, 38 bp, Artificial Sequence
  primer
gtaaaacgacggccagtgctgtcccttgagtcaaccac

SEQ ID NO: 57791 - DNA, 21 bp, Artificial Sequence
  primer
cagttgctggttctttccacc

SEQ ID NO: 57792 - DNA, 38 bp, Artificial Sequence
  primer
gtaaaacgacggccagtgagataccacccagccctttc

SEQ ID NO: 57793 - DNA, 21 bp, Artificial Sequence
  primer
attcaaagagggacccaaagg

SEQ ID NO: 57794 - DNA, 39 bp, Artificial Sequence
  primer
gtaaaacgacggccagttttcactgggaatttggagaaa

SEQ ID NO: 57795 - DNA, 38 bp, Artificial Sequence
  primer
gtaaaacgacggccagtttctgatatctggtgccttgc

SEQ ID NO: 57796 - DNA, 38 bp, Artificial Sequence
  primer
gtaaaacgacggccagtctgattgttagtttgctgcgg

SEQ ID NO: 57797 - DNA, 21 bp, Artificial Sequence
  primer
gatggcaatcgtttcctgttc

SEQ ID NO: 57798 - DNA, 39 bp, Artificial Sequence
  primer
gtaaaacgacggccagttgggtaggcagcatctctttac

SEQ ID NO: 57799 - DNA, 24 bp, Artificial Sequence
  primer
aaatctggagaactgggtaaagac

SEQ ID NO: 57800 - DNA, 25 bp, Artificial Sequence
  primer
tttagtgccagttactaggctatgc

SEQ ID NO: 57801 - DNA, 21 bp, Artificial Sequence
  primer
actgactggcattccacagac

SEQ ID NO: 57802 - DNA, 26 bp, Artificial Sequence
  primer
tcgatgaatttgattcttgataacac

SEQ ID NO: 57803 - DNA, 21 bp, Artificial Sequence
  primer
ggaggaggaatggagaatacg

SEQ ID NO: 57804 - DNA, 27 bp, Artificial Sequence
  primer
attatttgtgataaatggataatgtga

SEQ ID NO: 57805 - DNA, 21 bp, Artificial Sequence
  primer
ccgattggatttgagttgtcc

SEQ ID NO: 57806 - DNA, 37 bp, Artificial Sequence
  primer
gtaaaacgacggccagtggtagggacagcgatgtgtg

SEQ ID NO: 57807 - DNA, 21 bp, Artificial Sequence
  primer
gcaaatataaactgggcaggg

SEQ ID NO: 57808 - DNA, 38 bp, Artificial Sequence
  primer
gtaaaacgacggccagtcagtaaaggcaggccagctac

SEQ ID NO: 57809 - DNA, 21 bp, Artificial Sequence
  primer
gtacagcccttgccacgtatc

SEQ ID NO: 57810 - DNA, 38 bp, Artificial Sequence
  primer
gtaaaacgacggccagtacgttgactgaagctgtgtgc

SEQ ID NO: 57811 - DNA, 21 bp, Artificial Sequence
  primer
cgaatgggaaagagaacttgg

SEQ ID NO: 57812 - DNA, 40 bp, Artificial Sequence
  primer
gtaaaacgacggccagtgcaaaccctgaagaactgtaacc

SEQ ID NO: 57813 - DNA, 22 bp, Artificial Sequence
  primer
cggtaaatccaaactgctatgc

SEQ ID NO: 57814 - DNA, 39 bp, Artificial Sequence
  primer
gtaaaacgacggccagtcagcaggctttgttgtgttaag

SEQ ID NO: 57815 - DNA, 26 bp, Artificial Sequence
  primer
tcgatgaatttgattcttgataacac

SEQ ID NO: 57816 - DNA, 38 bp, Artificial Sequence
  primer
gtaaaacgacggccagtccagagtggatgtgttcccag

SEQ ID NO: 57817 - DNA, 37 bp, Artificial Sequence
  primer
gtaaaacgacggccagtgcagtcagggagcataggtg

SEQ ID NO: 57818 - DNA, 22 bp, Artificial Sequence
  primer
atgactgaagccacatcttcac

SEQ ID NO: 57819 - DNA, 21 bp, Artificial Sequence
  primer
aaaggcatcacgtacacatgg

SEQ ID NO: 57820 - DNA, 36 bp, Artificial Sequence
  primer
gtaaaacgacggccagtatgtagctggcacccttgg

SEQ ID NO: 57821 - DNA, 18 bp, Artificial Sequence
  primer
cctcagggtgagctgtgc

SEQ ID NO: 57822 - DNA, 38 bp, Artificial Sequence
  primer
gtaaaacgacggccagttgaagagctggcttctcagtc

SEQ ID NO: 57823 - DNA, 21 bp, Artificial Sequence
  primer
gaaccaaacgtgtgagacagg

SEQ ID NO: 57824 - DNA, 20 bp, Artificial Sequence
  primer
cctatgacttcgacatcgcc

SEQ ID NO: 57825 - DNA, 20 bp, Artificial Sequence
  primer
atgctccaggattgggaaag

SEQ ID NO: 57826 - DNA, 21 bp, Artificial Sequence
  primer
tccaaattcaggcgtatttcc

SEQ ID NO: 57827 - DNA, 26 bp, Artificial Sequence
  primer
ttacatgcagtctcttaagtgtaggg

SEQ ID NO: 57828 - DNA, 38 bp, Artificial Sequence
  primer
gtaaaacgacggccagtcaggagggacagttgcttagg

SEQ ID NO: 57829 - DNA, 20 bp, Artificial Sequence
  primer
caggtcctctctccaaaggg

SEQ ID NO: 57830 - DNA, 41 bp, Artificial Sequence
  primer
gtaaaacgacggccagttggaatttacacatactgtgaccg

SEQ ID NO: 57831 - DNA, 21 bp, Artificial Sequence
  primer
tttatgggtgtaactccgtgg

SEQ ID NO: 57832 - DNA, 38 bp, Artificial Sequence
  primer
gtaaaacgacggccagtattctggctgagagtgaccag

SEQ ID NO: 57833 - DNA, 38 bp, Artificial Sequence
  primer
gtaaaacgacggccagtcctgcaacgaagggaagtaag

SEQ ID NO: 57834 - DNA, 44 bp, Artificial Sequence
  primer
gtaaaacgacggccagttctctgtaactcagggtcatgataaac

SEQ ID NO: 57835 - DNA, 39 bp, Artificial Sequence
  primer
gtaaaacgacggccagtaacagccacacacttcacaatg

SEQ ID NO: 57836 - DNA, 21 bp, Artificial Sequence
  primer
atgtgcgatatcgtgctgaac

SEQ ID NO: 57837 - DNA, 21 bp, Artificial Sequence
  primer
gtgagctgagattgcaccact

SEQ ID NO: 57838 - DNA, 38 bp, Artificial Sequence
  primer
gtaaaacgacggccagtagcaagatgtgctgaagatgg

SEQ ID NO: 57839 - DNA, 38 bp, Artificial Sequence
  primer
gtaaaacgacggccagtaagagcagcggttccttacac

SEQ ID NO: 57840 - DNA, 38 bp, Artificial Sequence
  primer
gtaaaacgacggccagtgccagagggagcataagtctg

SEQ ID NO: 57841 - DNA, 21 bp, Artificial Sequence
  primer
aataatcgtgagttgggaggg

SEQ ID NO: 57842 - DNA, 38 bp, Artificial Sequence
  primer
gtaaaacgacggccagtagaggagagcacttgcgtacc

SEQ ID NO: 57843 - DNA, 38 bp, Artificial Sequence
  primer
gtaaaacgacggccagtggcttgagctgagtagttggg

SEQ ID NO: 57844 - DNA, 21 bp, Artificial Sequence
  primer
aaaggtgggaggaagaacagg

SEQ ID NO: 57845 - DNA, 38 bp, Artificial Sequence
  primer
gtaaaacgacggccagttcatcctgccattggtgatac

SEQ ID NO: 57846 - DNA, 38 bp, Artificial Sequence
  primer
gtaaaacgacggccagtccatctaacaccaagagctgg

SEQ ID NO: 57847 - DNA, 38 bp, Artificial Sequence
  primer
gtaaaacgacggccagtcgcttctggcctttaaagttg

SEQ ID NO: 57848 - DNA, 38 bp, Artificial Sequence
  primer
gtaaaacgacggccagttagtgcccgaagtgaagtgag

SEQ ID NO: 57849 - DNA, 38 bp, Artificial Sequence
  primer
gtaaaacgacggccagtcacttggctttccacaaacag

SEQ ID NO: 57850 - DNA, 38 bp, Artificial Sequence
  primer
gtaaaacgacggccagtgaaatctctgcatttctgggc

SEQ ID NO: 57851 - DNA, 37 bp, Artificial Sequence
  primer
gtaaaacgacggccagttttcctgaccagaccctgag

SEQ ID NO: 57852 - DNA, 38 bp, Artificial Sequence
  primer
gtaaaacgacggccagtagacatgtaccctgcctgtcc

SEQ ID NO: 57853 - DNA, 21 bp, Artificial Sequence
  primer
agagggagagttctgggaagg

SEQ ID NO: 57854 - DNA, 38 bp, Artificial Sequence
  primer
gtaaaacgacggccagtccacaacacctcactggaaac

SEQ ID NO: 57855 - DNA, 19 bp, Artificial Sequence
  primer
gaagacaggctggcaggag

SEQ ID NO: 57856 - DNA, 36 bp, Artificial Sequence
  primer
gtaaaacgacggccagtggagggagagtgcggaaag

SEQ ID NO: 57857 - DNA, 35 bp, Artificial Sequence
  primer
gtaaaacgacggccagtacgtgactgccgagcaag

SEQ ID NO: 57858 - DNA, 19 bp, Artificial Sequence
  primer
cgggaggttaggaagtggg

SEQ ID NO: 57859 - DNA, 19 bp, Artificial Sequence
  primer
aagctggaacacgggattg

SEQ ID NO: 57860 - DNA, 19 bp, Artificial Sequence
  primer
gtcagctaccagcacgacc

SEQ ID NO: 57861 - DNA, 21 bp, Artificial Sequence
  primer
tgaattaatggcacctcctcc

SEQ ID NO: 57862 - DNA, 37 bp, Artificial Sequence
  primer
gtaaaacgacggccagtcgtgccaggtgagctcttag

SEQ ID NO: 57863 - DNA, 21 bp, Artificial Sequence
  primer
taatccttgctgccacttctc

SEQ ID NO: 57864 - DNA, 38 bp, Artificial Sequence
  primer
gtaaaacgacggccagtcagaccttgctacctgccttc

SEQ ID NO: 57865 - DNA, 21 bp, Artificial Sequence
  primer
tttgcagacttgcctgatttg

SEQ ID NO: 57866 - DNA, 39 bp, Artificial Sequence
  primer
gtaaaacgacggccagtgctatgcttggtgaaacaaagg

SEQ ID NO: 57867 - DNA, 42 bp, Artificial Sequence
  primer
gtaaaacgacggccagttgggagatcactatacaggaaacac

SEQ ID NO: 57868 - DNA, 38 bp, Artificial Sequence
  primer
gtaaaacgacggccagtgccatgcatagcctggagtag

SEQ ID NO: 57869 - DNA, 21 bp, Artificial Sequence
  primer
gttgggtcaggaagaaagtcc

SEQ ID NO: 57870 - DNA, 39 bp, Artificial Sequence
  primer
gtaaaacgacggccagtccgtcacttcttgatctcttgg

SEQ ID NO: 57871 - DNA, 38 bp, Artificial Sequence
  primer
gtaaaacgacggccagttacagagtcaccctcagtgcc

SEQ ID NO: 57872 - DNA, 41 bp, Artificial Sequence
  primer
gtaaaacgacggccagtcgactgctctatggacagttaaag

SEQ ID NO: 57873 - DNA, 20 bp, Artificial Sequence
  primer
ccaacaagtgcagtacacgg

SEQ ID NO: 57874 - DNA, 37 bp, Artificial Sequence
  primer
gtaaaacgacggccagtgtggcttccaggctaatgtg

SEQ ID NO: 57875 - DNA, 22 bp, Artificial Sequence
  primer
tcagctatcctcatcacactgg

SEQ ID NO: 57876 - DNA, 23 bp, Artificial Sequence
  primer
gcaccaactgagagaaagaaagc

SEQ ID NO: 57877 - DNA, 40 bp, Artificial Sequence
  primer
gtaaaacgacggccagtgctcttactggactctgacatgg

SEQ ID NO: 57878 - DNA, 38 bp, Artificial Sequence
  primer
gtaaaacgacggccagtaaaggactgcttgagttgtca

SEQ ID NO: 57879 - DNA, 23 bp, Artificial Sequence
  primer
aaatgaaatcgccaataataaca

SEQ ID NO: 57880 - DNA, 25 bp, Artificial Sequence
  primer
tgaagaagagaatagaggcaaagaa

SEQ ID NO: 57881 - DNA, 44 bp, Artificial Sequence
  primer
gtaaaacgacggccagtgctcacagaattaaattagaataagcc

SEQ ID NO: 57882 - DNA, 24 bp, Artificial Sequence
  primer
tcctagaatcagtctgccattctc

SEQ ID NO: 57883 - DNA, 38 bp, Artificial Sequence
  primer
gtaaaacgacggccagttgggtcagcagaaatacgttg

SEQ ID NO: 57884 - DNA, 41 bp, Artificial Sequence
  primer
gtaaaacgacggccagtaacatatttgctgtcaactcttgc

SEQ ID NO: 57885 - DNA, 23 bp, Artificial Sequence
  primer
atgtgtgtgagagaagccttaat

SEQ ID NO: 57886 - DNA, 40 bp, Artificial Sequence
  primer
gtaaaacgacggccagtgggagactctgtctctgtagcac

SEQ ID NO: 57887 - DNA, 38 bp, Artificial Sequence
  primer
gtaaaacgacggccagttaggcaacacaacgattcctg

SEQ ID NO: 57888 - DNA, 23 bp, Artificial Sequence
  primer
aaagggaactggtggtattattt

SEQ ID NO: 57889 - DNA, 38 bp, Artificial Sequence
  primer
gtaaaacgacggccagtgactatctacccacccgtccc

SEQ ID NO: 57890 - DNA, 21 bp, Artificial Sequence
  primer
ccacatttagcagccttccag

SEQ ID NO: 57891 - DNA, 38 bp, Artificial Sequence
  primer
gtaaaacgacggccagtgaaactctgccacaaacctcc

SEQ ID NO: 57892 - DNA, 38 bp, Artificial Sequence
  primer
gtaaaacgacggccagtaatcttctgctgcacctagcc

SEQ ID NO: 57893 - DNA, 21 bp, Artificial Sequence
  primer
gggatagacaactttgcaggg

SEQ ID NO: 57894 - DNA, 38 bp, Artificial Sequence
  primer
gtaaaacgacggccagtgagtcgctacccacataagcc

SEQ ID NO: 57895 - DNA, 20 bp, Artificial Sequence
  primer
caggcagaaagcagcaagac

SEQ ID NO: 57896 - DNA, 20 bp, Artificial Sequence
  primer
taacctctgcaccaaatggc

SEQ ID NO: 57897 - DNA, 38 bp, Artificial Sequence
  primer
gtaaaacgacggccagtgagaggcaggtgaggtagtgg

SEQ ID NO: 57898 - DNA, 21 bp, Artificial Sequence
  primer
ccagctgggttcttagacctg

SEQ ID NO: 57899 - DNA, 36 bp, Artificial Sequence
  primer
gtaaaacgacggccagtcaggaaccagccctatccc

SEQ ID NO: 57900 - DNA, 38 bp, Artificial Sequence
  primer
gtaaaacgacggccagttctctaagaaatggcgttggg

SEQ ID NO: 57901 - DNA, 38 bp, Artificial Sequence
  primer
gtaaaacgacggccagttaggattggatgggtagggtg

SEQ ID NO: 57902 - DNA, 38 bp, Artificial Sequence
  primer
gtaaaacgacggccagtgcctggtgaacacatcttctg

SEQ ID NO: 57903 - DNA, 37 bp, Artificial Sequence
  primer
gtaaaacgacggccagtcaggctggacacaaccaaag

SEQ ID NO: 57904 - DNA, 20 bp, Artificial Sequence
  primer
acagagcaatcacgtgggac

SEQ ID NO: 57905 - DNA, 21 bp, Artificial Sequence
  primer
tgctggagaagagtcacatgg

SEQ ID NO: 57906 - DNA, 21 bp, Artificial Sequence
  primer
cctgtacaaagaccctgtggc

SEQ ID NO: 57907 - DNA, 38 bp, Artificial Sequence
  primer
gtaaaacgacggccagttgagggtcaactgtctttccc

SEQ ID NO: 57908 - DNA, 21 bp, Artificial Sequence
  primer
ccctagagggtcggtaaggag

SEQ ID NO: 57909 - DNA, 20 bp, Artificial Sequence
  primer
agggatgaatgtggattccc

SEQ ID NO: 57910 - DNA, 38 bp, Artificial Sequence
  primer
gtaaaacgacggccagttcgtgatgtgtacaagctgcc

SEQ ID NO: 57911 - DNA, 38 bp, Artificial Sequence
  primer
gtaaaacgacggccagtccctccacactcatctatcgc

SEQ ID NO: 57912 - DNA, 21 bp, Artificial Sequence
  primer
tcgcttggaccctgatcttac

SEQ ID NO: 57913 - DNA, 38 bp, Artificial Sequence
  primer
gtaaaacgacggccagtgctctttaccacccactctcc

SEQ ID NO: 57914 - DNA, 38 bp, Artificial Sequence
  primer
gtaaaacgacggccagtacaaatgccaccttagatccc

SEQ ID NO: 57915 - DNA, 38 bp, Artificial Sequence
  primer
gtaaaacgacggccagtgaagatgcctccggatatttg

SEQ ID NO: 57916 - DNA, 20 bp, Artificial Sequence
  primer
ttctggctgtggtgtatccc

SEQ ID NO: 57917 - DNA, 38 bp, Artificial Sequence
  primer
gtaaaacgacggccagttcgatgtcttagctcttccgc

SEQ ID NO: 57918 - DNA, 21 bp, Artificial Sequence
  primer
gagaggctgactttctctcgg

SEQ ID NO: 57919 - DNA, 38 bp, Artificial Sequence
  primer
gtaaaacgacggccagtctggctgtttaggaggattgc

SEQ ID NO: 57920 - DNA, 38 bp, Artificial Sequence
  primer
gtaaaacgacggccagtgtggtgggtttgccaagtaac

SEQ ID NO: 57921 - DNA, 21 bp, Artificial Sequence
  primer
gcaatatggctgctgattctg

SEQ ID NO: 57922 - DNA, 21 bp, Artificial Sequence
  primer
agagggccatcaaactcattg

SEQ ID NO: 57923 - DNA, 38 bp, Artificial Sequence
  primer
gtaaaacgacggccagttacagacagaccaaggcttcc

SEQ ID NO: 57924 - DNA, 38 bp, Artificial Sequence
  primer
gtaaaacgacggccagttacaaacaacttggcaaagcc

SEQ ID NO: 57925 - DNA, 21 bp, Artificial Sequence
  primer
atctcaatgggaacaactggg

SEQ ID NO: 57926 - DNA, 21 bp, Artificial Sequence
  primer
cttgttcagccagacatcacc

SEQ ID NO: 57927 - DNA, 38 bp, Artificial Sequence
  primer
gtaaaacgacggccagttcctggtttatctctaccggc

SEQ ID NO: 57928 - DNA, 21 bp, Artificial Sequence
  primer
tctgtatcccgtctctgaccc

SEQ ID NO: 57929 - DNA, 35 bp, Artificial Sequence
  primer
gtaaaacgacggccagtggatcgcctaccacctgc

SEQ ID NO: 57930 - DNA, 36 bp, Artificial Sequence
  primer
gtaaaacgacggccagtcttggactctgcatggctg

SEQ ID NO: 57931 - DNA, 19 bp, Artificial Sequence
  primer
gctgctgctgctgcattac

SEQ ID NO: 57932 - DNA, 35 bp, Artificial Sequence
  primer
gtaaaacgacggccagtccttcagcccaacctccc

SEQ ID NO: 57933 - DNA, 37 bp, Artificial Sequence
  primer
gtaaaacgacggccagttgatgtcaggtgggaaggtg

SEQ ID NO: 57934 - DNA, 39 bp, Artificial Sequence
  primer
gtaaaacgacggccagtcacagccaggaagcagtctatc

SEQ ID NO: 57935 - DNA, 38 bp, Artificial Sequence
  primer
gtaaaacgacggccagtcagggagctggttctatgcac

SEQ ID NO: 57936 - DNA, 38 bp, Artificial Sequence
  primer
gtaaaacgacggccagtatccttcacgtgtcagctgtg

SEQ ID NO: 57937 - DNA, 39 bp, Artificial Sequence
  primer
gtaaaacgacggccagttgcccattaaatgtgtttagcc

SEQ ID NO: 57938 - DNA, 37 bp, Artificial Sequence
  primer
gtaaaacgacggccagtgagtgtggttagcagctcgg

SEQ ID NO: 57939 - DNA, 26 bp, Artificial Sequence
  primer
tgtgaacaaatagttatcacaacagg

SEQ ID NO: 57940 - DNA, 38 bp, Artificial Sequence
  primer
gtaaaacgacggccagtcaggaccaggaggaatggtag

SEQ ID NO: 57941 - DNA, 39 bp, Artificial Sequence
  primer
gtaaaacgacggccagttgaaggacatatgcatctccag

SEQ ID NO: 57942 - DNA, 38 bp, Artificial Sequence
  primer
gtaaaacgacggccagttgcttgccctaaactctttgc

SEQ ID NO: 57943 - DNA, 22 bp, Artificial Sequence
  primer
caggtgctcaatacacttggtg

SEQ ID NO: 57944 - DNA, 40 bp, Artificial Sequence
  primer
gtaaaacgacggccagtttgcctgagcattactttcactc

SEQ ID NO: 57945 - DNA, 21 bp, Artificial Sequence
  primer
gtttaagcacaagggtttccc

SEQ ID NO: 57946 - DNA, 20 bp, Artificial Sequence
  primer
aatgctcctgccaagtgatg

SEQ ID NO: 57947 - DNA, 21 bp, Artificial Sequence
  primer
ttaattggttccagcgaaagc

SEQ ID NO: 57948 - DNA, 38 bp, Artificial Sequence
  primer
gtaaaacgacggccagtgtaggtgcgcagccttatttc

SEQ ID NO: 57949 - DNA, 42 bp, Artificial Sequence
  primer
gtaaaacgacggccagtgacacaaccaaattaacatggagac

SEQ ID NO: 57950 - DNA, 21 bp, Artificial Sequence
  primer
acgcactggtcatgtgcttag

SEQ ID NO: 57951 - DNA, 23 bp, Artificial Sequence
  primer
aatctacagtcatggctacacgg

SEQ ID NO: 57952 - DNA, 38 bp, Artificial Sequence
  primer
gtaaaacgacggccagtggaatcaggtcattccgaaac

SEQ ID NO: 57953 - DNA, 38 bp, Artificial Sequence
  primer
gtaaaacgacggccagtccttgcagaacctcagaaagc

SEQ ID NO: 57954 - DNA, 38 bp, Artificial Sequence
  primer
gtaaaacgacggccagtaagcacaggttctcctggatg

SEQ ID NO: 57955 - DNA, 38 bp, Artificial Sequence
  primer
gtaaaacgacggccagtgcatttggcttctgagaaagg

SEQ ID NO: 57956 - DNA, 38 bp, Artificial Sequence
  primer
gtaaaacgacggccagttatctccgaggacctttcacc

SEQ ID NO: 57957 - DNA, 38 bp, Artificial Sequence
  primer
gtaaaacgacggccagtcctcagaacatgaagtctggc

SEQ ID NO: 57958 - DNA, 22 bp, Artificial Sequence
  primer
ctcagtcaaacaaacctttccc

SEQ ID NO: 57959 - DNA, 21 bp, Artificial Sequence
  primer
ccagccatacaaccctttctc

SEQ ID NO: 57960 - DNA, 25 bp, Artificial Sequence
  primer
tctgaatctagtcagtcattgcttc

SEQ ID NO: 57961 - DNA, 21 bp, Artificial Sequence
  primer
aggaagaggtccagagcagtg

SEQ ID NO: 57962 - DNA, 44 bp, Artificial Sequence
  primer
gtaaaacgacggccagtattaaagaccttctctatgctagatgc

SEQ ID NO: 57963 - DNA, 38 bp, Artificial Sequence
  primer
gtaaaacgacggccagtggccatatctcacaggatggt

SEQ ID NO: 57964 - DNA, 42 bp, Artificial Sequence
  primer
gtaaaacgacggccagtcatcttcaaattcagagcctatcag

SEQ ID NO: 57965 - DNA, 21 bp, Artificial Sequence
  primer
gcagaatcatgaggaacatgg

SEQ ID NO: 57966 - DNA, 38 bp, Artificial Sequence
  primer
gtaaaacgacggccagttgaaagcctcttgtgaagcag

SEQ ID NO: 57967 - DNA, 21 bp, Artificial Sequence
  primer
tttaagtcagggccacacaag

SEQ ID NO: 57968 - DNA, 21 bp, Artificial Sequence
  primer
cagacctgaagcccagatttc

SEQ ID NO: 57969 - DNA, 40 bp, Artificial Sequence
  primer
gtaaaacgacggccagtgcccaaatatgaattgcatgtag

SEQ ID NO: 57970 - DNA, 40 bp, Artificial Sequence
  primer
gtaaaacgacggccagttcttcctggaactggaattatcc

SEQ ID NO: 57971 - DNA, 19 bp, Artificial Sequence
  primer
ctctgcagtgcatgaagcc

SEQ ID NO: 57972 - DNA, 25 bp, Artificial Sequence
  primer
tctaggagactgtgaatcctaaggg

SEQ ID NO: 57973 - DNA, 21 bp, Artificial Sequence
  primer
ctgggcaacagaataagaccc

SEQ ID NO: 57974 - DNA, 36 bp, Artificial Sequence
  primer
gtaaaacgacggccagtgcagagaactttgcccgtc

SEQ ID NO: 57975 - DNA, 35 bp, Artificial Sequence
  primer
gtaaaacgacggccagtgtgggctgtgagggacag

SEQ ID NO: 57976 - DNA, 18 bp, Artificial Sequence
  primer
ggaagcagagaggccagg

SEQ ID NO: 57977 - DNA, 21 bp, Artificial Sequence
  primer
tccagaggaaagtctggcttc

SEQ ID NO: 57978 - DNA, 38 bp, Artificial Sequence
  primer
gtaaaacgacggccagtacgaggcttgctctcttgttc

SEQ ID NO: 57979 - DNA, 21 bp, Artificial Sequence
  primer
gccttgtcctttggatcagtc

SEQ ID NO: 57980 - DNA, 38 bp, Artificial Sequence
  primer
gtaaaacgacggccagttgggtgtttctgaatctttcc

SEQ ID NO: 57981 - DNA, 21 bp, Artificial Sequence
  primer
agaaattgtgcaatgccagag

SEQ ID NO: 57982 - DNA, 35 bp, Artificial Sequence
  primer
gtaaaacgacggccagtgtgaggtggcaggtggtg

SEQ ID NO: 57983 - DNA, 36 bp, Artificial Sequence
  primer
gtaaaacgacggccagtcttcgtgcgcttctcattg

SEQ ID NO: 57984 - DNA, 21 bp, Artificial Sequence
  primer
gctctgcaaagaaattgggac

SEQ ID NO: 57985 - DNA, 38 bp, Artificial Sequence
  primer
gtaaaacgacggccagtacttcaaatttgcctccttgc

SEQ ID NO: 57986 - DNA, 38 bp, Artificial Sequence
  primer
gtaaaacgacggccagtatgttggcagcaagcaaatac

SEQ ID NO: 57987 - DNA, 38 bp, Artificial Sequence
  primer
gtaaaacgacggccagtaacaaagatgcagaaagtccg

SEQ ID NO: 57988 - DNA, 22 bp, Artificial Sequence
  primer
gagacctgacatcaaagccaag

SEQ ID NO: 57989 - DNA, 21 bp, Artificial Sequence
  primer
ttaaggtgtgagcacactggg

SEQ ID NO: 57990 - DNA, 43 bp, Artificial Sequence
  primer
gtaaaacgacggccagtacaagtcaaggtagcaataaagtgtc

SEQ ID NO: 57991 - DNA, 37 bp, Artificial Sequence
  primer
gtaaaacgacggccagtgagacctccctgaagccaag

SEQ ID NO: 57992 - DNA, 22 bp, Artificial Sequence
  primer
tggcaagggtattaacatttgg

SEQ ID NO: 57993 - DNA, 37 bp, Artificial Sequence
  primer
gtaaaacgacggccagtgcatgccaaggaacaatttc

SEQ ID NO: 57994 - DNA, 40 bp, Artificial Sequence
  primer
gtaaaacgacggccagttgtagaacccttgcaacaacaac

SEQ ID NO: 57995 - DNA, 21 bp, Artificial Sequence
  primer
gccctggtacatgcctaagag

SEQ ID NO: 57996 - DNA, 39 bp, Artificial Sequence
  primer
gtaaaacgacggccagttcctgggaataagataatgggc

SEQ ID NO: 57997 - DNA, 38 bp, Artificial Sequence
  primer
gtaaaacgacggccagtatctgggaatgggagagaacc

SEQ ID NO: 57998 - DNA, 38 bp, Artificial Sequence
  primer
gtaaaacgacggccagtgtgccacaactcagactttcg

SEQ ID NO: 57999 - DNA, 38 bp, Artificial Sequence
  primer
gtaaaacgacggccagttgcgacagagtcctactccac

SEQ ID NO: 58000 - DNA, 20 bp, Artificial Sequence
  primer
ccatcagacaatttggcagc

SEQ ID NO: 58001 - DNA, 37 bp, Artificial Sequence
  primer
gtaaaacgacggccagtctggtggacctctgagcttg

SEQ ID NO: 58002 - DNA, 38 bp, Artificial Sequence
  primer
gtaaaacgacggccagtagagctcatggacctgctttg

SEQ ID NO: 58003 - DNA, 38 bp, Artificial Sequence
  primer
gtaaaacgacggccagtaaagactcacattgatggccc

SEQ ID NO: 58004 - DNA, 42 bp, Artificial Sequence
  primer
gtaaaacgacggccagtcagctttgaggctaaatcatatgtc

SEQ ID NO: 58005 - DNA, 21 bp, Artificial Sequence
  primer
tcagcaaggtggatacaaagg

SEQ ID NO: 58006 - DNA, 40 bp, Artificial Sequence
  primer
gtaaaacgacggccagtggacgtaggactcaaagagatgg

SEQ ID NO: 58007 - DNA, 44 bp, Artificial Sequence
  primer
gtaaaacgacggccagtcagatacatacagtgactggcactaag

SEQ ID NO: 58008 - DNA, 38 bp, Artificial Sequence
  primer
gtaaaacgacggccagtacttggaaggcttgggaaatc

SEQ ID NO: 58009 - DNA, 37 bp, Artificial Sequence
  primer
gtaaaacgacggccagtgacacctcaacccagtggtc

SEQ ID NO: 58010 - DNA, 21 bp, Artificial Sequence
  primer
tgaccagggtcctattccaag

SEQ ID NO: 58011 - DNA, 38 bp, Artificial Sequence
  primer
gtaaaacgacggccagtggtgatcaaagagaggttggc

SEQ ID NO: 58012 - DNA, 38 bp, Artificial Sequence
  primer
gtaaaacgacggccagtacagagggagcgattaagtgg

SEQ ID NO: 58013 - DNA, 21 bp, Artificial Sequence
  primer
cgaaatagaagtcacctgggc

SEQ ID NO: 58014 - DNA, 44 bp, Artificial Sequence
  primer
gtaaaacgacggccagttcaaggaagatgaagtggttaactatg

SEQ ID NO: 58015 - DNA, 22 bp, Artificial Sequence
  primer
agggatgtaaaccctaaggacc

SEQ ID NO: 58016 - DNA, 24 bp, Artificial Sequence
  primer
aaattgatgagaaatccactctgg

SEQ ID NO: 58017 - DNA, 22 bp, Artificial Sequence
  primer
tgtgggagtggaatcctcatag

SEQ ID NO: 58018 - DNA, 21 bp, Artificial Sequence
  primer
ggtcacgtagcaagcactttg

SEQ ID NO: 58019 - DNA, 39 bp, Artificial Sequence
  primer
gtaaaacgacggccagtcgttgagtacagttcttggcac

SEQ ID NO: 58020 - DNA, 40 bp, Artificial Sequence
  primer
gtaaaacgacggccagttgatactggtatgccataaagcc

SEQ ID NO: 58021 - DNA, 39 bp, Artificial Sequence
  primer
gtaaaacgacggccagtgatggacacacctgtagcaatg

SEQ ID NO: 58022 - DNA, 21 bp, Artificial Sequence
  primer
gctgttgagaaacgcacaaag

SEQ ID NO: 58023 - DNA, 39 bp, Artificial Sequence
  primer
gtaaaacgacggccagtgccctagaatatcagtggaagc

SEQ ID NO: 58024 - DNA, 39 bp, Artificial Sequence
  primer
gtaaaacgacggccagttgctgtggtatggttaagaggg

SEQ ID NO: 58025 - DNA, 21 bp, Artificial Sequence
  primer
tagatgtcccagatgcgtagg

SEQ ID NO: 58026 - DNA, 37 bp, Artificial Sequence
  primer
gtaaaacgacggccagtccctgatgaggtgcaaagag

SEQ ID NO: 58027 - DNA, 38 bp, Artificial Sequence
  primer
gtaaaacgacggccagtaaagacccattgagggagatg

SEQ ID NO: 58028 - DNA, 38 bp, Artificial Sequence
  primer
gtaaaacgacggccagtatgccctaaagagaaattggc

SEQ ID NO: 58029 - DNA, 41 bp, Artificial Sequence
  primer
gtaaaacgacggccagtggaaccttgagagagaatgtatgg

SEQ ID NO: 58030 - DNA, 38 bp, Artificial Sequence
  primer
gtaaaacgacggccagtgatctttgtttgggtggcttt

SEQ ID NO: 58031 - DNA, 42 bp, Artificial Sequence
  primer
gtaaaacgacggccagtgacccatacatgagtcagtagttcc

SEQ ID NO: 58032 - DNA, 37 bp, Artificial Sequence
  primer
gtaaaacgacggccagtcagaagtgacaaggatgggc

SEQ ID NO: 58033 - DNA, 22 bp, Artificial Sequence
  primer
catttctgccagcacctagaag

SEQ ID NO: 58034 - DNA, 21 bp, Artificial Sequence
  primer
ttgccaattaggtcagtggtc

SEQ ID NO: 58035 - DNA, 38 bp, Artificial Sequence
  primer
gtaaaacgacggccagtttcctcaaatttggatctggc

SEQ ID NO: 58036 - DNA, 37 bp, Artificial Sequence
  primer
gtaaaacgacggccagtgatgttagaggcgctcaggg

SEQ ID NO: 58037 - DNA, 38 bp, Artificial Sequence
  primer
gtaaaacgacggccagtgtacccagcgtccttgatctc

SEQ ID NO: 58038 - DNA, 38 bp, Artificial Sequence
  primer
gtaaaacgacggccagtatgctgtaacgaggaaatggg

SEQ ID NO: 58039 - DNA, 21 bp, Artificial Sequence
  primer
gggcaacaagagtgaaactcc

SEQ ID NO: 58040 - DNA, 37 bp, Artificial Sequence
  primer
gtaaaacgacggccagtagtatggcctggccctgtag

SEQ ID NO: 58041 - DNA, 38 bp, Artificial Sequence
  primer
gtaaaacgacggccagtcctacgcagtggaatgtctgg

SEQ ID NO: 58042 - DNA, 21 bp, Artificial Sequence
  primer
acctcttatccctaccctggc

SEQ ID NO: 58043 - DNA, 38 bp, Artificial Sequence
  primer
gtaaaacgacggccagttgatagcctctaggctctggc

SEQ ID NO: 58044 - DNA, 37 bp, Artificial Sequence
  primer
gtaaaacgacggccagttctggaggagacagagctgc

SEQ ID NO: 58045 - DNA, 21 bp, Artificial Sequence
  primer
agccctaggtcatcctctgtg

SEQ ID NO: 58046 - DNA, 38 bp, Artificial Sequence
  primer
gtaaaacgacggccagttgacagttgttggagtggacc

SEQ ID NO: 58047 - DNA, 38 bp, Artificial Sequence
  primer
gtaaaacgacggccagtagtccatgttcaggttgggtc

SEQ ID NO: 58048 - DNA, 38 bp, Artificial Sequence
  primer
gtaaaacgacggccagtcgtgggtcctagtttccaaag

SEQ ID NO: 58049 - DNA, 21 bp, Artificial Sequence
  primer
cctgaagggctgtgtctatgg

SEQ ID NO: 58050 - DNA, 38 bp, Artificial Sequence
  primer
gtaaaacgacggccagtgaaagggtcagatgcagaagg

SEQ ID NO: 58051 - DNA, 38 bp, Artificial Sequence
  primer
gtaaaacgacggccagtgttggtccaatccatcctcag

SEQ ID NO: 58052 - DNA, 38 bp, Artificial Sequence
  primer
gtaaaacgacggccagtgatccctgcatagagaatggg

SEQ ID NO: 58053 - DNA, 37 bp, Artificial Sequence
  primer
gtaaaacgacggccagtagtggcttggcctgaagaag

SEQ ID NO: 58054 - DNA, 38 bp, Artificial Sequence
  primer
gtaaaacgacggccagtggtgagatctagagggttggc

SEQ ID NO: 58055 - DNA, 20 bp, Artificial Sequence
  primer
gtcccactgtggctctgttc

SEQ ID NO: 58056 - DNA, 38 bp, Artificial Sequence
  primer
gtaaaacgacggccagttatgaggtttgactcaggccc

SEQ ID NO: 58057 - DNA, 38 bp, Artificial Sequence
  primer
gtaaaacgacggccagtacgttgtggcctctctctagc

SEQ ID NO: 58058 - DNA, 38 bp, Artificial Sequence
  primer
gtaaaacgacggccagttcattgaccattgctctcagg

SEQ ID NO: 58059 - DNA, 21 bp, Artificial Sequence
  primer
acacagtgcccttctctgtcc

SEQ ID NO: 58060 - DNA, 21 bp, Artificial Sequence
  primer
ctgagacctgtgcaaaggaag

SEQ ID NO: 58061 - DNA, 38 bp, Artificial Sequence
  primer
gtaaaacgacggccagtcggtcctacaggaaaccagac

SEQ ID NO: 58062 - DNA, 40 bp, Artificial Sequence
  primer
gtaaaacgacggccagtttcctgaactttaagcttccaca

SEQ ID NO: 58063 - DNA, 38 bp, Artificial Sequence
  primer
gtaaaacgacggccagtcttgtgcaaaggcaatgctac

SEQ ID NO: 58064 - DNA, 25 bp, Artificial Sequence
  primer
tcaatcctcactctgtgactttagg

SEQ ID NO: 58065 - DNA, 25 bp, Artificial Sequence
  primer
aaatggctgtatcccatatctgtat

SEQ ID NO: 58066 - DNA, 20 bp, Artificial Sequence
  primer
agggctatttaaagcggcag

SEQ ID NO: 58067 - DNA, 38 bp, Artificial Sequence
  primer
gtaaaacgacggccagtccaaacagaactaagcgcaag

SEQ ID NO: 58068 - DNA, 38 bp, Artificial Sequence
  primer
gtaaaacgacggccagtatgtcttgcagggatagctgg

SEQ ID NO: 58069 - DNA, 22 bp, Artificial Sequence
  primer
caattatcaggaggaagggagg

SEQ ID NO: 58070 - DNA, 38 bp, Artificial Sequence
  primer
gtaaaacgacggccagtgactcaagagggtcacagcac

SEQ ID NO: 58071 - DNA, 21 bp, Artificial Sequence
  primer
tgtgcacacacacattctctg

SEQ ID NO: 58072 - DNA, 25 bp, Artificial Sequence
  primer
ctggacataacgtatccataagtgg

SEQ ID NO: 58073 - DNA, 42 bp, Artificial Sequence
  primer
gtaaaacgacggccagttccagaaatgaatatctttggaatg

SEQ ID NO: 58074 - DNA, 19 bp, Artificial Sequence
  primer
gagctggttagcacctccc

SEQ ID NO: 58075 - DNA, 38 bp, Artificial Sequence
  primer
gtaaaacgacggccagtcgcacaaagtgattacaatgg

SEQ ID NO: 58076 - DNA, 42 bp, Artificial Sequence
  primer
gtaaaacgacggccagttgattaaggaggttatgagtcatgg

SEQ ID NO: 58077 - DNA, 39 bp, Artificial Sequence
  primer
gtaaaacgacggccagttgatttcgtgggactttgattc

SEQ ID NO: 58078 - DNA, 21 bp, Artificial Sequence
  primer
agcaagtgcttcctcttcagg

SEQ ID NO: 58079 - DNA, 38 bp, Artificial Sequence
  primer
gtaaaacgacggccagtgctagcctatcatgcacaagg

SEQ ID NO: 58080 - DNA, 38 bp, Artificial Sequence
  primer
gtaaaacgacggccagtgtgcctggccttggtaaattc

SEQ ID NO: 58081 - DNA, 38 bp, Artificial Sequence
  primer
gtaaaacgacggccagtagactcatcttccttcagcgg

SEQ ID NO: 58082 - DNA, 38 bp, Artificial Sequence
  primer
gtaaaacgacggccagtgctgcttgctgaggtgtaaag

SEQ ID NO: 58083 - DNA, 40 bp, Artificial Sequence
  primer
gtaaaacgacggccagttgctattccgtggagaatatgaa

SEQ ID NO: 58084 - DNA, 38 bp, Artificial Sequence
  primer
gtaaaacgacggccagtacgactagctgcaaagcactg

SEQ ID NO: 58085 - DNA, 23 bp, Artificial Sequence
  primer
aagatgtgaaatgcttatgcagc

SEQ ID NO: 58086 - DNA, 20 bp, Artificial Sequence
  primer
ctgtgaggagttggagccac

SEQ ID NO: 58087 - DNA, 39 bp, Artificial Sequence
  primer
gtaaaacgacggccagtacgttgtattctccaggcagag

SEQ ID NO: 58088 - DNA, 38 bp, Artificial Sequence
  primer
gtaaaacgacggccagttttccatgtttcaggtcatgc

SEQ ID NO: 58089 - DNA, 38 bp, Artificial Sequence
  primer
gtaaaacgacggccagtggcctgaagacagatttggac

SEQ ID NO: 58090 - DNA, 21 bp, Artificial Sequence
  primer
cagcctggtcaactctcagtc

SEQ ID NO: 58091 - DNA, 38 bp, Artificial Sequence
  primer
gtaaaacgacggccagtaggtgaagaagttcaggctgc

SEQ ID NO: 58092 - DNA, 21 bp, Artificial Sequence
  primer
gcccataatcgactggaattg

SEQ ID NO: 58093 - DNA, 38 bp, Artificial Sequence
  primer
gtaaaacgacggccagtatgtatgggctccgaaatctg

SEQ ID NO: 58094 - DNA, 38 bp, Artificial Sequence
  primer
gtaaaacgacggccagtctccaggaattggacctgaag

SEQ ID NO: 58095 - DNA, 38 bp, Artificial Sequence
  primer
gtaaaacgacggccagttcctgtagtgaatcaggcacc

SEQ ID NO: 58096 - DNA, 20 bp, Artificial Sequence
  primer
aagccctagggaggattgtg

SEQ ID NO: 58097 - DNA, 19 bp, Artificial Sequence
  primer
aaatccactcctggagccc

SEQ ID NO: 58098 - DNA, 38 bp, Artificial Sequence
  primer
gtaaaacgacggccagtaacttgggtacagccttctgg

SEQ ID NO: 58099 - DNA, 38 bp, Artificial Sequence
  primer
gtaaaacgacggccagtcagctacctcagtgggaggtc

SEQ ID NO: 58100 - DNA, 38 bp, Artificial Sequence
  primer
gtaaaacgacggccagtaggaagtgggagaggctgaag

SEQ ID NO: 58101 - DNA, 21 bp, Artificial Sequence
  primer
gcacctcaaagtggaaccatc

SEQ ID NO: 58102 - DNA, 21 bp, Artificial Sequence
  primer
gaggaggcctaaacctccaag

SEQ ID NO: 58103 - DNA, 21 bp, Artificial Sequence
  primer
ctagaggccatctctcccaac

SEQ ID NO: 58104 - DNA, 38 bp, Artificial Sequence
  primer
gtaaaacgacggccagtctgcaccatgcaaacaaagag

SEQ ID NO: 58105 - DNA, 21 bp, Artificial Sequence
  primer
ggctggagcagttatctgagg

SEQ ID NO: 58106 - DNA, 38 bp, Artificial Sequence
  primer
gtaaaacgacggccagtctcagccagctttacctggag

SEQ ID NO: 58107 - DNA, 38 bp, Artificial Sequence
  primer
gtaaaacgacggccagtgagcaccagtgagtagggagc

SEQ ID NO: 58108 - DNA, 38 bp, Artificial Sequence
  primer
gtaaaacgacggccagtaacagaaggtgttcccagtcg

SEQ ID NO: 58109 - DNA, 19 bp, Artificial Sequence
  primer
aaagccgaaagcgaagagg

SEQ ID NO: 58110 - DNA, 37 bp, Artificial Sequence
  primer
gtaaaacgacggccagtggtgagcactgtcctccttg

SEQ ID NO: 58111 - DNA, 37 bp, Artificial Sequence
  primer
gtaaaacgacggccagtattggctgttgaaatggcag

SEQ ID NO: 58112 - DNA, 21 bp, Artificial Sequence
  primer
aatggctggattcctaccctc

SEQ ID NO: 58113 - DNA, 22 bp, Artificial Sequence
  primer
gctcctaagaagggcctgttac

SEQ ID NO: 58114 - DNA, 20 bp, Artificial Sequence
  primer
ctagggctgaggaagcgttg

SEQ ID NO: 58115 - DNA, 20 bp, Artificial Sequence
  primer
gtgacacacgtcctcaaggg

SEQ ID NO: 58116 - DNA, 38 bp, Artificial Sequence
  primer
gtaaaacgacggccagttagaggcctgagtgtgaggtg

SEQ ID NO: 58117 - DNA, 21 bp, Artificial Sequence
  primer
ctggttgggagagtggatctg

SEQ ID NO: 58118 - DNA, 37 bp, Artificial Sequence
  primer
gtaaaacgacggccagtaggcaggacggtatgatgtg

SEQ ID NO: 58119 - DNA, 38 bp, Artificial Sequence
  primer
gtaaaacgacggccagtctgtggacagggtctctgagg

SEQ ID NO: 58120 - DNA, 38 bp, Artificial Sequence
  primer
gtaaaacgacggccagtgcagtggtaagccctggttag

SEQ ID NO: 58121 - DNA, 18 bp, Artificial Sequence
  primer
gtccgcgcggttataagg

SEQ ID NO: 58122 - DNA, 38 bp, Artificial Sequence
  primer
gtaaaacgacggccagttagtccttccgcctgtctctg

SEQ ID NO: 58123 - DNA, 22 bp, Artificial Sequence
  primer
tgtcacttcattcctctttgcc

SEQ ID NO: 58124 - DNA, 37 bp, Artificial Sequence
  primer
gtaaaacgacggccagtgaaatggagcattagcacgg

SEQ ID NO: 58125 - DNA, 20 bp, Artificial Sequence
  primer
gcagctaaaggtgagggtgg

SEQ ID NO: 58126 - DNA, 39 bp, Artificial Sequence
  primer
gtaaaacgacggccagtctagagttgcctttgacccttg

SEQ ID NO: 58127 - DNA, 38 bp, Artificial Sequence
  primer
gtaaaacgacggccagtgaggcttggacacagaattgg

SEQ ID NO: 58128 - DNA, 37 bp, Artificial Sequence
  primer
gtaaaacgacggccagtctctgaggcaaatcaggcag

SEQ ID NO: 58129 - DNA, 38 bp, Artificial Sequence
  primer
gtaaaacgacggccagtagtggacactgctccattcag

SEQ ID NO: 58130 - DNA, 37 bp, Artificial Sequence
  primer
gtaaaacgacggccagtctaggagccagatggcaaag

SEQ ID NO: 58131 - DNA, 21 bp, Artificial Sequence
  primer
aacttccagatcgagcaccag

SEQ ID NO: 58132 - DNA, 38 bp, Artificial Sequence
  primer
gtaaaacgacggccagtggatctccgctcacacttacc

SEQ ID NO: 58133 - DNA, 18 bp, Artificial Sequence
  primer
cctgcaccgcagacacac

SEQ ID NO: 58134 - DNA, 38 bp, Artificial Sequence
  primer
gtaaaacgacggccagttaagggttgaggtatttgggc

SEQ ID NO: 58135 - DNA, 38 bp, Artificial Sequence
  primer
gtaaaacgacggccagtgctctcaaaggtcctgcattg

SEQ ID NO: 58136 - DNA, 37 bp, Artificial Sequence
  primer
gtaaaacgacggccagtctttagcacgcttgagccag

SEQ ID NO: 58137 - DNA, 21 bp, Artificial Sequence
  primer
aaacagacagggtcatcatcg

SEQ ID NO: 58138 - DNA, 38 bp, Artificial Sequence
  primer
gtaaaacgacggccagttgacttaagcccttctgctcc

SEQ ID NO: 58139 - DNA, 21 bp, Artificial Sequence
  primer
aaggttaccgagtgcatgagc

SEQ ID NO: 58140 - DNA, 24 bp, Artificial Sequence
  primer
ttggtaattagagatcatcctggg

SEQ ID NO: 58141 - DNA, 40 bp, Artificial Sequence
  primer
gtaaaacgacggccagtgactttatgactcaaggtttggg

SEQ ID NO: 58142 - DNA, 38 bp, Artificial Sequence
  primer
gtaaaacgacggccagtagccaagtatggagagggtcc

SEQ ID NO: 58143 - DNA, 24 bp, Artificial Sequence
  primer
cattgactgtacactgtatgccac

SEQ ID NO: 58144 - DNA, 23 bp, Artificial Sequence
  primer
gggcaataaggttacttggattc

SEQ ID NO: 58145 - DNA, 38 bp, Artificial Sequence
  primer
gtaaaacgacggccagtacatgcctgtgtggaggttag

SEQ ID NO: 58146 - DNA, 22 bp, Artificial Sequence
  primer
aaatgaagtcagccaggagttg

SEQ ID NO: 58147 - DNA, 39 bp, Artificial Sequence
  primer
gtaaaacgacggccagttttcaaagccttcctggtaatg

SEQ ID NO: 58148 - DNA, 23 bp, Artificial Sequence
  primer
ccttcggtctacaggtatcacag

SEQ ID NO: 58149 - DNA, 27 bp, Artificial Sequence
  primer
ttatatgtgggattagatgttatgtgg

SEQ ID NO: 58150 - DNA, 22 bp, Artificial Sequence
  primer
ccaataaagctcatttccaagc

SEQ ID NO: 58151 - DNA, 43 bp, Artificial Sequence
  primer
gtaaaacgacggccagtgcagaattagatataatcatcccagc

SEQ ID NO: 58152 - DNA, 39 bp, Artificial Sequence
  primer
gtaaaacgacggccagtcccagacagcatttagggtatg

SEQ ID NO: 58153 - DNA, 21 bp, Artificial Sequence
  primer
acttccgaaatttcaactgcc

SEQ ID NO: 58154 - DNA, 23 bp, Artificial Sequence
  primer
catgctgctcatcttattgtttg

SEQ ID NO: 58155 - DNA, 21 bp, Artificial Sequence
  primer
gaatgccactttacccagagc

SEQ ID NO: 58156 - DNA, 22 bp, Artificial Sequence
  primer
tggcttggctaataaatagggc

SEQ ID NO: 58157 - DNA, 38 bp, Artificial Sequence
  primer
gtaaaacgacggccagtactcttcgtgccagtgcatag

SEQ ID NO: 58158 - DNA, 18 bp, Artificial Sequence
  primer
ctgtgtcacccggacagg

SEQ ID NO: 58159 - DNA, 38 bp, Artificial Sequence
  primer
gtaaaacgacggccagtgaacatggttcttcagtccgc

SEQ ID NO: 58160 - DNA, 39 bp, Artificial Sequence
  primer
gtaaaacgacggccagttgagagtttgagttagcgggag

SEQ ID NO: 58161 - DNA, 37 bp, Artificial Sequence
  primer
gtaaaacgacggccagtgttcagcatagctctggccc

SEQ ID NO: 58162 - DNA, 21 bp, Artificial Sequence
  primer
tatattgcatttggtgctgcc

SEQ ID NO: 58163 - DNA, 39 bp, Artificial Sequence
  primer
gtaaaacgacggccagttggatggaaacttgtaagcacc

SEQ ID NO: 58164 - DNA, 21 bp, Artificial Sequence
  primer
tgggacagatgaaacctgatg

SEQ ID NO: 58165 - DNA, 21 bp, Artificial Sequence
  primer
aacacagtggattcatgccag

SEQ ID NO: 58166 - DNA, 38 bp, Artificial Sequence
  primer
gtaaaacgacggccagttggcagtgctaggtgtctctg

SEQ ID NO: 58167 - DNA, 37 bp, Artificial Sequence
  primer
gtaaaacgacggccagtgctatccagggacacagtgc

SEQ ID NO: 58168 - DNA, 38 bp, Artificial Sequence
  primer
gtaaaacgacggccagtgaaatcatgttggacaatggg

SEQ ID NO: 58169 - DNA, 38 bp, Artificial Sequence
  primer
gtaaaacgacggccagttaagggactggagagagctgg

SEQ ID NO: 58170 - DNA, 39 bp, Artificial Sequence
  primer
gtaaaacgacggccagtgcagagttccatgtctcaaagg

SEQ ID NO: 58171 - DNA, 21 bp, Artificial Sequence
  primer
tgtgtgtgtgattctgatggc

SEQ ID NO: 58172 - DNA, 36 bp, Artificial Sequence
  primer
gtaaaacgacggccagtacagtggatccctggaggc

SEQ ID NO: 58173 - DNA, 19 bp, Artificial Sequence
  primer
agcccacgtgactacaggg

SEQ ID NO: 58174 - DNA, 20 bp, Artificial Sequence
  primer
gtacactcgcaacctgcacc

SEQ ID NO: 58175 - DNA, 21 bp, Artificial Sequence
  primer
aggagaagatccctgaccctc

SEQ ID NO: 58176 - DNA, 37 bp, Artificial Sequence
  primer
gtaaaacgacggccagtttcagggaacctgatgatgg

SEQ ID NO: 58177 - DNA, 23 bp, Artificial Sequence
  primer
tttcacactgactctgatggttg

SEQ ID NO: 58178 - DNA, 38 bp, Artificial Sequence
  primer
gtaaaacgacggccagttactgacaaaggttgaggccc

SEQ ID NO: 58179 - DNA, 38 bp, Artificial Sequence
  primer
gtaaaacgacggccagtgatcccttgccataggtgttg

SEQ ID NO: 58180 - DNA, 21 bp, Artificial Sequence
  primer
cactttgaagccctttcacct

SEQ ID NO: 58181 - DNA, 21 bp, Artificial Sequence
  primer
acagaggacctgatagcctgg

SEQ ID NO: 58182 - DNA, 21 bp, Artificial Sequence
  primer
gcttgcctcagacttgagaag

SEQ ID NO: 58183 - DNA, 41 bp, Artificial Sequence
  primer
gtaaaacgacggccagttttcatcttggaaggattaattgg

SEQ ID NO: 58184 - DNA, 39 bp, Artificial Sequence
  primer
gtaaaacgacggccagtcattgcctttgttcactttacg

SEQ ID NO: 58185 - DNA, 36 bp, Artificial Sequence
  primer
gtaaaacgacggccagttctgcaagccatgaaagcc

SEQ ID NO: 58186 - DNA, 43 bp, Artificial Sequence
  primer
gtaaaacgacggccagtaaaggaaactttcaattcataacaga

SEQ ID NO: 58187 - DNA, 21 bp, Artificial Sequence
  primer
cagtggatgttgctagaaccc

SEQ ID NO: 58188 - DNA, 21 bp, Artificial Sequence
  primer
tccaagtgcaggtaaggaagg

SEQ ID NO: 58189 - DNA, 21 bp, Artificial Sequence
  primer
tgaccagggagagagatctgg

SEQ ID NO: 58190 - DNA, 21 bp, Artificial Sequence
  primer
agcatctttgctttcctttcg

SEQ ID NO: 58191 - DNA, 21 bp, Artificial Sequence
  primer
ggacagatgcagatgctgaac

SEQ ID NO: 58192 - DNA, 21 bp, Artificial Sequence
  primer
ctgccaggttctaggatgacc

SEQ ID NO: 58193 - DNA, 38 bp, Artificial Sequence
  primer
gtaaaacgacggccagtctgaaggaagaggctctgagg

SEQ ID NO: 58194 - DNA, 38 bp, Artificial Sequence
  primer
gtaaaacgacggccagttgactcccgaaagtcagtgtg

SEQ ID NO: 58195 - DNA, 20 bp, Artificial Sequence
  primer
aggcagacagagggatctgg

SEQ ID NO: 58196 - DNA, 38 bp, Artificial Sequence
  primer
gtaaaacgacggccagttaagcacaagactgtggcctg

SEQ ID NO: 58197 - DNA, 38 bp, Artificial Sequence
  primer
gtaaaacgacggccagtcgtgtcctccattctctggac

SEQ ID NO: 58198 - DNA, 20 bp, Artificial Sequence
  primer
acacctgggctgccatagtc

SEQ ID NO: 58199 - DNA, 19 bp, Artificial Sequence
  primer
cccttcgctttccttctcc

SEQ ID NO: 58200 - DNA, 38 bp, Artificial Sequence
  primer
gtaaaacgacggccagtggtgtacgatgaccacgagag

SEQ ID NO: 58201 - DNA, 38 bp, Artificial Sequence
  primer
gtaaaacgacggccagtaagagtacatcggcctcgttc

SEQ ID NO: 58202 - DNA, 21 bp, Artificial Sequence
  primer
ttccttaccaagaggcagagg

SEQ ID NO: 58203 - DNA, 27 bp, Artificial Sequence
  primer
cagagtaaatcaagtttgagtgagacc

SEQ ID NO: 58204 - DNA, 24 bp, Artificial Sequence
  primer
gaaactcgtaagtgacatttgtgg

SEQ ID NO: 58205 - DNA, 37 bp, Artificial Sequence
  primer
gtaaaacgacggccagttgactgaatgtggccatttg

SEQ ID NO: 58206 - DNA, 39 bp, Artificial Sequence
  primer
gtaaaacgacggccagtggtgttgcctaccactttcttt

SEQ ID NO: 58207 - DNA, 23 bp, Artificial Sequence
  primer
ggaataatgatacttgctttgcc

SEQ ID NO: 58208 - DNA, 38 bp, Artificial Sequence
  primer
gtaaaacgacggccagttctgcaggcatatcttggttg

SEQ ID NO: 58209 - DNA, 22 bp, Artificial Sequence
  primer
gagaaatttcacggttgagcac

SEQ ID NO: 58210 - DNA, 38 bp, Artificial Sequence
  primer
gtaaaacgacggccagttacctggaatcagatggaggc

SEQ ID NO: 58211 - DNA, 26 bp, Artificial Sequence
  primer
tggtttgtaggattataacagtctgc

SEQ ID NO: 58212 - DNA, 43 bp, Artificial Sequence
  primer
gtaaaacgacggccagttgattagtaaatttcatttgcctgac

SEQ ID NO: 58213 - DNA, 27 bp, Artificial Sequence
  primer
gaaacataacttgctggaaattacttg

SEQ ID NO: 58214 - DNA, 38 bp, Artificial Sequence
  primer
gtaaaacgacggccagtgcaaggaagaaccaatggaag

SEQ ID NO: 58215 - DNA, 21 bp, Artificial Sequence
  primer
gttggagggtggaattaaggg

SEQ ID NO: 58216 - DNA, 41 bp, Artificial Sequence
  primer
gtaaaacgacggccagtcgatgactctaaactagccagtgc

SEQ ID NO: 58217 - DNA, 21 bp, Artificial Sequence
  primer
gatgttgaagtcttggagccg

SEQ ID NO: 58218 - DNA, 21 bp, Artificial Sequence
  primer
ttggagccgttaaagtgtgag

SEQ ID NO: 58219 - DNA, 21 bp, Artificial Sequence
  primer
cgagatagccttgagaccctg

SEQ ID NO: 58220 - DNA, 21 bp, Artificial Sequence
  primer
tacacagacgaccacaccctc

SEQ ID NO: 58221 - DNA, 38 bp, Artificial Sequence
  primer
gtaaaacgacggccagtatccactgtcacaaccaccac

SEQ ID NO: 58222 - DNA, 23 bp, Artificial Sequence
  primer
cacgagacaaagtgaaactgatg

SEQ ID NO: 58223 - DNA, 21 bp, Artificial Sequence
  primer
ggacaagaaacacagcccttc

SEQ ID NO: 58224 - DNA, 39 bp, Artificial Sequence
  primer
gtaaaacgacggccagttgttgcagtctagcagtgatcc

SEQ ID NO: 58225 - DNA, 38 bp, Artificial Sequence
  primer
gtaaaacgacggccagtgtagctgcagcagagaccatc

SEQ ID NO: 58226 - DNA, 19 bp, Artificial Sequence
  primer
cacctcgcacaaccaaatg

SEQ ID NO: 58227 - DNA, 40 bp, Artificial Sequence
  primer
gtaaaacgacggccagtggtgagagaaattgtggacagac

SEQ ID NO: 58228 - DNA, 21 bp, Artificial Sequence
  primer
agtttctcctcagcaaccgag

SEQ ID NO: 58229 - DNA, 36 bp, Artificial Sequence
  primer
gtaaaacgacggccagttttggtatcagtggcaggg

SEQ ID NO: 58230 - DNA, 40 bp, Artificial Sequence
  primer
gtaaaacgacggccagtgaatacgttcatgtgaggtgttg

SEQ ID NO: 58231 - DNA, 21 bp, Artificial Sequence
  primer
gagcttgaactggaactctgg

SEQ ID NO: 58232 - DNA, 21 bp, Artificial Sequence
  primer
gtagccttgaactcctggacg

SEQ ID NO: 58233 - DNA, 21 bp, Artificial Sequence
  primer
tcagtcatcaagtgtgggtcc

SEQ ID NO: 58234 - DNA, 38 bp, Artificial Sequence
  primer
gtaaaacgacggccagttggtttgaaccactcttgacg

SEQ ID NO: 58235 - DNA, 22 bp, Artificial Sequence
  primer
tgggtagtgtaccatcttctgg

SEQ ID NO: 58236 - DNA, 26 bp, Artificial Sequence
  primer
tggttctccagtattacacagtgttc

SEQ ID NO: 58237 - DNA, 38 bp, Artificial Sequence
  primer
gtaaaacgacggccagtgtcttctgaccagcctttgag

SEQ ID NO: 58238 - DNA, 21 bp, Artificial Sequence
  primer
ataacctccagggtgaaccag

SEQ ID NO: 58239 - DNA, 38 bp, Artificial Sequence
  primer
gtaaaacgacggccagtcatccgcataaagcatcattg

SEQ ID NO: 58240 - DNA, 21 bp, Artificial Sequence
  primer
gtagccttgaactcctggacg

SEQ ID NO: 58241 - DNA, 21 bp, Artificial Sequence
  primer
tcagtcatcaagtgtgggtcc

SEQ ID NO: 58242 - DNA, 38 bp, Artificial Sequence
  primer
gtaaaacgacggccagttgttcgtgtccaaagtccatc

SEQ ID NO: 58243 - DNA, 21 bp, Artificial Sequence
  primer
tccaaattcagcaaagcagtg

SEQ ID NO: 58244 - DNA, 39 bp, Artificial Sequence
  primer
gtaaaacgacggccagtgattgtacgattgcactccagc

SEQ ID NO: 58245 - DNA, 21 bp, Artificial Sequence
  primer
ccacaaatgactcacggtcac

SEQ ID NO: 58246 - DNA, 36 bp, Artificial Sequence
  primer
gtaaaacgacggccagtcctggctctcacgatgatg

SEQ ID NO: 58247 - DNA, 21 bp, Artificial Sequence
  primer
tgcttccttcctgctacactg

SEQ ID NO: 58248 - DNA, 27 bp, Artificial Sequence
  primer
gtgggagtctaaatagttggatttaag

SEQ ID NO: 58249 - DNA, 40 bp, Artificial Sequence
  primer
gtaaaacgacggccagtaaacctgtctagggtatgggttg

SEQ ID NO: 58250 - DNA, 21 bp, Artificial Sequence
  primer
cccgtggatataacccaattc

SEQ ID NO: 58251 - DNA, 22 bp, Artificial Sequence
  primer
ggactctatggagacaatgccc

SEQ ID NO: 58252 - DNA, 27 bp, Artificial Sequence
  primer
tgcatagactgaactaataaaggactg

SEQ ID NO: 58253 - DNA, 38 bp, Artificial Sequence
  primer
gtaaaacgacggccagtggacttgaaactgctgtggtg

SEQ ID NO: 58254 - DNA, 21 bp, Artificial Sequence
  primer
cgctgagccaaatcttgatac

SEQ ID NO: 58255 - DNA, 46 bp, Artificial Sequence
  primer
gtaaaacgacggccagtgaaatttctaggaagagctatctccatta

SEQ ID NO: 58256 - DNA, 22 bp, Artificial Sequence
  primer
tgtcgataggtcaagaattggg

SEQ ID NO: 58257 - DNA, 36 bp, Artificial Sequence
  primer
gtaaaacgacggccagtcagagcccgtcaatccttg

SEQ ID NO: 58258 - DNA, 22 bp, Artificial Sequence
  primer
cggctttacaatttaagcatcc

SEQ ID NO: 58259 - DNA, 21 bp, Artificial Sequence
  primer
gctgctattctccaagccaag

SEQ ID NO: 58260 - DNA, 21 bp, Artificial Sequence
  primer
agcaaatttccattcattccc

SEQ ID NO: 58261 - DNA, 35 bp, Artificial Sequence
  primer
gtaaaacgacggccagtagtgatcccaggccaagc

SEQ ID NO: 58262 - DNA, 39 bp, Artificial Sequence
  primer
gtaaaacgacggccagtttacagcttggattgtgtggtg

SEQ ID NO: 58263 - DNA, 21 bp, Artificial Sequence
  primer
cctgaatgttgtgagcattgg

SEQ ID NO: 58264 - DNA, 38 bp, Artificial Sequence
  primer
gtaaaacgacggccagtgggataatggatggaacatgg

SEQ ID NO: 58265 - DNA, 21 bp, Artificial Sequence
  primer
gcgtctcctgcatgtatgttc

SEQ ID NO: 58266 - DNA, 37 bp, Artificial Sequence
  primer
gtaaaacgacggccagtgtgggctgtcactacgcatc

SEQ ID NO: 58267 - DNA, 37 bp, Artificial Sequence
  primer
gtaaaacgacggccagtcttcgacgccttccctaagt

SEQ ID NO: 58268 - DNA, 38 bp, Artificial Sequence
  primer
gtaaaacgacggccagtctcctgtctgatgcaatctcg

SEQ ID NO: 58269 - DNA, 21 bp, Artificial Sequence
  primer
ctctcttgcctcacagttccc

SEQ ID NO: 58270 - DNA, 37 bp, Artificial Sequence
  primer
gtaaaacgacggccagtgagtttgcctttgccatctg

SEQ ID NO: 58271 - DNA, 21 bp, Artificial Sequence
  primer
atcctggaagtctgttgccag

SEQ ID NO: 58272 - DNA, 21 bp, Artificial Sequence
  primer
acaatgtccatgttcactcgc

SEQ ID NO: 58273 - DNA, 38 bp, Artificial Sequence
  primer
gtaaaacgacggccagttgaaccagacactgatgctcc

SEQ ID NO: 58274 - DNA, 21 bp, Artificial Sequence
  primer
aaatcctgattcagctcagcc

SEQ ID NO: 58275 - DNA, 21 bp, Artificial Sequence
  primer
aagccagacgacagtcaggag

SEQ ID NO: 58276 - DNA, 38 bp, Artificial Sequence
  primer
gtaaaacgacggccagtggcttcacaatccgagacaag

SEQ ID NO: 58277 - DNA, 38 bp, Artificial Sequence
  primer
gtaaaacgacggccagtacacctgacctcaagtgatcc

SEQ ID NO: 58278 - DNA, 24 bp, Artificial Sequence
  primer
agcattccaaacttactgacagag

SEQ ID NO: 58279 - DNA, 21 bp, Artificial Sequence
  primer
aaggatggctttgagcaagtc

SEQ ID NO: 58280 - DNA, 40 bp, Artificial Sequence
  primer
gtaaaacgacggccagttgatttgggtttataaaggagcc

SEQ ID NO: 58281 - DNA, 25 bp, Artificial Sequence
  primer
tgccattatgctcttaaagtgtagc

SEQ ID NO: 58282 - DNA, 36 bp, Artificial Sequence
  primer
gtaaaacgacggccagtaggcctttgccagttgatg

SEQ ID NO: 58283 - DNA, 38 bp, Artificial Sequence
  primer
gtaaaacgacggccagttgtgtgggtatggagaccttg

SEQ ID NO: 58284 - DNA, 38 bp, Artificial Sequence
  primer
gtaaaacgacggccagtaagttagacagggcagcatgg

SEQ ID NO: 58285 - DNA, 42 bp, Artificial Sequence
  primer
gtaaaacgacggccagtgcaggaagaatttatatcaatgtgg

SEQ ID NO: 58286 - DNA, 40 bp, Artificial Sequence
  primer
gtaaaacgacggccagttccctttgtgtgtataccgtttg

SEQ ID NO: 58287 - DNA, 21 bp, Artificial Sequence
  primer
gtgttgcctggcatgtagttg

SEQ ID NO: 58288 - DNA, 47 bp, Artificial Sequence
  primer
gtaaaacgacggccagttgtactgttgtagtaatccagtattcttgt

SEQ ID NO: 58289 - DNA, 38 bp, Artificial Sequence
  primer
gtaaaacgacggccagtgactctggattccaaacctgg

SEQ ID NO: 58290 - DNA, 40 bp, Artificial Sequence
  primer
gtaaaacgacggccagtgggatgaacagtattccctaagc

SEQ ID NO: 58291 - DNA, 38 bp, Artificial Sequence
  primer
gtaaaacgacggccagtgtgatggagttgttgctgtcc

SEQ ID NO: 58292 - DNA, 37 bp, Artificial Sequence
  primer
gtaaaacgacggccagtcaagcttgatgcctttgcag

SEQ ID NO: 58293 - DNA, 37 bp, Artificial Sequence
  primer
gtaaaacgacggccagttttacacccatgtgtcgtgc

SEQ ID NO: 58294 - DNA, 24 bp, Artificial Sequence
  primer
tgagacaattattctggctaatgc

SEQ ID NO: 58295 - DNA, 26 bp, Artificial Sequence
  primer
aattgtttaaatagaatgctccttgc

SEQ ID NO: 58296 - DNA, 35 bp, Artificial Sequence
  primer
gtaaaacgacggccagtctgtaaggcgcaggctgt

SEQ ID NO: 58297 - DNA, 38 bp, Artificial Sequence
  primer
gtaaaacgacggccagtacatgctgacaaatgtggctc

SEQ ID NO: 58298 - DNA, 21 bp, Artificial Sequence
  primer
ggtatttgccctgaactgctt

SEQ ID NO: 58299 - DNA, 38 bp, Artificial Sequence
  primer
gtaaaacgacggccagtttgccataatactgctgtgcc

SEQ ID NO: 58300 - DNA, 21 bp, Artificial Sequence
  primer
cttattcggctcacaggaagg

SEQ ID NO: 58301 - DNA, 21 bp, Artificial Sequence
  primer
gctagcatttgcacttcttcc

SEQ ID NO: 58302 - DNA, 38 bp, Artificial Sequence
  primer
gtaaaacgacggccagttacgggtataagccactgtgc

SEQ ID NO: 58303 - DNA, 21 bp, Artificial Sequence
  primer
ggacgtggtgactgagatgac

SEQ ID NO: 58304 - DNA, 38 bp, Artificial Sequence
  primer
gtaaaacgacggccagtaggtggagttcagctctctgg

SEQ ID NO: 58305 - DNA, 22 bp, Artificial Sequence
  primer
ggcatcgtctctaaagatctgg

SEQ ID NO: 58306 - DNA, 35 bp, Artificial Sequence
  primer
gtaaaacgacggccagtggccaactgcagagcaag

SEQ ID NO: 58307 - DNA, 22 bp, Artificial Sequence
  primer
catgtgattggctttaatgtgc

SEQ ID NO: 58308 - DNA, 38 bp, Artificial Sequence
  primer
gtaaaacgacggccagtgctaatttctttcagcctgcg

SEQ ID NO: 58309 - DNA, 23 bp, Artificial Sequence
  primer
ccactggaaatacagatgttccc

SEQ ID NO: 58310 - DNA, 38 bp, Artificial Sequence
  primer
gtaaaacgacggccagtgaatttctgggcactctttgg

SEQ ID NO: 58311 - DNA, 38 bp, Artificial Sequence
  primer
gtaaaacgacggccagtttaaagaaaggagggtctgcg

SEQ ID NO: 58312 - DNA, 25 bp, Artificial Sequence
  primer
cacagtgctattgaaggcaaataac

SEQ ID NO: 58313 - DNA, 38 bp, Artificial Sequence
  primer
gtaaaacgacggccagtgcattagcagctgtgacttgg

SEQ ID NO: 58314 - DNA, 38 bp, Artificial Sequence
  primer
gtaaaacgacggccagtctaaagcatctgggaagcctg

SEQ ID NO: 58315 - DNA, 21 bp, Artificial Sequence
  primer
gggacataccaagctccaatg

SEQ ID NO: 58316 - DNA, 41 bp, Artificial Sequence
  primer
gtaaaacgacggccagttggaattacatttgtgacatttgc

SEQ ID NO: 58317 - DNA, 18 bp, Artificial Sequence
  primer
agaatggcgtgaacccag

SEQ ID NO: 58318 - DNA, 21 bp, Artificial Sequence
  primer
cccaagagctcaggagtaacc

SEQ ID NO: 58319 - DNA, 38 bp, Artificial Sequence
  primer
gtaaaacgacggccagtagaattacaaaggcccagagc

SEQ ID NO: 58320 - DNA, 37 bp, Artificial Sequence
  primer
gtaaaacgacggccagtgtttggcagggagggataag

SEQ ID NO: 58321 - DNA, 43 bp, Artificial Sequence
  primer
gtaaaacgacggccagttggctacattgtgttattaaatgtgt

SEQ ID NO: 58322 - DNA, 38 bp, Artificial Sequence
  primer
gtaaaacgacggccagtctttctgcacagctcctgttg

SEQ ID NO: 58323 - DNA, 39 bp, Artificial Sequence
  primer
gtaaaacgacggccagtaacaatgataatttgcccgatg

SEQ ID NO: 58324 - DNA, 21 bp, Artificial Sequence
  primer
agctgctcttcgcttaccttg

SEQ ID NO: 58325 - DNA, 39 bp, Artificial Sequence
  primer
gtaaaacgacggccagtggtgtttctgttgtaaccatgc

SEQ ID NO: 58326 - DNA, 22 bp, Artificial Sequence
  primer
aagctgacatgcagtggatatg

SEQ ID NO: 58327 - DNA, 24 bp, Artificial Sequence
  primer
tcaaatacacaaggcctatctcag

SEQ ID NO: 58328 - DNA, 26 bp, Artificial Sequence
  primer
ccctataaggctaattattcaggaga

SEQ ID NO: 58329 - DNA, 40 bp, Artificial Sequence
  primer
gtaaaacgacggccagtcaactcaatccagaaatgctctc

SEQ ID NO: 58330 - DNA, 18 bp, Artificial Sequence
  primer
ccttccctgtgccctttg

SEQ ID NO: 58331 - DNA, 37 bp, Artificial Sequence
  primer
gtaaaacgacggccagtcagacagcagcccaaggtag

SEQ ID NO: 58332 - DNA, 22 bp, Artificial Sequence
  primer
tttgggagagaatgatagggag

SEQ ID NO: 58333 - DNA, 38 bp, Artificial Sequence
  primer
gtaaaacgacggccagtagcaatgaatatctccagccc

SEQ ID NO: 58334 - DNA, 38 bp, Artificial Sequence
  primer
gtaaaacgacggccagtgtgttatgcattgctgcttcc

SEQ ID NO: 58335 - DNA, 38 bp, Artificial Sequence
  primer
gtaaaacgacggccagtacagccagatttgtagccacc

SEQ ID NO: 58336 - DNA, 21 bp, Artificial Sequence
  primer
ccagttctttccctgaagcag

SEQ ID NO: 58337 - DNA, 39 bp, Artificial Sequence
  primer
gtaaaacgacggccagtaagaaatgacaaagaggcaagc

SEQ ID NO: 58338 - DNA, 38 bp, Artificial Sequence
  primer
gtaaaacgacggccagtagtccaagacaacatccaccc

SEQ ID NO: 58339 - DNA, 21 bp, Artificial Sequence
  primer
tccatcagaaatttcacaccc

SEQ ID NO: 58340 - DNA, 38 bp, Artificial Sequence
  primer
gtaaaacgacggccagttctacagatttggcatcaggg

SEQ ID NO: 58341 - DNA, 18 bp, Artificial Sequence
  primer
tcatgccattgcactccg

SEQ ID NO: 58342 - DNA, 38 bp, Artificial Sequence
  primer
gtaaaacgacggccagtccatcccagttctcagtaggc

SEQ ID NO: 58343 - DNA, 38 bp, Artificial Sequence
  primer
gtaaaacgacggccagttgcctatggtcaggctctatg

SEQ ID NO: 58344 - DNA, 37 bp, Artificial Sequence
  primer
gtaaaacgacggccagtaaccaagtggaggccgttac

SEQ ID NO: 58345 - DNA, 21 bp, Artificial Sequence
  primer
cttgctatggcttccaggttc

SEQ ID NO: 58346 - DNA, 21 bp, Artificial Sequence
  primer
ccaggaagggacagggaatag

SEQ ID NO: 58347 - DNA, 21 bp, Artificial Sequence
  primer
ttgctcaagctgacagtctcc

SEQ ID NO: 58348 - DNA, 38 bp, Artificial Sequence
  primer
gtaaaacgacggccagttgcctctagcagcttctaccc

SEQ ID NO: 58349 - DNA, 37 bp, Artificial Sequence
  primer
gtaaaacgacggccagtccaggagggatgcagagttc

SEQ ID NO: 58350 - DNA, 38 bp, Artificial Sequence
  primer
gtaaaacgacggccagtgccttcacctctgacctatgg

SEQ ID NO: 58351 - DNA, 38 bp, Artificial Sequence
  primer
gtaaaacgacggccagtgctgctttacacgttgactgc

SEQ ID NO: 58352 - DNA, 21 bp, Artificial Sequence
  primer
caccagagttcttgcctcctc

SEQ ID NO: 58353 - DNA, 21 bp, Artificial Sequence
  primer
ttgctggtttggaagtacagc

SEQ ID NO: 58354 - DNA, 37 bp, Artificial Sequence
  primer
gtaaaacgacggccagtatctgcagagggacacaacg

SEQ ID NO: 58355 - DNA, 37 bp, Artificial Sequence
  primer
gtaaaacgacggccagtctccaggagcctcactcctc

SEQ ID NO: 58356 - DNA, 38 bp, Artificial Sequence
  primer
gtaaaacgacggccagtaggcagggctttgcttatttc

SEQ ID NO: 58357 - DNA, 20 bp, Artificial Sequence
  primer
atttctcgtttcatgcctgg

SEQ ID NO: 58358 - DNA, 24 bp, Artificial Sequence
  primer
cctcaaatacctgtattcccactg

SEQ ID NO: 58359 - DNA, 21 bp, Artificial Sequence
  primer
tcactctctgggtgtgagagg

SEQ ID NO: 58360 - DNA, 20 bp, Artificial Sequence
  primer
catctttgtgcctcccagag

SEQ ID NO: 58361 - DNA, 38 bp, Artificial Sequence
  primer
gtaaaacgacggccagtgggaagatttcatccacttcc

SEQ ID NO: 58362 - DNA, 21 bp, Artificial Sequence
  primer
ggctgagtactgcctctctgg

SEQ ID NO: 58363 - DNA, 38 bp, Artificial Sequence
  primer
gtaaaacgacggccagtttggcagcaatgtcctctaag

SEQ ID NO: 58364 - DNA, 21 bp, Artificial Sequence
  primer
ctgaaactgcaggtgtcatgg

SEQ ID NO: 58365 - DNA, 38 bp, Artificial Sequence
  primer
gtaaaacgacggccagtgccttcctagaatggtgcttg

SEQ ID NO: 58366 - DNA, 38 bp, Artificial Sequence
  primer
gtaaaacgacggccagtctgcctaccacaggttcacag

SEQ ID NO: 58367 - DNA, 39 bp, Artificial Sequence
  primer
gtaaaacgacggccagtgattccttcaatttaccaaccg

SEQ ID NO: 58368 - DNA, 38 bp, Artificial Sequence
  primer
gtaaaacgacggccagtgctgcaaagcagaatttgaac

SEQ ID NO: 58369 - DNA, 38 bp, Artificial Sequence
  primer
gtaaaacgacggccagtagaaagacacaaatcgcctcc

SEQ ID NO: 58370 - DNA, 19 bp, Artificial Sequence
  primer
cagccttcgaggtgctttc

SEQ ID NO: 58371 - DNA, 21 bp, Artificial Sequence
  primer
gcactaaaccaggagaccagg

SEQ ID NO: 58372 - DNA, 21 bp, Artificial Sequence
  primer
ggatgagctcttcgtttcagg

SEQ ID NO: 58373 - DNA, 20 bp, Artificial Sequence
  primer
accgcctactgactctgctg

SEQ ID NO: 58374 - DNA, 22 bp, Artificial Sequence
  primer
ctctgagggtaagaaaggaccc

SEQ ID NO: 58375 - DNA, 38 bp, Artificial Sequence
  primer
gtaaaacgacggccagtctgaaccagagtcaagggacc

SEQ ID NO: 58376 - DNA, 38 bp, Artificial Sequence
  primer
gtaaaacgacggccagtgtcagctgggcttattgaagg

SEQ ID NO: 58377 - DNA, 21 bp, Artificial Sequence
  primer
tctcctcccactttgcttgtc

SEQ ID NO: 58378 - DNA, 21 bp, Artificial Sequence
  primer
accagccaattcctaatgtgc

SEQ ID NO: 58379 - DNA, 21 bp, Artificial Sequence
  primer
agctgtgagttcagggtttcc

SEQ ID NO: 58380 - DNA, 21 bp, Artificial Sequence
  primer
accatgggtttagtgtccacc

SEQ ID NO: 58381 - DNA, 38 bp, Artificial Sequence
  primer
gtaaaacgacggccagtctcaagtgatgacaggcctcc

SEQ ID NO: 58382 - DNA, 21 bp, Artificial Sequence
  primer
gccctctgcagctagtgaatg

SEQ ID NO: 58383 - DNA, 20 bp, Artificial Sequence
  primer
gaggcgccaagagtatcagc

SEQ ID NO: 58384 - DNA, 38 bp, Artificial Sequence
  primer
gtaaaacgacggccagtactgtggaaggtgcatcagtg

SEQ ID NO: 58385 - DNA, 20 bp, Artificial Sequence
  primer
accgaatgatgactggcttg

SEQ ID NO: 58386 - DNA, 38 bp, Artificial Sequence
  primer
gtaaaacgacggccagtaatcaggcttgctaatgggtg

SEQ ID NO: 58387 - DNA, 21 bp, Artificial Sequence
  primer
tgagcccatatacccactctg

SEQ ID NO: 58388 - DNA, 40 bp, Artificial Sequence
  primer
gtaaaacgacggccagtctgttctgcattatttgggagag

SEQ ID NO: 58389 - DNA, 21 bp, Artificial Sequence
  primer
ggcaaaccggtaggtaggaac

SEQ ID NO: 58390 - DNA, 40 bp, Artificial Sequence
  primer
gtaaaacgacggccagtgctggagcgtgaaattatctagg

SEQ ID NO: 58391 - DNA, 38 bp, Artificial Sequence
  primer
gtaaaacgacggccagttgcctagcaggctttcaactc

SEQ ID NO: 58392 - DNA, 35 bp, Artificial Sequence
  primer
gtaaaacgacggccagtaccgatggaccttgaccc

SEQ ID NO: 58393 - DNA, 38 bp, Artificial Sequence
  primer
gtaaaacgacggccagtgtgctcatcctgatggtgttc

SEQ ID NO: 58394 - DNA, 19 bp, Artificial Sequence
  primer
caggacttcagctccgacc

SEQ ID NO: 58395 - DNA, 38 bp, Artificial Sequence
  primer
gtaaaacgacggccagtacatctgcacttgcttgaacc

SEQ ID NO: 58396 - DNA, 21 bp, Artificial Sequence
  primer
actcaaacttcccaggcagag

SEQ ID NO: 58397 - DNA, 18 bp, Artificial Sequence
  primer
catcgcaggtcggatcac

SEQ ID NO: 58398 - DNA, 19 bp, Artificial Sequence
  primer
gtactccagcccaggcaac

SEQ ID NO: 58399 - DNA, 21 bp, Artificial Sequence
  primer
tgaataaccatttccttccgc

SEQ ID NO: 58400 - DNA, 21 bp, Artificial Sequence
  primer
aggcattcagcagaatttgac

SEQ ID NO: 58401 - DNA, 41 bp, Artificial Sequence
  primer
gtaaaacgacggccagttgtgtttcttattctccaccttcg

SEQ ID NO: 58402 - DNA, 22 bp, Artificial Sequence
  primer
tttgcttcataacttgctgcat

SEQ ID NO: 58403 - DNA, 38 bp, Artificial Sequence
  primer
gtaaaacgacggccagtagtcctattccttgggtgagc

SEQ ID NO: 58404 - DNA, 38 bp, Artificial Sequence
  primer
gtaaaacgacggccagttgaaaggcagatgtcttgctc

SEQ ID NO: 58405 - DNA, 21 bp, Artificial Sequence
  primer
agagaatgaatgctgtgtgcc

SEQ ID NO: 58406 - DNA, 22 bp, Artificial Sequence
  primer
tctgttgtcttccacgtttgtt

SEQ ID NO: 58407 - DNA, 38 bp, Artificial Sequence
  primer
gtaaaacgacggccagtagctgtgtgttacattgcacg

SEQ ID NO: 58408 - DNA, 21 bp, Artificial Sequence
  primer
gtttgagcgacctggtgattc

SEQ ID NO: 58409 - DNA, 20 bp, Artificial Sequence
  primer
ggataagcatgtcagccacg

SEQ ID NO: 58410 - DNA, 21 bp, Artificial Sequence
  primer
tcagcttgctgcctatcacag

SEQ ID NO: 58411 - DNA, 38 bp, Artificial Sequence
  primer
gtaaaacgacggccagttagctctcctcctccttagcg

SEQ ID NO: 58412 - DNA, 21 bp, Artificial Sequence
  primer
aaggtcaactaatggcttggg

SEQ ID NO: 58413 - DNA, 38 bp, Artificial Sequence
  primer
gtaaaacgacggccagtagactcatgatcgtctggtgg

SEQ ID NO: 58414 - DNA, 38 bp, Artificial Sequence
  primer
gtaaaacgacggccagtaggtcagttccaaatggttcc

SEQ ID NO: 58415 - DNA, 21 bp, Artificial Sequence
  primer
ttcagccctcatttgagaaag

SEQ ID NO: 58416 - DNA, 38 bp, Artificial Sequence
  primer
gtaaaacgacggccagtgtggtgggcataggtgtaaga

SEQ ID NO: 58417 - DNA, 22 bp, Artificial Sequence
  primer
ttgcagtttacatgtgtctggg

SEQ ID NO: 58418 - DNA, 21 bp, Artificial Sequence
  primer
ggcttcagcactaaacttccc

SEQ ID NO: 58419 - DNA, 21 bp, Artificial Sequence
  primer
gacattggcattgcttagtgg

SEQ ID NO: 58420 - DNA, 21 bp, Artificial Sequence
  primer
tgtttgactggcttcagcact

SEQ ID NO: 58421 - DNA, 37 bp, Artificial Sequence
  primer
gtaaaacgacggccagtcacagcagacaccaggaagg

SEQ ID NO: 58422 - DNA, 21 bp, Artificial Sequence
  primer
ctgggacctctacactgggag

SEQ ID NO: 58423 - DNA, 21 bp, Artificial Sequence
  primer
cactcacatctaacctcgggc

SEQ ID NO: 58424 - DNA, 21 bp, Artificial Sequence
  primer
gcttcgaccagacagtcttcc

SEQ ID NO: 58425 - DNA, 38 bp, Artificial Sequence
  primer
gtaaaacgacggccagtcagcctgtccacactagcatc

SEQ ID NO: 58426 - DNA, 21 bp, Artificial Sequence
  primer
agaacttccgcttcctgtcac

SEQ ID NO: 58427 - DNA, 21 bp, Artificial Sequence
  primer
aacaaccacacctggaacctc

SEQ ID NO: 58428 - DNA, 38 bp, Artificial Sequence
  primer
gtaaaacgacggccagttacccaagcagaacttgctcc

SEQ ID NO: 58429 - DNA, 21 bp, Artificial Sequence
  primer
atcctggtgttcctgaccaag

SEQ ID NO: 58430 - DNA, 38 bp, Artificial Sequence
  primer
gtaaaacgacggccagttcaaagcgacagtgacctcag

SEQ ID NO: 58431 - DNA, 21 bp, Artificial Sequence
  primer
ttccggatgatcttccagttc

SEQ ID NO: 58432 - DNA, 21 bp, Artificial Sequence
  primer
gttgcgctacatgttctgctc

SEQ ID NO: 58433 - DNA, 38 bp, Artificial Sequence
  primer
gtaaaacgacggccagtcagggtctgcccacttaactc

SEQ ID NO: 58434 - DNA, 36 bp, Artificial Sequence
  primer
gtaaaacgacggccagtgctgctgaccactctgctg

SEQ ID NO: 58435 - DNA, 21 bp, Artificial Sequence
  primer
tatatcgacatcgagcgcaag

SEQ ID NO: 58436 - DNA, 38 bp, Artificial Sequence
  primer
gtaaaacgacggccagtcgactaggatgacgaaaccac

SEQ ID NO: 58437 - DNA, 38 bp, Artificial Sequence
  primer
gtaaaacgacggccagtttccactttgggtttgtgaag

SEQ ID NO: 58438 - DNA, 38 bp, Artificial Sequence
  primer
gtaaaacgacggccagtaccgtagggagggatcttgag

SEQ ID NO: 58439 - DNA, 38 bp, Artificial Sequence
  primer
gtaaaacgacggccagtttaaagccagttctgccagtc

SEQ ID NO: 58440 - DNA, 21 bp, Artificial Sequence
  primer
atctgtctgcattggctttcc

SEQ ID NO: 58441 - DNA, 39 bp, Artificial Sequence
  primer
gtaaaacgacggccagtctattgcaagactgtcacaccc

SEQ ID NO: 58442 - DNA, 40 bp, Artificial Sequence
  primer
gtaaaacgacggccagttcagatttagcagtgggagattg

SEQ ID NO: 58443 - DNA, 38 bp, Artificial Sequence
  primer
gtaaaacgacggccagtagtcctttagcttgctggtgg

SEQ ID NO: 58444 - DNA, 37 bp, Artificial Sequence
  primer
gtaaaacgacggccagtgttggtgggttgatttgcag

SEQ ID NO: 58445 - DNA, 30 bp, Artificial Sequence
  primer
cattctaggaaatttgttactaagagtgaa

SEQ ID NO: 58446 - DNA, 18 bp, Artificial Sequence
  primer
gttgcgtctggcctttcc

SEQ ID NO: 58447 - DNA, 37 bp, Artificial Sequence
  primer
gtaaaacgacggccagtctttagcctaggcgagggac

SEQ ID NO: 58448 - DNA, 43 bp, Artificial Sequence
  primer
gtaaaacgacggccagttttcttctgtttacaagttgttctcg

SEQ ID NO: 58449 - DNA, 21 bp, Artificial Sequence
  primer
atcgtaacggacagatacggg

SEQ ID NO: 58450 - DNA, 24 bp, Artificial Sequence
  primer
cagtgaactgctaatgaagacagc

SEQ ID NO: 58451 - DNA, 37 bp, Artificial Sequence
  primer
gtaaaacgacggccagtgggctgctgactgtgaagtg

SEQ ID NO: 58452 - DNA, 38 bp, Artificial Sequence
  primer
gtaaaacgacggccagtggaggcttatcatccaaccag

SEQ ID NO: 58453 - DNA, 20 bp, Artificial Sequence
  primer
ttcagattgcgagtgtgtgc

SEQ ID NO: 58454 - DNA, 38 bp, Artificial Sequence
  primer
gtaaaacgacggccagtaggatagatgtgatgggtggc

SEQ ID NO: 58455 - DNA, 21 bp, Artificial Sequence
  primer
tggagccaaatagtcctatgc

SEQ ID NO: 58456 - DNA, 40 bp, Artificial Sequence
  primer
gtaaaacgacggccagttctggagaaagagggtactttgg

SEQ ID NO: 58457 - DNA, 38 bp, Artificial Sequence
  primer
gtaaaacgacggccagtcaccttgtagctcagccaatc

SEQ ID NO: 58458 - DNA, 38 bp, Artificial Sequence
  primer
gtaaaacgacggccagtgcactggagagtgtcatggag

SEQ ID NO: 58459 - DNA, 21 bp, Artificial Sequence
  primer
acaaggcacagagcctgaaac

SEQ ID NO: 58460 - DNA, 38 bp, Artificial Sequence
  primer
gtaaaacgacggccagtcagggtgagtttgagaggagg

SEQ ID NO: 58461 - DNA, 39 bp, Artificial Sequence
  primer
gtaaaacgacggccagtagtgcgagatgttgagtgacag

SEQ ID NO: 58462 - DNA, 42 bp, Artificial Sequence
  primer
gtaaaacgacggccagtgaggcatagagaaatgaatgacttt

SEQ ID NO: 58463 - DNA, 21 bp, Artificial Sequence
  primer
ccatctgatgtcatgtggctg

SEQ ID NO: 58464 - DNA, 39 bp, Artificial Sequence
  primer
gtaaaacgacggccagtcccttgcctttctaaatctgtg

SEQ ID NO: 58465 - DNA, 20 bp, Artificial Sequence
  primer
gtgctccaattgctccactg

SEQ ID NO: 58466 - DNA, 24 bp, Artificial Sequence
  primer
ttggttctccagatcttagtggtc

SEQ ID NO: 58467 - DNA, 20 bp, Artificial Sequence
  primer
agttccgcatttcaccgaag

SEQ ID NO: 58468 - DNA, 21 bp, Artificial Sequence
  primer
gggccagtctgaagctctatc

SEQ ID NO: 58469 - DNA, 21 bp, Artificial Sequence
  primer
tcgtgcctttaggcaggttat

SEQ ID NO: 58470 - DNA, 23 bp, Artificial Sequence
  primer
caacctgatgtattagtccacgc

SEQ ID NO: 58471 - DNA, 21 bp, Artificial Sequence
  primer
ctctcagttgcagccagacat

SEQ ID NO: 58472 - DNA, 24 bp, Artificial Sequence
  primer
aatttatcatttgaagctcttggg

SEQ ID NO: 58473 - DNA, 38 bp, Artificial Sequence
  primer
gtaaaacgacggccagtctactggacgggaggagaaat

SEQ ID NO: 58474 - DNA, 38 bp, Artificial Sequence
  primer
gtaaaacgacggccagtcggaacaaaggacatgacagc

SEQ ID NO: 58475 - DNA, 38 bp, Artificial Sequence
  primer
gtaaaacgacggccagtgacaacgcaagctgatttagg

SEQ ID NO: 58476 - DNA, 20 bp, Artificial Sequence
  primer
taggatctgttgtggctggc

SEQ ID NO: 58477 - DNA, 44 bp, Artificial Sequence
  primer
gtaaaacgacggccagtgaatgtgttgataggtattctgacacc

SEQ ID NO: 58478 - DNA, 38 bp, Artificial Sequence
  primer
gtaaaacgacggccagtatcctcccaaacagtcctgag

SEQ ID NO: 58479 - DNA, 38 bp, Artificial Sequence
  primer
gtaaaacgacggccagttgtctggtcatttctgccatc

SEQ ID NO: 58480 - DNA, 21 bp, Artificial Sequence
  primer
ctggctgacactgtggacttc

SEQ ID NO: 58481 - DNA, 36 bp, Artificial Sequence
  primer
gtaaaacgacggccagtgggaaattctgttggcctg

SEQ ID NO: 58482 - DNA, 19 bp, Artificial Sequence
  primer
gcttgagctcctgggtgag

SEQ ID NO: 58483 - DNA, 38 bp, Artificial Sequence
  primer
gtaaaacgacggccagtagtttccctttggtcttgagc

SEQ ID NO: 58484 - DNA, 38 bp, Artificial Sequence
  primer
gtaaaacgacggccagtgaagccaaattagtgcaatgg

SEQ ID NO: 58485 - DNA, 20 bp, Artificial Sequence
  primer
gtcaggattgaccgttgtgg

SEQ ID NO: 58486 - DNA, 21 bp, Artificial Sequence
  primer
tgtttgtaagccatcaccgag

SEQ ID NO: 58487 - DNA, 39 bp, Artificial Sequence
  primer
gtaaaacgacggccagtgcccattcacgcttctagtatg

SEQ ID NO: 58488 - DNA, 27 bp, Artificial Sequence
  primer
gcttatttcttctacagaatttgaggg

SEQ ID NO: 58489 - DNA, 20 bp, Artificial Sequence
  primer
acaaacaggtcgtagcaccg

SEQ ID NO: 58490 - DNA, 38 bp, Artificial Sequence
  primer
gtaaaacgacggccagtttgtcctccagccacttcttc

SEQ ID NO: 58491 - DNA, 21 bp, Artificial Sequence
  primer
tacacttcgcggtgtaaggag

SEQ ID NO: 58492 - DNA, 21 bp, Artificial Sequence
  primer
ctacttgtgtcctgctctgcg

SEQ ID NO: 58493 - DNA, 21 bp, Artificial Sequence
  primer
gcctcgaggacaagatgtgag

SEQ ID NO: 58494 - DNA, 38 bp, Artificial Sequence
  primer
gtaaaacgacggccagtgtttgaaagcttccagaaggg

SEQ ID NO: 58495 - DNA, 21 bp, Artificial Sequence
  primer
agcttcctacaccagcctgtc

SEQ ID NO: 58496 - DNA, 38 bp, Artificial Sequence
  primer
gtaaaacgacggccagtaagtttattcggccactgcac

SEQ ID NO: 58497 - DNA, 37 bp, Artificial Sequence
  primer
gtaaaacgacggccagtcctgagagtacaccgttggc

SEQ ID NO: 58498 - DNA, 35 bp, Artificial Sequence
  primer
gtaaaacgacggccagtcttgccttcctgacccag

SEQ ID NO: 58499 - DNA, 20 bp, Artificial Sequence
  primer
agtgcctatagcgcagtccc

SEQ ID NO: 58500 - DNA, 38 bp, Artificial Sequence
  primer
gtaaaacgacggccagtatgaagtgctggtgttctccg

SEQ ID NO: 58501 - DNA, 38 bp, Artificial Sequence
  primer
gtaaaacgacggccagtgacatttggtcaggcgaagac

SEQ ID NO: 58502 - DNA, 39 bp, Artificial Sequence
  primer
gtaaaacgacggccagtttacatcagtggtgtttgctgg

SEQ ID NO: 58503 - DNA, 38 bp, Artificial Sequence
  primer
gtaaaacgacggccagtccagagctagcacaccatctg

SEQ ID NO: 58504 - DNA, 38 bp, Artificial Sequence
  primer
gtaaaacgacggccagtggatgcacagcgtaacacatc

SEQ ID NO: 58505 - DNA, 38 bp, Artificial Sequence
  primer
gtaaaacgacggccagttctaggaagtggttgtgtcgg

SEQ ID NO: 58506 - DNA, 21 bp, Artificial Sequence
  primer
tatggtccagtggaagacagg

SEQ ID NO: 58507 - DNA, 38 bp, Artificial Sequence
  primer
gtaaaacgacggccagtggttcaagcagtcctttggat

SEQ ID NO: 58508 - DNA, 27 bp, Artificial Sequence
  primer
tgaatgtacagtgtgaagttactttct

SEQ ID NO: 58509 - DNA, 40 bp, Artificial Sequence
  primer
gtaaaacgacggccagtaatgctctttgtggtttgagatt

SEQ ID NO: 58510 - DNA, 20 bp, Artificial Sequence
  primer
tttaatttcctccgcagcac

SEQ ID NO: 58511 - DNA, 21 bp, Artificial Sequence
  primer
ccgaattggaatggtctacag

SEQ ID NO: 58512 - DNA, 40 bp, Artificial Sequence
  primer
gtaaaacgacggccagtcaggaatgggaaattgtaagttg

SEQ ID NO: 58513 - DNA, 26 bp, Artificial Sequence
  primer
aagttaaatgaaggtgaattgttgtg

SEQ ID NO: 58514 - DNA, 23 bp, Artificial Sequence
  primer
gtatgtgatacagcctgagggtc

SEQ ID NO: 58515 - DNA, 21 bp, Artificial Sequence
  primer
tcttcaggcttgatcacttgc

SEQ ID NO: 58516 - DNA, 38 bp, Artificial Sequence
  primer
gtaaaacgacggccagttgggatttgggaagaactcac

SEQ ID NO: 58517 - DNA, 18 bp, Artificial Sequence
  primer
gggtgacagtggcaaggc

SEQ ID NO: 58518 - DNA, 20 bp, Artificial Sequence
  primer
ctgagcttcatcccaagctg

SEQ ID NO: 58519 - DNA, 38 bp, Artificial Sequence
  primer
gtaaaacgacggccagttcttcagagaatccagcccac

SEQ ID NO: 58520 - DNA, 38 bp, Artificial Sequence
  primer
gtaaaacgacggccagttcctcagccattacgttcttg

SEQ ID NO: 58521 - DNA, 38 bp, Artificial Sequence
  primer
gtaaaacgacggccagttagctgactcctgcatcatgg

SEQ ID NO: 58522 - DNA, 22 bp, Artificial Sequence
  primer
tttaccctgtccttcctgagtg

SEQ ID NO: 58523 - DNA, 22 bp, Artificial Sequence
  primer
tgggttaataacatcccacacc

SEQ ID NO: 58524 - DNA, 38 bp, Artificial Sequence
  primer
gtaaaacgacggccagtggtattggtcagccaagatgg

SEQ ID NO: 58525 - DNA, 38 bp, Artificial Sequence
  primer
gtaaaacgacggccagtggcagtggtgtcctgtaacac

SEQ ID NO: 58526 - DNA, 39 bp, Artificial Sequence
  primer
gtaaaacgacggccagtttctctgcacttgtgagacctg

SEQ ID NO: 58527 - DNA, 38 bp, Artificial Sequence
  primer
gtaaaacgacggccagtggcagtcctgaatttggtgag

SEQ ID NO: 58528 - DNA, 38 bp, Artificial Sequence
  primer
gtaaaacgacggccagtagtcactgccagggagaagag

SEQ ID NO: 58529 - DNA, 38 bp, Artificial Sequence
  primer
gtaaaacgacggccagtggtctggtttcttaaccaccg

SEQ ID NO: 58530 - DNA, 21 bp, Artificial Sequence
  primer
gaccctacagctcgctaccac

SEQ ID NO: 58531 - DNA, 38 bp, Artificial Sequence
  primer
gtaaaacgacggccagtggatcctctctagaggccctg

SEQ ID NO: 58532 - DNA, 21 bp, Artificial Sequence
  primer
tttctgagcctgacacaatgg

SEQ ID NO: 58533 - DNA, 36 bp, Artificial Sequence
  primer
gtaaaacgacggccagtctcctctggctgcacttcc

SEQ ID NO: 58534 - DNA, 21 bp, Artificial Sequence
  primer
tggcttcacagtttctggatg

SEQ ID NO: 58535 - DNA, 38 bp, Artificial Sequence
  primer
gtaaaacgacggccagtagatgttccttgagtccagcc

SEQ ID NO: 58536 - DNA, 39 bp, Artificial Sequence
  primer
gtaaaacgacggccagttgtttgaagacaaatgtgtggg

SEQ ID NO: 58537 - DNA, 38 bp, Artificial Sequence
  primer
gtaaaacgacggccagtttgtttgtgttcagggtttgc

SEQ ID NO: 58538 - DNA, 38 bp, Artificial Sequence
  primer
gtaaaacgacggccagttgggacactcccactacactg

SEQ ID NO: 58539 - DNA, 37 bp, Artificial Sequence
  primer
gtaaaacgacggccagtgctacattgcttgggaggtg

SEQ ID NO: 58540 - DNA, 20 bp, Artificial Sequence
  primer
tcatccctggaggaaagagg

SEQ ID NO: 58541 - DNA, 38 bp, Artificial Sequence
  primer
gtaaaacgacggccagtccaacaagtgagggaggaaag

SEQ ID NO: 58542 - DNA, 21 bp, Artificial Sequence
  primer
attcctggtagaggcctggag

SEQ ID NO: 58543 - DNA, 38 bp, Artificial Sequence
  primer
gtaaaacgacggccagtaaactgggatggtttgtcacc

SEQ ID NO: 58544 - DNA, 38 bp, Artificial Sequence
  primer
gtaaaacgacggccagtgatgagctcggaggtatcctg

SEQ ID NO: 58545 - DNA, 21 bp, Artificial Sequence
  primer
agctgccgtaaccaatagagg

SEQ ID NO: 58546 - DNA, 38 bp, Artificial Sequence
  primer
gtaaaacgacggccagttctccctgatctaaccttggc

SEQ ID NO: 58547 - DNA, 22 bp, Artificial Sequence
  primer
gctagctttggattcattggac

SEQ ID NO: 58548 - DNA, 21 bp, Artificial Sequence
  primer
ggctatagactgggttcaggc

SEQ ID NO: 58549 - DNA, 38 bp, Artificial Sequence
  primer
gtaaaacgacggccagtagcacattggacctaaccctg

SEQ ID NO: 58550 - DNA, 22 bp, Artificial Sequence
  primer
gaccagtttcattagtggctgc

SEQ ID NO: 58551 - DNA, 38 bp, Artificial Sequence
  primer
gtaaaacgacggccagtagctaatctcactgggttggg

SEQ ID NO: 58552 - DNA, 20 bp, Artificial Sequence
  primer
tgagtgccttcctgtgtgtg

SEQ ID NO: 58553 - DNA, 20 bp, Artificial Sequence
  primer
tttccctgaccttggctctc

SEQ ID NO: 58554 - DNA, 38 bp, Artificial Sequence
  primer
gtaaaacgacggccagtatgttccctgaaatgtggagg

SEQ ID NO: 58555 - DNA, 21 bp, Artificial Sequence
  primer
ttggtctggcagtcagaactc

SEQ ID NO: 58556 - DNA, 20 bp, Artificial Sequence
  primer
tcctgaagcactgatgtggg

SEQ ID NO: 58557 - DNA, 38 bp, Artificial Sequence
  primer
gtaaaacgacggccagtactggtgctgatgatgcagag

SEQ ID NO: 58558 - DNA, 22 bp, Artificial Sequence
  primer
tctgactcccagcttagtgctc

SEQ ID NO: 58559 - DNA, 38 bp, Artificial Sequence
  primer
gtaaaacgacggccagtttatagggcggttagggtgtg

SEQ ID NO: 58560 - DNA, 21 bp, Artificial Sequence
  primer
tcaagtttcccaagttctggc

SEQ ID NO: 58561 - DNA, 21 bp, Artificial Sequence
  primer
ccatttcccagacaggaagac

SEQ ID NO: 58562 - DNA, 38 bp, Artificial Sequence
  primer
gtaaaacgacggccagttcctgccctttccagatacag

SEQ ID NO: 58563 - DNA, 38 bp, Artificial Sequence
  primer
gtaaaacgacggccagttgaccaacattgacttccagg

SEQ ID NO: 58564 - DNA, 38 bp, Artificial Sequence
  primer
gtaaaacgacggccagtagcctggaccatagattcctg

SEQ ID NO: 58565 - DNA, 38 bp, Artificial Sequence
  primer
gtaaaacgacggccagtttggaatcccatagaccatgc

SEQ ID NO: 58566 - DNA, 38 bp, Artificial Sequence
  primer
gtaaaacgacggccagttttattcttcgatcttgcccg

SEQ ID NO: 58567 - DNA, 38 bp, Artificial Sequence
  primer
gtaaaacgacggccagttacgctgtgagcctgcactac

SEQ ID NO: 58568 - DNA, 21 bp, Artificial Sequence
  primer
ctgcacatcactagcgaggac

SEQ ID NO: 58569 - DNA, 19 bp, Artificial Sequence
  primer
catggccctgctgctctac

SEQ ID NO: 58570 - DNA, 37 bp, Artificial Sequence
  primer
gtaaaacgacggccagtaatttaaacgcctcaagcgg

SEQ ID NO: 58571 - DNA, 21 bp, Artificial Sequence
  primer
atactctggagaatggccgtg

SEQ ID NO: 58572 - DNA, 36 bp, Artificial Sequence
  primer
gtaaaacgacggccagtatctgcgaagctagccctg

SEQ ID NO: 58573 - DNA, 20 bp, Artificial Sequence
  primer
acaaattcgtgctggtggag

SEQ ID NO: 58574 - DNA, 38 bp, Artificial Sequence
  primer
gtaaaacgacggccagtctaagatgaagctgacgctgg

SEQ ID NO: 58575 - DNA, 19 bp, Artificial Sequence
  primer
gccttcagcgacttcaagc

SEQ ID NO: 58576 - DNA, 38 bp, Artificial Sequence
  primer
gtaaaacgacggccagttaacaacatcccgttggcttc

SEQ ID NO: 58577 - DNA, 24 bp, Artificial Sequence
  primer
gaaactgtgaaactttgttgtccc

SEQ ID NO: 58578 - DNA, 22 bp, Artificial Sequence
  primer
tgggacaatttaaggttggatg

SEQ ID NO: 58579 - DNA, 38 bp, Artificial Sequence
  primer
gtaaaacgacggccagtaaagatgacaatggcatgtgg

SEQ ID NO: 58580 - DNA, 21 bp, Artificial Sequence
  primer
agctgactctggaggtgaagg

SEQ ID NO: 58581 - DNA, 23 bp, Artificial Sequence
  primer
gccttgtttgatagtttgacacg

SEQ ID NO: 58582 - DNA, 39 bp, Artificial Sequence
  primer
gtaaaacgacggccagtttcatcttgcctttactgcttg

SEQ ID NO: 58583 - DNA, 23 bp, Artificial Sequence
  primer
tcagagcccgttaatttgtaaga

SEQ ID NO: 58584 - DNA, 39 bp, Artificial Sequence
  primer
gtaaaacgacggccagtccttcaccacctctacacgttc

SEQ ID NO: 58585 - DNA, 21 bp, Artificial Sequence
  primer
ggtgatcttcatgcacagtgg

SEQ ID NO: 58586 - DNA, 38 bp, Artificial Sequence
  primer
gtaaaacgacggccagtctcgcacgtgacacttattgg

SEQ ID NO: 58587 - DNA, 18 bp, Artificial Sequence
  primer
gagggaggcgggtcctac

SEQ ID NO: 58588 - DNA, 40 bp, Artificial Sequence
  primer
gtaaaacgacggccagttgtgagttgctttgtaagatggg

SEQ ID NO: 58589 - DNA, 26 bp, Artificial Sequence
  primer
gcagaagtataaagaagcaagtgagg

SEQ ID NO: 58590 - DNA, 37 bp, Artificial Sequence
  primer
gtaaaacgacggccagtggattcttgagaaggcaccc

SEQ ID NO: 58591 - DNA, 22 bp, Artificial Sequence
  primer
aactatcttgccactgcattcc

SEQ ID NO: 58592 - DNA, 38 bp, Artificial Sequence
  primer
gtaaaacgacggccagtttctcaggaagaggagaaggg

SEQ ID NO: 58593 - DNA, 21 bp, Artificial Sequence
  primer
tcccgaatgaataaagcagtg

SEQ ID NO: 58594 - DNA, 38 bp, Artificial Sequence
  primer
gtaaaacgacggccagtattccctcagtgtggtcttcc

SEQ ID NO: 58595 - DNA, 24 bp, Artificial Sequence
  primer
aactcctgactcaagacattctcc

SEQ ID NO: 58596 - DNA, 20 bp, Artificial Sequence
  primer
taggactgaccagggccaag

SEQ ID NO: 58597 - DNA, 21 bp, Artificial Sequence
  primer
aagggtacttcgccatgtctg

SEQ ID NO: 58598 - DNA, 21 bp, Artificial Sequence
  primer
ggactattgcgaaagccctac

SEQ ID NO: 58599 - DNA, 39 bp, Artificial Sequence
  primer
gtaaaacgacggccagtgcctgtaggtagtgtttggctg

SEQ ID NO: 58600 - DNA, 38 bp, Artificial Sequence
  primer
gtaaaacgacggccagttgaaatttgtggattccctcc

SEQ ID NO: 58601 - DNA, 38 bp, Artificial Sequence
  primer
gtaaaacgacggccagtaagatcattgccaccaggaac

SEQ ID NO: 58602 - DNA, 19 bp, Artificial Sequence
  primer
gtctgaggtgttccctggc

SEQ ID NO: 58603 - DNA, 38 bp, Artificial Sequence
  primer
gtaaaacgacggccagtgtaaacggaagtccttggtgg

SEQ ID NO: 58604 - DNA, 38 bp, Artificial Sequence
  primer
gtaaaacgacggccagtctgggctacaaggatctggac

SEQ ID NO: 58605 - DNA, 37 bp, Artificial Sequence
  primer
gtaaaacgacggccagtgtccactcccatgtctgagg

SEQ ID NO: 58606 - DNA, 21 bp, Artificial Sequence
  primer
tcctcaagtactgccacctcc

SEQ ID NO: 58607 - DNA, 21 bp, Artificial Sequence
  primer
cagtgtgagttcctcgagctg

SEQ ID NO: 58608 - DNA, 21 bp, Artificial Sequence
  primer
ggacctaatcttccatgtggc

SEQ ID NO: 58609 - DNA, 21 bp, Artificial Sequence
  primer
catctctgagcacttccaccc

SEQ ID NO: 58610 - DNA, 21 bp, Artificial Sequence
  primer
ttgaacagcagaggaagttgg

SEQ ID NO: 58611 - DNA, 42 bp, Artificial Sequence
  primer
gtaaaacgacggccagttcatggtttatgttgagggtaagtc

SEQ ID NO: 58612 - DNA, 22 bp, Artificial Sequence
  primer
cagattcaccaatctcacttgg

SEQ ID NO: 58613 - DNA, 21 bp, Artificial Sequence
  primer
gatgccagattgaatggttcc

SEQ ID NO: 58614 - DNA, 38 bp, Artificial Sequence
  primer
gtaaaacgacggccagtattggtcaaggtttgcaatgg

SEQ ID NO: 58615 - DNA, 21 bp, Artificial Sequence
  primer
gccaagctaaccaaagaatcc

SEQ ID NO: 58616 - DNA, 21 bp, Artificial Sequence
  primer
acctcagaagctggagacgtg

SEQ ID NO: 58617 - DNA, 21 bp, Artificial Sequence
  primer
ttcgtagagcaagtggaagcc

SEQ ID NO: 58618 - DNA, 21 bp, Artificial Sequence
  primer
ctggagtgtcccatctaagcc

SEQ ID NO: 58619 - DNA, 38 bp, Artificial Sequence
  primer
gtaaaacgacggccagttcggagatccagtctcctacg

SEQ ID NO: 58620 - DNA, 38 bp, Artificial Sequence
  primer
gtaaaacgacggccagtgccttccaagactggagtgtc

SEQ ID NO: 58621 - DNA, 38 bp, Artificial Sequence
  primer
gtaaaacgacggccagtgacgtatgggatcgttgtgag

SEQ ID NO: 58622 - DNA, 20 bp, Artificial Sequence
  primer
ctcccaaagctccagagtcc

SEQ ID NO: 58623 - DNA, 38 bp, Artificial Sequence
  primer
gtaaaacgacggccagtaattcttcaagtgggctggag

SEQ ID NO: 58624 - DNA, 38 bp, Artificial Sequence
  primer
gtaaaacgacggccagtacacacctgttagaatccggg

SEQ ID NO: 58625 - DNA, 21 bp, Artificial Sequence
  primer
actccaagccctggtactgtg

SEQ ID NO: 58626 - DNA, 38 bp, Artificial Sequence
  primer
gtaaaacgacggccagtttcgtagaggaagtggaagcc

SEQ ID NO: 58627 - DNA, 21 bp, Artificial Sequence
  primer
gaagacaaccgaggtacccac

SEQ ID NO: 58628 - DNA, 21 bp, Artificial Sequence
  primer
acccagagcctcctgatactg

SEQ ID NO: 58629 - DNA, 21 bp, Artificial Sequence
  primer
ccttccaagactcaggtgtcc

SEQ ID NO: 58630 - DNA, 21 bp, Artificial Sequence
  primer
agaagaagctggaagacgcac

SEQ ID NO: 58631 - DNA, 21 bp, Artificial Sequence
  primer
tgcagaacaaccgatcaagac

SEQ ID NO: 58632 - DNA, 38 bp, Artificial Sequence
  primer
gtaaaacgacggccagtgagtgtgcttcaaggctgatg

SEQ ID NO: 58633 - DNA, 40 bp, Artificial Sequence
  primer
gtaaaacgacggccagtttgatgttaaaggcatggtgttc

SEQ ID NO: 58634 - DNA, 21 bp, Artificial Sequence
  primer
cactgaccagagagaccgtgt

SEQ ID NO: 58635 - DNA, 21 bp, Artificial Sequence
  primer
ctctgctaaatcgtggtgcag

SEQ ID NO: 58636 - DNA, 38 bp, Artificial Sequence
  primer
gtaaaacgacggccagtcattcctcgtagggactgagc

SEQ ID NO: 58637 - DNA, 39 bp, Artificial Sequence
  primer
gtaaaacgacggccagttcataatgcagaaagagcacca

SEQ ID NO: 58638 - DNA, 38 bp, Artificial Sequence
  primer
gtaaaacgacggccagtatccttgcttggttgaaatgc

SEQ ID NO: 58639 - DNA, 24 bp, Artificial Sequence
  primer
gcgaaatgtttgatataaacccac

SEQ ID NO: 58640 - DNA, 38 bp, Artificial Sequence
  primer
gtaaaacgacggccagttcttacgtccaacaatgcagg

SEQ ID NO: 58641 - DNA, 24 bp, Artificial Sequence
  primer
catgcacactaacattggaacttg

SEQ ID NO: 58642 - DNA, 38 bp, Artificial Sequence
  primer
gtaaaacgacggccagttaggactgtgcttggcatgtg

SEQ ID NO: 58643 - DNA, 21 bp, Artificial Sequence
  primer
atctcattgtccacctcctcc

SEQ ID NO: 58644 - DNA, 45 bp, Artificial Sequence
  primer
gtaaaacgacggccagtaagcataagtagttgataccggtaattt

SEQ ID NO: 58645 - DNA, 40 bp, Artificial Sequence
  primer
gtaaaacgacggccagtgctgtgtgtcttcctatcgtcag

SEQ ID NO: 58646 - DNA, 27 bp, Artificial Sequence
  primer
gcatgatttattatcttccagtcattc

SEQ ID NO: 58647 - DNA, 27 bp, Artificial Sequence
  primer
caaattattcacattgtttcataatgc

SEQ ID NO: 58648 - DNA, 44 bp, Artificial Sequence
  primer
gtaaaacgacggccagtttgccattaatagtcattattctttcc

SEQ ID NO: 58649 - DNA, 21 bp, Artificial Sequence
  primer
ctcctctgcctttctccctaa

SEQ ID NO: 58650 - DNA, 21 bp, Artificial Sequence
  primer
ccaatcaaacttccctcaagc

SEQ ID NO: 58651 - DNA, 37 bp, Artificial Sequence
  primer
gtaaaacgacggccagtcccaagattcaggcttcacc

SEQ ID NO: 58652 - DNA, 38 bp, Artificial Sequence
  primer
gtaaaacgacggccagtatctgaggaattgtgtggctg

SEQ ID NO: 58653 - DNA, 21 bp, Artificial Sequence
  primer
aatgtgcatctggtgcttcac

SEQ ID NO: 58654 - DNA, 42 bp, Artificial Sequence
  primer
gtaaaacgacggccagtaagagtgacacatagcaaatgatcc

SEQ ID NO: 58655 - DNA, 28 bp, Artificial Sequence
  primer
cttaggcgttatctaggtagcattaaac

SEQ ID NO: 58656 - DNA, 39 bp, Artificial Sequence
  primer
gtaaaacgacggccagttgttatcttggtgctttctccc

SEQ ID NO: 58657 - DNA, 21 bp, Artificial Sequence
  primer
ccagggatattcacgcaagtc

SEQ ID NO: 58658 - DNA, 38 bp, Artificial Sequence
  primer
gtaaaacgacggccagtctgaatatccatcctcctccc

SEQ ID NO: 58659 - DNA, 38 bp, Artificial Sequence
  primer
gtaaaacgacggccagttattgagcatgttggaggacc

SEQ ID NO: 58660 - DNA, 21 bp, Artificial Sequence
  primer
ggctgggaattgtgttctttg

SEQ ID NO: 58661 - DNA, 21 bp, Artificial Sequence
  primer
gtgtctgggctcctcctaatg

SEQ ID NO: 58662 - DNA, 38 bp, Artificial Sequence
  primer
gtaaaacgacggccagtcttgacctttgcacccttctc

SEQ ID NO: 58663 - DNA, 21 bp, Artificial Sequence
  primer
cttagcaatgccacaatgcac

SEQ ID NO: 58664 - DNA, 38 bp, Artificial Sequence
  primer
gtaaaacgacggccagtttgttcccaagagaggattgg

SEQ ID NO: 58665 - DNA, 38 bp, Artificial Sequence
  primer
gtaaaacgacggccagtctgttggtcatttctgcgttg

SEQ ID NO: 58666 - DNA, 21 bp, Artificial Sequence
  primer
gtttccgaaggtaaagatggg

SEQ ID NO: 58667 - DNA, 21 bp, Artificial Sequence
  primer
ccagagcacagtctgggtaac

SEQ ID NO: 58668 - DNA, 22 bp, Artificial Sequence
  primer
ggaaatttgggttgttaattgc

SEQ ID NO: 58669 - DNA, 27 bp, Artificial Sequence
  primer
ggattataccagtgtttcctatgtttg

SEQ ID NO: 58670 - DNA, 23 bp, Artificial Sequence
  primer
agcaatggcaacatttaaacttc

SEQ ID NO: 58671 - DNA, 22 bp, Artificial Sequence
  primer
ccaccttggattataccagtgc

SEQ ID NO: 58672 - DNA, 39 bp, Artificial Sequence
  primer
gtaaaacgacggccagttgcctgggtccttgtataattg

SEQ ID NO: 58673 - DNA, 20 bp, Artificial Sequence
  primer
cccagtgcttggaacagttg

SEQ ID NO: 58674 - DNA, 23 bp, Artificial Sequence
  primer
gcatcagctgaaagttgaatcac

SEQ ID NO: 58675 - DNA, 26 bp, Artificial Sequence
  primer
tcttgagttccatagttatggtcttg

SEQ ID NO: 58676 - DNA, 21 bp, Artificial Sequence
  primer
gctgagaccaattctccatcc

SEQ ID NO: 58677 - DNA, 35 bp, Artificial Sequence
  primer
gtaaaacgacggccagtgtctcctggtggctgacg

SEQ ID NO: 58678 - DNA, 37 bp, Artificial Sequence
  primer
gtaaaacgacggccagttggaaccttccatcgacaag

SEQ ID NO: 58679 - DNA, 37 bp, Artificial Sequence
  primer
gtaaaacgacggccagtcagagctcaagtccagcacc

SEQ ID NO: 58680 - DNA, 21 bp, Artificial Sequence
  primer
aaagtgatccaggacagcagg

SEQ ID NO: 58681 - DNA, 40 bp, Artificial Sequence
  primer
gtaaaacgacggccagtccctaggcttgtcttctagatcg

SEQ ID NO: 58682 - DNA, 38 bp, Artificial Sequence
  primer
gtaaaacgacggccagtctggtggagacccttgcttag

SEQ ID NO: 58683 - DNA, 38 bp, Artificial Sequence
  primer
gtaaaacgacggccagtagtgagtgtttgcggagtcag

SEQ ID NO: 58684 - DNA, 37 bp, Artificial Sequence
  primer
gtaaaacgacggccagtgaggataactggctccaggg

SEQ ID NO: 58685 - DNA, 38 bp, Artificial Sequence
  primer
gtaaaacgacggccagtcactaaaccatggagcttccc

SEQ ID NO: 58686 - DNA, 21 bp, Artificial Sequence
  primer
caaggaggacttgatcatccc

SEQ ID NO: 58687 - DNA, 38 bp, Artificial Sequence
  primer
gtaaaacgacggccagttcccagcatcacagcttctac

SEQ ID NO: 58688 - DNA, 37 bp, Artificial Sequence
  primer
gtaaaacgacggccagtcctgggctatggaggagaag

SEQ ID NO: 58689 - DNA, 38 bp, Artificial Sequence
  primer
gtaaaacgacggccagtacaagtacacggtgaggaggg

SEQ ID NO: 58690 - DNA, 21 bp, Artificial Sequence
  primer
tcgcatttgcatttattgagg

SEQ ID NO: 58691 - DNA, 38 bp, Artificial Sequence
  primer
gtaaaacgacggccagtgaggagaccatcctcaagtcg

SEQ ID NO: 58692 - DNA, 38 bp, Artificial Sequence
  primer
gtaaaacgacggccagtctagacgacctcgatgaccag

SEQ ID NO: 58693 - DNA, 21 bp, Artificial Sequence
  primer
aagtgaaggacgaggagatgg

SEQ ID NO: 58694 - DNA, 38 bp, Artificial Sequence
  primer
gtaaaacgacggccagtgagctgcctcacaaaccatag

SEQ ID NO: 58695 - DNA, 21 bp, Artificial Sequence
  primer
acgatcactagccttcatccc

SEQ ID NO: 58696 - DNA, 39 bp, Artificial Sequence
  primer
gtaaaacgacggccagtttgtaggcatcaacatcgaaag

SEQ ID NO: 58697 - DNA, 20 bp, Artificial Sequence
  primer
actcactgggctccttctgc

SEQ ID NO: 58698 - DNA, 38 bp, Artificial Sequence
  primer
gtaaaacgacggccagtgaccttgagatttggctgacc

SEQ ID NO: 58699 - DNA, 38 bp, Artificial Sequence
  primer
gtaaaacgacggccagtaaggtagaacgtgctgcagtg

SEQ ID NO: 58700 - DNA, 38 bp, Artificial Sequence
  primer
gtaaaacgacggccagtctttaagaagtgagccgagcc

SEQ ID NO: 58701 - DNA, 21 bp, Artificial Sequence
  primer
gaccagagtccctggaaggtc

SEQ ID NO: 58702 - DNA, 20 bp, Artificial Sequence
  primer
agtgaaagcacaggctcgtc

SEQ ID NO: 58703 - DNA, 21 bp, Artificial Sequence
  primer
tggactccagtctccaagagg

SEQ ID NO: 58704 - DNA, 38 bp, Artificial Sequence
  primer
gtaaaacgacggccagttttctgctgacatcaattccc

SEQ ID NO: 58705 - DNA, 37 bp, Artificial Sequence
  primer
gtaaaacgacggccagtttccctgatctgacattggc

SEQ ID NO: 58706 - DNA, 38 bp, Artificial Sequence
  primer
gtaaaacgacggccagttactgtgtttgaaacgggctg

SEQ ID NO: 58707 - DNA, 38 bp, Artificial Sequence
  primer
gtaaaacgacggccagtaaagacctcagcatcagcgac

SEQ ID NO: 58708 - DNA, 21 bp, Artificial Sequence
  primer
atgcagaggagttccagcttc

SEQ ID NO: 58709 - DNA, 38 bp, Artificial Sequence
  primer
gtaaaacgacggccagtcacagcctggtggtctagttg

SEQ ID NO: 58710 - DNA, 38 bp, Artificial Sequence
  primer
gtaaaacgacggccagtacagcctggtggtctagttgc

SEQ ID NO: 58711 - DNA, 38 bp, Artificial Sequence
  primer
gtaaaacgacggccagtgtcccaatggtgctagaatgg

SEQ ID NO: 58712 - DNA, 38 bp, Artificial Sequence
  primer
gtaaaacgacggccagtggtggagaagggtttgagatg

SEQ ID NO: 58713 - DNA, 38 bp, Artificial Sequence
  primer
gtaaaacgacggccagttggtcacaatggaggcaatag

SEQ ID NO: 58714 - DNA, 21 bp, Artificial Sequence
  primer
taaatgccttccagaaggtgc

SEQ ID NO: 58715 - DNA, 18 bp, Artificial Sequence
  primer
aagcgggtctccagcctc

SEQ ID NO: 58716 - DNA, 38 bp, Artificial Sequence
  primer
gtaaaacgacggccagtccagtgcctcttctcaatgtg

SEQ ID NO: 58717 - DNA, 21 bp, Artificial Sequence
  primer
ccagggtgacagagtgagact

SEQ ID NO: 58718 - DNA, 23 bp, Artificial Sequence
  primer
tgactgtgtcgtgtatcaagagg

SEQ ID NO: 58719 - DNA, 21 bp, Artificial Sequence
  primer
tctttgaagaaaggctctgcc

SEQ ID NO: 58720 - DNA, 22 bp, Artificial Sequence
  primer
gggcaagtgtgaacaataactg

SEQ ID NO: 58721 - DNA, 29 bp, Artificial Sequence
  primer
tttcacgtaggagtgtaagagtttatacc

SEQ ID NO: 58722 - DNA, 39 bp, Artificial Sequence
  primer
gtaaaacgacggccagttgggattgacactctttccttg

SEQ ID NO: 58723 - DNA, 20 bp, Artificial Sequence
  primer
cctttggcttgagtgacgag

SEQ ID NO: 58724 - DNA, 21 bp, Artificial Sequence
  primer
ccatgtttgtcaacaaggagc

SEQ ID NO: 58725 - DNA, 21 bp, Artificial Sequence
  primer
tggctctgagcgtagtacctg

SEQ ID NO: 58726 - DNA, 39 bp, Artificial Sequence
  primer
gtaaaacgacggccagtcagatggcctgatatgaaggag

SEQ ID NO: 58727 - DNA, 21 bp, Artificial Sequence
  primer
ttagcagcagcaggtattccc

SEQ ID NO: 58728 - DNA, 38 bp, Artificial Sequence
  primer
gtaaaacgacggccagttcttggtctcaagcattctgc

SEQ ID NO: 58729 - DNA, 21 bp, Artificial Sequence
  primer
agaggaatgagaactgtgggc

SEQ ID NO: 58730 - DNA, 38 bp, Artificial Sequence
  primer
gtaaaacgacggccagtgaatgttcagtaggcagggct

SEQ ID NO: 58731 - DNA, 39 bp, Artificial Sequence
  primer
gtaaaacgacggccagttgaaagggaattgtaatggcac

SEQ ID NO: 58732 - DNA, 22 bp, Artificial Sequence
  primer
cctcgagatacatactgcaggg

SEQ ID NO: 58733 - DNA, 21 bp, Artificial Sequence
  primer
tgctctcagcagggtagaaag

SEQ ID NO: 58734 - DNA, 22 bp, Artificial Sequence
  primer
gaaataggcattacaggaaggg

SEQ ID NO: 58735 - DNA, 22 bp, Artificial Sequence
  primer
aaggctccagtgagcaattatc

SEQ ID NO: 58736 - DNA, 38 bp, Artificial Sequence
  primer
gtaaaacgacggccagtgctatcccttcgtcactttcc

SEQ ID NO: 58737 - DNA, 41 bp, Artificial Sequence
  primer
gtaaaacgacggccagttgggcaggaacagatcataataag

SEQ ID NO: 58738 - DNA, 37 bp, Artificial Sequence
  primer
gtaaaacgacggccagtgaaccaaagtgtacggagcc

SEQ ID NO: 58739 - DNA, 21 bp, Artificial Sequence
  primer
tggcagcagaggaagtcatac

SEQ ID NO: 58740 - DNA, 21 bp, Artificial Sequence
  primer
actagaccagcagatcccacc

SEQ ID NO: 58741 - DNA, 22 bp, Artificial Sequence
  primer
tggtcagcttcactctgttctg

SEQ ID NO: 58742 - DNA, 21 bp, Artificial Sequence
  primer
cagctttccagaatcctgacc

SEQ ID NO: 58743 - DNA, 38 bp, Artificial Sequence
  primer
gtaaaacgacggccagtgggtttcactatctggttggc

SEQ ID NO: 58744 - DNA, 41 bp, Artificial Sequence
  primer
gtaaaacgacggccagtgcaggatagaagcaaatgaaactg

SEQ ID NO: 58745 - DNA, 38 bp, Artificial Sequence
  primer
gtaaaacgacggccagtctgtttcagccactttcatcg

SEQ ID NO: 58746 - DNA, 21 bp, Artificial Sequence
  primer
agcccaagaagtatggtggag

SEQ ID NO: 58747 - DNA, 40 bp, Artificial Sequence
  primer
gtaaaacgacggccagttttcatcataataaggctccgtg

SEQ ID NO: 58748 - DNA, 38 bp, Artificial Sequence
  primer
gtaaaacgacggccagttgggcataattgtttcttggg

SEQ ID NO: 58749 - DNA, 21 bp, Artificial Sequence
  primer
tagtcccaagaatgtgggtcc

SEQ ID NO: 58750 - DNA, 38 bp, Artificial Sequence
  primer
gtaaaacgacggccagtcagaagcacaacatcctgctc

SEQ ID NO: 58751 - DNA, 39 bp, Artificial Sequence
  primer
gtaaaacgacggccagttgggtaactgtatcccatagcc

SEQ ID NO: 58752 - DNA, 39 bp, Artificial Sequence
  primer
gtaaaacgacggccagttccaccattaccaccaccttac

SEQ ID NO: 58753 - DNA, 38 bp, Artificial Sequence
  primer
gtaaaacgacggccagttgcctcctatccaccatctta

SEQ ID NO: 58754 - DNA, 38 bp, Artificial Sequence
  primer
gtaaaacgacggccagtccactccagtagtctccgacc

SEQ ID NO: 58755 - DNA, 18 bp, Artificial Sequence
  primer
gtgctgagcgtggagctg

SEQ ID NO: 58756 - DNA, 21 bp, Artificial Sequence
  primer
gcatttcactttccctccttg

SEQ ID NO: 58757 - DNA, 37 bp, Artificial Sequence
  primer
gtaaaacgacggccagtctgttgcgagggtttctcac

SEQ ID NO: 58758 - DNA, 21 bp, Artificial Sequence
  primer
gaggaaggtgaggaacaggtg

SEQ ID NO: 58759 - DNA, 37 bp, Artificial Sequence
  primer
gtaaaacgacggccagtataacagcctgcacacctgg

SEQ ID NO: 58760 - DNA, 37 bp, Artificial Sequence
  primer
gtaaaacgacggccagtattcgcatgcaaactccttg

SEQ ID NO: 58761 - DNA, 21 bp, Artificial Sequence
  primer
ggtctccacgtaccaccaaag

SEQ ID NO: 58762 - DNA, 23 bp, Artificial Sequence
  primer
tgggacttacatcatattcgtgg

SEQ ID NO: 58763 - DNA, 37 bp, Artificial Sequence
  primer
gtaaaacgacggccagtactcccaattctcgagacgg

SEQ ID NO: 58764 - DNA, 38 bp, Artificial Sequence
  primer
gtaaaacgacggccagtcctgggagatagagcgagact

SEQ ID NO: 58765 - DNA, 38 bp, Artificial Sequence
  primer
gtaaaacgacggccagttgagctcacagaaactccacc

SEQ ID NO: 58766 - DNA, 38 bp, Artificial Sequence
  primer
gtaaaacgacggccagtgtgagcagcatggaacatttg

SEQ ID NO: 58767 - DNA, 38 bp, Artificial Sequence
  primer
gtaaaacgacggccagtctctgttgcatggattggatg

SEQ ID NO: 58768 - DNA, 39 bp, Artificial Sequence
  primer
gtaaaacgacggccagttttcccattaaattgttcccag

SEQ ID NO: 58769 - DNA, 21 bp, Artificial Sequence
  primer
cacgaagcctttatctgtggg

SEQ ID NO: 58770 - DNA, 38 bp, Artificial Sequence
  primer
gtaaaacgacggccagtgacaaagggtcaggagcgtag

SEQ ID NO: 58771 - DNA, 38 bp, Artificial Sequence
  primer
gtaaaacgacggccagtttgcaggtaaagacatcccag

SEQ ID NO: 58772 - DNA, 41 bp, Artificial Sequence
  primer
gtaaaacgacggccagtttcatctgtttgacttgtacccag

SEQ ID NO: 58773 - DNA, 38 bp, Artificial Sequence
  primer
gtaaaacgacggccagttctgttccttgttgcttctcg

SEQ ID NO: 58774 - DNA, 21 bp, Artificial Sequence
  primer
acccagacatctatgggatgc

SEQ ID NO: 58775 - DNA, 38 bp, Artificial Sequence
  primer
gtaaaacgacggccagtttgggcttaagagatcctccc

SEQ ID NO: 58776 - DNA, 21 bp, Artificial Sequence
  primer
tctggcatctgaagaacttgc

SEQ ID NO: 58777 - DNA, 38 bp, Artificial Sequence
  primer
gtaaaacgacggccagtcaatacagctgtcatggcgtc

SEQ ID NO: 58778 - DNA, 19 bp, Artificial Sequence
  primer
gcggtctccatagagctgg

SEQ ID NO: 58779 - DNA, 21 bp, Artificial Sequence
  primer
ggacagtggtttggagagtcc

SEQ ID NO: 58780 - DNA, 20 bp, Artificial Sequence
  primer
ctccgagcctggactctctg

SEQ ID NO: 58781 - DNA, 18 bp, Artificial Sequence
  primer
atggcctgaaccggagag

SEQ ID NO: 58782 - DNA, 26 bp, Artificial Sequence
  primer
gcagtgaaatttgttataacctttgg

SEQ ID NO: 58783 - DNA, 25 bp, Artificial Sequence
  primer
tctttcaaactccaactagcttctg

SEQ ID NO: 58784 - DNA, 38 bp, Artificial Sequence
  primer
gtaaaacgacggccagtcttggaaactgttgggtgttg

SEQ ID NO: 58785 - DNA, 38 bp, Artificial Sequence
  primer
gtaaaacgacggccagtcacaaatgtccagtttggagc

SEQ ID NO: 58786 - DNA, 35 bp, Artificial Sequence
  primer
gtaaaacgacggccagtcctgggaatgggtatggg

SEQ ID NO: 58787 - DNA, 38 bp, Artificial Sequence
  primer
gtaaaacgacggccagtactgggattataggcgtgagc

SEQ ID NO: 58788 - DNA, 38 bp, Artificial Sequence
  primer
gtaaaacgacggccagttgtttgtcgctctgaggtcac

SEQ ID NO: 58789 - DNA, 21 bp, Artificial Sequence
  primer
tgccagctctatgtgttgagg

SEQ ID NO: 58790 - DNA, 18 bp, Artificial Sequence
  primer
gaacagggcaggaggctg

SEQ ID NO: 58791 - DNA, 38 bp, Artificial Sequence
  primer
gtaaaacgacggccagtcaagaagggtgagaagtcgtg

SEQ ID NO: 58792 - DNA, 40 bp, Artificial Sequence
  primer
gtaaaacgacggccagtcaggtctgtctaagtccaaagcc

SEQ ID NO: 58793 - DNA, 21 bp, Artificial Sequence
  primer
tttgttcagaggaggaggacc

SEQ ID NO: 58794 - DNA, 38 bp, Artificial Sequence
  primer
gtaaaacgacggccagtatcccaggtttcacaagcaac

SEQ ID NO: 58795 - DNA, 35 bp, Artificial Sequence
  primer
gtaaaacgacggccagtaagtggaggcggagggag

SEQ ID NO: 58796 - DNA, 39 bp, Artificial Sequence
  primer
gtaaaacgacggccagtagcatccagttctttacgttgg

SEQ ID NO: 58797 - DNA, 25 bp, Artificial Sequence
  primer
tgctgtgcagtaatagtgtcaagtg

SEQ ID NO: 58798 - DNA, 21 bp, Artificial Sequence
  primer
tgacagggcaacaaacttgac

SEQ ID NO: 58799 - DNA, 41 bp, Artificial Sequence
  primer
gtaaaacgacggccagtagtggtttatcttacctggtttcg

SEQ ID NO: 58800 - DNA, 42 bp, Artificial Sequence
  primer
gtaaaacgacggccagtgaagaacttgagatggttagcagtc

SEQ ID NO: 58801 - DNA, 38 bp, Artificial Sequence
  primer
gtaaaacgacggccagtgcagggactgtggaaacagag

SEQ ID NO: 58802 - DNA, 42 bp, Artificial Sequence
  primer
gtaaaacgacggccagtgaaacaaatttgaatggagaacatt

SEQ ID NO: 58803 - DNA, 36 bp, Artificial Sequence
  primer
gtaaaacgacggccagtcgccgggaaactaacaaag

SEQ ID NO: 58804 - DNA, 21 bp, Artificial Sequence
  primer
tcctccagccatgagataaag

SEQ ID NO: 58805 - DNA, 37 bp, Artificial Sequence
  primer
gtaaaacgacggccagtctccgtcagtttcttcccag

SEQ ID NO: 58806 - DNA, 41 bp, Artificial Sequence
  primer
gtaaaacgacggccagtttcctaaggtcaaagtcaaagacg

SEQ ID NO: 58807 - DNA, 43 bp, Artificial Sequence
  primer
gtaaaacgacggccagtaaagctattaaggctgcatagaaatg

SEQ ID NO: 58808 - DNA, 37 bp, Artificial Sequence
  primer
gtaaaacgacggccagtgccctgcacacaaaggtaag

SEQ ID NO: 58809 - DNA, 36 bp, Artificial Sequence
  primer
gtaaaacgacggccagtagctgagtctgaccgggag

SEQ ID NO: 58810 - DNA, 21 bp, Artificial Sequence
  primer
ctgttctcaattgggtcagcc

SEQ ID NO: 58811 - DNA, 21 bp, Artificial Sequence
  primer
ctgacttgagggaagggagag

SEQ ID NO: 58812 - DNA, 38 bp, Artificial Sequence; identical to SEQ ID NO: 10548
  primer

SEQ ID NO: 58813 - DNA, 21 bp, Artificial Sequence
  primer
tttgtactcccagcactcagc

SEQ ID NO: 58814 - DNA, 38 bp, Artificial Sequence
  primer
gtaaaacgacggccagtaaggtctgtagtgcttggcct

SEQ ID NO: 58815 - DNA, 24 bp, Artificial Sequence
  primer
gaagaggtggtcagtttccatatt

SEQ ID NO: 58816 - DNA, 26 bp, Artificial Sequence
  primer
caaactttggcgtattactattcctc

SEQ ID NO: 58817 - DNA, 39 bp, Artificial Sequence
  primer
gtaaaacgacggccagtaacttccttgtgctgttggttg

SEQ ID NO: 58818 - DNA, 42 bp, Artificial Sequence
  primer
gtaaaacgacggccagtgcagattgtgatacaagaagattca

SEQ ID NO: 58819 - DNA, 38 bp, Artificial Sequence
  primer
gtaaaacgacggccagtcctgggagactggatagggag

SEQ ID NO: 58820 - DNA, 22 bp, Artificial Sequence
  primer
aaagtttggcctttgaagatcc

SEQ ID NO: 58821 - DNA, 25 bp, Artificial Sequence
  primer
ttggaaacatatgctgtttatttca

SEQ ID NO: 58822 - DNA, 22 bp, Artificial Sequence
  primer
cctgcctcaaaccctatttagc

SEQ ID NO: 58823 - DNA, 38 bp, Artificial Sequence
  primer
gtaaaacgacggccagtggtctctctctgtctaggccc

SEQ ID NO: 58824 - DNA, 38 bp, Artificial Sequence
  primer
gtaaaacgacggccagtaaaccataatgaggccagctc

SEQ ID NO: 58825 - DNA, 42 bp, Artificial Sequence
  primer
gtaaaacgacggccagttgccattgactacaatatggcttac

SEQ ID NO: 58826 - DNA, 21 bp, Artificial Sequence
  primer
cctaggtgatgggttgacaga

SEQ ID NO: 58827 - DNA, 38 bp, Artificial Sequence
  primer
gtaaaacgacggccagtttgcaaatctgtttcttgcag

SEQ ID NO: 58828 - DNA, 23 bp, Artificial Sequence
  primer
ccatcatactttcatcccagagg

SEQ ID NO: 58829 - DNA, 22 bp, Artificial Sequence
  primer
cttcctgcagtcacaatgctac

SEQ ID NO: 58830 - DNA, 21 bp, Artificial Sequence
  primer
aaagcctccctttaagccaag

SEQ ID NO: 58831 - DNA, 44 bp, Artificial Sequence
  primer
gtaaaacgacggccagtttaactgagctgattatctggtctatg

SEQ ID NO: 58832 - DNA, 43 bp, Artificial Sequence
  primer
gtaaaacgacggccagtaaaggatcagaagtgaggattctagt

SEQ ID NO: 58833 - DNA, 21 bp, Artificial Sequence
  primer
aatcaaaccactgctgcttcc

SEQ ID NO: 58834 - DNA, 38 bp, Artificial Sequence
  primer
gtaaaacgacggccagtcatcaaatgaatgtgcaggtg

SEQ ID NO: 58835 - DNA, 38 bp, Artificial Sequence
  primer
gtaaaacgacggccagtattaatctgtttcccggctcc

SEQ ID NO: 58836 - DNA, 38 bp, Artificial Sequence
  primer
gtaaaacgacggccagttgtacttaccttgcctctggc

SEQ ID NO: 58837 - DNA, 21 bp, Artificial Sequence
  primer
aacagggccaaagggattaac

SEQ ID NO: 58838 - DNA, 18 bp, Artificial Sequence
  primer
gcaggactgccgattagc

SEQ ID NO: 58839 - DNA, 38 bp, Artificial Sequence
  primer
gtaaaacgacggccagtggattgaatctcctttagccc

SEQ ID NO: 58840 - DNA, 40 bp, Artificial Sequence
  primer
gtaaaacgacggccagtgtattatgatcgattgctttggg

SEQ ID NO: 58841 - DNA, 27 bp, Artificial Sequence
  primer
tgtttcattgtaggtcatttctgtatc

SEQ ID NO: 58842 - DNA, 44 bp, Artificial Sequence
  primer
gtaaaacgacggccagtcctaagctgaaagaccataatgtattc

SEQ ID NO: 58843 - DNA, 38 bp, Artificial Sequence
  primer
gtaaaacgacggccagtagagggccatgtccacttctc

SEQ ID NO: 58844 - DNA, 40 bp, Artificial Sequence
  primer
gtaaaacgacggccagtgggagaactgaaacacacagttg

SEQ ID NO: 58845 - DNA, 21 bp, Artificial Sequence
  primer
actacctggcacaatgcactc

SEQ ID NO: 58846 - DNA, 41 bp, Artificial Sequence
  primer
gtaaaacgacggccagttttgggtgttaactctcactgttg

SEQ ID NO: 58847 - DNA, 25 bp, Artificial Sequence
  primer
aaatgtgtataatgcagtgcctagc

SEQ ID NO: 58848 - DNA, 37 bp, Artificial Sequence
  primer
gtaaaacgacggccagtgacacacatggcagatcgag

SEQ ID NO: 58849 - DNA, 38 bp, Artificial Sequence
  primer
gtaaaacgacggccagtctcaccactgcatgaatggac

SEQ ID NO: 58850 - DNA, 23 bp, Artificial Sequence
  primer
ttgatattctgattgaacacggg

SEQ ID NO: 58851 - DNA, 42 bp, Artificial Sequence
  primer
gtaaaacgacggccagtcctactgaaatgcagatttccttta

SEQ ID NO: 58852 - DNA, 39 bp, Artificial Sequence
  primer
gtaaaacgacggccagtgtgagaggctgagtgatctttg

SEQ ID NO: 58853 - DNA, 21 bp, Artificial Sequence
  primer
aagctcacctcagcatggttc

SEQ ID NO: 58854 - DNA, 38 bp, Artificial Sequence
  primer
gtaaaacgacggccagtaagaatcagcaagggtgaagc

SEQ ID NO: 58855 - DNA, 38 bp, Artificial Sequence
  primer
gtaaaacgacggccagtgatagtctcagtgtggcgtcc

SEQ ID NO: 58856 - DNA, 38 bp, Artificial Sequence
  primer
gtaaaacgacggccagtctcggcttcgttcctctttag

SEQ ID NO: 58857 - DNA, 20 bp, Artificial Sequence
  primer
gcgaagtttcccgttatttg

SEQ ID NO: 58858 - DNA, 23 bp, Artificial Sequence
  primer
tgtgactcataacttggaggagg

SEQ ID NO: 58859 - DNA, 24 bp, Artificial Sequence
  primer
tcaaagaaggaagttaagggttcc

SEQ ID NO: 58860 - DNA, 41 bp, Artificial Sequence
  primer
gtaaaacgacggccagtctgacacattagtttctgagggtg

SEQ ID NO: 58861 - DNA, 38 bp, Artificial Sequence
  primer
gtaaaacgacggccagtaattctcaaggcagcatccac

SEQ ID NO: 58862 - DNA, 38 bp, Artificial Sequence
  primer
gtaaaacgacggccagtgtctaggcctgactgtccctg

SEQ ID NO: 58863 - DNA, 38 bp, Artificial Sequence
  primer
gtaaaacgacggccagtgttgcctataaagcgggactg

SEQ ID NO: 58864 - DNA, 37 bp, Artificial Sequence
  primer
gtaaaacgacggccagtcgagctgttcagcgagtcac

SEQ ID NO: 58865 - DNA, 21 bp, Artificial Sequence
  primer
tggatagggatcatttcccag

SEQ ID NO: 58866 - DNA, 38 bp, Artificial Sequence
  primer
gtaaaacgacggccagttgaggcttgagaactgtctgg

SEQ ID NO: 58867 - DNA, 21 bp, Artificial Sequence
  primer
cctctgaggctgagcatttag

SEQ ID NO: 58868 - DNA, 38 bp, Artificial Sequence
  primer
gtaaaacgacggccagtcctctcacagtcagtcctccc

SEQ ID NO: 58869 - DNA, 38 bp, Artificial Sequence
  primer
gtaaaacgacggccagtagatgtcaggtttcccacacc

SEQ ID NO: 58870 - DNA, 37 bp, Artificial Sequence
  primer
gtaaaacgacggccagtgcctggccttggacagatac

SEQ ID NO: 58871 - DNA, 22 bp, Artificial Sequence
  primer
tctacagacagggaagctgagg

SEQ ID NO: 58872 - DNA, 21 bp, Artificial Sequence
  primer
tgaaattgttgacgccttcag

SEQ ID NO: 58873 - DNA, 21 bp, Artificial Sequence
  primer
ctttcgctgcttctctcttgc

SEQ ID NO: 58874 - DNA, 37 bp, Artificial Sequence
  primer
gtaaaacgacggccagtgtcgcttatcctggccctac

SEQ ID NO: 58875 - DNA, 38 bp, Artificial Sequence
  primer
gtaaaacgacggccagtacggagcagtgacaggtatcc

SEQ ID NO: 58876 - DNA, 21 bp, Artificial Sequence
  primer
gagtggctgtggcagtcctac

SEQ ID NO: 58877 - DNA, 21 bp, Artificial Sequence
  primer
tacatggcttgtgttccaagg

SEQ ID NO: 58878 - DNA, 25 bp, Artificial Sequence
  primer
tgctttatgatactagatggttggg

SEQ ID NO: 58879 - DNA, 44 bp, Artificial Sequence
  primer
gtaaaacgacggccagtcctacagaaatgcataaagttaaatgg

SEQ ID NO: 58880 - DNA, 38 bp, Artificial Sequence
  primer
gtaaaacgacggccagtagaaatagcccaggtggtttg

SEQ ID NO: 58881 - DNA, 21 bp, Artificial Sequence
  primer
ccatcgacttgtgtgtgtttg

SEQ ID NO: 58882 - DNA, 38 bp, Artificial Sequence
  primer
gtaaaacgacggccagtgctctgaattcacaatccgtc

SEQ ID NO: 58883 - DNA, 38 bp, Artificial Sequence
  primer
gtaaaacgacggccagttagttgggaagcctagagggc

SEQ ID NO: 58884 - DNA, 21 bp, Artificial Sequence
  primer
ctgatcagcactcaggtggag

SEQ ID NO: 58885 - DNA, 38 bp, Artificial Sequence
  primer
gtaaaacgacggccagtccttgtctttggatgtggttg

SEQ ID NO: 58886 - DNA, 38 bp, Artificial Sequence
  primer
gtaaaacgacggccagtggctccgtcttagcttcactg

SEQ ID NO: 58887 - DNA, 37 bp, Artificial Sequence
  primer
gtaaaacgacggccagtcagaccttgcctgcctactg

SEQ ID NO: 58888 - DNA, 20 bp, Artificial Sequence
  primer
gtgccctcttctctcagcag

SEQ ID NO: 58889 - DNA, 40 bp, Artificial Sequence
  primer
gtaaaacgacggccagtcatagctattgtctgctcttggc

SEQ ID NO: 58890 - DNA, 38 bp, Artificial Sequence
  primer
gtaaaacgacggccagtgagagactgaatgcgttgctg

SEQ ID NO: 58891 - DNA, 37 bp, Artificial Sequence
  primer
gtaaaacgacggccagtacagatcaagcagacacggg

SEQ ID NO: 58892 - DNA, 38 bp, Artificial Sequence
  primer
gtaaaacgacggccagttggcctgagagaagggtttag

SEQ ID NO: 58893 - DNA, 18 bp, Artificial Sequence
  primer
catctgcctgcatcccag

SEQ ID NO: 58894 - DNA, 38 bp, Artificial Sequence
  primer
gtaaaacgacggccagtcatgagcattagctgtctcgg

SEQ ID NO: 58895 - DNA, 38 bp, Artificial Sequence
  primer
gtaaaacgacggccagtagggttcctcagaggttaggg

SEQ ID NO: 58896 - DNA, 18 bp, Artificial Sequence
  primer
tctgctccagcgaccatc

SEQ ID NO: 58897 - DNA, 38 bp, Artificial Sequence
  primer
gtaaaacgacggccagtgggagcagtgatatcgagcag

SEQ ID NO: 58898 - DNA, 21 bp, Artificial Sequence
  primer
actgaggcccatagaagttgg

SEQ ID NO: 58899 - DNA, 38 bp, Artificial Sequence
  primer
gtaaaacgacggccagtattggaatacctgtggatggg

SEQ ID NO: 58900 - DNA, 21 bp, Artificial Sequence
  primer
gggctcaggtggttgaagtag

SEQ ID NO: 58901 - DNA, 38 bp, Artificial Sequence
  primer
gtaaaacgacggccagtcagtgggaccaagtttcttgc

SEQ ID NO: 58902 - DNA, 21 bp, Artificial Sequence
  primer
tttgaaaggttgaaatgcagc

SEQ ID NO: 58903 - DNA, 27 bp, Artificial Sequence
  primer
gcagtggtgtaagaaaggataaattag

SEQ ID NO: 58904 - DNA, 46 bp, Artificial Sequence
  primer
gtaaaacgacggccagtcaataggtctatatagttgtgactccaga

SEQ ID NO: 58905 - DNA, 38 bp, Artificial Sequence
  primer
gtaaaacgacggccagtgcaagatatgatgggaattgg

SEQ ID NO: 58906 - DNA, 36 bp, Artificial Sequence
  primer
gtaaaacgacggccagtggccgggatctcagttatg

SEQ ID NO: 58907 - DNA, 38 bp, Artificial Sequence
  primer
gtaaaacgacggccagttccctgtcactccttgttgtg

SEQ ID NO: 58908 - DNA, 21 bp, Artificial Sequence
  primer
gcaaggcaggacttgtcaaag

SEQ ID NO: 58909 - DNA, 21 bp, Artificial Sequence
  primer
aataagcatcaaggaggctgg

SEQ ID NO: 58910 - DNA, 21 bp, Artificial Sequence
  primer
ctgcaatttacagctccaggg

SEQ ID NO: 58911 - DNA, 35 bp, Artificial Sequence
  primer
gtaaaacgacggccagtgtgcaggaaggccaggtc

SEQ ID NO: 58912 - DNA, 18 bp, Artificial Sequence
  primer
cgacggtaaacacggagc

SEQ ID NO: 58913 - DNA, 37 bp, Artificial Sequence
  primer
gtaaaacgacggccagtctccatctcctgacctcgtg

SEQ ID NO: 58914 - DNA, 38 bp, Artificial Sequence
  primer
gtaaaacgacggccagttgtgactggcattctcacatc

SEQ ID NO: 58915 - DNA, 38 bp, Artificial Sequence
  primer
gtaaaacgacggccagtgtgtgcgactgactgaatgtg

SEQ ID NO: 58916 - DNA, 38 bp, Artificial Sequence
  primer
gtaaaacgacggccagtttatttgagctgtgggcagtg

SEQ ID NO: 58917 - DNA, 21 bp, Artificial Sequence
  primer
ttcttcagcctcatgctgttc

SEQ ID NO: 58918 - DNA, 38 bp, Artificial Sequence
  primer
gtaaaacgacggccagttcctgctcccacaggatacac

SEQ ID NO: 58919 - DNA, 38 bp, Artificial Sequence
  primer
gtaaaacgacggccagtacactggcatcttctccatcc

SEQ ID NO: 58920 - DNA, 19 bp, Artificial Sequence
  primer
gagcccagtgattccatgc

SEQ ID NO: 58921 - DNA, 39 bp, Artificial Sequence
  primer
gtaaaacgacggccagttgcggaacatttcacataagac

SEQ ID NO: 58922 - DNA, 39 bp, Artificial Sequence
  primer
gtaaaacgacggccagttgctgaaccatcatatctcacg

SEQ ID NO: 58923 - DNA, 21 bp, Artificial Sequence
  primer
gcatatgggtggtgaacacag

SEQ ID NO: 58924 - DNA, 23 bp, Artificial Sequence
  primer
gcaaagtacatgacaattggacc

SEQ ID NO: 58925 - DNA, 21 bp, Artificial Sequence
  primer
atgccaggtttccttagcttc

SEQ ID NO: 58926 - DNA, 21 bp, Artificial Sequence
  primer
agctttaattggcagagagcc

SEQ ID NO: 58927 - DNA, 19 bp, Artificial Sequence
  primer
ttgcctgtcggatagggtc

SEQ ID NO: 58928 - DNA, 40 bp, Artificial Sequence
  primer
gtaaaacgacggccagtaaattgctgaaccataaagtccc

SEQ ID NO: 58929 - DNA, 38 bp, Artificial Sequence
  primer
gtaaaacgacggccagtaccctcctttgtcttcagcag

SEQ ID NO: 58930 - DNA, 25 bp, Artificial Sequence
  primer
ttcattggaaatcaagaattaggac

SEQ ID NO: 58931 - DNA, 40 bp, Artificial Sequence
  primer
gtaaaacgacggccagttttgaaatgaataactggcatcc

SEQ ID NO: 58932 - DNA, 21 bp, Artificial Sequence
  primer
acacgcctcgtttccttagtg

SEQ ID NO: 58933 - DNA, 21 bp, Artificial Sequence
  primer
aagctttaattggcggagagc

SEQ ID NO: 58934 - DNA, 40 bp, Artificial Sequence
  primer
gtaaaacgacggccagtcacacaagacatttcttcccaac

SEQ ID NO: 58935 - DNA, 38 bp, Artificial Sequence
  primer
gtaaaacgacggccagtattgctgaaccatcaagtccc

SEQ ID NO: 58936 - DNA, 38 bp, Artificial Sequence; identical to SEQ ID NO: 58929
  primer

SEQ ID NO: 58937 - DNA, 24 bp, Artificial Sequence
  primer
ttcaaattggtcataaacgttgtc

SEQ ID NO: 58938 - DNA, 35 bp, Artificial Sequence
  primer
gtaaaacgacggccagtccgcagccaataggaagg

SEQ ID NO: 58939 - DNA, 18 bp, Artificial Sequence
  primer
cctcttcgggagggtgtc

SEQ ID NO: 58940 - DNA, 35 bp, Artificial Sequence
  primer
gtaaaacgacggccagtcgtgagccactacgcctg

SEQ ID NO: 58941 - DNA, 38 bp, Artificial Sequence
  primer
gtaaaacgacggccagttccctttgcatctattctccc

SEQ ID NO: 58942 - DNA, 21 bp, Artificial Sequence
  primer
accagcaaagatgaggaaacc

SEQ ID NO: 58943 - DNA, 21 bp, Artificial Sequence
  primer
ggaagagaagcaagtgttggg

SEQ ID NO: 58944 - DNA, 21 bp, Artificial Sequence
  primer
catatggctcaactcaatccc

SEQ ID NO: 58945 - DNA, 38 bp, Artificial Sequence
  primer
gtaaaacgacggccagttctgaagtggatggtctgtgc

SEQ ID NO: 58946 - DNA, 21 bp, Artificial Sequence
  primer
tagctgagactacagggcgtc

SEQ ID NO: 58947 - DNA, 38 bp, Artificial Sequence
  primer
gtaaaacgacggccagttggatctgttgtctgaaagcg

SEQ ID NO: 58948 - DNA, 21 bp, Artificial Sequence
  primer
aaagaagggatgagcctgagc

SEQ ID NO: 58949 - DNA, 21 bp, Artificial Sequence
  primer
tttctacactctctcgtcgcc

SEQ ID NO: 58950 - DNA, 38 bp, Artificial Sequence
  primer
gtaaaacgacggccagtacctttgcagtgggaagtgag

SEQ ID NO: 58951 - DNA, 38 bp, Artificial Sequence
  primer
gtaaaacgacggccagtgtgtgcacagtctccttctgg

SEQ ID NO: 58952 - DNA, 21 bp, Artificial Sequence
  primer
ggtgggcttcacactcttctc

SEQ ID NO: 58953 - DNA, 38 bp, Artificial Sequence
  primer
gtaaaacgacggccagtatgttggaagtgaattgtggc

SEQ ID NO: 58954 - DNA, 38 bp, Artificial Sequence
  primer
gtaaaacgacggccagtcgctccctcctcacagactac

SEQ ID NO: 58955 - DNA, 37 bp, Artificial Sequence
  primer
gtaaaacgacggccagtgagtgtggccttcactgctc

SEQ ID NO: 58956 - DNA, 38 bp, Artificial Sequence
  primer
gtaaaacgacggccagtgacttcataatgcatcgtggc

SEQ ID NO: 58957 - DNA, 21 bp, Artificial Sequence
  primer
gtctgtgggaattgccttctc

SEQ ID NO: 58958 - DNA, 27 bp, Artificial Sequence
  primer
aaataatttataatttcactgcccagg

SEQ ID NO: 58959 - DNA, 38 bp, Artificial Sequence
  primer
gtaaaacgacggccagtcacagcagcttggaagttcac

SEQ ID NO: 58960 - DNA, 21 bp, Artificial Sequence
  primer
ggatccgtggaatcgtacttg

SEQ ID NO: 58961 - DNA, 38 bp, Artificial Sequence
  primer
gtaaaacgacggccagtggcaccagtttgcattgtaac

SEQ ID NO: 58962 - DNA, 21 bp, Artificial Sequence
  primer
gcagaagatgggttgtcttcc

SEQ ID NO: 58963 - DNA, 39 bp, Artificial Sequence
  primer
gtaaaacgacggccagtcaggctgctacttctcaattcg

SEQ ID NO: 58964 - DNA, 20 bp, Artificial Sequence
  primer
atgctcaggccatccagttc

SEQ ID NO: 58965 - DNA, 38 bp, Artificial Sequence
  primer
gtaaaacgacggccagtctgtttccacctgagcatttg

SEQ ID NO: 58966 - DNA, 22 bp, Artificial Sequence
  primer
tctttcctgtggaactctcagc

SEQ ID NO: 58967 - DNA, 38 bp, Artificial Sequence
  primer
gtaaaacgacggccagttactatgggcctattccctgg

SEQ ID NO: 58968 - DNA, 37 bp, Artificial Sequence
  primer
gtaaaacgacggccagtgcaggaggagaactgggaac

SEQ ID NO: 58969 - DNA, 36 bp, Artificial Sequence
  primer
gtaaaacgacggccagtggagacctctccctgaccc

SEQ ID NO: 58970 - DNA, 37 bp, Artificial Sequence
  primer
gtaaaacgacggccagtgatgggacagagggacacag

SEQ ID NO: 58971 - DNA, 21 bp, Artificial Sequence
  primer
gccgttaagtttcaggacagc

SEQ ID NO: 58972 - DNA, 21 bp, Artificial Sequence
  primer
gtggatcctcctgtcagcttc

SEQ ID NO: 58973 - DNA, 21 bp, Artificial Sequence
  primer
gcctgtagtggcctgtaggag

SEQ ID NO: 58974 - DNA, 38 bp, Artificial Sequence
  primer
gtaaaacgacggccagtaaggacttggtttctatggcg

SEQ ID NO: 58975 - DNA, 21 bp, Artificial Sequence
  primer
aaggcaagtgtgaaatgaccc

SEQ ID NO: 58976 - DNA, 38 bp, Artificial Sequence
  primer
gtaaaacgacggccagtgtccagaggcccagtattacc

SEQ ID NO: 58977 - DNA, 21 bp, Artificial Sequence
  primer
tactggctcactggtcaaccc

SEQ ID NO: 58978 - DNA, 38 bp, Artificial Sequence
  primer
gtaaaacgacggccagtagtatcccttggcatcacctg

SEQ ID NO: 58979 - DNA, 21 bp, Artificial Sequence
  primer
ccttctgccaaagaatgttcc

SEQ ID NO: 58980 - DNA, 21 bp, Artificial Sequence
  primer
tcgactatttctgccagagcc

SEQ ID NO: 58981 - DNA, 38 bp, Artificial Sequence
  primer
gtaaaacgacggccagtactcacaagatcgtgaggtgc

SEQ ID NO: 58982 - DNA, 38 bp, Artificial Sequence
  primer
gtaaaacgacggccagtcaacccttcctacttcatggc

SEQ ID NO: 58983 - DNA, 22 bp, Artificial Sequence
  primer
tcatgtgttgcaactgtgtgtc

SEQ ID NO: 58984 - DNA, 21 bp, Artificial Sequence
  primer
tttatggaggcatgtcaaagc

SEQ ID NO: 58985 - DNA, 21 bp, Artificial Sequence
  primer
cctgcttacagcagtgtggtg

SEQ ID NO: 58986 - DNA, 38 bp, Artificial Sequence
  primer
gtaaaacgacggccagtagtccctggacaaacctgaat

SEQ ID NO: 58987 - DNA, 41 bp, Artificial Sequence
  primer
gtaaaacgacggccagtcactagggaaactgttctgactgg

SEQ ID NO: 58988 - DNA, 42 bp, Artificial Sequence
  primer
gtaaaacgacggccagtcacatttggagaaagtatttcctga

SEQ ID NO: 58989 - DNA, 21 bp, Artificial Sequence
  primer
taaatgtttgggccataagcc

SEQ ID NO: 58990 - DNA, 22 bp, Artificial Sequence
  primer
tcattgttaatggatcaagccc

SEQ ID NO: 58991 - DNA, 24 bp, Artificial Sequence
  primer
tgggaagtacctactgacatttcc

SEQ ID NO: 58992 - DNA, 38 bp, Artificial Sequence
  primer
gtaaaacgacggccagtcatgactggctttgtgctgtc

SEQ ID NO: 58993 - DNA, 23 bp, Artificial Sequence
  primer
tttggagaaggaactagtcaccc

SEQ ID NO: 58994 - DNA, 38 bp, Artificial Sequence
  primer
gtaaaacgacggccagtttaatgtgtgccgaccatttc

SEQ ID NO: 58995 - DNA, 38 bp, Artificial Sequence
  primer
gtaaaacgacggccagtaagaagcattcacgttccctc

SEQ ID NO: 58996 - DNA, 39 bp, Artificial Sequence
  primer
gtaaaacgacggccagtgcaaagtatgatggcgagaaag

SEQ ID NO: 58997 - DNA, 27 bp, Artificial Sequence
  primer
tttcactgctaatgtttgtttaaattg

SEQ ID NO: 58998 - DNA, 41 bp, Artificial Sequence
  primer
gtaaaacgacggccagtacagagtgaaacatgagaagatgg

SEQ ID NO: 58999 - DNA, 40 bp, Artificial Sequence
  primer
gtaaaacgacggccagtaagagaagtgttcatcgatggtg

SEQ ID NO: 59000 - DNA, 39 bp, Artificial Sequence
  primer
gtaaaacgacggccagttgctgtgaccatgatgagaagt

SEQ ID NO: 59001 - DNA, 38 bp, Artificial Sequence
  primer
gtaaaacgacggccagttttctggacatcagcagttcc

SEQ ID NO: 59002 - DNA, 23 bp, Artificial Sequence
  primer
cacacaaggactgaaatctgatg

SEQ ID NO: 59003 - DNA, 23 bp, Artificial Sequence
  primer
gaccatgttagtactggtgggtc

SEQ ID NO: 59004 - DNA, 21 bp, Artificial Sequence
  primer
agtaaagggcgtctcccaaag

SEQ ID NO: 59005 - DNA, 38 bp, Artificial Sequence
  primer
gtaaaacgacggccagttgtattccttgcaggttgcac

SEQ ID NO: 59006 - DNA, 37 bp, Artificial Sequence
  primer
gtaaaacgacggccagtcagtgcttacccgtttctgg

SEQ ID NO: 59007 - DNA, 38 bp, Artificial Sequence
  primer
gtaaaacgacggccagtgctggatagggcttctttcag

SEQ ID NO: 59008 - DNA, 41 bp, Artificial Sequence
  primer
gtaaaacgacggccagtaagagttgaaatttgcttagcacc

SEQ ID NO: 59009 - DNA, 38 bp, Artificial Sequence
  primer
gtaaaacgacggccagttggaagccactattgctgaag

SEQ ID NO: 59010 - DNA, 38 bp, Artificial Sequence
  primer
gtaaaacgacggccagtttcatcaggcaagaaacttgg

SEQ ID NO: 59011 - DNA, 21 bp, Artificial Sequence
  primer
ttgcttgtgccagcataactc

SEQ ID NO: 59012 - DNA, 22 bp, Artificial Sequence
  primer
aagagccatctgctcatttctg

SEQ ID NO: 59013 - DNA, 37 bp, Artificial Sequence
  primer
gtaaaacgacggccagtcccaggtccaagaggttctc

SEQ ID NO: 59014 - DNA, 39 bp, Artificial Sequence
  primer
gtaaaacgacggccagtcggtaaatgttaatggaatggc

SEQ ID NO: 59015 - DNA, 40 bp, Artificial Sequence
  primer
gtaaaacgacggccagtaatttcagctctgcatttcacac

SEQ ID NO: 59016 - DNA, 21 bp, Artificial Sequence
  primer
gtggtgttctctgggtagtgg

SEQ ID NO: 59017 - DNA, 21 bp, Artificial Sequence
  primer
ctgtttcacatttattgcccg

SEQ ID NO: 59018 - DNA, 39 bp, Artificial Sequence
  primer
gtaaaacgacggccagtggtagagagactggactgtgcc

SEQ ID NO: 59019 - DNA, 21 bp, Artificial Sequence
  primer
gaggttgtcatttgctccagg

SEQ ID NO: 59020 - DNA, 37 bp, Artificial Sequence
  primer
gtaaaacgacggccagttgatagctgatggttgccag

SEQ ID NO: 59021 - DNA, 41 bp, Artificial Sequence
  primer
gtaaaacgacggccagtcaaatgagcattatccattctgtg

SEQ ID NO: 59022 - DNA, 20 bp, Artificial Sequence
  primer
gtggaatcccattgatgctg

SEQ ID NO: 59023 - DNA, 38 bp, Artificial Sequence
  primer
gtaaaacgacggccagttagagattggagaggccttgg

SEQ ID NO: 59024 - DNA, 39 bp, Artificial Sequence
  primer
gtaaaacgacggccagttctatcaaacctttgggctctg

SEQ ID NO: 59025 - DNA, 21 bp, Artificial Sequence
  primer
tggctcgatatccataccttc

SEQ ID NO: 59026 - DNA, 38 bp, Artificial Sequence
  primer
gtaaaacgacggccagtgacacaggaaagggaacatca

SEQ ID NO: 59027 - DNA, 21 bp, Artificial Sequence
  primer
acagacgggtcagaacattca

SEQ ID NO: 59028 - DNA, 20 bp, Artificial Sequence
  primer
ctattctgtgctgggccttg

SEQ ID NO: 59029 - DNA, 39 bp, Artificial Sequence
  primer
gtaaaacgacggccagtgttgtgtttgaaattggtttgc

SEQ ID NO: 59030 - DNA, 23 bp, Artificial Sequence
  primer
cagtgtggcatgcacctataatc

SEQ ID NO: 59031 - DNA, 21 bp, Artificial Sequence
  primer
acagctagctccagaggcaac

SEQ ID NO: 59032 - DNA, 21 bp, Artificial Sequence
  primer
ccacgttgttgaggacagttc

SEQ ID NO: 59033 - DNA, 22 bp, Artificial Sequence
  primer
tcttataagcattcagccatgc

SEQ ID NO: 59034 - DNA, 38 bp, Artificial Sequence
  primer
gtaaaacgacggccagttctgagggcaatgatatttgg

SEQ ID NO: 59035 - DNA, 21 bp, Artificial Sequence
  primer
tttagggacttgggctagagg

SEQ ID NO: 59036 - DNA, 21 bp, Artificial Sequence
  primer
gctatgatcttgccactgcac

SEQ ID NO: 59037 - DNA, 38 bp, Artificial Sequence
  primer
gtaaaacgacggccagtccattgcgaacccttagtttc

SEQ ID NO: 59038 - DNA, 38 bp, Artificial Sequence
  primer
gtaaaacgacggccagtccaatgtgtaaccacctggag

SEQ ID NO: 59039 - DNA, 37 bp, Artificial Sequence
  primer
gtaaaacgacggccagtggtacagactggaggccagg

SEQ ID NO: 59040 - DNA, 38 bp, Artificial Sequence
  primer
gtaaaacgacggccagtaaacactgaaagggacttggg

SEQ ID NO: 59041 - DNA, 38 bp, Artificial Sequence
  primer
gtaaaacgacggccagttaagttgcctgttagaccggg

SEQ ID NO: 59042 - DNA, 21 bp, Artificial Sequence
  primer
tttggtttcttccaatgagcc

SEQ ID NO: 59043 - DNA, 38 bp, Artificial Sequence
  primer
gtaaaacgacggccagtttactgagtcctttccgctcc

SEQ ID NO: 59044 - DNA, 21 bp, Artificial Sequence
  primer
atcttgtggatgcactggttg

SEQ ID NO: 59045 - DNA, 38 bp, Artificial Sequence
  primer
gtaaaacgacggccagtaattctctgcagcacccaaag

SEQ ID NO: 59046 - DNA, 21 bp, Artificial Sequence
  primer
tgagactattctgcctcaggg

SEQ ID NO: 59047 - DNA, 38 bp, Artificial Sequence
  primer
gtaaaacgacggccagtcataggctggaaactgcagag

SEQ ID NO: 59048 - DNA, 38 bp, Artificial Sequence
  primer
gtaaaacgacggccagttttgatggaacataccgttgg

SEQ ID NO: 59049 - DNA, 39 bp, Artificial Sequence
  primer
gtaaaacgacggccagtgcctgtaaactcaaccttctcc

SEQ ID NO: 59050 - DNA, 37 bp, Artificial Sequence
  primer
gtaaaacgacggccagtcgccgaggagagcttgtaac

SEQ ID NO: 59051 - DNA, 38 bp, Artificial Sequence
  primer
gtaaaacgacggccagtccaacatccactgactcttgc

SEQ ID NO: 59052 - DNA, 21 bp, Artificial Sequence
  primer
gaaagtgggctcctctctgtg

SEQ ID NO: 59053 - DNA, 21 bp, Artificial Sequence
  primer
agggagcttctccactgtctg

SEQ ID NO: 59054 - DNA, 38 bp, Artificial Sequence
  primer
gtaaaacgacggccagttcttgaatcatctttgccagc

SEQ ID NO: 59055 - DNA, 38 bp, Artificial Sequence
  primer
gtaaaacgacggccagtgatctcaggccactccttctg

SEQ ID NO: 59056 - DNA, 21 bp, Artificial Sequence
  primer
ctctgtctgctgtccagttgc

SEQ ID NO: 59057 - DNA, 21 bp, Artificial Sequence
  primer
ctgatcaagggactttcaggg

SEQ ID NO: 59058 - DNA, 20 bp, Artificial Sequence
  primer
ctgtaacaggctgggcattc

SEQ ID NO: 59059 - DNA, 38 bp, Artificial Sequence
  primer
gtaaaacgacggccagtattacaggacccaccaccaag

SEQ ID NO: 59060 - DNA, 21 bp, Artificial Sequence
  primer
gctaggaagtggtggagttgg

SEQ ID NO: 59061 - DNA, 21 bp, Artificial Sequence
  primer
cggcttagtaaattgtgcagc

SEQ ID NO: 59062 - DNA, 38 bp, Artificial Sequence
  primer
gtaaaacgacggccagtgatgccctacatctgctctcc

SEQ ID NO: 59063 - DNA, 21 bp, Artificial Sequence
  primer
cggtctcaagcactacctacg

SEQ ID NO: 59064 - DNA, 21 bp, Artificial Sequence
  primer
acctggtgcagcaactctttc

SEQ ID NO: 59065 - DNA, 21 bp, Artificial Sequence
  primer
aacccaaatctccaggaggac

SEQ ID NO: 59066 - DNA, 38 bp, Artificial Sequence
  primer
gtaaaacgacggccagtggaattcggaagtctttgctg

SEQ ID NO: 59067 - DNA, 20 bp, Artificial Sequence
  primer
atctgtcctggaaagcctgg

SEQ ID NO: 59068 - DNA, 21 bp, Artificial Sequence
  primer
agggactgagcttgaccaaag

SEQ ID NO: 59069 - DNA, 38 bp, Artificial Sequence
  primer
gtaaaacgacggccagttggagggtgggttctttattg

SEQ ID NO: 59070 - DNA, 20 bp, Artificial Sequence
  primer
ctgcaggagaggaaagccag

SEQ ID NO: 59071 - DNA, 38 bp, Artificial Sequence
  primer
gtaaaacgacggccagttcctcaaggatcaagaggacc

SEQ ID NO: 59072 - DNA, 38 bp, Artificial Sequence
  primer
gtaaaacgacggccagtgttccatgggcttcttagacc

SEQ ID NO: 59073 - DNA, 38 bp, Artificial Sequence
  primer
gtaaaacgacggccagtgacagtcctagggtggattgg

SEQ ID NO: 59074 - DNA, 21 bp, Artificial Sequence
  primer
gaactgccaggtgaagatgtg

SEQ ID NO: 59075 - DNA, 37 bp, Artificial Sequence
  primer
gtaaaacgacggccagtagccctaagaccttccctcc

SEQ ID NO: 59076 - DNA, 20 bp, Artificial Sequence
  primer
accagagcctggtgaagagg

SEQ ID NO: 59077 - DNA, 38 bp, Artificial Sequence
  primer
gtaaaacgacggccagtgtgaatttagcaggtgagccc

SEQ ID NO: 59078 - DNA, 38 bp, Artificial Sequence
  primer
gtaaaacgacggccagttgggttccctttaatgtgtcc

SEQ ID NO: 59079 - DNA, 21 bp, Artificial Sequence
  primer
atggttgtgaatgatctgccc

SEQ ID NO: 59080 - DNA, 38 bp, Artificial Sequence
  primer
gtaaaacgacggccagtagtccttggacctattgtggg

SEQ ID NO: 59081 - DNA, 37 bp, Artificial Sequence
  primer
gtaaaacgacggccagtctgcgcttcaccttcatttc

SEQ ID NO: 59082 - DNA, 26 bp, Artificial Sequence
  primer
ttgtgtttgtgagtgactttctcttt

SEQ ID NO: 59083 - DNA, 24 bp, Artificial Sequence
  primer
aactttgcttcggatgtgttaaag

SEQ ID NO: 59084 - DNA, 43 bp, Artificial Sequence
  primer
gtaaaacgacggccagtaaagttgatgaccgatacttcatttc

SEQ ID NO: 59085 - DNA, 38 bp, Artificial Sequence
  primer
gtaaaacgacggccagtaatgagtcagccagatttccg

SEQ ID NO: 59086 - DNA, 38 bp, Artificial Sequence
  primer
gtaaaacgacggccagtattcaaccatctccagttccc

SEQ ID NO: 59087 - DNA, 21 bp, Artificial Sequence
  primer
tttcaccgtatagccaggatg

SEQ ID NO: 59088 - DNA, 21 bp, Artificial Sequence
  primer
aggaagagatgtgaagcaggg

SEQ ID NO: 59089 - DNA, 41 bp, Artificial Sequence
  primer
gtaaaacgacggccagttgaaataggtagccagaccaacac

SEQ ID NO: 59090 - DNA, 25 bp, Artificial Sequence
  primer
cattctgtatcaaatgtggctttag

SEQ ID NO: 59091 - DNA, 21 bp, Artificial Sequence
  primer
ctgggaattaagctgagcagg

SEQ ID NO: 59092 - DNA, 38 bp, Artificial Sequence
  primer
gtaaaacgacggccagtccctcccaaatatgtacaacg

SEQ ID NO: 59093 - DNA, 38 bp, Artificial Sequence
  primer
gtaaaacgacggccagtcaaagggaatgacatttggag

SEQ ID NO: 59094 - DNA, 43 bp, Artificial Sequence
  primer
gtaaaacgacggccagttgtgcctagctttcagtaatatgttc

SEQ ID NO: 59095 - DNA, 21 bp, Artificial Sequence
  primer
ataaactggccttagtcccgc

SEQ ID NO: 59096 - DNA, 20 bp, Artificial Sequence
  primer
aactgagcgacctcagagcc

SEQ ID NO: 59097 - DNA, 22 bp, Artificial Sequence
  primer
ttaccaaagcatgtttgcattc

SEQ ID NO: 59098 - DNA, 23 bp, Artificial Sequence
  primer
gaagaagccctactgtgttcttg

SEQ ID NO: 59099 - DNA, 21 bp, Artificial Sequence
  primer
cttggcttgaaggtctgtgtg

SEQ ID NO: 59100 - DNA, 27 bp, Artificial Sequence
  primer
aaacagataaacgaatgtgttgttaaa

SEQ ID NO: 59101 - DNA, 38 bp, Artificial Sequence
  primer
gtaaaacgacggccagtactatggcctgacaacttggg

SEQ ID NO: 59102 - DNA, 21 bp, Artificial Sequence
  primer
caaatggccatgtttctttgt

SEQ ID NO: 59103 - DNA, 24 bp, Artificial Sequence
  primer
tttgctttctttgctactgattcc

SEQ ID NO: 59104 - DNA, 41 bp, Artificial Sequence
  primer
gtaaaacgacggccagtttcgttagcattaacactttcagg

SEQ ID NO: 59105 - DNA, 21 bp, Artificial Sequence
  primer
cattacaggcatgagctgtgg

SEQ ID NO: 59106 - DNA, 42 bp, Artificial Sequence
  primer
gtaaaacgacggccagttttctaagtatttaagtggatcggg

SEQ ID NO: 59107 - DNA, 38 bp, Artificial Sequence
  primer
gtaaaacgacggccagttgggtgacagagtttgaatgg

SEQ ID NO: 59108 - DNA, 21 bp, Artificial Sequence
  primer
gggcatctttctgctttatga

SEQ ID NO: 59109 - DNA, 21 bp, Artificial Sequence
  primer
tcaacatttattgctcccagg

SEQ ID NO: 59110 - DNA, 38 bp, Artificial Sequence
  primer
gtaaaacgacggccagtcaaggcagttcatcctcagtg

SEQ ID NO: 59111 - DNA, 43 bp, Artificial Sequence
  primer
gtaaaacgacggccagttccattcgaagaagagctttatattg

SEQ ID NO: 59112 - DNA, 40 bp, Artificial Sequence
  primer
gtaaaacgacggccagttgaaattgctaagggtactgcac

SEQ ID NO: 59113 - DNA, 24 bp, Artificial Sequence
  primer
tccactgatcaagatgaaagtttg

SEQ ID NO: 59114 - DNA, 38 bp, Artificial Sequence
  primer
gtaaaacgacggccagtactccaagatcaaatcacccg

SEQ ID NO: 59115 - DNA, 42 bp, Artificial Sequence
  primer
gtaaaacgacggccagttcgaatcaagcactaataccaagag

SEQ ID NO: 59116 - DNA, 23 bp, Artificial Sequence
  primer
tttctggcctcatttcagttaat

SEQ ID NO: 59117 - DNA, 41 bp, Artificial Sequence
  primer
gtaaaacgacggccagtcctgaggtgagtcattcagtaatc

SEQ ID NO: 59118 - DNA, 40 bp, Artificial Sequence
  primer
gtaaaacgacggccagttggctctgagttgtaagagcaat

SEQ ID NO: 59119 - DNA, 35 bp, Artificial Sequence
  primer
gtaaaacgacggccagtatgcatcactgcactggg

SEQ ID NO: 59120 - DNA, 42 bp, Artificial Sequence
  primer
gtaaaacgacggccagttgatttcaaaggctaaactcctaac

SEQ ID NO: 59121 - DNA, 23 bp, Artificial Sequence
  primer
tgcagatttcatgtgcctagaag

SEQ ID NO: 59122 - DNA, 19 bp, Artificial Sequence
  primer
gcggttaacccaagcactg

SEQ ID NO: 59123 - DNA, 38 bp, Artificial Sequence
  primer
gtaaaacgacggccagtttcgggtgtgagacgtttatg

SEQ ID NO: 59124 - DNA, 38 bp, Artificial Sequence
  primer
gtaaaacgacggccagtaggatggtagtgctttggagg

SEQ ID NO: 59125 - DNA, 39 bp, Artificial Sequence
  primer
gtaaaacgacggccagttgctcaatggtgtagatcttgg

SEQ ID NO: 59126 - DNA, 38 bp, Artificial Sequence
  primer
gtaaaacgacggccagtcctttagttctgcccacttcg

SEQ ID NO: 59127 - DNA, 21 bp, Artificial Sequence
  primer
caagcagctgtaatccactcg

SEQ ID NO: 59128 - DNA, 38 bp, Artificial Sequence
  primer
gtaaaacgacggccagttcacttccacctgctcttctg

SEQ ID NO: 59129 - DNA, 37 bp, Artificial Sequence
  primer
gtaaaacgacggccagtgccttcctgaagatgatccc

SEQ ID NO: 59130 - DNA, 38 bp, Artificial Sequence
  primer
gtaaaacgacggccagtctaagccctgtgagaaccacc

SEQ ID NO: 59131 - DNA, 38 bp, Artificial Sequence
  primer
gtaaaacgacggccagttagcccgatttgtttcatgtg

SEQ ID NO: 59132 - DNA, 38 bp, Artificial Sequence
  primer
gtaaaacgacggccagtcttggtttaagccaggtaggg

SEQ ID NO: 59133 - DNA, 38 bp, Artificial Sequence
  primer
gtaaaacgacggccagttatctaagtccgggtgttggg

SEQ ID NO: 59134 - DNA, 21 bp, Artificial Sequence
  primer
accatacagctgcagaggaag

SEQ ID NO: 59135 - DNA, 20 bp, Artificial Sequence
  primer
agaagctcatgcacaccacc

SEQ ID NO: 59136 - DNA, 20 bp, Artificial Sequence
  primer
ttcagttcggcaaaggtgtc

SEQ ID NO: 59137 - DNA, 21 bp, Artificial Sequence
  primer
ttgaaacttggcacggtattc

SEQ ID NO: 59138 - DNA, 21 bp, Artificial Sequence
  primer
ttacttcctcaatgggttggg

SEQ ID NO: 59139 - DNA, 38 bp, Artificial Sequence
  primer
gtaaaacgacggccagtacagatgaaggccaggcttag

SEQ ID NO: 59140 - DNA, 21 bp, Artificial Sequence
  primer
caaatgtggcatctttgtgtg

SEQ ID NO: 59141 - DNA, 41 bp, Artificial Sequence
  primer
gtaaaacgacggccagtgcattgaaagtctatgcatgtagg

SEQ ID NO: 59142 - DNA, 21 bp, Artificial Sequence
  primer
gttctggaacttgcacaaacg

SEQ ID NO: 59143 - DNA, 21 bp, Artificial Sequence
  primer
ggaagaacagcaatcaacacc

SEQ ID NO: 59144 - DNA, 24 bp, Artificial Sequence
  primer
tgatgttaatgtgagttggttgga

SEQ ID NO: 59145 - DNA, 27 bp, Artificial Sequence
  primer
ttgatgtttgatatagagtgaaagggt

SEQ ID NO: 59146 - DNA, 22 bp, Artificial Sequence
  primer
tgaaatgagattccttgtcgtg

SEQ ID NO: 59147 - DNA, 27 bp, Artificial Sequence
  primer
tgatttcattagatgaagaaactctca

SEQ ID NO: 59148 - DNA, 21 bp, Artificial Sequence
  primer
caagtcactgcctcatggaag

SEQ ID NO: 59149 - DNA, 21 bp, Artificial Sequence
  primer
gaggcgagacattctgattcc

SEQ ID NO: 59150 - DNA, 40 bp, Artificial Sequence
  primer
gtaaaacgacggccagtcgttccttccaagatttatctcc

SEQ ID NO: 59151 - DNA, 44 bp, Artificial Sequence
  primer
gtaaaacgacggccagtaattgtttcattagataaatgcttacc

SEQ ID NO: 59152 - DNA, 23 bp, Artificial Sequence
  primer
ttgtgcctattaaggcaaagatg

SEQ ID NO: 59153 - DNA, 38 bp, Artificial Sequence
  primer
gtaaaacgacggccagtcacagctgttctttgagtggg

SEQ ID NO: 59154 - DNA, 22 bp, Artificial Sequence
  primer
tttcacagtttcagtttcaccc

SEQ ID NO: 59155 - DNA, 23 bp, Artificial Sequence
  primer
tttcaatagcttcctttccacac

SEQ ID NO: 59156 - DNA, 35 bp, Artificial Sequence
  primer
gtaaaacgacggccagtaatgcttggccaggatgg

SEQ ID NO: 59157 - DNA, 38 bp, Artificial Sequence
  primer
gtaaaacgacggccagttgcaggcttattatgcatgtg

SEQ ID NO: 59158 - DNA, 38 bp, Artificial Sequence
  primer
gtaaaacgacggccagttagccatattctccagctccc

SEQ ID NO: 59159 - DNA, 22 bp, Artificial Sequence
  primer
gaggccaaccattatagcaaag

SEQ ID NO: 59160 - DNA, 25 bp, Artificial Sequence
  primer
gaatcagatggaagtaatgcaaatg

SEQ ID NO: 59161 - DNA, 21 bp, Artificial Sequence
  primer
cctatgcctatgctcagggtc

SEQ ID NO: 59162 - DNA, 39 bp, Artificial Sequence
  primer
gtaaaacgacggccagtttaacgaaagctcttcctgctg

SEQ ID NO: 59163 - DNA, 38 bp, Artificial Sequence
  primer
gtaaaacgacggccagtcacacagcttgggtggtagtc

SEQ ID NO: 59164 - DNA, 38 bp, Artificial Sequence
  primer
gtaaaacgacggccagtgggatacggaggtgtagatgg

SEQ ID NO: 59165 - DNA, 43 bp, Artificial Sequence
  primer
gtaaaacgacggccagtaaagtggtagacaacgtaagatacgg

SEQ ID NO: 59166 - DNA, 37 bp, Artificial Sequence
  primer
gtaaaacgacggccagtacttggcagcttggaatgag

SEQ ID NO: 59167 - DNA, 36 bp, Artificial Sequence
  primer
gtaaaacgacggccagttttgcatccctctccttgg

SEQ ID NO: 59168 - DNA, 38 bp, Artificial Sequence
  primer
gtaaaacgacggccagtaccaactgggctcaccttatg

SEQ ID NO: 59169 - DNA, 38 bp, Artificial Sequence
  primer
gtaaaacgacggccagtaatgggagattgggtgtcatc

SEQ ID NO: 59170 - DNA, 37 bp, Artificial Sequence
  primer
gtaaaacgacggccagttgccagccctcttcctttag

SEQ ID NO: 59171 - DNA, 21 bp, Artificial Sequence
  primer
tggactagggaccacatcttg

SEQ ID NO: 59172 - DNA, 21 bp, Artificial Sequence
  primer
ctgcatctctcccagttaggg

SEQ ID NO: 59173 - DNA, 22 bp, Artificial Sequence
  primer
caagtagcatttgtaaaggcgg

SEQ ID NO: 59174 - DNA, 18 bp, Artificial Sequence
  primer
aggcctcgggtgttcttg

SEQ ID NO: 59175 - DNA, 39 bp, Artificial Sequence
  primer
gtaaaacgacggccagtaaagaatcgctttaggtttgcc

SEQ ID NO: 59176 - DNA, 39 bp, Artificial Sequence
  primer
gtaaaacgacggccagttttatttcttgttgatgccagc

SEQ ID NO: 59177 - DNA, 38 bp, Artificial Sequence
  primer
gtaaaacgacggccagtcatttggctgcatgtgacttc

SEQ ID NO: 59178 - DNA, 38 bp, Artificial Sequence
  primer
gtaaaacgacggccagttgattggaaaggaagcggtag

SEQ ID NO: 59179 - DNA, 38 bp, Artificial Sequence
  primer
gtaaaacgacggccagtgaaatagagagtgcaggagcg

SEQ ID NO: 59180 - DNA, 38 bp, Artificial Sequence
  primer
gtaaaacgacggccagttgcagggactggagtgatttc

SEQ ID NO: 59181 - DNA, 38 bp, Artificial Sequence
  primer
gtaaaacgacggccagtaggaagccagtaggtttgcac

SEQ ID NO: 59182 - DNA, 21 bp, Artificial Sequence
  primer
tgttgaggacagtgaaggcac

SEQ ID NO: 59183 - DNA, 21 bp, Artificial Sequence
  primer
agagtgccttctccctctgtg

SEQ ID NO: 59184 - DNA, 21 bp, Artificial Sequence
  primer
agattgaggagagcgaagacg

SEQ ID NO: 59185 - DNA, 39 bp, Artificial Sequence
  primer
gtaaaacgacggccagtccagcacctcagagtgtatcag

SEQ ID NO: 59186 - DNA, 19 bp, Artificial Sequence
  primer
caggacctgccaagtctcc

SEQ ID NO: 59187 - DNA, 38 bp, Artificial Sequence
  primer
gtaaaacgacggccagtctcccaagtccctgtctgatg

SEQ ID NO: 59188 - DNA, 38 bp, Artificial Sequence
  primer
gtaaaacgacggccagtgtgtttctgtaagcgatgccc

SEQ ID NO: 59189 - DNA, 21 bp, Artificial Sequence
  primer
tcccgtgtctccgataatttg

SEQ ID NO: 59190 - DNA, 21 bp, Artificial Sequence
  primer
ttgttgccagtttctgagcac

SEQ ID NO: 59191 - DNA, 20 bp, Artificial Sequence
  primer
aggcattgctgtccttcttg

SEQ ID NO: 59192 - DNA, 21 bp, Artificial Sequence
  primer
cacttggaagcatgacctcag

SEQ ID NO: 59193 - DNA, 21 bp, Artificial Sequence
  primer
atttgctgtcttgctgtggag

SEQ ID NO: 59194 - DNA, 23 bp, Artificial Sequence
  primer
tcaagaaatcctcttcacttccc

SEQ ID NO: 59195 - DNA, 21 bp, Artificial Sequence
  primer
gccctctaaacacacaaagcc

SEQ ID NO: 59196 - DNA, 38 bp, Artificial Sequence
  primer
gtaaaacgacggccagttgccaagtagagtgctgtgtt

SEQ ID NO: 59197 - DNA, 38 bp, Artificial Sequence
  primer
gtaaaacgacggccagttttggaattccctatcgtgtg

SEQ ID NO: 59198 - DNA, 37 bp, Artificial Sequence
  primer
gtaaaacgacggccagtcgcttaaacccatgaggcag

SEQ ID NO: 59199 - DNA, 39 bp, Artificial Sequence
  primer
gtaaaacgacggccagtggatacagtacatgcttgctgc

SEQ ID NO: 59200 - DNA, 37 bp, Artificial Sequence
  primer
gtaaaacgacggccagtagttaggccaggtggctttg

SEQ ID NO: 59201 - DNA, 21 bp, Artificial Sequence
  primer
ggattgctctctgaaattggg

SEQ ID NO: 59202 - DNA, 38 bp, Artificial Sequence
  primer
gtaaaacgacggccagtcattaccaacttcaggctccc

SEQ ID NO: 59203 - DNA, 38 bp, Artificial Sequence
  primer
gtaaaacgacggccagttcatcactgggtgacctatgg

SEQ ID NO: 59204 - DNA, 21 bp, Artificial Sequence
  primer
tcaccctgcgtcagattacag

SEQ ID NO: 59205 - DNA, 38 bp, Artificial Sequence
  primer
gtaaaacgacggccagtcattccgtggaggctagaaag

SEQ ID NO: 59206 - DNA, 21 bp, Artificial Sequence
  primer
ccgctgctataaggagtcgag

SEQ ID NO: 59207 - DNA, 38 bp, Artificial Sequence
  primer
gtaaaacgacggccagtaggctattcctgaccctcagc

SEQ ID NO: 59208 - DNA, 38 bp, Artificial Sequence
  primer
gtaaaacgacggccagtttccttactgcctccagcttc

SEQ ID NO: 59209 - DNA, 38 bp, Artificial Sequence
  primer
gtaaaacgacggccagtcagcagtcaccttgtgtcctg

SEQ ID NO: 59210 - DNA, 37 bp, Artificial Sequence
  primer
gtaaaacgacggccagtatgtgagagaacaggtgccc

SEQ ID NO: 59211 - DNA, 38 bp, Artificial Sequence
  primer
gtaaaacgacggccagtctctggcagaagcacctgtag

SEQ ID NO: 59212 - DNA, 38 bp, Artificial Sequence
  primer
gtaaaacgacggccagtatgcagaggcttagtcttggg

SEQ ID NO: 59213 - DNA, 38 bp, Artificial Sequence
  primer
gtaaaacgacggccagtgtgcaggtagcagaggaatgg

SEQ ID NO: 59214 - DNA, 38 bp, Artificial Sequence
  primer
gtaaaacgacggccagtcttgtcccatatcctgggttg

SEQ ID NO: 59215 - DNA, 38 bp, Artificial Sequence
  primer
gtaaaacgacggccagttgggagatgcaaagaacacac

SEQ ID NO: 59216 - DNA, 38 bp, Artificial Sequence
  primer
gtaaaacgacggccagtacctggtgagtaaggccagtc

SEQ ID NO: 59217 - DNA, 21 bp, Artificial Sequence
  primer
acgacctggcagaactttgac

SEQ ID NO: 59218 - DNA, 43 bp, Artificial Sequence
  primer
gtaaaacgacggccagttttcattacgtttattgacaggacat

SEQ ID NO: 59219 - DNA, 38 bp, Artificial Sequence
  primer
gtaaaacgacggccagttattggagaagacatgcccag

SEQ ID NO: 59220 - DNA, 38 bp, Artificial Sequence
  primer
gtaaaacgacggccagttgtcagggagtggtatgaacc

SEQ ID NO: 59221 - DNA, 41 bp, Artificial Sequence
  primer
gtaaaacgacggccagttttgttctgcaaatttagatgctg

SEQ ID NO: 59222 - DNA, 20 bp, Artificial Sequence
  primer
aagccacactgctccttcag

SEQ ID NO: 59223 - DNA, 21 bp, Artificial Sequence
  primer
tcaagatggcggtacacactc

SEQ ID NO: 59224 - DNA, 38 bp, Artificial Sequence
  primer
gtaaaacgacggccagtttaagggctgtgctttcaacc

SEQ ID NO: 59225 - DNA, 21 bp, Artificial Sequence
  primer
caccaagcactgggagcttac

SEQ ID NO: 59226 - DNA, 21 bp, Artificial Sequence
  primer
catgtccaacaagtggattcg

SEQ ID NO: 59227 - DNA, 38 bp, Artificial Sequence
  primer
gtaaaacgacggccagttcagacgggagatcaaggaag

SEQ ID NO: 59228 - DNA, 38 bp, Artificial Sequence
  primer
gtaaaacgacggccagtagcaagagacagagctgagcc

SEQ ID NO: 59229 - DNA, 20 bp, Artificial Sequence
  primer
tccgacagatcttcctggag

SEQ ID NO: 59230 - DNA, 21 bp, Artificial Sequence
  primer
agccattgtacttcagctggg

SEQ ID NO: 59231 - DNA, 38 bp, Artificial Sequence
  primer
gtaaaacgacggccagttgacctgatgttgctctgtcc

SEQ ID NO: 59232 - DNA, 38 bp, Artificial Sequence
  primer
gtaaaacgacggccagtataactggaagctggacgagg

SEQ ID NO: 59233 - DNA, 21 bp, Artificial Sequence
  primer
ctgagttccaccagatcgagg

SEQ ID NO: 59234 - DNA, 38 bp, Artificial Sequence
  primer
gtaaaacgacggccagtaagctcaccacctagacccag

SEQ ID NO: 59235 - DNA, 37 bp, Artificial Sequence
  primer
gtaaaacgacggccagtagatgggagccatggaaatc

SEQ ID NO: 59236 - DNA, 21 bp, Artificial Sequence
  primer
acaagaagaggcgggtcctac

SEQ ID NO: 59237 - DNA, 37 bp, Artificial Sequence
  primer
gtaaaacgacggccagtgatccacacacattggcctc

SEQ ID NO: 59238 - DNA, 19 bp, Artificial Sequence
  primer
gggtgattgaggttgccag

SEQ ID NO: 59239 - DNA, 38 bp, Artificial Sequence
  primer
gtaaaacgacggccagttgctgtaactcaacccattgc

SEQ ID NO: 59240 - DNA, 38 bp, Artificial Sequence
  primer
gtaaaacgacggccagtagtggcaagaatgcagctacc

SEQ ID NO: 59241 - DNA, 22 bp, Artificial Sequence
  primer
tgctgtttcagggaagtatctg

SEQ ID NO: 59242 - DNA, 19 bp, Artificial Sequence
  primer
cacacctggcgttctcttc

SEQ ID NO: 59243 - DNA, 37 bp, Artificial Sequence
  primer
gtaaaacgacggccagtatccctggccaaggtgttag

SEQ ID NO: 59244 - DNA, 21 bp, Artificial Sequence
  primer
actgcgtaaatgcagaacacc

SEQ ID NO: 59245 - DNA, 21 bp, Artificial Sequence
  primer
gatcaatccaaacagtgctgg

SEQ ID NO: 59246 - DNA, 40 bp, Artificial Sequence
  primer
gtaaaacgacggccagtggctctaatgacaatttcttggg

SEQ ID NO: 59247 - DNA, 21 bp, Artificial Sequence
  primer
tgcgatccttcagagtctgtt

SEQ ID NO: 59248 - DNA, 25 bp, Artificial Sequence
  primer
ggcattagcagtacgttagtaaggg

SEQ ID NO: 59249 - DNA, 23 bp, Artificial Sequence
  primer
caccaggcctattcttaacttgc

SEQ ID NO: 59250 - DNA, 38 bp, Artificial Sequence
  primer
gtaaaacgacggccagtgtctttctgccatggtctttg

SEQ ID NO: 59251 - DNA, 21 bp, Artificial Sequence
  primer
tgcatttgtgaggttgaatcc

SEQ ID NO: 59252 - DNA, 22 bp, Artificial Sequence
  primer
catgatttcatccttcctgctc

SEQ ID NO: 59253 - DNA, 21 bp, Artificial Sequence
  primer
ttacgagtgacttggctggag

SEQ ID NO: 59254 - DNA, 39 bp, Artificial Sequence
  primer
gtaaaacgacggccagttgggttacacttgtttaccacg

SEQ ID NO: 59255 - DNA, 22 bp, Artificial Sequence
  primer
catccctctatagttcccaccc

SEQ ID NO: 59256 - DNA, 38 bp, Artificial Sequence
  primer
gtaaaacgacggccagtttgctgctaaatgattgctgg

SEQ ID NO: 59257 - DNA, 21 bp, Artificial Sequence
  primer
tttgccagagatgcaaagatg

SEQ ID NO: 59258 - DNA, 21 bp, Artificial Sequence
  primer
agcaacaccaagtgcaaagag

SEQ ID NO: 59259 - DNA, 36 bp, Artificial Sequence
  primer
gtaaaacgacggccagtggtctcctgcgatgtttgg

SEQ ID NO: 59260 - DNA, 18 bp, Artificial Sequence
  primer
aaggccggaacctttcag

SEQ ID NO: 59261 - DNA, 23 bp, Artificial Sequence
  primer
ccctagtcagctcttcatagacc

SEQ ID NO: 59262 - DNA, 38 bp, Artificial Sequence
  primer
gtaaaacgacggccagttgttatgtattgtggcccagg

SEQ ID NO: 59263 - DNA, 21 bp, Artificial Sequence
  primer
caccaagtgcaaagaggaagg

SEQ ID NO: 59264 - DNA, 36 bp, Artificial Sequence; identical to SEQ ID NO: 59259
  primer

SEQ ID NO: 59265 - DNA, 39 bp, Artificial Sequence
  primer
gtaaaacgacggccagttccttgacacctcagcctctac

SEQ ID NO: 59266 - DNA, 38 bp, Artificial Sequence
  primer
gtaaaacgacggccagtttccagggcttggtttatttg

SEQ ID NO: 59267 - DNA, 21 bp, Artificial Sequence
  primer
atgaatcctgcagttcagacc

SEQ ID NO: 59268 - DNA, 21 bp, Artificial Sequence
  primer
taccagctgtcattctgggtg

SEQ ID NO: 59269 - DNA, 19 bp, Artificial Sequence
  primer
actggccacatgaggaagg

SEQ ID NO: 59270 - DNA, 21 bp, Artificial Sequence
  primer
ggcatagcagagagtcctcag

SEQ ID NO: 59271 - DNA, 21 bp, Artificial Sequence
  primer
gacacctcaccctccttaggc

SEQ ID NO: 59272 - DNA, 36 bp, Artificial Sequence
  primer
gtaaaacgacggccagtgtgtgtgtccagcctggtg

SEQ ID NO: 59273 - DNA, 35 bp, Artificial Sequence
  primer
gtaaaacgacggccagtccagagctcctcctggtg

SEQ ID NO: 59274 - DNA, 38 bp, Artificial Sequence
  primer
gtaaaacgacggccagtcagatggcttcaaggagcaag

SEQ ID NO: 59275 - DNA, 20 bp, Artificial Sequence
  primer
ccatgagcctaacctacgcc

SEQ ID NO: 59276 - DNA, 38 bp, Artificial Sequence
  primer
gtaaaacgacggccagtcagctcagggcagtggtagag

SEQ ID NO: 59277 - DNA, 20 bp, Artificial Sequence
  primer
cctgaggtgctctctgggac

SEQ ID NO: 59278 - DNA, 38 bp, Artificial Sequence
  primer
gtaaaacgacggccagttttcctatcaggagacctggg

SEQ ID NO: 59279 - DNA, 21 bp, Artificial Sequence
  primer
ccacacttgtcattactgccc

SEQ ID NO: 59280 - DNA, 37 bp, Artificial Sequence
  primer
gtaaaacgacggccagtattccctctcggttcccttg

SEQ ID NO: 59281 - DNA, 21 bp, Artificial Sequence
  primer
ccactcctacttcatggaggc

SEQ ID NO: 59282 - DNA, 19 bp, Artificial Sequence
  primer
cctgtgctgttccaggagg

SEQ ID NO: 59283 - DNA, 35 bp, Artificial Sequence
  primer
gtaaaacgacggccagtggtgggctgaacccagag

SEQ ID NO: 59284 - DNA, 38 bp, Artificial Sequence
  primer
gtaaaacgacggccagttctacaacatcggtgagcagg

SEQ ID NO: 59285 - DNA, 20 bp, Artificial Sequence
  primer
agctgcctgtggtgtttgag

SEQ ID NO: 59286 - DNA, 38 bp, Artificial Sequence
  primer
gtaaaacgacggccagtgaacggcaacctggtagtgag

SEQ ID NO: 59287 - DNA, 20 bp, Artificial Sequence
  primer
gactacactgctgcccaagc

SEQ ID NO: 59288 - DNA, 38 bp, Artificial Sequence
  primer
gtaaaacgacggccagtgtacacactgcaggacaaggc

SEQ ID NO: 59289 - DNA, 38 bp, Artificial Sequence
  primer
gtaaaacgacggccagtcagaaggacagagtgggtctg

SEQ ID NO: 59290 - DNA, 21 bp, Artificial Sequence
  primer
aagcctttctgccagactgag

SEQ ID NO: 59291 - DNA, 19 bp, Artificial Sequence
  primer
gccttcctcacctccactg

SEQ ID NO: 59292 - DNA, 21 bp, Artificial Sequence
  primer
tgggtggagtctctgaaggtc

SEQ ID NO: 59293 - DNA, 18 bp, Artificial Sequence
  primer
tggtgaactgtctccgcc

SEQ ID NO: 59294 - DNA, 21 bp, Artificial Sequence
  primer
cctggtgatgaacgtctaccg

SEQ ID NO: 59295 - DNA, 38 bp, Artificial Sequence
  primer
gtaaaacgacggccagtactacgcctccctcaacttcc

SEQ ID NO: 59296 - DNA, 21 bp, Artificial Sequence
  primer
caggacagcctgctaggtatg

SEQ ID NO: 59297 - DNA, 21 bp, Artificial Sequence
  primer
tctacagcacggcctactacg

SEQ ID NO: 59298 - DNA, 36 bp, Artificial Sequence
  primer
gtaaaacgacggccagtcagggagaagcagggtctg

SEQ ID NO: 59299 - DNA, 37 bp, Artificial Sequence
  primer
gtaaaacgacggccagtacctttctcagaaccacccg

SEQ ID NO: 59300 - DNA, 37 bp, Artificial Sequence
  primer
gtaaaacgacggccagtacattggcaaagtcgtcgtg

SEQ ID NO: 59301 - DNA, 35 bp, Artificial Sequence
  primer
gtaaaacgacggccagtccctgagcccttctctgc

SEQ ID NO: 59302 - DNA, 20 bp, Artificial Sequence
  primer
aggtgtccaccagcaacatc

SEQ ID NO: 59303 - DNA, 37 bp, Artificial Sequence
  primer
gtaaaacgacggccagtttgttgacagccctctctgg

SEQ ID NO: 59304 - DNA, 38 bp, Artificial Sequence
  primer
gtaaaacgacggccagtcatggagcgtatctgtgagaa

SEQ ID NO: 59305 - DNA, 37 bp, Artificial Sequence
  primer
gtaaaacgacggccagtgtgctttgggagatgcacag

SEQ ID NO: 59306 - DNA, 38 bp, Artificial Sequence
  primer
gtaaaacgacggccagtgtgtctgtgtgtccttgcgtg

SEQ ID NO: 59307 - DNA, 35 bp, Artificial Sequence
  primer
gtaaaacgacggccagtcctctggaagcggtggtc

SEQ ID NO: 59308 - DNA, 38 bp, Artificial Sequence
  primer
gtaaaacgacggccagtcctacgtactggcctacaccc

SEQ ID NO: 59309 - DNA, 36 bp, Artificial Sequence
  primer
gtaaaacgacggccagtacccgcagtgtagcacagg

SEQ ID NO: 59310 - DNA, 38 bp, Artificial Sequence
  primer
gtaaaacgacggccagtaagtaccatggcaacgtgatg

SEQ ID NO: 59311 - DNA, 37 bp, Artificial Sequence
  primer
gtaaaacgacggccagtgatagctgcttcgggattgg

SEQ ID NO: 59312 - DNA, 38 bp, Artificial Sequence
  primer
gtaaaacgacggccagtaccggtgaaatgaggtaatgc

SEQ ID NO: 59313 - DNA, 21 bp, Artificial Sequence
  primer
ctcaggtctccatcacccaac

SEQ ID NO: 59314 - DNA, 20 bp, Artificial Sequence
  primer
aacgggagaggagaaaggtg

SEQ ID NO: 59315 - DNA, 37 bp, Artificial Sequence
  primer
gtaaaacgacggccagtctgacaggaggaggaaggtg

SEQ ID NO: 59316 - DNA, 22 bp, Artificial Sequence
  primer
gggactgtcctgtctttacagc

SEQ ID NO: 59317 - DNA, 38 bp, Artificial Sequence
  primer
gtaaaacgacggccagtctacatcagtggtacgcagcc

SEQ ID NO: 59318 - DNA, 37 bp, Artificial Sequence
  primer
gtaaaacgacggccagtaagccagagggaccatgaag

SEQ ID NO: 59319 - DNA, 38 bp, Artificial Sequence
  primer
gtaaaacgacggccagtgaggagaaataccgccaggac

SEQ ID NO: 59320 - DNA, 38 bp, Artificial Sequence
  primer
gtaaaacgacggccagtagaccctgcccagaggtaaag

SEQ ID NO: 59321 - DNA, 37 bp, Artificial Sequence
  primer
gtaaaacgacggccagtacctaggcctgatgggctac

SEQ ID NO: 59322 - DNA, 36 bp, Artificial Sequence
  primer
gtaaaacgacggccagtaaacatcccaaaccgttgc

SEQ ID NO: 59323 - DNA, 21 bp, Artificial Sequence
  primer
tctgtttcagattcccgacag

SEQ ID NO: 59324 - DNA, 39 bp, Artificial Sequence
  primer
gtaaaacgacggccagtgcaggagaactctgcagctaag

SEQ ID NO: 59325 - DNA, 21 bp, Artificial Sequence
  primer
acatccagcgtgggaagtaag

SEQ ID NO: 59326 - DNA, 21 bp, Artificial Sequence
  primer
ttgctattcacccaaccagtg

SEQ ID NO: 59327 - DNA, 38 bp, Artificial Sequence
  primer
gtaaaacgacggccagtcccagcatatgcaattgtgac

SEQ ID NO: 59328 - DNA, 21 bp, Artificial Sequence
  primer
cctgcttattcccatttgagg

SEQ ID NO: 59329 - DNA, 21 bp, Artificial Sequence
  primer
tttaaatcatgtgccgtttgc

SEQ ID NO: 59330 - DNA, 21 bp, Artificial Sequence
  primer
gctaatggatggcttaggtgc

SEQ ID NO: 59331 - DNA, 39 bp, Artificial Sequence
  primer
gtaaaacgacggccagttggtctatgctgtttctggagg

SEQ ID NO: 59332 - DNA, 21 bp, Artificial Sequence
  primer
gatgccaatgataatccaccc

SEQ ID NO: 59333 - DNA, 38 bp, Artificial Sequence
  primer
gtaaaacgacggccagttccttaaagattgaggccagg

SEQ ID NO: 59334 - DNA, 21 bp, Artificial Sequence
  primer
ggagcagttaggatcgtccag

SEQ ID NO: 59335 - DNA, 22 bp, Artificial Sequence
  primer
tgttgacactttctgaagctgg

SEQ ID NO: 59336 - DNA, 36 bp, Artificial Sequence
  primer
gtaaaacgacggccagtgcacctggccaagagtgtg

SEQ ID NO: 59337 - DNA, 23 bp, Artificial Sequence
  primer
gtagcatgaggaagaagatgctc

SEQ ID NO: 59338 - DNA, 38 bp, Artificial Sequence
  primer
gtaaaacgacggccagtgaccaaaccagtctgtgcttc

SEQ ID NO: 59339 - DNA, 20 bp, Artificial Sequence
  primer
cctccttggaagctctttgc

SEQ ID NO: 59340 - DNA, 40 bp, Artificial Sequence
  primer
gtaaaacgacggccagttacatgactttcgttcatggttc

SEQ ID NO: 59341 - DNA, 20 bp, Artificial Sequence
  primer
accctcacggtcatggtagg

SEQ ID NO: 59342 - DNA, 37 bp, Artificial Sequence
  primer
gtaaaacgacggccagttggcttcgctaagagcagag

SEQ ID NO: 59343 - DNA, 22 bp, Artificial Sequence
  primer
ctctccttccaggaaatattgg

SEQ ID NO: 59344 - DNA, 38 bp, Artificial Sequence
  primer
gtaaaacgacggccagtgattgatcctgtcttgggctc

SEQ ID NO: 59345 - DNA, 21 bp, Artificial Sequence
  primer
ctggactttgaaactttgccc

SEQ ID NO: 59346 - DNA, 21 bp, Artificial Sequence
  primer
tcagcctcaattaacagcgtg

SEQ ID NO: 59347 - DNA, 21 bp, Artificial Sequence
  primer
tgccaagccattatatgaagc

SEQ ID NO: 59348 - DNA, 21 bp, Artificial Sequence
  primer
atttactccatcaccgaaggc

SEQ ID NO: 59349 - DNA, 21 bp, Artificial Sequence
  primer
acccaggatgtctactctgcg

SEQ ID NO: 59350 - DNA, 38 bp, Artificial Sequence
  primer
gtaaaacgacggccagtaaataagccgcacttcaggag

SEQ ID NO: 59351 - DNA, 37 bp, Artificial Sequence
  primer
gtaaaacgacggccagtcgttgtcgtgaaggtcattg

SEQ ID NO: 59352 - DNA, 21 bp, Artificial Sequence
  primer
actttcaaattggacccttgg

SEQ ID NO: 59353 - DNA, 38 bp, Artificial Sequence
  primer
gtaaaacgacggccagtagattgcagagagcatccagg

SEQ ID NO: 59354 - DNA, 38 bp, Artificial Sequence
  primer
gtaaaacgacggccagtatcacagacggagaccctttc

SEQ ID NO: 59355 - DNA, 38 bp, Artificial Sequence
  primer
gtaaaacgacggccagtcagatgtttgggaatcacagc

SEQ ID NO: 59356 - DNA, 21 bp, Artificial Sequence
  primer
atcaccctctcaaacctgcac

SEQ ID NO: 59357 - DNA, 38 bp, Artificial Sequence
  primer
gtaaaacgacggccagtccgtttaatggctaaggatgc

SEQ ID NO: 59358 - DNA, 21 bp, Artificial Sequence
  primer
aaattaacaaactgtccggcg

SEQ ID NO: 59359 - DNA, 21 bp, Artificial Sequence
  primer
ctttacagcctggtcaaaggg

SEQ ID NO: 59360 - DNA, 38 bp, Artificial Sequence
  primer
gtaaaacgacggccagtatgctgactcaggaaccaacg

SEQ ID NO: 59361 - DNA, 24 bp, Artificial Sequence
  primer
accagattaaagtggttgcatcag

SEQ ID NO: 59362 - DNA, 40 bp, Artificial Sequence
  primer
gtaaaacgacggccagtttggaaggctaatatatgccaaa

SEQ ID NO: 59363 - DNA, 40 bp, Artificial Sequence
  primer
gtaaaacgacggccagtttccattattcccttgatgtttg

SEQ ID NO: 59364 - DNA, 21 bp, Artificial Sequence
  primer
gcctcttgcagctgttgaatc

SEQ ID NO: 59365 - DNA, 22 bp, Artificial Sequence
  primer
cactgattgactctgctgatgg

SEQ ID NO: 59366 - DNA, 38 bp, Artificial Sequence
  primer
gtaaaacgacggccagtcagggatgggcagattcatag

SEQ ID NO: 59367 - DNA, 20 bp, Artificial Sequence
  primer
gcctgagtgacagagcaagg

SEQ ID NO: 59368 - DNA, 38 bp, Artificial Sequence
  primer
gtaaaacgacggccagtcaggaggacactcctcattgg

SEQ ID NO: 59369 - DNA, 37 bp, Artificial Sequence
  primer
gtaaaacgacggccagtacactcccgtctccaccttt

SEQ ID NO: 59370 - DNA, 38 bp, Artificial Sequence
  primer
gtaaaacgacggccagttgacagagctgggtttcagtg

SEQ ID NO: 59371 - DNA, 38 bp, Artificial Sequence
  primer
gtaaaacgacggccagtatactcaggtggcgtcattgg

SEQ ID NO: 59372 - DNA, 21 bp, Artificial Sequence
  primer
gcaacttccagcgagctttac

SEQ ID NO: 59373 - DNA, 38 bp, Artificial Sequence
  primer
gtaaaacgacggccagtgtcacagatggtttcagacgg

SEQ ID NO: 59374 - DNA, 23 bp, Artificial Sequence
  primer
aaaccctaaatcagtctcaaggg

SEQ ID NO: 59375 - DNA, 22 bp, Artificial Sequence
  primer
ttctaccctcactccctaagcc

SEQ ID NO: 59376 - DNA, 21 bp, Artificial Sequence
  primer
gccctggaattgtctctgttc

SEQ ID NO: 59377 - DNA, 21 bp, Artificial Sequence
  primer
ggaaggcttgttgatgtagcc

SEQ ID NO: 59378 - DNA, 22 bp, Artificial Sequence
  primer
gctttgtttgccagtgtagagg

SEQ ID NO: 59379 - DNA, 21 bp, Artificial Sequence
  primer
tctcgtggttgtcgacgttac

SEQ ID NO: 59380 - DNA, 38 bp, Artificial Sequence
  primer
gtaaaacgacggccagtgtggtggtgtttgttctctgc

SEQ ID NO: 59381 - DNA, 38 bp, Artificial Sequence
  primer
gtaaaacgacggccagttggtgtgtctcaggattcagc

SEQ ID NO: 59382 - DNA, 38 bp, Artificial Sequence
  primer
gtaaaacgacggccagttttaaactggagtgggttggg

SEQ ID NO: 59383 - DNA, 22 bp, Artificial Sequence
  primer
cgccatcgatacggactattac

SEQ ID NO: 59384 - DNA, 38 bp, Artificial Sequence
  primer
gtaaaacgacggccagtattagcaccaccactcccaag

SEQ ID NO: 59385 - DNA, 21 bp, Artificial Sequence
  primer
agggattctctcctcctctgc

SEQ ID NO: 59386 - DNA, 21 bp, Artificial Sequence
  primer
aagccacagagaagaccttgg

SEQ ID NO: 59387 - DNA, 38 bp, Artificial Sequence
  primer
gtaaaacgacggccagttgccacagatgctgatctagg

SEQ ID NO: 59388 - DNA, 21 bp, Artificial Sequence
  primer
tggtcgatgcaaatagctcag

SEQ ID NO: 59389 - DNA, 37 bp, Artificial Sequence
  primer
gtaaaacgacggccagtccaccacaaagctcatggac

SEQ ID NO: 59390 - DNA, 38 bp, Artificial Sequence
  primer
gtaaaacgacggccagtcttggatgagaacatccctcc

SEQ ID NO: 59391 - DNA, 21 bp, Artificial Sequence
  primer
gtacagggtctatccgccaag

SEQ ID NO: 59392 - DNA, 38 bp, Artificial Sequence
  primer
gtaaaacgacggccagtcccaccagttattccctgaag

SEQ ID NO: 59393 - DNA, 21 bp, Artificial Sequence
  primer
acatagagctggagacagggc

SEQ ID NO: 59394 - DNA, 21 bp, Artificial Sequence
  primer
gttggaaccacaattgcagag

SEQ ID NO: 59395 - DNA, 38 bp, Artificial Sequence
  primer
gtaaaacgacggccagtacacaacaggctgaaggttcc

SEQ ID NO: 59396 - DNA, 21 bp, Artificial Sequence
  primer
atggtgggtaagggtgatttc

SEQ ID NO: 59397 - DNA, 23 bp, Artificial Sequence
  primer
tcagggatggtctttacatgttc

SEQ ID NO: 59398 - DNA, 27 bp, Artificial Sequence
  primer
tgactactatttccaggttgttaaagc

SEQ ID NO: 59399 - DNA, 38 bp, Artificial Sequence
  primer
gtaaaacgacggccagtctgcttggtcagaatcacagg

SEQ ID NO: 59400 - DNA, 21 bp, Artificial Sequence
  primer
gtgtcctctgagcctgacaac

SEQ ID NO: 59401 - DNA, 38 bp, Artificial Sequence
  primer
gtaaaacgacggccagtgaggtccagacagacccagtc

SEQ ID NO: 59402 - DNA, 39 bp, Artificial Sequence
  primer
gtaaaacgacggccagtgctgagcctaggaatcattgac

SEQ ID NO: 59403 - DNA, 38 bp, Artificial Sequence
  primer
gtaaaacgacggccagtttgatacctgtcgagggtgtg

SEQ ID NO: 59404 - DNA, 38 bp, Artificial Sequence
  primer
gtaaaacgacggccagtttcttcaacatcaatgccctg

SEQ ID NO: 59405 - DNA, 21 bp, Artificial Sequence
  primer
tttccacccagaagaaattgg

SEQ ID NO: 59406 - DNA, 38 bp, Artificial Sequence
  primer
gtaaaacgacggccagtcctttgtgattcatgcctctg

SEQ ID NO: 59407 - DNA, 21 bp, Artificial Sequence
  primer
tgaagctgttaccatccatcc

SEQ ID NO: 59408 - DNA, 38 bp, Artificial Sequence
  primer
gtaaaacgacggccagtgatgtctactgggcagctgtg

SEQ ID NO: 59409 - DNA, 38 bp, Artificial Sequence
  primer
gtaaaacgacggccagtaagtgagggacaatcggacac

SEQ ID NO: 59410 - DNA, 38 bp, Artificial Sequence
  primer
gtaaaacgacggccagttccctccagagtgaggaagag

SEQ ID NO: 59411 - DNA, 38 bp, Artificial Sequence
  primer
gtaaaacgacggccagtggactccggctcatctacaac

SEQ ID NO: 59412 - DNA, 38 bp, Artificial Sequence
  primer
gtaaaacgacggccagtaactgttggcttctgaccagg

SEQ ID NO: 59413 - DNA, 38 bp, Artificial Sequence
  primer
gtaaaacgacggccagtctcactggtgaaacccttgtg

SEQ ID NO: 59414 - DNA, 21 bp, Artificial Sequence
  primer
gggtaggtgcttctgatggag

SEQ ID NO: 59415 - DNA, 21 bp, Artificial Sequence
  primer
gctattaaggtcatggctcgg

SEQ ID NO: 59416 - DNA, 21 bp, Artificial Sequence
  primer
gtgccagtacgacttcaggtg

SEQ ID NO: 59417 - DNA, 21 bp, Artificial Sequence
  primer
ctccctagacccagacacagg

SEQ ID NO: 59418 - DNA, 21 bp, Artificial Sequence
  primer
accacactccaggaacttgac

SEQ ID NO: 59419 - DNA, 40 bp, Artificial Sequence
  primer
gtaaaacgacggccagttcagtcactctgcttctctctgg

SEQ ID NO: 59420 - DNA, 20 bp, Artificial Sequence
  primer
tctgtgtggctgggtttgtc

SEQ ID NO: 59421 - DNA, 38 bp, Artificial Sequence
  primer
gtaaaacgacggccagttatacccaagccagcttgtcc

SEQ ID NO: 59422 - DNA, 21 bp, Artificial Sequence
  primer
gtggatcacacccttggtctc

SEQ ID NO: 59423 - DNA, 36 bp, Artificial Sequence
  primer
gtaaaacgacggccagttgggctcagaccctcagtc

SEQ ID NO: 59424 - DNA, 38 bp, Artificial Sequence
  primer
gtaaaacgacggccagtttactttggcagggacaactg

SEQ ID NO: 59425 - DNA, 21 bp, Artificial Sequence
  primer
ctgactccagaacctaagccc

SEQ ID NO: 59426 - DNA, 21 bp, Artificial Sequence
  primer
tgatgtccaggcaccatctac

SEQ ID NO: 59427 - DNA, 21 bp, Artificial Sequence
  primer
aaacgtagctccacaaggagg

SEQ ID NO: 59428 - DNA, 21 bp, Artificial Sequence
  primer
tactcgttcaacgtcacggtc

SEQ ID NO: 59429 - DNA, 21 bp, Artificial Sequence
  primer
ataagctggacatcaaacggg

SEQ ID NO: 59430 - DNA, 38 bp, Artificial Sequence
  primer
gtaaaacgacggccagtagacaaagtcagtccaagggc

SEQ ID NO: 59431 - DNA, 38 bp, Artificial Sequence
  primer
gtaaaacgacggccagttgatcagcaaagcatctctcg

SEQ ID NO: 59432 - DNA, 38 bp, Artificial Sequence
  primer
gtaaaacgacggccagttggctgtttggatttcctttg

SEQ ID NO: 59433 - DNA, 21 bp, Artificial Sequence
  primer
aaacacaccagtctgccaatg

SEQ ID NO: 59434 - DNA, 21 bp, Artificial Sequence
  primer
ggtggaaggtggaaagttctg

SEQ ID NO: 59435 - DNA, 21 bp, Artificial Sequence
  primer
agtcactcccgagatccaaag

SEQ ID NO: 59436 - DNA, 21 bp, Artificial Sequence
  primer
tggagacatccaaatccttcc

SEQ ID NO: 59437 - DNA, 38 bp, Artificial Sequence
  primer
gtaaaacgacggccagttcaccctatcttgctgttccc

SEQ ID NO: 59438 - DNA, 21 bp, Artificial Sequence
  primer
gaacctggaagatctgatgcc

SEQ ID NO: 59439 - DNA, 37 bp, Artificial Sequence
  primer
gtaaaacgacggccagtcagcaagctgaataccaggg

SEQ ID NO: 59440 - DNA, 21 bp, Artificial Sequence
  primer
cagtcttgattgcgtggattc

SEQ ID NO: 59441 - DNA, 23 bp, Artificial Sequence
  primer
aaagccttcctttgtcaaataca

SEQ ID NO: 59442 - DNA, 38 bp, Artificial Sequence
  primer
gtaaaacgacggccagtatgctgaaacctgaggtccac

SEQ ID NO: 59443 - DNA, 21 bp, Artificial Sequence
  primer
acggatgatgactctggtgtg

SEQ ID NO: 59444 - DNA, 37 bp, Artificial Sequence
  primer
gtaaaacgacggccagtgtttggatgcacggcatatc

SEQ ID NO: 59445 - DNA, 21 bp, Artificial Sequence
  primer
cctccagattcacaagcactg

SEQ ID NO: 59446 - DNA, 38 bp, Artificial Sequence
  primer
gtaaaacgacggccagttcaaagctcaagcaactgacc

SEQ ID NO: 59447 - DNA, 25 bp, Artificial Sequence
  primer
tttacacaaatagactcgggtgata

SEQ ID NO: 59448 - DNA, 29 bp, Artificial Sequence
  primer
actaggaaagagttgaaattctagttcac

SEQ ID NO: 59449 - DNA, 41 bp, Artificial Sequence
  primer
gtaaaacgacggccagttttcttgcatttctacctcagttt

SEQ ID NO: 59450 - DNA, 21 bp, Artificial Sequence
  primer
aatggacaaggacagtggacc

SEQ ID NO: 59451 - DNA, 23 bp, Artificial Sequence
  primer
tacacagttacccgtgtcacaac

SEQ ID NO: 59452 - DNA, 21 bp, Artificial Sequence
  primer
acagaattcgagtttccgcac

SEQ ID NO: 59453 - DNA, 43 bp, Artificial Sequence
  primer
gtaaaacgacggccagtttcctattatttagattgccctgaac

SEQ ID NO: 59454 - DNA, 38 bp, Artificial Sequence
  primer
gtaaaacgacggccagttcaggattaatgccaccactg

SEQ ID NO: 59455 - DNA, 21 bp, Artificial Sequence
  primer
gggtggatttcagtagcatcc

SEQ ID NO: 59456 - DNA, 21 bp, Artificial Sequence
  primer
tagcattgggtccattgtcag

SEQ ID NO: 59457 - DNA, 21 bp, Artificial Sequence
  primer
tggaacaaatgctgtgattgc

SEQ ID NO: 59458 - DNA, 21 bp, Artificial Sequence
  primer
ggaaaggtgtagctttgccac

SEQ ID NO: 59459 - DNA, 39 bp, Artificial Sequence
  primer
gtaaaacgacggccagtccaagaactttggcagcattag

SEQ ID NO: 59460 - DNA, 38 bp, Artificial Sequence
  primer
gtaaaacgacggccagtagtgtgcagatcagtgaaggg

SEQ ID NO: 59461 - DNA, 21 bp, Artificial Sequence
  primer
ccctcagctacaggtagtgcc

SEQ ID NO: 59462 - DNA, 21 bp, Artificial Sequence
  primer
atggtaacttgtttcccggtg

SEQ ID NO: 59463 - DNA, 21 bp, Artificial Sequence
  primer
tccaatgccacagtggataac

SEQ ID NO: 59464 - DNA, 23 bp, Artificial Sequence
  primer
cagttaatcatttctgccatgtt

SEQ ID NO: 59465 - DNA, 38 bp, Artificial Sequence
  primer
gtaaaacgacggccagtgcaagtcatgggtagtgttgg

SEQ ID NO: 59466 - DNA, 44 bp, Artificial Sequence
  primer
gtaaaacgacggccagttttccattgaaatttatcacactataa

SEQ ID NO: 59467 - DNA, 25 bp, Artificial Sequence
  primer
tgcatttaaacatgtgaaatcaact

SEQ ID NO: 59468 - DNA, 24 bp, Artificial Sequence
  primer
tcagctattctatctgctgtggac

SEQ ID NO: 59469 - DNA, 38 bp, Artificial Sequence
  primer
gtaaaacgacggccagtttcagctggatgatggttctg

SEQ ID NO: 59470 - DNA, 20 bp, Artificial Sequence
  primer
cctcagtgaagattggctgc

SEQ ID NO: 59471 - DNA, 21 bp, Artificial Sequence
  primer
agatctctctgcctttgtggg

SEQ ID NO: 59472 - DNA, 38 bp, Artificial Sequence
  primer
gtaaaacgacggccagtggtccttagcctgatcctgtg

SEQ ID NO: 59473 - DNA, 38 bp, Artificial Sequence
  primer
gtaaaacgacggccagtcttcggatgcagacatcattc

SEQ ID NO: 59474 - DNA, 21 bp, Artificial Sequence
  primer
ttcaactatgccacaaggctg

SEQ ID NO: 59475 - DNA, 21 bp, Artificial Sequence
  primer
tccactggaatcttctcctcc

SEQ ID NO: 59476 - DNA, 21 bp, Artificial Sequence
  primer
ctgaagcctcgaaggtaccac

SEQ ID NO: 59477 - DNA, 36 bp, Artificial Sequence
  primer
gtaaaacgacggccagtccttgagctcctgtttccg

SEQ ID NO: 59478 - DNA, 21 bp, Artificial Sequence
  primer
agtgattcccaagaaagctgg

SEQ ID NO: 59479 - DNA, 20 bp, Artificial Sequence
  primer
gaccaggcaccatgtgattc

SEQ ID NO: 59480 - DNA, 21 bp, Artificial Sequence
  primer
tgacctcactgccttcttgtg

SEQ ID NO: 59481 - DNA, 21 bp, Artificial Sequence
  primer
agcctcctgcttctcactagg

SEQ ID NO: 59482 - DNA, 38 bp, Artificial Sequence
  primer
gtaaaacgacggccagtcccaaatctcctttatcccag

SEQ ID NO: 59483 - DNA, 38 bp, Artificial Sequence
  primer
gtaaaacgacggccagtgatcaaggtaaggctgcttgg

SEQ ID NO: 59484 - DNA, 38 bp, Artificial Sequence
  primer
gtaaaacgacggccagtctcattacctattgggcgcag

SEQ ID NO: 59485 - DNA, 37 bp, Artificial Sequence
  primer
gtaaaacgacggccagtgagatgagcctgagggaagg

SEQ ID NO: 59486 - DNA, 35 bp, Artificial Sequence
  primer
gtaaaacgacggccagtgtactcacctgagggccg

SEQ ID NO: 59487 - DNA, 21 bp, Artificial Sequence
  primer
gtgtcgacaggctcgagaatc

SEQ ID NO: 59488 - DNA, 38 bp, Artificial Sequence
  primer
gtaaaacgacggccagttcacctgagaggtattgctgg

SEQ ID NO: 59489 - DNA, 22 bp, Artificial Sequence
  primer
gaggtggtaagattggctaggg

SEQ ID NO: 59490 - DNA, 38 bp, Artificial Sequence
  primer
gtaaaacgacggccagtgggaagaatgtgatggtggag

SEQ ID NO: 59491 - DNA, 21 bp, Artificial Sequence
  primer
ggctcctagggttaaaggcag

SEQ ID NO: 59492 - DNA, 21 bp, Artificial Sequence
  primer
ggccagtgactttatgtctgg

SEQ ID NO: 59493 - DNA, 37 bp, Artificial Sequence
  primer
gtaaaacgacggccagtaatctcccaggaacctgctg

SEQ ID NO: 59494 - DNA, 22 bp, Artificial Sequence
  primer
cgtttccaacacatgaactttg

SEQ ID NO: 59495 - DNA, 37 bp, Artificial Sequence
  primer
gtaaaacgacggccagtatgaaagagaccatgccgtg

SEQ ID NO: 59496 - DNA, 36 bp, Artificial Sequence
  primer
gtaaaacgacggccagtgtttctccgcttgctggac

SEQ ID NO: 59497 - DNA, 38 bp, Artificial Sequence
  primer
gtaaaacgacggccagtaaggcagggaccaggtctatc

SEQ ID NO: 59498 - DNA, 36 bp, Artificial Sequence
  primer
gtaaaacgacggccagtgagggaggaccaggagacc

SEQ ID NO: 59499 - DNA, 38 bp, Artificial Sequence
  primer
gtaaaacgacggccagtgagtgactaagggatgtgccc

SEQ ID NO: 59500 - DNA, 38 bp, Artificial Sequence
  primer
gtaaaacgacggccagtgaggctcaaaggtgagagcac

SEQ ID NO: 59501 - DNA, 38 bp, Artificial Sequence
  primer
gtaaaacgacggccagtctacaggttgtgtggacaggg

SEQ ID NO: 59502 - DNA, 40 bp, Artificial Sequence
  primer
gtaaaacgacggccagttgacaagaagagagaatgttggg

SEQ ID NO: 59503 - DNA, 38 bp, Artificial Sequence
  primer
gtaaaacgacggccagtagcctgaacggagctagaaac

SEQ ID NO: 59504 - DNA, 21 bp, Artificial Sequence
  primer
tttggcacattcctttctagg

SEQ ID NO: 59505 - DNA, 20 bp, Artificial Sequence
  primer
gagcacgatttggctcagtg

SEQ ID NO: 59506 - DNA, 21 bp, Artificial Sequence
  primer
gccagagaggtggtgtttgag

SEQ ID NO: 59507 - DNA, 21 bp, Artificial Sequence
  primer
ccatgtccatgtgttcctttc

SEQ ID NO: 59508 - DNA, 38 bp, Artificial Sequence
  primer
gtaaaacgacggccagtaggaggtggaggacaaaggac

SEQ ID NO: 59509 - DNA, 38 bp, Artificial Sequence
  primer
gtaaaacgacggccagtttcactgaccctgagggctac

SEQ ID NO: 59510 - DNA, 38 bp, Artificial Sequence
  primer
gtaaaacgacggccagtgatggtctctgaggcttcctg

SEQ ID NO: 59511 - DNA, 21 bp, Artificial Sequence
  primer
taaccctagttgatgggaggc

SEQ ID NO: 59512 - DNA, 37 bp, Artificial Sequence
  primer
gtaaaacgacggccagtctcctcctccctagacctcg

SEQ ID NO: 59513 - DNA, 37 bp, Artificial Sequence
  primer
gtaaaacgacggccagtatgaaagggccctgggttag

SEQ ID NO: 59514 - DNA, 21 bp, Artificial Sequence
  primer
ggactccatgaggtctatgcc

SEQ ID NO: 59515 - DNA, 21 bp, Artificial Sequence
  primer
gctgggtctcattctcctgtc

SEQ ID NO: 59516 - DNA, 38 bp, Artificial Sequence
  primer
gtaaaacgacggccagtacccagtactgacaggcttcc

SEQ ID NO: 59517 - DNA, 38 bp, Artificial Sequence
  primer
gtaaaacgacggccagtctggagaactgcattgaggag

SEQ ID NO: 59518 - DNA, 20 bp, Artificial Sequence
  primer
gcaagatcagctgccagttc

SEQ ID NO: 59519 - DNA, 21 bp, Artificial Sequence
  primer
acagctatgaccaggaggtgg

SEQ ID NO: 59520 - DNA, 21 bp, Artificial Sequence
  primer
gctaggagagtgaccgaggac

SEQ ID NO: 59521 - DNA, 21 bp, Artificial Sequence
  primer
acatcctgtccacatcactgc

SEQ ID NO: 59522 - DNA, 38 bp, Artificial Sequence
  primer
gtaaaacgacggccagtctgcccagtaaaggagacctg

SEQ ID NO: 59523 - DNA, 38 bp, Artificial Sequence
  primer
gtaaaacgacggccagttgagcctcactcactttccac

SEQ ID NO: 59524 - DNA, 20 bp, Artificial Sequence
  primer
ctgggagagcgcatagtctg

SEQ ID NO: 59525 - DNA, 38 bp, Artificial Sequence
  primer
gtaaaacgacggccagtcctgcactagtttcccaaagc

SEQ ID NO: 59526 - DNA, 38 bp, Artificial Sequence
  primer
gtaaaacgacggccagtaatgtcagtgccctgtgtgag

SEQ ID NO: 59527 - DNA, 21 bp, Artificial Sequence
  primer
gtaggttagagccagggatgg

SEQ ID NO: 59528 - DNA, 20 bp, Artificial Sequence
  primer
gagctctctccctcctggtg

SEQ ID NO: 59529 - DNA, 21 bp, Artificial Sequence
  primer
agcttcccagggagatctttg

SEQ ID NO: 59530 - DNA, 38 bp, Artificial Sequence
  primer
gtaaaacgacggccagtttctgggaggtgtatcccttg

SEQ ID NO: 59531 - DNA, 21 bp, Artificial Sequence
  primer
gaccaagtgtgtgggtaaggc

SEQ ID NO: 59532 - DNA, 38 bp, Artificial Sequence
  primer
gtaaaacgacggccagttctccctgtctttccttctgg

SEQ ID NO: 59533 - DNA, 38 bp, Artificial Sequence
  primer
gtaaaacgacggccagttgtcagacagcatttggatgg

SEQ ID NO: 59534 - DNA, 20 bp, Artificial Sequence
  primer
gctctatggctgtgacaggg

SEQ ID NO: 59535 - DNA, 38 bp, Artificial Sequence
  primer
gtaaaacgacggccagtctattctcacaggtccggctg

SEQ ID NO: 59536 - DNA, 38 bp, Artificial Sequence
  primer
gtaaaacgacggccagtctgagctgtgccatctgtgtc

SEQ ID NO: 59537 - DNA, 22 bp, Artificial Sequence
  primer
tcctccaattggtttaatgctg

SEQ ID NO: 59538 - DNA, 38 bp, Artificial Sequence
  primer
gtaaaacgacggccagtgtctggaaccaccatgacctc

SEQ ID NO: 59539 - DNA, 21 bp, Artificial Sequence
  primer
gggctcaagaaatccttcctc

SEQ ID NO: 59540 - DNA, 19 bp, Artificial Sequence
  primer
gcctggtaccgagttctgc

SEQ ID NO: 59541 - DNA, 38 bp, Artificial Sequence
  primer
gtaaaacgacggccagtcagtgtctcctagaggtgccc

SEQ ID NO: 59542 - DNA, 38 bp, Artificial Sequence
  primer
gtaaaacgacggccagtttccgttcatgatcctgtttg

SEQ ID NO: 59543 - DNA, 38 bp, Artificial Sequence
  primer
gtaaaacgacggccagttggtggtagatttcgttgctg

SEQ ID NO: 59544 - DNA, 38 bp, Artificial Sequence
  primer
gtaaaacgacggccagtgtagatggccactaagctccc

SEQ ID NO: 59545 - DNA, 40 bp, Artificial Sequence
  primer
gtaaaacgacggccagtcagctctgtagtaagatccagcc

SEQ ID NO: 59546 - DNA, 21 bp, Artificial Sequence
  primer
ctctaggaaacagagctcgcc

SEQ ID NO: 59547 - DNA, 38 bp, Artificial Sequence
  primer
gtaaaacgacggccagtagtttgactgacggaggcaag

SEQ ID NO: 59548 - DNA, 35 bp, Artificial Sequence
  primer
gtaaaacgacggccagtggctgtgtgtctgggtgg

SEQ ID NO: 59549 - DNA, 21 bp, Artificial Sequence
  primer
ccctcagcttccctctgtatg

SEQ ID NO: 59550 - DNA, 38 bp, Artificial Sequence
  primer
gtaaaacgacggccagtcaatgcggctaattgtacctg

SEQ ID NO: 59551 - DNA, 38 bp, Artificial Sequence
  primer
gtaaaacgacggccagtggtttaagacagagcctcggg

SEQ ID NO: 59552 - DNA, 21 bp, Artificial Sequence
  primer
ctcagaagaagacgaccctcg

SEQ ID NO: 59553 - DNA, 38 bp, Artificial Sequence
  primer
gtaaaacgacggccagtaacgggactgaaattgctcag

SEQ ID NO: 59554 - DNA, 38 bp, Artificial Sequence
  primer
gtaaaacgacggccagttcatgcagttggtttattcgg

SEQ ID NO: 59555 - DNA, 39 bp, Artificial Sequence
  primer
gtaaaacgacggccagtgggatttgtctctgtgttgcag

SEQ ID NO: 59556 - DNA, 21 bp, Artificial Sequence
  primer
agctaccaacccagcattgag

SEQ ID NO: 59557 - DNA, 38 bp, Artificial Sequence
  primer
gtaaaacgacggccagtgcaaagtttgtgagggacctg

SEQ ID NO: 59558 - DNA, 21 bp, Artificial Sequence
  primer
tcaactcctgtgagctgttgc

SEQ ID NO: 59559 - DNA, 21 bp, Artificial Sequence
  primer
tcagatgcttcacggaatgag

SEQ ID NO: 59560 - DNA, 37 bp, Artificial Sequence
  primer
gtaaaacgacggccagtgagcacagctgttcctctgc

SEQ ID NO: 59561 - DNA, 22 bp, Artificial Sequence
  primer
gtgatggacaaataactcaccg

SEQ ID NO: 59562 - DNA, 21 bp, Artificial Sequence
  primer
tgtttccagggacatgatttg

SEQ ID NO: 59563 - DNA, 21 bp, Artificial Sequence
  primer
gtgaagtatggagctgctcgg

SEQ ID NO: 59564 - DNA, 40 bp, Artificial Sequence
  primer
gtaaaacgacggccagtaaataaggatgacttctgtgggc

SEQ ID NO: 59565 - DNA, 38 bp, Artificial Sequence
  primer
gtaaaacgacggccagtgttgtcaccagacgacctttg

SEQ ID NO: 59566 - DNA, 38 bp, Artificial Sequence
  primer
gtaaaacgacggccagtctcaaccagtcttcaaatggc

SEQ ID NO: 59567 - DNA, 43 bp, Artificial Sequence
  primer
gtaaaacgacggccagttttgataaccaatttatgttggagaa

SEQ ID NO: 59568 - DNA, 43 bp, Artificial Sequence
  primer
gtaaaacgacggccagttgatcttatttggatgaaagttagcc

SEQ ID NO: 59569 - DNA, 42 bp, Artificial Sequence
  primer
gtaaaacgacggccagtgctgcatattatttcctatcttccc

SEQ ID NO: 59570 - DNA, 22 bp, Artificial Sequence
  primer
agccctcttcaactttgacttg

SEQ ID NO: 59571 - DNA, 38 bp, Artificial Sequence
  primer
gtaaaacgacggccagttttggaggaaatgatgtgtgc

SEQ ID NO: 59572 - DNA, 21 bp, Artificial Sequence
  primer
ttcctctcaggaacttgtggg

SEQ ID NO: 59573 - DNA, 38 bp, Artificial Sequence
  primer
gtaaaacgacggccagtgcttgaattgatcacgtcgtt

SEQ ID NO: 59574 - DNA, 38 bp, Artificial Sequence
  primer
gtaaaacgacggccagttagcccagctttactgtgtgg

SEQ ID NO: 59575 - DNA, 30 bp, Artificial Sequence
  primer
tatcaatgttgttatacttaatgtcagctt

SEQ ID NO: 59576 - DNA, 38 bp, Artificial Sequence
  primer
gtaaaacgacggccagttgtcagaactgcaaagtctgg

SEQ ID NO: 59577 - DNA, 21 bp, Artificial Sequence
  primer
ccctgaaaccaatggagaaac

SEQ ID NO: 59578 - DNA, 37 bp, Artificial Sequence
  primer
gtaaaacgacggccagtcagagtgttggcagtttggg

SEQ ID NO: 59579 - DNA, 38 bp, Artificial Sequence
  primer
gtaaaacgacggccagttggatcatcacacattcttgg

SEQ ID NO: 59580 - DNA, 21 bp, Artificial Sequence
  primer
tgaagaaaggaactgcacagg

SEQ ID NO: 59581 - DNA, 21 bp, Artificial Sequence
  primer
aaggaggtcaagatggacacc

SEQ ID NO: 59582 - DNA, 38 bp, Artificial Sequence
  primer
gtaaaacgacggccagtatctccgcgtgtatcggtaag

SEQ ID NO: 59583 - DNA, 38 bp, Artificial Sequence
  primer
gtaaaacgacggccagtggccctgcctcttaaatagtg

SEQ ID NO: 59584 - DNA, 39 bp, Artificial Sequence
  primer
gtaaaacgacggccagtggctaagtttatttgactgcgg

SEQ ID NO: 59585 - DNA, 24 bp, Artificial Sequence
  primer
gagcaaatgtaaattggcctctaa

SEQ ID NO: 59586 - DNA, 21 bp, Artificial Sequence
  primer
taccatgggaagtttgaaggc

SEQ ID NO: 59587 - DNA, 38 bp, Artificial Sequence
  primer
gtaaaacgacggccagttggattggagatggcattaag

SEQ ID NO: 59588 - DNA, 38 bp, Artificial Sequence
  primer
gtaaaacgacggccagtaaacattgctgcactggaaag

SEQ ID NO: 59589 - DNA, 21 bp, Artificial Sequence
  primer
acgagacttcactgtgcatgg

SEQ ID NO: 59590 - DNA, 39 bp, Artificial Sequence
  primer
gtaaaacgacggccagtttgtttggagctctagattggg

SEQ ID NO: 59591 - DNA, 38 bp, Artificial Sequence
  primer
gtaaaacgacggccagtttgaacagttcctgaagtggg

SEQ ID NO: 59592 - DNA, 38 bp, Artificial Sequence
  primer
gtaaaacgacggccagttcagacgggcagagtaacaac

SEQ ID NO: 59593 - DNA, 21 bp, Artificial Sequence
  primer
ttccgaccaaatcctatcacc

SEQ ID NO: 59594 - DNA, 39 bp, Artificial Sequence
  primer
gtaaaacgacggccagtggacacggatgaatgaaatacc

SEQ ID NO: 59595 - DNA, 25 bp, Artificial Sequence
  primer
tcaaagtcctttatcttgtagcagc

SEQ ID NO: 59596 - DNA, 38 bp, Artificial Sequence
  primer
gtaaaacgacggccagtaatgagtggcatgtgatctgg

SEQ ID NO: 59597 - DNA, 21 bp, Artificial Sequence
  primer
gatgtccctattgccatcacc

SEQ ID NO: 59598 - DNA, 39 bp, Artificial Sequence
  primer
gtaaaacgacggccagttcatgtgagaggctttgttgac

SEQ ID NO: 59599 - DNA, 44 bp, Artificial Sequence
  primer
gtaaaacgacggccagttgactatgcctggtaaatgagagtaag

SEQ ID NO: 59600 - DNA, 39 bp, Artificial Sequence
  primer
gtaaaacgacggccagttgctctttagccactgtaaccg

SEQ ID NO: 59601 - DNA, 18 bp, Artificial Sequence
  primer
ggctaagccagcaaaggc

SEQ ID NO: 59602 - DNA, 23 bp, Artificial Sequence
  primer
ggaaacatttaatttgatgcagg

SEQ ID NO: 59603 - DNA, 21 bp, Artificial Sequence
  primer
ctcagttgccctttgtgtgtc

SEQ ID NO: 59604 - DNA, 38 bp, Artificial Sequence
  primer
gtaaaacgacggccagttattgctgtggtcctgagagg

SEQ ID NO: 59605 - DNA, 36 bp, Artificial Sequence
  primer
gtaaaacgacggccagtcctctggtttctgggcttg

SEQ ID NO: 59606 - DNA, 20 bp, Artificial Sequence
  primer
cagttgcctgtgctggattc

SEQ ID NO: 59607 - DNA, 37 bp, Artificial Sequence
  primer
gtaaaacgacggccagtgtttgcatgagctgaaatcg

SEQ ID NO: 59608 - DNA, 21 bp, Artificial Sequence
  primer
aaatgggagaccacttgatcc

SEQ ID NO: 59609 - DNA, 22 bp, Artificial Sequence
  primer
gagcagaaggaaatacagccag

SEQ ID NO: 59610 - DNA, 38 bp, Artificial Sequence
  primer
gtaaaacgacggccagtgagaaaggaacaaagggaggg

SEQ ID NO: 59611 - DNA, 39 bp, Artificial Sequence
  primer
gtaaaacgacggccagtcccagggtaaagtgttacatcc

SEQ ID NO: 59612 - DNA, 43 bp, Artificial Sequence
  primer
gtaaaacgacggccagttgctgtcatcttactggtttaatttc

SEQ ID NO: 59613 - DNA, 39 bp, Artificial Sequence
  primer
gtaaaacgacggccagttcgttagaccctgtggaaattg

SEQ ID NO: 59614 - DNA, 38 bp, Artificial Sequence
  primer
gtaaaacgacggccagtgtggagctgcttcatagggtc

SEQ ID NO: 59615 - DNA, 39 bp, Artificial Sequence
  primer
gtaaaacgacggccagtcatgtatgtgaagcgttgttgg

SEQ ID NO: 59616 - DNA, 22 bp, Artificial Sequence
  primer
ttctccttggacttagcagcag

SEQ ID NO: 59617 - DNA, 19 bp, Artificial Sequence
  primer
ggccagatccaatgtcctc

SEQ ID NO: 59618 - DNA, 38 bp, Artificial Sequence
  primer
gtaaaacgacggccagtctcacaactgcaaggaacagg

SEQ ID NO: 59619 - DNA, 38 bp, Artificial Sequence
  primer
gtaaaacgacggccagtcctgcctttcttcctgacatc

SEQ ID NO: 59620 - DNA, 21 bp, Artificial Sequence
  primer
tgagtcttgcaagttgggatg

SEQ ID NO: 59621 - DNA, 20 bp, Artificial Sequence
  primer
ctccagctagagcagggagc

SEQ ID NO: 59622 - DNA, 38 bp, Artificial Sequence
  primer
gtaaaacgacggccagttcctgaaatctactcgctcgg

SEQ ID NO: 59623 - DNA, 21 bp, Artificial Sequence
  primer
ttattcccaagtctgcaatgg

SEQ ID NO: 59624 - DNA, 43 bp, Artificial Sequence
  primer
gtaaaacgacggccagttgtcattgaattggataattgagttt

SEQ ID NO: 59625 - DNA, 37 bp, Artificial Sequence
  primer
gtaaaacgacggccagttggcagcatcactgcactac

SEQ ID NO: 59626 - DNA, 38 bp, Artificial Sequence
  primer
gtaaaacgacggccagttttatgcatttggaggcactg

SEQ ID NO: 59627 - DNA, 21 bp, Artificial Sequence
  primer
cccacaacaggatggatctta

SEQ ID NO: 59628 - DNA, 23 bp, Artificial Sequence
  primer
cctaatcaaccatgaatgctctc

SEQ ID NO: 59629 - DNA, 37 bp, Artificial Sequence
  primer
gtaaaacgacggccagtttcattgttctgtccctggc

SEQ ID NO: 59630 - DNA, 44 bp, Artificial Sequence
  primer
gtaaaacgacggccagtttgtgtagtataggtaacccaaagtga

SEQ ID NO: 59631 - DNA, 39 bp, Artificial Sequence
  primer
gtaaaacgacggccagtaagttgcaaccatgtgtctcag

SEQ ID NO: 59632 - DNA, 38 bp, Artificial Sequence
  primer
gtaaaacgacggccagtaccactgactggccttctctc

SEQ ID NO: 59633 - DNA, 23 bp, Artificial Sequence
  primer
aaattgcttgcacctacctatcc

SEQ ID NO: 59634 - DNA, 21 bp, Artificial Sequence
  primer
tgaaggtcctttccactctcc

SEQ ID NO: 59635 - DNA, 38 bp, Artificial Sequence
  primer
gtaaaacgacggccagtagtggctgcaagtaaaccctg

SEQ ID NO: 59636 - DNA, 27 bp, Artificial Sequence
  primer
tgttgatttcctaacactattagatgc

SEQ ID NO: 59637 - DNA, 41 bp, Artificial Sequence
  primer
gtaaaacgacggccagttgcacaaataattcttcctaatgg

SEQ ID NO: 59638 - DNA, 21 bp, Artificial Sequence
  primer
gaaaggcaggcaaattgtgag

SEQ ID NO: 59639 - DNA, 38 bp, Artificial Sequence
  primer
gtaaaacgacggccagtattaaacattgctgcccactg

SEQ ID NO: 59640 - DNA, 38 bp, Artificial Sequence
  primer
gtaaaacgacggccagtccaataggctgatcactgtgg

SEQ ID NO: 59641 - DNA, 21 bp, Artificial Sequence
  primer
ggcgtgagccagtaatctttc

SEQ ID NO: 59642 - DNA, 20 bp, Artificial Sequence
  primer
gaccctaagaccctgccttg

SEQ ID NO: 59643 - DNA, 21 bp, Artificial Sequence
  primer
aggaagtaggaccacacctgc

SEQ ID NO: 59644 - DNA, 36 bp, Artificial Sequence
  primer
gtaaaacgacggccagtcatgatgcctggtgctgag

SEQ ID NO: 59645 - DNA, 39 bp, Artificial Sequence
  primer
gtaaaacgacggccagtcttggatgcattactgttgtcc

SEQ ID NO: 59646 - DNA, 38 bp, Artificial Sequence
  primer
gtaaaacgacggccagtactgttagccagcaatttccc

SEQ ID NO: 59647 - DNA, 37 bp, Artificial Sequence
  primer
gtaaaacgacggccagttctcccacgctgtatgtgtg

SEQ ID NO: 59648 - DNA, 38 bp, Artificial Sequence
  primer
gtaaaacgacggccagtggtgaagcacctttctgatgg

SEQ ID NO: 59649 - DNA, 39 bp, Artificial Sequence
  primer
gtaaaacgacggccagttgcacttaaacatggaatgctg

SEQ ID NO: 59650 - DNA, 36 bp, Artificial Sequence
  primer
gtaaaacgacggccagtggttatgccctgatgccag

SEQ ID NO: 59651 - DNA, 37 bp, Artificial Sequence
  primer
gtaaaacgacggccagtaacacgatgatttgcggatg

SEQ ID NO: 59652 - DNA, 38 bp, Artificial Sequence
  primer
gtaaaacgacggccagtccaagtcctcttggagcctac

SEQ ID NO: 59653 - DNA, 38 bp, Artificial Sequence
  primer
gtaaaacgacggccagtattgggtctgagagcttagcg

SEQ ID NO: 59654 - DNA, 23 bp, Artificial Sequence
  primer
tttctctcaggttgataccctcc

SEQ ID NO: 59655 - DNA, 21 bp, Artificial Sequence
  primer
tgaacattagttgcttgccct

SEQ ID NO: 59656 - DNA, 39 bp, Artificial Sequence
  primer
gtaaaacgacggccagttccaccaaattctttggaacag

SEQ ID NO: 59657 - DNA, 38 bp, Artificial Sequence
  primer
gtaaaacgacggccagtttggcttcctctgactcaatc

SEQ ID NO: 59658 - DNA, 39 bp, Artificial Sequence
  primer
gtaaaacgacggccagtctgaatgcttgctcattgtctc

SEQ ID NO: 59659 - DNA, 38 bp, Artificial Sequence
  primer
gtaaaacgacggccagttgcgttcatttggatgcatag

SEQ ID NO: 59660 - DNA, 26 bp, Artificial Sequence
  primer
ggatttagagaatcacctatgctttg

SEQ ID NO: 59661 - DNA, 38 bp, Artificial Sequence
  primer
gtaaaacgacggccagtgtctacagctgtgtgggcttc

SEQ ID NO: 59662 - DNA, 37 bp, Artificial Sequence
  primer
gtaaaacgacggccagtcctagcagaagctggcattg

SEQ ID NO: 59663 - DNA, 43 bp, Artificial Sequence
  primer
gtaaaacgacggccagtacactgaatatttgtactcatcccag

SEQ ID NO: 59664 - DNA, 41 bp, Artificial Sequence
  primer
gtaaaacgacggccagtcaaagtgtgacgtgaatgtaatgc

SEQ ID NO: 59665 - DNA, 24 bp, Artificial Sequence
  primer
ttgattcagctgttgttatggttc

SEQ ID NO: 59666 - DNA, 39 bp, Artificial Sequence
  primer
gtaaaacgacggccagtgggatgctctcttaggctatgt

SEQ ID NO: 59667 - DNA, 23 bp, Artificial Sequence
  primer
gaatggaaagcttcaccgtaaac

SEQ ID NO: 59668 - DNA, 22 bp, Artificial Sequence
  primer
gacccagtagatcagaggaccc

SEQ ID NO: 59669 - DNA, 39 bp, Artificial Sequence
  primer
gtaaaacgacggccagtgctggctagtggacagtgatag

SEQ ID NO: 59670 - DNA, 21 bp, Artificial Sequence
  primer
tgcatcccgtgttctacaatg

SEQ ID NO: 59671 - DNA, 38 bp, Artificial Sequence
  primer
gtaaaacgacggccagtcctagaaggtggccctcacta

SEQ ID NO: 59672 - DNA, 38 bp, Artificial Sequence
  primer
gtaaaacgacggccagttgggatttataagcatgagcc

SEQ ID NO: 59673 - DNA, 38 bp, Artificial Sequence
  primer
gtaaaacgacggccagtcagatcctggaaatgggtgag

SEQ ID NO: 59674 - DNA, 38 bp, Artificial Sequence
  primer
gtaaaacgacggccagtgaccgccaagtaaatgacatc

SEQ ID NO: 59675 - DNA, 21 bp, Artificial Sequence
  primer
ttctcctttctctgtcccacc

SEQ ID NO: 59676 - DNA, 43 bp, Artificial Sequence
  primer
gtaaaacgacggccagtaacattatcttaagaaagaacccacc

SEQ ID NO: 59677 - DNA, 38 bp, Artificial Sequence
  primer
gtaaaacgacggccagttgcttaatttgaaagccagga

SEQ ID NO: 59678 - DNA, 38 bp, Artificial Sequence
  primer
gtaaaacgacggccagtacatccatgttgctgttcacc

SEQ ID NO: 59679 - DNA, 40 bp, Artificial Sequence
  primer
gtaaaacgacggccagttgaagtgagaatatggaaggagg

SEQ ID NO: 59680 - DNA, 37 bp, Artificial Sequence
  primer
gtaaaacgacggccagtgagcatgtgcatctcctgtg

SEQ ID NO: 59681 - DNA, 38 bp, Artificial Sequence
  primer
gtaaaacgacggccagtcagtgtgccttcaatcactcc

SEQ ID NO: 59682 - DNA, 21 bp, Artificial Sequence
  primer
gagagcagaagaatgagctgg

SEQ ID NO: 59683 - DNA, 39 bp, Artificial Sequence
  primer
gtaaaacgacggccagtaatcacaggcacttgagactcc

SEQ ID NO: 59684 - DNA, 39 bp, Artificial Sequence
  primer
gtaaaacgacggccagttgttggtttcgtgtttctgaag

SEQ ID NO: 59685 - DNA, 38 bp, Artificial Sequence
  primer
gtaaaacgacggccagtgggaacactctgtaagcccag

SEQ ID NO: 59686 - DNA, 39 bp, Artificial Sequence
  primer
gtaaaacgacggccagttgtcccaaatcatttcctgttc

SEQ ID NO: 59687 - DNA, 37 bp, Artificial Sequence
  primer
gtaaaacgacggccagtcctcctcgttgtgttgggtc

SEQ ID NO: 59688 - DNA, 36 bp, Artificial Sequence
  primer
gtaaaacgacggccagtgtggtacctgggatgctgg

SEQ ID NO: 59689 - DNA, 18 bp, Artificial Sequence
  primer
cggacaccaatggagcag

SEQ ID NO: 59690 - DNA, 38 bp, Artificial Sequence
  primer
gtaaaacgacggccagtagggagaagaagttcacaggg

SEQ ID NO: 59691 - DNA, 20 bp, Artificial Sequence
  primer
tacaggcgctagccactcag

SEQ ID NO: 59692 - DNA, 38 bp, Artificial Sequence
  primer
gtaaaacgacggccagtgccgctgagaaggtgttagag

SEQ ID NO: 59693 - DNA, 37 bp, Artificial Sequence
  primer
gtaaaacgacggccagtgcctgccaaggtgaatagtg

SEQ ID NO: 59694 - DNA, 38 bp, Artificial Sequence
  primer
gtaaaacgacggccagttgctgctacagctggaatttg

SEQ ID NO: 59695 - DNA, 37 bp, Artificial Sequence
  primer
gtaaaacgacggccagtgtccctgagctgtgtcctcc

SEQ ID NO: 59696 - DNA, 38 bp, Artificial Sequence
  primer
gtaaaacgacggccagttctgggcctagagaggtgaag

SEQ ID NO: 59697 - DNA, 20 bp, Artificial Sequence
  primer
gcgagtgtaacgtgggctac

SEQ ID NO: 59698 - DNA, 38 bp, Artificial Sequence
  primer
gtaaaacgacggccagtgctgtccatccaagagtaggg

SEQ ID NO: 59699 - DNA, 20 bp, Artificial Sequence
  primer
cttgtttgcctcccacactc

SEQ ID NO: 59700 - DNA, 21 bp, Artificial Sequence
  primer
atagaatggctgggaagatgg

SEQ ID NO: 59701 - DNA, 38 bp, Artificial Sequence
  primer
gtaaaacgacggccagtcttagtcccaaactcttgccc

SEQ ID NO: 59702 - DNA, 36 bp, Artificial Sequence
  primer
gtaaaacgacggccagtggtctgggctggagctatg

SEQ ID NO: 59703 - DNA, 38 bp, Artificial Sequence
  primer
gtaaaacgacggccagtgtgtctgcaacctgggttatg

SEQ ID NO: 59704 - DNA, 21 bp, Artificial Sequence
  primer
atgcacatttgattccagtgc

SEQ ID NO: 59705 - DNA, 36 bp, Artificial Sequence
  primer
gtaaaacgacggccagtctgggcgtctatgggtcag

SEQ ID NO: 59706 - DNA, 21 bp, Artificial Sequence
  primer
cggtagtatcctccttgaggc

SEQ ID NO: 59707 - DNA, 38 bp, Artificial Sequence
  primer
gtaaaacgacggccagttccttcctcctcaaggacaac

SEQ ID NO: 59708 - DNA, 38 bp, Artificial Sequence
  primer
gtaaaacgacggccagtagacagtgcctggaggaagtc

SEQ ID NO: 59709 - DNA, 38 bp, Artificial Sequence
  primer
gtaaaacgacggccagttaaggcgaggcactaagaacc

SEQ ID NO: 59710 - DNA, 21 bp, Artificial Sequence
  primer
acacctccatcaaaggacagg

SEQ ID NO: 59711 - DNA, 37 bp, Artificial Sequence
  primer
gtaaaacgacggccagtgagaatctcagcctccctcc

SEQ ID NO: 59712 - DNA, 38 bp, Artificial Sequence
  primer
gtaaaacgacggccagtccagggtgtgtttgtgagtct

SEQ ID NO: 59713 - DNA, 21 bp, Artificial Sequence
  primer
tcctgtcctcacctcaactcc

SEQ ID NO: 59714 - DNA, 38 bp, Artificial Sequence
  primer
gtaaaacgacggccagtctcacctggctacaggtcgtc

SEQ ID NO: 59715 - DNA, 21 bp, Artificial Sequence
  primer
tcctagcagagaggacctgtg

SEQ ID NO: 59716 - DNA, 38 bp, Artificial Sequence
  primer
gtaaaacgacggccagtcttgggctctgggtaaagatg

SEQ ID NO: 59717 - DNA, 21 bp, Artificial Sequence
  primer
agggttgatgggtctttctcc

SEQ ID NO: 59718 - DNA, 38 bp, Artificial Sequence
  primer
gtaaaacgacggccagtacagcgaagtgttccagtgac

SEQ ID NO: 59719 - DNA, 21 bp, Artificial Sequence
  primer
aacgtggacctctgtgacaac

SEQ ID NO: 59720 - DNA, 21 bp, Artificial Sequence
  primer
ttcccaggatgaagctaggag

SEQ ID NO: 59721 - DNA, 38 bp, Artificial Sequence
  primer
gtaaaacgacggccagtggttgtccttgtcacctgttg

SEQ ID NO: 59722 - DNA, 21 bp, Artificial Sequence
  primer
caggactggccaaagtctctt

SEQ ID NO: 59723 - DNA, 38 bp, Artificial Sequence
  primer
gtaaaacgacggccagttccagccatcaagatagaccc

SEQ ID NO: 59724 - DNA, 21 bp, Artificial Sequence
  primer
accaaacttaggtccctggtg

SEQ ID NO: 59725 - DNA, 38 bp, Artificial Sequence
  primer
gtaaaacgacggccagttgcctggacaagccagtaatc

SEQ ID NO: 59726 - DNA, 19 bp, Artificial Sequence
  primer
agttcaaggtggccaggtg

SEQ ID NO: 59727 - DNA, 38 bp, Artificial Sequence
  primer
gtaaaacgacggccagtaaccagattgcagggctagtg

SEQ ID NO: 59728 - DNA, 38 bp, Artificial Sequence
  primer
gtaaaacgacggccagttgggtttcacgtttgattctg

SEQ ID NO: 59729 - DNA, 21 bp, Artificial Sequence
  primer
agagctcaggtccatgcagac

SEQ ID NO: 59730 - DNA, 38 bp, Artificial Sequence
  primer
gtaaaacgacggccagtgagtacttcccagccatcacc

SEQ ID NO: 59731 - DNA, 38 bp, Artificial Sequence
  primer
gtaaaacgacggccagtccaatgctgtcagctcaactc

SEQ ID NO: 59732 - DNA, 38 bp, Artificial Sequence
  primer
gtaaaacgacggccagttgatcacacagtgattgcagg

SEQ ID NO: 59733 - DNA, 38 bp, Artificial Sequence
  primer
gtaaaacgacggccagttccatctgtcccttctcacag

SEQ ID NO: 59734 - DNA, 37 bp, Artificial Sequence
  primer
gtaaaacgacggccagtatcagcacaacccattcacc

SEQ ID NO: 59735 - DNA, 21 bp, Artificial Sequence
  primer
tcttctctcatccttccctgc

SEQ ID NO: 59736 - DNA, 21 bp, Artificial Sequence
  primer
ctgcctgggtctctgagtttc

SEQ ID NO: 59737 - DNA, 38 bp, Artificial Sequence
  primer
gtaaaacgacggccagttaaacacataccgcttgcctg

SEQ ID NO: 59738 - DNA, 21 bp, Artificial Sequence
  primer
cagatgggatgctactgagga

SEQ ID NO: 59739 - DNA, 37 bp, Artificial Sequence
  primer
gtaaaacgacggccagtagggtctgcagggaactcac

SEQ ID NO: 59740 - DNA, 36 bp, Artificial Sequence
  primer
gtaaaacgacggccagtataagcaagagggcctggg

SEQ ID NO: 59741 - DNA, 38 bp, Artificial Sequence
  primer
gtaaaacgacggccagtaaagcaagctcagtctttgcc

SEQ ID NO: 59742 - DNA, 38 bp, Artificial Sequence
  primer
gtaaaacgacggccagtagagaaggagacattcctcgg

SEQ ID NO: 59743 - DNA, 21 bp, Artificial Sequence
  primer
gtctggtggagacctcagtcc

SEQ ID NO: 59744 - DNA, 39 bp, Artificial Sequence
  primer
gtaaaacgacggccagttccgaggtctttctcttgtcac

SEQ ID NO: 59745 - DNA, 37 bp, Artificial Sequence
  primer
gtaaaacgacggccagtggtgagcaacttgcctgaag

SEQ ID NO: 59746 - DNA, 20 bp, Artificial Sequence
  primer
aaggtacagcccagctttgg

SEQ ID NO: 59747 - DNA, 38 bp, Artificial Sequence
  primer
gtaaaacgacggccagtatacagcattccaggtggagg

SEQ ID NO: 59748 - DNA, 38 bp, Artificial Sequence
  primer
gtaaaacgacggccagtatgctcagaggcatttgtgtg

SEQ ID NO: 59749 - DNA, 20 bp, Artificial Sequence
  primer
ctcctctttggccacaatcc

SEQ ID NO: 59750 - DNA, 38 bp, Artificial Sequence
  primer
gtaaaacgacggccagtagtgcctactgccctctcttg

SEQ ID NO: 59751 - DNA, 27 bp, Artificial Sequence
  primer
ttctaaatcttaccgaacactcacttt

SEQ ID NO: 59752 - DNA, 19 bp, Artificial Sequence
  primer
atgccatctcatgccttcc

SEQ ID NO: 59753 - DNA, 38 bp, Artificial Sequence
  primer
gtaaaacgacggccagttctgggaagatgccctatttc

SEQ ID NO: 59754 - DNA, 20 bp, Artificial Sequence
  primer
cacagttcccagagagcctg

SEQ ID NO: 59755 - DNA, 21 bp, Artificial Sequence
  primer
cttgtaggtgctcggtgaatg

SEQ ID NO: 59756 - DNA, 21 bp, Artificial Sequence
  primer
attcgttcccttggaaactcc

SEQ ID NO: 59757 - DNA, 38 bp, Artificial Sequence
  primer
gtaaaacgacggccagtgccagcacagatttcttatcg

SEQ ID NO: 59758 - DNA, 37 bp, Artificial Sequence
  primer
gtaaaacgacggccagtttagggtcccaggctctttg

SEQ ID NO: 59759 - DNA, 38 bp, Artificial Sequence
  primer
gtaaaacgacggccagtgatgtggtgtactctgccacg

SEQ ID NO: 59760 - DNA, 21 bp, Artificial Sequence
  primer
gtttcctctggatggatttgc

SEQ ID NO: 59761 - DNA, 22 bp, Artificial Sequence
  primer
ccatatggtccctattcttccc

SEQ ID NO: 59762 - DNA, 38 bp, Artificial Sequence
  primer
gtaaaacgacggccagtcagaggtcacaccaactggac

SEQ ID NO: 59763 - DNA, 38 bp, Artificial Sequence
  primer
gtaaaacgacggccagtaagcaccgcagtacaaactcc

SEQ ID NO: 59764 - DNA, 38 bp, Artificial Sequence
  primer
gtaaaacgacggccagtggagtggatgatgagtgaacg

SEQ ID NO: 59765 - DNA, 21 bp, Artificial Sequence
  primer
aggcagaagataggcatccag

SEQ ID NO: 59766 - DNA, 20 bp, Artificial Sequence
  primer
ctccctcttcactgcgactg

SEQ ID NO: 59767 - DNA, 37 bp, Artificial Sequence
  primer
gtaaaacgacggccagttgtgaggttaaccgacaggg

SEQ ID NO: 59768 - DNA, 35 bp, Artificial Sequence
  primer
gtaaaacgacggccagtctgggaggaggcctgaac

SEQ ID NO: 59769 - DNA, 38 bp, Artificial Sequence
  primer
gtaaaacgacggccagtcaccaaggaggagaaggacag

SEQ ID NO: 59770 - DNA, 38 bp, Artificial Sequence
  primer
gtaaaacgacggccagttaaaggaagagcggaaggagg

SEQ ID NO: 59771 - DNA, 37 bp, Artificial Sequence
  primer
gtaaaacgacggccagtgactttgcaaacggatctgc

SEQ ID NO: 59772 - DNA, 21 bp, Artificial Sequence
  primer
cacagcagggactggaatatg

SEQ ID NO: 59773 - DNA, 21 bp, Artificial Sequence
  primer
gccgagatgtctgtgagtgtc

SEQ ID NO: 59774 - DNA, 22 bp, Artificial Sequence
  primer
tctggtctggctgtatttcctg

SEQ ID NO: 59775 - DNA, 37 bp, Artificial Sequence
  primer
gtaaaacgacggccagtaagttgcttgggttgcaatg

SEQ ID NO: 59776 - DNA, 21 bp, Artificial Sequence
  primer
ggctttgcctaatccatttcc

SEQ ID NO: 59777 - DNA, 21 bp, Artificial Sequence
  primer
gaggttcaggtttgagttgcc

SEQ ID NO: 59778 - DNA, 20 bp, Artificial Sequence
  primer
gggagacagatcccagaagg

SEQ ID NO: 59779 - DNA, 21 bp, Artificial Sequence
  primer
cctcccatgttgggactattg

SEQ ID NO: 59780 - DNA, 21 bp, Artificial Sequence
  primer
gggaactccgattacatttgg

SEQ ID NO: 59781 - DNA, 21 bp, Artificial Sequence
  primer
atggatctgccatctctccac

SEQ ID NO: 59782 - DNA, 36 bp, Artificial Sequence
  primer
gtaaaacgacggccagtcttctccactccctgcacc

SEQ ID NO: 59783 - DNA, 21 bp, Artificial Sequence
  primer
accatccatgctctcgctaag

SEQ ID NO: 59784 - DNA, 38 bp, Artificial Sequence
  primer
gtaaaacgacggccagttgagtggaggttccaaagacc

SEQ ID NO: 59785 - DNA, 21 bp, Artificial Sequence
  primer
tcggaggaaagtgtgaagtcc

SEQ ID NO: 59786 - DNA, 38 bp, Artificial Sequence
  primer
gtaaaacgacggccagttccttgctggactatgtctgc

SEQ ID NO: 59787 - DNA, 38 bp, Artificial Sequence
  primer
gtaaaacgacggccagttttgctccctaacaccctttc

SEQ ID NO: 59788 - DNA, 20 bp, Artificial Sequence
  primer
agctcattgcccttgaactg

SEQ ID NO: 59789 - DNA, 38 bp, Artificial Sequence
  primer
gtaaaacgacggccagtacgggatagatgtgacgttgg

SEQ ID NO: 59790 - DNA, 20 bp, Artificial Sequence
  primer
cctgtcccaggagtttcagg

SEQ ID NO: 59791 - DNA, 21 bp, Artificial Sequence
  primer
tcacctaagtcctgagagccc

SEQ ID NO: 59792 - DNA, 38 bp, Artificial Sequence
  primer
gtaaaacgacggccagttctggagactgtggactcgtg

SEQ ID NO: 59793 - DNA, 38 bp, Artificial Sequence
  primer
gtaaaacgacggccagtagctcaaacctggcaaagaag

SEQ ID NO: 59794 - DNA, 19 bp, Artificial Sequence
  primer
cttcaagcaggaacccgag

SEQ ID NO: 59795 - DNA, 20 bp, Artificial Sequence
  primer
tgagcaaggagctcaaccac

SEQ ID NO: 59796 - DNA, 21 bp, Artificial Sequence
  primer
ctgagttaaggagcctcccag

SEQ ID NO: 59797 - DNA, 20 bp, Artificial Sequence
  primer
gatgctgagtggcatcatcc

SEQ ID NO: 59798 - DNA, 38 bp, Artificial Sequence
  primer
gtaaaacgacggccagtgagtgttctgtctggctggtg

SEQ ID NO: 59799 - DNA, 21 bp, Artificial Sequence
  primer
cacagcagggactggaatatg

SEQ ID NO: 59800 - DNA, 39 bp, Artificial Sequence
  primer
gtaaaacgacggccagttttagtgttgcaatctggttcc

SEQ ID NO: 59801 - DNA, 42 bp, Artificial Sequence
  primer
gtaaaacgacggccagtcacatgtagggaaatctatgaccac

SEQ ID NO: 59802 - DNA, 21 bp, Artificial Sequence
  primer
ctcaagcgttgcttctcaatg

SEQ ID NO: 59803 - DNA, 23 bp, Artificial Sequence
  primer
aaatctcctgaaatctaccaccc

SEQ ID NO: 59804 - DNA, 23 bp, Artificial Sequence
  primer
cattgtctttcccattctttgtg

SEQ ID NO: 59805 - DNA, 25 bp, Artificial Sequence
  primer
cctagtaatcctaagattcgccaac

SEQ ID NO: 59806 - DNA, 21 bp, Artificial Sequence
  primer
ccatagcacacaaccacacag

SEQ ID NO: 59807 - DNA, 38 bp, Artificial Sequence
  primer
gtaaaacgacggccagtgcttgcctttcttctacctgg

SEQ ID NO: 59808 - DNA, 41 bp, Artificial Sequence
  primer
gtaaaacgacggccagtagcagaatcagagtgaagagtgtg

SEQ ID NO: 59809 - DNA, 21 bp, Artificial Sequence
  primer
gtttgcaggttgactggtgag

SEQ ID NO: 59810 - DNA, 38 bp, Artificial Sequence
  primer
gtaaaacgacggccagtgaacagtggacaaatgggttg

SEQ ID NO: 59811 - DNA, 21 bp, Artificial Sequence
  primer
ttaaatgggttggagtctggg

SEQ ID NO: 59812 - DNA, 38 bp, Artificial Sequence
  primer
gtaaaacgacggccagtactgaggcagagtctggatgc

SEQ ID NO: 59813 - DNA, 36 bp, Artificial Sequence
  primer
gtaaaacgacggccagtcagatctggccatagtggg

SEQ ID NO: 59814 - DNA, 38 bp, Artificial Sequence
  primer
gtaaaacgacggccagtacccaaatctcccatcttcag

SEQ ID NO: 59815 - DNA, 21 bp, Artificial Sequence
  primer
ttcagcaccattggctatttg

SEQ ID NO: 59816 - DNA, 37 bp, Artificial Sequence
  primer
gtaaaacgacggccagttcacttgagcccaggagttg

SEQ ID NO: 59817 - DNA, 38 bp, Artificial Sequence
  primer
gtaaaacgacggccagtctcattcacccacttccatgc

SEQ ID NO: 59818 - DNA, 21 bp, Artificial Sequence
  primer
gatcgtacctcactgtcacgc

SEQ ID NO: 59819 - DNA, 38 bp, Artificial Sequence
  primer
gtaaaacgacggccagttttcccagaagccataagcag

SEQ ID NO: 59820 - DNA, 37 bp, Artificial Sequence
  primer
gtaaaacgacggccagttttgctcagatcgttacggc

SEQ ID NO: 59821 - DNA, 38 bp, Artificial Sequence
  primer
gtaaaacgacggccagtagtagctgttgctgcctggag

SEQ ID NO: 59822 - DNA, 21 bp, Artificial Sequence
  primer
acggctacaggaattgaatgg

SEQ ID NO: 59823 - DNA, 38 bp, Artificial Sequence
  primer
gtaaaacgacggccagtgaaggtcaaatttctcgaccg

SEQ ID NO: 59824 - DNA, 22 bp, Artificial Sequence
  primer
cgagatcttctcttacctcccg

SEQ ID NO: 59825 - DNA, 37 bp, Artificial Sequence
  primer
gtaaaacgacggccagtgttgtgtgtctccagcccag

SEQ ID NO: 59826 - DNA, 19 bp, Artificial Sequence
  primer
cttgaggaccctggagctg

SEQ ID NO: 59827 - DNA, 21 bp, Artificial Sequence
  primer
gggtggtacctaccgtgtgac

SEQ ID NO: 59828 - DNA, 38 bp, Artificial Sequence
  primer
gtaaaacgacggccagtctcttggcatccattgctctc

SEQ ID NO: 59829 - DNA, 24 bp, Artificial Sequence
  primer
cttcaggtcatacccaagttgtag

SEQ ID NO: 59830 - DNA, 20 bp, Artificial Sequence
  primer
agggcaaaggtgatgtttcc

SEQ ID NO: 59831 - DNA, 26 bp, Artificial Sequence
  primer
tgtttaattggtcctattcttgtgtc

SEQ ID NO: 59832 - DNA, 22 bp, Artificial Sequence
  primer
ggagtcagcaggtaagttccag

SEQ ID NO: 59833 - DNA, 21 bp, Artificial Sequence
  primer
atctgttcatgttcttcgcct

SEQ ID NO: 59834 - DNA, 40 bp, Artificial Sequence
  primer
gtaaaacgacggccagtgaacatgttacttgccaaggttt

SEQ ID NO: 59835 - DNA, 40 bp, Artificial Sequence
  primer
gtaaaacgacggccagtaaggagggagtaatgatgctttg

SEQ ID NO: 59836 - DNA, 43 bp, Artificial Sequence
  primer
gtaaaacgacggccagttctgcaagaagaagagttgaatttac

SEQ ID NO: 59837 - DNA, 43 bp, Artificial Sequence
  primer
gtaaaacgacggccagttgtatctttggttattactcccttgg

SEQ ID NO: 59838 - DNA, 25 bp, Artificial Sequence
  primer
aaatccagttgtctttgaaattagg

SEQ ID NO: 59839 - DNA, 40 bp, Artificial Sequence
  primer
gtaaaacgacggccagtgaaagatccgatttgaaggtctg

SEQ ID NO: 59840 - DNA, 20 bp, Artificial Sequence
  primer
aagaccttgagggccatctg

SEQ ID NO: 59841 - DNA, 38 bp, Artificial Sequence
  primer
gtaaaacgacggccagtactgccctttcatgcaacttt

SEQ ID NO: 59842 - DNA, 39 bp, Artificial Sequence
  primer
gtaaaacgacggccagtggcattgcctaatctaagtggt

SEQ ID NO: 59843 - DNA, 25 bp, Artificial Sequence
  primer
gctgttaagctgctttgtgaatatc

SEQ ID NO: 59844 - DNA, 37 bp, Artificial Sequence
  primer
gtaaaacgacggccagtttgcccaaagtgactaaggc

SEQ ID NO: 59845 - DNA, 38 bp, Artificial Sequence
  primer
gtaaaacgacggccagtctcagcaaggcaagagaggtc

SEQ ID NO: 59846 - DNA, 21 bp, Artificial Sequence
  primer
gaggaaatggagacccacatc

SEQ ID NO: 59847 - DNA, 38 bp, Artificial Sequence
  primer
gtaaaacgacggccagttgctacaacctcaccgacaac

SEQ ID NO: 59848 - DNA, 21 bp, Artificial Sequence
  primer
tctaaagcacatctcccgagg

SEQ ID NO: 59849 - DNA, 21 bp, Artificial Sequence
  primer
tttcgttctgtgacaaggtgg

SEQ ID NO: 59850 - DNA, 38 bp, Artificial Sequence
  primer
gtaaaacgacggccagtcagttaggcgctgataaagcc

SEQ ID NO: 59851 - DNA, 38 bp, Artificial Sequence
  primer
gtaaaacgacggccagttgttacaccaccggtctgttc

SEQ ID NO: 59852 - DNA, 36 bp, Artificial Sequence
  primer
gtaaaacgacggccagtgcaggaacataacggaggc

SEQ ID NO: 59853 - DNA, 37 bp, Artificial Sequence
  primer
gtaaaacgacggccagtcagtatgcccttctggaccc

SEQ ID NO: 59854 - DNA, 19 bp, Artificial Sequence
  primer
cgtgtcacgaatggctgtc

SEQ ID NO: 59855 - DNA, 37 bp, Artificial Sequence
  primer
gtaaaacgacggccagtcagctcactggaagccaatc

SEQ ID NO: 59856 - DNA, 21 bp, Artificial Sequence
  primer
tcacagtctgggagggagaag

SEQ ID NO: 59857 - DNA, 20 bp, Artificial Sequence
  primer
gaaacggtctggtgaagctg

SEQ ID NO: 59858 - DNA, 21 bp, Artificial Sequence
  primer
cttctggtatttctcggcctg

SEQ ID NO: 59859 - DNA, 21 bp, Artificial Sequence
  primer
agctccctgcatgtttacacc

SEQ ID NO: 59860 - DNA, 18 bp, Artificial Sequence
  primer
cacagcctgcccaacctc

SEQ ID NO: 59861 - DNA, 19 bp, Artificial Sequence
  primer
aggaagggattcacgccag

SEQ ID NO: 59862 - DNA, 38 bp, Artificial Sequence
  primer
gtaaaacgacggccagttcagatcctgggagagtctgg

SEQ ID NO: 59863 - DNA, 35 bp, Artificial Sequence
  primer
gtaaaacgacggccagtacttagtccacccgccca

SEQ ID NO: 59864 - DNA, 22 bp, Artificial Sequence
  primer
caggtcactgatgaattgttgg

SEQ ID NO: 59865 - DNA, 21 bp, Artificial Sequence
  primer
cttggagggcttgtaatgtga

SEQ ID NO: 59866 - DNA, 39 bp, Artificial Sequence
  primer
gtaaaacgacggccagttcaaatgatctaacagggcagg

SEQ ID NO: 59867 - DNA, 38 bp, Artificial Sequence
  primer
gtaaaacgacggccagtttgccattcagatattcacca

SEQ ID NO: 59868 - DNA, 21 bp, Artificial Sequence
  primer
gctgtggcattcaccaaatac

SEQ ID NO: 59869 - DNA, 43 bp, Artificial Sequence
  primer
gtaaaacgacggccagtaaatttcaggaacaaatttagtgagg

SEQ ID NO: 59870 - DNA, 37 bp, Artificial Sequence
  primer
gtaaaacgacggccagtgagggctcttcgtgtcacag

SEQ ID NO: 59871 - DNA, 37 bp, Artificial Sequence
  primer
gtaaaacgacggccagtacgaacggaagtgcgtgtag

SEQ ID NO: 59872 - DNA, 37 bp, Artificial Sequence
  primer
gtaaaacgacggccagtttgcttctctgcctagctgc

SEQ ID NO: 59873 - DNA, 37 bp, Artificial Sequence
  primer
gtaaaacgacggccagtgagggttggagacccgtaag

SEQ ID NO: 59874 - DNA, 20 bp, Artificial Sequence
  primer
acaaagtgaggcagctggtg

SEQ ID NO: 59875 - DNA, 38 bp, Artificial Sequence
  primer
gtaaaacgacggccagttcaagcagacgctgttcactc

SEQ ID NO: 59876 - DNA, 38 bp, Artificial Sequence
  primer
gtaaaacgacggccagttacatcaaccaggaggtggtg

SEQ ID NO: 59877 - DNA, 21 bp, Artificial Sequence
  primer
cacatgaaattcaacaacccg

SEQ ID NO: 59878 - DNA, 18 bp, Artificial Sequence
  primer
gctctgtcgctgactccg

SEQ ID NO: 59879 - DNA, 21 bp, Artificial Sequence
  primer
gctgattgggtccaacttctc

SEQ ID NO: 59880 - DNA, 22 bp, Artificial Sequence
  primer
ccaagggatagtggtattggtg

SEQ ID NO: 59881 - DNA, 38 bp, Artificial Sequence
  primer
gtaaaacgacggccagtttcagtgtgtttccttccacg

SEQ ID NO: 59882 - DNA, 21 bp, Artificial Sequence
  primer
atctgcaacgagatcgtccac

SEQ ID NO: 59883 - DNA, 38 bp, Artificial Sequence
  primer
gtaaaacgacggccagtctgagggtgtcatcaatgcag

SEQ ID NO: 59884 - DNA, 38 bp, Artificial Sequence
  primer
gtaaaacgacggccagtagaggagggcatggaccttag

SEQ ID NO: 59885 - DNA, 20 bp, Artificial Sequence
  primer
aactcaggactgtccctcgg

SEQ ID NO: 59886 - DNA, 21 bp, Artificial Sequence
  primer
ccgcagagggagaagctagag

SEQ ID NO: 59887 - DNA, 21 bp, Artificial Sequence
  primer
gctaccctgttgtctgtgtgg

SEQ ID NO: 59888 - DNA, 21 bp, Artificial Sequence
  primer
aaggtagggtgtgtggtacgg

SEQ ID NO: 59889 - DNA, 21 bp, Artificial Sequence
  primer
gagggcagatggtctggatac

SEQ ID NO: 59890 - DNA, 37 bp, Artificial Sequence
  primer
gtaaaacgacggccagtaatcttgctggtaagcacgg

SEQ ID NO: 59891 - DNA, 36 bp, Artificial Sequence
  primer
gtaaaacgacggccagtgaagaggcccagttccagg

SEQ ID NO: 59892 - DNA, 24 bp, Artificial Sequence
  primer
tgtctaattgctttggctagaacc

SEQ ID NO: 59893 - DNA, 21 bp, Artificial Sequence
  primer
acttatgtatccaggtggcgg

SEQ ID NO: 59894 - DNA, 44 bp, Artificial Sequence
  primer
gtaaaacgacggccagtggagtttggaaataaaggttaatcaag

SEQ ID NO: 59895 - DNA, 24 bp, Artificial Sequence
  primer
tgcattaaggatagaactgaggtg

SEQ ID NO: 59896 - DNA, 38 bp, Artificial Sequence
  primer
gtaaaacgacggccagtcgtgaatggtttcatatgccc

SEQ ID NO: 59897 - DNA, 21 bp, Artificial Sequence
  primer
tttgaacctcaatggatgcac

SEQ ID NO: 59898 - DNA, 21 bp, Artificial Sequence
  primer
gtgcccattgtttgtgtcaag

SEQ ID NO: 59899 - DNA, 36 bp, Artificial Sequence
  primer
gtaaaacgacggccagtgtgtgggcacatcatccag

SEQ ID NO: 59900 - DNA, 41 bp, Artificial Sequence
  primer
gtaaaacgacggccagttttcctggatgcatgtatcttatc

SEQ ID NO: 59901 - DNA, 38 bp, Artificial Sequence
  primer
gtaaaacgacggccagttttccaagtttgggatggaac

SEQ ID NO: 59902 - DNA, 21 bp, Artificial Sequence
  primer
cagaagtgctggtttactggg

SEQ ID NO: 59903 - DNA, 21 bp, Artificial Sequence
  primer
tgcatctctagaagtgggcag

SEQ ID NO: 59904 - DNA, 20 bp, Artificial Sequence
  primer
gctgtgtcatcccattgcag

SEQ ID NO: 59905 - DNA, 23 bp, Artificial Sequence
  primer
gggtggaaacgtatcaacgtaag

SEQ ID NO: 59906 - DNA, 37 bp, Artificial Sequence
  primer
gtaaaacgacggccagtccgagaggtctcttgttccc

SEQ ID NO: 59907 - DNA, 41 bp, Artificial Sequence
  primer
gtaaaacgacggccagtttcctgagagaattgcctctaaac

SEQ ID NO: 59908 - DNA, 21 bp, Artificial Sequence
  primer
tactcaggagcttgacgtggg

SEQ ID NO: 59909 - DNA, 38 bp, Artificial Sequence
  primer
gtaaaacgacggccagtttgggagtaagtggatagggc

SEQ ID NO: 59910 - DNA, 38 bp, Artificial Sequence
  primer
gtaaaacgacggccagtggcatgatgcaaatgataggg

SEQ ID NO: 59911 - DNA, 21 bp, Artificial Sequence
  primer
gaaccgaagatgaagaccaaa

SEQ ID NO: 59912 - DNA, 38 bp, Artificial Sequence
  primer
gtaaaacgacggccagtcttcctcaatgtgaagggtcg

SEQ ID NO: 59913 - DNA, 21 bp, Artificial Sequence
  primer
gccaataaattgagacgttgg

SEQ ID NO: 59914 - DNA, 38 bp, Artificial Sequence
  primer
gtaaaacgacggccagtgttccttcgaaacttggttgg

SEQ ID NO: 59915 - DNA, 21 bp, Artificial Sequence
  primer
ctggaaggaagaaacaacgtg

SEQ ID NO: 59916 - DNA, 21 bp, Artificial Sequence
  primer
attgcatcaccctgaaatgtg

SEQ ID NO: 59917 - DNA, 21 bp, Artificial Sequence
  primer
gggtgacagagtgagaccttg

SEQ ID NO: 59918 - DNA, 21 bp, Artificial Sequence
  primer
aagattgcttgagcccagaag

SEQ ID NO: 59919 - DNA, 38 bp, Artificial Sequence
  primer
gtaaaacgacggccagttttccaattcacacaagcctc

SEQ ID NO: 59920 - DNA, 21 bp, Artificial Sequence
  primer
aggccctctaacatcctgacc

SEQ ID NO: 59921 - DNA, 37 bp, Artificial Sequence
  primer
gtaaaacgacggccagtagtcagcagaagctgcctgt

SEQ ID NO: 59922 - DNA, 38 bp, Artificial Sequence
  primer
gtaaaacgacggccagtcagccgtatgttcatggttct

SEQ ID NO: 59923 - DNA, 21 bp, Artificial Sequence
  primer
cagccatgctctcagaagttg

SEQ ID NO: 59924 - DNA, 21 bp, Artificial Sequence
  primer
tcaaggccttagagaactggc

SEQ ID NO: 59925 - DNA, 21 bp, Artificial Sequence
  primer
aggacgggtaggtctcaactg

SEQ ID NO: 59926 - DNA, 38 bp, Artificial Sequence
  primer
gtaaaacgacggccagtcaaccatatatgtccaccggc

SEQ ID NO: 59927 - DNA, 38 bp, Artificial Sequence
  primer
gtaaaacgacggccagtcttccaccttcagaccaccac

SEQ ID NO: 59928 - DNA, 19 bp, Artificial Sequence
  primer
ttggaccgaaatcacctcg

SEQ ID NO: 59929 - DNA, 24 bp, Artificial Sequence
  primer
cacatctcagtgacagaagaatga

SEQ ID NO: 59930 - DNA, 39 bp, Artificial Sequence
  primer
gtaaaacgacggccagttcttgaagtctgggtatttggg

SEQ ID NO: 59931 - DNA, 21 bp, Artificial Sequence
  primer
aacagagtgaagggatgccac

SEQ ID NO: 59932 - DNA, 22 bp, Artificial Sequence
  primer
tgccctaaccttagtgatggtg

SEQ ID NO: 59933 - DNA, 39 bp, Artificial Sequence
  primer
gtaaaacgacggccagtgaacatttgcgcattgatgtag

SEQ ID NO: 59934 - DNA, 21 bp, Artificial Sequence
  primer
atgaaatacctgccacccatc

SEQ ID NO: 59935 - DNA, 22 bp, Artificial Sequence
  primer
catccttcaaagagttcatggc

SEQ ID NO: 59936 - DNA, 21 bp, Artificial Sequence
  primer
cctagtgcttccttgccattc

SEQ ID NO: 59937 - DNA, 24 bp, Artificial Sequence
  primer
catgggtctataaccttaagggac

SEQ ID NO: 59938 - DNA, 40 bp, Artificial Sequence
  primer
gtaaaacgacggccagttttggataattctgttggatgtt

SEQ ID NO: 59939 - DNA, 45 bp, Artificial Sequence
  primer
gtaaaacgacggccagtcagtatgcagtgaataagaatttaagca

SEQ ID NO: 59940 - DNA, 38 bp, Artificial Sequence
  primer
gtaaaacgacggccagtttgactccaagccaatcaatg

SEQ ID NO: 59941 - DNA, 38 bp, Artificial Sequence
  primer
gtaaaacgacggccagtacatggaagcaaagcaatagg

SEQ ID NO: 59942 - DNA, 39 bp, Artificial Sequence
  primer
gtaaaacgacggccagtcatggatggattcattgttagc

SEQ ID NO: 59943 - DNA, 38 bp, Artificial Sequence
  primer
gtaaaacgacggccagtagggaagtatgctgtgtgcaa

SEQ ID NO: 59944 - DNA, 20 bp, Artificial Sequence
  primer
aagctgtgggcagatacgtg

SEQ ID NO: 59945 - DNA, 36 bp, Artificial Sequence
  primer
gtaaaacgacggccagtggccaggatcttcttggtg

SEQ ID NO: 59946 - DNA, 21 bp, Artificial Sequence
  primer
aggaaggaattgacttcaggc

SEQ ID NO: 59947 - DNA, 38 bp, Artificial Sequence
  primer
gtaaaacgacggccagtgttgcttattgcctagggctc

SEQ ID NO: 59948 - DNA, 38 bp, Artificial Sequence
  primer
gtaaaacgacggccagttaacaatttggtgagcgcttg

SEQ ID NO: 59949 - DNA, 21 bp, Artificial Sequence
  primer
gattctcagggatttgagccc

SEQ ID NO: 59950 - DNA, 21 bp, Artificial Sequence
  primer
tttgcagccttacttctgctg

SEQ ID NO: 59951 - DNA, 21 bp, Artificial Sequence
  primer
tattggtcttggcttggttgc

SEQ ID NO: 59952 - DNA, 22 bp, Artificial Sequence
  primer
tggaaacagcatccaactttag

SEQ ID NO: 59953 - DNA, 21 bp, Artificial Sequence
  primer
cccagaatcttctgcaatgtg

SEQ ID NO: 59954 - DNA, 40 bp, Artificial Sequence
  primer
gtaaaacgacggccagttgtatttctgcctaaggatgagg

SEQ ID NO: 59955 - DNA, 22 bp, Artificial Sequence
  primer
ttctgtggattgtctcatttcc

SEQ ID NO: 59956 - DNA, 38 bp, Artificial Sequence
  primer
gtaaaacgacggccagttgtcggtctataaagcctcgc

SEQ ID NO: 59957 - DNA, 19 bp, Artificial Sequence
  primer
cagttggagtcccaggagc

SEQ ID NO: 59958 - DNA, 21 bp, Artificial Sequence
  primer
agaagaagctccttgcttccc

SEQ ID NO: 59959 - DNA, 38 bp, Artificial Sequence
  primer
gtaaaacgacggccagtcaccagccacttgtctgtttc

SEQ ID NO: 59960 - DNA, 21 bp, Artificial Sequence
  primer
tcactttcctcaagctctccg

SEQ ID NO: 59961 - DNA, 21 bp, Artificial Sequence
  primer
gacctacagctcccagacgac

SEQ ID NO: 59962 - DNA, 37 bp, Artificial Sequence
  primer
gtaaaacgacggccagttgtcgaggctctgcagaaag

SEQ ID NO: 59963 - DNA, 37 bp, Artificial Sequence
  primer
gtaaaacgacggccagtcttcaggatctgccatgtcg

SEQ ID NO: 59964 - DNA, 36 bp, Artificial Sequence
  primer
gtaaaacgacggccagtcttggccttggtggctatg

SEQ ID NO: 59965 - DNA, 19 bp, Artificial Sequence
  primer
atgtgcagctaacggtccc

SEQ ID NO: 59966 - DNA, 38 bp, Artificial Sequence
  primer
gtaaaacgacggccagtaactggtgatatggcttgctg

SEQ ID NO: 59967 - DNA, 37 bp, Artificial Sequence
  primer
gtaaaacgacggccagtttgccatgagccaagatcac

SEQ ID NO: 59968 - DNA, 21 bp, Artificial Sequence
  primer
gatatgtccaccgaatctccc

SEQ ID NO: 59969 - DNA, 20 bp, Artificial Sequence
  primer
caacgtgtgtctcatgctgg

SEQ ID NO: 59970 - DNA, 21 bp, Artificial Sequence
  primer
gaaagggtaacatcagcctcg

SEQ ID NO: 59971 - DNA, 38 bp, Artificial Sequence
  primer
gtaaaacgacggccagtcgctacctggtgatctactgc

SEQ ID NO: 59972 - DNA, 21 bp, Artificial Sequence
  primer
gtacctcgccaagaactgcac

SEQ ID NO: 59973 - DNA, 21 bp, Artificial Sequence
  primer
cacctaagctcggtcttcctg

SEQ ID NO: 59974 - DNA, 20 bp, Artificial Sequence
  primer
ggtctgaacagagacgtggg

SEQ ID NO: 59975 - DNA, 19 bp, Artificial Sequence
  primer
aggctgtgcacgctgtatg

SEQ ID NO: 59976 - DNA, 21 bp, Artificial Sequence
  primer
cctgcacctagccagtttgtc

SEQ ID NO: 59977 - DNA, 20 bp, Artificial Sequence
  primer
ctcaacctctcaggcgacac

SEQ ID NO: 59978 - DNA, 36 bp, Artificial Sequence
  primer
gtaaaacgacggccagtctccctcccgaatttgaag

SEQ ID NO: 59979 - DNA, 38 bp, Artificial Sequence
  primer
gtaaaacgacggccagtagaacagcgtgtcccacaaag

SEQ ID NO: 59980 - DNA, 21 bp, Artificial Sequence
  primer
tgtgttacccatgaaacccac

SEQ ID NO: 59981 - DNA, 23 bp, Artificial Sequence
  primer
tctagcctggatgacagtgagac

SEQ ID NO: 59982 - DNA, 40 bp, Artificial Sequence
  primer
gtaaaacgacggccagtgaaaccctgttctttgtttctgg

SEQ ID NO: 59983 - DNA, 25 bp, Artificial Sequence
  primer
acagtaaccctgcaagatataaagg

SEQ ID NO: 59984 - DNA, 41 bp, Artificial Sequence
  primer
gtaaaacgacggccagttggatttgaatatagcaaaggctg

SEQ ID NO: 59985 - DNA, 23 bp, Artificial Sequence
  primer
ggaaggctctgaagatgcttatg

SEQ ID NO: 59986 - DNA, 37 bp, Artificial Sequence
  primer
gtaaaacgacggccagtaacaccacaatgcacaccac

SEQ ID NO: 59987 - DNA, 21 bp, Artificial Sequence
  primer
cccaccatcaagcactgtaac

SEQ ID NO: 59988 - DNA, 25 bp, Artificial Sequence
  primer
gcccagccttaaatgtttctaatac

SEQ ID NO: 59989 - DNA, 24 bp, Artificial Sequence
  primer
tgaagaaattgaggccttagaagt

SEQ ID NO: 59990 - DNA, 36 bp, Artificial Sequence
  primer
gtaaaacgacggccagtgcctgcagctctctgcatc

SEQ ID NO: 59991 - DNA, 38 bp, Artificial Sequence
  primer
gtaaaacgacggccagttgccattacctccttactcgg

SEQ ID NO: 59992 - DNA, 21 bp, Artificial Sequence
  primer
ttagcctggactcttggatgg

SEQ ID NO: 59993 - DNA, 38 bp, Artificial Sequence
  primer
gtaaaacgacggccagtttctcagggcatcttggactc

SEQ ID NO: 59994 - DNA, 18 bp, Artificial Sequence
  primer
ccactgcacactccagcc

SEQ ID NO: 59995 - DNA, 39 bp, Artificial Sequence
  primer
gtaaaacgacggccagttggagatggcagattattggtc

SEQ ID NO: 59996 - DNA, 42 bp, Artificial Sequence
  primer
gtaaaacgacggccagtactgttggtggttgaaataggtatc

SEQ ID NO: 59997 - DNA, 40 bp, Artificial Sequence
  primer
gtaaaacgacggccagtgctttggttctaaatggttggag

SEQ ID NO: 59998 - DNA, 22 bp, Artificial Sequence
  primer
ggtcctcttaaagccaaaggtc

SEQ ID NO: 59999 - DNA, 38 bp, Artificial Sequence
  primer
gtaaaacgacggccagtgccatcagggacatgatgtag

SEQ ID NO: 60000 - DNA, 22 bp, Artificial Sequence
  primer
tgagggtacagtttgcctcttg

SEQ ID NO: 60001 - DNA, 38 bp, Artificial Sequence
  primer
gtaaaacgacggccagtttcagcttggcttattcatgg

SEQ ID NO: 60002 - DNA, 29 bp, Artificial Sequence
  primer
tttaaggaactagatgctttagagaagat

SEQ ID NO: 60003 - DNA, 22 bp, Artificial Sequence
  primer
caacatgccacttagtttgagc

SEQ ID NO: 60004 - DNA, 38 bp, Artificial Sequence
  primer
gtaaaacgacggccagtctgcaagatgaatgtgctgtg

SEQ ID NO: 60005 - DNA, 22 bp, Artificial Sequence
  primer
acagaactcacatcattgcctg

SEQ ID NO: 60006 - DNA, 21 bp, Artificial Sequence
  primer
ccctgactcacctttgacatc

SEQ ID NO: 60007 - DNA, 38 bp, Artificial Sequence
  primer
gtaaaacgacggccagtccacacgcagcatttctagtg

SEQ ID NO: 60008 - DNA, 38 bp, Artificial Sequence
  primer
gtaaaacgacggccagtatcgtgcctggctggtattag

SEQ ID NO: 60009 - DNA, 38 bp, Artificial Sequence
  primer
gtaaaacgacggccagtagagagagaaaccttgcccag

SEQ ID NO: 60010 - DNA, 40 bp, Artificial Sequence
  primer
gtaaaacgacggccagtaactccctttctatgccattgtc

SEQ ID NO: 60011 - DNA, 38 bp, Artificial Sequence
  primer
gtaaaacgacggccagtttctcaggtccaggatgacag

SEQ ID NO: 60012 - DNA, 38 bp, Artificial Sequence
  primer
gtaaaacgacggccagttggtctcgaacttctgacctc

SEQ ID NO: 60013 - DNA, 38 bp, Artificial Sequence
  primer
gtaaaacgacggccagtgtggagatgcaggagttgatg

SEQ ID NO: 60014 - DNA, 21 bp, Artificial Sequence
  primer
ccaagataagggcgaactttg

SEQ ID NO: 60015 - DNA, 38 bp, Artificial Sequence
  primer
gtaaaacgacggccagtctcaataaatcccatccagcc

SEQ ID NO: 60016 - DNA, 35 bp, Artificial Sequence
  primer
gtaaaacgacggccagtgggacaaggtagggaggg

SEQ ID NO: 60017 - DNA, 38 bp, Artificial Sequence
  primer
gtaaaacgacggccagtaataatgggaggaggagtcgg

SEQ ID NO: 60018 - DNA, 21 bp, Artificial Sequence
  primer
agggagacttcttggaggagg

SEQ ID NO: 60019 - DNA, 38 bp, Artificial Sequence
  primer
gtaaaacgacggccagtccttcatcaagatggagccag

SEQ ID NO: 60020 - DNA, 38 bp, Artificial Sequence
  primer
gtaaaacgacggccagtgtcctttgggcctatctgttg

SEQ ID NO: 60021 - DNA, 38 bp, Artificial Sequence
  primer
gtaaaacgacggccagttttcagaagctgctttcaagg

SEQ ID NO: 60022 - DNA, 20 bp, Artificial Sequence
  primer
gaagtgcttcctggcttgag

SEQ ID NO: 60023 - DNA, 36 bp, Artificial Sequence
  primer
gtaaaacgacggccagtgttagtggccgtccgtcag

SEQ ID NO: 60024 - DNA, 41 bp, Artificial Sequence
  primer
gtaaaacgacggccagtgaaacttgagtataatgtgctggc

SEQ ID NO: 60025 - DNA, 38 bp, Artificial Sequence
  primer
gtaaaacgacggccagtgcaggtcaacagtcatcgttc

SEQ ID NO: 60026 - DNA, 38 bp, Artificial Sequence
  primer
gtaaaacgacggccagtgggtgacatgatctttcctgc

SEQ ID NO: 60027 - DNA, 35 bp, Artificial Sequence
  primer
gtaaaacgacggccagtcccgcctcattaatctgc

SEQ ID NO: 60028 - DNA, 38 bp, Artificial Sequence
  primer
gtaaaacgacggccagtctgtgctgtaaagaaggcgtc

SEQ ID NO: 60029 - DNA, 37 bp, Artificial Sequence
  primer
gtaaaacgacggccagtcctgactccttcctgctgtg

SEQ ID NO: 60030 - DNA, 22 bp, Artificial Sequence
  primer
cctttcccaggactgtgttatc

SEQ ID NO: 60031 - DNA, 21 bp, Artificial Sequence
  primer
agtgacattgcctgagctgtg

SEQ ID NO: 60032 - DNA, 39 bp, Artificial Sequence
  primer
gtaaaacgacggccagtcagaggtgtgataagcctggac

SEQ ID NO: 60033 - DNA, 38 bp, Artificial Sequence
  primer
gtaaaacgacggccagtgagacccaggaggttagggtg

SEQ ID NO: 60034 - DNA, 37 bp, Artificial Sequence
  primer
gtaaaacgacggccagtatgactcatgacggtaggcg

SEQ ID NO: 60035 - DNA, 38 bp, Artificial Sequence
  primer
gtaaaacgacggccagttgcattcctagcaccagaaac

SEQ ID NO: 60036 - DNA, 21 bp, Artificial Sequence
  primer
gagcctgtgaagttcgctttc

SEQ ID NO: 60037 - DNA, 21 bp, Artificial Sequence
  primer
ctttggttggaggaaaccatc

SEQ ID NO: 60038 - DNA, 21 bp, Artificial Sequence
  primer
ttcatgaagtttcctgcttgc

SEQ ID NO: 60039 - DNA, 38 bp, Artificial Sequence
  primer
gtaaaacgacggccagtcacacagcgagttagtgatgc

SEQ ID NO: 60040 - DNA, 38 bp, Artificial Sequence
  primer
gtaaaacgacggccagtcactgaggcaagaaatgttcg

SEQ ID NO: 60041 - DNA, 21 bp, Artificial Sequence
  primer
tttggaattggcatttgtagg

SEQ ID NO: 60042 - DNA, 21 bp, Artificial Sequence
  primer
gtaagggagaacgggttaggc

SEQ ID NO: 60043 - DNA, 21 bp, Artificial Sequence
  primer
tcagaatccaaatgcgttgtc

SEQ ID NO: 60044 - DNA, 38 bp, Artificial Sequence
  primer
gtaaaacgacggccagtaaacgactcctgacctttccc

SEQ ID NO: 60045 - DNA, 21 bp, Artificial Sequence
  primer
tacagggtggaggaatcacag

SEQ ID NO: 60046 - DNA, 37 bp, Artificial Sequence
  primer
gtaaaacgacggccagtaccaagacaccaagtgcgac

SEQ ID NO: 60047 - DNA, 38 bp, Artificial Sequence
  primer
gtaaaacgacggccagttacttcgcctcctcctttgag

SEQ ID NO: 60048 - DNA, 20 bp, Artificial Sequence
  primer
ctggcctcgtttcccttatc

SEQ ID NO: 60049 - DNA, 38 bp, Artificial Sequence
  primer
gtaaaacgacggccagtttctgaataccgcggagaaac

SEQ ID NO: 60050 - DNA, 18 bp, Artificial Sequence
  primer
ccaagaccagtaggcggg

SEQ ID NO: 60051 - DNA, 21 bp, Artificial Sequence
  primer
actgctgtccctgtttccaag

SEQ ID NO: 60052 - DNA, 38 bp, Artificial Sequence
  primer
gtaaaacgacggccagtacccatgactggtagtgcaag

SEQ ID NO: 60053 - DNA, 38 bp, Artificial Sequence
  primer
gtaaaacgacggccagtagccaggcagataactgttcc

SEQ ID NO: 60054 - DNA, 21 bp, Artificial Sequence
  primer
tgtaaagagccatgtcccagg

SEQ ID NO: 60055 - DNA, 38 bp, Artificial Sequence
  primer
gtaaaacgacggccagttgccaatgtcttcatgttgtg

SEQ ID NO: 60056 - DNA, 38 bp, Artificial Sequence
  primer
gtaaaacgacggccagttggaccatagtttacccaccc

SEQ ID NO: 60057 - DNA, 37 bp, Artificial Sequence
  primer
gtaaaacgacggccagtaaccttcagcccatgatttg

SEQ ID NO: 60058 - DNA, 22 bp, Artificial Sequence
  primer
gcattgtatctcttcgttgagc

SEQ ID NO: 60059 - DNA, 38 bp, Artificial Sequence
  primer
gtaaaacgacggccagtagaggatggtccagagacctg

SEQ ID NO: 60060 - DNA, 21 bp, Artificial Sequence
  primer
tgattcaccgtggagtaaagc

SEQ ID NO: 60061 - DNA, 39 bp, Artificial Sequence
  primer
gtaaaacgacggccagtggttctctggatgaaaggtgtg

SEQ ID NO: 60062 - DNA, 37 bp, Artificial Sequence
  primer
gtaaaacgacggccagtgtacacctcggagtacgggc

SEQ ID NO: 60063 - DNA, 38 bp, Artificial Sequence
  primer
gtaaaacgacggccagtaactagcgccctgactgacac

SEQ ID NO: 60064 - DNA, 22 bp, Artificial Sequence
  primer
tggactgggtgatacttcaagg

SEQ ID NO: 60065 - DNA, 22 bp, Artificial Sequence
  primer
tgctaaatttgacatcactggg

SEQ ID NO: 60066 - DNA, 40 bp, Artificial Sequence
  primer
gtaaaacgacggccagtggcaaacatcatgacactacacc

SEQ ID NO: 60067 - DNA, 38 bp, Artificial Sequence
  primer
gtaaaacgacggccagtgcttaagccactaaattgccc

SEQ ID NO: 60068 - DNA, 20 bp, Artificial Sequence
  primer
tcccgtcagtgaatcaggag

SEQ ID NO: 60069 - DNA, 21 bp, Artificial Sequence
  primer
aatccgatttccatccagttg

SEQ ID NO: 60070 - DNA, 38 bp, Artificial Sequence
  primer
gtaaaacgacggccagtgcaggttagtggcttggagac

SEQ ID NO: 60071 - DNA, 38 bp, Artificial Sequence
  primer
gtaaaacgacggccagtatcgtaagccagatacaggcg

SEQ ID NO: 60072 - DNA, 37 bp, Artificial Sequence
  primer
gtaaaacgacggccagtcaaggtaggcggagagaagg

SEQ ID NO: 60073 - DNA, 38 bp, Artificial Sequence
  primer
gtaaaacgacggccagtaatccgatttccatccagttg

SEQ ID NO: 60074 - DNA, 39 bp, Artificial Sequence
  primer
gtaaaacgacggccagttctacccaagctccaactcatc

SEQ ID NO: 60075 - DNA, 38 bp, Artificial Sequence
  primer
gtaaaacgacggccagtctctggacccaagcatttcac

SEQ ID NO: 60076 - DNA, 38 bp, Artificial Sequence
  primer
gtaaaacgacggccagtagggcagtaaatgtgtcaccc

SEQ ID NO: 60077 - DNA, 22 bp, Artificial Sequence
  primer
tggatcttgtagctttcatccc

SEQ ID NO: 60078 - DNA, 38 bp, Artificial Sequence; identical to SEQ ID NO: 60070
  primer

SEQ ID NO: 60079 - DNA, 21 bp, Artificial Sequence
  primer
tgcaagaccctatgtgaccag

SEQ ID NO: 60080 - DNA, 38 bp, Artificial Sequence
  primer
gtaaaacgacggccagtatgcaataggcagattagccc

SEQ ID NO: 60081 - DNA, 38 bp, Artificial Sequence
  primer
gtaaaacgacggccagtccaaatgaagatctccctgaa

SEQ ID NO: 60082 - DNA, 20 bp, Artificial Sequence
  primer
actgtcaccaatgtcgagcc

SEQ ID NO: 60083 - DNA, 21 bp, Artificial Sequence
  primer
agcccacagtctgtcactttg

SEQ ID NO: 60084 - DNA, 38 bp, Artificial Sequence
  primer
gtaaaacgacggccagtgcaattctgtttgcattcacc

SEQ ID NO: 60085 - DNA, 24 bp, Artificial Sequence
  primer
aaatgtcagttaacggtgtctcag

SEQ ID NO: 60086 - DNA, 21 bp, Artificial Sequence
  primer
ttcaggtttgcatgggtagtg

SEQ ID NO: 60087 - DNA, 22 bp, Artificial Sequence
  primer
tcgtctatcagtggacatttgg

SEQ ID NO: 60088 - DNA, 19 bp, Artificial Sequence
  primer
cgacgcatgacatggagag

SEQ ID NO: 60089 - DNA, 22 bp, Artificial Sequence
  primer
aaatcccagacttcagcactgt

SEQ ID NO: 60090 - DNA, 38 bp, Artificial Sequence
  primer
gtaaaacgacggccagtcatcaacaagcagctgacgac

SEQ ID NO: 60091 - DNA, 25 bp, Artificial Sequence
  primer
ggttatctgatgagaacttgtttgc

SEQ ID NO: 60092 - DNA, 19 bp, Artificial Sequence
  primer
agaatcagggcaggcagag

SEQ ID NO: 60093 - DNA, 21 bp, Artificial Sequence
  primer
aatcagtgagaagggccagag

SEQ ID NO: 60094 - DNA, 38 bp, Artificial Sequence
  primer
gtaaaacgacggccagtacgtgcttcgtgacttcattc

SEQ ID NO: 60095 - DNA, 38 bp, Artificial Sequence
  primer
gtaaaacgacggccagtattcggacaaggtaggcagac

SEQ ID NO: 60096 - DNA, 38 bp, Artificial Sequence
  primer
gtaaaacgacggccagtcttccagaaggccctaacctc

SEQ ID NO: 60097 - DNA, 37 bp, Artificial Sequence
  primer
gtaaaacgacggccagtctgcaggaggaggaagtgac

SEQ ID NO: 60098 - DNA, 21 bp, Artificial Sequence
  primer
ggttgtgctgagctgagattg

SEQ ID NO: 60099 - DNA, 27 bp, Artificial Sequence
  primer
catcattacagttaaattatgacccaa

SEQ ID NO: 60100 - DNA, 41 bp, Artificial Sequence
  primer
gtaaaacgacggccagtgccagtacatcacttaaatcaccc

SEQ ID NO: 60101 - DNA, 21 bp, Artificial Sequence
  primer
ctccgtttcctggcagtctac

SEQ ID NO: 60102 - DNA, 21 bp, Artificial Sequence
  primer
attcctccacagttccaggac

SEQ ID NO: 60103 - DNA, 36 bp, Artificial Sequence
  primer
gtaaaacgacggccagtaaacctgtgagagcggctg

SEQ ID NO: 60104 - DNA, 22 bp, Artificial Sequence
  primer
ctccaatggcatatatggtctg

SEQ ID NO: 60105 - DNA, 21 bp, Artificial Sequence
  primer
gcaattccaccatgccagtag

SEQ ID NO: 60106 - DNA, 40 bp, Artificial Sequence
  primer
gtaaaacgacggccagtggacagaattcactcattccaag

SEQ ID NO: 60107 - DNA, 43 bp, Artificial Sequence
  primer
gtaaaacgacggccagtttgtgagtgggaaattattattcatc

SEQ ID NO: 60108 - DNA, 38 bp, Artificial Sequence
  primer
gtaaaacgacggccagtggatggtagcttggtctctcc

SEQ ID NO: 60109 - DNA, 22 bp, Artificial Sequence
  primer
gaatcccaaggaaataaggtgg

SEQ ID NO: 60110 - DNA, 38 bp, Artificial Sequence
  primer
gtaaaacgacggccagtactgatccagagtcaccaagg

SEQ ID NO: 60111 - DNA, 36 bp, Artificial Sequence
  primer
gtaaaacgacggccagtggactttgggttgggtttc

SEQ ID NO: 60112 - DNA, 39 bp, Artificial Sequence
  primer
gtaaaacgacggccagtcataatgccatggagaccatac

SEQ ID NO: 60113 - DNA, 38 bp, Artificial Sequence
  primer
gtaaaacgacggccagtcatatttggcgtgtctggttg

SEQ ID NO: 60114 - DNA, 41 bp, Artificial Sequence
  primer
gtaaaacgacggccagttgcttacatcctttcaagacattg

SEQ ID NO: 60115 - DNA, 38 bp, Artificial Sequence
  primer
gtaaaacgacggccagttttcatcaaccagagctggac

SEQ ID NO: 60116 - DNA, 21 bp, Artificial Sequence
  primer
ccagggatttcctgtgatttg

SEQ ID NO: 60117 - DNA, 38 bp, Artificial Sequence
  primer
gtaaaacgacggccagttgtcccagaaataccacatgc

SEQ ID NO: 60118 - DNA, 21 bp, Artificial Sequence
  primer
tttgtaatggctttcctttgg

SEQ ID NO: 60119 - DNA, 21 bp, Artificial Sequence
  primer
tcctcatgccagatgatgaag

SEQ ID NO: 60120 - DNA, 38 bp, Artificial Sequence
  primer
gtaaaacgacggccagtcttgtgatcatgccaatccac

SEQ ID NO: 60121 - DNA, 40 bp, Artificial Sequence
  primer
gtaaaacgacggccagtgcagaaatgtatgcagtaggagc

SEQ ID NO: 60122 - DNA, 38 bp, Artificial Sequence
  primer
gtaaaacgacggccagtacagatgcactctggagatgg

SEQ ID NO: 60123 - DNA, 21 bp, Artificial Sequence
  primer
tagaggcttggtgtgcatgtg

SEQ ID NO: 60124 - DNA, 37 bp, Artificial Sequence
  primer
gtaaaacgacggccagtctggcaggagcttctctgtg

SEQ ID NO: 60125 - DNA, 21 bp, Artificial Sequence
  primer
caccttgtgtgtgagatgcag

SEQ ID NO: 60126 - DNA, 38 bp, Artificial Sequence
  primer
gtaaaacgacggccagtgcctgtgcactgacaaagaag

SEQ ID NO: 60127 - DNA, 38 bp, Artificial Sequence
  primer
gtaaaacgacggccagtagaagtcctgttggaagcgtg

SEQ ID NO: 60128 - DNA, 38 bp, Artificial Sequence
  primer
gtaaaacgacggccagtaagtcagtaggagggctggtg

SEQ ID NO: 60129 - DNA, 21 bp, Artificial Sequence
  primer
ccacacagtggttactgctgc

SEQ ID NO: 60130 - DNA, 37 bp, Artificial Sequence
  primer
gtaaaacgacggccagtgtcgcagaatgctgtacgtg

SEQ ID NO: 60131 - DNA, 37 bp, Artificial Sequence
  primer
gtaaaacgacggccagtaacgcttgagatcctctccg

SEQ ID NO: 60132 - DNA, 38 bp, Artificial Sequence
  primer
gtaaaacgacggccagtagtagaagctcccatccctgc

SEQ ID NO: 60133 - DNA, 22 bp, Artificial Sequence
  primer
ctggcctgtaatttcttatggc

SEQ ID NO: 60134 - DNA, 38 bp, Artificial Sequence
  primer
gtaaaacgacggccagtttacccatcttggtggctctc

SEQ ID NO: 60135 - DNA, 38 bp, Artificial Sequence
  primer
gtaaaacgacggccagttatccacgtgtcatgggactc

SEQ ID NO: 60136 - DNA, 21 bp, Artificial Sequence
  primer
gtgcctgggtaacatgagtgg

SEQ ID NO: 60137 - DNA, 21 bp, Artificial Sequence
  primer
aataaactgccttgagggtgg

SEQ ID NO: 60138 - DNA, 19 bp, Artificial Sequence
  primer
acatgtcaccagccacctg

SEQ ID NO: 60139 - DNA, 20 bp, Artificial Sequence
  primer
catgcaacatttaggcctgg

SEQ ID NO: 60140 - DNA, 36 bp, Artificial Sequence
  primer
gtaaaacgacggccagtctactttggttccgccgag

SEQ ID NO: 60141 - DNA, 21 bp, Artificial Sequence
  primer
ggcgtgagtgcctcttctatc

SEQ ID NO: 60142 - DNA, 18 bp, Artificial Sequence
  primer
atggtgtgaacccgggag

SEQ ID NO: 60143 - DNA, 39 bp, Artificial Sequence
  primer
gtaaaacgacggccagttgtgggttgaatcgaaattacc

SEQ ID NO: 60144 - DNA, 20 bp, Artificial Sequence
  primer
aacaccatggagcacctcag

SEQ ID NO: 60145 - DNA, 38 bp, Artificial Sequence
  primer
gtaaaacgacggccagttgcaacgactgtctcttctgg

SEQ ID NO: 60146 - DNA, 42 bp, Artificial Sequence
  primer
gtaaaacgacggccagttctctagaagctttgaatgaggaaa

SEQ ID NO: 60147 - DNA, 43 bp, Artificial Sequence
  primer
gtaaaacgacggccagtaaactggtagctgtttgttattcttg

SEQ ID NO: 60148 - DNA, 39 bp, Artificial Sequence
  primer
gtaaaacgacggccagtgcacctaaagccatattggaag

SEQ ID NO: 60149 - DNA, 38 bp, Artificial Sequence
  primer
gtaaaacgacggccagtttcagcctctctcggtaaagc

SEQ ID NO: 60150 - DNA, 38 bp, Artificial Sequence
  primer
gtaaaacgacggccagttacaggtggaaaggatgaggg

SEQ ID NO: 60151 - DNA, 38 bp, Artificial Sequence
  primer
gtaaaacgacggccagttccgtgtccttgacatggtag

SEQ ID NO: 60152 - DNA, 21 bp, Artificial Sequence
  primer
atgacagatgaactcgttggg

SEQ ID NO: 60153 - DNA, 19 bp, Artificial Sequence
  primer
cccagttccagggatgttg

SEQ ID NO: 60154 - DNA, 21 bp, Artificial Sequence
  primer
gaggcatccagttggaagaag

SEQ ID NO: 60155 - DNA, 38 bp, Artificial Sequence
  primer
gtaaaacgacggccagtcctaagacccttggaagaggg

SEQ ID NO: 60156 - DNA, 37 bp, Artificial Sequence
  primer
gtaaaacgacggccagttgtgatgccagactgcaaag

SEQ ID NO: 60157 - DNA, 39 bp, Artificial Sequence
  primer
gtaaaacgacggccagttgccctgaagcttgtatttcac

SEQ ID NO: 60158 - DNA, 38 bp, Artificial Sequence
  primer
gtaaaacgacggccagttgtttctccagtgtcccacag

SEQ ID NO: 60159 - DNA, 24 bp, Artificial Sequence
  primer
ttatgatacctctgcttgtgtgtg

SEQ ID NO: 60160 - DNA, 23 bp, Artificial Sequence
  primer
tttgagtggtaggagattggaag

SEQ ID NO: 60161 - DNA, 24 bp, Artificial Sequence
  primer
ttacggaaatttgaagaggaagtc

SEQ ID NO: 60162 - DNA, 23 bp, Artificial Sequence
  primer
tgcaaatctcatctgtcacaaac

SEQ ID NO: 60163 - DNA, 26 bp, Artificial Sequence
  primer
tccttgaaggttaagctgttaatatg

SEQ ID NO: 60164 - DNA, 27 bp, Artificial Sequence
  primer
tgctgagtaagtgtatggttaataggc

SEQ ID NO: 60165 - DNA, 38 bp, Artificial Sequence
  primer
gtaaaacgacggccagttgagggtctgctttcatttcc

SEQ ID NO: 60166 - DNA, 38 bp, Artificial Sequence
  primer
gtaaaacgacggccagtttgtcagcagcatagaaacgg

SEQ ID NO: 60167 - DNA, 21 bp, Artificial Sequence
  primer
cctgaacccaatgataagcag

SEQ ID NO: 60168 - DNA, 41 bp, Artificial Sequence
  primer
gtaaaacgacggccagtggatttgaaagtctttgtgacctg

SEQ ID NO: 60169 - DNA, 19 bp, Artificial Sequence
  primer
gttgcaggccttaaatggg

SEQ ID NO: 60170 - DNA, 38 bp, Artificial Sequence
  primer
gtaaaacgacggccagtactgttcagttcttagggcgg

SEQ ID NO: 60171 - DNA, 21 bp, Artificial Sequence
  primer
attccagatccctggaaacag

SEQ ID NO: 60172 - DNA, 21 bp, Artificial Sequence
  primer
gggtacgacatggaaagatgg

SEQ ID NO: 60173 - DNA, 21 bp, Artificial Sequence
  primer
ggaaagcagctgtgagaaagg

SEQ ID NO: 60174 - DNA, 38 bp, Artificial Sequence
  primer
gtaaaacgacggccagttgaggaacgtccttcaaccag

SEQ ID NO: 60175 - DNA, 21 bp, Artificial Sequence
  primer
gtgattgaatgtgcttgaggg

SEQ ID NO: 60176 - DNA, 21 bp, Artificial Sequence
  primer
atcctgtgatcgaggatgacc

SEQ ID NO: 60177 - DNA, 26 bp, Artificial Sequence
  primer
cctctgttaaagatgtttgttactgc

SEQ ID NO: 60178 - DNA, 22 bp, Artificial Sequence
  primer
gaaagattgttcaagctctcgg

SEQ ID NO: 60179 - DNA, 21 bp, Artificial Sequence
  primer
tttgatggttccttcctaccc

SEQ ID NO: 60180 - DNA, 40 bp, Artificial Sequence
  primer
gtaaaacgacggccagtttgaggacacctgactcactctc

SEQ ID NO: 60181 - DNA, 21 bp, Artificial Sequence
  primer
agaacaaactggtggtgaccc

SEQ ID NO: 60182 - DNA, 21 bp, Artificial Sequence
  primer
accttcctgctctctcacagg

SEQ ID NO: 60183 - DNA, 38 bp, Artificial Sequence
  primer
gtaaaacgacggccagtgtggctaggagacagggacag

SEQ ID NO: 60184 - DNA, 21 bp, Artificial Sequence
  primer
agctcattcatcagcagcttg

SEQ ID NO: 60185 - DNA, 38 bp, Artificial Sequence
  primer
gtaaaacgacggccagtccaaattctcgactccctcag

SEQ ID NO: 60186 - DNA, 22 bp, Artificial Sequence
  primer
ccaggtcgtggaaatgttacag

SEQ ID NO: 60187 - DNA, 21 bp, Artificial Sequence
  primer
ttaagttgctgtcaagccctg

SEQ ID NO: 60188 - DNA, 35 bp, Artificial Sequence
  primer
gtaaaacgacggccagtcctaaccctgccctggag

SEQ ID NO: 60189 - DNA, 23 bp, Artificial Sequence
  primer
tgttcagttatgatcctttgctg

SEQ ID NO: 60190 - DNA, 21 bp, Artificial Sequence
  primer
attgttctcctggaggattgg

SEQ ID NO: 60191 - DNA, 23 bp, Artificial Sequence
  primer
aaggactgttataagccttgcag

SEQ ID NO: 60192 - DNA, 39 bp, Artificial Sequence
  primer
gtaaaacgacggccagtttggtggcttaactgaaacatc

SEQ ID NO: 60193 - DNA, 38 bp, Artificial Sequence
  primer
gtaaaacgacggccagttttgttccctcgctttgttag

SEQ ID NO: 60194 - DNA, 20 bp, Artificial Sequence
  primer
tccaaagctgaattccaagg

SEQ ID NO: 60195 - DNA, 39 bp, Artificial Sequence; identical to SEQ ID NO: 60192
  primer

SEQ ID NO: 60196 - DNA, 22 bp, Artificial Sequence
  primer
gctgattccatcacttagcagc

SEQ ID NO: 60197 - DNA, 38 bp, Artificial Sequence
  primer
gtaaaacgacggccagttttctggattgtgggattgtg

SEQ ID NO: 60198 - DNA, 38 bp, Artificial Sequence
  primer
gtaaaacgacggccagtattgtgagggatgcttcaacc

SEQ ID NO: 60199 - DNA, 38 bp, Artificial Sequence
  primer
gtaaaacgacggccagtctgcaggatcagaaggtcctc

SEQ ID NO: 60200 - DNA, 21 bp, Artificial Sequence
  primer
agtcaagaagaacgggaggtg

SEQ ID NO: 60201 - DNA, 38 bp, Artificial Sequence
  primer
gtaaaacgacggccagttcagatgcctgcttgtacacc

SEQ ID NO: 60202 - DNA, 38 bp, Artificial Sequence
  primer
gtaaaacgacggccagttgaatccagaagcattgatgg

SEQ ID NO: 60203 - DNA, 38 bp, Artificial Sequence
  primer
gtaaaacgacggccagtgcaacaaattcttcaggaggg

SEQ ID NO: 60204 - DNA, 38 bp, Artificial Sequence
  primer
gtaaaacgacggccagttgcaggagccactaaacactc

SEQ ID NO: 60205 - DNA, 39 bp, Artificial Sequence
  primer
gtaaaacgacggccagtttggatgtacatgcctgaattg

SEQ ID NO: 60206 - DNA, 21 bp, Artificial Sequence
  primer
caggagaatcacttgaaccca

SEQ ID NO: 60207 - DNA, 21 bp, Artificial Sequence
  primer
cacttggagacaagaggctgg

SEQ ID NO: 60208 - DNA, 38 bp, Artificial Sequence
  primer
gtaaaacgacggccagtccagggaaaggtgatctatgg

SEQ ID NO: 60209 - DNA, 22 bp, Artificial Sequence
  primer
cccaacaaatctctgctgaaag

SEQ ID NO: 60210 - DNA, 37 bp, Artificial Sequence
  primer
gtaaaacgacggccagtaaatggtgcaagtttgccag

SEQ ID NO: 60211 - DNA, 42 bp, Artificial Sequence
  primer
gtaaaacgacggccagtaatttattcacagggatcagaattg

SEQ ID NO: 60212 - DNA, 22 bp, Artificial Sequence
  primer
ccacatcctttcaagaccagac

SEQ ID NO: 60213 - DNA, 21 bp, Artificial Sequence
  primer
cacacaaagcagcgattgttc

SEQ ID NO: 60214 - DNA, 21 bp, Artificial Sequence
  primer
ccgagagtaccgctctcagtc

SEQ ID NO: 60215 - DNA, 38 bp, Artificial Sequence
  primer
gtaaaacgacggccagtctgctcctgaaggatacgacc

SEQ ID NO: 60216 - DNA, 21 bp, Artificial Sequence
  primer
gagtctggaagccatcaaagc

SEQ ID NO: 60217 - DNA, 38 bp, Artificial Sequence
  primer
gtaaaacgacggccagtaccctgtgtacccttcgactt

SEQ ID NO: 60218 - DNA, 22 bp, Artificial Sequence
  primer
ttggctttgtgatgtcaagaac

SEQ ID NO: 60219 - DNA, 20 bp, Artificial Sequence
  primer
aggcctgggcttaacacatc

SEQ ID NO: 60220 - DNA, 38 bp, Artificial Sequence
  primer
gtaaaacgacggccagttacctcgcagaaggttgaatg

SEQ ID NO: 60221 - DNA, 21 bp, Artificial Sequence
  primer
tcctgggctcctctgttagtg

SEQ ID NO: 60222 - DNA, 21 bp, Artificial Sequence
  primer
aagcagattgtccaccctgac

SEQ ID NO: 60223 - DNA, 38 bp, Artificial Sequence
  primer
gtaaaacgacggccagttccatcaccatgtgtctcagg

SEQ ID NO: 60224 - DNA, 21 bp, Artificial Sequence
  primer
agcccaaatcaatttaccctg

SEQ ID NO: 60225 - DNA, 21 bp, Artificial Sequence
  primer
actagttgcaaactcctgggc

SEQ ID NO: 60226 - DNA, 38 bp, Artificial Sequence
  primer
gtaaaacgacggccagtctcccgagataaatggcagag

SEQ ID NO: 60227 - DNA, 38 bp, Artificial Sequence; identical to SEQ ID NO: 60223
  primer

SEQ ID NO: 60228 - DNA, 38 bp, Artificial Sequence
  primer
gtaaaacgacggccagtgacatcgaggtcaaggactgg

SEQ ID NO: 60229 - DNA, 21 bp, Artificial Sequence
  primer
actagttgcaaactcctgggc

SEQ ID NO: 60230 - DNA, 26 bp, Artificial Sequence
  primer
agctattgcatatcgtactatcaacc

SEQ ID NO: 60231 - DNA, 20 bp, Artificial Sequence
  primer
ccaaagggatgatgatggtg

SEQ ID NO: 60232 - DNA, 42 bp, Artificial Sequence
  primer
gtaaaacgacggccagtccatacttgactttcaggaaacatt

SEQ ID NO: 60233 - DNA, 38 bp, Artificial Sequence
  primer
gtaaaacgacggccagttcaaaccattgttccaccatt

SEQ ID NO: 60234 - DNA, 38 bp, Artificial Sequence
  primer
gtaaaacgacggccagtccatgcctggtgtgacttatg

SEQ ID NO: 60235 - DNA, 46 bp, Artificial Sequence
  primer
gtaaaacgacggccagttgattaataagttgctttgatcactattc

SEQ ID NO: 60236 - DNA, 38 bp, Artificial Sequence
  primer
gtaaaacgacggccagtccattgtgcaattcactttcc

SEQ ID NO: 60237 - DNA, 37 bp, Artificial Sequence
  primer
gtaaaacgacggccagttttctgagcatttcccttgg

SEQ ID NO: 60238 - DNA, 42 bp, Artificial Sequence
  primer
gtaaaacgacggccagtagactcagtatggtgtcaggtatca

SEQ ID NO: 60239 - DNA, 38 bp, Artificial Sequence
  primer
gtaaaacgacggccagtcattccagcctaagcaacagg

SEQ ID NO: 60240 - DNA, 36 bp, Artificial Sequence
  primer
gtaaaacgacggccagtaagcaggcaggttgctcag

SEQ ID NO: 60241 - DNA, 40 bp, Artificial Sequence
  primer
gtaaaacgacggccagtcctaatgctgagagattgcaaag

SEQ ID NO: 60242 - DNA, 21 bp, Artificial Sequence
  primer
cgattgtgagccctaggattg

SEQ ID NO: 60243 - DNA, 37 bp, Artificial Sequence
  primer
gtaaaacgacggccagtgccaggcaattgtaatgtgg

SEQ ID NO: 60244 - DNA, 29 bp, Artificial Sequence
  primer
gggataagtctcttacctaatcttgtttg

SEQ ID NO: 60245 - DNA, 19 bp, Artificial Sequence
  primer
ggaaggtgcaagggtgtcc

SEQ ID NO: 60246 - DNA, 37 bp, Artificial Sequence
  primer
gtaaaacgacggccagtgctaatgcagggttggagag

SEQ ID NO: 60247 - DNA, 38 bp, Artificial Sequence
  primer
gtaaaacgacggccagtaaggtcactaacgccaaccac

SEQ ID NO: 60248 - DNA, 21 bp, Artificial Sequence
  primer
aggcacaagtgggtcaaactc

SEQ ID NO: 60249 - DNA, 38 bp, Artificial Sequence
  primer
gtaaaacgacggccagtaatgtataggtcccacctgcc

SEQ ID NO: 60250 - DNA, 39 bp, Artificial Sequence
  primer
gtaaaacgacggccagtgctctcttagaggacctggctc

SEQ ID NO: 60251 - DNA, 38 bp, Artificial Sequence
  primer
gtaaaacgacggccagtctattccagagaccgagtggc

SEQ ID NO: 60252 - DNA, 44 bp, Artificial Sequence
  primer
gtaaaacgacggccagttctcttcatcacttagttcttctaggg

SEQ ID NO: 60253 - DNA, 38 bp, Artificial Sequence
  primer
gtaaaacgacggccagtctcccatttctgaacccaatg

SEQ ID NO: 60254 - DNA, 44 bp, Artificial Sequence
  primer
gtaaaacgacggccagttggagtgattatttcaaacaagttagg

SEQ ID NO: 60255 - DNA, 38 bp, Artificial Sequence
  primer
gtaaaacgacggccagtaggagctaggaaatgcaagcc

SEQ ID NO: 60256 - DNA, 21 bp, Artificial Sequence
  primer
ttccatgagggaatttggttc

SEQ ID NO: 60257 - DNA, 23 bp, Artificial Sequence
  primer
ttgttgactatgtggagaaagcc

SEQ ID NO: 60258 - DNA, 25 bp, Artificial Sequence
  primer
cccttaaccatcaataaagtgtttg

SEQ ID NO: 60259 - DNA, 38 bp, Artificial Sequence
  primer
gtaaaacgacggccagtggtttattgcattggtttggg

SEQ ID NO: 60260 - DNA, 20 bp, Artificial Sequence
  primer
ctgccatcgtcaactcacac

SEQ ID NO: 60261 - DNA, 24 bp, Artificial Sequence
  primer
tcagatttgttataccactgggaa

SEQ ID NO: 60262 - DNA, 44 bp, Artificial Sequence
  primer
gtaaaacgacggccagtttgctaaatttaaagcatctgtcatac

SEQ ID NO: 60263 - DNA, 44 bp, Artificial Sequence
  primer
gtaaaacgacggccagtaaccacaaacaatagtttcagttcaag

SEQ ID NO: 60264 - DNA, 21 bp, Artificial Sequence
  primer
acaaactgggatggattggtc

SEQ ID NO: 60265 - DNA, 21 bp, Artificial Sequence
  primer
caaagtgggttccacaaagtg

SEQ ID NO: 60266 - DNA, 38 bp, Artificial Sequence
  primer
gtaaaacgacggccagtgacaggcaggagtagacaccc

SEQ ID NO: 60267 - DNA, 21 bp, Artificial Sequence
  primer
caaagtgggttccacaaagtg

SEQ ID NO: 60268 - DNA, 42 bp, Artificial Sequence
  primer
gtaaaacgacggccagttggacatattgatacattgttccag

SEQ ID NO: 60269 - DNA, 42 bp, Artificial Sequence; identical to SEQ ID NO: 60268
  primer

SEQ ID NO: 60270 - DNA, 43 bp, Artificial Sequence
  primer
gtaaaacgacggccagttgtaaagtatgaggtttaggtcaagg

SEQ ID NO: 60271 - DNA, 40 bp, Artificial Sequence
  primer
gtaaaacgacggccagtggccgtttgtaaagaaagttacc

SEQ ID NO: 60272 - DNA, 23 bp, Artificial Sequence
  primer
acagtattcctttgcaagacagg

SEQ ID NO: 60273 - DNA, 40 bp, Artificial Sequence
  primer
gtaaaacgacggccagtttagctctgagcaatacagaggg

SEQ ID NO: 60274 - DNA, 37 bp, Artificial Sequence
  primer
gtaaaacgacggccagtctcagaacagtgcctcccag

SEQ ID NO: 60275 - DNA, 38 bp, Artificial Sequence
  primer
gtaaaacgacggccagtcgtgttcggtttgatggtaag

SEQ ID NO: 60276 - DNA, 21 bp, Artificial Sequence
  primer
ttagcccgtggtatttcagtg

SEQ ID NO: 60277 - DNA, 21 bp, Artificial Sequence
  primer
gtctttggagccttggaattg

SEQ ID NO: 60278 - DNA, 44 bp, Artificial Sequence
  primer
gtaaaacgacggccagtagtgtcactgttgcatactatttctgt

SEQ ID NO: 60279 - DNA, 43 bp, Artificial Sequence
  primer
gtaaaacgacggccagtaaggctaaagcatagaataaccttcc

SEQ ID NO: 60280 - DNA, 38 bp, Artificial Sequence
  primer
gtaaaacgacggccagtctctagtgtttggtggcgttg

SEQ ID NO: 60281 - DNA, 38 bp, Artificial Sequence
  primer
gtaaaacgacggccagttctatgccggaagtgtgagac

SEQ ID NO: 60282 - DNA, 22 bp, Artificial Sequence
  primer
cctcgactctctctctctctgc

SEQ ID NO: 60283 - DNA, 21 bp, Artificial Sequence
  primer
ttgttcttggcctggagtttc

SEQ ID NO: 60284 - DNA, 21 bp, Artificial Sequence
  primer
ggcttacccatccttcacatt

SEQ ID NO: 60285 - DNA, 38 bp, Artificial Sequence
  primer
gtaaaacgacggccagtcagccttcagaggaagaatcc

SEQ ID NO: 60286 - DNA, 38 bp, Artificial Sequence
  primer
gtaaaacgacggccagtaattctcgaccttgccttctg

SEQ ID NO: 60287 - DNA, 38 bp, Artificial Sequence
  primer
gtaaaacgacggccagtccctgactctaagctgaacca

SEQ ID NO: 60288 - DNA, 21 bp, Artificial Sequence
  primer
tctgacttgatgggcttgatg

SEQ ID NO: 60289 - DNA, 38 bp, Artificial Sequence
  primer
gtaaaacgacggccagttctgaagaagcctcagctttg

SEQ ID NO: 60290 - DNA, 38 bp, Artificial Sequence
  primer
gtaaaacgacggccagtcagtgctgctcaatcacacac

SEQ ID NO: 60291 - DNA, 38 bp, Artificial Sequence
  primer
gtaaaacgacggccagtaagaccaggtgggatggtaac

SEQ ID NO: 60292 - DNA, 38 bp, Artificial Sequence
  primer
gtaaaacgacggccagttccagtgctactctcagctcg

SEQ ID NO: 60293 - DNA, 39 bp, Artificial Sequence
  primer
gtaaaacgacggccagtcccaactaacattcaagttgcc

SEQ ID NO: 60294 - DNA, 23 bp, Artificial Sequence
  primer
aaaggaatgagtttggctttagg

SEQ ID NO: 60295 - DNA, 39 bp, Artificial Sequence
  primer
gtaaaacgacggccagttctttaaggaaatgatggctgg

SEQ ID NO: 60296 - DNA, 42 bp, Artificial Sequence
  primer
gtaaaacgacggccagtcatgtaaatttgtcagaaatcctgc

SEQ ID NO: 60297 - DNA, 38 bp, Artificial Sequence
  primer
gtaaaacgacggccagtagcaacgccaaagtctgaaac

SEQ ID NO: 60298 - DNA, 27 bp, Artificial Sequence
  primer
tttcttatttactgtaacccaagtgtg

SEQ ID NO: 60299 - DNA, 21 bp, Artificial Sequence
  primer
tatccaaaccattgcagaccc

SEQ ID NO: 60300 - DNA, 21 bp, Artificial Sequence
  primer
cttcacttccctccgtgtttc

SEQ ID NO: 60301 - DNA, 21 bp, Artificial Sequence
  primer
tgcttggaaacacacagatgg

SEQ ID NO: 60302 - DNA, 25 bp, Artificial Sequence
  primer
tttggtgacataggttatcaagtcc

SEQ ID NO: 60303 - DNA, 21 bp, Artificial Sequence
  primer
tctgcccagtttctcattgtg

SEQ ID NO: 60304 - DNA, 21 bp, Artificial Sequence
  primer
atgagcacatctcccttgacc

SEQ ID NO: 60305 - DNA, 38 bp, Artificial Sequence
  primer
gtaaaacgacggccagtacctgcagcttgtttctaccg

SEQ ID NO: 60306 - DNA, 21 bp, Artificial Sequence
  primer
catctgattaacctgtgcggg

SEQ ID NO: 60307 - DNA, 18 bp, Artificial Sequence
  primer
aaggcctgtgtggctgtg

SEQ ID NO: 60308 - DNA, 40 bp, Artificial Sequence
  primer
gtaaaacgacggccagtccatattgttacccaaaccttcc

SEQ ID NO: 60309 - DNA, 38 bp, Artificial Sequence
  primer
gtaaaacgacggccagtaaacatgggcagaatgaaagc

SEQ ID NO: 60310 - DNA, 37 bp, Artificial Sequence
  primer
gtaaaacgacggccagtcagctcatagtgctgcctcc

SEQ ID NO: 60311 - DNA, 37 bp, Artificial Sequence
  primer
gtaaaacgacggccagtagctttggccacaagatgag

SEQ ID NO: 60312 - DNA, 21 bp, Artificial Sequence
  primer
ccggaatgaagtctgtggaag

SEQ ID NO: 60313 - DNA, 37 bp, Artificial Sequence
  primer
gtaaaacgacggccagtaggcagccatcaacaacttc

SEQ ID NO: 60314 - DNA, 22 bp, Artificial Sequence
  primer
aggttgtgattgctattcctgc

SEQ ID NO: 60315 - DNA, 21 bp, Artificial Sequence
  primer
acacacgccagtctgtttcac

SEQ ID NO: 60316 - DNA, 21 bp, Artificial Sequence
  primer
agtccagctcaggcatctctc

SEQ ID NO: 60317 - DNA, 22 bp, Artificial Sequence
  primer
gaagggaccgttaatgttcttg

SEQ ID NO: 60318 - DNA, 23 bp, Artificial Sequence
  primer
cattcttacggtgtctctggttg

SEQ ID NO: 60319 - DNA, 36 bp, Artificial Sequence
  primer
gtaaaacgacggccagtgtgacccacctcatctggc

SEQ ID NO: 60320 - DNA, 21 bp, Artificial Sequence
  primer
cttgaacctgtgattcttggc

SEQ ID NO: 60321 - DNA, 21 bp, Artificial Sequence
  primer
aatgactgaacgcacctctcc

SEQ ID NO: 60322 - DNA, 38 bp, Artificial Sequence
  primer
gtaaaacgacggccagtaagaaggaggaatggagggtc

SEQ ID NO: 60323 - DNA, 22 bp, Artificial Sequence
  primer
tccattagattgctttggcatc

SEQ ID NO: 60324 - DNA, 39 bp, Artificial Sequence
  primer
gtaaaacgacggccagtggtcagcttcttcaaagattgg

SEQ ID NO: 60325 - DNA, 21 bp, Artificial Sequence
  primer
gatgtcactggagacttgggc

SEQ ID NO: 60326 - DNA, 38 bp, Artificial Sequence
  primer
gtaaaacgacggccagtacctccaacagtcacctctcc

SEQ ID NO: 60327 - DNA, 38 bp, Artificial Sequence
  primer
gtaaaacgacggccagtttcccattgttagccatttcc

SEQ ID NO: 60328 - DNA, 20 bp, Artificial Sequence
  primer
ccaaggtctgatgccttctg

SEQ ID NO: 60329 - DNA, 38 bp, Artificial Sequence
  primer
gtaaaacgacggccagtactctaggcccaagaaagctg

SEQ ID NO: 60330 - DNA, 38 bp, Artificial Sequence
  primer
gtaaaacgacggccagtggaagaagcctacaatggcac

SEQ ID NO: 60331 - DNA, 35 bp, Artificial Sequence
  primer
gtaaaacgacggccagtgggctggaggaacaggac

SEQ ID NO: 60332 - DNA, 38 bp, Artificial Sequence
  primer
gtaaaacgacggccagtatgccatgactagtgggttcc

SEQ ID NO: 60333 - DNA, 21 bp, Artificial Sequence
  primer
gcctcatggctgtgtagtagc

SEQ ID NO: 60334 - DNA, 38 bp, Artificial Sequence
  primer
gtaaaacgacggccagttcaacaaggacgactcgctac

SEQ ID NO: 60335 - DNA, 38 bp, Artificial Sequence
  primer
gtaaaacgacggccagtgagatatcacctcctgctcgg

SEQ ID NO: 60336 - DNA, 21 bp, Artificial Sequence
  primer
agaacgtcaacgtggtgaagc

SEQ ID NO: 60337 - DNA, 38 bp, Artificial Sequence
  primer
gtaaaacgacggccagtcaccactgaggtaggaagctg

SEQ ID NO: 60338 - DNA, 39 bp, Artificial Sequence
  primer
gtaaaacgacggccagtgacatacacggacacatcatcg

SEQ ID NO: 60339 - DNA, 38 bp, Artificial Sequence
  primer
gtaaaacgacggccagttgcttcttcatcttcctggac

SEQ ID NO: 60340 - DNA, 37 bp, Artificial Sequence
  primer
gtaaaacgacggccagtcatcagcctaggtgagcacg

SEQ ID NO: 60341 - DNA, 21 bp, Artificial Sequence
  primer
gcctcatggctgtgtagtagc

SEQ ID NO: 60342 - DNA, 39 bp, Artificial Sequence
  primer
gtaaaacgacggccagttctcctccaataatcttctccg

SEQ ID NO: 60343 - DNA, 22 bp, Artificial Sequence
  primer
caaggtccaagaagtagcaagc

SEQ ID NO: 60344 - DNA, 38 bp, Artificial Sequence
  primer
gtaaaacgacggccagtggaacagcaacagcaactcag

SEQ ID NO: 60345 - DNA, 21 bp, Artificial Sequence
  primer
tcacctttccattccattcag

SEQ ID NO: 60346 - DNA, 25 bp, Artificial Sequence
  primer
aaatatgccagatcatcattctttg

SEQ ID NO: 60347 - DNA, 20 bp, Artificial Sequence
  primer
gccttcttcaatgccttgtg

SEQ ID NO: 60348 - DNA, 25 bp, Artificial Sequence
  primer
atttgttaggactgaagttactgcc

SEQ ID NO: 60349 - DNA, 22 bp, Artificial Sequence
  primer
caatgtcttgcatttcagtggt

SEQ ID NO: 60350 - DNA, 36 bp, Artificial Sequence
  primer
gtaaaacgacggccagttctggattcgtcagccagg

SEQ ID NO: 60351 - DNA, 41 bp, Artificial Sequence
  primer
gtaaaacgacggccagtttctgaagagccaaacaaattaaa

SEQ ID NO: 60352 - DNA, 19 bp, Artificial Sequence
  primer
ttcccaacttcccattccc

SEQ ID NO: 60353 - DNA, 38 bp, Artificial Sequence
  primer
gtaaaacgacggccagtacctgtttcccatcctcttcc

SEQ ID NO: 60354 - DNA, 41 bp, Artificial Sequence
  primer
gtaaaacgacggccagttgaggacatgggtttctaaatatg

SEQ ID NO: 60355 - DNA, 35 bp, Artificial Sequence
  primer
gtaaaacgacggccagtcacccggaaccctagagc

SEQ ID NO: 60356 - DNA, 21 bp, Artificial Sequence
  primer
ctgcctggtgaaacagtatgg

SEQ ID NO: 60357 - DNA, 38 bp, Artificial Sequence
  primer
gtaaaacgacggccagtatactgccataaacccagggc

SEQ ID NO: 60358 - DNA, 38 bp, Artificial Sequence
  primer
gtaaaacgacggccagtggtaactcgcccatgcttaac

SEQ ID NO: 60359 - DNA, 39 bp, Artificial Sequence
  primer
gtaaaacgacggccagtcaccacccgattcttacttgtc

SEQ ID NO: 60360 - DNA, 22 bp, Artificial Sequence
  primer
tctcatttccaaggtatctccg

SEQ ID NO: 60361 - DNA, 40 bp, Artificial Sequence
  primer
gtaaaacgacggccagttcattgatgtgtaggtggaattg

SEQ ID NO: 60362 - DNA, 21 bp, Artificial Sequence
  primer
cacgggagctcagtgataagg

SEQ ID NO: 60363 - DNA, 37 bp, Artificial Sequence
  primer
gtaaaacgacggccagtcatagaccagcaccgtggag

SEQ ID NO: 60364 - DNA, 38 bp, Artificial Sequence
  primer
gtaaaacgacggccagtcttcgggaactgaggtgagac

SEQ ID NO: 60365 - DNA, 37 bp, Artificial Sequence
  primer
gtaaaacgacggccagtcctcctgcacagacagaagc

SEQ ID NO: 60366 - DNA, 21 bp, Artificial Sequence
  primer
agagatgggtcactctgtggg

SEQ ID NO: 60367 - DNA, 38 bp, Artificial Sequence
  primer
gtaaaacgacggccagtgcaccagcaactacactccag

SEQ ID NO: 60368 - DNA, 21 bp, Artificial Sequence
  primer
ctgcatgtcctaccaggaacc

SEQ ID NO: 60369 - DNA, 38 bp, Artificial Sequence
  primer
gtaaaacgacggccagtcatccactgacaagaccatcc

SEQ ID NO: 60370 - DNA, 38 bp, Artificial Sequence
  primer
gtaaaacgacggccagtatgacaatgggctcaataggg

SEQ ID NO: 60371 - DNA, 38 bp, Artificial Sequence
  primer
gtaaaacgacggccagtgtgacttgaggtgagtggcag

SEQ ID NO: 60372 - DNA, 38 bp, Artificial Sequence
  primer
gtaaaacgacggccagtcttacttgatggatggcctgg

SEQ ID NO: 60373 - DNA, 38 bp, Artificial Sequence
  primer
gtaaaacgacggccagttggcagagttcagagttcgtg

SEQ ID NO: 60374 - DNA, 21 bp, Artificial Sequence
  primer
tttgccacaaactggagaatg

SEQ ID NO: 60375 - DNA, 38 bp, Artificial Sequence
  primer
gtaaaacgacggccagtagttgcttccactccaggaac

SEQ ID NO: 60376 - DNA, 21 bp, Artificial Sequence
  primer
ctccgattccagagagtccac

SEQ ID NO: 60377 - DNA, 38 bp, Artificial Sequence
  primer
gtaaaacgacggccagtaagcaacgccagtttctaagc

SEQ ID NO: 60378 - DNA, 38 bp, Artificial Sequence
  primer
gtaaaacgacggccagttcacagcagagagcaggagtg

SEQ ID NO: 60379 - DNA, 38 bp, Artificial Sequence
  primer
gtaaaacgacggccagtgaagtccaagccctatcatgg

SEQ ID NO: 60380 - DNA, 38 bp, Artificial Sequence
  primer
gtaaaacgacggccagtatgtggaaattccctgacgag

SEQ ID NO: 60381 - DNA, 22 bp, Artificial Sequence
  primer
gctgtgaatccatctggtactg

SEQ ID NO: 60382 - DNA, 38 bp, Artificial Sequence
  primer
gtaaaacgacggccagttctcccacagagaaggaaagg

SEQ ID NO: 60383 - DNA, 21 bp, Artificial Sequence
  primer
aagagcgaaactccatctcaa

SEQ ID NO: 60384 - DNA, 38 bp, Artificial Sequence
  primer
gtaaaacgacggccagtatgcttgagggagtcccattt

SEQ ID NO: 60385 - DNA, 21 bp, Artificial Sequence
  primer
atatgtggaggtgggataggg

SEQ ID NO: 60386 - DNA, 21 bp, Artificial Sequence
  primer
ttcctaccaaggaaatgaggg

SEQ ID NO: 60387 - DNA, 25 bp, Artificial Sequence
  primer
ccactgattgtcagaatattgcttc

SEQ ID NO: 60388 - DNA, 21 bp, Artificial Sequence
  primer
ttctgacacatgctctatgcg

SEQ ID NO: 60389 - DNA, 37 bp, Artificial Sequence
  primer
gtaaaacgacggccagttctctgtgcttctggatgcc

SEQ ID NO: 60390 - DNA, 38 bp, Artificial Sequence
  primer
gtaaaacgacggccagtaactcccttagttggcccttc

SEQ ID NO: 60391 - DNA, 21 bp, Artificial Sequence
  primer
tggaaggccagagagaaacag

SEQ ID NO: 60392 - DNA, 38 bp, Artificial Sequence
  primer
gtaaaacgacggccagtcctcaccctcctctactgtcg

SEQ ID NO: 60393 - DNA, 38 bp, Artificial Sequence
  primer
gtaaaacgacggccagtgcaaacaggtatccatgtccc

SEQ ID NO: 60394 - DNA, 21 bp, Artificial Sequence
  primer
cacccaggaagtcagcagaag

SEQ ID NO: 60395 - DNA, 38 bp, Artificial Sequence
  primer
gtaaaacgacggccagtctaggatttgatggctcaccc

SEQ ID NO: 60396 - DNA, 38 bp, Artificial Sequence
  primer
gtaaaacgacggccagtctctgggtaatggagagacgg

SEQ ID NO: 60397 - DNA, 21 bp, Artificial Sequence
  primer
ccatggcttatacccaagacc

SEQ ID NO: 60398 - DNA, 21 bp, Artificial Sequence
  primer
gggtgagggagaggtacacag

SEQ ID NO: 60399 - DNA, 38 bp, Artificial Sequence
  primer
gtaaaacgacggccagtaactgagcaggtggttccaag

SEQ ID NO: 60400 - DNA, 20 bp, Artificial Sequence
  primer
tatgaagccagattgggtgg

SEQ ID NO: 60401 - DNA, 38 bp, Artificial Sequence
  primer
gtaaaacgacggccagtatctgagcagcttcaagtccc

SEQ ID NO: 60402 - DNA, 37 bp, Artificial Sequence
  primer
gtaaaacgacggccagtcgtgaggctgtctgttaggc

SEQ ID NO: 60403 - DNA, 21 bp, Artificial Sequence
  primer
gtgctactacttcggcaaggg

SEQ ID NO: 60404 - DNA, 36 bp, Artificial Sequence
  primer
gtaaaacgacggccagtgtgagaagggagggtgcag

SEQ ID NO: 60405 - DNA, 37 bp, Artificial Sequence
  primer
gtaaaacgacggccagtaatctgcccgacttctttcc

SEQ ID NO: 60406 - DNA, 38 bp, Artificial Sequence
  primer
gtaaaacgacggccagtcttcaacatgtttctgggtgc

SEQ ID NO: 60407 - DNA, 37 bp, Artificial Sequence
  primer
gtaaaacgacggccagtccgcctccttatctccagtc

SEQ ID NO: 60408 - DNA, 38 bp, Artificial Sequence
  primer
gtaaaacgacggccagtacctcagccaggaatgtcaag

SEQ ID NO: 60409 - DNA, 21 bp, Artificial Sequence
  primer
tatgatttggccttcgttgtg

SEQ ID NO: 60410 - DNA, 21 bp, Artificial Sequence
  primer
ccaatgtgctgggattacaac

SEQ ID NO: 60411 - DNA, 21 bp, Artificial Sequence
  primer
ggcttgagtcagtgacgtttg

SEQ ID NO: 60412 - DNA, 21 bp, Artificial Sequence
  primer
agttcgcaagtagctggaagc

SEQ ID NO: 60413 - DNA, 38 bp, Artificial Sequence
  primer
gtaaaacgacggccagtgagctctgagagaggagcagg

SEQ ID NO: 60414 - DNA, 36 bp, Artificial Sequence
  primer
gtaaaacgacggccagtcaccttccagggtctccag

SEQ ID NO: 60415 - DNA, 21 bp, Artificial Sequence
  primer
tagcaaggaggtcagggtagc

SEQ ID NO: 60416 - DNA, 21 bp, Artificial Sequence
  primer
gacgtccttcagtatctgccc

SEQ ID NO: 60417 - DNA, 38 bp, Artificial Sequence
  primer
gtaaaacgacggccagtaatgagtgtggaatccttgcc

SEQ ID NO: 60418 - DNA, 38 bp, Artificial Sequence
  primer
gtaaaacgacggccagttgcatacgaatgtgttgaggg

SEQ ID NO: 60419 - DNA, 21 bp, Artificial Sequence
  primer
gtacaccagggcacctaccac

SEQ ID NO: 60420 - DNA, 21 bp, Artificial Sequence
  primer
atggaccaccattcaatccac

SEQ ID NO: 60421 - DNA, 38 bp, Artificial Sequence
  primer
gtaaaacgacggccagtcccggaaactactaccagcag

SEQ ID NO: 60422 - DNA, 21 bp, Artificial Sequence
  primer
tttctgtcgtgagtgagggag

SEQ ID NO: 60423 - DNA, 38 bp, Artificial Sequence
  primer
gtaaaacgacggccagttcctacagcagacattgagcg

SEQ ID NO: 60424 - DNA, 38 bp, Artificial Sequence
  primer
gtaaaacgacggccagttcttccctaatggcacactgg

SEQ ID NO: 60425 - DNA, 21 bp, Artificial Sequence
  primer
tctccttcctgctccttcatc

SEQ ID NO: 60426 - DNA, 37 bp, Artificial Sequence
  primer
gtaaaacgacggccagtaccgattcaatttccaaggc

SEQ ID NO: 60427 - DNA, 21 bp, Artificial Sequence
  primer
gcttatgcgggaactacaacc

SEQ ID NO: 60428 - DNA, 21 bp, Artificial Sequence
  primer
ctggatcacatgtgcctaccc

SEQ ID NO: 60429 - DNA, 21 bp, Artificial Sequence
  primer
tcacaaagatcagcatcaggc

SEQ ID NO: 60430 - DNA, 21 bp, Artificial Sequence
  primer
tttctgtcgtgagtgagggag

SEQ ID NO: 60431 - DNA, 38 bp, Artificial Sequence
  primer
gtaaaacgacggccagtcctacagcagacgttgagtgg

SEQ ID NO: 60432 - DNA, 38 bp, Artificial Sequence
  primer
gtaaaacgacggccagttctccttcctgctccttcatc

SEQ ID NO: 60433 - DNA, 21 bp, Artificial Sequence
  primer
gagggcctaagaggtgaggtc

SEQ ID NO: 60434 - DNA, 38 bp, Artificial Sequence
  primer
gtaaaacgacggccagtggagagcttgaggcacagaag

SEQ ID NO: 60435 - DNA, 38 bp, Artificial Sequence
  primer
gtaaaacgacggccagtctgtgcctcagcttcacagac

SEQ ID NO: 60436 - DNA, 21 bp, Artificial Sequence
  primer
ctgggtagatatggagggagc

SEQ ID NO: 60437 - DNA, 21 bp, Artificial Sequence
  primer
gatgacaatccaactctcggg

SEQ ID NO: 60438 - DNA, 37 bp, Artificial Sequence
  primer
gtaaaacgacggccagtactgctggtggctgactttg

SEQ ID NO: 60439 - DNA, 37 bp, Artificial Sequence
  primer
gtaaaacgacggccagtctctccttcctgctccttcg

SEQ ID NO: 60440 - DNA, 38 bp, Artificial Sequence
  primer
gtaaaacgacggccagtccattacgtcactctggatgg

SEQ ID NO: 60441 - DNA, 21 bp, Artificial Sequence
  primer
aagtgatcctcccatctcgtc

SEQ ID NO: 60442 - DNA, 21 bp, Artificial Sequence
  primer
gcttatgcgggaactacaacc

SEQ ID NO: 60443 - DNA, 38 bp, Artificial Sequence
  primer
gtaaaacgacggccagttcaggcaagcagagtcatttg

SEQ ID NO: 60444 - DNA, 38 bp, Artificial Sequence
  primer
gtaaaacgacggccagtctggcttcgtactcagtggtg

SEQ ID NO: 60445 - DNA, 38 bp, Artificial Sequence
  primer
gtaaaacgacggccagttaatgggactgagggagatgc

SEQ ID NO: 60446 - DNA, 20 bp, Artificial Sequence
  primer
gcttctctttgatggcgatg

SEQ ID NO: 60447 - DNA, 37 bp, Artificial Sequence
  primer
gtaaaacgacggccagtctgtcccactggaagtgagc

SEQ ID NO: 60448 - DNA, 21 bp, Artificial Sequence
  primer
gatccatcccaccaccataac

SEQ ID NO: 60449 - DNA, 38 bp, Artificial Sequence
  primer
gtaaaacgacggccagttccatcctccatcctggtaac

SEQ ID NO: 60450 - DNA, 38 bp, Artificial Sequence
  primer
gtaaaacgacggccagttatggaaaccaggcttcttgg

SEQ ID NO: 60451 - DNA, 21 bp, Artificial Sequence
  primer
taggcctgagatttggcagag

SEQ ID NO: 60452 - DNA, 38 bp, Artificial Sequence
  primer
gtaaaacgacggccagtgggttaatgccttatggatgc

SEQ ID NO: 60453 - DNA, 39 bp, Artificial Sequence
  primer
gtaaaacgacggccagtaactggaattgttcctgattgg

SEQ ID NO: 60454 - DNA, 37 bp, Artificial Sequence
  primer
gtaaaacgacggccagtgagatgggtcctggagaagg

SEQ ID NO: 60455 - DNA, 38 bp, Artificial Sequence
  primer
gtaaaacgacggccagttaggactcttgggtgcctgac

SEQ ID NO: 60456 - DNA, 42 bp, Artificial Sequence
  primer
gtaaaacgacggccagttgtgagtaacgtacctctgagactg

SEQ ID NO: 60457 - DNA, 21 bp, Artificial Sequence
  primer
acatagcattggaggtgggag

SEQ ID NO: 60458 - DNA, 38 bp, Artificial Sequence
  primer
gtaaaacgacggccagtgcagtccttgctttgagtctg

SEQ ID NO: 60459 - DNA, 38 bp, Artificial Sequence
  primer
gtaaaacgacggccagtccgagaatctttgctcagagg

SEQ ID NO: 60460 - DNA, 21 bp, Artificial Sequence
  primer
gtctgagattcagggcctctc

SEQ ID NO: 60461 - DNA, 38 bp, Artificial Sequence
  primer
gtaaaacgacggccagttctagggtagaatccgccaag

SEQ ID NO: 60462 - DNA, 38 bp, Artificial Sequence
  primer
gtaaaacgacggccagtagggctgtgctgtaggtgaag

SEQ ID NO: 60463 - DNA, 21 bp, Artificial Sequence
  primer
gtctgagattcagggcctctc

SEQ ID NO: 60464 - DNA, 21 bp, Artificial Sequence
  primer
gacctaagctgttccctctgc

SEQ ID NO: 60465 - DNA, 21 bp, Artificial Sequence
  primer
cagaaaccctgtgcagatgag

SEQ ID NO: 60466 - DNA, 38 bp, Artificial Sequence
  primer
gtaaaacgacggccagttacccagtgcttggcctagag

SEQ ID NO: 60467 - DNA, 38 bp, Artificial Sequence
  primer
gtaaaacgacggccagttgatgaggctgacaaagttgg

SEQ ID NO: 60468 - DNA, 20 bp, Artificial Sequence
  primer
acctggtccttggtcctgag

SEQ ID NO: 60469 - DNA, 38 bp, Artificial Sequence
  primer
gtaaaacgacggccagttgtgaccatcactgtccaagg

SEQ ID NO: 60470 - DNA, 38 bp, Artificial Sequence
  primer
gtaaaacgacggccagtctggtcctgttctatggtggg

SEQ ID NO: 60471 - DNA, 21 bp, Artificial Sequence
  primer
accagagagcaggtagcaagg

SEQ ID NO: 60472 - DNA, 38 bp, Artificial Sequence
  primer
gtaaaacgacggccagttgagctcattctggctttgag

SEQ ID NO: 60473 - DNA, 38 bp, Artificial Sequence
  primer
gtaaaacgacggccagttatgtctcaggatctgggtgg

SEQ ID NO: 60474 - DNA, 21 bp, Artificial Sequence
  primer
accattcctaccacttgcctg

SEQ ID NO: 60475 - DNA, 38 bp, Artificial Sequence
  primer
gtaaaacgacggccagttacgaggagggcattgttgtc

SEQ ID NO: 60476 - DNA, 38 bp, Artificial Sequence
  primer
gtaaaacgacggccagttcttctccctccctgggtatc

SEQ ID NO: 60477 - DNA, 37 bp, Artificial Sequence
  primer
gtaaaacgacggccagtaaggtgagattccggtctgg

SEQ ID NO: 60478 - DNA, 20 bp, Artificial Sequence
  primer
tttctgtccctatccagccc

SEQ ID NO: 60479 - DNA, 38 bp, Artificial Sequence
  primer
gtaaaacgacggccagtcagacacttggtgctggaatc

SEQ ID NO: 60480 - DNA, 21 bp, Artificial Sequence
  primer
tgagacacacacacaaatggg

SEQ ID NO: 60481 - DNA, 22 bp, Artificial Sequence
  primer
tcctctacagggagggactttc

SEQ ID NO: 60482 - DNA, 21 bp, Artificial Sequence
  primer
aacaagtccctacagccaagg

SEQ ID NO: 60483 - DNA, 35 bp, Artificial Sequence
  primer
gtaaaacgacggccagtcatgcaccaccacacctg

SEQ ID NO: 60484 - DNA, 38 bp, Artificial Sequence
  primer
gtaaaacgacggccagtcagcacatacctgagccagtg

SEQ ID NO: 60485 - DNA, 38 bp, Artificial Sequence
  primer
gtaaaacgacggccagttgacatcacgtggagtgtttg

SEQ ID NO: 60486 - DNA, 39 bp, Artificial Sequence
  primer
gtaaaacgacggccagtagagtggaaacacatcccagag

SEQ ID NO: 60487 - DNA, 21 bp, Artificial Sequence
  primer
cctagggcagactctcattgg

SEQ ID NO: 60488 - DNA, 37 bp, Artificial Sequence
  primer
gtaaaacgacggccagtaggtgtgaggaatgaggctg

SEQ ID NO: 60489 - DNA, 18 bp, Artificial Sequence
  primer
tgcagtggtgcagtctcg

SEQ ID NO: 60490 - DNA, 21 bp, Artificial Sequence
  primer
cctctggacttcgaggcatac

SEQ ID NO: 60491 - DNA, 38 bp, Artificial Sequence
  primer
gtaaaacgacggccagtcagcttccatgtccagtgttg

SEQ ID NO: 60492 - DNA, 38 bp, Artificial Sequence
  primer
gtaaaacgacggccagtgaagacagtcgttgccatcag

SEQ ID NO: 60493 - DNA, 36 bp, Artificial Sequence
  primer
gtaaaacgacggccagtaggctggattggagagctg

SEQ ID NO: 60494 - DNA, 20 bp, Artificial Sequence
  primer
cagcctcatccttcctcctg

SEQ ID NO: 60495 - DNA, 38 bp, Artificial Sequence
  primer
gtaaaacgacggccagtagctagcatctggagacaggc

SEQ ID NO: 60496 - DNA, 19 bp, Artificial Sequence
  primer
gcagcaagctgagatcgtg

SEQ ID NO: 60497 - DNA, 36 bp, Artificial Sequence
  primer
gtaaaacgacggccagtctgaccttccctcgacgtg

SEQ ID NO: 60498 - DNA, 38 bp, Artificial Sequence
  primer
gtaaaacgacggccagttgcaacaccaggacttcagac

SEQ ID NO: 60499 - DNA, 37 bp, Artificial Sequence
  primer
gtaaaacgacggccagttcctgccctctcacacgtag

SEQ ID NO: 60500 - DNA, 38 bp, Artificial Sequence
  primer
gtaaaacgacggccagtttctctgttggcagaggtgtg

SEQ ID NO: 60501 - DNA, 37 bp, Artificial Sequence
  primer
gtaaaacgacggccagtggcaccagtgaaaccaagag

SEQ ID NO: 60502 - DNA, 38 bp, Artificial Sequence
  primer
gtaaaacgacggccagtgtagattgaatgctgggagcc

SEQ ID NO: 60503 - DNA, 21 bp, Artificial Sequence
  primer
gggtcaaggtggttgaatagc

SEQ ID NO: 60504 - DNA, 21 bp, Artificial Sequence
  primer
aggaaattgaggtgaagtggg

SEQ ID NO: 60505 - DNA, 21 bp, Artificial Sequence
  primer
ggcacataaaggccacagaac

SEQ ID NO: 60506 - DNA, 37 bp, Artificial Sequence
  primer
gtaaaacgacggccagtgaagcatcccagggtcagag

SEQ ID NO: 60507 - DNA, 39 bp, Artificial Sequence
  primer
gtaaaacgacggccagtcagagagatctaccaacacccg

SEQ ID NO: 60508 - DNA, 20 bp, Artificial Sequence
  primer
tcacctgagcacaggattgc

SEQ ID NO: 60509 - DNA, 38 bp, Artificial Sequence
  primer
gtaaaacgacggccagtaggccggaaattcatgactac

SEQ ID NO: 60510 - DNA, 42 bp, Artificial Sequence
  primer
gtaaaacgacggccagtcactattatttccactggttccttg

SEQ ID NO: 60511 - DNA, 22 bp, Artificial Sequence
  primer
gcaaattgtcacttggatcttg

SEQ ID NO: 60512 - DNA, 38 bp, Artificial Sequence
  primer
gtaaaacgacggccagttaaagagggcctcacaacaag

SEQ ID NO: 60513 - DNA, 37 bp, Artificial Sequence
  primer
gtaaaacgacggccagtccaaagtgctgggagagatg

SEQ ID NO: 60514 - DNA, 38 bp, Artificial Sequence
  primer
gtaaaacgacggccagtggttggtccctacagatccag

SEQ ID NO: 60515 - DNA, 23 bp, Artificial Sequence
  primer
tttgtggcatcatatgtaattgg

SEQ ID NO: 60516 - DNA, 23 bp, Artificial Sequence
  primer
gagcaaattatgtgtgaggatgc

SEQ ID NO: 60517 - DNA, 24 bp, Artificial Sequence
  primer
tttgtcaggtggtatgggtataag

SEQ ID NO: 60518 - DNA, 21 bp, Artificial Sequence
  primer
gtagccagagcatggagtgtg

SEQ ID NO: 60519 - DNA, 20 bp, Artificial Sequence
  primer
cggcccaaagtctgtgtaac

SEQ ID NO: 60520 - DNA, 42 bp, Artificial Sequence
  primer
gtaaaacgacggccagtgggaatgataaattattacagcaca

SEQ ID NO: 60521 - DNA, 46 bp, Artificial Sequence
  primer
gtaaaacgacggccagtatgtaaatacactttacaattgagcagat

SEQ ID NO: 60522 - DNA, 43 bp, Artificial Sequence
  primer
gtaaaacgacggccagttttaaagttgcaacccatagtttctc

SEQ ID NO: 60523 - DNA, 35 bp, Artificial Sequence
  primer
gtaaaacgacggccagtatggtgcctggccctaac

SEQ ID NO: 60524 - DNA, 27 bp, Artificial Sequence
  primer
aaataaagcatatttgatagattccca

SEQ ID NO: 60525 - DNA, 43 bp, Artificial Sequence
  primer
gtaaaacgacggccagttcacacagtaaatttggtttggtatg

SEQ ID NO: 60526 - DNA, 39 bp, Artificial Sequence
  primer
gtaaaacgacggccagtcgtttgtgacagcctaacaatg

SEQ ID NO: 60527 - DNA, 27 bp, Artificial Sequence
  primer
catttgtgtttagagtttaattccagg

SEQ ID NO: 60528 - DNA, 21 bp, Artificial Sequence
  primer
tttccttcatcccacctcttg

SEQ ID NO: 60529 - DNA, 40 bp, Artificial Sequence
  primer
gtaaaacgacggccagtttcactctgccaacagatagtcc

SEQ ID NO: 60530 - DNA, 43 bp, Artificial Sequence
  primer
gtaaaacgacggccagttgaccaataggaatgagaagaattac

SEQ ID NO: 60531 - DNA, 40 bp, Artificial Sequence
  primer
gtaaaacgacggccagttgaatgtagcacaggactgatgt

SEQ ID NO: 60532 - DNA, 38 bp, Artificial Sequence
  primer
gtaaaacgacggccagtcctgggagagagttcttacgg

SEQ ID NO: 60533 - DNA, 38 bp, Artificial Sequence
  primer
gtaaaacgacggccagtcgtattcgcagcagtaacagg

SEQ ID NO: 60534 - DNA, 21 bp, Artificial Sequence
  primer
cagaggaaagagctcagcacc

SEQ ID NO: 60535 - DNA, 20 bp, Artificial Sequence
  primer
actcccatcagtcccattcc

SEQ ID NO: 60536 - DNA, 38 bp, Artificial Sequence
  primer
gtaaaacgacggccagtggcatttagcaaagcaagtgg

SEQ ID NO: 60537 - DNA, 38 bp, Artificial Sequence
  primer
gtaaaacgacggccagtctgtctcccatggtgttggtc

SEQ ID NO: 60538 - DNA, 38 bp, Artificial Sequence
  primer
gtaaaacgacggccagtaaggtatggctcagaggttgg

SEQ ID NO: 60539 - DNA, 20 bp, Artificial Sequence
  primer
tcatggagagtgaggaagcc

SEQ ID NO: 60540 - DNA, 38 bp, Artificial Sequence
  primer
gtaaaacgacggccagttggcttctcaattggtcttgg

SEQ ID NO: 60541 - DNA, 21 bp, Artificial Sequence
  primer
ctgtcaaatctggaacgagcc

SEQ ID NO: 60542 - DNA, 38 bp, Artificial Sequence
  primer
gtaaaacgacggccagtcaagaagtgctagggacaggg

SEQ ID NO: 60543 - DNA, 38 bp, Artificial Sequence
  primer
gtaaaacgacggccagtctttgtccttgtccttggagg

SEQ ID NO: 60544 - DNA, 37 bp, Artificial Sequence
  primer
gtaaaacgacggccagtggccaataatagcacccacc

SEQ ID NO: 60545 - DNA, 38 bp, Artificial Sequence
  primer
gtaaaacgacggccagtggaaggaagggagaagcagag

SEQ ID NO: 60546 - DNA, 39 bp, Artificial Sequence
  primer
gtaaaacgacggccagttgtgtacatggtgagtggatgg

SEQ ID NO: 60547 - DNA, 21 bp, Artificial Sequence
  primer
gagacgggagagctctttgag

SEQ ID NO: 60548 - DNA, 38 bp, Artificial Sequence
  primer
gtaaaacgacggccagtaggcaaagctagaagcctgag

SEQ ID NO: 60549 - DNA, 37 bp, Artificial Sequence
  primer
gtaaaacgacggccagttttgggttagaggaccctgg

SEQ ID NO: 60550 - DNA, 38 bp, Artificial Sequence
  primer
gtaaaacgacggccagtaactggagatgggatgagagg

SEQ ID NO: 60551 - DNA, 38 bp, Artificial Sequence
  primer
gtaaaacgacggccagtttggtttcttgacagccattg

SEQ ID NO: 60552 - DNA, 21 bp, Artificial Sequence
  primer
cagggctgagggaatagacag

SEQ ID NO: 60553 - DNA, 20 bp, Artificial Sequence
  primer
ccacgtgcagcctatcattg

SEQ ID NO: 60554 - DNA, 21 bp, Artificial Sequence
  primer
tttattctgtcagtgctgccc

SEQ ID NO: 60555 - DNA, 20 bp, Artificial Sequence
  primer
tggatttccatcctgaaggc

SEQ ID NO: 60556 - DNA, 30 bp, Artificial Sequence
  primer
tgtcttatattaatcccagtatttcctgtt

SEQ ID NO: 60557 - DNA, 38 bp, Artificial Sequence
  primer
gtaaaacgacggccagtcgcacgtggttacctttattc

SEQ ID NO: 60558 - DNA, 20 bp, Artificial Sequence
  primer
agatcagaacccacgcattt

SEQ ID NO: 60559 - DNA, 39 bp, Artificial Sequence
  primer
gtaaaacgacggccagtccacagtgttggatgatttctc

SEQ ID NO: 60560 - DNA, 21 bp, Artificial Sequence
  primer
cattgcttccagcagtagtgg

SEQ ID NO: 60561 - DNA, 20 bp, Artificial Sequence
  primer
cccactgaagggactgtctg

SEQ ID NO: 60562 - DNA, 38 bp, Artificial Sequence
  primer
gtaaaacgacggccagtggcatttgggttgattcctta

SEQ ID NO: 60563 - DNA, 42 bp, Artificial Sequence
  primer
gtaaaacgacggccagtgcgaaagatagtcatttctatgcag

SEQ ID NO: 60564 - DNA, 38 bp, Artificial Sequence
  primer
gtaaaacgacggccagtcattgcctcttgaggattcag

SEQ ID NO: 60565 - DNA, 21 bp, Artificial Sequence
  primer
ctttgctcatatcgccctttc

SEQ ID NO: 60566 - DNA, 38 bp, Artificial Sequence
  primer
gtaaaacgacggccagtatatggtcacgtttgtcctgc

SEQ ID NO: 60567 - DNA, 40 bp, Artificial Sequence
  primer
gtaaaacgacggccagttggttatttaatgctcagttgcc

SEQ ID NO: 60568 - DNA, 21 bp, Artificial Sequence
  primer
taatcctcccgcctcagtatc

SEQ ID NO: 60569 - DNA, 39 bp, Artificial Sequence
  primer
gtaaaacgacggccagtgctcacaacatttctgagaccc

SEQ ID NO: 60570 - DNA, 21 bp, Artificial Sequence
  primer
cagatcaaagaatgcctgtgg

SEQ ID NO: 60571 - DNA, 39 bp, Artificial Sequence
  primer
gtaaaacgacggccagtaattccaaagagtttgccattc

SEQ ID NO: 60572 - DNA, 25 bp, Artificial Sequence
  primer
aatgataagcatggtatctattggg

SEQ ID NO: 60573 - DNA, 42 bp, Artificial Sequence
  primer
gtaaaacgacggccagttggctcaagttcaatataagaatca

SEQ ID NO: 60574 - DNA, 38 bp, Artificial Sequence
  primer
gtaaaacgacggccagtttaagctctgcacgcattagg

SEQ ID NO: 60575 - DNA, 41 bp, Artificial Sequence
  primer
gtaaaacgacggccagttttcaaatttaattcagatgccac

SEQ ID NO: 60576 - DNA, 19 bp, Artificial Sequence
  primer
agtttgcgtacagcctggg

SEQ ID NO: 60577 - DNA, 21 bp, Artificial Sequence
  primer
tgatgcatcccaatttcagag

SEQ ID NO: 60578 - DNA, 38 bp, Artificial Sequence
  primer
gtaaaacgacggccagtgtccttcagccaataatgcac

SEQ ID NO: 60579 - DNA, 21 bp, Artificial Sequence
  primer
agggagttgagaaactgtggc

SEQ ID NO: 60580 - DNA, 38 bp, Artificial Sequence
  primer
gtaaaacgacggccagtaggacacacagcactgaggag

SEQ ID NO: 60581 - DNA, 38 bp, Artificial Sequence
  primer
gtaaaacgacggccagtctcacctccatctgcagtcac

SEQ ID NO: 60582 - DNA, 21 bp, Artificial Sequence
  primer
gagagaaagacagtggcaggc

SEQ ID NO: 60583 - DNA, 38 bp, Artificial Sequence
  primer
gtaaaacgacggccagtctattctgtgctcagggagcc

SEQ ID NO: 60584 - DNA, 38 bp, Artificial Sequence
  primer
gtaaaacgacggccagttatctaccctagaaggccggg

SEQ ID NO: 60585 - DNA, 38 bp, Artificial Sequence
  primer
gtaaaacgacggccagtctacaaatgctgctcctctgg

SEQ ID NO: 60586 - DNA, 21 bp, Artificial Sequence
  primer
caacaagagcggaactctgtc

SEQ ID NO: 60587 - DNA, 37 bp, Artificial Sequence
  primer
gtaaaacgacggccagtcaggatgtggtgagggtctc

SEQ ID NO: 60588 - DNA, 39 bp, Artificial Sequence
  primer
gtaaaacgacggccagtcactcggaagatgagaaattgg

SEQ ID NO: 60589 - DNA, 38 bp, Artificial Sequence
  primer
gtaaaacgacggccagtaagatggcagatgcctttcag

SEQ ID NO: 60590 - DNA, 20 bp, Artificial Sequence
  primer
atgattggaaatgacagccg

SEQ ID NO: 60591 - DNA, 20 bp, Artificial Sequence
  primer
ctcagcagtctctgggatgg

SEQ ID NO: 60592 - DNA, 37 bp, Artificial Sequence
  primer
gtaaaacgacggccagttatggccctgcttcttcctc

SEQ ID NO: 60593 - DNA, 21 bp, Artificial Sequence
  primer
tgccaactacaaatgctgctc

SEQ ID NO: 60594 - DNA, 38 bp, Artificial Sequence
  primer
gtaaaacgacggccagtggagtccagacctccttccag

SEQ ID NO: 60595 - DNA, 38 bp, Artificial Sequence
  primer
gtaaaacgacggccagtggccaggcctcaggtataaag

SEQ ID NO: 60596 - DNA, 38 bp, Artificial Sequence
  primer
gtaaaacgacggccagtggacaatgggaggaagtcttg

SEQ ID NO: 60597 - DNA, 38 bp, Artificial Sequence
  primer
gtaaaacgacggccagtgacagtgggaatctgggagac

SEQ ID NO: 60598 - DNA, 38 bp, Artificial Sequence
  primer
gtaaaacgacggccagtaagatatttgcccgcaatcac

SEQ ID NO: 60599 - DNA, 38 bp, Artificial Sequence
  primer
gtaaaacgacggccagtcctacagggtatggaaggctg

SEQ ID NO: 60600 - DNA, 21 bp, Artificial Sequence
  primer
ctagggtcccacacttgttcc

SEQ ID NO: 60601 - DNA, 20 bp, Artificial Sequence
  primer
ctcacagttcctgcaccctc

SEQ ID NO: 60602 - DNA, 38 bp, Artificial Sequence
  primer
gtaaaacgacggccagtactgtctgccatcctgaatcc

SEQ ID NO: 60603 - DNA, 40 bp, Artificial Sequence
  primer
gtaaaacgacggccagtgactcccatggcattatatctcc

SEQ ID NO: 60604 - DNA, 21 bp, Artificial Sequence
  primer
tgcagcttgtggaactgaatc

SEQ ID NO: 60605 - DNA, 20 bp, Artificial Sequence
  primer
agagagatgcagggagggtc

SEQ ID NO: 60606 - DNA, 21 bp, Artificial Sequence
  primer
agtgctgagacacaaactgcc

SEQ ID NO: 60607 - DNA, 38 bp, Artificial Sequence
  primer
gtaaaacgacggccagtatgctctttgctttcaggacc

SEQ ID NO: 60608 - DNA, 38 bp, Artificial Sequence
  primer
gtaaaacgacggccagtcatgctgaggaagttcaatgg

SEQ ID NO: 60609 - DNA, 21 bp, Artificial Sequence
  primer
acaacccacacccaagatgtc

SEQ ID NO: 60610 - DNA, 37 bp, Artificial Sequence
  primer
gtaaaacgacggccagtatgattgccaggatgtctgc

SEQ ID NO: 60611 - DNA, 38 bp, Artificial Sequence
  primer
gtaaaacgacggccagtgcacagagccgtgactcatac

SEQ ID NO: 60612 - DNA, 38 bp, Artificial Sequence
  primer
gtaaaacgacggccagtctgtgccctagcctctgctac

SEQ ID NO: 60613 - DNA, 38 bp, Artificial Sequence
  primer
gtaaaacgacggccagtggtctacttaccctcccaccc

SEQ ID NO: 60614 - DNA, 38 bp, Artificial Sequence
  primer
gtaaaacgacggccagtagtccaccagtgggatacagg

SEQ ID NO: 60615 - DNA, 38 bp, Artificial Sequence
  primer
gtaaaacgacggccagtgactgcagctgatggaagatg

SEQ ID NO: 60616 - DNA, 38 bp, Artificial Sequence
  primer
gtaaaacgacggccagtggacataagccatcacgtttg

SEQ ID NO: 60617 - DNA, 38 bp, Artificial Sequence
  primer
gtaaaacgacggccagtactcctgactgtaggttgggc

SEQ ID NO: 60618 - DNA, 40 bp, Artificial Sequence
  primer
gtaaaacgacggccagttgtatagaactgtggctcttgcc

SEQ ID NO: 60619 - DNA, 21 bp, Artificial Sequence
  primer
tctatctcctgatggctggtg

SEQ ID NO: 60620 - DNA, 38 bp, Artificial Sequence
  primer
gtaaaacgacggccagtttcatggtagctccagccttc

SEQ ID NO: 60621 - DNA, 21 bp, Artificial Sequence
  primer
gggacatatccattgctaggc

SEQ ID NO: 60622 - DNA, 38 bp, Artificial Sequence
  primer
gtaaaacgacggccagttgttcccgcaactcaactatg

SEQ ID NO: 60623 - DNA, 39 bp, Artificial Sequence
  primer
gtaaaacgacggccagtggaacacactcaccctacttgc

SEQ ID NO: 60624 - DNA, 38 bp, Artificial Sequence
  primer
gtaaaacgacggccagtggtggagctggataatccttg

SEQ ID NO: 60625 - DNA, 38 bp, Artificial Sequence
  primer
gtaaaacgacggccagtcatgctggactggaggacttc

SEQ ID NO: 60626 - DNA, 23 bp, Artificial Sequence
  primer
ttggttatgaatttggtgattgg

SEQ ID NO: 60627 - DNA, 38 bp, Artificial Sequence
  primer
gtaaaacgacggccagtattggtttggaatgcagtgtg

SEQ ID NO: 60628 - DNA, 38 bp, Artificial Sequence
  primer
gtaaaacgacggccagtttggctttctttcctctctgg

SEQ ID NO: 60629 - DNA, 37 bp, Artificial Sequence
  primer
gtaaaacgacggccagtcatgttctccgctaaggtgg

SEQ ID NO: 60630 - DNA, 37 bp, Artificial Sequence
  primer
gtaaaacgacggccagtgacagtgcaaggtgggagag

SEQ ID NO: 60631 - DNA, 38 bp, Artificial Sequence
  primer
gtaaaacgacggccagtgcgtctcctattctaggctgc

SEQ ID NO: 60632 - DNA, 19 bp, Artificial Sequence
  primer
agtgtccggaaacgcagtc

SEQ ID NO: 60633 - DNA, 38 bp, Artificial Sequence
  primer
gtaaaacgacggccagtagctatagcaccacccagctc

SEQ ID NO: 60634 - DNA, 21 bp, Artificial Sequence
  primer
gttatgtggttggatggttgg

SEQ ID NO: 60635 - DNA, 21 bp, Artificial Sequence
  primer
tgacaccataccagtgccatc

SEQ ID NO: 60636 - DNA, 35 bp, Artificial Sequence
  primer
gtaaaacgacggccagttcaggcctcagcctcctg

SEQ ID NO: 60637 - DNA, 38 bp, Artificial Sequence
  primer
gtaaaacgacggccagtcctgggactaaaggagttggg

SEQ ID NO: 60638 - DNA, 37 bp, Artificial Sequence
  primer
gtaaaacgacggccagtatgcccatctatgaggctcc

SEQ ID NO: 60639 - DNA, 38 bp, Artificial Sequence
  primer
gtaaaacgacggccagttagccctcctaaccaaaccag

SEQ ID NO: 60640 - DNA, 21 bp, Artificial Sequence
  primer
ttagtgaccaaccctcattgc

SEQ ID NO: 60641 - DNA, 38 bp, Artificial Sequence
  primer
gtaaaacgacggccagtcaattccaggttgaggaggag

SEQ ID NO: 60642 - DNA, 21 bp, Artificial Sequence
  primer
cttgctgtggagcacagagac

SEQ ID NO: 60643 - DNA, 38 bp, Artificial Sequence
  primer
gtaaaacgacggccagtgtcatagccctaagggtgcag

SEQ ID NO: 60644 - DNA, 38 bp, Artificial Sequence
  primer
gtaaaacgacggccagtggaggaaccctgtcctctttc

SEQ ID NO: 60645 - DNA, 38 bp, Artificial Sequence
  primer
gtaaaacgacggccagtgggtgagagtttacctggacc

SEQ ID NO: 60646 - DNA, 19 bp, Artificial Sequence
  primer
attcctgctggaaacaggg

SEQ ID NO: 60647 - DNA, 38 bp, Artificial Sequence
  primer
gtaaaacgacggccagtgaacaagaaagattggccagg

SEQ ID NO: 60648 - DNA, 38 bp, Artificial Sequence
  primer
gtaaaacgacggccagtaagcacctactccacaggtcc

SEQ ID NO: 60649 - DNA, 18 bp, Artificial Sequence
  primer
cctgcaaggactggcctc

SEQ ID NO: 60650 - DNA, 20 bp, Artificial Sequence
  primer
gggtttagaaagtggccagg

SEQ ID NO: 60651 - DNA, 38 bp, Artificial Sequence
  primer
gtaaaacgacggccagtattaattccgccattgtttgc

SEQ ID NO: 60652 - DNA, 21 bp, Artificial Sequence
  primer
aaacatcaaattcccgtcagc

SEQ ID NO: 60653 - DNA, 37 bp, Artificial Sequence
  primer
gtaaaacgacggccagtgcgcccagcctgtatcatag

SEQ ID NO: 60654 - DNA, 21 bp, Artificial Sequence
  primer
tagcaattgcccattcaacag

SEQ ID NO: 60655 - DNA, 38 bp, Artificial Sequence
  primer
gtaaaacgacggccagtccagtggagggttgttgtaag

SEQ ID NO: 60656 - DNA, 37 bp, Artificial Sequence
  primer
gtaaaacgacggccagtaagcacattccacaagaggg

SEQ ID NO: 60657 - DNA, 37 bp, Artificial Sequence
  primer
gtaaaacgacggccagtaggaacctcggtgagtgtgg

SEQ ID NO: 60658 - DNA, 38 bp, Artificial Sequence
  primer
gtaaaacgacggccagtgtggttggaaatgggagagag

SEQ ID NO: 60659 - DNA, 21 bp, Artificial Sequence
  primer
acagtgagctgtgactgcacc

SEQ ID NO: 60660 - DNA, 21 bp, Artificial Sequence
  primer
tcatggattcatcccttaccc

SEQ ID NO: 60661 - DNA, 38 bp, Artificial Sequence
  primer
gtaaaacgacggccagtgtcagctggtatgggatgttg

SEQ ID NO: 60662 - DNA, 38 bp, Artificial Sequence
  primer
gtaaaacgacggccagtcagactgagattgggcagacc

SEQ ID NO: 60663 - DNA, 21 bp, Artificial Sequence
  primer
gggaagccaagatgtctgaag

SEQ ID NO: 60664 - DNA, 38 bp, Artificial Sequence
  primer
gtaaaacgacggccagtaggcagtagcagagaacaggc

SEQ ID NO: 60665 - DNA, 39 bp, Artificial Sequence
  primer
gtaaaacgacggccagtcaatatttgggatagggaaggg

SEQ ID NO: 60666 - DNA, 20 bp, Artificial Sequence
  primer
ttataggtcacccggaaggc

SEQ ID NO: 60667 - DNA, 37 bp, Artificial Sequence
  primer
gtaaaacgacggccagtgtgctgggcacctgtattcc

SEQ ID NO: 60668 - DNA, 35 bp, Artificial Sequence
  primer
gtaaaacgacggccagtgtgtgagccactgtgccc

SEQ ID NO: 60669 - DNA, 21 bp, Artificial Sequence
  primer
tccctgactgctttgggtaag

SEQ ID NO: 60670 - DNA, 20 bp, Artificial Sequence
  primer
cgtagttaagggcgggtctc

SEQ ID NO: 60671 - DNA, 21 bp, Artificial Sequence
  primer
ggatattcaggttggtttggg

SEQ ID NO: 60672 - DNA, 21 bp, Artificial Sequence
  primer
gtggaagccttgtgttctcag

SEQ ID NO: 60673 - DNA, 37 bp, Artificial Sequence
  primer
gtaaaacgacggccagtacacagagtggtgagggtgg

SEQ ID NO: 60674 - DNA, 20 bp, Artificial Sequence
  primer
gctgagaagctggaaggagg

SEQ ID NO: 60675 - DNA, 38 bp, Artificial Sequence
  primer
gtaaaacgacggccagtaccagagttgtggactttccc

SEQ ID NO: 60676 - DNA, 21 bp, Artificial Sequence
  primer
tagttggagccatttgcagag

SEQ ID NO: 60677 - DNA, 36 bp, Artificial Sequence
  primer
gtaaaacgacggccagtctgcctgggatggaagaag

SEQ ID NO: 60678 - DNA, 38 bp, Artificial Sequence
  primer
gtaaaacgacggccagtgcctaggtcagagagggattg

SEQ ID NO: 60679 - DNA, 40 bp, Artificial Sequence
  primer
gtaaaacgacggccagttctcatgtttctcaaagacaccc

SEQ ID NO: 60680 - DNA, 20 bp, Artificial Sequence
  primer
acgtgggtgtagattgtggg

SEQ ID NO: 60681 - DNA, 36 bp, Artificial Sequence
  primer
gtaaaacgacggccagtgatgctgaggtcctgggag

SEQ ID NO: 60682 - DNA, 18 bp, Artificial Sequence
  primer
cgggcttctagctcagcc

SEQ ID NO: 60683 - DNA, 38 bp, Artificial Sequence
  primer
gtaaaacgacggccagtttacctgcctgcagagaaatg

SEQ ID NO: 60684 - DNA, 38 bp, Artificial Sequence
  primer
gtaaaacgacggccagtctgaaccaagagtccaccctg

SEQ ID NO: 60685 - DNA, 21 bp, Artificial Sequence
  primer
gagcacagctgggtattcctc

SEQ ID NO: 60686 - DNA, 38 bp, Artificial Sequence
  primer
gtaaaacgacggccagttgttctttgttctgggcattg

SEQ ID NO: 60687 - DNA, 23 bp, Artificial Sequence
  primer
agtgatcttcatttgcagggtag

SEQ ID NO: 60688 - DNA, 21 bp, Artificial Sequence
  primer
ctgagaggctggactgtttgc

SEQ ID NO: 60689 - DNA, 38 bp, Artificial Sequence
  primer
gtaaaacgacggccagtgtgcaggagacagaaagggag

SEQ ID NO: 60690 - DNA, 21 bp, Artificial Sequence
  primer
tgtaaagagtggctcttgccc

SEQ ID NO: 60691 - DNA, 21 bp, Artificial Sequence
  primer
agcagtctgcgaacagttgaa

SEQ ID NO: 60692 - DNA, 21 bp, Artificial Sequence
  primer
aatttggttcaaagggctcac

SEQ ID NO: 60693 - DNA, 20 bp, Artificial Sequence
  primer
ccgaggagaccctaagatgg

SEQ ID NO: 60694 - DNA, 21 bp, Artificial Sequence
  primer
acaccaacatcgtggagtacc

SEQ ID NO: 60695 - DNA, 21 bp, Artificial Sequence
  primer
ttgctgggagctacgtatgtg

SEQ ID NO: 60696 - DNA, 39 bp, Artificial Sequence
  primer
gtaaaacgacggccagtcggacacttcctattacatccg

SEQ ID NO: 60697 - DNA, 38 bp, Artificial Sequence
  primer
gtaaaacgacggccagtgactcagcccagttcaccaag

SEQ ID NO: 60698 - DNA, 21 bp, Artificial Sequence
  primer
gacaaggacaccacaaacgtg

SEQ ID NO: 60699 - DNA, 36 bp, Artificial Sequence
  primer
gtaaaacgacggccagtgtttaaagcgctggcgaac

SEQ ID NO: 60700 - DNA, 38 bp, Artificial Sequence
  primer
gtaaaacgacggccagtagagtgaggtcttggtcggtg

SEQ ID NO: 60701 - DNA, 21 bp, Artificial Sequence
  primer
cttctagtcagccatggagcc

SEQ ID NO: 60702 - DNA, 38 bp, Artificial Sequence
  primer
gtaaaacgacggccagtctgattgcgaccgaagaagtc

SEQ ID NO: 60703 - DNA, 22 bp, Artificial Sequence
  primer
aaagaggttcttccaccaatcc

SEQ ID NO: 60704 - DNA, 38 bp, Artificial Sequence
  primer
gtaaaacgacggccagtcacccacaaggatcttcttcg

SEQ ID NO: 60705 - DNA, 21 bp, Artificial Sequence
  primer
cccagaactcgtgaaggtttc

SEQ ID NO: 60706 - DNA, 38 bp, Artificial Sequence
  primer
gtaaaacgacggccagtttcctgtgactcttgcctgtg

SEQ ID NO: 60707 - DNA, 38 bp, Artificial Sequence
  primer
gtaaaacgacggccagtaaattgttggcaagcaaatcc

SEQ ID NO: 60708 - DNA, 38 bp, Artificial Sequence
  primer
gtaaaacgacggccagtgtgcagaatctggaagtttgg

SEQ ID NO: 60709 - DNA, 21 bp, Artificial Sequence
  primer
ccaaggaagtgaacagtgcag

SEQ ID NO: 60710 - DNA, 21 bp, Artificial Sequence
  primer
ttggatcctttaagcccaatg

SEQ ID NO: 60711 - DNA, 21 bp, Artificial Sequence
  primer
acttcagccctcttcatctgg

SEQ ID NO: 60712 - DNA, 21 bp, Artificial Sequence
  primer
atgccacaaacttgcacaaac

SEQ ID NO: 60713 - DNA, 38 bp, Artificial Sequence
  primer
gtaaaacgacggccagttgaaggcatgaagttggtgag

SEQ ID NO: 60714 - DNA, 38 bp, Artificial Sequence
  primer
gtaaaacgacggccagttggccaaactaattgctgatg

SEQ ID NO: 60715 - DNA, 21 bp, Artificial Sequence
  primer
tcaagcccgtgtatgtctttg

SEQ ID NO: 60716 - DNA, 21 bp, Artificial Sequence
  primer
aaagtctatgctgcggctacc

SEQ ID NO: 60717 - DNA, 38 bp, Artificial Sequence
  primer
gtaaaacgacggccagtgaggctcaccagctcttcttg

SEQ ID NO: 60718 - DNA, 24 bp, Artificial Sequence
  primer
ttcatcttgtttctgatctttgga

SEQ ID NO: 60719 - DNA, 21 bp, Artificial Sequence
  primer
ttgaacagttgccagaaacct

SEQ ID NO: 60720 - DNA, 38 bp, Artificial Sequence
  primer
gtaaaacgacggccagtcctggcctgatttgctattct

SEQ ID NO: 60721 - DNA, 24 bp, Artificial Sequence
  primer
tttgcaaatctaacagtaccttgc

SEQ ID NO: 60722 - DNA, 21 bp, Artificial Sequence
  primer
aggtggtacaggaaacaacca

SEQ ID NO: 60723 - DNA, 23 bp, Artificial Sequence
  primer
tttgaaacccaggatttagtttg

SEQ ID NO: 60724 - DNA, 21 bp, Artificial Sequence
  primer
ccaccatccagtaaggtagcc

SEQ ID NO: 60725 - DNA, 22 bp, Artificial Sequence
  primer
tggatttgactccaaacacttc

SEQ ID NO: 60726 - DNA, 42 bp, Artificial Sequence
  primer
gtaaaacgacggccagtgatggataagctgtggataagtacc

SEQ ID NO: 60727 - DNA, 22 bp, Artificial Sequence
  primer
gggaggaacatttgtaagaagc

SEQ ID NO: 60728 - DNA, 21 bp, Artificial Sequence
  primer
tgcatttcaggtctgtttgtt

SEQ ID NO: 60729 - DNA, 38 bp, Artificial Sequence
  primer
gtaaaacgacggccagtcactggctcaaatgcaacttc

SEQ ID NO: 60730 - DNA, 21 bp, Artificial Sequence
  primer
taagcacctcctcctctttgg

SEQ ID NO: 60731 - DNA, 38 bp, Artificial Sequence
  primer
gtaaaacgacggccagtagggaaggctttactcgtttg

SEQ ID NO: 60732 - DNA, 38 bp, Artificial Sequence
  primer
gtaaaacgacggccagtcctcacgtcaaacaaattggg

SEQ ID NO: 60733 - DNA, 39 bp, Artificial Sequence
  primer
gtaaaacgacggccagttgaggactggtaaatcacaagc

SEQ ID NO: 60734 - DNA, 38 bp, Artificial Sequence
  primer
gtaaaacgacggccagttgtggtgcatgactgacacag

SEQ ID NO: 60735 - DNA, 38 bp, Artificial Sequence
  primer
gtaaaacgacggccagtaactgcataatgccctgtgtg

SEQ ID NO: 60736 - DNA, 38 bp, Artificial Sequence
  primer
gtaaaacgacggccagttggcactggatttgattaacg

SEQ ID NO: 60737 - DNA, 21 bp, Artificial Sequence
  primer
agaaatcctcccttcactggg

SEQ ID NO: 60738 - DNA, 21 bp, Artificial Sequence
  primer
agaataaatgaatggcccacg

SEQ ID NO: 60739 - DNA, 21 bp, Artificial Sequence
  primer
tagaaagcaggaagccaggag

SEQ ID NO: 60740 - DNA, 38 bp, Artificial Sequence
  primer
gtaaaacgacggccagttgagaggtcctgagtcattgg

SEQ ID NO: 60741 - DNA, 21 bp, Artificial Sequence
  primer
tccagcctcgcttacctactc

SEQ ID NO: 60742 - DNA, 37 bp, Artificial Sequence
  primer
gtaaaacgacggccagtggaaacctgagcctttggac

SEQ ID NO: 60743 - DNA, 38 bp, Artificial Sequence
  primer
gtaaaacgacggccagttgaaggaaatgaagcaacacc

SEQ ID NO: 60744 - DNA, 37 bp, Artificial Sequence
  primer
gtaaaacgacggccagtcttaaactccaggccttgcc

SEQ ID NO: 60745 - DNA, 21 bp, Artificial Sequence
  primer
cgggtaagggtcagcaagtag

SEQ ID NO: 60746 - DNA, 38 bp, Artificial Sequence
  primer
gtaaaacgacggccagtacacatcagacaaggcactgg

SEQ ID NO: 60747 - DNA, 38 bp, Artificial Sequence
  primer
gtaaaacgacggccagtgtgtgtcgtgaagaggcttcc

SEQ ID NO: 60748 - DNA, 40 bp, Artificial Sequence
  primer
gtaaaacgacggccagtccaaacacaggaaatcttaatgg

SEQ ID NO: 60749 - DNA, 39 bp, Artificial Sequence
  primer
gtaaaacgacggccagttcttctgacctcatgatccacc

SEQ ID NO: 60750 - DNA, 38 bp, Artificial Sequence
  primer
gtaaaacgacggccagtctcctagtgcctcgaaacagc

SEQ ID NO: 60751 - DNA, 21 bp, Artificial Sequence
  primer
aacccagagtggaatcaggtc

SEQ ID NO: 60752 - DNA, 21 bp, Artificial Sequence
  primer
gcaggagatgagggtgagaag

SEQ ID NO: 60753 - DNA, 21 bp, Artificial Sequence
  primer
atatggcaaacctcatggtgc

SEQ ID NO: 60754 - DNA, 39 bp, Artificial Sequence
  primer
gtaaaacgacggccagtgattcatttcgaaggttagggc

SEQ ID NO: 60755 - DNA, 38 bp, Artificial Sequence
  primer
gtaaaacgacggccagtctgggtccaagaacattctcc

SEQ ID NO: 60756 - DNA, 38 bp, Artificial Sequence
  primer
gtaaaacgacggccagtaatcagcagctcagtctgcac

SEQ ID NO: 60757 - DNA, 21 bp, Artificial Sequence
  primer
ccactttagggttccctctcc

SEQ ID NO: 60758 - DNA, 21 bp, Artificial Sequence
  primer
taggaggttgatgtggtttgc

SEQ ID NO: 60759 - DNA, 39 bp, Artificial Sequence
  primer
gtaaaacgacggccagtgctaaatgaatccctgagggtc

SEQ ID NO: 60760 - DNA, 39 bp, Artificial Sequence
  primer
gtaaaacgacggccagttctttgctgtagggtcatctgg

SEQ ID NO: 60761 - DNA, 23 bp, Artificial Sequence
  primer
ttgaatgatttatccgaagttgc

SEQ ID NO: 60762 - DNA, 39 bp, Artificial Sequence
  primer
gtaaaacgacggccagtgggtgtagatgcttcctgagtg

SEQ ID NO: 60763 - DNA, 23 bp, Artificial Sequence
  primer
ggaactatattggaccctttgcc

SEQ ID NO: 60764 - DNA, 38 bp, Artificial Sequence
  primer
gtaaaacgacggccagttacagaacatctgagggcagg

SEQ ID NO: 60765 - DNA, 20 bp, Artificial Sequence
  primer
caaggcagaggtcctgtctg

SEQ ID NO: 60766 - DNA, 38 bp, Artificial Sequence
  primer
gtaaaacgacggccagtgctttccagctaagcgacttc

SEQ ID NO: 60767 - DNA, 37 bp, Artificial Sequence
  primer
gtaaaacgacggccagtctactttgggaggccacatc

SEQ ID NO: 60768 - DNA, 38 bp, Artificial Sequence
  primer
gtaaaacgacggccagttggttgcactgagtggttctg

SEQ ID NO: 60769 - DNA, 21 bp, Artificial Sequence
  primer
caatgaccaagtggtaggtcg

SEQ ID NO: 60770 - DNA, 38 bp, Artificial Sequence
  primer
gtaaaacgacggccagtatgaatggagacaaagcctgc

SEQ ID NO: 60771 - DNA, 40 bp, Artificial Sequence
  primer
gtaaaacgacggccagtctttctttggatgacctacaagc

SEQ ID NO: 60772 - DNA, 38 bp, Artificial Sequence
  primer
gtaaaacgacggccagttagccaggtagttcatggtgg

SEQ ID NO: 60773 - DNA, 21 bp, Artificial Sequence
  primer
ggaaacgtgatggattgttgg

SEQ ID NO: 60774 - DNA, 41 bp, Artificial Sequence
  primer
gtaaaacgacggccagtctctttaaacttcatgttcctggg

SEQ ID NO: 60775 - DNA, 21 bp, Artificial Sequence
  primer
gggcattaaagccaaacacat

SEQ ID NO: 60776 - DNA, 38 bp, Artificial Sequence
  primer
gtaaaacgacggccagtcccacttgatactgtcagccc

SEQ ID NO: 60777 - DNA, 20 bp, Artificial Sequence
  primer
tccatccttcaatcccacac

SEQ ID NO: 60778 - DNA, 22 bp, Artificial Sequence
  primer
gctgagtctgtccctgaacttg

SEQ ID NO: 60779 - DNA, 38 bp, Artificial Sequence
  primer
gtaaaacgacggccagtgccatactacacacagcctgg

SEQ ID NO: 60780 - DNA, 41 bp, Artificial Sequence
  primer
gtaaaacgacggccagttgagcatgtatgtgtgaatctgag

SEQ ID NO: 60781 - DNA, 38 bp, Artificial Sequence
  primer
gtaaaacgacggccagtaagcagctctaggcaatctgg

SEQ ID NO: 60782 - DNA, 38 bp, Artificial Sequence
  primer
gtaaaacgacggccagtctcttccacttcttgccttcc

SEQ ID NO: 60783 - DNA, 38 bp, Artificial Sequence
  primer
gtaaaacgacggccagtcctcctttcaacatcacaccc

SEQ ID NO: 60784 - DNA, 37 bp, Artificial Sequence
  primer
gtaaaacgacggccagtcccagctccgaagataactg

SEQ ID NO: 60785 - DNA, 38 bp, Artificial Sequence
  primer
gtaaaacgacggccagtagagtggaaggatttaggccc

SEQ ID NO: 60786 - DNA, 38 bp, Artificial Sequence
  primer
gtaaaacgacggccagttcactgtgtgcctctctcctg

SEQ ID NO: 60787 - DNA, 21 bp, Artificial Sequence
  primer
tcctcaaagtttcccacacag

SEQ ID NO: 60788 - DNA, 21 bp, Artificial Sequence
  primer
cctttctcagtcaacgaaggg

SEQ ID NO: 60789 - DNA, 20 bp, Artificial Sequence
  primer
gccagtgaaagctgctgaac

SEQ ID NO: 60790 - DNA, 38 bp, Artificial Sequence
  primer
gtaaaacgacggccagtccttatcggtgcgactaatcc

SEQ ID NO: 60791 - DNA, 21 bp, Artificial Sequence
  primer
aagaagaggagtgcgaagtgg

SEQ ID NO: 60792 - DNA, 38 bp, Artificial Sequence
  primer
gtaaaacgacggccagtgacgctaaggaagcaatgagg

SEQ ID NO: 60793 - DNA, 21 bp, Artificial Sequence
  primer
ctggctgtatctgccttctcc

SEQ ID NO: 60794 - DNA, 38 bp, Artificial Sequence
  primer
gtaaaacgacggccagtctgacgacaggacctttccag

SEQ ID NO: 60795 - DNA, 20 bp, Artificial Sequence
  primer
ccagtgctgacctgtccttg

SEQ ID NO: 60796 - DNA, 37 bp, Artificial Sequence
  primer
gtaaaacgacggccagtagggtcctaggcctgaactg

SEQ ID NO: 60797 - DNA, 38 bp, Artificial Sequence
  primer
gtaaaacgacggccagtgctgagtaccaaggcttcctg

SEQ ID NO: 60798 - DNA, 37 bp, Artificial Sequence
  primer
gtaaaacgacggccagtgctctacagggatgcactgg

SEQ ID NO: 60799 - DNA, 39 bp, Artificial Sequence
  primer
gtaaaacgacggccagtccctcctacctaccctaactgc

SEQ ID NO: 60800 - DNA, 37 bp, Artificial Sequence
  primer
gtaaaacgacggccagtagttgctgcagaccaagctg

SEQ ID NO: 60801 - DNA, 21 bp, Artificial Sequence
  primer
actccatggttgtaagggctg

SEQ ID NO: 60802 - DNA, 37 bp, Artificial Sequence
  primer
gtaaaacgacggccagtttctggaggtctctctgccc

SEQ ID NO: 60803 - DNA, 37 bp, Artificial Sequence
  primer
gtaaaacgacggccagtaatggaggacacagcccttc

SEQ ID NO: 60804 - DNA, 38 bp, Artificial Sequence
  primer
gtaaaacgacggccagtgaagcagaatgggtaggaagc

SEQ ID NO: 60805 - DNA, 38 bp, Artificial Sequence
  primer
gtaaaacgacggccagtcaagctcttctcccatcatcc

SEQ ID NO: 60806 - DNA, 38 bp, Artificial Sequence
  primer
gtaaaacgacggccagtccatctacatcgtcatggagc

SEQ ID NO: 60807 - DNA, 39 bp, Artificial Sequence
  primer
gtaaaacgacggccagttggctttcctagagtgttcagc

SEQ ID NO: 60808 - DNA, 39 bp, Artificial Sequence
  primer
gtaaaacgacggccagtagtccctgtctaccctggactc

SEQ ID NO: 60809 - DNA, 39 bp, Artificial Sequence
  primer
gtaaaacgacggccagtcatcttaagcagctcctatggc

SEQ ID NO: 60810 - DNA, 38 bp, Artificial Sequence
  primer
gtaaaacgacggccagtaaagagccttacaagccagcc

SEQ ID NO: 60811 - DNA, 20 bp, Artificial Sequence
  primer
ttggctttgccataaagcag

SEQ ID NO: 60812 - DNA, 38 bp, Artificial Sequence
  primer
gtaaaacgacggccagtgggaggcttggaaacatattc

SEQ ID NO: 60813 - DNA, 22 bp, Artificial Sequence
  primer
ccatccttgcctctttacagtc

SEQ ID NO: 60814 - DNA, 38 bp, Artificial Sequence
  primer
gtaaaacgacggccagtcttgacaatgcctctggtgac

SEQ ID NO: 60815 - DNA, 22 bp, Artificial Sequence
  primer
tttggatgatttcttggtaggg

SEQ ID NO: 60816 - DNA, 38 bp, Artificial Sequence
  primer
gtaaaacgacggccagttggtactaggcatgggaggac

SEQ ID NO: 60817 - DNA, 21 bp, Artificial Sequence
  primer
cgtcttctcctccttgtcacc

SEQ ID NO: 60818 - DNA, 21 bp, Artificial Sequence
  primer
ttcctgacttgggctctatgg

SEQ ID NO: 60819 - DNA, 37 bp, Artificial Sequence
  primer
gtaaaacgacggccagtgcggtaaggctacacaccac

SEQ ID NO: 60820 - DNA, 36 bp, Artificial Sequence
  primer
gtaaaacgacggccagtgtggcagtttctgctggag

SEQ ID NO: 60821 - DNA, 22 bp, Artificial Sequence
  primer
caagcccaacatgaactacgac

SEQ ID NO: 60822 - DNA, 42 bp, Artificial Sequence
  primer
gtaaaacgacggccagtggtctaaactcacattacgctgttc

SEQ ID NO: 60823 - DNA, 21 bp, Artificial Sequence
  primer
cacacacagaagcctctctcc

SEQ ID NO: 60824 - DNA, 38 bp, Artificial Sequence
  primer
gtaaaacgacggccagtggcatgctggagttagtgatg

SEQ ID NO: 60825 - DNA, 21 bp, Artificial Sequence
  primer
gtgtatgcaagcctttggttg

SEQ ID NO: 60826 - DNA, 38 bp, Artificial Sequence
  primer
gtaaaacgacggccagtagttggaagggatctcctctg

SEQ ID NO: 60827 - DNA, 21 bp, Artificial Sequence
  primer
tctggcctgtctctgtaagcc

SEQ ID NO: 60828 - DNA, 22 bp, Artificial Sequence
  primer
ccagtgaccatgaatgtttcag

SEQ ID NO: 60829 - DNA, 20 bp, Artificial Sequence
  primer
gggctcaaggtctgggttac

SEQ ID NO: 60830 - DNA, 38 bp, Artificial Sequence
  primer
gtaaaacgacggccagttctcagctagggctatccagg

SEQ ID NO: 60831 - DNA, 42 bp, Artificial Sequence; identical to SEQ ID NO: 60822
  primer

SEQ ID NO: 60832 - DNA, 40 bp, Artificial Sequence
  primer
gtaaaacgacggccagtgcaggatttctatgagttccagg

SEQ ID NO: 60833 - DNA, 38 bp, Artificial Sequence
  primer
gtaaaacgacggccagtatggaagtgttgcctactgcc

SEQ ID NO: 60834 - DNA, 22 bp, Artificial Sequence
  primer
actcattgcctggtacagagtg

SEQ ID NO: 60835 - DNA, 19 bp, Artificial Sequence
  primer
gctctgggtgccttaggtg

SEQ ID NO: 60836 - DNA, 39 bp, Artificial Sequence
  primer
gtaaaacgacggccagttttgctctttggcattgattac

SEQ ID NO: 60837 - DNA, 21 bp, Artificial Sequence
  primer
atgaagcaaatagaggtgggc

SEQ ID NO: 60838 - DNA, 21 bp, Artificial Sequence
  primer
gggcctttattgttgtatccc

SEQ ID NO: 60839 - DNA, 21 bp, Artificial Sequence
  primer
ttctatctccaagtggcaccc

SEQ ID NO: 60840 - DNA, 38 bp, Artificial Sequence
  primer
gtaaaacgacggccagtgcttatcggaagcaaacaagc

SEQ ID NO: 60841 - DNA, 21 bp, Artificial Sequence
  primer
gagagtgccatctcttcctgg

SEQ ID NO: 60842 - DNA, 21 bp, Artificial Sequence
  primer
ttccagagtttctctgcgacc

SEQ ID NO: 60843 - DNA, 21 bp, Artificial Sequence
  primer
gcagggcataacattatccaa

SEQ ID NO: 60844 - DNA, 38 bp, Artificial Sequence
  primer
gtaaaacgacggccagtcctttgagagggaatagcacc

SEQ ID NO: 60845 - DNA, 21 bp, Artificial Sequence
  primer
ttgtcgagggtcatgcagtag

SEQ ID NO: 60846 - DNA, 38 bp, Artificial Sequence
  primer
gtaaaacgacggccagtcccagagtggaaggcattaac

SEQ ID NO: 60847 - DNA, 38 bp, Artificial Sequence
  primer
gtaaaacgacggccagtcctggaagtactggaagctgg

SEQ ID NO: 60848 - DNA, 38 bp, Artificial Sequence
  primer
gtaaaacgacggccagtagtccagggacaaggagagag

SEQ ID NO: 60849 - DNA, 38 bp, Artificial Sequence
  primer
gtaaaacgacggccagtggcataggtactctggatggg

SEQ ID NO: 60850 - DNA, 37 bp, Artificial Sequence
  primer
gtaaaacgacggccagtctgagccgtgcctatctttg

SEQ ID NO: 60851 - DNA, 38 bp, Artificial Sequence
  primer
gtaaaacgacggccagtcggacctggcaagactacaag

SEQ ID NO: 60852 - DNA, 21 bp, Artificial Sequence
  primer
gcagttcagcacctttgacag

SEQ ID NO: 60853 - DNA, 26 bp, Artificial Sequence
  primer
aaaggtaaccatttctgaagtcattc

SEQ ID NO: 60854 - DNA, 38 bp, Artificial Sequence
  primer
gtaaaacgacggccagttcactatcaccaaccagccag

SEQ ID NO: 60855 - DNA, 38 bp, Artificial Sequence
  primer
gtaaaacgacggccagttgttggctaatcgtatcgctg

SEQ ID NO: 60856 - DNA, 39 bp, Artificial Sequence
  primer
gtaaaacgacggccagttgcttggtgatagctcagtgtt

SEQ ID NO: 60857 - DNA, 23 bp, Artificial Sequence
  primer
ggagaagagctttgttcatcctc

SEQ ID NO: 60858 - DNA, 39 bp, Artificial Sequence
  primer
gtaaaacgacggccagtaaagcacttgcagtttccaaag

SEQ ID NO: 60859 - DNA, 41 bp, Artificial Sequence
  primer
gtaaaacgacggccagttgtggaagctaaagataagggaag

SEQ ID NO: 60860 - DNA, 38 bp, Artificial Sequence
  primer
gtaaaacgacggccagtgcacaggaggtctttggtgta

SEQ ID NO: 60861 - DNA, 20 bp, Artificial Sequence
  primer
gcttgagtctctgcagtggg

SEQ ID NO: 60862 - DNA, 38 bp, Artificial Sequence
  primer
gtaaaacgacggccagtgctgctaagacatgccagtcc

SEQ ID NO: 60863 - DNA, 21 bp, Artificial Sequence
  primer
tcccaagtagctgggactaca

SEQ ID NO: 60864 - DNA, 21 bp, Artificial Sequence
  primer
ttgaaaggtgagtctggtccc

SEQ ID NO: 60865 - DNA, 21 bp, Artificial Sequence
  primer
tcagagagcctgtgattgtcg

SEQ ID NO: 60866 - DNA, 38 bp, Artificial Sequence
  primer
gtaaaacgacggccagtactcagggatgaagctgaagg

SEQ ID NO: 60867 - DNA, 38 bp, Artificial Sequence
  primer
gtaaaacgacggccagttctcaagaccaatgctgatcc

SEQ ID NO: 60868 - DNA, 38 bp, Artificial Sequence
  primer
gtaaaacgacggccagtgatgaaaggtatctgcctggg

SEQ ID NO: 60869 - DNA, 38 bp, Artificial Sequence
  primer
gtaaaacgacggccagtaagctggaaggagcagacttg

SEQ ID NO: 60870 - DNA, 18 bp, Artificial Sequence
  primer
aggttgtggtgagccgtg

SEQ ID NO: 60871 - DNA, 37 bp, Artificial Sequence
  primer
gtaaaacgacggccagtcacctgtggtgtctccatcc

SEQ ID NO: 60872 - DNA, 38 bp, Artificial Sequence
  primer
gtaaaacgacggccagtcttccatgcctaggctctttc

SEQ ID NO: 60873 - DNA, 20 bp, Artificial Sequence
  primer
tggtgttgggaggaacaaag

SEQ ID NO: 60874 - DNA, 21 bp, Artificial Sequence
  primer
tcaagcccaggtctttctgac

SEQ ID NO: 60875 - DNA, 38 bp, Artificial Sequence
  primer
gtaaaacgacggccagtggtatacgaaggtgaggcgag

SEQ ID NO: 60876 - DNA, 37 bp, Artificial Sequence
  primer
gtaaaacgacggccagttaatccaagcgttggagcag

SEQ ID NO: 60877 - DNA, 21 bp, Artificial Sequence
  primer
tctgctgtgggagttggtatg

SEQ ID NO: 60878 - DNA, 38 bp, Artificial Sequence
  primer
gtaaaacgacggccagtcactggacaaatcactcctgc

SEQ ID NO: 60879 - DNA, 38 bp, Artificial Sequence
  primer
gtaaaacgacggccagtccacggaaggttcctgagtag

SEQ ID NO: 60880 - DNA, 21 bp, Artificial Sequence
  primer
tttagcctatctgtcccaggc

SEQ ID NO: 60881 - DNA, 36 bp, Artificial Sequence
  primer
gtaaaacgacggccagtatccacaccagggacttgc

SEQ ID NO: 60882 - DNA, 38 bp, Artificial Sequence
  primer
gtaaaacgacggccagtcactgcagcaactttggagac

SEQ ID NO: 60883 - DNA, 37 bp, Artificial Sequence
  primer
gtaaaacgacggccagtgcttggtgggaccctagttc

SEQ ID NO: 60884 - DNA, 38 bp, Artificial Sequence
  primer
gtaaaacgacggccagtagaattgccgtggaaagtttg

SEQ ID NO: 60885 - DNA, 21 bp, Artificial Sequence
  primer
caggctcagctgcttccatag

SEQ ID NO: 60886 - DNA, 21 bp, Artificial Sequence
  primer
aacgttcagtggcttccagtc

SEQ ID NO: 60887 - DNA, 38 bp, Artificial Sequence
  primer
gtaaaacgacggccagtcactgctgccctcactgttac

SEQ ID NO: 60888 - DNA, 21 bp, Artificial Sequence
  primer
ctggccagagtgtgttcaaag

SEQ ID NO: 60889 - DNA, 20 bp, Artificial Sequence
  primer
gaacaagctctgcatccctg

SEQ ID NO: 60890 - DNA, 38 bp, Artificial Sequence
  primer
gtaaaacgacggccagtgagtctgaactggttgcctcc

SEQ ID NO: 60891 - DNA, 21 bp, Artificial Sequence
  primer
agtccagggccagtcacttac

SEQ ID NO: 60892 - DNA, 38 bp, Artificial Sequence
  primer
gtaaaacgacggccagtggaagcccaacacaaagaatc

SEQ ID NO: 60893 - DNA, 21 bp, Artificial Sequence
  primer
cctctattcctccctcgaagc

SEQ ID NO: 60894 - DNA, 37 bp, Artificial Sequence
  primer
gtaaaacgacggccagtgagcctcaaggaccaaggac

SEQ ID NO: 60895 - DNA, 21 bp, Artificial Sequence
  primer
gcagccagttcttctgtcctc

SEQ ID NO: 60896 - DNA, 38 bp, Artificial Sequence
  primer
gtaaaacgacggccagttgactctggcttgtttctccc

SEQ ID NO: 60897 - DNA, 21 bp, Artificial Sequence
  primer
ttaaggatggagtcaggcagg

SEQ ID NO: 60898 - DNA, 37 bp, Artificial Sequence
  primer
gtaaaacgacggccagtggttctcctgcacacagtgg

SEQ ID NO: 60899 - DNA, 39 bp, Artificial Sequence
  primer
gtaaaacgacggccagtggttgtctgaaccagttggatg

SEQ ID NO: 60900 - DNA, 38 bp, Artificial Sequence
  primer
gtaaaacgacggccagtctcaccatcacacagagctgg

SEQ ID NO: 60901 - DNA, 38 bp, Artificial Sequence
  primer
gtaaaacgacggccagtgaaggacagtcagttctgggc

SEQ ID NO: 60902 - DNA, 20 bp, Artificial Sequence
  primer
tctagagtagcccaggcacc

SEQ ID NO: 60903 - DNA, 38 bp, Artificial Sequence
  primer
gtaaaacgacggccagttgtcagtagctcattgccctc

SEQ ID NO: 60904 - DNA, 21 bp, Artificial Sequence
  primer
aggatcccatgtgagaagctc

SEQ ID NO: 60905 - DNA, 38 bp, Artificial Sequence
  primer
gtaaaacgacggccagtcacctctgttacctccttggg

SEQ ID NO: 60906 - DNA, 21 bp, Artificial Sequence
  primer
atcttccaatccttgagctgc

SEQ ID NO: 60907 - DNA, 38 bp, Artificial Sequence
  primer
gtaaaacgacggccagtctcctcaatctggacagctcc

SEQ ID NO: 60908 - DNA, 20 bp, Artificial Sequence
  primer
ctcaatgcacagaggtgctg

SEQ ID NO: 60909 - DNA, 21 bp, Artificial Sequence
  primer
attcccttctgcatgttccac

SEQ ID NO: 60910 - DNA, 38 bp, Artificial Sequence
  primer
gtaaaacgacggccagtctacctcctctggcatcttcc

SEQ ID NO: 60911 - DNA, 38 bp, Artificial Sequence
  primer
gtaaaacgacggccagtctccaaagccattacacctgc

SEQ ID NO: 60912 - DNA, 39 bp, Artificial Sequence
  primer
gtaaaacgacggccagttgtggatagcatcccaagagac

SEQ ID NO: 60913 - DNA, 22 bp, Artificial Sequence
  primer
ggattgacaaccacacctcaac

SEQ ID NO: 60914 - DNA, 20 bp, Artificial Sequence
  primer
cttgatggctgaaagaaccg

SEQ ID NO: 60915 - DNA, 37 bp, Artificial Sequence
  primer
gtaaaacgacggccagtgagcccactatgtgcctagc

SEQ ID NO: 60916 - DNA, 20 bp, Artificial Sequence
  primer
tgggtgacagaacaagaccc

SEQ ID NO: 60917 - DNA, 38 bp, Artificial Sequence
  primer
gtaaaacgacggccagtcatttcatgcaggtgatggac

SEQ ID NO: 60918 - DNA, 27 bp, Artificial Sequence
  primer
ggaaatacgaagtttcaagtaatctgc

SEQ ID NO: 60919 - DNA, 42 bp, Artificial Sequence
  primer
gtaaaacgacggccagtcaaagtgaattgaaatagatgagcc

SEQ ID NO: 60920 - DNA, 22 bp, Artificial Sequence
  primer
gcttacaatgagccaaggtcac

SEQ ID NO: 60921 - DNA, 39 bp, Artificial Sequence
  primer
gtaaaacgacggccagtaattccttccataacatccctg

SEQ ID NO: 60922 - DNA, 18 bp, Artificial Sequence
  primer
gatctgcctgcctcggtc

SEQ ID NO: 60923 - DNA, 42 bp, Artificial Sequence
  primer
gtaaaacgacggccagtgctgggattatagttcagaacatgg

SEQ ID NO: 60924 - DNA, 40 bp, Artificial Sequence
  primer
gtaaaacgacggccagtgtcttctacctttagaggccagg

SEQ ID NO: 60925 - DNA, 22 bp, Artificial Sequence
  primer
ccttctcagtgttggtgtgagg

SEQ ID NO: 60926 - DNA, 21 bp, Artificial Sequence
  primer
tctgtttgggacagtggtagg

SEQ ID NO: 60927 - DNA, 21 bp, Artificial Sequence
  primer
ggaagagaagctagtgcagcc

SEQ ID NO: 60928 - DNA, 38 bp, Artificial Sequence
  primer
gtaaaacgacggccagtttgacctcagtgaaccacctg

SEQ ID NO: 60929 - DNA, 19 bp, Artificial Sequence
  primer
ctttgtgtggccagtgtgg

SEQ ID NO: 60930 - DNA, 38 bp, Artificial Sequence
  primer
gtaaaacgacggccagtattgaactgtgaggcagaggg

SEQ ID NO: 60931 - DNA, 21 bp, Artificial Sequence
  primer
cgtgtgtaattggctcctctg

SEQ ID NO: 60932 - DNA, 38 bp, Artificial Sequence
  primer
gtaaaacgacggccagtttcctggcactgacgtttaag

SEQ ID NO: 60933 - DNA, 38 bp, Artificial Sequence
  primer
gtaaaacgacggccagtcttcagagtccagctaccacg

SEQ ID NO: 60934 - DNA, 37 bp, Artificial Sequence
  primer
gtaaaacgacggccagtagcaagagcctggtgtgttc

SEQ ID NO: 60935 - DNA, 20 bp, Artificial Sequence
  primer
gagtgccaggaaatggtctg

SEQ ID NO: 60936 - DNA, 38 bp, Artificial Sequence
  primer
gtaaaacgacggccagtcccacctgattgctctctttc

SEQ ID NO: 60937 - DNA, 37 bp, Artificial Sequence
  primer
gtaaaacgacggccagtctgtcttcacagaggccagg

SEQ ID NO: 60938 - DNA, 38 bp, Artificial Sequence
  primer
gtaaaacgacggccagtgccgaactccgaagtgttaag

SEQ ID NO: 60939 - DNA, 38 bp, Artificial Sequence
  primer
gtaaaacgacggccagttgtatatgggctgctgtgagc

SEQ ID NO: 60940 - DNA, 21 bp, Artificial Sequence
  primer
gcctggtttcatgctaatgtg

SEQ ID NO: 60941 - DNA, 39 bp, Artificial Sequence
  primer
gtaaaacgacggccagttgtgacctgacactacagtggg

SEQ ID NO: 60942 - DNA, 21 bp, Artificial Sequence
  primer
gtacaggaggttggatttggg

SEQ ID NO: 60943 - DNA, 21 bp, Artificial Sequence
  primer
ttatctgctagctgctctcgg

SEQ ID NO: 60944 - DNA, 21 bp, Artificial Sequence
  primer
tcagggatcctttgaggacag

SEQ ID NO: 60945 - DNA, 38 bp, Artificial Sequence
  primer
gtaaaacgacggccagtgtggacatggtccctctgttc

SEQ ID NO: 60946 - DNA, 20 bp, Artificial Sequence
  primer
ggttctgggcagtgtgagag

SEQ ID NO: 60947 - DNA, 21 bp, Artificial Sequence
  primer
acagtctggctgtttcccaac

SEQ ID NO: 60948 - DNA, 38 bp, Artificial Sequence
  primer
gtaaaacgacggccagtcagttgtgggtggattagcag

SEQ ID NO: 60949 - DNA, 38 bp, Artificial Sequence
  primer
gtaaaacgacggccagtatggctcacattcctagaggg

SEQ ID NO: 60950 - DNA, 38 bp, Artificial Sequence
  primer
gtaaaacgacggccagtagccaaatggtttgcagtgtc

SEQ ID NO: 60951 - DNA, 37 bp, Artificial Sequence
  primer
gtaaaacgacggccagtcccacacagaggcactcttc

SEQ ID NO: 60952 - DNA, 41 bp, Artificial Sequence
  primer
gtaaaacgacggccagttcaaggatgcattgattcagtaag

SEQ ID NO: 60953 - DNA, 38 bp, Artificial Sequence
  primer
gtaaaacgacggccagtaactgtgggaacaatggactg

SEQ ID NO: 60954 - DNA, 21 bp, Artificial Sequence
  primer
tggtaacagttccaaagctgg

SEQ ID NO: 60955 - DNA, 38 bp, Artificial Sequence
  primer
gtaaaacgacggccagtgtggcaaataataagccagcc

SEQ ID NO: 60956 - DNA, 38 bp, Artificial Sequence
  primer
gtaaaacgacggccagttgaagacctcacctgttcgag

SEQ ID NO: 60957 - DNA, 42 bp, Artificial Sequence
  primer
gtaaaacgacggccagtcaaagatgccttaatacaccaaatg

SEQ ID NO: 60958 - DNA, 38 bp, Artificial Sequence
  primer
gtaaaacgacggccagttggtggctgtaattcaaatgg

SEQ ID NO: 60959 - DNA, 20 bp, Artificial Sequence
  primer
gaaagcactgaagaaccggg

SEQ ID NO: 60960 - DNA, 38 bp, Artificial Sequence
  primer
gtaaaacgacggccagttgtgtaagcaggaacaggtgg

SEQ ID NO: 60961 - DNA, 21 bp, Artificial Sequence
  primer
agcttgcctgctacaggagtg

SEQ ID NO: 60962 - DNA, 21 bp, Artificial Sequence
  primer
ctttgatatgcctaaacgggc

SEQ ID NO: 60963 - DNA, 38 bp, Artificial Sequence
  primer
gtaaaacgacggccagtgtccaagagtagccaactcgg

SEQ ID NO: 60964 - DNA, 21 bp, Artificial Sequence
  primer
gtgaaggaagggaaagttggc

SEQ ID NO: 60965 - DNA, 39 bp, Artificial Sequence
  primer
gtaaaacgacggccagttgaactgtgtgctaggaggaaa

SEQ ID NO: 60966 - DNA, 25 bp, Artificial Sequence
  primer
tcatgagctcagagaaagtgtaggt

SEQ ID NO: 60967 - DNA, 23 bp, Artificial Sequence
  primer
cagctgtgcaatctgtatcattt

SEQ ID NO: 60968 - DNA, 21 bp, Artificial Sequence
  primer
gtggactctgcgtatcattgc

SEQ ID NO: 60969 - DNA, 21 bp, Artificial Sequence
  primer
ggtttcagggactgcctacag

SEQ ID NO: 60970 - DNA, 21 bp, Artificial Sequence
  primer
gttgggtgagatcctttgctc

SEQ ID NO: 60971 - DNA, 39 bp, Artificial Sequence
  primer
gtaaaacgacggccagtcaataagctcctccagaggttg

SEQ ID NO: 60972 - DNA, 38 bp, Artificial Sequence
  primer
gtaaaacgacggccagttcttgttgtcagtggctggtg

SEQ ID NO: 60973 - DNA, 21 bp, Artificial Sequence
  primer
tctcaaggaaactgtggctcc

SEQ ID NO: 60974 - DNA, 25 bp, Artificial Sequence
  primer
tttaggcagactaatacctttgtgg

SEQ ID NO: 60975 - DNA, 38 bp, Artificial Sequence
  primer
gtaaaacgacggccagtgccattggacaacttcagctc

SEQ ID NO: 60976 - DNA, 38 bp, Artificial Sequence
  primer
gtaaaacgacggccagtactggtattgttggagggtgg

SEQ ID NO: 60977 - DNA, 21 bp, Artificial Sequence
  primer
gtagtgtgagatgccactgcc

SEQ ID NO: 60978 - DNA, 38 bp, Artificial Sequence
  primer
gtaaaacgacggccagtcccttcatctttcaagtgtgg

SEQ ID NO: 60979 - DNA, 36 bp, Artificial Sequence
  primer
gtaaaacgacggccagtaactcccagccatccattg

SEQ ID NO: 60980 - DNA, 42 bp, Artificial Sequence
  primer
gtaaaacgacggccagtcattacagttattgctttcagcacc

SEQ ID NO: 60981 - DNA, 38 bp, Artificial Sequence
  primer
gtaaaacgacggccagtgtacctagggagggagtggct

SEQ ID NO: 60982 - DNA, 21 bp, Artificial Sequence
  primer
acccaggaagcagagattgtg

SEQ ID NO: 60983 - DNA, 38 bp, Artificial Sequence
  primer
gtaaaacgacggccagtgctggaagaaccgactacagg

SEQ ID NO: 60984 - DNA, 38 bp, Artificial Sequence
  primer
gtaaaacgacggccagtctccgtgaaatgaatgagcag

SEQ ID NO: 60985 - DNA, 22 bp, Artificial Sequence
  primer
gaaataagttccaccatgaccc

SEQ ID NO: 60986 - DNA, 36 bp, Artificial Sequence
  primer
gtaaaacgacggccagtagctctttagtgcccggtg

SEQ ID NO: 60987 - DNA, 36 bp, Artificial Sequence
  primer
gtaaaacgacggccagtgccttgcatcgggtcttac

SEQ ID NO: 60988 - DNA, 19 bp, Artificial Sequence
  primer
gctggaaatacttgccggg

SEQ ID NO: 60989 - DNA, 38 bp, Artificial Sequence
  primer
gtaaaacgacggccagtgactggagttctctggatggc

SEQ ID NO: 60990 - DNA, 20 bp, Artificial Sequence
  primer
gtaactggctgctgtggagg

SEQ ID NO: 60991 - DNA, 21 bp, Artificial Sequence
  primer
agcgtgcttggaggataagag

SEQ ID NO: 60992 - DNA, 21 bp, Artificial Sequence
  primer
agcttctgttgccattgatcc

SEQ ID NO: 60993 - DNA, 21 bp, Artificial Sequence
  primer
tgctttccatgagctcctttc

SEQ ID NO: 60994 - DNA, 21 bp, Artificial Sequence
  primer
tttgtgacagatcaagccagg

SEQ ID NO: 60995 - DNA, 38 bp, Artificial Sequence
  primer
gtaaaacgacggccagttttcgatactgcagcctcctc

SEQ ID NO: 60996 - DNA, 39 bp, Artificial Sequence
  primer
gtaaaacgacggccagtgttactgaaacacccaactccc

SEQ ID NO: 60997 - DNA, 21 bp, Artificial Sequence
  primer
ctggtgcagggtcaagaagtc

SEQ ID NO: 60998 - DNA, 22 bp, Artificial Sequence
  primer
acagaggacatggatttcaagc

SEQ ID NO: 60999 - DNA, 42 bp, Artificial Sequence
  primer
gtaaaacgacggccagtaatgagaagaagagcttgtgatgag

SEQ ID NO: 61000 - DNA, 20 bp, Artificial Sequence
  primer
aggctaaggagaccaaagcg

SEQ ID NO: 61001 - DNA, 21 bp, Artificial Sequence
  primer
tttctggccattaccttggag

SEQ ID NO: 61002 - DNA, 41 bp, Artificial Sequence
  primer
gtaaaacgacggccagtttcagaagctttaccaatgtttcc

SEQ ID NO: 61003 - DNA, 39 bp, Artificial Sequence
  primer
gtaaaacgacggccagttgcataccctcaccaactacac

SEQ ID NO: 61004 - DNA, 39 bp, Artificial Sequence
  primer
gtaaaacgacggccagtaaatagagcaccagtcacacga

SEQ ID NO: 61005 - DNA, 28 bp, Artificial Sequence
  primer
tggaatagaacacctacaaactattctt

SEQ ID NO: 61006 - DNA, 21 bp, Artificial Sequence
  primer
ggataaatcattcaccctggc

SEQ ID NO: 61007 - DNA, 24 bp, Artificial Sequence
  primer
cctgtttctgtggcttactactgc

SEQ ID NO: 61008 - DNA, 21 bp, Artificial Sequence
  primer
ctgtttattgtcgcatcagcc

SEQ ID NO: 61009 - DNA, 21 bp, Artificial Sequence
  primer
catgccaaagcactctttcac

SEQ ID NO: 61010 - DNA, 38 bp, Artificial Sequence
  primer
gtaaaacgacggccagtgcaaactgcagtggtctatgc

SEQ ID NO: 61011 - DNA, 37 bp, Artificial Sequence
  primer
gtaaaacgacggccagtttatcaaaggcacacagggc

SEQ ID NO: 61012 - DNA, 24 bp, Artificial Sequence
  primer
cagggtttctctactagcaagctg

SEQ ID NO: 61013 - DNA, 21 bp, Artificial Sequence
  primer
ggcttctctgggactctaccc

SEQ ID NO: 61014 - DNA, 21 bp, Artificial Sequence
  primer
ctggagtttcgttgccatttc

SEQ ID NO: 61015 - DNA, 38 bp, Artificial Sequence
  primer
gtaaaacgacggccagtggtagacgcaaagcaaagagg

SEQ ID NO: 61016 - DNA, 36 bp, Artificial Sequence
  primer
gtaaaacgacggccagtcttcgcctgagtctggagg

SEQ ID NO: 61017 - DNA, 35 bp, Artificial Sequence
  primer
gtaaaacgacggccagtaaataggccgtaagggcg

SEQ ID NO: 61018 - DNA, 35 bp, Artificial Sequence
  primer
gtaaaacgacggccagtgcagtgagcgagcttccc

SEQ ID NO: 61019 - DNA, 38 bp, Artificial Sequence
  primer
gtaaaacgacggccagtgactcttcgactgcgtgtctg

SEQ ID NO: 61020 - DNA, 38 bp, Artificial Sequence
  primer
gtaaaacgacggccagtggtgtagagaagcccttggtc

SEQ ID NO: 61021 - DNA, 38 bp, Artificial Sequence
  primer
gtaaaacgacggccagtgtcctgtgggacttgttaggc

SEQ ID NO: 61022 - DNA, 19 bp, Artificial Sequence
  primer
accttcctcgctgtgcttt

SEQ ID NO: 61023 - DNA, 37 bp, Artificial Sequence
  primer
gtaaaacgacggccagtgatctagggccacgaccatc

SEQ ID NO: 61024 - DNA, 38 bp, Artificial Sequence
  primer
gtaaaacgacggccagttaggatccctccgttagtccc

SEQ ID NO: 61025 - DNA, 39 bp, Artificial Sequence
  primer
gtaaaacgacggccagtacagtctgtagcacaaacgtcc

SEQ ID NO: 61026 - DNA, 38 bp, Artificial Sequence
  primer
gtaaaacgacggccagtgtggagaaagcctaaacgtgg

SEQ ID NO: 61027 - DNA, 19 bp, Artificial Sequence
  primer
aggagggaggagaactggg

SEQ ID NO: 61028 - DNA, 19 bp, Artificial Sequence
  primer
agacacccatccgtgaacc

SEQ ID NO: 61029 - DNA, 21 bp, Artificial Sequence
  primer
aacctcaccaatcctccaaag

SEQ ID NO: 61030 - DNA, 38 bp, Artificial Sequence
  primer
gtaaaacgacggccagtctgctggttgagcagaatagg

SEQ ID NO: 61031 - DNA, 21 bp, Artificial Sequence
  primer
ctctatccacctccatcccac

SEQ ID NO: 61032 - DNA, 38 bp, Artificial Sequence
  primer
gtaaaacgacggccagtataatggccgactaccgctac

SEQ ID NO: 61033 - DNA, 24 bp, Artificial Sequence
  primer
tcacctgcactaagaatcagagat

SEQ ID NO: 61034 - DNA, 38 bp, Artificial Sequence
  primer
gtaaaacgacggccagttctggcaccaattctaaacca

SEQ ID NO: 61035 - DNA, 37 bp, Artificial Sequence
  primer
gtaaaacgacggccagtgtctgagggaggaggtaggc

SEQ ID NO: 61036 - DNA, 38 bp, Artificial Sequence
  primer
gtaaaacgacggccagtggaggagaaactagggtctgg

SEQ ID NO: 61037 - DNA, 18 bp, Artificial Sequence
  primer
ctgactcacggacacgcc

SEQ ID NO: 61038 - DNA, 38 bp, Artificial Sequence
  primer
gtaaaacgacggccagtctggtatctgtcgtggtcctg

SEQ ID NO: 61039 - DNA, 38 bp, Artificial Sequence
  primer
gtaaaacgacggccagtatcctggagatccgctctgta

SEQ ID NO: 61040 - DNA, 38 bp, Artificial Sequence
  primer
gtaaaacgacggccagtagctacttgcaagggagaagg

SEQ ID NO: 61041 - DNA, 39 bp, Artificial Sequence
  primer
gtaaaacgacggccagtagggaggtttcatgaaggtagg

SEQ ID NO: 61042 - DNA, 21 bp, Artificial Sequence
  primer
aacgccctaagaactgcagag

SEQ ID NO: 61043 - DNA, 21 bp, Artificial Sequence
  primer
ctatttcgacccggagaactg

SEQ ID NO: 61044 - DNA, 36 bp, Artificial Sequence
  primer
gtaaaacgacggccagtggagtcagcatctccaggc

SEQ ID NO: 61045 - DNA, 21 bp, Artificial Sequence
  primer
cctgaacttccactcactccc

SEQ ID NO: 61046 - DNA, 21 bp, Artificial Sequence
  primer
gcacagctttgagtgaaggtg

SEQ ID NO: 61047 - DNA, 22 bp, Artificial Sequence
  primer
tccacgagctgggctataatac

SEQ ID NO: 61048 - DNA, 36 bp, Artificial Sequence
  primer
gtaaaacgacggccagtgaaccctggccctttatcc

SEQ ID NO: 61049 - DNA, 20 bp, Artificial Sequence
  primer
cagagacatctcagcccagg

SEQ ID NO: 61050 - DNA, 38 bp, Artificial Sequence
  primer
gtaaaacgacggccagtctacagagcccagaatcagcc

SEQ ID NO: 61051 - DNA, 27 bp, Artificial Sequence
  primer
gtcatcgatattatgtcaccaagtaag

SEQ ID NO: 61052 - DNA, 38 bp, Artificial Sequence
  primer
gtaaaacgacggccagtgaggctttggtttcatgtcag

SEQ ID NO: 61053 - DNA, 21 bp, Artificial Sequence
  primer
atggactgagatgcccttgtc

SEQ ID NO: 61054 - DNA, 21 bp, Artificial Sequence
  primer
ctcacaaagagaagggaaggg

SEQ ID NO: 61055 - DNA, 42 bp, Artificial Sequence
  primer
gtaaaacgacggccagttgacctaggagtaacaatcaactca

SEQ ID NO: 61056 - DNA, 38 bp, Artificial Sequence
  primer
gtaaaacgacggccagttgtatctgttgtgggtcaggg

SEQ ID NO: 61057 - DNA, 18 bp, Artificial Sequence
  primer
gctgcctgtgagtaccgc

SEQ ID NO: 61058 - DNA, 37 bp, Artificial Sequence
  primer
gtaaaacgacggccagtacaggtgggtccagcttctc

SEQ ID NO: 61059 - DNA, 21 bp, Artificial Sequence
  primer
gtccactgccctctgtaaacc

SEQ ID NO: 61060 - DNA, 18 bp, Artificial Sequence
  primer
gtgcccacctgctgtctg

SEQ ID NO: 61061 - DNA, 37 bp, Artificial Sequence
  primer
gtaaaacgacggccagtcactctcaacatttgctccg

SEQ ID NO: 61062 - DNA, 20 bp, Artificial Sequence
  primer
acaggtgggtccagcttctc

SEQ ID NO: 61063 - DNA, 38 bp, Artificial Sequence
  primer
gtaaaacgacggccagtcctcgcctaatatctcctggg

SEQ ID NO: 61064 - DNA, 38 bp, Artificial Sequence
  primer
gtaaaacgacggccagtagctgggcttagtgtcctctc

SEQ ID NO: 61065 - DNA, 38 bp, Artificial Sequence
  primer
gtaaaacgacggccagtctgcacctatcaatccatccc

SEQ ID NO: 61066 - DNA, 21 bp, Artificial Sequence
  primer
gtaggcacctgtcagggtagg

SEQ ID NO: 61067 - DNA, 21 bp, Artificial Sequence
  primer
aaaggacactctgggcaacac

SEQ ID NO: 61068 - DNA, 21 bp, Artificial Sequence
  primer
ctgcgctcacagaaagacatc

SEQ ID NO: 61069 - DNA, 37 bp, Artificial Sequence
  primer
gtaaaacgacggccagtgaggatcgagctcactgtgg

SEQ ID NO: 61070 - DNA, 21 bp, Artificial Sequence
  primer
cagtaagtgatgcccaggatg

SEQ ID NO: 61071 - DNA, 21 bp, Artificial Sequence
  primer
actaacattgctccctgcctg

SEQ ID NO: 61072 - DNA, 18 bp, Artificial Sequence
  primer
cccgaggtctctatgccc

SEQ ID NO: 61073 - DNA, 39 bp, Artificial Sequence
  primer
gtaaaacgacggccagtttgctggataaatgtgagcttg

SEQ ID NO: 61074 - DNA, 27 bp, Artificial Sequence
  primer
tgacatttaattgtatttcacacaggt

SEQ ID NO: 61075 - DNA, 22 bp, Artificial Sequence
  primer
cagactgatgatcccagtgaaa

SEQ ID NO: 61076 - DNA, 21 bp, Artificial Sequence
  primer
ggaaacgttgaaggtagaggc

SEQ ID NO: 61077 - DNA, 38 bp, Artificial Sequence
  primer
gtaaaacgacggccagtacctgggacagatttcagtgg

SEQ ID NO: 61078 - DNA, 21 bp, Artificial Sequence
  primer
gcaggtggaggctaaggtatc

SEQ ID NO: 61079 - DNA, 38 bp, Artificial Sequence
  primer
gtaaaacgacggccagtacaaaggttgcacacacacag

SEQ ID NO: 61080 - DNA, 36 bp, Artificial Sequence
  primer
gtaaaacgacggccagttgatttccagccaccacac

SEQ ID NO: 61081 - DNA, 38 bp, Artificial Sequence
  primer
gtaaaacgacggccagtgctcctgtcataaagaagccc

SEQ ID NO: 61082 - DNA, 42 bp, Artificial Sequence
  primer
gtaaaacgacggccagtaaggaaatgtgtgtttaatggtagg

SEQ ID NO: 61083 - DNA, 36 bp, Artificial Sequence
  primer
gtaaaacgacggccagtctgctgctgcccttgctac

SEQ ID NO: 61084 - DNA, 38 bp, Artificial Sequence
  primer
gtaaaacgacggccagtgccattcttgcaggagtaagg

SEQ ID NO: 61085 - DNA, 40 bp, Artificial Sequence
  primer
gtaaaacgacggccagtgcatatctgtgttgacatgaagc

SEQ ID NO: 61086 - DNA, 22 bp, Artificial Sequence
  primer
tgtttattcaaatcctttgcca

SEQ ID NO: 61087 - DNA, 42 bp, Artificial Sequence
  primer
gtaaaacgacggccagtcgttcataagttgcttagtggaaga

SEQ ID NO: 61088 - DNA, 38 bp, Artificial Sequence
  primer
gtaaaacgacggccagtagttggctaacacgcatgaac

SEQ ID NO: 61089 - DNA, 44 bp, Artificial Sequence
  primer
gtaaaacgacggccagttgtgctgcttattcttaattctagtcc

SEQ ID NO: 61090 - DNA, 21 bp, Artificial Sequence
  primer
gccaattacagaccttgcttg

SEQ ID NO: 61091 - DNA, 38 bp, Artificial Sequence
  primer
gtaaaacgacggccagtctgactcgccaatctctttcc

SEQ ID NO: 61092 - DNA, 38 bp, Artificial Sequence
  primer
gtaaaacgacggccagtcctttgttggacgttctctcc

SEQ ID NO: 61093 - DNA, 37 bp, Artificial Sequence
  primer
gtaaaacgacggccagtagggttcctgggttgttgac

SEQ ID NO: 61094 - DNA, 39 bp, Artificial Sequence
  primer
gtaaaacgacggccagttgcaaagcgaaatgatcttacc

SEQ ID NO: 61095 - DNA, 38 bp, Artificial Sequence
  primer
gtaaaacgacggccagtttccatacctttcttgcctcc

SEQ ID NO: 61096 - DNA, 20 bp, Artificial Sequence
  primer
gacagccctctggacaacac

SEQ ID NO: 61097 - DNA, 38 bp, Artificial Sequence
  primer
gtaaaacgacggccagtagattcgatactctggctggg

SEQ ID NO: 61098 - DNA, 39 bp, Artificial Sequence
  primer
gtaaaacgacggccagttgctttagtaagccgctgaaag

SEQ ID NO: 61099 - DNA, 38 bp, Artificial Sequence
  primer
gtaaaacgacggccagtgtaggcctttgtcccttcctc

SEQ ID NO: 61100 - DNA, 21 bp, Artificial Sequence
  primer
tacagatatgaggcaccacgc

SEQ ID NO: 61101 - DNA, 37 bp, Artificial Sequence
  primer
gtaaaacgacggccagtacccggccacactgtatttc

SEQ ID NO: 61102 - DNA, 38 bp, Artificial Sequence
  primer
gtaaaacgacggccagtacagggcatagccctattgag

SEQ ID NO: 61103 - DNA, 38 bp, Artificial Sequence
  primer
gtaaaacgacggccagtgtctcagctgggcgtgtttag

SEQ ID NO: 61104 - DNA, 37 bp, Artificial Sequence
  primer
gtaaaacgacggccagttgcttggaaggttctgatgc

SEQ ID NO: 61105 - DNA, 21 bp, Artificial Sequence
  primer
acctcagtcagcctctcgaac

SEQ ID NO: 61106 - DNA, 38 bp, Artificial Sequence
  primer
gtaaaacgacggccagtactcgtttgaaagcatgaacg

SEQ ID NO: 61107 - DNA, 38 bp, Artificial Sequence
  primer
gtaaaacgacggccagtgttggtggtgggaccatagac

SEQ ID NO: 61108 - DNA, 37 bp, Artificial Sequence
  primer
gtaaaacgacggccagttttggttcctttggttgtgc

SEQ ID NO: 61109 - DNA, 21 bp, Artificial Sequence
  primer
tgccttcctcctcctgtagtc

SEQ ID NO: 61110 - DNA, 37 bp, Artificial Sequence
  primer
gtaaaacgacggccagtgaggcttccactgctgtgtc

SEQ ID NO: 61111 - DNA, 38 bp, Artificial Sequence
  primer
gtaaaacgacggccagttctctctggtcattggtggag

SEQ ID NO: 61112 - DNA, 38 bp, Artificial Sequence
  primer
gtaaaacgacggccagtttcctacacaggacgggaaac

SEQ ID NO: 61113 - DNA, 38 bp, Artificial Sequence
  primer
gtaaaacgacggccagttccatctcctggctgaagaac

SEQ ID NO: 61114 - DNA, 38 bp, Artificial Sequence
  primer
gtaaaacgacggccagtagaacaagtttggcagcatcc

SEQ ID NO: 61115 - DNA, 19 bp, Artificial Sequence
  primer
ctgccgtgtggactctgtg

SEQ ID NO: 61116 - DNA, 21 bp, Artificial Sequence
  primer
ctcactggcgttactgactgc

SEQ ID NO: 61117 - DNA, 21 bp, Artificial Sequence
  primer
ttcattcaatgctggtggaag

SEQ ID NO: 61118 - DNA, 38 bp, Artificial Sequence
  primer
gtaaaacgacggccagtctcttcgtccttacgagcagg

SEQ ID NO: 61119 - DNA, 20 bp, Artificial Sequence
  primer
agccgtgaagatgctgaaag

SEQ ID NO: 61120 - DNA, 37 bp, Artificial Sequence
  primer
gtaaaacgacggccagtaacatcatcaacctgctggg

SEQ ID NO: 61121 - DNA, 38 bp, Artificial Sequence
  primer
gtaaaacgacggccagtatggagtacttggcctcccag

SEQ ID NO: 61122 - DNA, 38 bp, Artificial Sequence
  primer
gtaaaacgacggccagtgatgaagatcgcagacttcgg

SEQ ID NO: 61123 - DNA, 38 bp, Artificial Sequence
  primer
gtaaaacgacggccagtgctcctgggtgtggtttctac

SEQ ID NO: 61124 - DNA, 20 bp, Artificial Sequence
  primer
tggaggagctcttcaagctg

SEQ ID NO: 61125 - DNA, 19 bp, Artificial Sequence
  primer
gacgtgagtgctggctctg

SEQ ID NO: 61126 - DNA, 37 bp, Artificial Sequence
  primer
gtaaaacgacggccagtacatcatcctgtacgcgtcg

SEQ ID NO: 61127 - DNA, 37 bp, Artificial Sequence
  primer
gtaaaacgacggccagtctggccacttcctgtctcag

SEQ ID NO: 61128 - DNA, 21 bp, Artificial Sequence
  primer
ctgtgtgggtgtcaaggagtg

SEQ ID NO: 61129 - DNA, 38 bp, Artificial Sequence
  primer
gtaaaacgacggccagtactctagcagggagtgaaggg

SEQ ID NO: 61130 - DNA, 21 bp, Artificial Sequence
  primer
gtctccaaggacttgtgtccc

SEQ ID NO: 61131 - DNA, 21 bp, Artificial Sequence
  primer
tgaggatctagcctcctggtc

SEQ ID NO: 61132 - DNA, 38 bp, Artificial Sequence
  primer
gtaaaacgacggccagtcttgaacttgaggaaggctgg

SEQ ID NO: 61133 - DNA, 20 bp, Artificial Sequence
  primer
cccattcttctcccaccttg

SEQ ID NO: 61134 - DNA, 20 bp, Artificial Sequence
  primer
gactgagttagggtgcacgg

SEQ ID NO: 61135 - DNA, 37 bp, Artificial Sequence
  primer
gtaaaacgacggccagtcactgtgcagaagctctccc

SEQ ID NO: 61136 - DNA, 21 bp, Artificial Sequence
  primer
ctcgacccactatgggagttc

SEQ ID NO: 61137 - DNA, 38 bp, Artificial Sequence
  primer
gtaaaacgacggccagtagacctacgtagccctggtcc

SEQ ID NO: 61138 - DNA, 37 bp, Artificial Sequence
  primer
gtaaaacgacggccagtaacctgcttggtgtctgcac

SEQ ID NO: 61139 - DNA, 21 bp, Artificial Sequence
  primer
ctctgtaaagtgggtggaggg

SEQ ID NO: 61140 - DNA, 21 bp, Artificial Sequence
  primer
ggcgtccaccacattgactac

SEQ ID NO: 61141 - DNA, 35 bp, Artificial Sequence
  primer
gtaaaacgacggccagtagtgggcccagactccag

SEQ ID NO: 61142 - DNA, 39 bp, Artificial Sequence
  primer
gtaaaacgacggccagtgatgaccctcctatccctcatc

SEQ ID NO: 61143 - DNA, 38 bp, Artificial Sequence
  primer
gtaaaacgacggccagtgccgtctctgaggaggtacag

SEQ ID NO: 61144 - DNA, 38 bp, Artificial Sequence
  primer
gtaaaacgacggccagtgcctttgatacccacagcttc

SEQ ID NO: 61145 - DNA, 18 bp, Artificial Sequence
  primer
caggtgacccaggtggag

SEQ ID NO: 61146 - DNA, 19 bp, Artificial Sequence
  primer
attctgggctgtgggtgtg

SEQ ID NO: 61147 - DNA, 38 bp, Artificial Sequence
  primer
gtaaaacgacggccagtctacaaggtggatgtgatccg

SEQ ID NO: 61148 - DNA, 19 bp, Artificial Sequence
  primer
ggaccacgtccttccagtg

SEQ ID NO: 61149 - DNA, 38 bp, Artificial Sequence
  primer
gtaaaacgacggccagtctctcctggtctttgtgtcgg

SEQ ID NO: 61150 - DNA, 38 bp, Artificial Sequence
  primer
gtaaaacgacggccagtcataaagggacaattggagcc

SEQ ID NO: 61151 - DNA, 38 bp, Artificial Sequence
  primer
gtaaaacgacggccagtgtgctgacactacaaggctcg

SEQ ID NO: 61152 - DNA, 41 bp, Artificial Sequence
  primer
gtaaaacgacggccagttccctcataaatatcatctggcac

SEQ ID NO: 61153 - DNA, 19 bp, Artificial Sequence
  primer
tgtggcattgcagatttcc

SEQ ID NO: 61154 - DNA, 23 bp, Artificial Sequence
  primer
gattcaggtccacattgtattcc

SEQ ID NO: 61155 - DNA, 27 bp, Artificial Sequence
  primer
cagttgtctagacctttcttgaatagc

SEQ ID NO: 61156 - DNA, 38 bp, Artificial Sequence
  primer
gtaaaacgacggccagttggccaagatcacttagttgg

SEQ ID NO: 61157 - DNA, 38 bp, Artificial Sequence
  primer
gtaaaacgacggccagtgaagcatcctacgaaagaggg

SEQ ID NO: 61158 - DNA, 38 bp, Artificial Sequence
  primer
gtaaaacgacggccagttgtaactggcaatgcacttcg

SEQ ID NO: 61159 - DNA, 41 bp, Artificial Sequence
  primer
gtaaaacgacggccagtcagatcttgatgaacaaagcagtc

SEQ ID NO: 61160 - DNA, 40 bp, Artificial Sequence
  primer
gtaaaacgacggccagtttggaccaggagtaaatgtatgg

SEQ ID NO: 61161 - DNA, 21 bp, Artificial Sequence
  primer
agcttaccacagtgcggagac

SEQ ID NO: 61162 - DNA, 38 bp, Artificial Sequence
  primer
gtaaaacgacggccagtctaagattagggatggcctgc

SEQ ID NO: 61163 - DNA, 39 bp, Artificial Sequence
  primer
gtaaaacgacggccagttttcaagccactttctctttgg

SEQ ID NO: 61164 - DNA, 21 bp, Artificial Sequence
  primer
cattcagaggctccctaaggc

SEQ ID NO: 61165 - DNA, 38 bp, Artificial Sequence
  primer
gtaaaacgacggccagttcagagacgatctgatggcag

SEQ ID NO: 61166 - DNA, 19 bp, Artificial Sequence
  primer
tggccaagggaaatggtaa

SEQ ID NO: 61167 - DNA, 38 bp, Artificial Sequence
  primer
gtaaaacgacggccagtaaccctggagtcagtggaaat

SEQ ID NO: 61168 - DNA, 21 bp, Artificial Sequence
  primer
cagggcaacacagtgagacac

SEQ ID NO: 61169 - DNA, 38 bp, Artificial Sequence
  primer
gtaaaacgacggccagtgctatctcctcttcctgtgcg

SEQ ID NO: 61170 - DNA, 21 bp, Artificial Sequence
  primer
agctggctaactggtactggc

SEQ ID NO: 61171 - DNA, 21 bp, Artificial Sequence
  primer
tcaatgtacttcatggtcgcc

SEQ ID NO: 61172 - DNA, 21 bp, Artificial Sequence
  primer
ttgtgaggccttaagcatttg

SEQ ID NO: 61173 - DNA, 20 bp, Artificial Sequence
  primer
gatgggagcaccaacttcac

SEQ ID NO: 61174 - DNA, 21 bp, Artificial Sequence
  primer
tatccttctgggaactgtggg

SEQ ID NO: 61175 - DNA, 21 bp, Artificial Sequence
  primer
acgtgcctgtatgagcgtatg

SEQ ID NO: 61176 - DNA, 38 bp, Artificial Sequence
  primer
gtaaaacgacggccagtaggaatgggcttgaagttgtg

SEQ ID NO: 61177 - DNA, 21 bp, Artificial Sequence
  primer
ggtgtccaagatgagggtttg

SEQ ID NO: 61178 - DNA, 21 bp, Artificial Sequence
  primer
atggagtcttggcttgtgagg

SEQ ID NO: 61179 - DNA, 38 bp, Artificial Sequence
  primer
gtaaaacgacggccagtcttgggttaaggccaagactg

SEQ ID NO: 61180 - DNA, 21 bp, Artificial Sequence
  primer
ctgatcttagggtctggcacc

SEQ ID NO: 61181 - DNA, 36 bp, Artificial Sequence
  primer
gtaaaacgacggccagtgatgtgtggctgggtacgg

SEQ ID NO: 61182 - DNA, 38 bp, Artificial Sequence
  primer
gtaaaacgacggccagtaaacgagatgtgggcagagtc

SEQ ID NO: 61183 - DNA, 21 bp, Artificial Sequence
  primer
ggtactgcctctctttctggg

SEQ ID NO: 61184 - DNA, 38 bp, Artificial Sequence
  primer
gtaaaacgacggccagtcaggttattgaagcctcccag

SEQ ID NO: 61185 - DNA, 38 bp, Artificial Sequence
  primer
gtaaaacgacggccagtagtcagacgtgtggtcctttg

SEQ ID NO: 61186 - DNA, 21 bp, Artificial Sequence
  primer
atgaatccgaaggccttacac

SEQ ID NO: 61187 - DNA, 22 bp, Artificial Sequence
  primer
ggaaagacctgaaagtgaggaa

SEQ ID NO: 61188 - DNA, 26 bp, Artificial Sequence
  primer
tgtatatgtatgtgggagacgtacac

SEQ ID NO: 61189 - DNA, 21 bp, Artificial Sequence
  primer
tggagcaagtgatgcttcaga

SEQ ID NO: 61190 - DNA, 24 bp, Artificial Sequence
  primer
acacatacatgtaactgagctggg

SEQ ID NO: 61191 - DNA, 40 bp, Artificial Sequence
  primer
gtaaaacgacggccagtcctcatccttccctatactttgc

SEQ ID NO: 61192 - DNA, 43 bp, Artificial Sequence
  primer
gtaaaacgacggccagtttctgtttcacttgctaatggtagaa

SEQ ID NO: 61193 - DNA, 37 bp, Artificial Sequence
  primer
gtaaaacgacggccagtggttgggccttgctttattg

SEQ ID NO: 61194 - DNA, 20 bp, Artificial Sequence
  primer
gtgccttcaaatgttcatgc

SEQ ID NO: 61195 - DNA, 41 bp, Artificial Sequence
  primer
gtaaaacgacggccagttgtcatttaagaggcccatatagc

SEQ ID NO: 61196 - DNA, 39 bp, Artificial Sequence
  primer
gtaaaacgacggccagtgaggaacaatttcaatggcatc

SEQ ID NO: 61197 - DNA, 39 bp, Artificial Sequence
  primer
gtaaaacgacggccagtcaatcctgtgggtatgaactgc

SEQ ID NO: 61198 - DNA, 21 bp, Artificial Sequence
  primer
cttactctcaggcggaaatgg

SEQ ID NO: 61199 - DNA, 21 bp, Artificial Sequence
  primer
aaccatcgtggagtaattggg

SEQ ID NO: 61200 - DNA, 21 bp, Artificial Sequence
  primer
atatgggcaaggacacagacc

SEQ ID NO: 61201 - DNA, 37 bp, Artificial Sequence
  primer
gtaaaacgacggccagtgaagctgggtcttggtcctc

SEQ ID NO: 61202 - DNA, 38 bp, Artificial Sequence
  primer
gtaaaacgacggccagtgaaatcagccttatgggaggg

SEQ ID NO: 61203 - DNA, 38 bp, Artificial Sequence
  primer
gtaaaacgacggccagtggttagttggaggtgtgaggc

SEQ ID NO: 61204 - DNA, 20 bp, Artificial Sequence
  primer
ttgtataccaaagcgcccag

SEQ ID NO: 61205 - DNA, 21 bp, Artificial Sequence
  primer
ctgaatcgtggtttcctcacc

SEQ ID NO: 61206 - DNA, 20 bp, Artificial Sequence
  primer
ctggcaaacaaagggtacgg

SEQ ID NO: 61207 - DNA, 21 bp, Artificial Sequence
  primer
gacagttaatgcctttgcgtg

SEQ ID NO: 61208 - DNA, 21 bp, Artificial Sequence
  primer
cttctttccttgtttgccctg

SEQ ID NO: 61209 - DNA, 38 bp, Artificial Sequence
  primer
gtaaaacgacggccagtaaactagagggcagcaagctc

SEQ ID NO: 61210 - DNA, 37 bp, Artificial Sequence
  primer
gtaaaacgacggccagtgaggatcttgcatcgtccag

SEQ ID NO: 61211 - DNA, 39 bp, Artificial Sequence
  primer
gtaaaacgacggccagtccagaattccttcttcagtccc

SEQ ID NO: 61212 - DNA, 21 bp, Artificial Sequence
  primer
gacagttaatgcctttgcgtg

SEQ ID NO: 61213 - DNA, 38 bp, Artificial Sequence
  primer
gtaaaacgacggccagtaaagttccttgagcttgggtg

SEQ ID NO: 61214 - DNA, 37 bp, Artificial Sequence; identical to SEQ ID NO: 61210
  primer

SEQ ID NO: 61215 - DNA, 21 bp, Artificial Sequence
  primer
acatgtgggattcctggtttc

SEQ ID NO: 61216 - DNA, 38 bp, Artificial Sequence
  primer
gtaaaacgacggccagtgcatgactcgagggtaaggag

SEQ ID NO: 61217 - DNA, 38 bp, Artificial Sequence
  primer
gtaaaacgacggccagtagaggagtggagactcctggg

SEQ ID NO: 61218 - DNA, 38 bp, Artificial Sequence
  primer
gtaaaacgacggccagtgagaacaagtttgctcctcgc

SEQ ID NO: 61219 - DNA, 38 bp, Artificial Sequence
  primer
gtaaaacgacggccagtagggagtgggatgtggtattg

SEQ ID NO: 61220 - DNA, 41 bp, Artificial Sequence
  primer
gtaaaacgacggccagtccaaatgtcaccatgactataagc

SEQ ID NO: 61221 - DNA, 38 bp, Artificial Sequence
  primer
gtaaaacgacggccagtcctcacgctactagcacaacc

SEQ ID NO: 61222 - DNA, 22 bp, Artificial Sequence
  primer
ttctccatcatcatggctaaac

SEQ ID NO: 61223 - DNA, 21 bp, Artificial Sequence
  primer
gcaccagttgtggcatagaag

SEQ ID NO: 61224 - DNA, 39 bp, Artificial Sequence
  primer
gtaaaacgacggccagtccagttcctagaggagcatctg

SEQ ID NO: 61225 - DNA, 19 bp, Artificial Sequence
  primer
gcagtggttacctcctggc

SEQ ID NO: 61226 - DNA, 21 bp, Artificial Sequence
  primer
agctgtagtgcagaccctgtg

SEQ ID NO: 61227 - DNA, 38 bp, Artificial Sequence
  primer
gtaaaacgacggccagtgtttgcaccaaccctcttgtc

SEQ ID NO: 61228 - DNA, 38 bp, Artificial Sequence
  primer
gtaaaacgacggccagttttggtggagagttgtggttg

SEQ ID NO: 61229 - DNA, 21 bp, Artificial Sequence
  primer
ctgaagcagatcttccaggtg

SEQ ID NO: 61230 - DNA, 38 bp, Artificial Sequence
  primer
gtaaaacgacggccagtaagacctggtgcctgaatttg

SEQ ID NO: 61231 - DNA, 21 bp, Artificial Sequence
  primer
agtctgaggcctctgtaagcc

SEQ ID NO: 61232 - DNA, 21 bp, Artificial Sequence
  primer
gttcatccgtgcagtgaactc

SEQ ID NO: 61233 - DNA, 38 bp, Artificial Sequence
  primer
gtaaaacgacggccagttacacggtcaccctcatcaac

SEQ ID NO: 61234 - DNA, 20 bp, Artificial Sequence
  primer
gcttgtgctctacgaggtgg

SEQ ID NO: 61235 - DNA, 38 bp, Artificial Sequence
  primer
gtaaaacgacggccagtgcatctgtagatgggaaaggg

SEQ ID NO: 61236 - DNA, 21 bp, Artificial Sequence
  primer
ggactgttccctgtgtgtctg

SEQ ID NO: 61237 - DNA, 38 bp, Artificial Sequence
  primer
gtaaaacgacggccagtgtggacacccaggtgagtagg

SEQ ID NO: 61238 - DNA, 38 bp, Artificial Sequence
  primer
gtaaaacgacggccagtccttccctttctttaatgccc

SEQ ID NO: 61239 - DNA, 21 bp, Artificial Sequence
  primer
gtgcacccaggctctctattg

SEQ ID NO: 61240 - DNA, 18 bp, Artificial Sequence
  primer
gctgggactacaggtgcc

SEQ ID NO: 61241 - DNA, 37 bp, Artificial Sequence
  primer
gtaaaacgacggccagtggtcaagaccaatgcctcag

SEQ ID NO: 61242 - DNA, 38 bp, Artificial Sequence
  primer
gtaaaacgacggccagtggagtgggacagtcagtaggg

SEQ ID NO: 61243 - DNA, 37 bp, Artificial Sequence
  primer
gtaaaacgacggccagtacttcctcaatggctcccag

SEQ ID NO: 61244 - DNA, 22 bp, Artificial Sequence
  primer
tgagatttggatgtctgtgtcc

SEQ ID NO: 61245 - DNA, 21 bp, Artificial Sequence
  primer
gccgtgtctgcaataggtagg

SEQ ID NO: 61246 - DNA, 38 bp, Artificial Sequence
  primer
gtaaaacgacggccagtgtgcccttccaggtcttagtc

SEQ ID NO: 61247 - DNA, 37 bp, Artificial Sequence
  primer
gtaaaacgacggccagtagcagaggtgaggcccatag

SEQ ID NO: 61248 - DNA, 21 bp, Artificial Sequence
  primer
ttagctgctagggaacgcaag

SEQ ID NO: 61249 - DNA, 18 bp, Artificial Sequence
  primer
gaggagccggagggagag

SEQ ID NO: 61250 - DNA, 21 bp, Artificial Sequence
  primer
ttgttcccgatctatttgcac

SEQ ID NO: 61251 - DNA, 38 bp, Artificial Sequence
  primer
gtaaaacgacggccagttcagaaccttcacgtggattg

SEQ ID NO: 61252 - DNA, 38 bp, Artificial Sequence
  primer
gtaaaacgacggccagtcattattccatgccacctgtc

SEQ ID NO: 61253 - DNA, 38 bp, Artificial Sequence
  primer
gtaaaacgacggccagtgcagagcaatctgtagggtcc

SEQ ID NO: 61254 - DNA, 39 bp, Artificial Sequence
  primer
gtaaaacgacggccagttcagagctcaggaattctcctc

SEQ ID NO: 61255 - DNA, 38 bp, Artificial Sequence
  primer
gtaaaacgacggccagttgcggttaggaagatgctctc

SEQ ID NO: 61256 - DNA, 38 bp, Artificial Sequence
  primer
gtaaaacgacggccagttttggtgactgaaagacgctg

SEQ ID NO: 61257 - DNA, 37 bp, Artificial Sequence
  primer
gtaaaacgacggccagtctgcctgccacactgaagag

SEQ ID NO: 61258 - DNA, 21 bp, Artificial Sequence
  primer
gcaatcctgaaatgcagtcac

SEQ ID NO: 61259 - DNA, 22 bp, Artificial Sequence
  primer
tttccagacctgtttctcttgc

SEQ ID NO: 61260 - DNA, 38 bp, Artificial Sequence
  primer
gtaaaacgacggccagttaaccaaggtctgactggtgc

SEQ ID NO: 61261 - DNA, 37 bp, Artificial Sequence
  primer
gtaaaacgacggccagttgaggcagtgccagtctttc

SEQ ID NO: 61262 - DNA, 37 bp, Artificial Sequence
  primer
gtaaaacgacggccagttgctgtgtgcatcaggaaac

SEQ ID NO: 61263 - DNA, 39 bp, Artificial Sequence
  primer
gtaaaacgacggccagtccaccacagagaaatcaacctc

SEQ ID NO: 61264 - DNA, 38 bp, Artificial Sequence
  primer
gtaaaacgacggccagtaaagcagcatctcttcttgcc

SEQ ID NO: 61265 - DNA, 21 bp, Artificial Sequence
  primer
ttgctaccaggatatccaccc

SEQ ID NO: 61266 - DNA, 21 bp, Artificial Sequence
  primer
agtgtcaggagggtggatgtc

SEQ ID NO: 61267 - DNA, 21 bp, Artificial Sequence
  primer
tattggttcctcctcctccag

SEQ ID NO: 61268 - DNA, 22 bp, Artificial Sequence
  primer
gctgaacagtagccagtccttc

SEQ ID NO: 61269 - DNA, 40 bp, Artificial Sequence
  primer
gtaaaacgacggccagtaatgtcctatgtgtgtgagaccc

SEQ ID NO: 61270 - DNA, 22 bp, Artificial Sequence
  primer
gagaacaccgtgtgttattccc

SEQ ID NO: 61271 - DNA, 38 bp, Artificial Sequence
  primer
gtaaaacgacggccagtttgatcctaaccatcctgtgc

SEQ ID NO: 61272 - DNA, 24 bp, Artificial Sequence
  primer
ggctgtaaatatgtttgcatttca

SEQ ID NO: 61273 - DNA, 44 bp, Artificial Sequence
  primer
gtaaaacgacggccagttctcacattggtttcttactgagagat

SEQ ID NO: 61274 - DNA, 38 bp, Artificial Sequence
  primer
gtaaaacgacggccagttgccgtaatgaatgtgtctgc

SEQ ID NO: 61275 - DNA, 21 bp, Artificial Sequence
  primer
ctgcttggaggaatactgctg

SEQ ID NO: 61276 - DNA, 38 bp, Artificial Sequence
  primer
gtaaaacgacggccagtactggagtcttgactgccctg

SEQ ID NO: 61277 - DNA, 18 bp, Artificial Sequence
  primer
gctcatcctcacacgccc

SEQ ID NO: 61278 - DNA, 38 bp, Artificial Sequence
  primer
gtaaaacgacggccagtctgtgtccctctcactgcatc

SEQ ID NO: 61279 - DNA, 36 bp, Artificial Sequence
  primer
gtaaaacgacggccagtgctgtgctgctggctgtag

SEQ ID NO: 61280 - DNA, 20 bp, Artificial Sequence
  primer
ggccagtgacctgctatgtg

SEQ ID NO: 61281 - DNA, 38 bp, Artificial Sequence
  primer
gtaaaacgacggccagtccacatgcattatcgatggac

SEQ ID NO: 61282 - DNA, 38 bp, Artificial Sequence
  primer
gtaaaacgacggccagtcatttggttaatcccacctcg

SEQ ID NO: 61283 - DNA, 21 bp, Artificial Sequence
  primer
cacttggtggttgtccctttc

SEQ ID NO: 61284 - DNA, 21 bp, Artificial Sequence
  primer
gtgtctgctcacacatgcaac

SEQ ID NO: 61285 - DNA, 21 bp, Artificial Sequence
  primer
aagtggtcataagctgggtcc

SEQ ID NO: 61286 - DNA, 38 bp, Artificial Sequence
  primer
gtaaaacgacggccagtagacttgggcatcctttaggg

SEQ ID NO: 61287 - DNA, 38 bp, Artificial Sequence
  primer
gtaaaacgacggccagtcccagccatcagaaagttgag

SEQ ID NO: 61288 - DNA, 21 bp, Artificial Sequence
  primer
tgctgactggataggtggatg

SEQ ID NO: 61289 - DNA, 20 bp, Artificial Sequence
  primer
agagagaggccagaactcgg

SEQ ID NO: 61290 - DNA, 38 bp, Artificial Sequence
  primer
gtaaaacgacggccagtgaaataaggtggtgggtgagg

SEQ ID NO: 61291 - DNA, 21 bp, Artificial Sequence
  primer
gacaaggaccttctggacctg

SEQ ID NO: 61292 - DNA, 37 bp, Artificial Sequence
  primer
gtaaaacgacggccagtacttggttgatggagggagg

SEQ ID NO: 61293 - DNA, 20 bp, Artificial Sequence
  primer
ggagaaggtgagctgtcgtg

SEQ ID NO: 61294 - DNA, 38 bp, Artificial Sequence
  primer
gtaaaacgacggccagtaaggtgtagaaagcacgcagg

SEQ ID NO: 61295 - DNA, 37 bp, Artificial Sequence
  primer
gtaaaacgacggccagtagagagaggccagaactcgg

SEQ ID NO: 61296 - DNA, 24 bp, Artificial Sequence
  primer
ggtagaagacatgtccaccttctg

SEQ ID NO: 61297 - DNA, 39 bp, Artificial Sequence
  primer
gtaaaacgacggccagtgcactggcatacgtttcaatag

SEQ ID NO: 61298 - DNA, 20 bp, Artificial Sequence
  primer
ataaccctggcacatgttgg

SEQ ID NO: 61299 - DNA, 38 bp, Artificial Sequence
  primer
gtaaaacgacggccagtattgccgtaaatgacaaaggc

SEQ ID NO: 61300 - DNA, 18 bp, Artificial Sequence
  primer
acctggcccgctccttta

SEQ ID NO: 61301 - DNA, 23 bp, Artificial Sequence
  primer
gggtgaatccaagttacttacgg

SEQ ID NO: 61302 - DNA, 37 bp, Artificial Sequence
  primer
gtaaaacgacggccagttccatgtgggataaccatgc

SEQ ID NO: 61303 - DNA, 36 bp, Artificial Sequence
  primer
gtaaaacgacggccagtggaatggttgcaggtggtc

SEQ ID NO: 61304 - DNA, 21 bp, Artificial Sequence
  primer
agacaaggaggcagtggaaac

SEQ ID NO: 61305 - DNA, 23 bp, Artificial Sequence
  primer
tgacttaagcattgcccttatca

SEQ ID NO: 61306 - DNA, 41 bp, Artificial Sequence
  primer
gtaaaacgacggccagttttactgttggccactatgttctc

SEQ ID NO: 61307 - DNA, 39 bp, Artificial Sequence
  primer
gtaaaacgacggccagtgccaatttataacaccactggc

SEQ ID NO: 61308 - DNA, 38 bp, Artificial Sequence
  primer
gtaaaacgacggccagtgcccacaaagttgaagcctac

SEQ ID NO: 61309 - DNA, 38 bp, Artificial Sequence
  primer
gtaaaacgacggccagttatcccatgaactgtgttccg

SEQ ID NO: 61310 - DNA, 38 bp, Artificial Sequence
  primer
gtaaaacgacggccagtacttccttcacctcatccgtc

SEQ ID NO: 61311 - DNA, 21 bp, Artificial Sequence
  primer
tttgacacctattgcaccgtc

SEQ ID NO: 61312 - DNA, 38 bp, Artificial Sequence
  primer
gtaaaacgacggccagttccagtgaatcctttgggaag

SEQ ID NO: 61313 - DNA, 21 bp, Artificial Sequence
  primer
tcgccaagtggttaggagaag

SEQ ID NO: 61314 - DNA, 21 bp, Artificial Sequence
  primer
aaggagtttgcactgctcgtc

SEQ ID NO: 61315 - DNA, 38 bp, Artificial Sequence
  primer
gtaaaacgacggccagtgtccagtgtcccttccttcag

SEQ ID NO: 61316 - DNA, 38 bp, Artificial Sequence
  primer
gtaaaacgacggccagttggcaggatctcaacaaacag

SEQ ID NO: 61317 - DNA, 38 bp, Artificial Sequence
  primer
gtaaaacgacggccagtaagacttcccggagagcaatc

SEQ ID NO: 61318 - DNA, 21 bp, Artificial Sequence
  primer
aaagtaccaccaacctcagcg

SEQ ID NO: 61319 - DNA, 38 bp, Artificial Sequence
  primer
gtaaaacgacggccagtatagttgtgtggcccatgttg

SEQ ID NO: 61320 - DNA, 38 bp, Artificial Sequence
  primer
gtaaaacgacggccagtctgttgcaaggtgtcagcaac

SEQ ID NO: 61321 - DNA, 18 bp, Artificial Sequence
  primer
cacagctttgcagggagg

SEQ ID NO: 61322 - DNA, 20 bp, Artificial Sequence
  primer
tttccttattggcgatgtgg

SEQ ID NO: 61323 - DNA, 21 bp, Artificial Sequence
  primer
gaatttgccaatagccctgac

SEQ ID NO: 61324 - DNA, 38 bp, Artificial Sequence
  primer
gtaaaacgacggccagttggtttacacagccaatcagc

SEQ ID NO: 61325 - DNA, 21 bp, Artificial Sequence
  primer
tcaaatcctttgcactcatgc

SEQ ID NO: 61326 - DNA, 21 bp, Artificial Sequence
  primer
taacccaaagaatcgaggagc

SEQ ID NO: 61327 - DNA, 43 bp, Artificial Sequence
  primer
gtaaaacgacggccagtccagctacatttaaatctggagaaag

SEQ ID NO: 61328 - DNA, 21 bp, Artificial Sequence
  primer
catttaccgtgatgctggttg

SEQ ID NO: 61329 - DNA, 21 bp, Artificial Sequence
  primer
acaattggaagtggtcgaagg

SEQ ID NO: 61330 - DNA, 21 bp, Artificial Sequence
  primer
gagaagggtgaggttgtgagc

SEQ ID NO: 61331 - DNA, 38 bp, Artificial Sequence
  primer
gtaaaacgacggccagttcatacggaaatccttccagg

SEQ ID NO: 61332 - DNA, 21 bp, Artificial Sequence
  primer
catcaccaaacgttatgcctc

SEQ ID NO: 61333 - DNA, 21 bp, Artificial Sequence
  primer
gtctacatcagcagcaccagc

SEQ ID NO: 61334 - DNA, 40 bp, Artificial Sequence
  primer
gtaaaacgacggccagtccactaatgttcagattgatggc

SEQ ID NO: 61335 - DNA, 38 bp, Artificial Sequence
  primer
gtaaaacgacggccagtgtctcgagctttcttcgttcg

SEQ ID NO: 61336 - DNA, 21 bp, Artificial Sequence
  primer
tcgtttggtggcaagatttag

SEQ ID NO: 61337 - DNA, 39 bp, Artificial Sequence
  primer
gtaaaacgacggccagttggcaaaggacctaggttagtg

SEQ ID NO: 61338 - DNA, 38 bp, Artificial Sequence
  primer
gtaaaacgacggccagtagcctggcatttgcattctac

SEQ ID NO: 61339 - DNA, 18 bp, Artificial Sequence
  primer
ttagttgggcatggtggc

SEQ ID NO: 61340 - DNA, 20 bp, Artificial Sequence
  primer
aggtgggaggattgcttgag

SEQ ID NO: 61341 - DNA, 21 bp, Artificial Sequence
  primer
aggctctgctttgtttggaac

SEQ ID NO: 61342 - DNA, 40 bp, Artificial Sequence
  primer
gtaaaacgacggccagtgcgtttgtaaagggaataatttg

SEQ ID NO: 61343 - DNA, 38 bp, Artificial Sequence
  primer
gtaaaacgacggccagtatacccttggcttgtctaccg

SEQ ID NO: 61344 - DNA, 23 bp, Artificial Sequence
  primer
ttggtgcctttcacctaatactg

SEQ ID NO: 61345 - DNA, 29 bp, Artificial Sequence
  primer
cacagcaagtagtttatatgacttgagaa

SEQ ID NO: 61346 - DNA, 23 bp, Artificial Sequence
  primer
tgggtatgttggttctagcttgt

SEQ ID NO: 61347 - DNA, 47 bp, Artificial Sequence
  primer
gtaaaacgacggccagtcatatcacacatgtagaactattactctcc

SEQ ID NO: 61348 - DNA, 40 bp, Artificial Sequence
  primer
gtaaaacgacggccagtgcagcaactttgtttcactcttg

SEQ ID NO: 61349 - DNA, 42 bp, Artificial Sequence
  primer
gtaaaacgacggccagtaaattatcattaaattggtggttgg

SEQ ID NO: 61350 - DNA, 38 bp, Artificial Sequence
  primer
gtaaaacgacggccagtatttgtttctggatcttcccg

SEQ ID NO: 61351 - DNA, 39 bp, Artificial Sequence
  primer
gtaaaacgacggccagttttggactgcagatcacatctc

SEQ ID NO: 61352 - DNA, 25 bp, Artificial Sequence
  primer
tgagaatttccttagagtgattgga

SEQ ID NO: 61353 - DNA, 38 bp, Artificial Sequence
  primer
gtaaaacgacggccagttaatagcactggtgtcggtgg

SEQ ID NO: 61354 - DNA, 38 bp, Artificial Sequence
  primer
gtaaaacgacggccagtacgccacaccacattctgtag

SEQ ID NO: 61355 - DNA, 38 bp, Artificial Sequence
  primer
gtaaaacgacggccagtctgctgaactgagaggaaggg

SEQ ID NO: 61356 - DNA, 37 bp, Artificial Sequence
  primer
gtaaaacgacggccagtcagataccgagacctgcgag

SEQ ID NO: 61357 - DNA, 38 bp, Artificial Sequence
  primer
gtaaaacgacggccagtaggcattcagagagtggaagg

SEQ ID NO: 61358 - DNA, 37 bp, Artificial Sequence
  primer
gtaaaacgacggccagtcttgagcctgggagtttgag

SEQ ID NO: 61359 - DNA, 38 bp, Artificial Sequence
  primer
gtaaaacgacggccagtcccttccagttcttagagccc

SEQ ID NO: 61360 - DNA, 21 bp, Artificial Sequence
  primer
gcgaggccctgtcttactatc

SEQ ID NO: 61361 - DNA, 21 bp, Artificial Sequence
  primer
gccctgtcttactatctggcg

SEQ ID NO: 61362 - DNA, 21 bp, Artificial Sequence
  primer
gactacctgacggccaacttc

SEQ ID NO: 61363 - DNA, 18 bp, Artificial Sequence
  primer
gagccagttctgggaggc

SEQ ID NO: 61364 - DNA, 19 bp, Artificial Sequence
  primer
aggcacacctgtgcatctg

SEQ ID NO: 61365 - DNA, 20 bp, Artificial Sequence
  primer
tctcttggtgctgggatgag

SEQ ID NO: 61366 - DNA, 38 bp, Artificial Sequence
  primer
gtaaaacgacggccagttaccactacaatggcaccctg

SEQ ID NO: 61367 - DNA, 19 bp, Artificial Sequence
  primer
cactgggccttcctgagtc

SEQ ID NO: 61368 - DNA, 38 bp, Artificial Sequence
  primer
gtaaaacgacggccagttcttcgattccaggtcaggag

SEQ ID NO: 61369 - DNA, 38 bp, Artificial Sequence
  primer
gtaaaacgacggccagtactctggacaaacatcccgtc

SEQ ID NO: 61370 - DNA, 37 bp, Artificial Sequence
  primer
gtaaaacgacggccagtaactgagggcttgttctggg

SEQ ID NO: 61371 - DNA, 21 bp, Artificial Sequence
  primer
ggatggctccttaaacatccc

SEQ ID NO: 61372 - DNA, 21 bp, Artificial Sequence
  primer
ccttcctgagttacagggtgc

SEQ ID NO: 61373 - DNA, 37 bp, Artificial Sequence
  primer
gtaaaacgacggccagtaggaggagctctagcatcgc

SEQ ID NO: 61374 - DNA, 38 bp, Artificial Sequence
  primer
gtaaaacgacggccagtccctggtgaggagatagtccc

SEQ ID NO: 61375 - DNA, 19 bp, Artificial Sequence
  primer
ctaggctgccgcactaagg

SEQ ID NO: 61376 - DNA, 38 bp, Artificial Sequence
  primer
gtaaaacgacggccagtgtcaattgaggatggaggagg

SEQ ID NO: 61377 - DNA, 38 bp, Artificial Sequence
  primer
gtaaaacgacggccagtaggagcttcagctggactgag

SEQ ID NO: 61378 - DNA, 39 bp, Artificial Sequence
  primer
gtaaaacgacggccagttgtcagcttcatagttgttggc

SEQ ID NO: 61379 - DNA, 38 bp, Artificial Sequence
  primer
gtaaaacgacggccagtacttgtctgaagcccttgtcc

SEQ ID NO: 61380 - DNA, 39 bp, Artificial Sequence
  primer
gtaaaacgacggccagtaaacttgacttggaggtgtgtg

SEQ ID NO: 61381 - DNA, 26 bp, Artificial Sequence
  primer
aatcttaggaaggctctttaattcag

SEQ ID NO: 61382 - DNA, 40 bp, Artificial Sequence
  primer
gtaaaacgacggccagtcatgtctgtgatattgattggct

SEQ ID NO: 61383 - DNA, 21 bp, Artificial Sequence
  primer
acagaggaagggcaggagaac

SEQ ID NO: 61384 - DNA, 38 bp, Artificial Sequence
  primer
gtaaaacgacggccagtagtgcaggtggaaaccatctc

SEQ ID NO: 61385 - DNA, 38 bp, Artificial Sequence
  primer
gtaaaacgacggccagtgttcctgccagactcttcagc

SEQ ID NO: 61386 - DNA, 21 bp, Artificial Sequence
  primer
ggaatatgactgccaacctcc

SEQ ID NO: 61387 - DNA, 21 bp, Artificial Sequence
  primer
agtgggttaatgtcgtcaggc

SEQ ID NO: 61388 - DNA, 38 bp, Artificial Sequence
  primer
gtaaaacgacggccagttgacgtgattcattctggctc

SEQ ID NO: 61389 - DNA, 37 bp, Artificial Sequence
  primer
gtaaaacgacggccagtgaagaggagcaggtgtgtgc

SEQ ID NO: 61390 - DNA, 21 bp, Artificial Sequence
  primer
cagtcacatctctgctgaggc

SEQ ID NO: 61391 - DNA, 38 bp, Artificial Sequence
  primer
gtaaaacgacggccagtcctgttacctacccgtgttcc

SEQ ID NO: 61392 - DNA, 21 bp, Artificial Sequence
  primer
catggcaacagagactccatc

SEQ ID NO: 61393 - DNA, 38 bp, Artificial Sequence
  primer
gtaaaacgacggccagttgggacagagtttgacagcag

SEQ ID NO: 61394 - DNA, 38 bp, Artificial Sequence
  primer
gtaaaacgacggccagtttacccttctccatttctggc

SEQ ID NO: 61395 - DNA, 38 bp, Artificial Sequence
  primer
gtaaaacgacggccagttgcatcttcaacagggtatgg

SEQ ID NO: 61396 - DNA, 39 bp, Artificial Sequence
  primer
gtaaaacgacggccagttcaacaaagaagccctcatagc

SEQ ID NO: 61397 - DNA, 25 bp, Artificial Sequence
  primer
aacactacagttgcagtcttgtcac

SEQ ID NO: 61398 - DNA, 39 bp, Artificial Sequence
  primer
gtaaaacgacggccagttctttctttgctcttcgtttcc

SEQ ID NO: 61399 - DNA, 21 bp, Artificial Sequence
  primer
ttaggcttccaaagaagctgg

SEQ ID NO: 61400 - DNA, 26 bp, Artificial Sequence
  primer
ccctctaccctttgttaagaatgtaa

SEQ ID NO: 61401 - DNA, 40 bp, Artificial Sequence
  primer
gtaaaacgacggccagttgtcttgactgtcctggtattgc

SEQ ID NO: 61402 - DNA, 21 bp, Artificial Sequence
  primer
ggaggatcctagtccaagctc

SEQ ID NO: 61403 - DNA, 19 bp, Artificial Sequence
  primer
gcagaggtgctcaagcctc

SEQ ID NO: 61404 - DNA, 21 bp, Artificial Sequence
  primer
tatgttccctctggaggcttg

SEQ ID NO: 61405 - DNA, 38 bp, Artificial Sequence
  primer
gtaaaacgacggccagtcttcaggagcactgtttgagc

SEQ ID NO: 61406 - DNA, 21 bp, Artificial Sequence
  primer
gccactctacccaactccttg

SEQ ID NO: 61407 - DNA, 19 bp, Artificial Sequence
  primer
gctgatggcatccttcctc

SEQ ID NO: 61408 - DNA, 38 bp, Artificial Sequence
  primer
gtaaaacgacggccagtgaaccaagtctcaagggatgg

SEQ ID NO: 61409 - DNA, 38 bp, Artificial Sequence
  primer
gtaaaacgacggccagtaagtttgctcagggtcttccc

SEQ ID NO: 61410 - DNA, 21 bp, Artificial Sequence
  primer
ccatgtgtcactgatgtctgc

SEQ ID NO: 61411 - DNA, 21 bp, Artificial Sequence
  primer
gggtacctttggaacccagtc

SEQ ID NO: 61412 - DNA, 20 bp, Artificial Sequence
  primer
tacaggcataagccaccagg

SEQ ID NO: 61413 - DNA, 38 bp, Artificial Sequence
  primer
gtaaaacgacggccagttcccagggacattcaagattc

SEQ ID NO: 61414 - DNA, 38 bp, Artificial Sequence
  primer
gtaaaacgacggccagtgatgtcttgggatggactgtg

SEQ ID NO: 61415 - DNA, 39 bp, Artificial Sequence
  primer
gtaaaacgacggccagtgcactctgtcatcttgtagccc

SEQ ID NO: 61416 - DNA, 37 bp, Artificial Sequence
  primer
gtaaaacgacggccagtaataattggttgcccttgcc

SEQ ID NO: 61417 - DNA, 39 bp, Artificial Sequence
  primer
gtaaaacgacggccagttttgctacattgtcgaccactc

SEQ ID NO: 61418 - DNA, 22 bp, Artificial Sequence
  primer
catctggtttgtcttcagggtc

SEQ ID NO: 61419 - DNA, 38 bp, Artificial Sequence
  primer
gtaaaacgacggccagtggcctagcagtaaattggcac

SEQ ID NO: 61420 - DNA, 21 bp, Artificial Sequence
  primer
aaccagctgtaccagggtttg

SEQ ID NO: 61421 - DNA, 38 bp, Artificial Sequence
  primer
gtaaaacgacggccagtcctttggcaagagaactttgg

SEQ ID NO: 61422 - DNA, 38 bp, Artificial Sequence
  primer
gtaaaacgacggccagtgcccagacttcattatcccac

SEQ ID NO: 61423 - DNA, 21 bp, Artificial Sequence
  primer
cagtagctgggattacaagcg

SEQ ID NO: 61424 - DNA, 38 bp, Artificial Sequence
  primer
gtaaaacgacggccagttgaactgagcccagaagtttg

SEQ ID NO: 61425 - DNA, 41 bp, Artificial Sequence
  primer
gtaaaacgacggccagtcgtgtactaacacttccattgtgg

SEQ ID NO: 61426 - DNA, 38 bp, Artificial Sequence
  primer
gtaaaacgacggccagttttgcgtgtggattctttagg

SEQ ID NO: 61427 - DNA, 35 bp, Artificial Sequence
  primer
gtaaaacgacggccagtttacaggcatgcgccatc

SEQ ID NO: 61428 - DNA, 38 bp, Artificial Sequence
  primer
gtaaaacgacggccagttctccagcttacttccatccc

SEQ ID NO: 61429 - DNA, 35 bp, Artificial Sequence
  primer
gtaaaacgacggccagtagcgttaaccgcgctgag

SEQ ID NO: 61430 - DNA, 40 bp, Artificial Sequence
  primer
gtaaaacgacggccagttgggaatgatggttagagaggac

SEQ ID NO: 61431 - DNA, 22 bp, Artificial Sequence
  primer
cctttgaattgacttggtttgg

SEQ ID NO: 61432 - DNA, 39 bp, Artificial Sequence
  primer
gtaaaacgacggccagttgaagacctgtttctctccaaa

SEQ ID NO: 61433 - DNA, 21 bp, Artificial Sequence
  primer
cacagaaagtgatcggcagtg

SEQ ID NO: 61434 - DNA, 38 bp, Artificial Sequence
  primer
gtaaaacgacggccagtattggaagtttggtttgtgcc

SEQ ID NO: 61435 - DNA, 21 bp, Artificial Sequence
  primer
gactgtgacgtcatccaggtg

SEQ ID NO: 61436 - DNA, 21 bp, Artificial Sequence
  primer
caagctcactccttcctagcc

SEQ ID NO: 61437 - DNA, 37 bp, Artificial Sequence
  primer
gtaaaacgacggccagtaactgaggccagagaggcag

SEQ ID NO: 61438 - DNA, 20 bp, Artificial Sequence
  primer
gttcaagcaatcctcccacc

SEQ ID NO: 61439 - DNA, 38 bp, Artificial Sequence
  primer
gtaaaacgacggccagttagggtcccagtaaggcagag

SEQ ID NO: 61440 - DNA, 21 bp, Artificial Sequence
  primer
ttgccaggaagtgggaaatac

SEQ ID NO: 61441 - DNA, 35 bp, Artificial Sequence
  primer
gtaaaacgacggccagtagacccggtccacgtttg

SEQ ID NO: 61442 - DNA, 21 bp, Artificial Sequence
  primer
ttgggattgtatagcggtgac

SEQ ID NO: 61443 - DNA, 22 bp, Artificial Sequence
  primer
tgggtatgggatcatcgtttag

SEQ ID NO: 61444 - DNA, 38 bp, Artificial Sequence
  primer
gtaaaacgacggccagtcatttgtttccttggcttcaa

SEQ ID NO: 61445 - DNA, 38 bp, Artificial Sequence
  primer
gtaaaacgacggccagtctctgtgtgcctttgcatctc

SEQ ID NO: 61446 - DNA, 38 bp, Artificial Sequence
  primer
gtaaaacgacggccagtggacatacctggtgacactgg

SEQ ID NO: 61447 - DNA, 37 bp, Artificial Sequence
  primer
gtaaaacgacggccagtacttccacagtcttgcctgg

SEQ ID NO: 61448 - DNA, 37 bp, Artificial Sequence
  primer
gtaaaacgacggccagtcgctttcttgctttggtcag

SEQ ID NO: 61449 - DNA, 38 bp, Artificial Sequence
  primer
gtaaaacgacggccagtgactcaagttccagccctgtc

SEQ ID NO: 61450 - DNA, 40 bp, Artificial Sequence
  primer
gtaaaacgacggccagttgacctaacatgaggctcttctg

SEQ ID NO: 61451 - DNA, 37 bp, Artificial Sequence; identical to SEQ ID NO: 61448
  primer

SEQ ID NO: 61452 - DNA, 38 bp, Artificial Sequence
  primer
gtaaaacgacggccagtcccagactgctctgtttctgg

SEQ ID NO: 61453 - DNA, 38 bp, Artificial Sequence
  primer
gtaaaacgacggccagttaccttaaccgcagggaattg

SEQ ID NO: 61454 - DNA, 38 bp, Artificial Sequence
  primer
gtaaaacgacggccagtttcgggagaaccttgattcag

SEQ ID NO: 61455 - DNA, 21 bp, Artificial Sequence
  primer
gaaatgcttggagtccatgtg

SEQ ID NO: 61456 - DNA, 21 bp, Artificial Sequence
  primer
gaacgaactgtccttcatgcc

SEQ ID NO: 61457 - DNA, 38 bp, Artificial Sequence
  primer
gtaaaacgacggccagtcttccttcccaactcctcatc

SEQ ID NO: 61458 - DNA, 21 bp, Artificial Sequence
  primer
agcctccctacagctacatcg

SEQ ID NO: 61459 - DNA, 36 bp, Artificial Sequence
  primer
gtaaaacgacggccagtacatgtttgagcacggcag

SEQ ID NO: 61460 - DNA, 19 bp, Artificial Sequence
  primer
ccatgccagccagtatgtg

SEQ ID NO: 61461 - DNA, 20 bp, Artificial Sequence
  primer
gactgggaggtcagggagtg

SEQ ID NO: 61462 - DNA, 21 bp, Artificial Sequence
  primer
tcttctatgtctcgtggctgc

SEQ ID NO: 61463 - DNA, 34 bp, Artificial Sequence
  primer
gtaaaacgacggccagtgaagcgcacgtctggtg

SEQ ID NO: 61464 - DNA, 21 bp, Artificial Sequence
  primer
cagctgctggacttgaccttc

SEQ ID NO: 61465 - DNA, 18 bp, Artificial Sequence
  primer
ctacgaggagcgctggac

SEQ ID NO: 61466 - DNA, 38 bp, Artificial Sequence
  primer
gtaaaacgacggccagtgtggacctgggcatctacttg

SEQ ID NO: 61467 - DNA, 22 bp, Artificial Sequence
  primer
ccctagatgagtatctggcagg

SEQ ID NO: 61468 - DNA, 20 bp, Artificial Sequence
  primer
ttgtttggctgccttaatcg

SEQ ID NO: 61469 - DNA, 38 bp, Artificial Sequence
  primer
gtaaaacgacggccagtctggagcagcgtgagagttag

SEQ ID NO: 61470 - DNA, 37 bp, Artificial Sequence
  primer
gtaaaacgacggccagtagggaaactctgccttggag

SEQ ID NO: 61471 - DNA, 38 bp, Artificial Sequence
  primer
gtaaaacgacggccagttggaagtatcctggaccactg

SEQ ID NO: 61472 - DNA, 21 bp, Artificial Sequence
  primer
tggaagtatcctggaccactg

SEQ ID NO: 61473 - DNA, 25 bp, Artificial Sequence
  primer
ttgacttgactgtacctttggtttc

SEQ ID NO: 61474 - DNA, 37 bp, Artificial Sequence
  primer
gtaaaacgacggccagtgcgccaagaatgaaactctg

SEQ ID NO: 61475 - DNA, 41 bp, Artificial Sequence
  primer
gtaaaacgacggccagtagctaatacccatagtcctttcaa

SEQ ID NO: 61476 - DNA, 21 bp, Artificial Sequence
  primer
ctagtgccaccttcatctccc

SEQ ID NO: 61477 - DNA, 36 bp, Artificial Sequence
  primer
gtaaaacgacggccagtcaggcatacaccaccatgc

SEQ ID NO: 61478 - DNA, 21 bp, Artificial Sequence
  primer
caatttgggatcgacagtgac

SEQ ID NO: 61479 - DNA, 37 bp, Artificial Sequence
  primer
gtaaaacgacggccagtttagccagggagggagagag

SEQ ID NO: 61480 - DNA, 21 bp, Artificial Sequence
  primer
gggaattctacaaggtgggag

SEQ ID NO: 61481 - DNA, 21 bp, Artificial Sequence
  primer
gtccctgccaagtctgttgag

SEQ ID NO: 61482 - DNA, 21 bp, Artificial Sequence
  primer
tgtcttcccttctatcgtggg

SEQ ID NO: 61483 - DNA, 21 bp, Artificial Sequence
  primer
tgcgtgacatcaaagagaagc

SEQ ID NO: 61484 - DNA, 21 bp, Artificial Sequence
  primer
cgtactcaccgagagcttgag

SEQ ID NO: 61485 - DNA, 38 bp, Artificial Sequence
  primer
gtaaaacgacggccagtctctggcgaggactctgtctc

SEQ ID NO: 61486 - DNA, 38 bp, Artificial Sequence
  primer
gtaaaacgacggccagtgtgtgataggtggaagggcag

SEQ ID NO: 61487 - DNA, 20 bp, Artificial Sequence
  primer
gatgagctgcacactccacc

SEQ ID NO: 61488 - DNA, 19 bp, Artificial Sequence
  primer
cctccctgtccctagaccc

SEQ ID NO: 61489 - DNA, 38 bp, Artificial Sequence
  primer
gtaaaacgacggccagtatgtgtgtctgcttcctccag

SEQ ID NO: 61490 - DNA, 38 bp, Artificial Sequence
  primer
gtaaaacgacggccagtcccaaacagcagaagttcctc

SEQ ID NO: 61491 - DNA, 22 bp, Artificial Sequence
  primer
tgtagactcagccttggagagg

SEQ ID NO: 61492 - DNA, 38 bp, Artificial Sequence
  primer
gtaaaacgacggccagtagagcagagctcatttcaggc

SEQ ID NO: 61493 - DNA, 21 bp, Artificial Sequence
  primer
cttaggtcggcagtgttaggg

SEQ ID NO: 61494 - DNA, 21 bp, Artificial Sequence
  primer
gaacaatacatggcatccagc

SEQ ID NO: 61495 - DNA, 21 bp, Artificial Sequence
  primer
tctcatgcacctaactttggc

SEQ ID NO: 61496 - DNA, 21 bp, Artificial Sequence
  primer
gcatggctcaaacctcaaatc

SEQ ID NO: 61497 - DNA, 22 bp, Artificial Sequence
  primer
tgggactaacgtgtgtctttcc

SEQ ID NO: 61498 - DNA, 42 bp, Artificial Sequence
  primer
gtaaaacgacggccagttttctttaaactggtaggatcaggg

SEQ ID NO: 61499 - DNA, 21 bp, Artificial Sequence
  primer
catggagtcaataggcattgg

SEQ ID NO: 61500 - DNA, 22 bp, Artificial Sequence
  primer
tctctgcgatctctgtgttctg

SEQ ID NO: 61501 - DNA, 38 bp, Artificial Sequence
  primer
gtaaaacgacggccagtgatttgtgccagctgactctg

SEQ ID NO: 61502 - DNA, 38 bp, Artificial Sequence
  primer
gtaaaacgacggccagtgttggctgtgaacgagtaggg

SEQ ID NO: 61503 - DNA, 21 bp, Artificial Sequence
  primer
gtcgttgacttgtggaactgc

SEQ ID NO: 61504 - DNA, 38 bp, Artificial Sequence
  primer
gtaaaacgacggccagtcccatgaagtatcttgggctg

SEQ ID NO: 61505 - DNA, 21 bp, Artificial Sequence
  primer
ctggaacttctctctctgccc

SEQ ID NO: 61506 - DNA, 38 bp, Artificial Sequence
  primer
gtaaaacgacggccagtcggtccagacaagagttaggg

SEQ ID NO: 61507 - DNA, 36 bp, Artificial Sequence
  primer
gtaaaacgacggccagtcccactgacctgggatgag

SEQ ID NO: 61508 - DNA, 21 bp, Artificial Sequence
  primer
acgagtttgtggtgaccagtg

SEQ ID NO: 61509 - DNA, 37 bp, Artificial Sequence
  primer
gtaaaacgacggccagtctcctttcagcagttcaggg

SEQ ID NO: 61510 - DNA, 18 bp, Artificial Sequence
  primer
taagtgggcacaaggcca

SEQ ID NO: 61511 - DNA, 20 bp, Artificial Sequence
  primer
gtatcatccctggcccattc

SEQ ID NO: 61512 - DNA, 21 bp, Artificial Sequence
  primer
gctggatcgagatcatgacag

SEQ ID NO: 61513 - DNA, 38 bp, Artificial Sequence
  primer
gtaaaacgacggccagtgtggtcattcatggagtggtg

SEQ ID NO: 61514 - DNA, 38 bp, Artificial Sequence
  primer
gtaaaacgacggccagtgcttgggtctagctgttcagg

SEQ ID NO: 61515 - DNA, 38 bp, Artificial Sequence
  primer
gtaaaacgacggccagtggaattaagggaggacaaggc

SEQ ID NO: 61516 - DNA, 38 bp, Artificial Sequence
  primer
gtaaaacgacggccagttttggacaacatgagtcaggc

SEQ ID NO: 61517 - DNA, 38 bp, Artificial Sequence
  primer
gtaaaacgacggccagtctggctccagtcaatcatctg

SEQ ID NO: 61518 - DNA, 38 bp, Artificial Sequence
  primer
gtaaaacgacggccagtctggtcaaggacaatccacac

SEQ ID NO: 61519 - DNA, 38 bp, Artificial Sequence
  primer
gtaaaacgacggccagtacccaaagtcaggatccacag

SEQ ID NO: 61520 - DNA, 43 bp, Artificial Sequence
  primer
gtaaaacgacggccagtaactacttatggacagacaggagagg

SEQ ID NO: 61521 - DNA, 22 bp, Artificial Sequence
  primer
ggagacacggaactactcatgg

SEQ ID NO: 61522 - DNA, 20 bp, Artificial Sequence
  primer
cgcacacacattcaggacac

SEQ ID NO: 61523 - DNA, 38 bp, Artificial Sequence
  primer
gtaaaacgacggccagtgaacaaaccacacagacaggg

SEQ ID NO: 61524 - DNA, 38 bp, Artificial Sequence
  primer
gtaaaacgacggccagtctggacattcccactctggtc

SEQ ID NO: 61525 - DNA, 38 bp, Artificial Sequence
  primer
gtaaaacgacggccagtgctggatctcaacatggacag

SEQ ID NO: 61526 - DNA, 40 bp, Artificial Sequence
  primer
gtaaaacgacggccagtagtgacagtgaagggtactcagg

SEQ ID NO: 61527 - DNA, 38 bp, Artificial Sequence
  primer
gtaaaacgacggccagtcacacacacattcaggacacg

SEQ ID NO: 61528 - DNA, 21 bp, Artificial Sequence
  primer
gatcctcaggtcatgggagac

SEQ ID NO: 61529 - DNA, 20 bp, Artificial Sequence
  primer
cacagttcatgggagactgg

SEQ ID NO: 61530 - DNA, 21 bp, Artificial Sequence
  primer
tctctttcgctccgctacaac

SEQ ID NO: 61531 - DNA, 38 bp, Artificial Sequence
  primer
gtaaaacgacggccagtcttgccagctcaaagcaagag

SEQ ID NO: 61532 - DNA, 37 bp, Artificial Sequence
  primer
gtaaaacgacggccagtcatgattcagaggctgaggc

SEQ ID NO: 61533 - DNA, 37 bp, Artificial Sequence
  primer
gtaaaacgacggccagtgaggctgcctaggctctcag

SEQ ID NO: 61534 - DNA, 38 bp, Artificial Sequence
  primer
gtaaaacgacggccagtctccctcctcatgtcatctcc

SEQ ID NO: 61535 - DNA, 38 bp, Artificial Sequence
  primer
gtaaaacgacggccagttcttcccattactttggctcc

SEQ ID NO: 61536 - DNA, 40 bp, Artificial Sequence
  primer
gtaaaacgacggccagtgagaaagcacatctgtcaagacg

SEQ ID NO: 61537 - DNA, 23 bp, Artificial Sequence
  primer
tgaagaccacaaatgtcatcaag

SEQ ID NO: 61538 - DNA, 38 bp, Artificial Sequence
  primer
gtaaaacgacggccagttgtcaagtcgatcccaatgtc

SEQ ID NO: 61539 - DNA, 21 bp, Artificial Sequence
  primer
tgaattacgacaagctgagcc

SEQ ID NO: 61540 - DNA, 21 bp, Artificial Sequence
  primer
ggcctaaagcctacacttccc

SEQ ID NO: 61541 - DNA, 38 bp, Artificial Sequence
  primer
gtaaaacgacggccagttggtgagagttggttctgtgg

SEQ ID NO: 61542 - DNA, 37 bp, Artificial Sequence
  primer
gtaaaacgacggccagtatggtgcagagttgtggagg

SEQ ID NO: 61543 - DNA, 38 bp, Artificial Sequence
  primer
gtaaaacgacggccagtgaggtgagagagtcctcaggc

SEQ ID NO: 61544 - DNA, 38 bp, Artificial Sequence
  primer
gtaaaacgacggccagtactcttcctcccaagtccctg

SEQ ID NO: 61545 - DNA, 21 bp, Artificial Sequence
  primer
aagaacatgctggtgctgaac

SEQ ID NO: 61546 - DNA, 38 bp, Artificial Sequence
  primer
gtaaaacgacggccagtgacctcacacctaccctctgg

SEQ ID NO: 61547 - DNA, 38 bp, Artificial Sequence
  primer
gtaaaacgacggccagttgtcacttgcctaagccacac

SEQ ID NO: 61548 - DNA, 38 bp, Artificial Sequence
  primer
gtaaaacgacggccagtcgaaatcagctcacctcactg

SEQ ID NO: 61549 - DNA, 38 bp, Artificial Sequence
  primer
gtaaaacgacggccagtagtccttcaggcagagaatgg

SEQ ID NO: 61550 - DNA, 38 bp, Artificial Sequence
  primer
gtaaaacgacggccagtgcaagaaactggattggtgtg

SEQ ID NO: 61551 - DNA, 38 bp, Artificial Sequence
  primer
gtaaaacgacggccagtattgggtggcatacagctttc

SEQ ID NO: 61552 - DNA, 20 bp, Artificial Sequence
  primer
cctgaggtgtgggtagcaag

SEQ ID NO: 61553 - DNA, 37 bp, Artificial Sequence
  primer
gtaaaacgacggccagtctgttcagagtggcgtctcc

SEQ ID NO: 61554 - DNA, 22 bp, Artificial Sequence
  primer
gctgggattacaggcatcatag

SEQ ID NO: 61555 - DNA, 21 bp, Artificial Sequence
  primer
tgaagaaccacaccctcacac

SEQ ID NO: 61556 - DNA, 20 bp, Artificial Sequence
  primer
acctctctggacccaaggtg

SEQ ID NO: 61557 - DNA, 37 bp, Artificial Sequence
  primer
gtaaaacgacggccagtcaggtacaaggacaccgtgg

SEQ ID NO: 61558 - DNA, 22 bp, Artificial Sequence
  primer
aaacagaagcagtcagtgagcc

SEQ ID NO: 61559 - DNA, 38 bp, Artificial Sequence
  primer
gtaaaacgacggccagtgctggtaagagatgcaggagg

SEQ ID NO: 61560 - DNA, 37 bp, Artificial Sequence
  primer
gtaaaacgacggccagtctcaagcctcgggctacttc

SEQ ID NO: 61561 - DNA, 38 bp, Artificial Sequence
  primer
gtaaaacgacggccagtgtctctccgggaaggtgaaac

SEQ ID NO: 61562 - DNA, 38 bp, Artificial Sequence
  primer
gtaaaacgacggccagttaccacctcagcactcccttc

SEQ ID NO: 61563 - DNA, 38 bp, Artificial Sequence
  primer
gtaaaacgacggccagtgaagttcgagagcctcttccc

SEQ ID NO: 61564 - DNA, 37 bp, Artificial Sequence
  primer
gtaaaacgacggccagtagcctctaccagatccgcac

SEQ ID NO: 61565 - DNA, 38 bp, Artificial Sequence
  primer
gtaaaacgacggccagtactccgagttctgcttcatcc

SEQ ID NO: 61566 - DNA, 21 bp, Artificial Sequence
  primer
ctacagcaagcaggtcaggag

SEQ ID NO: 61567 - DNA, 38 bp, Artificial Sequence
  primer
gtaaaacgacggccagtgaaacacacacgtctcttccg

SEQ ID NO: 61568 - DNA, 38 bp, Artificial Sequence
  primer
gtaaaacgacggccagtaggaggcgcccatagacttac

SEQ ID NO: 61569 - DNA, 21 bp, Artificial Sequence
  primer
aggtaatctgggtggagggag

SEQ ID NO: 61570 - DNA, 20 bp, Artificial Sequence
  primer
ctgacctgcaggagatggtc

SEQ ID NO: 61571 - DNA, 38 bp, Artificial Sequence
  primer
gtaaaacgacggccagtaaccatcaccacagcttcatc

SEQ ID NO: 61572 - DNA, 38 bp, Artificial Sequence
  primer
gtaaaacgacggccagttgagataccctgaaacctccc

SEQ ID NO: 61573 - DNA, 37 bp, Artificial Sequence
  primer
gtaaaacgacggccagtagccacatcctttcctgtcc

SEQ ID NO: 61574 - DNA, 37 bp, Artificial Sequence
  primer
gtaaaacgacggccagtccatggctcattcctctctg

SEQ ID NO: 61575 - DNA, 38 bp, Artificial Sequence
  primer
gtaaaacgacggccagtacctatcaggtgagggagtgg

SEQ ID NO: 61576 - DNA, 38 bp, Artificial Sequence
  primer
gtaaaacgacggccagtagcccagctctacagtcttgc

SEQ ID NO: 61577 - DNA, 37 bp, Artificial Sequence
  primer
gtaaaacgacggccagtctcagcagaccctgtcttgg

SEQ ID NO: 61578 - DNA, 37 bp, Artificial Sequence
  primer
gtaaaacgacggccagtatggtgagaggctgacatgg

SEQ ID NO: 61579 - DNA, 38 bp, Artificial Sequence
  primer
gtaaaacgacggccagttctgtcattgttcctgaaccg

SEQ ID NO: 61580 - DNA, 37 bp, Artificial Sequence
  primer
gtaaaacgacggccagttcagtcctcagccacttcct

SEQ ID NO: 61581 - DNA, 38 bp, Artificial Sequence
  primer
gtaaaacgacggccagtgctaccgctttcttaccctcc

SEQ ID NO: 61582 - DNA, 23 bp, Artificial Sequence
  primer
catgttatgcttgttggtgtttg

SEQ ID NO: 61583 - DNA, 38 bp, Artificial Sequence
  primer
gtaaaacgacggccagtgactctgagaacgatgagccc

SEQ ID NO: 61584 - DNA, 21 bp, Artificial Sequence
  primer
ctcccaaacctcgaatgagtg

SEQ ID NO: 61585 - DNA, 38 bp, Artificial Sequence
  primer
gtaaaacgacggccagtgatgcgtccagacacaaacag

SEQ ID NO: 61586 - DNA, 24 bp, Artificial Sequence
  primer
gatacagaaatgcagaatgactcc

SEQ ID NO: 61587 - DNA, 38 bp, Artificial Sequence
  primer
gtaaaacgacggccagtactgccatcttaaagcacctg

SEQ ID NO: 61588 - DNA, 40 bp, Artificial Sequence
  primer
gtaaaacgacggccagtcatgagtgtatagggtgctggtt

SEQ ID NO: 61589 - DNA, 38 bp, Artificial Sequence
  primer
gtaaaacgacggccagtcactagtggctggagagggac

SEQ ID NO: 61590 - DNA, 37 bp, Artificial Sequence
  primer
gtaaaacgacggccagtgcgcatgactgtatttgcac

SEQ ID NO: 61591 - DNA, 26 bp, Artificial Sequence
  primer
tgcagaagatccatcttaaattattc

SEQ ID NO: 61592 - DNA, 41 bp, Artificial Sequence
  primer
gtaaaacgacggccagtccagaatggtgttcagtaaatgtc

SEQ ID NO: 61593 - DNA, 38 bp, Artificial Sequence
  primer
gtaaaacgacggccagtgttgtgaatgtgccaggtctc

SEQ ID NO: 61594 - DNA, 23 bp, Artificial Sequence
  primer
cagtacactggcattatgctttg

SEQ ID NO: 61595 - DNA, 22 bp, Artificial Sequence
  primer
tccacaaggaaacctgttatgc

SEQ ID NO: 61596 - DNA, 38 bp, Artificial Sequence
  primer
gtaaaacgacggccagtggaacaggagtgtgaaatggc

SEQ ID NO: 61597 - DNA, 40 bp, Artificial Sequence
  primer
gtaaaacgacggccagttgaggtcatcaacacacattctg

SEQ ID NO: 61598 - DNA, 21 bp, Artificial Sequence
  primer
actctcgcgagtcgaggtatc

SEQ ID NO: 61599 - DNA, 22 bp, Artificial Sequence
  primer
tgcaactacatcttagggctgc

SEQ ID NO: 61600 - DNA, 19 bp, Artificial Sequence
  primer
tgacctcgtgatccacctg

SEQ ID NO: 61601 - DNA, 38 bp, Artificial Sequence
  primer
gtaaaacgacggccagtccaatcatttgtgcttaaggg

SEQ ID NO: 61602 - DNA, 37 bp, Artificial Sequence; identical to SEQ ID NO: 42042
  primer

SEQ ID NO: 61603 - DNA, 38 bp, Artificial Sequence
  primer
gtaaaacgacggccagtatacccagcccactttcattc

SEQ ID NO: 61604 - DNA, 26 bp, Artificial Sequence
  primer
tttgtggtttcaaagaattgtcttac

SEQ ID NO: 61605 - DNA, 21 bp, Artificial Sequence
  primer
gtgtgaggagggcagttgttc

SEQ ID NO: 61606 - DNA, 38 bp, Artificial Sequence
  primer
gtaaaacgacggccagtcacagcagtacctgggatgtg

SEQ ID NO: 61607 - DNA, 38 bp, Artificial Sequence
  primer
gtaaaacgacggccagttacctccgttcatcctcacac

SEQ ID NO: 61608 - DNA, 21 bp, Artificial Sequence
  primer
tctcagagcagcatttgaagg

SEQ ID NO: 61609 - DNA, 40 bp, Artificial Sequence
  primer
gtaaaacgacggccagtgcttgcaaagtacaaattcttgc

SEQ ID NO: 61610 - DNA, 41 bp, Artificial Sequence
  primer
gtaaaacgacggccagtaggagactaggaatgcaagcttat

SEQ ID NO: 61611 - DNA, 41 bp, Artificial Sequence
  primer
gtaaaacgacggccagtggtataatatgccaggaaacttgg

SEQ ID NO: 61612 - DNA, 39 bp, Artificial Sequence
  primer
gtaaaacgacggccagtcctgttatcaagcatccaaatg

SEQ ID NO: 61613 - DNA, 19 bp, Artificial Sequence
  primer
cacgaagcctttctttggc

SEQ ID NO: 61614 - DNA, 21 bp, Artificial Sequence
  primer
gactatacacctcaagggcgg

SEQ ID NO: 61615 - DNA, 26 bp, Artificial Sequence
  primer
tctcttaaagtagaagacacattgcc

SEQ ID NO: 61616 - DNA, 38 bp, Artificial Sequence
  primer
gtaaaacgacggccagtccggtcctatttcctcacctg

SEQ ID NO: 61617 - DNA, 38 bp, Artificial Sequence
  primer
gtaaaacgacggccagttgctgtgacgatttgatttgg

SEQ ID NO: 61618 - DNA, 38 bp, Artificial Sequence
  primer
gtaaaacgacggccagtcctcactggctgactgacttg

SEQ ID NO: 61619 - DNA, 21 bp, Artificial Sequence
  primer
tgcatatccagactgctttcc

SEQ ID NO: 61620 - DNA, 38 bp, Artificial Sequence
  primer
gtaaaacgacggccagttgggatgagaaaggtattggg

SEQ ID NO: 61621 - DNA, 39 bp, Artificial Sequence
  primer
gtaaaacgacggccagtgtggagcctcctctaatccttc

SEQ ID NO: 61622 - DNA, 21 bp, Artificial Sequence
  primer
cagtgagaagcaaagtgctgg

SEQ ID NO: 61623 - DNA, 38 bp, Artificial Sequence
  primer
gtaaaacgacggccagtgtctggaccactcctggattc

SEQ ID NO: 61624 - DNA, 38 bp, Artificial Sequence
  primer
gtaaaacgacggccagtatggctgatcctccttagtgg

SEQ ID NO: 61625 - DNA, 38 bp, Artificial Sequence
  primer
gtaaaacgacggccagtgttcggagaggttgcattacc

SEQ ID NO: 61626 - DNA, 20 bp, Artificial Sequence
  primer
gccagagctgagggagaatc

SEQ ID NO: 61627 - DNA, 21 bp, Artificial Sequence
  primer
attccagagggacatgctgac

SEQ ID NO: 61628 - DNA, 38 bp, Artificial Sequence
  primer
gtaaaacgacggccagtgctgtgttggtgctggtattg

SEQ ID NO: 61629 - DNA, 39 bp, Artificial Sequence
  primer
gtaaaacgacggccagtttagcctaagctgtggaacctg

SEQ ID NO: 61630 - DNA, 38 bp, Artificial Sequence
  primer
gtaaaacgacggccagtctctgtaccctgccagtgttg

SEQ ID NO: 61631 - DNA, 21 bp, Artificial Sequence
  primer
ttctctctgaggacgggtgtc

SEQ ID NO: 61632 - DNA, 23 bp, Artificial Sequence
  primer
gcctttaataatatgctgtgggc

SEQ ID NO: 61633 - DNA, 21 bp, Artificial Sequence
  primer
tctccaggaaaggaaagcctc

SEQ ID NO: 61634 - DNA, 38 bp, Artificial Sequence
  primer
gtaaaacgacggccagtggaggctcagagaacataggc

SEQ ID NO: 61635 - DNA, 38 bp, Artificial Sequence
  primer
gtaaaacgacggccagtctgtgcctgagactggaaatc

SEQ ID NO: 61636 - DNA, 22 bp, Artificial Sequence
  primer
gggagaaggaaacaattcttcg

SEQ ID NO: 61637 - DNA, 40 bp, Artificial Sequence
  primer
gtaaaacgacggccagttctctttacccttctggcatagc

SEQ ID NO: 61638 - DNA, 38 bp, Artificial Sequence
  primer
gtaaaacgacggccagttgggatcaatgttaagttggc

SEQ ID NO: 61639 - DNA, 38 bp, Artificial Sequence
  primer
gtaaaacgacggccagtaagtgagcatttgcctaagcg

SEQ ID NO: 61640 - DNA, 40 bp, Artificial Sequence
  primer
gtaaaacgacggccagtccactaggttggactatgctctg

SEQ ID NO: 61641 - DNA, 38 bp, Artificial Sequence
  primer
gtaaaacgacggccagtagtgtctttgctttgcttccc

SEQ ID NO: 61642 - DNA, 22 bp, Artificial Sequence
  primer
cctcctttaggttaggtgaggc

SEQ ID NO: 61643 - DNA, 38 bp, Artificial Sequence
  primer
gtaaaacgacggccagtgacagactccctttcccacag

SEQ ID NO: 61644 - DNA, 21 bp, Artificial Sequence
  primer
tgcccttgatacttagtgcgg

SEQ ID NO: 61645 - DNA, 21 bp, Artificial Sequence
  primer
tcaaactggctccaataaggc

SEQ ID NO: 61646 - DNA, 20 bp, Artificial Sequence
  primer
gggagcagtacctaggagcc

SEQ ID NO: 61647 - DNA, 38 bp, Artificial Sequence
  primer
gtaaaacgacggccagtgctgctagaaatggcaagacc

SEQ ID NO: 61648 - DNA, 40 bp, Artificial Sequence
  primer
gtaaaacgacggccagttgctgttcatatcactgggaaag

SEQ ID NO: 61649 - DNA, 39 bp, Artificial Sequence
  primer
gtaaaacgacggccagtgaatcatagctttcctgttggc

SEQ ID NO: 61650 - DNA, 21 bp, Artificial Sequence
  primer
gggtcttacctgtattcccgc

SEQ ID NO: 61651 - DNA, 21 bp, Artificial Sequence
  primer
ctgtgtgggtttgatttcagg

SEQ ID NO: 61652 - DNA, 37 bp, Artificial Sequence
  primer
gtaaaacgacggccagtatgtgtgttgccgtgttcag

SEQ ID NO: 61653 - DNA, 21 bp, Artificial Sequence
  primer
ggaggctgtcaatcctgtctc

SEQ ID NO: 61654 - DNA, 37 bp, Artificial Sequence
  primer
gtaaaacgacggccagtgcgtcttgcaggagactttg

SEQ ID NO: 61655 - DNA, 38 bp, Artificial Sequence
  primer
gtaaaacgacggccagttcaggctcaatggcttgatag

SEQ ID NO: 61656 - DNA, 20 bp, Artificial Sequence
  primer
agaagttctccgaagggtgg

SEQ ID NO: 61657 - DNA, 38 bp, Artificial Sequence
  primer
gtaaaacgacggccagtctatccttacccgtgacagcc

SEQ ID NO: 61658 - DNA, 39 bp, Artificial Sequence
  primer
gtaaaacgacggccagtggctgcaaataaatgaggtagg

SEQ ID NO: 61659 - DNA, 20 bp, Artificial Sequence
  primer
aaatatgttgggttcatggc

SEQ ID NO: 61660 - DNA, 38 bp, Artificial Sequence
  primer
gtaaaacgacggccagtctctgtcaggttcagggtgtg

SEQ ID NO: 61661 - DNA, 20 bp, Artificial Sequence
  primer
ttctggattcccgtttgttg

SEQ ID NO: 61662 - DNA, 38 bp, Artificial Sequence
  primer
gtaaaacgacggccagtctgcctgtttgagaagtgctg

SEQ ID NO: 61663 - DNA, 39 bp, Artificial Sequence
  primer
gtaaaacgacggccagttggaatatcccgctaacagatg

SEQ ID NO: 61664 - DNA, 38 bp, Artificial Sequence
  primer
gtaaaacgacggccagtatatccctcctgtctccgtcc

SEQ ID NO: 61665 - DNA, 37 bp, Artificial Sequence
  primer
gtaaaacgacggccagtccatcttcatggagcagcag

SEQ ID NO: 61666 - DNA, 19 bp, Artificial Sequence
  primer
ctgccgagtcttcccttcc

SEQ ID NO: 61667 - DNA, 19 bp, Artificial Sequence
  primer
ctgcacaacgtgatccacc

SEQ ID NO: 61668 - DNA, 38 bp, Artificial Sequence
  primer
gtaaaacgacggccagtaagtctttgcagcctcgctac

SEQ ID NO: 61669 - DNA, 21 bp, Artificial Sequence
  primer
agattatggactcacctcgcc

SEQ ID NO: 61670 - DNA, 38 bp, Artificial Sequence
  primer
gtaaaacgacggccagtggtttagctggcaagaaggag

SEQ ID NO: 61671 - DNA, 47 bp, Artificial Sequence
  primer
gtaaaacgacggccagtccacctcaatacatttctctatctctaatc

SEQ ID NO: 61672 - DNA, 25 bp, Artificial Sequence
  primer
tctagttcttgagtttagtggtggg

SEQ ID NO: 61673 - DNA, 39 bp, Artificial Sequence
  primer
gtaaaacgacggccagtaaatcaccgatttaccacaagg

SEQ ID NO: 61674 - DNA, 19 bp, Artificial Sequence
  primer
ttgtaggaagggtccagcg

SEQ ID NO: 61675 - DNA, 41 bp, Artificial Sequence
  primer
gtaaaacgacggccagttgagaagcattgtgttagatcctg

SEQ ID NO: 61676 - DNA, 27 bp, Artificial Sequence
  primer
tcttaggatttatttactgtctttgga

SEQ ID NO: 61677 - DNA, 24 bp, Artificial Sequence
  primer
agaaggatgccagatataaacaca

SEQ ID NO: 61678 - DNA, 41 bp, Artificial Sequence
  primer
gtaaaacgacggccagtttgccagaactgttgattatgaaa

SEQ ID NO: 61679 - DNA, 44 bp, Artificial Sequence
  primer
gtaaaacgacggccagtttctgaatagaaccagttgatttgttt

SEQ ID NO: 61680 - DNA, 23 bp, Artificial Sequence
  primer
tcttcctcattaatgtgtggttt

SEQ ID NO: 61681 - DNA, 37 bp, Artificial Sequence
  primer
gtaaaacgacggccagtgatcaaaccagcaaactcgg

SEQ ID NO: 61682 - DNA, 24 bp, Artificial Sequence
  primer
tgcatgtaataaattggagggaag

SEQ ID NO: 61683 - DNA, 37 bp, Artificial Sequence
  primer
gtaaaacgacggccagtttgttgtgactgctgccttg

SEQ ID NO: 61684 - DNA, 38 bp, Artificial Sequence
  primer
gtaaaacgacggccagtttgaatgacttgagcacaggc

SEQ ID NO: 61685 - DNA, 36 bp, Artificial Sequence
  primer
gtaaaacgacggccagtactacaagcccgccctttc

SEQ ID NO: 61686 - DNA, 38 bp, Artificial Sequence
  primer
gtaaaacgacggccagtgttgaataccagcttgttggg

SEQ ID NO: 61687 - DNA, 20 bp, Artificial Sequence
  primer
tgcagtaagcccagattgtg

SEQ ID NO: 61688 - DNA, 39 bp, Artificial Sequence
  primer
gtaaaacgacggccagtaaccatttccctatctgtggac

SEQ ID NO: 61689 - DNA, 41 bp, Artificial Sequence
  primer
gtaaaacgacggccagttgtgcatgtcataggaaatgagtc

SEQ ID NO: 61690 - DNA, 21 bp, Artificial Sequence
  primer
ccacagaagtgacattgagcc

SEQ ID NO: 61691 - DNA, 38 bp, Artificial Sequence
  primer
gtaaaacgacggccagtaaactctagtgatcctcccgc

SEQ ID NO: 61692 - DNA, 39 bp, Artificial Sequence
  primer
gtaaaacgacggccagttgcagagtcaagtcatagcgac

SEQ ID NO: 61693 - DNA, 19 bp, Artificial Sequence
  primer
ccactggatgcattggaac

SEQ ID NO: 61694 - DNA, 21 bp, Artificial Sequence
  primer
atttgatgggttacaccaggc

SEQ ID NO: 61695 - DNA, 39 bp, Artificial Sequence
  primer
gtaaaacgacggccagtgcacctttaagaggacggttag

SEQ ID NO: 61696 - DNA, 38 bp, Artificial Sequence
  primer
gtaaaacgacggccagtgttcatggagcaagaactggg

SEQ ID NO: 61697 - DNA, 38 bp, Artificial Sequence
  primer
gtaaaacgacggccagtagactgggcagggatgttatc

SEQ ID NO: 61698 - DNA, 21 bp, Artificial Sequence
  primer
aaggttctgaagaggctggag

SEQ ID NO: 61699 - DNA, 38 bp, Artificial Sequence
  primer
gtaaaacgacggccagtgacatcaactacgagggcctg

SEQ ID NO: 61700 - DNA, 21 bp, Artificial Sequence
  primer
cacacacacgctgtccttaca

SEQ ID NO: 61701 - DNA, 21 bp, Artificial Sequence
  primer
agccctggctttaactgtttg

SEQ ID NO: 61702 - DNA, 21 bp, Artificial Sequence
  primer
cctggttaggttcagactgcc

SEQ ID NO: 61703 - DNA, 41 bp, Artificial Sequence
  primer
gtaaaacgacggccagtaaatttgccagtctcttcatatcc

SEQ ID NO: 61704 - DNA, 38 bp, Artificial Sequence
  primer
gtaaaacgacggccagtatttggaaacgaattatgccg

SEQ ID NO: 61705 - DNA, 21 bp, Artificial Sequence
  primer
ggagcttgaacacctctggtc

SEQ ID NO: 61706 - DNA, 21 bp, Artificial Sequence
  primer
ctgcactggagttcctcaaag

SEQ ID NO: 61707 - DNA, 21 bp, Artificial Sequence
  primer
ctaaagagcctgattcctggc

SEQ ID NO: 61708 - DNA, 42 bp, Artificial Sequence
  primer
gtaaaacgacggccagttgaaatatagtgtgtcagtggcatc

SEQ ID NO: 61709 - DNA, 23 bp, Artificial Sequence
  primer
tcacctctatcaaagactgtggc

SEQ ID NO: 61710 - DNA, 38 bp, Artificial Sequence
  primer
gtaaaacgacggccagtaggagctggtctgtggatctg

SEQ ID NO: 61711 - DNA, 22 bp, Artificial Sequence
  primer
tgccagtatgatttaaggtcgc

SEQ ID NO: 61712 - DNA, 38 bp, Artificial Sequence
  primer
gtaaaacgacggccagtctggatagagttcagggaggc

SEQ ID NO: 61713 - DNA, 38 bp, Artificial Sequence
  primer
gtaaaacgacggccagtagagtggagtcgcattgtgag

SEQ ID NO: 61714 - DNA, 21 bp, Artificial Sequence
  primer
cgctggagatttccatttgtc

SEQ ID NO: 61715 - DNA, 19 bp, Artificial Sequence
  primer
cagagacgggtgaagggtc

SEQ ID NO: 61716 - DNA, 38 bp, Artificial Sequence
  primer
gtaaaacgacggccagtgctggattgtggttgactgag

SEQ ID NO: 61717 - DNA, 40 bp, Artificial Sequence
  primer
gtaaaacgacggccagttggctttgaatacacaagctttc

SEQ ID NO: 61718 - DNA, 38 bp, Artificial Sequence
  primer
gtaaaacgacggccagtccagactggctgggaatagac

SEQ ID NO: 61719 - DNA, 38 bp, Artificial Sequence
  primer
gtaaaacgacggccagtggaagcaggctggatttattg

SEQ ID NO: 61720 - DNA, 38 bp, Artificial Sequence
  primer
gtaaaacgacggccagtcttattggctggccaggttac

SEQ ID NO: 61721 - DNA, 21 bp, Artificial Sequence
  primer
catgggcatttcacccatatc

SEQ ID NO: 61722 - DNA, 37 bp, Artificial Sequence
  primer
gtaaaacgacggccagtcccagctacaccctcttcag

SEQ ID NO: 61723 - DNA, 38 bp, Artificial Sequence
  primer
gtaaaacgacggccagtaggcagccatgtttgttaagg

SEQ ID NO: 61724 - DNA, 38 bp, Artificial Sequence
  primer
gtaaaacgacggccagtttgttaaacccttgggacctg

SEQ ID NO: 61725 - DNA, 21 bp, Artificial Sequence
  primer
ttgttaaacccttgggacctg

SEQ ID NO: 61726 - DNA, 38 bp, Artificial Sequence
  primer
gtaaaacgacggccagtaggatggcaggtacagagcag

SEQ ID NO: 61727 - DNA, 21 bp, Artificial Sequence
  primer
tttgcccagttggtaaacctc

SEQ ID NO: 61728 - DNA, 39 bp, Artificial Sequence
  primer
gtaaaacgacggccagtagcaagtgaaggtaagactgcc

SEQ ID NO: 61729 - DNA, 41 bp, Artificial Sequence
  primer
gtaaaacgacggccagtttatgcagaaattaccttgctgtt

SEQ ID NO: 61730 - DNA, 23 bp, Artificial Sequence
  primer
cagttcctttgtcagtgaattgg

SEQ ID NO: 61731 - DNA, 20 bp, Artificial Sequence
  primer
tgcaacctcttccattcacc

SEQ ID NO: 61732 - DNA, 39 bp, Artificial Sequence
  primer
gtaaaacgacggccagtttgggaagtaggctttatgcag

SEQ ID NO: 61733 - DNA, 38 bp, Artificial Sequence
  primer
gtaaaacgacggccagttttggttgaaacctatgctgc

SEQ ID NO: 61734 - DNA, 37 bp, Artificial Sequence
  primer
gtaaaacgacggccagtatgtgtcttggaagcatggg

SEQ ID NO: 61735 - DNA, 21 bp, Artificial Sequence
  primer
cctgtggtgacgcacttattc

SEQ ID NO: 61736 - DNA, 39 bp, Artificial Sequence
  primer
gtaaaacgacggccagttgatcttacacaaggagggagg

SEQ ID NO: 61737 - DNA, 21 bp, Artificial Sequence
  primer
tggatctcagtgttgcaaagg

SEQ ID NO: 61738 - DNA, 19 bp, Artificial Sequence
  primer
gtagtgcgcgtgagcagtc

SEQ ID NO: 61739 - DNA, 43 bp, Artificial Sequence
  primer
gtaaaacgacggccagttgatgtggttattacaatcataagga

SEQ ID NO: 61740 - DNA, 35 bp, Artificial Sequence
  primer
gtaaaacgacggccagtccacctccttcctgcctc

SEQ ID NO: 61741 - DNA, 38 bp, Artificial Sequence
  primer
gtaaaacgacggccagtactcattagatgggtgggagg

SEQ ID NO: 61742 - DNA, 21 bp, Artificial Sequence
  primer
taccacccggatagcacctac

SEQ ID NO: 61743 - DNA, 39 bp, Artificial Sequence
  primer
gtaaaacgacggccagtcctccgtgatctacttcctgtg

SEQ ID NO: 61744 - DNA, 21 bp, Artificial Sequence
  primer
gtactgctgctctgggtctgg

SEQ ID NO: 61745 - DNA, 21 bp, Artificial Sequence
  primer
gttggcgctaacctctctcac

SEQ ID NO: 61746 - DNA, 21 bp, Artificial Sequence
  primer
ctggtgtcctgaaggtgtttg

SEQ ID NO: 61747 - DNA, 18 bp, Artificial Sequence
  primer
caccacgcccaactcatt

SEQ ID NO: 61748 - DNA, 38 bp, Artificial Sequence
  primer
gtaaaacgacggccagtgtctcaaagctgggtgtctcc

SEQ ID NO: 61749 - DNA, 21 bp, Artificial Sequence
  primer
cgacatcctgcctctacactg

SEQ ID NO: 61750 - DNA, 38 bp, Artificial Sequence
  primer
gtaaaacgacggccagtacctgctgctattcaaggacc

SEQ ID NO: 61751 - DNA, 38 bp, Artificial Sequence
  primer
gtaaaacgacggccagttttcctgtcgatggtatcgtg

SEQ ID NO: 61752 - DNA, 38 bp, Artificial Sequence
  primer
gtaaaacgacggccagtgcagtgtcaggttgatggttg

SEQ ID NO: 61753 - DNA, 38 bp, Artificial Sequence
  primer
gtaaaacgacggccagtcagtttatcgcatctggaccc

SEQ ID NO: 61754 - DNA, 19 bp, Artificial Sequence
  primer
cagcaggaagctaccgagg

SEQ ID NO: 61755 - DNA, 21 bp, Artificial Sequence
  primer
gagctgtgatgtcctcagtgg

SEQ ID NO: 61756 - DNA, 35 bp, Artificial Sequence
  primer
gtaaaacgacggccagtgaggccatccctctttgg

SEQ ID NO: 61757 - DNA, 38 bp, Artificial Sequence
  primer
gtaaaacgacggccagtggagtcctttgctgacctctg

SEQ ID NO: 61758 - DNA, 37 bp, Artificial Sequence
  primer
gtaaaacgacggccagtatccctgacgccctacagag

SEQ ID NO: 61759 - DNA, 36 bp, Artificial Sequence
  primer
gtaaaacgacggccagtctgtaggtgccaagggagg

SEQ ID NO: 61760 - DNA, 38 bp, Artificial Sequence
  primer
gtaaaacgacggccagttatcctggaggtgaatggcag

SEQ ID NO: 61761 - DNA, 35 bp, Artificial Sequence
  primer
gtaaaacgacggccagtgtgcgccctcttactcgg

SEQ ID NO: 61762 - DNA, 25 bp, Artificial Sequence
  primer
aagcaagtgttggctgttatttatg

SEQ ID NO: 61763 - DNA, 24 bp, Artificial Sequence
  primer
cactgtaagttctgcaatggtttg

SEQ ID NO: 61764 - DNA, 19 bp, Artificial Sequence
  primer
gggtgacagcgagactgtg

SEQ ID NO: 61765 - DNA, 38 bp, Artificial Sequence
  primer
gtaaaacgacggccagttttgatgggaagtatgaagcc

SEQ ID NO: 61766 - DNA, 22 bp, Artificial Sequence
  primer
gggcttggtttatcgatcttac

SEQ ID NO: 61767 - DNA, 39 bp, Artificial Sequence
  primer
gtaaaacgacggccagttcctctcttaaagccttctcca

SEQ ID NO: 61768 - DNA, 19 bp, Artificial Sequence
  primer
tgcaaactcccaacctcag

SEQ ID NO: 61769 - DNA, 36 bp, Artificial Sequence
  primer
gtaaaacgacggccagtaccctctgaggtgggaacc

SEQ ID NO: 61770 - DNA, 18 bp, Artificial Sequence
  primer
tataggcctgagtgccgc

SEQ ID NO: 61771 - DNA, 21 bp, Artificial Sequence
  primer
tcttattgccacctgttgctg

SEQ ID NO: 61772 - DNA, 39 bp, Artificial Sequence
  primer
gtaaaacgacggccagttgaatggctacaaacatccaaa

SEQ ID NO: 61773 - DNA, 26 bp, Artificial Sequence
  primer
agaaggctttgagtataagtacctgg

SEQ ID NO: 61774 - DNA, 39 bp, Artificial Sequence
  primer
gtaaaacgacggccagttgtgaacttcatggttgcattt

SEQ ID NO: 61775 - DNA, 22 bp, Artificial Sequence
  primer
tcacgtgatacatctctgtccc

SEQ ID NO: 61776 - DNA, 21 bp, Artificial Sequence
  primer
ctgaggtcaggcgtaggtagg

SEQ ID NO: 61777 - DNA, 20 bp, Artificial Sequence
  primer
gcccgcatttcattacagtg

SEQ ID NO: 61778 - DNA, 25 bp, Artificial Sequence
  primer
gggctattggaataagagtttgttg

SEQ ID NO: 61779 - DNA, 39 bp, Artificial Sequence
  primer
gtaaaacgacggccagttcccaggagttcttgcatattg

SEQ ID NO: 61780 - DNA, 37 bp, Artificial Sequence
  primer
gtaaaacgacggccagtaaggaggtgggtacacctgg

SEQ ID NO: 61781 - DNA, 42 bp, Artificial Sequence
  primer
gtaaaacgacggccagttggatccataatatttcatcacttg

SEQ ID NO: 61782 - DNA, 20 bp, Artificial Sequence
  primer
gtttgctcaggatgcaatgg

SEQ ID NO: 61783 - DNA, 21 bp, Artificial Sequence
  primer
caagctttaccaaggcaggac

SEQ ID NO: 61784 - DNA, 19 bp, Artificial Sequence
  primer
agaccgttgtcccgaagag

SEQ ID NO: 61785 - DNA, 40 bp, Artificial Sequence
  primer
gtaaaacgacggccagtgggtgctgtctaaatgtctaagc

SEQ ID NO: 61786 - DNA, 42 bp, Artificial Sequence
  primer
gtaaaacgacggccagtctccttagttctggattatggattg

SEQ ID NO: 61787 - DNA, 22 bp, Artificial Sequence
  primer
ttaactcgaaagcaagtgatgg

SEQ ID NO: 61788 - DNA, 21 bp, Artificial Sequence
  primer
tgcacacactaagcccaaata

SEQ ID NO: 61789 - DNA, 21 bp, Artificial Sequence
  primer
aggagatctctgagtccacgg

SEQ ID NO: 61790 - DNA, 21 bp, Artificial Sequence
  primer
aagatcccgaagtattgaccg

SEQ ID NO: 61791 - DNA, 21 bp, Artificial Sequence
  primer
aagacaaagatgataggcggc

SEQ ID NO: 61792 - DNA, 21 bp, Artificial Sequence
  primer
tatacgtactgggaccctcgc

SEQ ID NO: 61793 - DNA, 38 bp, Artificial Sequence
  primer
gtaaaacgacggccagttgtcctcaagccctcattctc

SEQ ID NO: 61794 - DNA, 25 bp, Artificial Sequence
  primer
aagaaatatttgagtgcatgagtgc

SEQ ID NO: 61795 - DNA, 38 bp, Artificial Sequence
  primer
gtaaaacgacggccagtggtacagaggcaagatggagg

SEQ ID NO: 61796 - DNA, 21 bp, Artificial Sequence
  primer
agaggagcatttgagtctggg

SEQ ID NO: 61797 - DNA, 37 bp, Artificial Sequence
  primer
gtaaaacgacggccagtagctgtcccttagccagacc

SEQ ID NO: 61798 - DNA, 38 bp, Artificial Sequence
  primer
gtaaaacgacggccagtctttggagaacacagccaacc

SEQ ID NO: 61799 - DNA, 38 bp, Artificial Sequence
  primer
gtaaaacgacggccagtctctctgccacctgaataccc

SEQ ID NO: 61800 - DNA, 21 bp, Artificial Sequence
  primer
gcccaggagacttctatctgc

SEQ ID NO: 61801 - DNA, 20 bp, Artificial Sequence
  primer
ctgggctgagctcatctgtc

SEQ ID NO: 61802 - DNA, 37 bp, Artificial Sequence
  primer
gtaaaacgacggccagtgacctgagggcgagtatgtg

SEQ ID NO: 61803 - DNA, 37 bp, Artificial Sequence
  primer
gtaaaacgacggccagtcagaggcagcagtcttggag

SEQ ID NO: 61804 - DNA, 21 bp, Artificial Sequence
  primer
caagtgagcacaagcttccag

SEQ ID NO: 61805 - DNA, 21 bp, Artificial Sequence
  primer
gtgagatgacacggagtgagg

SEQ ID NO: 61806 - DNA, 38 bp, Artificial Sequence
  primer
gtaaaacgacggccagtagggaaacaggactgggaaag

SEQ ID NO: 61807 - DNA, 22 bp, Artificial Sequence
  primer
cccatttcttcccaaatgtacc

SEQ ID NO: 61808 - DNA, 38 bp, Artificial Sequence
  primer
gtaaaacgacggccagtagccaacttcaggtaaccacc

SEQ ID NO: 61809 - DNA, 37 bp, Artificial Sequence
  primer
gtaaaacgacggccagtagaggagaagaggctggctg

SEQ ID NO: 61810 - DNA, 37 bp, Artificial Sequence
  primer
gtaaaacgacggccagtgaaggtttctgaacctgccc

SEQ ID NO: 61811 - DNA, 21 bp, Artificial Sequence
  primer
gaaatgagatgggacagtggg

SEQ ID NO: 61812 - DNA, 38 bp, Artificial Sequence
  primer
gtaaaacgacggccagtaacctctcatgtttgcatccc

SEQ ID NO: 61813 - DNA, 38 bp, Artificial Sequence
  primer
gtaaaacgacggccagtctgttgtcattcccacattgc

SEQ ID NO: 61814 - DNA, 37 bp, Artificial Sequence
  primer
gtaaaacgacggccagtgctgaggtccaggtgagaag

SEQ ID NO: 61815 - DNA, 38 bp, Artificial Sequence
  primer
gtaaaacgacggccagttaccaactccgagtgacatgg

SEQ ID NO: 61816 - DNA, 20 bp, Artificial Sequence
  primer
gtaggcacatgaatgggtgg

SEQ ID NO: 61817 - DNA, 19 bp, Artificial Sequence
  primer
ctcagctccttgctgctcc

SEQ ID NO: 61818 - DNA, 37 bp, Artificial Sequence
  primer
gtaaaacgacggccagtctaagaggcggagccaactg

SEQ ID NO: 61819 - DNA, 21 bp, Artificial Sequence
  primer
agctgcctggactatgctctc

SEQ ID NO: 61820 - DNA, 21 bp, Artificial Sequence
  primer
aagcctagggtatcacccacc

SEQ ID NO: 61821 - DNA, 38 bp, Artificial Sequence
  primer
gtaaaacgacggccagtagaaccagtgcattaggccac

SEQ ID NO: 61822 - DNA, 38 bp, Artificial Sequence
  primer
gtaaaacgacggccagtcttggcacgtgataggtgttg

SEQ ID NO: 61823 - DNA, 21 bp, Artificial Sequence
  primer
agtcacaccatcattgccatc

SEQ ID NO: 61824 - DNA, 21 bp, Artificial Sequence
  primer
gagactgagggtcattccagg

SEQ ID NO: 61825 - DNA, 38 bp, Artificial Sequence
  primer
gtaaaacgacggccagtcacagcttcctgttgctatgg

SEQ ID NO: 61826 - DNA, 20 bp, Artificial Sequence
  primer
tcagtgagccatgtttgtgc

SEQ ID NO: 61827 - DNA, 38 bp, Artificial Sequence
  primer
gtaaaacgacggccagtggaatccttatttcgcgctac

SEQ ID NO: 61828 - DNA, 38 bp, Artificial Sequence
  primer
gtaaaacgacggccagttgtactgagtcctgcgagtcc

SEQ ID NO: 61829 - DNA, 38 bp, Artificial Sequence
  primer
gtaaaacgacggccagtaagcaagcagtgatcttgcag

SEQ ID NO: 61830 - DNA, 38 bp, Artificial Sequence
  primer
gtaaaacgacggccagtgatgggaggagcactaggaag

SEQ ID NO: 61831 - DNA, 35 bp, Artificial Sequence
  primer
gtaaaacgacggccagtaggccagacagggtttgc

SEQ ID NO: 61832 - DNA, 37 bp, Artificial Sequence
  primer
gtaaaacgacggccagtctcactgagggcaggaagag

SEQ ID NO: 61833 - DNA, 38 bp, Artificial Sequence
  primer
gtaaaacgacggccagtctatgtgggatggagaatggg

SEQ ID NO: 61834 - DNA, 38 bp, Artificial Sequence
  primer
gtaaaacgacggccagtcacatgctgtcacctctggac

SEQ ID NO: 61835 - DNA, 38 bp, Artificial Sequence
  primer
gtaaaacgacggccagttgcccagttgttgtttagacc

SEQ ID NO: 61836 - DNA, 27 bp, Artificial Sequence
  primer
tgagatcaattatatgcttcttgaatg

SEQ ID NO: 61837 - DNA, 38 bp, Artificial Sequence
  primer
gtaaaacgacggccagtatgacattgacctttgcgttg

SEQ ID NO: 61838 - DNA, 38 bp, Artificial Sequence
  primer
gtaaaacgacggccagttgactgaggctctgatgttgg

SEQ ID NO: 61839 - DNA, 20 bp, Artificial Sequence
  primer
actgacctgcgtccactgtc

SEQ ID NO: 61840 - DNA, 26 bp, Artificial Sequence
  primer
agaaacaccattctaacacctagctt

SEQ ID NO: 61841 - DNA, 40 bp, Artificial Sequence
  primer
gtaaaacgacggccagtttagaggccacagctttgattag

SEQ ID NO: 61842 - DNA, 21 bp, Artificial Sequence
  primer
tattcccaattcaggtccagg

SEQ ID NO: 61843 - DNA, 38 bp, Artificial Sequence
  primer
gtaaaacgacggccagtggcctgcttggtctttgatac

SEQ ID NO: 61844 - DNA, 38 bp, Artificial Sequence
  primer
gtaaaacgacggccagtgcatcagagtcaccacttccc

SEQ ID NO: 61845 - DNA, 38 bp, Artificial Sequence
  primer
gtaaaacgacggccagtttggcagatgcctgcatataa

SEQ ID NO: 61846 - DNA, 27 bp, Artificial Sequence
  primer
atactttctcctagtctgcagctttac

SEQ ID NO: 61847 - DNA, 22 bp, Artificial Sequence
  primer
gttcagagtgctttcaaattgc

SEQ ID NO: 61848 - DNA, 39 bp, Artificial Sequence
  primer
gtaaaacgacggccagtttacaaagtggaagaaggtggc

SEQ ID NO: 61849 - DNA, 38 bp, Artificial Sequence
  primer
gtaaaacgacggccagtgcagaggaaatcctcgatgta

SEQ ID NO: 61850 - DNA, 41 bp, Artificial Sequence
  primer
gtaaaacgacggccagttcacagttaatgtgggagcaatag

SEQ ID NO: 61851 - DNA, 23 bp, Artificial Sequence
  primer
tgttaccttacaggtgcaaatga

SEQ ID NO: 61852 - DNA, 25 bp, Artificial Sequence
  primer
tcactggaaagcttacagttgagac

SEQ ID NO: 61853 - DNA, 41 bp, Artificial Sequence
  primer
gtaaaacgacggccagttggctgttaaactagcaattgagc

SEQ ID NO: 61854 - DNA, 21 bp, Artificial Sequence
  primer
tcaggaatcagtgtctgtccc

SEQ ID NO: 61855 - DNA, 43 bp, Artificial Sequence
  primer
gtaaaacgacggccagtttgaggttggtatcaattattgtctg

SEQ ID NO: 61856 - DNA, 21 bp, Artificial Sequence
  primer
cgatgcagttgtggtagttgc

SEQ ID NO: 61857 - DNA, 42 bp, Artificial Sequence
  primer
gtaaaacgacggccagttcctttgagcttagagaattacaaa

SEQ ID NO: 61858 - DNA, 44 bp, Artificial Sequence
  primer
gtaaaacgacggccagttgtttgagttcatttatagtcagaggg

SEQ ID NO: 61859 - DNA, 44 bp, Artificial Sequence
  primer
gtaaaacgacggccagtattgaacataaatagcactatatgcag

SEQ ID NO: 61860 - DNA, 18 bp, Artificial Sequence
  primer
tctgtggcctggaggttg

SEQ ID NO: 61861 - DNA, 39 bp, Artificial Sequence
  primer
gtaaaacgacggccagtggattagttgtgccatgtttgc

SEQ ID NO: 61862 - DNA, 46 bp, Artificial Sequence
  primer
gtaaaacgacggccagttcaagatctagagtaagcatatattggaa

SEQ ID NO: 61863 - DNA, 18 bp, Artificial Sequence
  primer
tgtgaggcggaagaatgg

SEQ ID NO: 61864 - DNA, 40 bp, Artificial Sequence
  primer
gtaaaacgacggccagttgaatgacccattacttgtagcc

SEQ ID NO: 61865 - DNA, 23 bp, Artificial Sequence
  primer
cacagcctgtactcaatcactcc

SEQ ID NO: 61866 - DNA, 20 bp, Artificial Sequence
  primer
catctctgacccttgccaac

SEQ ID NO: 61867 - DNA, 21 bp, Artificial Sequence
  primer
gccacatacagttcgaaggac

SEQ ID NO: 61868 - DNA, 44 bp, Artificial Sequence
  primer
gtaaaacgacggccagtttctaagtcactggagaacattatttg

SEQ ID NO: 61869 - DNA, 38 bp, Artificial Sequence
  primer
gtaaaacgacggccagtctaaagtgttggagtgcaggg

SEQ ID NO: 61870 - DNA, 40 bp, Artificial Sequence
  primer
gtaaaacgacggccagtttcatctctgaaggaagaggaaa

SEQ ID NO: 61871 - DNA, 37 bp, Artificial Sequence
  primer
gtaaaacgacggccagtaccaggattcgacaaggcag

SEQ ID NO: 61872 - DNA, 25 bp, Artificial Sequence
  primer
agtaatatcaatttcatagctgggc

SEQ ID NO: 61873 - DNA, 38 bp, Artificial Sequence
  primer
gtaaaacgacggccagtgctgtcagctacatagtcgcc

SEQ ID NO: 61874 - DNA, 39 bp, Artificial Sequence
  primer
gtaaaacgacggccagttcagataccacagcctttcctc

SEQ ID NO: 61875 - DNA, 38 bp, Artificial Sequence
  primer
gtaaaacgacggccagtttgcttcagaattgcttgtgg

SEQ ID NO: 61876 - DNA, 24 bp, Artificial Sequence
  primer
agaatcctgtgaaattggaaagag

SEQ ID NO: 61877 - DNA, 21 bp, Artificial Sequence
  primer
ccttatgcaacagtggacagg

SEQ ID NO: 61878 - DNA, 38 bp, Artificial Sequence
  primer
gtaaaacgacggccagtttctggtaatgcctggtttca

SEQ ID NO: 61879 - DNA, 21 bp, Artificial Sequence
  primer
ttagagggatgatgaggaggg

SEQ ID NO: 61880 - DNA, 21 bp, Artificial Sequence
  primer
taagaagccacagatgccttg

SEQ ID NO: 61881 - DNA, 22 bp, Artificial Sequence
  primer
tgaggatatgtcattgcagtcg

SEQ ID NO: 61882 - DNA, 23 bp, Artificial Sequence
  primer
tttcgcatatttgtatgacagag

SEQ ID NO: 61883 - DNA, 22 bp, Artificial Sequence
  primer
tcaggacagtttacagcacagg

SEQ ID NO: 61884 - DNA, 19 bp, Artificial Sequence
  primer
cgttggtctgcagctcctt

SEQ ID NO: 61885 - DNA, 20 bp, Artificial Sequence
  primer
cctggctgaggctaatctcc

SEQ ID NO: 61886 - DNA, 38 bp, Artificial Sequence
  primer
gtaaaacgacggccagttggtcctgagacccacttctc

SEQ ID NO: 61887 - DNA, 23 bp, Artificial Sequence
  primer
gcagtttgtgtcttctacttccc

SEQ ID NO: 61888 - DNA, 21 bp, Artificial Sequence
  primer
tgagctcacccttgaacattg

SEQ ID NO: 61889 - DNA, 18 bp, Artificial Sequence
  primer
aggcatgagccactgtgc

SEQ ID NO: 61890 - DNA, 38 bp, Artificial Sequence
  primer
gtaaaacgacggccagtatatctgggacgcattcactg

SEQ ID NO: 61891 - DNA, 22 bp, Artificial Sequence
  primer
cgggagacagacctctgcttag

SEQ ID NO: 61892 - DNA, 21 bp, Artificial Sequence
  primer
gcagggatgtagtctgcagtg

SEQ ID NO: 61893 - DNA, 21 bp, Artificial Sequence
  primer
tgactccttcctacacagggc

SEQ ID NO: 61894 - DNA, 37 bp, Artificial Sequence
  primer
gtaaaacgacggccagtagggaggtgaatcccagagg

SEQ ID NO: 61895 - DNA, 21 bp, Artificial Sequence
  primer
ccgacgagtcggaactatacc

SEQ ID NO: 61896 - DNA, 38 bp, Artificial Sequence
  primer
gtaaaacgacggccagttacctgtctggctgcagtttg

SEQ ID NO: 61897 - DNA, 21 bp, Artificial Sequence
  primer
gccagcttcagtgtgtgtgag

SEQ ID NO: 61898 - DNA, 21 bp, Artificial Sequence
  primer
tcaaaggaagttcccagttgc

SEQ ID NO: 61899 - DNA, 21 bp, Artificial Sequence
  primer
gtgagtgcaccaggaactgag

SEQ ID NO: 61900 - DNA, 38 bp, Artificial Sequence
  primer
gtaaaacgacggccagtcctgctaaaccctagcacctg

SEQ ID NO: 61901 - DNA, 37 bp, Artificial Sequence
  primer
gtaaaacgacggccagtgccttcctgcctttgaactg

SEQ ID NO: 61902 - DNA, 43 bp, Artificial Sequence
  primer
gtaaaacgacggccagtgatctgagttagtggttaacatcctg

SEQ ID NO: 61903 - DNA, 23 bp, Artificial Sequence
  primer
aatgacaattgtggttcaagctc

SEQ ID NO: 61904 - DNA, 38 bp, Artificial Sequence
  primer
gtaaaacgacggccagttctgcctttggaacatttgtg

SEQ ID NO: 61905 - DNA, 22 bp, Artificial Sequence
  primer
tgccttcagtaaacattgagcc

SEQ ID NO: 61906 - DNA, 26 bp, Artificial Sequence
  primer
tgcatagtgcttagtaccaagtatgg

SEQ ID NO: 61907 - DNA, 38 bp, Artificial Sequence
  primer
gtaaaacgacggccagtgaggtcttggtgtctgtgtgg

SEQ ID NO: 61908 - DNA, 39 bp, Artificial Sequence
  primer
gtaaaacgacggccagtcgaaggagaggagtctgtcaac

SEQ ID NO: 61909 - DNA, 38 bp, Artificial Sequence
  primer
gtaaaacgacggccagttcagtttgcttgtgctgtctg

SEQ ID NO: 61910 - DNA, 21 bp, Artificial Sequence
  primer
aggtagggagggtagaggcag

SEQ ID NO: 61911 - DNA, 36 bp, Artificial Sequence
  primer
gtaaaacgacggccagtagtgggtcctgatgccaag

SEQ ID NO: 61912 - DNA, 40 bp, Artificial Sequence
  primer
gtaaaacgacggccagttgtgtagaatttgaaagcgttgc

SEQ ID NO: 61913 - DNA, 38 bp, Artificial Sequence
  primer
gtaaaacgacggccagtattgtggacatcagcttctgg

SEQ ID NO: 61914 - DNA, 38 bp, Artificial Sequence
  primer
gtaaaacgacggccagtttgcccacaagatgtgaagtg

SEQ ID NO: 61915 - DNA, 21 bp, Artificial Sequence
  primer
atttagagacttggcaagggc

SEQ ID NO: 61916 - DNA, 19 bp, Artificial Sequence
  primer
cgtgcccagcctttatttc

SEQ ID NO: 61917 - DNA, 38 bp, Artificial Sequence
  primer
gtaaaacgacggccagtagtacagtggaactcctgggc

SEQ ID NO: 61918 - DNA, 38 bp, Artificial Sequence
  primer
gtaaaacgacggccagtgcaagccctcctcttcattag

SEQ ID NO: 61919 - DNA, 37 bp, Artificial Sequence
  primer
gtaaaacgacggccagtacctggtcagagagtcgcac

SEQ ID NO: 61920 - DNA, 38 bp, Artificial Sequence
  primer
gtaaaacgacggccagtataagcagccctttccattcc

SEQ ID NO: 61921 - DNA, 38 bp, Artificial Sequence
  primer
gtaaaacgacggccagtagctggttagagatgccttgc

SEQ ID NO: 61922 - DNA, 38 bp, Artificial Sequence
  primer
gtaaaacgacggccagtagatggaaatggtaggcatgg

SEQ ID NO: 61923 - DNA, 21 bp, Artificial Sequence
  primer
gattgggatttgaattcaggc

SEQ ID NO: 61924 - DNA, 38 bp, Artificial Sequence
  primer
gtaaaacgacggccagtagctcatagcaatggaggtgc

SEQ ID NO: 61925 - DNA, 37 bp, Artificial Sequence
  primer
gtaaaacgacggccagtgtggcaactcagggtgtttg

SEQ ID NO: 61926 - DNA, 21 bp, Artificial Sequence
  primer
tctgtgccagagtttgctgac

SEQ ID NO: 61927 - DNA, 38 bp, Artificial Sequence
  primer
gtaaaacgacggccagtcccatttctaatccctgaggc

SEQ ID NO: 61928 - DNA, 19 bp, Artificial Sequence
  primer
ctgagagaggcgaagtggg

SEQ ID NO: 61929 - DNA, 38 bp, Artificial Sequence
  primer
gtaaaacgacggccagtaagaagcttcacctcccacag

SEQ ID NO: 61930 - DNA, 38 bp, Artificial Sequence
  primer
gtaaaacgacggccagtattctcccagaggacagcatc

SEQ ID NO: 61931 - DNA, 38 bp, Artificial Sequence
  primer
gtaaaacgacggccagtaaggagtacctggcacctgac

SEQ ID NO: 61932 - DNA, 37 bp, Artificial Sequence
  primer
gtaaaacgacggccagtgttgggtgggaagtggtagg

SEQ ID NO: 61933 - DNA, 21 bp, Artificial Sequence
  primer
ttgtccatggcctttaagttg

SEQ ID NO: 61934 - DNA, 20 bp, Artificial Sequence
  primer
tgtaccacctgtctcctggg

SEQ ID NO: 61935 - DNA, 38 bp, Artificial Sequence
  primer
gtaaaacgacggccagtaggatcctgtgagtgattggg

SEQ ID NO: 61936 - DNA, 21 bp, Artificial Sequence
  primer
tgtatgcttgctgccaaagtc

SEQ ID NO: 61937 - DNA, 38 bp, Artificial Sequence
  primer
gtaaaacgacggccagtgttgagaaccactgccatgag

SEQ ID NO: 61938 - DNA, 38 bp, Artificial Sequence
  primer
gtaaaacgacggccagtacactgaaggtgtgggatgtg

SEQ ID NO: 61939 - DNA, 38 bp, Artificial Sequence
  primer
gtaaaacgacggccagtattgtgactgtttgctggtgg

SEQ ID NO: 61940 - DNA, 38 bp, Artificial Sequence
  primer
gtaaaacgacggccagtatgtcacctggagcgagtagc

SEQ ID NO: 61941 - DNA, 21 bp, Artificial Sequence
  primer
taaaggttggatttcaaggcg

SEQ ID NO: 61942 - DNA, 38 bp, Artificial Sequence
  primer
gtaaaacgacggccagtggaagaggtaggaagggatcg

SEQ ID NO: 61943 - DNA, 20 bp, Artificial Sequence
  primer
gaaccagcaggtgaggtcag

SEQ ID NO: 61944 - DNA, 38 bp, Artificial Sequence
  primer
gtaaaacgacggccagtctggagagatggtgacagcag

SEQ ID NO: 61945 - DNA, 21 bp, Artificial Sequence
  primer
agggacaaacagttggatgct

SEQ ID NO: 61946 - DNA, 38 bp, Artificial Sequence
  primer
gtaaaacgacggccagtactcaaggaggacgaagcaac

SEQ ID NO: 61947 - DNA, 38 bp, Artificial Sequence; identical to SEQ ID NO: 61946
  primer

SEQ ID NO: 61948 - DNA, 38 bp, Artificial Sequence
  primer
gtaaaacgacggccagtagaggctttgaggcaagaaac

SEQ ID NO: 61949 - DNA, 38 bp, Artificial Sequence
  primer
gtaaaacgacggccagtaaaggaacccaagtaccagga

SEQ ID NO: 61950 - DNA, 21 bp, Artificial Sequence
  primer
tgctacctggtccctaccatc

SEQ ID NO: 61951 - DNA, 37 bp, Artificial Sequence
  primer
gtaaaacgacggccagtacatgctgagcttctgtggg

SEQ ID NO: 61952 - DNA, 38 bp, Artificial Sequence
  primer
gtaaaacgacggccagtagctgatggcctgagaacata

SEQ ID NO: 61953 - DNA, 38 bp, Artificial Sequence; identical to SEQ ID NO: 61952
  primer

SEQ ID NO: 61954 - DNA, 38 bp, Artificial Sequence
  primer
gtaaaacgacggccagttatcagtttggcagagtccca

SEQ ID NO: 61955 - DNA, 38 bp, Artificial Sequence
  primer
gtaaaacgacggccagtgaagagagtgggaactcctgg

SEQ ID NO: 61956 - DNA, 20 bp, Artificial Sequence
  primer
ccctgtagccctgacatacc

SEQ ID NO: 61957 - DNA, 24 bp, Artificial Sequence
  primer
ttgcatgaatgtaactaatgaagg

SEQ ID NO: 61958 - DNA, 23 bp, Artificial Sequence
  primer
cccagcctttatggtaattaagc

SEQ ID NO: 61959 - DNA, 39 bp, Artificial Sequence
  primer
gtaaaacgacggccagtggatatgccatgacatttgttg

SEQ ID NO: 61960 - DNA, 40 bp, Artificial Sequence
  primer
gtaaaacgacggccagtggaattaacagcatacagtgggc

SEQ ID NO: 61961 - DNA, 21 bp, Artificial Sequence
  primer
agcaccagtaggcttggtagc

SEQ ID NO: 61962 - DNA, 23 bp, Artificial Sequence
  primer
gcaggaaattgtctctgtcattg

SEQ ID NO: 61963 - DNA, 35 bp, Artificial Sequence
  primer
gtaaaacgacggccagtatgcccggcccttcttac

SEQ ID NO: 61964 - DNA, 21 bp, Artificial Sequence
  primer
aggccattagcacagtgtctg

SEQ ID NO: 61965 - DNA, 39 bp, Artificial Sequence
  primer
gtaaaacgacggccagtcccatggtaaacactctttgaa

SEQ ID NO: 61966 - DNA, 38 bp, Artificial Sequence
  primer
gtaaaacgacggccagtctcccaactttcaagcagtcc

SEQ ID NO: 61967 - DNA, 21 bp, Artificial Sequence
  primer
tgggaaccggaaatctttgta

SEQ ID NO: 61968 - DNA, 38 bp, Artificial Sequence
  primer
gtaaaacgacggccagtaatccaggctgtgtcatttcc

SEQ ID NO: 61969 - DNA, 38 bp, Artificial Sequence
  primer
gtaaaacgacggccagtatctacagggtcttcaacccg

SEQ ID NO: 61970 - DNA, 23 bp, Artificial Sequence
  primer
tcccttactaacctgcaaatcac

SEQ ID NO: 61971 - DNA, 38 bp, Artificial Sequence
  primer
gtaaaacgacggccagtacgatggttggctacagtttg

SEQ ID NO: 61972 - DNA, 21 bp, Artificial Sequence
  primer
cacaggttgtgagccagtgac

SEQ ID NO: 61973 - DNA, 21 bp, Artificial Sequence
  primer
ggcttgagtttgatggctctc

SEQ ID NO: 61974 - DNA, 19 bp, Artificial Sequence
  primer
gctgatgactgagccaggg

SEQ ID NO: 61975 - DNA, 38 bp, Artificial Sequence
  primer
gtaaaacgacggccagtgcacgccttctaaagatgagg

SEQ ID NO: 61976 - DNA, 21 bp, Artificial Sequence
  primer
gggctatcagaaaggagggtg

SEQ ID NO: 61977 - DNA, 21 bp, Artificial Sequence
  primer
ttcagaaattgggtctgaggc

SEQ ID NO: 61978 - DNA, 38 bp, Artificial Sequence
  primer
gtaaaacgacggccagtcgtccgcactttacctgagtc

SEQ ID NO: 61979 - DNA, 21 bp, Artificial Sequence
  primer
ggtctgggtggttctgatctc

SEQ ID NO: 61980 - DNA, 20 bp, Artificial Sequence
  primer
agctgcttgcaccctaggac

SEQ ID NO: 61981 - DNA, 38 bp, Artificial Sequence
  primer
gtaaaacgacggccagtgagggatgggtttctctgtcc

SEQ ID NO: 61982 - DNA, 20 bp, Artificial Sequence
  primer
agtgagggatgagtgcctcc

SEQ ID NO: 61983 - DNA, 37 bp, Artificial Sequence
  primer
gtaaaacgacggccagtacacctgcctcgtttccttc

SEQ ID NO: 61984 - DNA, 21 bp, Artificial Sequence
  primer
agggataggcagggtcttagg

SEQ ID NO: 61985 - DNA, 39 bp, Artificial Sequence
  primer
gtaaaacgacggccagttttgcagacccagtgtgtgtag

SEQ ID NO: 61986 - DNA, 21 bp, Artificial Sequence
  primer
ctcagtctccctttctgcacc

SEQ ID NO: 61987 - DNA, 21 bp, Artificial Sequence
  primer
ggatcagtgtccttgtctggg

SEQ ID NO: 61988 - DNA, 36 bp, Artificial Sequence
  primer
gtaaaacgacggccagtctggtgtggaggagcaatg

SEQ ID NO: 61989 - DNA, 20 bp, Artificial Sequence
  primer
caccgtattagccaggatgg

SEQ ID NO: 61990 - DNA, 21 bp, Artificial Sequence
  primer
gaggctccaggacttcttcag

SEQ ID NO: 61991 - DNA, 21 bp, Artificial Sequence
  primer
gaccagacctccttgatctcc

SEQ ID NO: 61992 - DNA, 38 bp, Artificial Sequence
  primer
gtaaaacgacggccagtgatttcatctcagtccggcag

SEQ ID NO: 61993 - DNA, 38 bp, Artificial Sequence
  primer
gtaaaacgacggccagtgtaggaactgcctggagaagc

SEQ ID NO: 61994 - DNA, 21 bp, Artificial Sequence
  primer
agaagggatgcttctctcagg

SEQ ID NO: 61995 - DNA, 36 bp, Artificial Sequence
  primer
gtaaaacgacggccagtatggtggagctatggcctg

SEQ ID NO: 61996 - DNA, 20 bp, Artificial Sequence
  primer
atggagagagaaaggccctg

SEQ ID NO: 61997 - DNA, 21 bp, Artificial Sequence
  primer
aagaatgtgagaatggctggc

SEQ ID NO: 61998 - DNA, 21 bp, Artificial Sequence
  primer
aacttcttgctggtttcaggg

SEQ ID NO: 61999 - DNA, 21 bp, Artificial Sequence
  primer
ctcaggtgcttcccttaatgc

SEQ ID NO: 62000 - DNA, 20 bp, Artificial Sequence
  primer
agaagggcatcctcttgcag

SEQ ID NO: 62001 - DNA, 43 bp, Artificial Sequence
  primer
gtaaaacgacggccagttgagacttgtttcaaatcagtttatg

SEQ ID NO: 62002 - DNA, 24 bp, Artificial Sequence
  primer
aaactggcaatgtttctaagttgg

SEQ ID NO: 62003 - DNA, 21 bp, Artificial Sequence
  primer
gacattgggactggaatagcc

SEQ ID NO: 62004 - DNA, 38 bp, Artificial Sequence
  primer
gtaaaacgacggccagtatccaaagcccagatctaacg

SEQ ID NO: 62005 - DNA, 21 bp, Artificial Sequence
  primer
atgcaccgactggtagtgatg

SEQ ID NO: 62006 - DNA, 38 bp, Artificial Sequence
  primer
gtaaaacgacggccagtcaggttgcatctttcacgttc

SEQ ID NO: 62007 - DNA, 40 bp, Artificial Sequence
  primer
gtaaaacgacggccagtgtatctgatcaatcctttgtggg

SEQ ID NO: 62008 - DNA, 38 bp, Artificial Sequence
  primer
gtaaaacgacggccagttgccttactcagcactgttgc

SEQ ID NO: 62009 - DNA, 20 bp, Artificial Sequence
  primer
cttctagggtgtgtggctgg

SEQ ID NO: 62010 - DNA, 20 bp, Artificial Sequence
  primer
agccactggtgtctctctgc

SEQ ID NO: 62011 - DNA, 25 bp, Artificial Sequence
  primer
aagtatgttggaattctgtgctctg

SEQ ID NO: 62012 - DNA, 37 bp, Artificial Sequence
  primer
gtaaaacgacggccagtatgcctagggcaacatttgg

SEQ ID NO: 62013 - DNA, 37 bp, Artificial Sequence
  primer
gtaaaacgacggccagtgagctcaggcaatcctcctg

SEQ ID NO: 62014 - DNA, 38 bp, Artificial Sequence
  primer
gtaaaacgacggccagtaattcatatcacgggccaaac

SEQ ID NO: 62015 - DNA, 21 bp, Artificial Sequence
  primer
cagttcttggcacctggtatg

SEQ ID NO: 62016 - DNA, 21 bp, Artificial Sequence
  primer
tgatcaaaccaagctaccgtc

SEQ ID NO: 62017 - DNA, 39 bp, Artificial Sequence
  primer
gtaaaacgacggccagtcacattgcctgattgtatgctg

SEQ ID NO: 62018 - DNA, 38 bp, Artificial Sequence
  primer
gtaaaacgacggccagtgccaatttcaccatcacaaag

SEQ ID NO: 62019 - DNA, 38 bp, Artificial Sequence
  primer
gtaaaacgacggccagttgtttaccagccatttcgttg

SEQ ID NO: 62020 - DNA, 21 bp, Artificial Sequence
  primer
gttactcaactgccgagaccc

SEQ ID NO: 62021 - DNA, 38 bp, Artificial Sequence
  primer
gtaaaacgacggccagttacccaagtagcagcgatcag

SEQ ID NO: 62022 - DNA, 21 bp, Artificial Sequence
  primer
tttaccgggttcacgaatctc

SEQ ID NO: 62023 - DNA, 21 bp, Artificial Sequence
  primer
gtgctatctgagcgtcactgg

SEQ ID NO: 62024 - DNA, 38 bp, Artificial Sequence
  primer
gtaaaacgacggccagtgccctcctgagggttagagac

SEQ ID NO: 62025 - DNA, 38 bp, Artificial Sequence
  primer
gtaaaacgacggccagtgggtgagggatagacagaccc

SEQ ID NO: 62026 - DNA, 38 bp, Artificial Sequence
  primer
gtaaaacgacggccagtaattcaaacctagggtgtggg

SEQ ID NO: 62027 - DNA, 38 bp, Artificial Sequence
  primer
gtaaaacgacggccagtctgggtagggattggtgagag

SEQ ID NO: 62028 - DNA, 23 bp, Artificial Sequence
  primer
cagctctagttgagggtacaggg

SEQ ID NO: 62029 - DNA, 18 bp, Artificial Sequence
  primer
gcatgtaccaccatgccc

SEQ ID NO: 62030 - DNA, 21 bp, Artificial Sequence
  primer
gctcgtattattggtggttcg

SEQ ID NO: 62031 - DNA, 36 bp, Artificial Sequence
  primer
gtaaaacgacggccagtaatcagccacatggttggg

SEQ ID NO: 62032 - DNA, 42 bp, Artificial Sequence
  primer
gtaaaacgacggccagtgcaggaagggtatatatttccaagg

SEQ ID NO: 62033 - DNA, 38 bp, Artificial Sequence
  primer
gtaaaacgacggccagtcttaggttccactggtttggg

SEQ ID NO: 62034 - DNA, 38 bp, Artificial Sequence
  primer
gtaaaacgacggccagtaagaagcggaggaaggatttc

SEQ ID NO: 62035 - DNA, 38 bp, Artificial Sequence
  primer
gtaaaacgacggccagtcttgtgaatacggtgtgcgac

SEQ ID NO: 62036 - DNA, 38 bp, Artificial Sequence
  primer
gtaaaacgacggccagttgacaattcacagcttctccg

SEQ ID NO: 62037 - DNA, 21 bp, Artificial Sequence
  primer
aggtagaacctcctcggaacc

SEQ ID NO: 62038 - DNA, 21 bp, Artificial Sequence
  primer
tactgtgaaggacccggaatc

SEQ ID NO: 62039 - DNA, 21 bp, Artificial Sequence
  primer
tccagcatttcacaaatacgc

SEQ ID NO: 62040 - DNA, 47 bp, Artificial Sequence
  primer
gtaaaacgacggccagttcttctgttatgtgtatttaggtaaggttt

SEQ ID NO: 62041 - DNA, 21 bp, Artificial Sequence
  primer
cacctcgagatgatccctttg

SEQ ID NO: 62042 - DNA, 21 bp, Artificial Sequence
  primer
ctctcctgctcctccagattc

SEQ ID NO: 62043 - DNA, 21 bp, Artificial Sequence
  primer
tggaccaacagggctttattc

SEQ ID NO: 62044 - DNA, 21 bp, Artificial Sequence
  primer
gtcggagattcatgtgctctg

SEQ ID NO: 62045 - DNA, 40 bp, Artificial Sequence
  primer
gtaaaacgacggccagttgaacctatcgtctgtttaggca

SEQ ID NO: 62046 - DNA, 38 bp, Artificial Sequence
  primer
gtaaaacgacggccagtgagccagaaggatggtgtttc

SEQ ID NO: 62047 - DNA, 21 bp, Artificial Sequence
  primer
cacagaaagagactccgatgg

SEQ ID NO: 62048 - DNA, 38 bp, Artificial Sequence
  primer
gtaaaacgacggccagttgacaaggacgtgcatattcc

SEQ ID NO: 62049 - DNA, 37 bp, Artificial Sequence
  primer
gtaaaacgacggccagtgtttcaggactgggatgctg

SEQ ID NO: 62050 - DNA, 37 bp, Artificial Sequence
  primer
gtaaaacgacggccagtgctaggcggtctatgccttc

SEQ ID NO: 62051 - DNA, 21 bp, Artificial Sequence
  primer
accacactcccaggacttgac

SEQ ID NO: 62052 - DNA, 21 bp, Artificial Sequence
  primer
ggtttgtttacgggctgtttg

SEQ ID NO: 62053 - DNA, 38 bp, Artificial Sequence
  primer
gtaaaacgacggccagtcaggatgtgtcagctccactg

SEQ ID NO: 62054 - DNA, 38 bp, Artificial Sequence
  primer
gtaaaacgacggccagtattggtttgcttcaaaggagc

SEQ ID NO: 62055 - DNA, 37 bp, Artificial Sequence
  primer
gtaaaacgacggccagtgccttatcaggtccaaagcc

SEQ ID NO: 62056 - DNA, 38 bp, Artificial Sequence
  primer
gtaaaacgacggccagttagtattcacctgcaccaccc

SEQ ID NO: 62057 - DNA, 38 bp, Artificial Sequence
  primer
gtaaaacgacggccagtgggttaacgcagtactgaccc

SEQ ID NO: 62058 - DNA, 38 bp, Artificial Sequence
  primer
gtaaaacgacggccagtgtgactgactcaagcccaacc

SEQ ID NO: 62059 - DNA, 21 bp, Artificial Sequence
  primer
tggttctggaattcaagggag

SEQ ID NO: 62060 - DNA, 38 bp, Artificial Sequence
  primer
gtaaaacgacggccagtcgttacaaatgcctcatctgc

SEQ ID NO: 62061 - DNA, 21 bp, Artificial Sequence
  primer
gaccaaggtctcagcacacac

SEQ ID NO: 62062 - DNA, 35 bp, Artificial Sequence
  primer
gtaaaacgacggccagtgctgtgcgtctccagtcc

SEQ ID NO: 62063 - DNA, 21 bp, Artificial Sequence
  primer
atgtggattacagctctgggc

SEQ ID NO: 62064 - DNA, 37 bp, Artificial Sequence
  primer
gtaaaacgacggccagtcctcagtgtccaaagtgctg

SEQ ID NO: 62065 - DNA, 41 bp, Artificial Sequence
  primer
gtaaaacgacggccagttgagaatgtggctaggactttatg

SEQ ID NO: 62066 - DNA, 43 bp, Artificial Sequence
  primer
gtaaaacgacggccagtggatattctaagtaggttgggaaagc

SEQ ID NO: 62067 - DNA, 22 bp, Artificial Sequence
  primer
cttcatgagttaaagaaggcca

SEQ ID NO: 62068 - DNA, 39 bp, Artificial Sequence
  primer
gtaaaacgacggccagtctgataaatgggatgtgctcag

SEQ ID NO: 62069 - DNA, 21 bp, Artificial Sequence
  primer
tccctcagagtcagtcaagcc

SEQ ID NO: 62070 - DNA, 38 bp, Artificial Sequence
  primer
gtaaaacgacggccagtacatctgcagtggtgaggttg

SEQ ID NO: 62071 - DNA, 21 bp, Artificial Sequence
  primer
gtgtaagcacacattgcctgg

SEQ ID NO: 62072 - DNA, 21 bp, Artificial Sequence
  primer
cagtccttgctgtctaagccc

SEQ ID NO: 62073 - DNA, 38 bp, Artificial Sequence
  primer
gtaaaacgacggccagttcgtcgtgattgagactttgg

SEQ ID NO: 62074 - DNA, 20 bp, Artificial Sequence
  primer
gtgatttgtcccacccacag

SEQ ID NO: 62075 - DNA, 38 bp, Artificial Sequence
  primer
gtaaaacgacggccagtcaggagtgaccctttccagac

SEQ ID NO: 62076 - DNA, 20 bp, Artificial Sequence
  primer
ctgccttcaagttcccaagg

SEQ ID NO: 62077 - DNA, 21 bp, Artificial Sequence
  primer
ttgctcatcattcctttgctg

SEQ ID NO: 62078 - DNA, 21 bp, Artificial Sequence
  primer
cttagagggctagaacgctgg

SEQ ID NO: 62079 - DNA, 37 bp, Artificial Sequence
  primer
gtaaaacgacggccagtgggttccttcccttcctctg

SEQ ID NO: 62080 - DNA, 19 bp, Artificial Sequence
  primer
agggaagcgctctctccag

SEQ ID NO: 62081 - DNA, 21 bp, Artificial Sequence
  primer
aagggacatggagttgctcag

SEQ ID NO: 62082 - DNA, 21 bp, Artificial Sequence
  primer
gagagcttcggcctctacttc

SEQ ID NO: 62083 - DNA, 38 bp, Artificial Sequence
  primer
gtaaaacgacggccagtaagcttctcaggaaacccgac

SEQ ID NO: 62084 - DNA, 21 bp, Artificial Sequence
  primer
tgtcaaacccaaacgaaagag

SEQ ID NO: 62085 - DNA, 21 bp, Artificial Sequence
  primer
acgtgccatgtgattctgaac

SEQ ID NO: 62086 - DNA, 21 bp, Artificial Sequence
  primer
ctcaattcagccaaatgcctc

SEQ ID NO: 62087 - DNA, 42 bp, Artificial Sequence
  primer
gtaaaacgacggccagtcatgtggttatatctagggcctttc

SEQ ID NO: 62088 - DNA, 18 bp, Artificial Sequence
  primer
cagggcaatgaggatggg

SEQ ID NO: 62089 - DNA, 38 bp, Artificial Sequence
  primer
gtaaaacgacggccagtcggcctcataactctcatcct

SEQ ID NO: 62090 - DNA, 21 bp, Artificial Sequence
  primer
ttgccaactcattctattgcg

SEQ ID NO: 62091 - DNA, 38 bp, Artificial Sequence
  primer
gtaaaacgacggccagtctaatggcccaaatgatcaaa

SEQ ID NO: 62092 - DNA, 21 bp, Artificial Sequence
  primer
attctaggtacctgggtgggc

SEQ ID NO: 62093 - DNA, 21 bp, Artificial Sequence
  primer
ccactataccctccctcccag

SEQ ID NO: 62094 - DNA, 38 bp, Artificial Sequence
  primer
gtaaaacgacggccagtaacatctagagccaagcctgc

SEQ ID NO: 62095 - DNA, 36 bp, Artificial Sequence
  primer
gtaaaacgacggccagtcacacacacacagccctcc

SEQ ID NO: 62096 - DNA, 37 bp, Artificial Sequence
  primer
gtaaaacgacggccagtgatccggtcgcacttaacag

SEQ ID NO: 62097 - DNA, 38 bp, Artificial Sequence
  primer
gtaaaacgacggccagtgtctgggatgcagggagatag

SEQ ID NO: 62098 - DNA, 38 bp, Artificial Sequence
  primer
gtaaaacgacggccagtgcccagttcatccttcttcac

SEQ ID NO: 62099 - DNA, 21 bp, Artificial Sequence
  primer
gtagcctcgagagcattcctg

SEQ ID NO: 62100 - DNA, 38 bp, Artificial Sequence
  primer
gtaaaacgacggccagtagtactgcctccgagtgaagc

SEQ ID NO: 62101 - DNA, 37 bp, Artificial Sequence
  primer
gtaaaacgacggccagtgtgtctgtgacagtgtggcg

SEQ ID NO: 62102 - DNA, 38 bp, Artificial Sequence
  primer
gtaaaacgacggccagtaaacagaaaggtgttggtggc

SEQ ID NO: 62103 - DNA, 21 bp, Artificial Sequence
  primer
tgcctgcctgtaaagtgagag

SEQ ID NO: 62104 - DNA, 21 bp, Artificial Sequence
  primer
acgtccttccttcagggagtc

SEQ ID NO: 62105 - DNA, 36 bp, Artificial Sequence
  primer
gtaaaacgacggccagtcacttagcagggtgcctgg

SEQ ID NO: 62106 - DNA, 38 bp, Artificial Sequence
  primer
gtaaaacgacggccagttccctggacttgaacttgacc

SEQ ID NO: 62107 - DNA, 38 bp, Artificial Sequence
  primer
gtaaaacgacggccagtaccttctccaccctggaactc

SEQ ID NO: 62108 - DNA, 37 bp, Artificial Sequence
  primer
gtaaaacgacggccagttaagtgctggagggaagctg

SEQ ID NO: 62109 - DNA, 38 bp, Artificial Sequence
  primer
gtaaaacgacggccagtcagtggcctttgttgactgac

SEQ ID NO: 62110 - DNA, 41 bp, Artificial Sequence
  primer
gtaaaacgacggccagtaagctagatgatagcctgtggatg

SEQ ID NO: 62111 - DNA, 38 bp, Artificial Sequence
  primer
gtaaaacgacggccagtgctgtatttgtagcacccagc

SEQ ID NO: 62112 - DNA, 22 bp, Artificial Sequence
  primer
cttgcatctcttgaagcacact

SEQ ID NO: 62113 - DNA, 41 bp, Artificial Sequence
  primer
gtaaaacgacggccagtcaactgtttccaagttgtgttacg

SEQ ID NO: 62114 - DNA, 21 bp, Artificial Sequence
  primer
tgcttcagaggtaaactgggc

SEQ ID NO: 62115 - DNA, 24 bp, Artificial Sequence
  primer
gtcatttgttatttgtatcgcacc

SEQ ID NO: 62116 - DNA, 20 bp, Artificial Sequence
  primer
tgggcaacaagagtgaaacg

SEQ ID NO: 62117 - DNA, 25 bp, Artificial Sequence
  primer
tgatccaattctggtatcaattcag

SEQ ID NO: 62118 - DNA, 21 bp, Artificial Sequence
  primer
gctgggtgacagagtgagact

SEQ ID NO: 62119 - DNA, 23 bp, Artificial Sequence
  primer
tctgcttaaacaaccttccatgt

SEQ ID NO: 62120 - DNA, 38 bp, Artificial Sequence
  primer
gtaaaacgacggccagttattgagggaatggcagtgtc

SEQ ID NO: 62121 - DNA, 23 bp, Artificial Sequence
  primer
tttggttcaagccaatagatgag

SEQ ID NO: 62122 - DNA, 41 bp, Artificial Sequence
  primer
gtaaaacgacggccagtggaggactgacatacccagttatc

SEQ ID NO: 62123 - DNA, 41 bp, Artificial Sequence
  primer
gtaaaacgacggccagttttatgttaccttggtctggaatg

SEQ ID NO: 62124 - DNA, 38 bp, Artificial Sequence
  primer
gtaaaacgacggccagtagttaagtcggctcttggtgg

SEQ ID NO: 62125 - DNA, 24 bp, Artificial Sequence
  primer
caaattgtttaacctctttgaccc

SEQ ID NO: 62126 - DNA, 39 bp, Artificial Sequence
  primer
gtaaaacgacggccagttttccatccaaatcttaggcag

SEQ ID NO: 62127 - DNA, 38 bp, Artificial Sequence
  primer
gtaaaacgacggccagttgggcttattgaatgtatggc

SEQ ID NO: 62128 - DNA, 41 bp, Artificial Sequence
  primer
gtaaaacgacggccagttgacccagcagaagtaattaaagc

SEQ ID NO: 62129 - DNA, 40 bp, Artificial Sequence
  primer
gtaaaacgacggccagtccagaatttgcctagtatggttg

SEQ ID NO: 62130 - DNA, 23 bp, Artificial Sequence
  primer
gcatgtaagctttactccagtcc

SEQ ID NO: 62131 - DNA, 21 bp, Artificial Sequence
  primer
atgtgaatggcagctcatagg

SEQ ID NO: 62132 - DNA, 22 bp, Artificial Sequence
  primer
tttgggaaatgtataacagggc

SEQ ID NO: 62133 - DNA, 24 bp, Artificial Sequence
  primer
tgagtgattctgtctttccagatg

SEQ ID NO: 62134 - DNA, 41 bp, Artificial Sequence
  primer
gtaaaacgacggccagtaaagacttcacatttctttctccg

SEQ ID NO: 62135 - DNA, 27 bp, Artificial Sequence
  primer
ttccttatagaagccatatggtaacag

SEQ ID NO: 62136 - DNA, 40 bp, Artificial Sequence
  primer
gtaaaacgacggccagttgccttctctgtatgcaactagc

SEQ ID NO: 62137 - DNA, 38 bp, Artificial Sequence
  primer
gtaaaacgacggccagttggcatgtggaggaagctaag

SEQ ID NO: 62138 - DNA, 21 bp, Artificial Sequence
  primer
agtgatctgcctgtctcagcc

SEQ ID NO: 62139 - DNA, 22 bp, Artificial Sequence
  primer
tgggaaatgtgtgttagaaggc

SEQ ID NO: 62140 - DNA, 40 bp, Artificial Sequence
  primer
gtaaaacgacggccagtggacttaatttgtaacgccaatg

SEQ ID NO: 62141 - DNA, 21 bp, Artificial Sequence
  primer
aggaggaagaggcattctacg

SEQ ID NO: 62142 - DNA, 21 bp, Artificial Sequence
  primer
cccagatagattgctgtgacc

SEQ ID NO: 62143 - DNA, 42 bp, Artificial Sequence
  primer
gtaaaacgacggccagtcttctagaactgttcacctacaggg

SEQ ID NO: 62144 - DNA, 20 bp, Artificial Sequence
  primer
caaccacaaagagtggctgg

SEQ ID NO: 62145 - DNA, 24 bp, Artificial Sequence
  primer
ggtagctttgaattctttctgtcc

SEQ ID NO: 62146 - DNA, 37 bp, Artificial Sequence
  primer
gtaaaacgacggccagtttggcagctgatttgcttag

SEQ ID NO: 62147 - DNA, 35 bp, Artificial Sequence
  primer
gtaaaacgacggccagtgcacggtcttggctgacc

SEQ ID NO: 62148 - DNA, 21 bp, Artificial Sequence
  primer
acgggcatctgggagatatag

SEQ ID NO: 62149 - DNA, 21 bp, Artificial Sequence
  primer
agtgaatttgagaacggctgc

SEQ ID NO: 62150 - DNA, 39 bp, Artificial Sequence
  primer
gtaaaacgacggccagtgcacgattaattcactctgcat

SEQ ID NO: 62151 - DNA, 21 bp, Artificial Sequence
  primer
ggaagcttgtgtcttggcttc

SEQ ID NO: 62152 - DNA, 39 bp, Artificial Sequence
  primer
gtaaaacgacggccagtggtgagttgagaatgcctttcc

SEQ ID NO: 62153 - DNA, 20 bp, Artificial Sequence
  primer
cgcagaggttacagtgggtc

SEQ ID NO: 62154 - DNA, 38 bp, Artificial Sequence
  primer
gtaaaacgacggccagtttgggtccttccagattgaac

SEQ ID NO: 62155 - DNA, 38 bp, Artificial Sequence
  primer
gtaaaacgacggccagtgtgcgtgcttgctttaggtag

SEQ ID NO: 62156 - DNA, 22 bp, Artificial Sequence
  primer
tttggaggactccttcctcttc

SEQ ID NO: 62157 - DNA, 37 bp, Artificial Sequence
  primer
gtaaaacgacggccagtgtgcccggccagttagttac

SEQ ID NO: 62158 - DNA, 37 bp, Artificial Sequence
  primer
gtaaaacgacggccagtccctcagcttgttccatgag

SEQ ID NO: 62159 - DNA, 38 bp, Artificial Sequence
  primer
gtaaaacgacggccagtggaaagcaatggcaagttctc

SEQ ID NO: 62160 - DNA, 38 bp, Artificial Sequence
  primer
gtaaaacgacggccagttttcccattctctggttgatg

SEQ ID NO: 62161 - DNA, 21 bp, Artificial Sequence
  primer
atcccgcaaacacaagaagtc

SEQ ID NO: 62162 - DNA, 38 bp, Artificial Sequence
  primer
gtaaaacgacggccagtcttcccagtgaagttgaccag

SEQ ID NO: 62163 - DNA, 22 bp, Artificial Sequence
  primer
ggtgcctaacgtcaaggacttc

SEQ ID NO: 62164 - DNA, 37 bp, Artificial Sequence
  primer
gtaaaacgacggccagtgaggcaatagatgctggtgg

SEQ ID NO: 62165 - DNA, 39 bp, Artificial Sequence
  primer
gtaaaacgacggccagtgggagcttcctgtatgaatgag

SEQ ID NO: 62166 - DNA, 21 bp, Artificial Sequence
  primer
agagtgaagacactgcccagg

SEQ ID NO: 62167 - DNA, 38 bp, Artificial Sequence
  primer
gtaaaacgacggccagtaagttgaccttgcttggcttc

SEQ ID NO: 62168 - DNA, 37 bp, Artificial Sequence
  primer
gtaaaacgacggccagtgcttccaatggctgtgtttc

SEQ ID NO: 62169 - DNA, 38 bp, Artificial Sequence
  primer
gtaaaacgacggccagttgcttacagaaatccattggg

SEQ ID NO: 62170 - DNA, 38 bp, Artificial Sequence
  primer
gtaaaacgacggccagtgctgtgtgcttcatgtctctg

SEQ ID NO: 62171 - DNA, 38 bp, Artificial Sequence
  primer
gtaaaacgacggccagtgctgagtaatgagcgctggac

SEQ ID NO: 62172 - DNA, 20 bp, Artificial Sequence
  primer
tgtgtgaggcgttaacctcg

SEQ ID NO: 62173 - DNA, 38 bp, Artificial Sequence
  primer
gtaaaacgacggccagtgcaggagagagacccttatgc

SEQ ID NO: 62174 - DNA, 38 bp, Artificial Sequence
  primer
gtaaaacgacggccagtcgcggtgagttgacttctctc

SEQ ID NO: 62175 - DNA, 37 bp, Artificial Sequence
  primer
gtaaaacgacggccagtgacagggctatctgtcgtcg

SEQ ID NO: 62176 - DNA, 21 bp, Artificial Sequence
  primer
aggatgtgagtggagcctcag

SEQ ID NO: 62177 - DNA, 20 bp, Artificial Sequence
  primer
ctagccctggacctgtctcc

SEQ ID NO: 62178 - DNA, 38 bp, Artificial Sequence
  primer
gtaaaacgacggccagtaaaggcagccagctaatgttc

SEQ ID NO: 62179 - DNA, 38 bp, Artificial Sequence
  primer
gtaaaacgacggccagtattgctcgccttagaaccttg

SEQ ID NO: 62180 - DNA, 38 bp, Artificial Sequence
  primer
gtaaaacgacggccagtggcctcacactttcaagttcc

SEQ ID NO: 62181 - DNA, 21 bp, Artificial Sequence
  primer
gttaagagtcccttgggttgg

SEQ ID NO: 62182 - DNA, 38 bp, Artificial Sequence
  primer
gtaaaacgacggccagtaagattgcccatgtctccttg

SEQ ID NO: 62183 - DNA, 21 bp, Artificial Sequence
  primer
tgctgaatcatctcacactgc

SEQ ID NO: 62184 - DNA, 20 bp, Artificial Sequence
  primer
actccggtgagtctgtgctg

SEQ ID NO: 62185 - DNA, 38 bp, Artificial Sequence
  primer
gtaaaacgacggccagtatttagcctggcatcaacctc

SEQ ID NO: 62186 - DNA, 21 bp, Artificial Sequence
  primer
ctggttatcacctttgggaca

SEQ ID NO: 62187 - DNA, 19 bp, Artificial Sequence
  primer
ctgggctcgaaactccatc

SEQ ID NO: 62188 - DNA, 21 bp, Artificial Sequence
  primer
tcctttatgatgagtcgccag

SEQ ID NO: 62189 - DNA, 38 bp, Artificial Sequence
  primer
gtaaaacgacggccagtgtggaggaaagcagctctctg

SEQ ID NO: 62190 - DNA, 19 bp, Artificial Sequence
  primer
gggttggtatcgtggcaag

SEQ ID NO: 62191 - DNA, 38 bp, Artificial Sequence
  primer
gtaaaacgacggccagtcccagctacggaaatttgttc

SEQ ID NO: 62192 - DNA, 38 bp, Artificial Sequence
  primer
gtaaaacgacggccagttcatcctgtggttctgaatcg

SEQ ID NO: 62193 - DNA, 38 bp, Artificial Sequence
  primer
gtaaaacgacggccagtagggttaaacctgaacatggg

SEQ ID NO: 62194 - DNA, 21 bp, Artificial Sequence
  primer
gtctgtctcgaggcaagaagg

SEQ ID NO: 62195 - DNA, 38 bp, Artificial Sequence
  primer
gtaaaacgacggccagtttctctagaagcaatgcaggg

SEQ ID NO: 62196 - DNA, 20 bp, Artificial Sequence
  primer
ctaagtccagagtgcgctgc

SEQ ID NO: 62197 - DNA, 21 bp, Artificial Sequence
  primer
tgttggtagctggtatcggtg

SEQ ID NO: 62198 - DNA, 21 bp, Artificial Sequence
  primer
gatatgaggaaggtgaaggcg

SEQ ID NO: 62199 - DNA, 38 bp, Artificial Sequence
  primer
gtaaaacgacggccagtggagacaatgaggtgattggg

SEQ ID NO: 62200 - DNA, 21 bp, Artificial Sequence
  primer
atgctcctgtgtgttagggtg

SEQ ID NO: 62201 - DNA, 39 bp, Artificial Sequence
  primer
gtaaaacgacggccagtaggaagacagcatttcttggtg

SEQ ID NO: 62202 - DNA, 38 bp, Artificial Sequence
  primer
gtaaaacgacggccagtgacaccaagtgtctgggtcac

SEQ ID NO: 62203 - DNA, 20 bp, Artificial Sequence
  primer
tccagcatctgttggaaatg

SEQ ID NO: 62204 - DNA, 19 bp, Artificial Sequence
  primer
acagctcagcctggctttc

SEQ ID NO: 62205 - DNA, 38 bp, Artificial Sequence
  primer
gtaaaacgacggccagtgggtggcctacatcaagtttc

SEQ ID NO: 62206 - DNA, 38 bp, Artificial Sequence
  primer
gtaaaacgacggccagtggatctgtgagcttggtcatc

SEQ ID NO: 62207 - DNA, 21 bp, Artificial Sequence
  primer
atccacaggtccttgttggtc

SEQ ID NO: 62208 - DNA, 21 bp, Artificial Sequence
  primer
ctgaatgaattcctggatgcc

SEQ ID NO: 62209 - DNA, 20 bp, Artificial Sequence
  primer
agggctggagctaagtctcg

SEQ ID NO: 62210 - DNA, 38 bp, Artificial Sequence
  primer
gtaaaacgacggccagtagccctgtgtgaataaggagg

SEQ ID NO: 62211 - DNA, 38 bp, Artificial Sequence
  primer
gtaaaacgacggccagtatggtgtttgcagggtatgtg

SEQ ID NO: 62212 - DNA, 38 bp, Artificial Sequence
  primer
gtaaaacgacggccagtagccacccttaactcctcctc

SEQ ID NO: 62213 - DNA, 21 bp, Artificial Sequence
  primer
attctgcagtccttccctctg

SEQ ID NO: 62214 - DNA, 18 bp, Artificial Sequence
  primer
ctgcttgccgacttccag

SEQ ID NO: 62215 - DNA, 21 bp, Artificial Sequence
  primer
gaaggatggatccagtgaagg

SEQ ID NO: 62216 - DNA, 38 bp, Artificial Sequence
  primer
gtaaaacgacggccagtatcgtggctgaggatctgaag

SEQ ID NO: 62217 - DNA, 38 bp, Artificial Sequence
  primer
gtaaaacgacggccagtccaaatcctttccacttcacc

SEQ ID NO: 62218 - DNA, 21 bp, Artificial Sequence
  primer
gcagcagataaagactggtcg

SEQ ID NO: 62219 - DNA, 21 bp, Artificial Sequence
  primer
ctaagaagatgccctccctcc

SEQ ID NO: 62220 - DNA, 21 bp, Artificial Sequence
  primer
gcatctggaacaactgtggtc

SEQ ID NO: 62221 - DNA, 21 bp, Artificial Sequence
  primer
cgtgttctaaagcttgggttg

SEQ ID NO: 62222 - DNA, 38 bp, Artificial Sequence
  primer
gtaaaacgacggccagtcctttctggcttccttaatgc

SEQ ID NO: 62223 - DNA, 21 bp, Artificial Sequence
  primer
tcgtccatccacagatttcac

SEQ ID NO: 62224 - DNA, 21 bp, Artificial Sequence
  primer
attctccagctgggctgttag

SEQ ID NO: 62225 - DNA, 22 bp, Artificial Sequence
  primer
aattgtgttgacacagcactcg

SEQ ID NO: 62226 - DNA, 36 bp, Artificial Sequence
  primer
gtaaaacgacggccagtctctgatgacgtctccgcc

SEQ ID NO: 62227 - DNA, 23 bp, Artificial Sequence
  primer
acacaggatagaacaagcaatcc

SEQ ID NO: 62228 - DNA, 20 bp, Artificial Sequence
  primer
cataacaagtctgtgggccg

SEQ ID NO: 62229 - DNA, 44 bp, Artificial Sequence
  primer
gtaaaacgacggccagttcagatatgtgactaagctctgtgaag

SEQ ID NO: 62230 - DNA, 37 bp, Artificial Sequence
  primer
gtaaaacgacggccagttctgggcaaggttgaacatc

SEQ ID NO: 62231 - DNA, 41 bp, Artificial Sequence
  primer
gtaaaacgacggccagttctgatgtcattacagtgtccaac

SEQ ID NO: 62232 - DNA, 38 bp, Artificial Sequence
  primer
gtaaaacgacggccagtacgcaaactgacatgcttctg

SEQ ID NO: 62233 - DNA, 26 bp, Artificial Sequence
  primer
ttctgcatcagtttatcctgtttatg

SEQ ID NO: 62234 - DNA, 26 bp, Artificial Sequence
  primer
aacagaagaatagcttagaatttcgg

SEQ ID NO: 62235 - DNA, 22 bp, Artificial Sequence
  primer
aagtcctggagtttcacattgg

SEQ ID NO: 62236 - DNA, 40 bp, Artificial Sequence
  primer
gtaaaacgacggccagttttatttcagacccttgggagag

SEQ ID NO: 62237 - DNA, 20 bp, Artificial Sequence
  primer
ccttcatggccttgaggtta

SEQ ID NO: 62238 - DNA, 20 bp, Artificial Sequence
  primer
agcctgggtgacagtgagac

SEQ ID NO: 62239 - DNA, 21 bp, Artificial Sequence
  primer
aaggtaacacgcaaatgggtc

SEQ ID NO: 62240 - DNA, 21 bp, Artificial Sequence
  primer
ctgtcaacagttccttcaggc

SEQ ID NO: 62241 - DNA, 27 bp, Artificial Sequence
  primer
ttctagataaaccaaagtcaccttcac

SEQ ID NO: 62242 - DNA, 27 bp, Artificial Sequence
  primer
tttctatcttacataagcagttcaatg

SEQ ID NO: 62243 - DNA, 44 bp, Artificial Sequence
  primer
gtaaaacgacggccagttttgtatcattatgacctttaccaacc

SEQ ID NO: 62244 - DNA, 26 bp, Artificial Sequence
  primer
cagtgaatgtaatttctacaagccaa

SEQ ID NO: 62245 - DNA, 41 bp, Artificial Sequence
  primer
gtaaaacgacggccagtagaaagttgtaggttgtcctttgg

SEQ ID NO: 62246 - DNA, 41 bp, Artificial Sequence
  primer
gtaaaacgacggccagtgattcatgtttggcattacatagc

SEQ ID NO: 62247 - DNA, 22 bp, Artificial Sequence
  primer
tcctttccagctgctattgaac

SEQ ID NO: 62248 - DNA, 24 bp, Artificial Sequence
  primer
tgagttgacacttcaaacttaggc

SEQ ID NO: 62249 - DNA, 21 bp, Artificial Sequence
  primer
tggaatacaagggtggtaggg

SEQ ID NO: 62250 - DNA, 39 bp, Artificial Sequence
  primer
gtaaaacgacggccagtttcagcttcttcactgtttccc

SEQ ID NO: 62251 - DNA, 21 bp, Artificial Sequence
  primer
ccactcactcctcttcccaag

SEQ ID NO: 62252 - DNA, 27 bp, Artificial Sequence
  primer
aaagataaatgtctcaaatggatgtct

SEQ ID NO: 62253 - DNA, 21 bp, Artificial Sequence
  primer
cttacatgcctgtgcgagaag

SEQ ID NO: 62254 - DNA, 23 bp, Artificial Sequence
  primer
ggccttcaataacattagttgcc

SEQ ID NO: 62255 - DNA, 41 bp, Artificial Sequence
  primer
gtaaaacgacggccagtctatccacagagaaatgcttgaaa

SEQ ID NO: 62256 - DNA, 24 bp, Artificial Sequence
  primer
aaataatggacttctgaaagtggg

SEQ ID NO: 62257 - DNA, 25 bp, Artificial Sequence
  primer
ggatttcataaatgcagtcaaagtg

SEQ ID NO: 62258 - DNA, 21 bp, Artificial Sequence
  primer
ctctggatggcattagtcagc

SEQ ID NO: 62259 - DNA, 37 bp, Artificial Sequence
  primer
gtaaaacgacggccagtcaaacaggtgggtgttgctc

SEQ ID NO: 62260 - DNA, 38 bp, Artificial Sequence
  primer
gtaaaacgacggccagtattgcctttgtgagatttgcc

SEQ ID NO: 62261 - DNA, 37 bp, Artificial Sequence
  primer
gtaaaacgacggccagttcatctgggaatcctccctc

SEQ ID NO: 62262 - DNA, 38 bp, Artificial Sequence
  primer
gtaaaacgacggccagtcacttgtggtcgctagagctg

SEQ ID NO: 62263 - DNA, 21 bp, Artificial Sequence
  primer
ttctccctgttcccagacttc

SEQ ID NO: 62264 - DNA, 37 bp, Artificial Sequence
  primer
gtaaaacgacggccagtagaatggaggaaatcctggg

SEQ ID NO: 62265 - DNA, 37 bp, Artificial Sequence
  primer
gtaaaacgacggccagtgcctccgtctaagtgtccag

SEQ ID NO: 62266 - DNA, 38 bp, Artificial Sequence
  primer
gtaaaacgacggccagtgaaactgagggtcaggaatgg

SEQ ID NO: 62267 - DNA, 38 bp, Artificial Sequence
  primer
gtaaaacgacggccagtactgcttcttgggaaaggagg

SEQ ID NO: 62268 - DNA, 21 bp, Artificial Sequence
  primer
tctaccaacaggagaagtgcg

SEQ ID NO: 62269 - DNA, 39 bp, Artificial Sequence
  primer
gtaaaacgacggccagtagatcggagaatggatctcttg

SEQ ID NO: 62270 - DNA, 39 bp, Artificial Sequence
  primer
gtaaaacgacggccagtcagttgaatgtcaaacggactg

SEQ ID NO: 62271 - DNA, 38 bp, Artificial Sequence
  primer
gtaaaacgacggccagtgagtgaagcagatggaaaggg

SEQ ID NO: 62272 - DNA, 37 bp, Artificial Sequence
  primer
gtaaaacgacggccagtgcttagcatggaggaccctg

SEQ ID NO: 62273 - DNA, 35 bp, Artificial Sequence; identical to SEQ ID NO: 13122
  primer

SEQ ID NO: 62274 - DNA, 38 bp, Artificial Sequence
  primer
gtaaaacgacggccagtatcagccagattgatgtttgg

SEQ ID NO: 62275 - DNA, 43 bp, Artificial Sequence
  primer
gtaaaacgacggccagtaagagaggtacaaagctaacgatcag

SEQ ID NO: 62276 - DNA, 21 bp, Artificial Sequence
  primer
atgattcccttgcaatccaac

SEQ ID NO: 62277 - DNA, 38 bp, Artificial Sequence
  primer
gtaaaacgacggccagttgttaagcagcatgggatcag

SEQ ID NO: 62278 - DNA, 21 bp, Artificial Sequence
  primer
atgctggaatagggcttgttg

SEQ ID NO: 62279 - DNA, 20 bp, Artificial Sequence
  primer
gtgcagagagaggtgcaagg

SEQ ID NO: 62280 - DNA, 21 bp, Artificial Sequence
  primer
tctgactggacttgttgggtc

SEQ ID NO: 62281 - DNA, 21 bp, Artificial Sequence
  primer
ggagctttgcaggctcttatc

SEQ ID NO: 62282 - DNA, 21 bp, Artificial Sequence
  primer
cttatccagccaacctgcttc

SEQ ID NO: 62283 - DNA, 37 bp, Artificial Sequence
  primer
gtaaaacgacggccagtctgctccagcaacttaagcc

SEQ ID NO: 62284 - DNA, 21 bp, Artificial Sequence
  primer
taaagaagatgtgggaagccc

SEQ ID NO: 62285 - DNA, 21 bp, Artificial Sequence
  primer
cccagctatgcctgtgatacc

SEQ ID NO: 62286 - DNA, 37 bp, Artificial Sequence
  primer
gtaaaacgacggccagttctgggaagaagaccttggc

SEQ ID NO: 62287 - DNA, 21 bp, Artificial Sequence
  primer
aactgcatcaagctacatggg

SEQ ID NO: 62288 - DNA, 38 bp, Artificial Sequence
  primer
gtaaaacgacggccagtctgtatgaggatggatgacgg

SEQ ID NO: 62289 - DNA, 38 bp, Artificial Sequence
  primer
gtaaaacgacggccagtgagttcccggctagacaaagg

SEQ ID NO: 62290 - DNA, 38 bp, Artificial Sequence
  primer
gtaaaacgacggccagttgattacaggtgctgagaccc

SEQ ID NO: 62291 - DNA, 19 bp, Artificial Sequence
  primer
actgcgcctagccagaaag

SEQ ID NO: 62292 - DNA, 21 bp, Artificial Sequence
  primer
tatgaagtgctcgggagatgg

SEQ ID NO: 62293 - DNA, 40 bp, Artificial Sequence
  primer
gtaaaacgacggccagttggctgacagaagtgatataggc

SEQ ID NO: 62294 - DNA, 37 bp, Artificial Sequence
  primer
gtaaaacgacggccagtacaggtgtgagcactgagcc

SEQ ID NO: 62295 - DNA, 21 bp, Artificial Sequence
  primer
tgttcgtgaaggagtgagtgg

SEQ ID NO: 62296 - DNA, 21 bp, Artificial Sequence
  primer
acattcccgtaatgcacacag

SEQ ID NO: 62297 - DNA, 20 bp, Artificial Sequence
  primer
agtttgccagtgggtaaggg

SEQ ID NO: 62298 - DNA, 21 bp, Artificial Sequence
  primer
gaaagcctcatccctcttctg

SEQ ID NO: 62299 - DNA, 21 bp, Artificial Sequence
  primer
gagcagtgctggatacacagg

SEQ ID NO: 62300 - DNA, 38 bp, Artificial Sequence
  primer
gtaaaacgacggccagtaaggcggagaagtgatgagtc

SEQ ID NO: 62301 - DNA, 37 bp, Artificial Sequence
  primer
gtaaaacgacggccagtatcaacactttcgcgactcc

SEQ ID NO: 62302 - DNA, 21 bp, Artificial Sequence
  primer
attgagctttctgagcttcgg

SEQ ID NO: 62303 - DNA, 38 bp, Artificial Sequence
  primer
gtaaaacgacggccagtggtgacttcacctccttggtg

SEQ ID NO: 62304 - DNA, 38 bp, Artificial Sequence
  primer
gtaaaacgacggccagttccagggagtccagaacgtag

SEQ ID NO: 62305 - DNA, 21 bp, Artificial Sequence
  primer
aaggagctatgggctttccag

SEQ ID NO: 62306 - DNA, 38 bp, Artificial Sequence
  primer
gtaaaacgacggccagttgaggcaatcacaatttggag

SEQ ID NO: 62307 - DNA, 19 bp, Artificial Sequence
  primer
aagccttggctttgctacc

SEQ ID NO: 62308 - DNA, 20 bp, Artificial Sequence
  primer
acacaagcctgggtgacaag

SEQ ID NO: 62309 - DNA, 24 bp, Artificial Sequence
  primer
gaaactgataaggacatagctccg

SEQ ID NO: 62310 - DNA, 40 bp, Artificial Sequence
  primer
gtaaaacgacggccagtttcaagacctgatgtttgaggag

SEQ ID NO: 62311 - DNA, 38 bp, Artificial Sequence
  primer
gtaaaacgacggccagtacagagatggaaatcgcaatg

SEQ ID NO: 62312 - DNA, 21 bp, Artificial Sequence
  primer
gggagacttgacttgtttggg

SEQ ID NO: 62313 - DNA, 38 bp, Artificial Sequence
  primer
gtaaaacgacggccagtcagggatggaggatgatgaag

SEQ ID NO: 62314 - DNA, 23 bp, Artificial Sequence
  primer
aaagagctctgaaacaggaaagg

SEQ ID NO: 62315 - DNA, 38 bp, Artificial Sequence
  primer
gtaaaacgacggccagtcacaagtcaaggaactggcac

SEQ ID NO: 62316 - DNA, 21 bp, Artificial Sequence
  primer
gttcccattcaggtgtcttgg

SEQ ID NO: 62317 - DNA, 20 bp, Artificial Sequence
  primer
ttcccattcaggtgtcttgg

SEQ ID NO: 62318 - DNA, 21 bp, Artificial Sequence
  primer
tgagattgtcagtgcttgtcg

SEQ ID NO: 62319 - DNA, 21 bp, Artificial Sequence
  primer
tcagtcccttcttgcgtcttc

SEQ ID NO: 62320 - DNA, 21 bp, Artificial Sequence
  primer
ggttcctgaagcacagtcctc

SEQ ID NO: 62321 - DNA, 21 bp, Artificial Sequence
  primer
caggcatgagatgtgtgtgtg

SEQ ID NO: 62322 - DNA, 38 bp, Artificial Sequence
  primer
gtaaaacgacggccagtagagacagtgtggaggatggg

SEQ ID NO: 62323 - DNA, 20 bp, Artificial Sequence
  primer
actgtgtcagggctgctgtc

SEQ ID NO: 62324 - DNA, 21 bp, Artificial Sequence
  primer
cataactgatgctgtcctggg

SEQ ID NO: 62325 - DNA, 38 bp, Artificial Sequence
  primer
gtaaaacgacggccagttgtggtttgtggaggttcttg

SEQ ID NO: 62326 - DNA, 38 bp, Artificial Sequence
  primer
gtaaaacgacggccagtgccctactaactttgggagcc

SEQ ID NO: 62327 - DNA, 21 bp, Artificial Sequence
  primer
tttgctttgggagacttgacc

SEQ ID NO: 62328 - DNA, 36 bp, Artificial Sequence
  primer
gtaaaacgacggccagtcccgacatctcctttctgc

SEQ ID NO: 62329 - DNA, 38 bp, Artificial Sequence
  primer
gtaaaacgacggccagtatggtgtaactgtgcctgctg

SEQ ID NO: 62330 - DNA, 21 bp, Artificial Sequence
  primer
cggagactggtggtctagagg

SEQ ID NO: 62331 - DNA, 23 bp, Artificial Sequence
  primer
ggaatctatgaacagtttggtgc

SEQ ID NO: 62332 - DNA, 38 bp, Artificial Sequence
  primer
gtaaaacgacggccagtatttgacaacagtgctttggg

SEQ ID NO: 62333 - DNA, 22 bp, Artificial Sequence
  primer
gatagtgaggccaagctacgtg

SEQ ID NO: 62334 - DNA, 40 bp, Artificial Sequence
  primer
gtaaaacgacggccagttttgatgaagcccaatttacttt

SEQ ID NO: 62335 - DNA, 38 bp, Artificial Sequence
  primer
gtaaaacgacggccagtaccttggcatcagctatggac

SEQ ID NO: 62336 - DNA, 21 bp, Artificial Sequence
  primer
accagcagatagacaggcagc

SEQ ID NO: 62337 - DNA, 38 bp, Artificial Sequence
  primer
gtaaaacgacggccagtcgcatgcgtagttgatgtagg

SEQ ID NO: 62338 - DNA, 18 bp, Artificial Sequence
  primer
gcttctggagggtgggac

SEQ ID NO: 62339 - DNA, 38 bp, Artificial Sequence
  primer
gtaaaacgacggccagttagttaggcagccagggaaag

SEQ ID NO: 62340 - DNA, 22 bp, Artificial Sequence
  primer
tggagagggatgtccttagatg

SEQ ID NO: 62341 - DNA, 20 bp, Artificial Sequence
  primer
ggcaggacatctgattctgg

SEQ ID NO: 62342 - DNA, 38 bp, Artificial Sequence
  primer
gtaaaacgacggccagtgtgagcgtcctaggattggag

SEQ ID NO: 62343 - DNA, 38 bp, Artificial Sequence
  primer
gtaaaacgacggccagttgaagaggtctgggtaggacc

SEQ ID NO: 62344 - DNA, 38 bp, Artificial Sequence
  primer
gtaaaacgacggccagtcttcctgttctttgccctacg

SEQ ID NO: 62345 - DNA, 36 bp, Artificial Sequence
  primer
gtaaaacgacggccagtcctctggacccaccctagc

SEQ ID NO: 62346 - DNA, 21 bp, Artificial Sequence
  primer
ctactcgatgtacttcccggc

SEQ ID NO: 62347 - DNA, 38 bp, Artificial Sequence
  primer
gtaaaacgacggccagtggtcttaaagggaaaggctgc

SEQ ID NO: 62348 - DNA, 21 bp, Artificial Sequence
  primer
ggccaaggtaagatgagcaag

SEQ ID NO: 62349 - DNA, 38 bp, Artificial Sequence
  primer
gtaaaacgacggccagtggtgagaattctgggttggag

SEQ ID NO: 62350 - DNA, 21 bp, Artificial Sequence
  primer
tgattggatgcagttcctctg

SEQ ID NO: 62351 - DNA, 38 bp, Artificial Sequence
  primer
gtaaaacgacggccagttggacaatgtctggtgaggtc

SEQ ID NO: 62352 - DNA, 38 bp, Artificial Sequence
  primer
gtaaaacgacggccagtagaccaggcagctgactcaag

SEQ ID NO: 62353 - DNA, 20 bp, Artificial Sequence
  primer
caaagctgcccttcactcag

SEQ ID NO: 62354 - DNA, 21 bp, Artificial Sequence
  primer
atcagatgagactgtgctggc

SEQ ID NO: 62355 - DNA, 21 bp, Artificial Sequence
  primer
gggaagaccatttggaaggag

SEQ ID NO: 62356 - DNA, 36 bp, Artificial Sequence
  primer
gtaaaacgacggccagtaccgggtagaggatgggag

SEQ ID NO: 62357 - DNA, 18 bp, Artificial Sequence
  primer
gcccttcctccgactgtg

SEQ ID NO: 62358 - DNA, 22 bp, Artificial Sequence
  primer
gggatttaaactcagagcaccc

SEQ ID NO: 62359 - DNA, 21 bp, Artificial Sequence
  primer
cccagcttagaagcactgttg

SEQ ID NO: 62360 - DNA, 36 bp, Artificial Sequence
  primer
gtaaaacgacggccagtgagggagttgctgtgctgg

SEQ ID NO: 62361 - DNA, 38 bp, Artificial Sequence
  primer
gtaaaacgacggccagtcctcccaaagtgctgtgatta

SEQ ID NO: 62362 - DNA, 21 bp, Artificial Sequence
  primer
ctgggctagatgtggctgtag

SEQ ID NO: 62363 - DNA, 23 bp, Artificial Sequence
  primer
tttctggacaattaggtgcagtc

SEQ ID NO: 62364 - DNA, 40 bp, Artificial Sequence
  primer
gtaaaacgacggccagttctgcattcgtttcttacagagc

SEQ ID NO: 62365 - DNA, 38 bp, Artificial Sequence
  primer
gtaaaacgacggccagttagcgtgggttgttctgtgtc

SEQ ID NO: 62366 - DNA, 21 bp, Artificial Sequence
  primer
tttctcgaaagacttcagccc

SEQ ID NO: 62367 - DNA, 37 bp, Artificial Sequence
  primer
gtaaaacgacggccagttggctgtgagaagccatgag

SEQ ID NO: 62368 - DNA, 37 bp, Artificial Sequence
  primer
gtaaaacgacggccagttgcttgtttccttgaactgc

SEQ ID NO: 62369 - DNA, 23 bp, Artificial Sequence
  primer
cagggtttgaaatgaccacatac

SEQ ID NO: 62370 - DNA, 21 bp, Artificial Sequence
  primer
cagatagcgtgcatgacttcc

SEQ ID NO: 62371 - DNA, 20 bp, Artificial Sequence
  primer
ggtgaatggtgaaaccatcg

SEQ ID NO: 62372 - DNA, 24 bp, Artificial Sequence
  primer
agtttatgtacattgcaaacgagc

SEQ ID NO: 62373 - DNA, 38 bp, Artificial Sequence
  primer
gtaaaacgacggccagtgccatgtccagcctttacttc

SEQ ID NO: 62374 - DNA, 38 bp, Artificial Sequence
  primer
gtaaaacgacggccagtcatgaagaaagagccaagctg

SEQ ID NO: 62375 - DNA, 38 bp, Artificial Sequence
  primer
gtaaaacgacggccagtcaaagctgtgacctgacttcc

SEQ ID NO: 62376 - DNA, 22 bp, Artificial Sequence
  primer
tttcatggagatacgtggaacc

SEQ ID NO: 62377 - DNA, 20 bp, Artificial Sequence
  primer
agccttgctggtgtcctttc

SEQ ID NO: 62378 - DNA, 21 bp, Artificial Sequence
  primer
tgaacagatgtttcaatgggc

SEQ ID NO: 62379 - DNA, 19 bp, Artificial Sequence
  primer
ctgcagatacctggacggg

SEQ ID NO: 62380 - DNA, 21 bp, Artificial Sequence
  primer
aggagggaggagagagcaaag

SEQ ID NO: 62381 - DNA, 21 bp, Artificial Sequence
  primer
tacacacaggacccttcctcc

SEQ ID NO: 62382 - DNA, 38 bp, Artificial Sequence
  primer
gtaaaacgacggccagtggcctttcttgggagagagtg

SEQ ID NO: 62383 - DNA, 38 bp, Artificial Sequence
  primer
gtaaaacgacggccagtggaacccgtatggacaaagag

SEQ ID NO: 62384 - DNA, 21 bp, Artificial Sequence
  primer
aggagcctgcttactttcctg

SEQ ID NO: 62385 - DNA, 38 bp, Artificial Sequence
  primer
gtaaaacgacggccagttaataggcatttcacgttccg

SEQ ID NO: 62386 - DNA, 38 bp, Artificial Sequence
  primer
gtaaaacgacggccagtacttgaaattcccactctgcg

SEQ ID NO: 62387 - DNA, 39 bp, Artificial Sequence
  primer
gtaaaacgacggccagtggaataaagaagggaggactgc

SEQ ID NO: 62388 - DNA, 38 bp, Artificial Sequence
  primer
gtaaaacgacggccagttattaagcccaggaggtgtgg

SEQ ID NO: 62389 - DNA, 21 bp, Artificial Sequence
  primer
ctaattcattgcccaggatgc

SEQ ID NO: 62390 - DNA, 39 bp, Artificial Sequence
  primer
gtaaaacgacggccagtccatctaccttccacttcttcc

SEQ ID NO: 62391 - DNA, 38 bp, Artificial Sequence
  primer
gtaaaacgacggccagtgactagcctggcatggagaag

SEQ ID NO: 62392 - DNA, 38 bp, Artificial Sequence
  primer
gtaaaacgacggccagtcatgtctgaactggccttcac

SEQ ID NO: 62393 - DNA, 39 bp, Artificial Sequence
  primer
gtaaaacgacggccagtttcgtcaggcaaagtagtgatg

SEQ ID NO: 62394 - DNA, 21 bp, Artificial Sequence
  primer
acggtagaggcagagctgttg

SEQ ID NO: 62395 - DNA, 38 bp, Artificial Sequence
  primer
gtaaaacgacggccagttttgcatagcaagtagggtgg

SEQ ID NO: 62396 - DNA, 21 bp, Artificial Sequence
  primer
ggttcagccgtttggagtatc

SEQ ID NO: 62397 - DNA, 38 bp, Artificial Sequence
  primer
gtaaaacgacggccagttcaccgcaaagatccatgtag

SEQ ID NO: 62398 - DNA, 38 bp, Artificial Sequence
  primer
gtaaaacgacggccagttggcaaagccaaattatttcc

SEQ ID NO: 62399 - DNA, 21 bp, Artificial Sequence
  primer
agtactgctttgcccacattg

SEQ ID NO: 62400 - DNA, 37 bp, Artificial Sequence
  primer
gtaaaacgacggccagttcatttgttgttggcaaccc

SEQ ID NO: 62401 - DNA, 21 bp, Artificial Sequence
  primer
ggtgtaggtttggagaaacgg

SEQ ID NO: 62402 - DNA, 19 bp, Artificial Sequence
  primer
tttcttggatccggcattg

SEQ ID NO: 62403 - DNA, 38 bp, Artificial Sequence
  primer
gtaaaacgacggccagtataattggagatcagggcagc

SEQ ID NO: 62404 - DNA, 21 bp, Artificial Sequence
  primer
tgctcatctaagggcagttcc

SEQ ID NO: 62405 - DNA, 38 bp, Artificial Sequence
  primer
gtaaaacgacggccagtacccagacagtaaacttgggc

SEQ ID NO: 62406 - DNA, 38 bp, Artificial Sequence
  primer
gtaaaacgacggccagtaggaaagcgggaaagtcaatc

SEQ ID NO: 62407 - DNA, 38 bp, Artificial Sequence
  primer
gtaaaacgacggccagtagtgcattcatggaggagagg

SEQ ID NO: 62408 - DNA, 21 bp, Artificial Sequence
  primer
gagaagaaggtggattccctg

SEQ ID NO: 62409 - DNA, 21 bp, Artificial Sequence
  primer
caaagacctgattgcctctcc

SEQ ID NO: 62410 - DNA, 37 bp, Artificial Sequence
  primer
gtaaaacgacggccagttttggatgttgccagtagcc

SEQ ID NO: 62411 - DNA, 21 bp, Artificial Sequence
  primer
aagggctttgagaccatcttg

SEQ ID NO: 62412 - DNA, 21 bp, Artificial Sequence
  primer
gacttctggtccttggtggag

SEQ ID NO: 62413 - DNA, 21 bp, Artificial Sequence
  primer
acttctgcctgtggaatgagg

SEQ ID NO: 62414 - DNA, 21 bp, Artificial Sequence
  primer
ccatgctccatcacaataccc

SEQ ID NO: 62415 - DNA, 20 bp, Artificial Sequence
  primer
agggcaatgaattgttggag

SEQ ID NO: 62416 - DNA, 39 bp, Artificial Sequence
  primer
gtaaaacgacggccagttgctggtgagtttcattgtacc

SEQ ID NO: 62417 - DNA, 38 bp, Artificial Sequence
  primer
gtaaaacgacggccagtcatttctgggcctaggtcatc

SEQ ID NO: 62418 - DNA, 38 bp, Artificial Sequence
  primer
gtaaaacgacggccagtacaggttgtaaagacctgccc

SEQ ID NO: 62419 - DNA, 21 bp, Artificial Sequence
  primer
agagcccatcattactccagg

SEQ ID NO: 62420 - DNA, 18 bp, Artificial Sequence
  primer
tcacttgagcctgggagg

SEQ ID NO: 62421 - DNA, 43 bp, Artificial Sequence
  primer
gtaaaacgacggccagttggccttatagcttacatttaactcc

SEQ ID NO: 62422 - DNA, 21 bp, Artificial Sequence
  primer
taaccagcaccctctctgacc

SEQ ID NO: 62423 - DNA, 38 bp, Artificial Sequence
  primer
gtaaaacgacggccagttagaaagaagcagggcctgtg

SEQ ID NO: 62424 - DNA, 38 bp, Artificial Sequence
  primer
gtaaaacgacggccagtagcagtgaagtcttggtgcag

SEQ ID NO: 62425 - DNA, 20 bp, Artificial Sequence
  primer
cctcagaagggacccaagtc

SEQ ID NO: 62426 - DNA, 21 bp, Artificial Sequence
  primer
tggtttgaatacgcccttctc

SEQ ID NO: 62427 - DNA, 37 bp, Artificial Sequence
  primer
gtaaaacgacggccagtggcagggacttcacctcttc

SEQ ID NO: 62428 - DNA, 21 bp, Artificial Sequence
  primer
atctgcaacatttgggtgatg

SEQ ID NO: 62429 - DNA, 41 bp, Artificial Sequence
  primer
gtaaaacgacggccagtagttacttgcttgtctttattgcg

SEQ ID NO: 62430 - DNA, 37 bp, Artificial Sequence
  primer
gtaaaacgacggccagtgggatgagggagttggaaac

SEQ ID NO: 62431 - DNA, 39 bp, Artificial Sequence
  primer
gtaaaacgacggccagtgttggcttgtctctgtacatgc

SEQ ID NO: 62432 - DNA, 39 bp, Artificial Sequence
  primer
gtaaaacgacggccagttcagtcatttccttggatttgg

SEQ ID NO: 62433 - DNA, 22 bp, Artificial Sequence
  primer
tgattgaatgctatccatggtg

SEQ ID NO: 62434 - DNA, 20 bp, Artificial Sequence
  primer
gcatgtgcctctaatcccag

SEQ ID NO: 62435 - DNA, 38 bp, Artificial Sequence
  primer
gtaaaacgacggccagtaccaagatggtggtttcaagg

SEQ ID NO: 62436 - DNA, 38 bp, Artificial Sequence
  primer
gtaaaacgacggccagtagcagtagaggcatgagccac

SEQ ID NO: 62437 - DNA, 38 bp, Artificial Sequence
  primer
gtaaaacgacggccagtgctcaagtcagtccaaccctc

SEQ ID NO: 62438 - DNA, 40 bp, Artificial Sequence
  primer
gtaaaacgacggccagtagtgcctggcatatagcacatac

SEQ ID NO: 62439 - DNA, 27 bp, Artificial Sequence
  primer
aaagaatatgacaggttcctagggtag

SEQ ID NO: 62440 - DNA, 38 bp, Artificial Sequence
  primer
gtaaaacgacggccagttcagcactcagatatttgccg

SEQ ID NO: 62441 - DNA, 37 bp, Artificial Sequence
  primer
gtaaaacgacggccagtccgtgttagcaaggatggtc

SEQ ID NO: 62442 - DNA, 20 bp, Artificial Sequence
  primer
tcagatggatctgcggaaac

SEQ ID NO: 62443 - DNA, 21 bp, Artificial Sequence
  primer
ttctgattgcatcagggaaac

SEQ ID NO: 62444 - DNA, 38 bp, Artificial Sequence
  primer
gtaaaacgacggccagtcgacattgagtctcggagttg

SEQ ID NO: 62445 - DNA, 21 bp, Artificial Sequence
  primer
caagcctttaataggccatgc

SEQ ID NO: 62446 - DNA, 39 bp, Artificial Sequence
  primer
gtaaaacgacggccagtctcaacatttggtggagtatgg

SEQ ID NO: 62447 - DNA, 28 bp, Artificial Sequence
  primer
cactttgtctttctctaaatgcactaac

SEQ ID NO: 62448 - DNA, 39 bp, Artificial Sequence
  primer
gtaaaacgacggccagtaatgctgtggagggtatagcag

SEQ ID NO: 62449 - DNA, 39 bp, Artificial Sequence
  primer
gtaaaacgacggccagtacgcattaaatatcaggtgcag

SEQ ID NO: 62450 - DNA, 22 bp, Artificial Sequence
  primer
gaagtcactcaggcaatatggg

SEQ ID NO: 62451 - DNA, 39 bp, Artificial Sequence
  primer
gtaaaacgacggccagtaaagcaccagtgttgagactcc

SEQ ID NO: 62452 - DNA, 23 bp, Artificial Sequence
  primer
tttgtatgaacactgacagggac

SEQ ID NO: 62453 - DNA, 38 bp, Artificial Sequence
  primer
gtaaaacgacggccagtgtcctcccaattccatgtgag

SEQ ID NO: 62454 - DNA, 24 bp, Artificial Sequence
  primer
cattgtggctctttaaatattggg

SEQ ID NO: 62455 - DNA, 21 bp, Artificial Sequence
  primer
tgaagttgttcccttcttccc

SEQ ID NO: 62456 - DNA, 21 bp, Artificial Sequence
  primer
tagcttggaggcctttactcc

SEQ ID NO: 62457 - DNA, 21 bp, Artificial Sequence
  primer
tgcctgtagaggccttgtctc

SEQ ID NO: 62458 - DNA, 21 bp, Artificial Sequence
  primer
agagcattcagcctaccaagg

SEQ ID NO: 62459 - DNA, 19 bp, Artificial Sequence
  primer
gtgcccaggctgtttgttt

SEQ ID NO: 62460 - DNA, 22 bp, Artificial Sequence
  primer
gagatggttgaaacaacacctg

SEQ ID NO: 62461 - DNA, 22 bp, Artificial Sequence
  primer
gagtcttgaagggaaagcactg

SEQ ID NO: 62462 - DNA, 20 bp, Artificial Sequence
  primer
aatccttggtttctggtccc

SEQ ID NO: 62463 - DNA, 21 bp, Artificial Sequence
  primer
ggcttcttgcactgagtgttg

SEQ ID NO: 62464 - DNA, 38 bp, Artificial Sequence
  primer
gtaaaacgacggccagtatgagcattccgcctactttc

SEQ ID NO: 62465 - DNA, 38 bp, Artificial Sequence
  primer
gtaaaacgacggccagtgaggtgacactggacctggac

SEQ ID NO: 62466 - DNA, 19 bp, Artificial Sequence
  primer
tgccgagatcgacctgttc

SEQ ID NO: 62467 - DNA, 38 bp, Artificial Sequence
  primer
gtaaaacgacggccagtgaggccttcaactaccaggtg

SEQ ID NO: 62468 - DNA, 20 bp, Artificial Sequence
  primer
acggagatggaggtaggctg

SEQ ID NO: 62469 - DNA, 21 bp, Artificial Sequence
  primer
gggatctcagtggaggacaag

SEQ ID NO: 62470 - DNA, 21 bp, Artificial Sequence
  primer
gctgtggagtactatgtgccg

SEQ ID NO: 62471 - DNA, 20 bp, Artificial Sequence
  primer
tccactcctggcatctcaac

SEQ ID NO: 62472 - DNA, 39 bp, Artificial Sequence
  primer
gtaaaacgacggccagtttaataaggcatgggtactggg

SEQ ID NO: 62473 - DNA, 38 bp, Artificial Sequence
  primer
gtaaaacgacggccagttcttcctttcaacctgttccc

SEQ ID NO: 62474 - DNA, 22 bp, Artificial Sequence
  primer
tccaaatgtggtttctagtgcc

SEQ ID NO: 62475 - DNA, 38 bp, Artificial Sequence
  primer
gtaaaacgacggccagtagccgtacttcccatggattc

SEQ ID NO: 62476 - DNA, 38 bp, Artificial Sequence
  primer
gtaaaacgacggccagtctgaatcattcgtggaagcag

SEQ ID NO: 62477 - DNA, 21 bp, Artificial Sequence
  primer
tgtgtggaaggaacgtctgag

SEQ ID NO: 62478 - DNA, 39 bp, Artificial Sequence
  primer
gtaaaacgacggccagttggacaaatgaattctaccagc

SEQ ID NO: 62479 - DNA, 42 bp, Artificial Sequence
  primer
gtaaaacgacggccagtgattcagcaatctcaagaacagaag

SEQ ID NO: 62480 - DNA, 45 bp, Artificial Sequence
  primer
gtaaaacgacggccagtttaggttaaccaagtctgttactcaaga

SEQ ID NO: 62481 - DNA, 38 bp, Artificial Sequence
  primer
gtaaaacgacggccagtatagaatgagctgaaacccgc

SEQ ID NO: 62482 - DNA, 24 bp, Artificial Sequence
  primer
ttctagtgggcttcagagacataa

SEQ ID NO: 62483 - DNA, 36 bp, Artificial Sequence
  primer
gtaaaacgacggccagtcgtcagtcggtacccatcc

SEQ ID NO: 62484 - DNA, 21 bp, Artificial Sequence
  primer
ggtgctgattatgggagaacc

SEQ ID NO: 62485 - DNA, 38 bp, Artificial Sequence
  primer
gtaaaacgacggccagtgtggctgccatctgctacttc

SEQ ID NO: 62486 - DNA, 38 bp, Artificial Sequence
  primer
gtaaaacgacggccagtaaggtgcagagagggttcaag

SEQ ID NO: 62487 - DNA, 39 bp, Artificial Sequence
  primer
gtaaaacgacggccagtcactttagttgggaggaacacc

SEQ ID NO: 62488 - DNA, 23 bp, Artificial Sequence
  primer
aaagataaggttgtgtgctgtgc

SEQ ID NO: 62489 - DNA, 23 bp, Artificial Sequence
  primer
tgccgaaagatagaaagtgaaga

SEQ ID NO: 62490 - DNA, 38 bp, Artificial Sequence
  primer
gtaaaacgacggccagtaactgcagaggaacacttccc

SEQ ID NO: 62491 - DNA, 21 bp, Artificial Sequence
  primer
cagcggttgttctgtgtgaag

SEQ ID NO: 62492 - DNA, 21 bp, Artificial Sequence
  primer
agtgtatccactttgcatggg

SEQ ID NO: 62493 - DNA, 21 bp, Artificial Sequence
  primer
ttccatgtgctaggtggagtg

SEQ ID NO: 62494 - DNA, 21 bp, Artificial Sequence
  primer
ctttctcaggacgtgaccctc

SEQ ID NO: 62495 - DNA, 22 bp, Artificial Sequence
  primer
tctggacatcacatacgctttc

SEQ ID NO: 62496 - DNA, 39 bp, Artificial Sequence
  primer
gtaaaacgacggccagttttggtcacagattcacgtctc

SEQ ID NO: 62497 - DNA, 39 bp, Artificial Sequence
  primer
gtaaaacgacggccagttgggtttaaattccagctcaac

SEQ ID NO: 62498 - DNA, 39 bp, Artificial Sequence
  primer
gtaaaacgacggccagtttgtccaaatcacatgcacttc

SEQ ID NO: 62499 - DNA, 37 bp, Artificial Sequence
  primer
gtaaaacgacggccagtagctagcatttgaacccagg

SEQ ID NO: 62500 - DNA, 23 bp, Artificial Sequence
  primer
gggcaatttgaaagtaatcattg

SEQ ID NO: 62501 - DNA, 38 bp, Artificial Sequence
  primer
gtaaaacgacggccagttgaaatggaagacttgccaac

SEQ ID NO: 62502 - DNA, 38 bp, Artificial Sequence
  primer
gtaaaacgacggccagttttgcttgtttgtgatttgcc

SEQ ID NO: 62503 - DNA, 21 bp, Artificial Sequence
  primer
agccaggacagtctcgatctc

SEQ ID NO: 62504 - DNA, 23 bp, Artificial Sequence
  primer
tgaaagcattgatcactctaccc

SEQ ID NO: 62505 - DNA, 25 bp, Artificial Sequence
  primer
ttagcttagtgtggagttagggttg

SEQ ID NO: 62506 - DNA, 38 bp, Artificial Sequence
  primer
gtaaaacgacggccagtcggctagagcagatggttagg

SEQ ID NO: 62507 - DNA, 39 bp, Artificial Sequence
  primer
gtaaaacgacggccagttgagtgtgatcgtatttgctgc

SEQ ID NO: 62508 - DNA, 38 bp, Artificial Sequence
  primer
gtaaaacgacggccagtgttcagcagctagcaagtccc

SEQ ID NO: 62509 - DNA, 21 bp, Artificial Sequence
  primer
gagtggcagttaccagatccc

SEQ ID NO: 62510 - DNA, 21 bp, Artificial Sequence
  primer
catgaagcaaatgacgacctc

SEQ ID NO: 62511 - DNA, 21 bp, Artificial Sequence
  primer
tatggatgaccggcttattgc

SEQ ID NO: 62512 - DNA, 20 bp, Artificial Sequence
  primer
gagaggccatccatcctctg

SEQ ID NO: 62513 - DNA, 21 bp, Artificial Sequence
  primer
tcgtctatttgagtgcatggg

SEQ ID NO: 62514 - DNA, 21 bp, Artificial Sequence
  primer
gagggaaagaaactgccaaag

SEQ ID NO: 62515 - DNA, 21 bp, Artificial Sequence
  primer
caaataaagtgcctgctggtg

SEQ ID NO: 62516 - DNA, 38 bp, Artificial Sequence
  primer
gtaaaacgacggccagtctgccttctacattcattgcg

SEQ ID NO: 62517 - DNA, 38 bp, Artificial Sequence
  primer
gtaaaacgacggccagtgctttagagaaacgcactcgc

SEQ ID NO: 62518 - DNA, 41 bp, Artificial Sequence
  primer
gtaaaacgacggccagtgcacctctgaatatatcgtttctg

SEQ ID NO: 62519 - DNA, 24 bp, Artificial Sequence
  primer
tgaggtgcttaaaggaagtttctg

SEQ ID NO: 62520 - DNA, 39 bp, Artificial Sequence
  primer
gtaaaacgacggccagttggtttaattagctttgagccc

SEQ ID NO: 62521 - DNA, 37 bp, Artificial Sequence
  primer
gtaaaacgacggccagttaaaggccacatgaaggctg

SEQ ID NO: 62522 - DNA, 37 bp, Artificial Sequence
  primer
gtaaaacgacggccagtcgcctggcctaatagctttg

SEQ ID NO: 62523 - DNA, 27 bp, Artificial Sequence
  primer
ctcaggttagagaggatgaaagaatag

SEQ ID NO: 62524 - DNA, 22 bp, Artificial Sequence
  primer
gacgtctagaccaatcgtcagc

SEQ ID NO: 62525 - DNA, 24 bp, Artificial Sequence
  primer
tctgaggacaaagtaatgcttgag

SEQ ID NO: 62526 - DNA, 21 bp, Artificial Sequence
  primer
tcaggaaccactctagggacc

SEQ ID NO: 62527 - DNA, 39 bp, Artificial Sequence
  primer
gtaaaacgacggccagttcaactgatttgcccattcttc

SEQ ID NO: 62528 - DNA, 41 bp, Artificial Sequence
  primer
gtaaaacgacggccagtggaaggttgtctcttccttaaagc

SEQ ID NO: 62529 - DNA, 22 bp, Artificial Sequence
  primer
cgaagcccatggttagtacttg

SEQ ID NO: 62530 - DNA, 20 bp, Artificial Sequence
  primer
tcccaagtgccatatgaagc

SEQ ID NO: 62531 - DNA, 43 bp, Artificial Sequence
  primer
gtaaaacgacggccagtaaagtaaagatttgtcaataaggcca

SEQ ID NO: 62532 - DNA, 39 bp, Artificial Sequence
  primer
gtaaaacgacggccagtttaatccaaagttcagcacacc

SEQ ID NO: 62533 - DNA, 35 bp, Artificial Sequence
  primer
gtaaaacgacggccagtggaggagctccggaaagc

SEQ ID NO: 62534 - DNA, 37 bp, Artificial Sequence
  primer
gtaaaacgacggccagtaacttcgctgcctcttctcc

SEQ ID NO: 62535 - DNA, 20 bp, Artificial Sequence
  primer
atccgcatcgaagaacacac

SEQ ID NO: 62536 - DNA, 38 bp, Artificial Sequence
  primer
gtaaaacgacggccagtcccaggcctcagtatttcaag

SEQ ID NO: 62537 - DNA, 23 bp, Artificial Sequence
  primer
gaatgaatttgatggtctgtgaa

SEQ ID NO: 62538 - DNA, 39 bp, Artificial Sequence
  primer
gtaaaacgacggccagtaactgactgatgcttctgcttg

SEQ ID NO: 62539 - DNA, 23 bp, Artificial Sequence
  primer
ttcacagccagttacagattgaa

SEQ ID NO: 62540 - DNA, 21 bp, Artificial Sequence
  primer
ttcctttagcaaacctggtcc

SEQ ID NO: 62541 - DNA, 27 bp, Artificial Sequence
  primer
agtttctacccagatacagacgtaaac

SEQ ID NO: 62542 - DNA, 41 bp, Artificial Sequence
  primer
gtaaaacgacggccagtgaacattaaacataattcgggagc

SEQ ID NO: 62543 - DNA, 21 bp, Artificial Sequence
  primer
tttgttacctcatggtgcaga

SEQ ID NO: 62544 - DNA, 23 bp, Artificial Sequence
  primer
ttgcacagtttaattgctctcag

SEQ ID NO: 62545 - DNA, 21 bp, Artificial Sequence
  primer
cagggtttcactgcattagcc

SEQ ID NO: 62546 - DNA, 38 bp, Artificial Sequence
  primer
gtaaaacgacggccagtagagcctgatgtcacgatttc

SEQ ID NO: 62547 - DNA, 38 bp, Artificial Sequence
  primer
gtaaaacgacggccagtagatggagtcaggagggacag

SEQ ID NO: 62548 - DNA, 21 bp, Artificial Sequence
  primer
gtgatgaccaatggctcaaag

SEQ ID NO: 62549 - DNA, 21 bp, Artificial Sequence
  primer
cgaaggtatttccgtgttgtg

SEQ ID NO: 62550 - DNA, 39 bp, Artificial Sequence
  primer
gtaaaacgacggccagttttcctttggttgaaactcctc

SEQ ID NO: 62551 - DNA, 39 bp, Artificial Sequence
  primer
gtaaaacgacggccagtggacctgactcaagcatagcac

SEQ ID NO: 62552 - DNA, 39 bp, Artificial Sequence
  primer
gtaaaacgacggccagttttcaggtatggaacccttcag

SEQ ID NO: 62553 - DNA, 39 bp, Artificial Sequence
  primer
gtaaaacgacggccagtggtgagtatcagaaagctgtgc

SEQ ID NO: 62554 - DNA, 20 bp, Artificial Sequence
  primer
gcctcaggccttgttcactc

SEQ ID NO: 62555 - DNA, 38 bp, Artificial Sequence
  primer
gtaaaacgacggccagtttccaaaccagattgtgatgg

SEQ ID NO: 62556 - DNA, 25 bp, Artificial Sequence
  primer
caaccatacccaatactttcagatg

SEQ ID NO: 62557 - DNA, 29 bp, Artificial Sequence
  primer
ttcttggcatattacatacatagtactcg

SEQ ID NO: 62558 - DNA, 20 bp, Artificial Sequence
  primer
gtgatcacaccgccgtactc

SEQ ID NO: 62559 - DNA, 39 bp, Artificial Sequence
  primer
gtaaaacgacggccagtatagcctgcatttaaacaaccc

SEQ ID NO: 62560 - DNA, 21 bp, Artificial Sequence
  primer
acagggctcactcagctatcc

SEQ ID NO: 62561 - DNA, 21 bp, Artificial Sequence
  primer
actgcacaaacactagccagc

SEQ ID NO: 62562 - DNA, 21 bp, Artificial Sequence
  primer
agatgcaagagatgctgatgg

SEQ ID NO: 62563 - DNA, 20 bp, Artificial Sequence
  primer
cacattcattcccttgtgcc

SEQ ID NO: 62564 - DNA, 38 bp, Artificial Sequence
  primer
gtaaaacgacggccagtttcacctttatgaggctgtcg

SEQ ID NO: 62565 - DNA, 21 bp, Artificial Sequence
  primer
taatttctgcaggtgggagtg

SEQ ID NO: 62566 - DNA, 22 bp, Artificial Sequence
  primer
tgagctttgttcatttccttcc

SEQ ID NO: 62567 - DNA, 21 bp, Artificial Sequence
  primer
acgtcagaaggtgggactgac

SEQ ID NO: 62568 - DNA, 38 bp, Artificial Sequence
  primer
gtaaaacgacggccagtgctcataccgagatttctggc

SEQ ID NO: 62569 - DNA, 37 bp, Artificial Sequence
  primer
gtaaaacgacggccagttgatttggaaaccttgcctg

SEQ ID NO: 62570 - DNA, 38 bp, Artificial Sequence
  primer
gtaaaacgacggccagtctctgtcccaatcctgacacc

SEQ ID NO: 62571 - DNA, 38 bp, Artificial Sequence
  primer
gtaaaacgacggccagtctgaatcgaaagcgaaacagg

SEQ ID NO: 62572 - DNA, 37 bp, Artificial Sequence
  primer
gtaaaacgacggccagtaaaccaagggtcaagttcgg

SEQ ID NO: 62573 - DNA, 38 bp, Artificial Sequence
  primer
gtaaaacgacggccagtggtctagggagaggcgttgag

SEQ ID NO: 62574 - DNA, 38 bp, Artificial Sequence
  primer
gtaaaacgacggccagttgtgagcttctggcgagttag

SEQ ID NO: 62575 - DNA, 21 bp, Artificial Sequence
  primer
agaggagggctgatgcttatg

SEQ ID NO: 62576 - DNA, 21 bp, Artificial Sequence
  primer
tcactgattgagttgggttgc

SEQ ID NO: 62577 - DNA, 36 bp, Artificial Sequence
  primer
gtaaaacgacggccagtcccaccaccaccaggtatc

SEQ ID NO: 62578 - DNA, 37 bp, Artificial Sequence
  primer
gtaaaacgacggccagtctcagctcctccctagagcc

SEQ ID NO: 62579 - DNA, 38 bp, Artificial Sequence
  primer
gtaaaacgacggccagtggagcaaagagtttactcgcc

SEQ ID NO: 62580 - DNA, 38 bp, Artificial Sequence
  primer
gtaaaacgacggccagttttgccaaggtagagcagacc

SEQ ID NO: 62581 - DNA, 38 bp, Artificial Sequence
  primer
gtaaaacgacggccagttacccagctcatctcattggg

SEQ ID NO: 62582 - DNA, 36 bp, Artificial Sequence
  primer
gtaaaacgacggccagtacacaatcagagccgctgg

SEQ ID NO: 62583 - DNA, 41 bp, Artificial Sequence
  primer
gtaaaacgacggccagttggcattcagtgtattgttgtagg

SEQ ID NO: 62584 - DNA, 43 bp, Artificial Sequence
  primer
gtaaaacgacggccagtaagcataaattctcttgaaacagagg

SEQ ID NO: 62585 - DNA, 21 bp, Artificial Sequence
  primer
ccttcactcctttcatcccag

SEQ ID NO: 62586 - DNA, 39 bp, Artificial Sequence
  primer
gtaaaacgacggccagtgcaacataaatctgctcaaggg

SEQ ID NO: 62587 - DNA, 22 bp, Artificial Sequence
  primer
gataagtgcggactccattctg

SEQ ID NO: 62588 - DNA, 38 bp, Artificial Sequence
  primer
gtaaaacgacggccagtggcatggtagtacctggttcc

SEQ ID NO: 62589 - DNA, 39 bp, Artificial Sequence
  primer
gtaaaacgacggccagtcttgagctttgggacttacctc

SEQ ID NO: 62590 - DNA, 37 bp, Artificial Sequence
  primer
gtaaaacgacggccagtaatgccatctatgctggctg

SEQ ID NO: 62591 - DNA, 38 bp, Artificial Sequence
  primer
gtaaaacgacggccagtgcagttcctgttgaatttggg

SEQ ID NO: 62592 - DNA, 21 bp, Artificial Sequence
  primer
aaggtcacgtgtcatggaatg

SEQ ID NO: 62593 - DNA, 38 bp, Artificial Sequence
  primer
gtaaaacgacggccagtagcctgatgagagttgacgtg

SEQ ID NO: 62594 - DNA, 20 bp, Artificial Sequence
  primer
agacacagcccattgtcagg

SEQ ID NO: 62595 - DNA, 37 bp, Artificial Sequence
  primer
gtaaaacgacggccagtactgaactgtgccgctcttg

SEQ ID NO: 62596 - DNA, 22 bp, Artificial Sequence
  primer
acacctctgtttcccttggtag

SEQ ID NO: 62597 - DNA, 23 bp, Artificial Sequence
  primer
aaattgatatgggtgtatgtgcc

SEQ ID NO: 62598 - DNA, 36 bp, Artificial Sequence
  primer
gtaaaacgacggccagtgggttgcccgaatttcttt

SEQ ID NO: 62599 - DNA, 40 bp, Artificial Sequence
  primer
gtaaaacgacggccagttgaacacccattgtgtcttagtg

SEQ ID NO: 62600 - DNA, 40 bp, Artificial Sequence
  primer
gtaaaacgacggccagtccttaggcaaaccagaaacaatc

SEQ ID NO: 62601 - DNA, 38 bp, Artificial Sequence
  primer
gtaaaacgacggccagtgctgcatcacatgaggctaag

SEQ ID NO: 62602 - DNA, 38 bp, Artificial Sequence
  primer
gtaaaacgacggccagtttgctcacctgtcaattctgg

SEQ ID NO: 62603 - DNA, 39 bp, Artificial Sequence
  primer
gtaaaacgacggccagtcggtaataatgatccatcctgg

SEQ ID NO: 62604 - DNA, 39 bp, Artificial Sequence
  primer
gtaaaacgacggccagtgggtgcattaaaggatcagttc

SEQ ID NO: 62605 - DNA, 22 bp, Artificial Sequence
  primer
tggactgatgctgtatacggag

SEQ ID NO: 62606 - DNA, 44 bp, Artificial Sequence
  primer
gtaaaacgacggccagtcctcaacttctagtagtgacaacagtg

SEQ ID NO: 62607 - DNA, 22 bp, Artificial Sequence
  primer
accatgttgaggttgaaactgc

SEQ ID NO: 62608 - DNA, 40 bp, Artificial Sequence
  primer
gtaaaacgacggccagttgaatcctcaagtgctacattcc

SEQ ID NO: 62609 - DNA, 38 bp, Artificial Sequence
  primer
gtaaaacgacggccagtcatgcccagccctagtatttc

SEQ ID NO: 62610 - DNA, 40 bp, Artificial Sequence
  primer
gtaaaacgacggccagtagaagcaagatagagatggcaag

SEQ ID NO: 62611 - DNA, 27 bp, Artificial Sequence
  primer
agttcctggtatttacaatagttcctg

SEQ ID NO: 62612 - DNA, 24 bp, Artificial Sequence
  primer
ccaccatagctctacataatgtgc

SEQ ID NO: 62613 - DNA, 22 bp, Artificial Sequence
  primer
cattgctagttggtgacagagc

SEQ ID NO: 62614 - DNA, 42 bp, Artificial Sequence
  primer
gtaaaacgacggccagtgaagtaacattctgttgctgtttga

SEQ ID NO: 62615 - DNA, 21 bp, Artificial Sequence
  primer
tttccttggtccaaatcactg

SEQ ID NO: 62616 - DNA, 39 bp, Artificial Sequence
  primer
gtaaaacgacggccagtttacgtagcaattgagaagccc

SEQ ID NO: 62617 - DNA, 37 bp, Artificial Sequence; identical to SEQ ID NO: 6368
  primer

SEQ ID NO: 62618 - DNA, 21 bp, Artificial Sequence
  primer
tatcactccaccaggacatcg

SEQ ID NO: 62619 - DNA, 38 bp, Artificial Sequence
  primer
gtaaaacgacggccagttctgacacactagcgcaaacc

SEQ ID NO: 62620 - DNA, 38 bp, Artificial Sequence
  primer
gtaaaacgacggccagttattggtgccgtcattctcac

SEQ ID NO: 62621 - DNA, 38 bp, Artificial Sequence
  primer
gtaaaacgacggccagttggtctgggagtattgatcgg

SEQ ID NO: 62622 - DNA, 37 bp, Artificial Sequence
  primer
gtaaaacgacggccagtagcctggtcattccgagaac

SEQ ID NO: 62623 - DNA, 38 bp, Artificial Sequence
  primer
gtaaaacgacggccagtaatgcagggtcctttgaaatc

SEQ ID NO: 62624 - DNA, 24 bp, Artificial Sequence
  primer
agcatttgtggtttactttgacag

SEQ ID NO: 62625 - DNA, 39 bp, Artificial Sequence
  primer
gtaaaacgacggccagtgggaaacacattgagatttgtg

SEQ ID NO: 62626 - DNA, 20 bp, Artificial Sequence
  primer
aggtaatctgccctccttgg

SEQ ID NO: 62627 - DNA, 21 bp, Artificial Sequence
  primer
ttgcactgagctgtgattgtg

SEQ ID NO: 62628 - DNA, 38 bp, Artificial Sequence
  primer
gtaaaacgacggccagtaagccaaccaaggactgaaag

SEQ ID NO: 62629 - DNA, 38 bp, Artificial Sequence
  primer
gtaaaacgacggccagtgctggtatacactgggccttc

SEQ ID NO: 62630 - DNA, 38 bp, Artificial Sequence
  primer
gtaaaacgacggccagtcccgtctcccatcttctagtg

SEQ ID NO: 62631 - DNA, 37 bp, Artificial Sequence
  primer
gtaaaacgacggccagtgaggactggagggcaaagtg

SEQ ID NO: 62632 - DNA, 19 bp, Artificial Sequence
  primer
tctgcagcctcagtttccc

SEQ ID NO: 62633 - DNA, 38 bp, Artificial Sequence
  primer
gtaaaacgacggccagttggtcgagttacagatggagc

SEQ ID NO: 62634 - DNA, 35 bp, Artificial Sequence
  primer
gtaaaacgacggccagtgggcactgcagatgggag

SEQ ID NO: 62635 - DNA, 20 bp, Artificial Sequence
  primer
cctgagctacctccacatgc

SEQ ID NO: 62636 - DNA, 39 bp, Artificial Sequence
  primer
gtaaaacgacggccagtgggaaacagagacacagagagg

SEQ ID NO: 62637 - DNA, 37 bp, Artificial Sequence
  primer
gtaaaacgacggccagtccttggaatgctggagtcag

SEQ ID NO: 62638 - DNA, 37 bp, Artificial Sequence
  primer
gtaaaacgacggccagtccacgactcggtttatcagc

SEQ ID NO: 62639 - DNA, 21 bp, Artificial Sequence
  primer
agaacatggtgaccttcagcc

SEQ ID NO: 62640 - DNA, 20 bp, Artificial Sequence
  primer
ggaagcagaagagcctggag

SEQ ID NO: 62641 - DNA, 36 bp, Artificial Sequence
  primer
gtaaaacgacggccagtcagcatcgtgaccatcgac

SEQ ID NO: 62642 - DNA, 36 bp, Artificial Sequence
  primer
gtaaaacgacggccagtagtggtggctcggctagag

SEQ ID NO: 62643 - DNA, 21 bp, Artificial Sequence
  primer
tccctgcctttccatttagac

SEQ ID NO: 62644 - DNA, 40 bp, Artificial Sequence
  primer
gtaaaacgacggccagttttaaaggacaagagaagcctcc

SEQ ID NO: 62645 - DNA, 38 bp, Artificial Sequence
  primer
gtaaaacgacggccagttttgggaagtatgttgggagg

SEQ ID NO: 62646 - DNA, 37 bp, Artificial Sequence
  primer
gtaaaacgacggccagtgaaacgaaattcggtccctg

SEQ ID NO: 62647 - DNA, 21 bp, Artificial Sequence
  primer
gattatcacccaggccttctg

SEQ ID NO: 62648 - DNA, 21 bp, Artificial Sequence
  primer
cagtgaggattatggagctgg

SEQ ID NO: 62649 - DNA, 38 bp, Artificial Sequence
  primer
gtaaaacgacggccagtcagggatttgaagctctttgg

SEQ ID NO: 62650 - DNA, 21 bp, Artificial Sequence
  primer
gatggaataggtggcttctgc

SEQ ID NO: 62651 - DNA, 27 bp, Artificial Sequence
  primer
aaacatttcaagtatgttctcaggttt

SEQ ID NO: 62652 - DNA, 38 bp, Artificial Sequence
  primer
gtaaaacgacggccagtttaaatggtctgaaggccacc

SEQ ID NO: 62653 - DNA, 23 bp, Artificial Sequence
  primer
tccctttatccagatagggtcag

SEQ ID NO: 62654 - DNA, 43 bp, Artificial Sequence
  primer
gtaaaacgacggccagttgattgaacaggaagatatatggagg

SEQ ID NO: 62655 - DNA, 21 bp, Artificial Sequence
  primer
aagtaagccctttgctgggtc

SEQ ID NO: 62656 - DNA, 38 bp, Artificial Sequence
  primer
gtaaaacgacggccagtttggttggaacattctgcttc

SEQ ID NO: 62657 - DNA, 19 bp, Artificial Sequence
  primer
aacggcagaaagcagaagc

SEQ ID NO: 62658 - DNA, 21 bp, Artificial Sequence
  primer
tccacagggtggtttagtgtg

SEQ ID NO: 62659 - DNA, 38 bp, Artificial Sequence
  primer
gtaaaacgacggccagtttcctgcatggaacatgagtc

SEQ ID NO: 62660 - DNA, 21 bp, Artificial Sequence
  primer
tctttctttggcctgttgttg

SEQ ID NO: 62661 - DNA, 38 bp, Artificial Sequence
  primer
gtaaaacgacggccagttcatgttgatggacagattgc

SEQ ID NO: 62662 - DNA, 38 bp, Artificial Sequence
  primer
gtaaaacgacggccagtggaagggaatcttctgaccac

SEQ ID NO: 62663 - DNA, 38 bp, Artificial Sequence
  primer
gtaaaacgacggccagttgcagtagctgattgtgggac

SEQ ID NO: 62664 - DNA, 19 bp, Artificial Sequence
  primer
ctcgtgatctccctgcctc

SEQ ID NO: 62665 - DNA, 37 bp, Artificial Sequence
  primer
gtaaaacgacggccagtacttctccgtaccggtccaa

SEQ ID NO: 62666 - DNA, 38 bp, Artificial Sequence
  primer
gtaaaacgacggccagtagcaagggtgtcatcctgaac

SEQ ID NO: 62667 - DNA, 38 bp, Artificial Sequence
  primer
gtaaaacgacggccagtttaaacagggacaggagctgg

SEQ ID NO: 62668 - DNA, 38 bp, Artificial Sequence
  primer
gtaaaacgacggccagttgatgtccattgaagaggtgg

SEQ ID NO: 62669 - DNA, 38 bp, Artificial Sequence
  primer
gtaaaacgacggccagtgttcctgtccgctttaactcc

SEQ ID NO: 62670 - DNA, 38 bp, Artificial Sequence
  primer
gtaaaacgacggccagttggcttcctgtttgtcacttg

SEQ ID NO: 62671 - DNA, 21 bp, Artificial Sequence
  primer
gtttgtcaggcactgctgaag

SEQ ID NO: 62672 - DNA, 38 bp, Artificial Sequence
  primer
gtaaaacgacggccagtttatttgctgcccacacaaag

SEQ ID NO: 62673 - DNA, 23 bp, Artificial Sequence
  primer
gactggtaaggtgttggataggg

SEQ ID NO: 62674 - DNA, 26 bp, Artificial Sequence
  primer
tttgttactttatgaaacatgcaaat

SEQ ID NO: 62675 - DNA, 21 bp, Artificial Sequence
  primer
aaagtttcagcagccatagcc

SEQ ID NO: 62676 - DNA, 22 bp, Artificial Sequence
  primer
gcggaggagagtgtgacattag

SEQ ID NO: 62677 - DNA, 21 bp, Artificial Sequence
  primer
cagtaactgagacctcaccgc

SEQ ID NO: 62678 - DNA, 38 bp, Artificial Sequence
  primer
gtaaaacgacggccagttcctgtttggagggtatgctg

SEQ ID NO: 62679 - DNA, 24 bp, Artificial Sequence
  primer
gacttcacaagctgaagtgttctc

SEQ ID NO: 62680 - DNA, 39 bp, Artificial Sequence
  primer
gtaaaacgacggccagtgcatcaagatagaacttggccc

SEQ ID NO: 62681 - DNA, 21 bp, Artificial Sequence
  primer
cttctggcctcaaggaatcac

SEQ ID NO: 62682 - DNA, 38 bp, Artificial Sequence
  primer
gtaaaacgacggccagtagttctcgatgcccactaacc

SEQ ID NO: 62683 - DNA, 36 bp, Artificial Sequence
  primer
gtaaaacgacggccagtgcccttgggtagggtgaag

SEQ ID NO: 62684 - DNA, 38 bp, Artificial Sequence
  primer
gtaaaacgacggccagtaagcccaaatcgtttaccctc

SEQ ID NO: 62685 - DNA, 21 bp, Artificial Sequence
  primer
tgctcattcgttcccttcttc

SEQ ID NO: 62686 - DNA, 38 bp, Artificial Sequence
  primer
gtaaaacgacggccagttctgggcagatgtgttactcc

SEQ ID NO: 62687 - DNA, 35 bp, Artificial Sequence
  primer
gtaaaacgacggccagtgaggcagcatcctcccag

SEQ ID NO: 62688 - DNA, 38 bp, Artificial Sequence
  primer
gtaaaacgacggccagtgcctgaacaattcacatgctc

SEQ ID NO: 62689 - DNA, 21 bp, Artificial Sequence
  primer
agactgcccatggtaaagagc

SEQ ID NO: 62690 - DNA, 38 bp, Artificial Sequence
  primer
gtaaaacgacggccagttcaccacctttgatagcatcg

SEQ ID NO: 62691 - DNA, 41 bp, Artificial Sequence
  primer
gtaaaacgacggccagttttgatgattctcttatccattgc

SEQ ID NO: 62692 - DNA, 38 bp, Artificial Sequence
  primer
gtaaaacgacggccagtacaatacaattctcctgccgc

SEQ ID NO: 62693 - DNA, 36 bp, Artificial Sequence
  primer
gtaaaacgacggccagtaggtcttggcaaacgatgc

SEQ ID NO: 62694 - DNA, 38 bp, Artificial Sequence
  primer
gtaaaacgacggccagtacttgtgtgggtgacgacttg

SEQ ID NO: 62695 - DNA, 20 bp, Artificial Sequence
  primer
aacaggccaataaagcctgc

SEQ ID NO: 62696 - DNA, 22 bp, Artificial Sequence
  primer
tctgtacttcaagaccttcggc

SEQ ID NO: 62697 - DNA, 20 bp, Artificial Sequence
  primer
agggccctcatcttcatttg

SEQ ID NO: 62698 - DNA, 21 bp, Artificial Sequence
  primer
ggcctgaggagaaagtgtgag

SEQ ID NO: 62699 - DNA, 22 bp, Artificial Sequence
  primer
tgcagtgacttgagacaagtgg

SEQ ID NO: 62700 - DNA, 38 bp, Artificial Sequence
  primer
gtaaaacgacggccagtaacctgactttgagcaggagc

SEQ ID NO: 62701 - DNA, 19 bp, Artificial Sequence
  primer
agctgggattgctccattg

SEQ ID NO: 62702 - DNA, 38 bp, Artificial Sequence
  primer
gtaaaacgacggccagtctctccacatttctgaccgtg

SEQ ID NO: 62703 - DNA, 37 bp, Artificial Sequence
  primer
gtaaaacgacggccagtgtgttgagcccacctctgtc

SEQ ID NO: 62704 - DNA, 42 bp, Artificial Sequence
  primer
gtaaaacgacggccagtttgatggatgagcattaatttaacc

SEQ ID NO: 62705 - DNA, 21 bp, Artificial Sequence
  primer
tacagatgcctgaattgggtc

SEQ ID NO: 62706 - DNA, 38 bp, Artificial Sequence
  primer
gtaaaacgacggccagtggtgggaaaggagaacgagag

SEQ ID NO: 62707 - DNA, 21 bp, Artificial Sequence
  primer
gttgggaaacacaggcttcag

SEQ ID NO: 62708 - DNA, 21 bp, Artificial Sequence
  primer
aagggaccagagtatgggagg

SEQ ID NO: 62709 - DNA, 21 bp, Artificial Sequence
  primer
catgtttgtgaagggatggag

SEQ ID NO: 62710 - DNA, 37 bp, Artificial Sequence
  primer
gtaaaacgacggccagtagtattggtgctgtgtgggc

SEQ ID NO: 62711 - DNA, 22 bp, Artificial Sequence
  primer
tcctgggagtacttccttctca

SEQ ID NO: 62712 - DNA, 38 bp, Artificial Sequence
  primer
gtaaaacgacggccagtaaactcaggatttgggtggtg

SEQ ID NO: 62713 - DNA, 38 bp, Artificial Sequence
  primer
gtaaaacgacggccagtctgggtctttggaccatcttc

SEQ ID NO: 62714 - DNA, 21 bp, Artificial Sequence
  primer
catccatcactatgggccaac

SEQ ID NO: 62715 - DNA, 35 bp, Artificial Sequence
  primer
gtaaaacgacggccagtaccctagcggcctggaag

SEQ ID NO: 62716 - DNA, 18 bp, Artificial Sequence
  primer
gtggcccagagtcgcttc

SEQ ID NO: 62717 - DNA, 22 bp, Artificial Sequence
  primer
gggaagaaagtgaaggtaaccc

SEQ ID NO: 62718 - DNA, 21 bp, Artificial Sequence
  primer
tagagcagggcttggaaactg

SEQ ID NO: 62719 - DNA, 38 bp, Artificial Sequence
  primer
gtaaaacgacggccagtatcttgctcctctccctctgg

SEQ ID NO: 62720 - DNA, 38 bp, Artificial Sequence
  primer
gtaaaacgacggccagtggagagccagccaactgtatc

SEQ ID NO: 62721 - DNA, 38 bp, Artificial Sequence
  primer
gtaaaacgacggccagtgtttccgaaagctacagccac

SEQ ID NO: 62722 - DNA, 36 bp, Artificial Sequence
  primer
gtaaaacgacggccagtacaccaccaccacctctcc

SEQ ID NO: 62723 - DNA, 38 bp, Artificial Sequence
  primer
gtaaaacgacggccagtggagtagttgatcctgccacc

SEQ ID NO: 62724 - DNA, 37 bp, Artificial Sequence
  primer
gtaaaacgacggccagtagctgcctagaagcccgtag

SEQ ID NO: 62725 - DNA, 38 bp, Artificial Sequence
  primer
gtaaaacgacggccagttctcaggaaggagggacagtg

SEQ ID NO: 62726 - DNA, 19 bp, Artificial Sequence
  primer
aagggaggcgctacctgag

SEQ ID NO: 62727 - DNA, 38 bp, Artificial Sequence
  primer
gtaaaacgacggccagttttgggtgtgaattgagcaag

SEQ ID NO: 62728 - DNA, 21 bp, Artificial Sequence
  primer
agtttccttgtacctgctccg

SEQ ID NO: 62729 - DNA, 36 bp, Artificial Sequence
  primer
gtaaaacgacggccagtctttcttgtggctgggtgg

SEQ ID NO: 62730 - DNA, 38 bp, Artificial Sequence
  primer
gtaaaacgacggccagtagccctgaaggtaaagtgtgg

SEQ ID NO: 62731 - DNA, 21 bp, Artificial Sequence
  primer
ccaaggagttcaaggctatcg

SEQ ID NO: 62732 - DNA, 38 bp, Artificial Sequence
  primer
gtaaaacgacggccagttgactgtctgggtttctgtgg

SEQ ID NO: 62733 - DNA, 39 bp, Artificial Sequence
  primer
gtaaaacgacggccagtggctggaaggaataaatagacg

SEQ ID NO: 62734 - DNA, 21 bp, Artificial Sequence
  primer
attggatatgtgcaggttccc

SEQ ID NO: 62735 - DNA, 38 bp, Artificial Sequence
  primer
gtaaaacgacggccagttcgaacgtggaaagttcagtg

SEQ ID NO: 62736 - DNA, 37 bp, Artificial Sequence
  primer
gtaaaacgacggccagtaccctgtggtctgtgtccag

SEQ ID NO: 62737 - DNA, 21 bp, Artificial Sequence
  primer
tcaggaactcaagtctttggg

SEQ ID NO: 62738 - DNA, 37 bp, Artificial Sequence
  primer
gtaaaacgacggccagtgtgacctgctgaagcctttg

SEQ ID NO: 62739 - DNA, 36 bp, Artificial Sequence
  primer
gtaaaacgacggccagtctgcagggaatcagggaag

SEQ ID NO: 62740 - DNA, 38 bp, Artificial Sequence
  primer
gtaaaacgacggccagtaacctgattacgcctgtcagc

SEQ ID NO: 62741 - DNA, 38 bp, Artificial Sequence
  primer
gtaaaacgacggccagttagaaacagacccacactggc

SEQ ID NO: 62742 - DNA, 21 bp, Artificial Sequence
  primer
ctatgcggagaggttactggg

SEQ ID NO: 62743 - DNA, 21 bp, Artificial Sequence
  primer
cacagatctcaggatgatggg

SEQ ID NO: 62744 - DNA, 20 bp, Artificial Sequence
  primer
aattccgtttccaccctttg

SEQ ID NO: 62745 - DNA, 38 bp, Artificial Sequence
  primer
gtaaaacgacggccagttggaacatgtactctgccagg

SEQ ID NO: 62746 - DNA, 21 bp, Artificial Sequence
  primer
gaaggctttactcctggaggc

SEQ ID NO: 62747 - DNA, 21 bp, Artificial Sequence
  primer
tgagtctccaagaggccattc

SEQ ID NO: 62748 - DNA, 22 bp, Artificial Sequence
  primer
cgtgtcctgctgtcttgacttc

SEQ ID NO: 62749 - DNA, 18 bp, Artificial Sequence
  primer
ccttggtgcctggcgtag

SEQ ID NO: 62750 - DNA, 21 bp, Artificial Sequence
  primer
aaatgctcgctaggtggtagc

SEQ ID NO: 62751 - DNA, 21 bp, Artificial Sequence
  primer
gaggcacagtagggatgaagc

SEQ ID NO: 62752 - DNA, 38 bp, Artificial Sequence
  primer
gtaaaacgacggccagtaggaggagtgtatctgcagcc

SEQ ID NO: 62753 - DNA, 35 bp, Artificial Sequence
  primer
gtaaaacgacggccagtgcagcttgtgtggttggg

SEQ ID NO: 62754 - DNA, 21 bp, Artificial Sequence
  primer
agagtattgggacaccttggg

SEQ ID NO: 62755 - DNA, 39 bp, Artificial Sequence
  primer
gtaaaacgacggccagtgatctgccaggataagaaaggg

SEQ ID NO: 62756 - DNA, 21 bp, Artificial Sequence
  primer
caagatccaggagggaatgtg

SEQ ID NO: 62757 - DNA, 37 bp, Artificial Sequence
  primer
gtaaaacgacggccagtagtttcaggaaggcggtagc

SEQ ID NO: 62758 - DNA, 38 bp, Artificial Sequence
  primer
gtaaaacgacggccagtcaacttgccacacatcaggag

SEQ ID NO: 62759 - DNA, 21 bp, Artificial Sequence
  primer
gaggctgagatgggaagattg

SEQ ID NO: 62760 - DNA, 21 bp, Artificial Sequence
  primer
tccttcctctcaggtggtctg

SEQ ID NO: 62761 - DNA, 21 bp, Artificial Sequence
  primer
acacacaccctgaaagacagc

SEQ ID NO: 62762 - DNA, 21 bp, Artificial Sequence
  primer
aataagaggtgccattgtggg

SEQ ID NO: 62763 - DNA, 39 bp, Artificial Sequence
  primer
gtaaaacgacggccagttgacatcctgatcgagcactac

SEQ ID NO: 62764 - DNA, 38 bp, Artificial Sequence
  primer
gtaaaacgacggccagtcattcagaaggtgagtggctg

SEQ ID NO: 62765 - DNA, 38 bp, Artificial Sequence
  primer
gtaaaacgacggccagtatgaagattgacgccttccac

SEQ ID NO: 62766 - DNA, 38 bp, Artificial Sequence
  primer
gtaaaacgacggccagtatggcaaggtactccataccc

SEQ ID NO: 62767 - DNA, 38 bp, Artificial Sequence
  primer
gtaaaacgacggccagtcggatggcaggaaagactaag

SEQ ID NO: 62768 - DNA, 38 bp, Artificial Sequence
  primer
gtaaaacgacggccagtatcgagcaggacatgggtaag

SEQ ID NO: 62769 - DNA, 21 bp, Artificial Sequence
  primer
cagtcctttcagcttcgtgtg

SEQ ID NO: 62770 - DNA, 36 bp, Artificial Sequence
  primer
gtaaaacgacggccagttgagcaggtgggcctttac

SEQ ID NO: 62771 - DNA, 36 bp, Artificial Sequence
  primer
gtaaaacgacggccagtgattcgggagggaggactg

SEQ ID NO: 62772 - DNA, 21 bp, Artificial Sequence
  primer
tatagtgatctggcggtgagg

SEQ ID NO: 62773 - DNA, 21 bp, Artificial Sequence
  primer
gcagtacatgcactcgctgac

SEQ ID NO: 62774 - DNA, 36 bp, Artificial Sequence
  primer
gtaaaacgacggccagtgctgcctggatgaaagagc

SEQ ID NO: 62775 - DNA, 38 bp, Artificial Sequence
  primer
gtaaaacgacggccagttgctggtcagtgttggttagc

SEQ ID NO: 62776 - DNA, 38 bp, Artificial Sequence
  primer
gtaaaacgacggccagttcttccctcaagcagatgtcc

SEQ ID NO: 62777 - DNA, 21 bp, Artificial Sequence
  primer
ccctcagtcagggactcacag

SEQ ID NO: 62778 - DNA, 40 bp, Artificial Sequence
  primer
gtaaaacgacggccagttcccagtgtccaaattatgtcag

SEQ ID NO: 62779 - DNA, 38 bp, Artificial Sequence
  primer
gtaaaacgacggccagtacggtcaggacagatgttgag

SEQ ID NO: 62780 - DNA, 21 bp, Artificial Sequence
  primer
gtaaggtggtggttctctggg

SEQ ID NO: 62781 - DNA, 38 bp, Artificial Sequence
  primer
gtaaaacgacggccagtcataagcaggtgttgaatcgg

SEQ ID NO: 62782 - DNA, 38 bp, Artificial Sequence
  primer
gtaaaacgacggccagttcccagttgtcgttacagtgg

SEQ ID NO: 62783 - DNA, 38 bp, Artificial Sequence
  primer
gtaaaacgacggccagtatcgatgaatgtgtgactgcc

SEQ ID NO: 62784 - DNA, 21 bp, Artificial Sequence
  primer
cttggacagaacacatctcgc

SEQ ID NO: 62785 - DNA, 20 bp, Artificial Sequence
  primer
aacccacttggtggaatgtc

SEQ ID NO: 62786 - DNA, 37 bp, Artificial Sequence
  primer
gtaaaacgacggccagtgctccacatggaagttcgag

SEQ ID NO: 62787 - DNA, 38 bp, Artificial Sequence
  primer
gtaaaacgacggccagtctgaaagcatccgtttcacag

SEQ ID NO: 62788 - DNA, 38 bp, Artificial Sequence
  primer
gtaaaacgacggccagtcaacccagtacagttcatggc

SEQ ID NO: 62789 - DNA, 35 bp, Artificial Sequence
  primer
gtaaaacgacggccagtcctggcacgcatttgttg

SEQ ID NO: 62790 - DNA, 21 bp, Artificial Sequence
  primer
gtgccagatgctaggcttcac

SEQ ID NO: 62791 - DNA, 38 bp, Artificial Sequence
  primer
gtaaaacgacggccagtttactaggccagcacgctttc

SEQ ID NO: 62792 - DNA, 20 bp, Artificial Sequence
  primer
tgtttgtttgcttggttggg

SEQ ID NO: 62793 - DNA, 36 bp, Artificial Sequence
  primer
gtaaaacgacggccagtaagggaggacagcgagagg

SEQ ID NO: 62794 - DNA, 38 bp, Artificial Sequence
  primer
gtaaaacgacggccagttgatcctaatccacctgggac

SEQ ID NO: 62795 - DNA, 40 bp, Artificial Sequence
  primer
gtaaaacgacggccagttgacgtgtgtgttaaatcagtgc

SEQ ID NO: 62796 - DNA, 21 bp, Artificial Sequence
  primer
tctctcttggaacacgtcgag

SEQ ID NO: 62797 - DNA, 38 bp, Artificial Sequence
  primer
gtaaaacgacggccagttgccagtagcatcatgtagcc

SEQ ID NO: 62798 - DNA, 40 bp, Artificial Sequence
  primer
gtaaaacgacggccagtttcctggaaatatggactgtgac

SEQ ID NO: 62799 - DNA, 20 bp, Artificial Sequence
  primer
ccaatcggatgccagagttc

SEQ ID NO: 62800 - DNA, 44 bp, Artificial Sequence
  primer
gtaaaacgacggccagttgaacagaccattagaagtaaagacac

SEQ ID NO: 62801 - DNA, 21 bp, Artificial Sequence
  primer
aaatggctttctgactctggg

SEQ ID NO: 62802 - DNA, 37 bp, Artificial Sequence
  primer
gtaaaacgacggccagtatgcagaatctgagcccaag

SEQ ID NO: 62803 - DNA, 38 bp, Artificial Sequence
  primer
gtaaaacgacggccagttttggtctggttaggcagagg

SEQ ID NO: 62804 - DNA, 40 bp, Artificial Sequence
  primer
gtaaaacgacggccagtagcaatttgttcccttagttgtg

SEQ ID NO: 62805 - DNA, 38 bp, Artificial Sequence
  primer
gtaaaacgacggccagtaaattccatcaccagacaggc

SEQ ID NO: 62806 - DNA, 39 bp, Artificial Sequence
  primer
gtaaaacgacggccagttgcctgtgtgttctctcttcag

SEQ ID NO: 62807 - DNA, 21 bp, Artificial Sequence
  primer
caaggatgtgcttcggaagag

SEQ ID NO: 62808 - DNA, 38 bp, Artificial Sequence
  primer
gtaaaacgacggccagtagggatccatgcatctattgg

SEQ ID NO: 62809 - DNA, 37 bp, Artificial Sequence
  primer
gtaaaacgacggccagtaaactggccttgcttcttgg

SEQ ID NO: 62810 - DNA, 19 bp, Artificial Sequence
  primer
agcgagaggcatggagaag

SEQ ID NO: 62811 - DNA, 38 bp, Artificial Sequence
  primer
gtaaaacgacggccagttcaggagcacctctctctctg

SEQ ID NO: 62812 - DNA, 38 bp, Artificial Sequence
  primer
gtaaaacgacggccagtcactttcccttcctttgcatc

SEQ ID NO: 62813 - DNA, 21 bp, Artificial Sequence
  primer
gctacttaaccaatgggcagc

SEQ ID NO: 62814 - DNA, 38 bp, Artificial Sequence
  primer
gtaaaacgacggccagtgtcttcctgctcaatgccttc

SEQ ID NO: 62815 - DNA, 38 bp, Artificial Sequence
  primer
gtaaaacgacggccagtgagttgtgagctaaggctggc

SEQ ID NO: 62816 - DNA, 35 bp, Artificial Sequence
  primer
gtaaaacgacggccagtcgcccaacagaccaacac

SEQ ID NO: 62817 - DNA, 18 bp, Artificial Sequence
  primer
ctggttccgaggctggtc

SEQ ID NO: 62818 - DNA, 36 bp, Artificial Sequence
  primer
gtaaaacgacggccagttcctctgcagacggtttgg

SEQ ID NO: 62819 - DNA, 37 bp, Artificial Sequence
  primer
gtaaaacgacggccagtgagccgattggtctcagttg

SEQ ID NO: 62820 - DNA, 20 bp, Artificial Sequence
  primer
ctccttcagttggaccaggc

SEQ ID NO: 62821 - DNA, 38 bp, Artificial Sequence
  primer
gtaaaacgacggccagtggtccctgggtctacttgctc

SEQ ID NO: 62822 - DNA, 38 bp, Artificial Sequence
  primer
gtaaaacgacggccagtttaatggtcccttcttcgtcc

SEQ ID NO: 62823 - DNA, 38 bp, Artificial Sequence
  primer
gtaaaacgacggccagtagccttattacccggctcaac

SEQ ID NO: 62824 - DNA, 23 bp, Artificial Sequence
  primer
caggagttcaagaccactgaaac

SEQ ID NO: 62825 - DNA, 38 bp, Artificial Sequence
  primer
gtaaaacgacggccagtgcttcttgcagaaagctgtga

SEQ ID NO: 62826 - DNA, 38 bp, Artificial Sequence
  primer
gtaaaacgacggccagtcctgccttgatggatcttatg

SEQ ID NO: 62827 - DNA, 20 bp, Artificial Sequence
  primer
cgacagagcaagactttgcc

SEQ ID NO: 62828 - DNA, 20 bp, Artificial Sequence
  primer
gggacaagagcgagactttg

SEQ ID NO: 62829 - DNA, 20 bp, Artificial Sequence
  primer
tggttgctattgctgggaac

SEQ ID NO: 62830 - DNA, 22 bp, Artificial Sequence
  primer
tgtgcacattaagaccagaagc

SEQ ID NO: 62831 - DNA, 41 bp, Artificial Sequence
  primer
gtaaaacgacggccagtgaaccagtgatcatttgtcttcag

SEQ ID NO: 62832 - DNA, 19 bp, Artificial Sequence
  primer
cctgagccacaggttggac

SEQ ID NO: 62833 - DNA, 38 bp, Artificial Sequence
  primer
gtaaaacgacggccagttgcagaactcagtggatttgg

SEQ ID NO: 62834 - DNA, 28 bp, Artificial Sequence
  primer
cagtacagaagttgtcttggatgtagtt

SEQ ID NO: 62835 - DNA, 21 bp, Artificial Sequence
  primer
tggccattagaggtagagcac

SEQ ID NO: 62836 - DNA, 40 bp, Artificial Sequence
  primer
gtaaaacgacggccagtcctcagataatgggaaactaggg

SEQ ID NO: 62837 - DNA, 38 bp, Artificial Sequence
  primer
gtaaaacgacggccagtacatagaacagccgctggaag

SEQ ID NO: 62838 - DNA, 22 bp, Artificial Sequence
  primer
tccatgtgtgttagttggaagc

SEQ ID NO: 62839 - DNA, 20 bp, Artificial Sequence
  primer
gtgatctgccagtctgaggc

SEQ ID NO: 62840 - DNA, 28 bp, Artificial Sequence
  primer
tcttgtaactctcatcgtggttattaaa

SEQ ID NO: 62841 - DNA, 21 bp, Artificial Sequence
  primer
gcctcagttgctttctctgtg

SEQ ID NO: 62842 - DNA, 39 bp, Artificial Sequence
  primer
gtaaaacgacggccagtggacactgtaggaacagactgc

SEQ ID NO: 62843 - DNA, 47 bp, Artificial Sequence
  primer
gtaaaacgacggccagtgtgtgattatatttctacataggtgtcaaa

SEQ ID NO: 62844 - DNA, 39 bp, Artificial Sequence
  primer
gtaaaacgacggccagtgggaggttagcaatcattaccc

SEQ ID NO: 62845 - DNA, 24 bp, Artificial Sequence
  primer
gctaaagccagaaactttacagac

SEQ ID NO: 62846 - DNA, 38 bp, Artificial Sequence
  primer
gtaaaacgacggccagtgactagaatcctgggtttggg

SEQ ID NO: 62847 - DNA, 38 bp, Artificial Sequence
  primer
gtaaaacgacggccagtgaaagggacctagctgcagtg

SEQ ID NO: 62848 - DNA, 21 bp, Artificial Sequence
  primer
aggatgaactggtcctgttgg

SEQ ID NO: 62849 - DNA, 38 bp, Artificial Sequence
  primer
gtaaaacgacggccagtttaattaaatgcgggagcagg

SEQ ID NO: 62850 - DNA, 21 bp, Artificial Sequence
  primer
ctcttggtttgtgtctgcctg

SEQ ID NO: 62851 - DNA, 40 bp, Artificial Sequence
  primer
gtaaaacgacggccagtgcaggcccatgatagagtaatag

SEQ ID NO: 62852 - DNA, 38 bp, Artificial Sequence
  primer
gtaaaacgacggccagtttaccgtggagacagaacgtg

SEQ ID NO: 62853 - DNA, 35 bp, Artificial Sequence; identical to SEQ ID NO: 9148
  primer

SEQ ID NO: 62854 - DNA, 21 bp, Artificial Sequence
  primer
cctgttgtcagtaacccaacg

SEQ ID NO: 62855 - DNA, 36 bp, Artificial Sequence
  primer
gtaaaacgacggccagtcattgtggaagaatggccc

SEQ ID NO: 62856 - DNA, 22 bp, Artificial Sequence
  primer
catccgagtctcatttcattcc

SEQ ID NO: 62857 - DNA, 21 bp, Artificial Sequence
  primer
tccattgtttctttgcaggag

SEQ ID NO: 62858 - DNA, 38 bp, Artificial Sequence
  primer
gtaaaacgacggccagttcatgaactgtcctctttgcc

SEQ ID NO: 62859 - DNA, 36 bp, Artificial Sequence
  primer
gtaaaacgacggccagtccggcccaagtcacttaac

SEQ ID NO: 62860 - DNA, 22 bp, Artificial Sequence
  primer
tgccagctccttaaacattgtc

SEQ ID NO: 62861 - DNA, 38 bp, Artificial Sequence
  primer
gtaaaacgacggccagtctcaacaccgaacatggagag

SEQ ID NO: 62862 - DNA, 21 bp, Artificial Sequence
  primer
ttggctgctggaaactaaatg

SEQ ID NO: 62863 - DNA, 42 bp, Artificial Sequence
  primer
gtaaaacgacggccagtttcagtttcgggtctagttgttatg

SEQ ID NO: 62864 - DNA, 25 bp, Artificial Sequence
  primer
ttggtcactctcaagaactatgacc

SEQ ID NO: 62865 - DNA, 20 bp, Artificial Sequence
  primer
ggcttcctgtttcttcctgc

SEQ ID NO: 62866 - DNA, 39 bp, Artificial Sequence
  primer
gtaaaacgacggccagtaatcaccacaattctgtccctc

SEQ ID NO: 62867 - DNA, 38 bp, Artificial Sequence
  primer
gtaaaacgacggccagtcttaatgccaacattgcaagc

SEQ ID NO: 62868 - DNA, 41 bp, Artificial Sequence
  primer
gtaaaacgacggccagtcatacagtcccgtttcatgttatc

SEQ ID NO: 62869 - DNA, 25 bp, Artificial Sequence
  primer
cataaggctaggcagtttgtaattg

SEQ ID NO: 62870 - DNA, 39 bp, Artificial Sequence
  primer
gtaaaacgacggccagtgtggttgaaatgaaagctgttg

SEQ ID NO: 62871 - DNA, 24 bp, Artificial Sequence
  primer
tgtgaggtaattaggtctctgtgg

SEQ ID NO: 62872 - DNA, 38 bp, Artificial Sequence
  primer
gtaaaacgacggccagttgggagatctgtggtgttgag

SEQ ID NO: 62873 - DNA, 37 bp, Artificial Sequence
  primer
gtaaaacgacggccagtagcctcagagagaggatggg

SEQ ID NO: 62874 - DNA, 21 bp, Artificial Sequence
  primer
tgtgggcacttgaatcttctg

SEQ ID NO: 62875 - DNA, 38 bp, Artificial Sequence
  primer
gtaaaacgacggccagttgaggtgctttctcacattgg

SEQ ID NO: 62876 - DNA, 38 bp, Artificial Sequence
  primer
gtaaaacgacggccagttgaggattgggttgaacttcc

SEQ ID NO: 62877 - DNA, 37 bp, Artificial Sequence
  primer
gtaaaacgacggccagttctaacaattgccagcgtgc

SEQ ID NO: 62878 - DNA, 21 bp, Artificial Sequence
  primer
tggtctgtcacagtctgctcc

SEQ ID NO: 62879 - DNA, 38 bp, Artificial Sequence
  primer
gtaaaacgacggccagtttgggtgtcataatgctcagg

SEQ ID NO: 62880 - DNA, 21 bp, Artificial Sequence
  primer
tggttaacttgccaccactcc

SEQ ID NO: 62881 - DNA, 22 bp, Artificial Sequence
  primer
aggaagagaactaccagacccg

SEQ ID NO: 62882 - DNA, 18 bp, Artificial Sequence
  primer
ggtgatctgcctgccttg

SEQ ID NO: 62883 - DNA, 37 bp, Artificial Sequence
  primer
gtaaaacgacggccagtccactgcttccagcctactg

SEQ ID NO: 62884 - DNA, 21 bp, Artificial Sequence
  primer
acagctcacccgaggtcatac

SEQ ID NO: 62885 - DNA, 21 bp, Artificial Sequence
  primer
tggaaacatacatcctggagc

SEQ ID NO: 62886 - DNA, 21 bp, Artificial Sequence
  primer
ccacccaaggtatcctcttcc

SEQ ID NO: 62887 - DNA, 40 bp, Artificial Sequence
  primer
gtaaaacgacggccagttgaaatggttgtgattaggatgg

SEQ ID NO: 62888 - DNA, 38 bp, Artificial Sequence
  primer
gtaaaacgacggccagttcttcatggagaggttgggag

SEQ ID NO: 62889 - DNA, 23 bp, Artificial Sequence
  primer
ggtgtgatacacaaaccgttagc

SEQ ID NO: 62890 - DNA, 38 bp, Artificial Sequence
  primer
gtaaaacgacggccagtttgaaacccgaacacacattg

SEQ ID NO: 62891 - DNA, 19 bp, Artificial Sequence
  primer
cagctgccagtatgttgcc

SEQ ID NO: 62892 - DNA, 43 bp, Artificial Sequence
  primer
gtaaaacgacggccagtactattatcctctggagtttgtgttg

SEQ ID NO: 62893 - DNA, 41 bp, Artificial Sequence
  primer
gtaaaacgacggccagtaaacagactccacataggtcaagc

SEQ ID NO: 62894 - DNA, 38 bp, Artificial Sequence
  primer
gtaaaacgacggccagtggagtatcaccagcatgggtc

SEQ ID NO: 62895 - DNA, 38 bp, Artificial Sequence
  primer
gtaaaacgacggccagtccactgtgggtaaagacctga

SEQ ID NO: 62896 - DNA, 40 bp, Artificial Sequence
  primer
gtaaaacgacggccagtgggctaatggttattacattccg

SEQ ID NO: 62897 - DNA, 24 bp, Artificial Sequence
  primer
cctgcatgtacattaatatcgtcg

SEQ ID NO: 62898 - DNA, 22 bp, Artificial Sequence
  primer
tgggtagctgaggaaacttcac

SEQ ID NO: 62899 - DNA, 40 bp, Artificial Sequence
  primer
gtaaaacgacggccagtttgtgatcagcaaacctttagaa

SEQ ID NO: 62900 - DNA, 42 bp, Artificial Sequence
  primer
gtaaaacgacggccagttttgctcactggagaatacagtaaa

SEQ ID NO: 62901 - DNA, 21 bp, Artificial Sequence
  primer
aaatatgcaccaaatgccctg

SEQ ID NO: 62902 - DNA, 35 bp, Artificial Sequence
  primer
gtaaaacgacggccagtaaagcagggtggaatggg

SEQ ID NO: 62903 - DNA, 41 bp, Artificial Sequence
  primer
gtaaaacgacggccagttctgacataggtaaagtgggaagg

SEQ ID NO: 62904 - DNA, 39 bp, Artificial Sequence
  primer
gtaaaacgacggccagtcacagttcccattccagtcatc

SEQ ID NO: 62905 - DNA, 20 bp, Artificial Sequence
  primer
ggttcagggctgaggcttac

SEQ ID NO: 62906 - DNA, 20 bp, Artificial Sequence
  primer
agggcagctcatctctttcc

SEQ ID NO: 62907 - DNA, 40 bp, Artificial Sequence
  primer
gtaaaacgacggccagttccacaagtatgtggttaggctg

SEQ ID NO: 62908 - DNA, 38 bp, Artificial Sequence
  primer
gtaaaacgacggccagtcattgcagcaggatctctttg

SEQ ID NO: 62909 - DNA, 38 bp, Artificial Sequence
  primer
gtaaaacgacggccagtttcttaccctgaccttggtgg

SEQ ID NO: 62910 - DNA, 21 bp, Artificial Sequence
  primer
tacagactggtttgggtggtg

SEQ ID NO: 62911 - DNA, 38 bp, Artificial Sequence
  primer
gtaaaacgacggccagtttcgtgttaaccagggctttc

SEQ ID NO: 62912 - DNA, 23 bp, Artificial Sequence
  primer
ttcatgtaaatgggttacttgcc

SEQ ID NO: 62913 - DNA, 38 bp, Artificial Sequence
  primer
gtaaaacgacggccagtacatgctctcagcccttcttc

SEQ ID NO: 62914 - DNA, 18 bp, Artificial Sequence
  primer
atgccggttctgcatgtg

SEQ ID NO: 62915 - DNA, 39 bp, Artificial Sequence
  primer
gtaaaacgacggccagtgcctttatcagaatgcttggtg

SEQ ID NO: 62916 - DNA, 21 bp, Artificial Sequence
  primer
ctaaccaggagccatgagagg

SEQ ID NO: 62917 - DNA, 39 bp, Artificial Sequence
  primer
gtaaaacgacggccagtggatgtcatcatttctgggaac

SEQ ID NO: 62918 - DNA, 37 bp, Artificial Sequence
  primer
gtaaaacgacggccagtctgtgcaggtgcagcttatg

SEQ ID NO: 62919 - DNA, 39 bp, Artificial Sequence
  primer
gtaaaacgacggccagtaacatgcaaattatgcagtccc

SEQ ID NO: 62920 - DNA, 38 bp, Artificial Sequence
  primer
gtaaaacgacggccagtttggaattccttccatgttgg

SEQ ID NO: 62921 - DNA, 21 bp, Artificial Sequence
  primer
acgggacaacgctatgaacac

SEQ ID NO: 62922 - DNA, 21 bp, Artificial Sequence
  primer
gattcacacgggaattaagcc

SEQ ID NO: 62923 - DNA, 37 bp, Artificial Sequence
  primer
gtaaaacgacggccagtcagccagaagtcttgccttg

SEQ ID NO: 62924 - DNA, 38 bp, Artificial Sequence
  primer
gtaaaacgacggccagtaactcacacgggagagagacc

SEQ ID NO: 62925 - DNA, 38 bp, Artificial Sequence
  primer
gtaaaacgacggccagttcagcctgtctcttccacagg

SEQ ID NO: 62926 - DNA, 38 bp, Artificial Sequence
  primer
gtaaaacgacggccagtcagatctcctcatccctgagc

SEQ ID NO: 62927 - DNA, 39 bp, Artificial Sequence
  primer
gtaaaacgacggccagtaatatagtcttcctgggctggg

SEQ ID NO: 62928 - DNA, 37 bp, Artificial Sequence
  primer
gtaaaacgacggccagttacggtttgccttcatcctg

SEQ ID NO: 62929 - DNA, 37 bp, Artificial Sequence
  primer
gtaaaacgacggccagtggagtcctgccctcagattc

SEQ ID NO: 62930 - DNA, 38 bp, Artificial Sequence
  primer
gtaaaacgacggccagtcccagaagacgtcgcatttac

SEQ ID NO: 62931 - DNA, 35 bp, Artificial Sequence
  primer
gtaaaacgacggccagtgacgtcacagaaggcggg

SEQ ID NO: 62932 - DNA, 21 bp, Artificial Sequence
  primer
agacctacatgccaaagggag

SEQ ID NO: 62933 - DNA, 37 bp, Artificial Sequence
  primer
gtaaaacgacggccagtgttgtcaggctggtctccac

SEQ ID NO: 62934 - DNA, 38 bp, Artificial Sequence
  primer
gtaaaacgacggccagtgggtgaagaattcaaactggg

SEQ ID NO: 62935 - DNA, 21 bp, Artificial Sequence
  primer
gtggtgagtcatcgttcatgc

SEQ ID NO: 62936 - DNA, 38 bp, Artificial Sequence
  primer
gtaaaacgacggccagtcaatgctccctccatcatttc

SEQ ID NO: 62937 - DNA, 21 bp, Artificial Sequence
  primer
agaacggagaggctttctgag

SEQ ID NO: 62938 - DNA, 21 bp, Artificial Sequence
  primer
tccaaagatcaatagccaccc

SEQ ID NO: 62939 - DNA, 21 bp, Artificial Sequence
  primer
gaatccagaagggattgatgg

SEQ ID NO: 62940 - DNA, 21 bp, Artificial Sequence
  primer
aagaaactgtgtagcggaggc

SEQ ID NO: 62941 - DNA, 19 bp, Artificial Sequence
  primer
agaactgcgaaggaggcag

SEQ ID NO: 62942 - DNA, 36 bp, Artificial Sequence
  primer
gtaaaacgacggccagtcaaaccgtcagccagactc

SEQ ID NO: 62943 - DNA, 21 bp, Artificial Sequence
  primer
gagactaatacgtgcgggctg

SEQ ID NO: 62944 - DNA, 21 bp, Artificial Sequence
  primer
gatcagccctgtctcaaggac

SEQ ID NO: 62945 - DNA, 21 bp, Artificial Sequence
  primer
tcctgggaagctgtttctgtc

SEQ ID NO: 62946 - DNA, 20 bp, Artificial Sequence
  primer
gacccacaagcctctcccta

SEQ ID NO: 62947 - DNA, 21 bp, Artificial Sequence
  primer
agctgggtttcagttgtgatg

SEQ ID NO: 62948 - DNA, 37 bp, Artificial Sequence
  primer
gtaaaacgacggccagtacagctgacccttagggagc

SEQ ID NO: 62949 - DNA, 18 bp, Artificial Sequence
  primer
ctgaccaggaggcaggtg

SEQ ID NO: 62950 - DNA, 38 bp, Artificial Sequence
  primer
gtaaaacgacggccagtggaatgagtggtcagggctac

SEQ ID NO: 62951 - DNA, 36 bp, Artificial Sequence
  primer
gtaaaacgacggccagttacctgtgctcagggtggg

SEQ ID NO: 62952 - DNA, 36 bp, Artificial Sequence
  primer
gtaaaacgacggccagtccaggatacagtgcggacc

SEQ ID NO: 62953 - DNA, 21 bp, Artificial Sequence
  primer
tccacacatatggactcccag

SEQ ID NO: 62954 - DNA, 38 bp, Artificial Sequence
  primer
gtaaaacgacggccagtttgcctgtggttgagagctac

SEQ ID NO: 62955 - DNA, 20 bp, Artificial Sequence
  primer
ggctgctctcagactcctgg

SEQ ID NO: 62956 - DNA, 24 bp, Artificial Sequence
  primer
aatctgtttggaagatggactagg

SEQ ID NO: 62957 - DNA, 37 bp, Artificial Sequence
  primer
gtaaaacgacggccagtgctacaggagagggcagctc

SEQ ID NO: 62958 - DNA, 35 bp, Artificial Sequence
  primer
gtaaaacgacggccagtgcccaggctggagaaatg

SEQ ID NO: 62959 - DNA, 38 bp, Artificial Sequence
  primer
gtaaaacgacggccagtaatgcacataaagtgcttggc

SEQ ID NO: 62960 - DNA, 37 bp, Artificial Sequence
  primer
gtaaaacgacggccagtcttcggttgaatgaccaagg

SEQ ID NO: 62961 - DNA, 38 bp, Artificial Sequence
  primer
gtaaaacgacggccagtaggagtcctgttggtgtgatg

SEQ ID NO: 62962 - DNA, 41 bp, Artificial Sequence
  primer
gtaaaacgacggccagttttgcttcactttgtcttattcat

SEQ ID NO: 62963 - DNA, 21 bp, Artificial Sequence
  primer
ttgtgcctttatttgtgggaa

SEQ ID NO: 62964 - DNA, 21 bp, Artificial Sequence
  primer
aacgcacatgtcatggttctg

SEQ ID NO: 62965 - DNA, 38 bp, Artificial Sequence
  primer
gtaaaacgacggccagttgcaaagagcttcagagaagg

SEQ ID NO: 62966 - DNA, 38 bp, Artificial Sequence
  primer
gtaaaacgacggccagtgctgaggttaagtttcccagg

SEQ ID NO: 62967 - DNA, 37 bp, Artificial Sequence
  primer
gtaaaacgacggccagttgttcagtcaaaggttgggc

SEQ ID NO: 62968 - DNA, 38 bp, Artificial Sequence
  primer
gtaaaacgacggccagtctgcctcttagcacctttacg

SEQ ID NO: 62969 - DNA, 40 bp, Artificial Sequence
  primer
gtaaaacgacggccagttcagctgaaggagagaaatgttg

SEQ ID NO: 62970 - DNA, 36 bp, Artificial Sequence
  primer
gtaaaacgacggccagtccacaaacgtcaccattgc

SEQ ID NO: 62971 - DNA, 21 bp, Artificial Sequence
  primer
tgctattgatggcacaatctt

SEQ ID NO: 62972 - DNA, 40 bp, Artificial Sequence
  primer
gtaaaacgacggccagttccttggtagaggtaacctgatg

SEQ ID NO: 62973 - DNA, 47 bp, Artificial Sequence
  primer
gtaaaacgacggccagtggttggaattgtttatatagagtgtgttat

SEQ ID NO: 62974 - DNA, 39 bp, Artificial Sequence
  primer
gtaaaacgacggccagtttggttaacaggatgtgtgtgg

SEQ ID NO: 62975 - DNA, 40 bp, Artificial Sequence
  primer
gtaaaacgacggccagttcataatgcttcagtgtttgtgg

SEQ ID NO: 62976 - DNA, 39 bp, Artificial Sequence
  primer
gtaaaacgacggccagtaactccatggtcttagcagtcg

SEQ ID NO: 62977 - DNA, 21 bp, Artificial Sequence
  primer
ctgcacccagcctcttatttc

SEQ ID NO: 62978 - DNA, 39 bp, Artificial Sequence
  primer
gtaaaacgacggccagtagggtatggcatagtgctcttc

SEQ ID NO: 62979 - DNA, 23 bp, Artificial Sequence
  primer
cagtgggagcattgatgagttac

SEQ ID NO: 62980 - DNA, 20 bp, Artificial Sequence
  primer
ctggttgccagagtgagacc

SEQ ID NO: 62981 - DNA, 38 bp, Artificial Sequence
  primer
gtaaaacgacggccagtgtctttccatttgatgttgcg

SEQ ID NO: 62982 - DNA, 26 bp, Artificial Sequence
  primer
tgttctgttacttggatgtgaaactc

SEQ ID NO: 62983 - DNA, 39 bp, Artificial Sequence
  primer
gtaaaacgacggccagtgctggtgaatacatgtttcctg

SEQ ID NO: 62984 - DNA, 22 bp, Artificial Sequence
  primer
ccggcaagagtacagtaacgtc

SEQ ID NO: 62985 - DNA, 39 bp, Artificial Sequence
  primer
gtaaaacgacggccagtcagccctacactttggaatctg

SEQ ID NO: 62986 - DNA, 21 bp, Artificial Sequence
  primer
tcgattacgtatcctccctgg

SEQ ID NO: 62987 - DNA, 38 bp, Artificial Sequence
  primer
gtaaaacgacggccagtcccaggtgcaagtgaagaaag

SEQ ID NO: 62988 - DNA, 21 bp, Artificial Sequence
  primer
ctttctcattgcctctttccg

SEQ ID NO: 62989 - DNA, 37 bp, Artificial Sequence
  primer
gtaaaacgacggccagtttggcctcctgaagtactgg

SEQ ID NO: 62990 - DNA, 40 bp, Artificial Sequence
  primer
gtaaaacgacggccagtgaaagacttcacccacaaatgag

SEQ ID NO: 62991 - DNA, 25 bp, Artificial Sequence
  primer
gaaattagtagcgacgatagcaaag

SEQ ID NO: 62992 - DNA, 39 bp, Artificial Sequence
  primer
gtaaaacgacggccagtccaaatactatgacctccctgc

SEQ ID NO: 62993 - DNA, 38 bp, Artificial Sequence
  primer
gtaaaacgacggccagtgaaagcttacccttggcagag

SEQ ID NO: 62994 - DNA, 37 bp, Artificial Sequence
  primer
gtaaaacgacggccagtgttcttgcacaggttcaccc

SEQ ID NO: 62995 - DNA, 40 bp, Artificial Sequence
  primer
gtaaaacgacggccagtggaagttctgaagctgtgaaacc

SEQ ID NO: 62996 - DNA, 20 bp, Artificial Sequence
  primer
gaaagcatttaggcagccag

SEQ ID NO: 62997 - DNA, 41 bp, Artificial Sequence
  primer
gtaaaacgacggccagtccttctaaaggtttcctctctgtg

SEQ ID NO: 62998 - DNA, 35 bp, Artificial Sequence
  primer
gtaaaacgacggccagtatgccactgcaccagctc

SEQ ID NO: 62999 - DNA, 22 bp, Artificial Sequence
  primer
gacacatttcaatttaaggccc

SEQ ID NO: 63000 - DNA, 22 bp, Artificial Sequence
  primer
aagcccatggtcataataaacg

SEQ ID NO: 63001 - DNA, 22 bp, Artificial Sequence
  primer
ggtaggtacccgtagttccagc

SEQ ID NO: 63002 - DNA, 36 bp, Artificial Sequence
  primer
gtaaaacgacggccagttggtctggaaatccttgcc

SEQ ID NO: 63003 - DNA, 26 bp, Artificial Sequence
  primer
attaattctatttgttggagggtagg

SEQ ID NO: 63004 - DNA, 39 bp, Artificial Sequence
  primer
gtaaaacgacggccagtccggcctaaagctaatcttacg

SEQ ID NO: 63005 - DNA, 35 bp, Artificial Sequence
  primer
gtaaaacgacggccagtcactgcacctggattgcc

SEQ ID NO: 63006 - DNA, 21 bp, Artificial Sequence
  primer
gcgcctggctaacactttaat

SEQ ID NO: 63007 - DNA, 43 bp, Artificial Sequence
  primer
gtaaaacgacggccagtaaactaacaatatgccataacttccc

SEQ ID NO: 63008 - DNA, 38 bp, Artificial Sequence
  primer
gtaaaacgacggccagtgggatttgatcactgggtttc

SEQ ID NO: 63009 - DNA, 38 bp, Artificial Sequence
  primer
gtaaaacgacggccagtcccaggagcttggatttaagg

SEQ ID NO: 63010 - DNA, 39 bp, Artificial Sequence
  primer
gtaaaacgacggccagttgtggctaactgtcttgctacc

SEQ ID NO: 63011 - DNA, 24 bp, Artificial Sequence
  primer
tttcagtttgagcttattctgtgg

SEQ ID NO: 63012 - DNA, 40 bp, Artificial Sequence
  primer
gtaaaacgacggccagttgattaatgtaattcacggctgc

SEQ ID NO: 63013 - DNA, 21 bp, Artificial Sequence
  primer
tgaggcagaggatcacttgag

SEQ ID NO: 63014 - DNA, 23 bp, Artificial Sequence
  primer
aaagcagtttcatcctcaagaag

SEQ ID NO: 63015 - DNA, 22 bp, Artificial Sequence
  primer
aagatgtcaaaggatctcaggc

SEQ ID NO: 63016 - DNA, 42 bp, Artificial Sequence
  primer
gtaaaacgacggccagtaaaattatgaggggtagtgactcag

SEQ ID NO: 63017 - DNA, 22 bp, Artificial Sequence
  primer
tcttacagaattccaaatgcgg

SEQ ID NO: 63018 - DNA, 21 bp, Artificial Sequence
  primer
agtaactgtggatgccagtgc

SEQ ID NO: 63019 - DNA, 40 bp, Artificial Sequence
  primer
gtaaaacgacggccagttttgacactgacttggactttcc

SEQ ID NO: 63020 - DNA, 22 bp, Artificial Sequence
  primer
tgatggatggacttctcaaagc

SEQ ID NO: 63021 - DNA, 39 bp, Artificial Sequence
  primer
gtaaaacgacggccagtggcaaggaaactaaactggttg

SEQ ID NO: 63022 - DNA, 37 bp, Artificial Sequence
  primer
gtaaaacgacggccagtccaacccttcgaaacatctg

SEQ ID NO: 63023 - DNA, 38 bp, Artificial Sequence
  primer
gtaaaacgacggccagtacttgtaaatgaatgcaggcg

SEQ ID NO: 63024 - DNA, 19 bp, Artificial Sequence
  primer
cctgtatcagccgcctgtg

SEQ ID NO: 63025 - DNA, 21 bp, Artificial Sequence
  primer
actcagtaccagcgggacttc

SEQ ID NO: 63026 - DNA, 36 bp, Artificial Sequence
  primer
gtaaaacgacggccagtgatgaggactgcctggagc

SEQ ID NO: 63027 - DNA, 21 bp, Artificial Sequence
  primer
caactcctggaggatgcagag

SEQ ID NO: 63028 - DNA, 20 bp, Artificial Sequence
  primer
gacacttacgtcacgtccgc

SEQ ID NO: 63029 - DNA, 20 bp, Artificial Sequence
  primer
agctgtggagaccagtgagg

SEQ ID NO: 63030 - DNA, 21 bp, Artificial Sequence
  primer
acattcagcttcctggaaagg

SEQ ID NO: 63031 - DNA, 38 bp, Artificial Sequence
  primer
gtaaaacgacggccagtctctccacctagtggcagctc

SEQ ID NO: 63032 - DNA, 21 bp, Artificial Sequence
  primer
atcagagcaaacggaaactgg

SEQ ID NO: 63033 - DNA, 22 bp, Artificial Sequence
  primer
gaccatgtggaagtttctgagg

SEQ ID NO: 63034 - DNA, 38 bp, Artificial Sequence
  primer
gtaaaacgacggccagtaagtggagcatttcattgcag

SEQ ID NO: 63035 - DNA, 38 bp, Artificial Sequence
  primer
gtaaaacgacggccagtttctctttacctccgtgcctg

SEQ ID NO: 63036 - DNA, 38 bp, Artificial Sequence
  primer
gtaaaacgacggccagttgtctttgtgactccaccagg

SEQ ID NO: 63037 - DNA, 38 bp, Artificial Sequence
  primer
gtaaaacgacggccagttcttccaggtgaccacagttc

SEQ ID NO: 63038 - DNA, 38 bp, Artificial Sequence
  primer
gtaaaacgacggccagtttattgggagtgagggagcag

SEQ ID NO: 63039 - DNA, 38 bp, Artificial Sequence
  primer
gtaaaacgacggccagtgctgggaagtactcgggtatg

SEQ ID NO: 63040 - DNA, 21 bp, Artificial Sequence
  primer
ttccctccttgtcagcaagtc

SEQ ID NO: 63041 - DNA, 21 bp, Artificial Sequence
  primer
gggagacatttggctatcctg

SEQ ID NO: 63042 - DNA, 38 bp, Artificial Sequence
  primer
gtaaaacgacggccagtggaccttcatggactctctcg

SEQ ID NO: 63043 - DNA, 20 bp, Artificial Sequence
  primer
gtctaggagggcagaggcag

SEQ ID NO: 63044 - DNA, 21 bp, Artificial Sequence
  primer
agtctctgggctggatagctg

SEQ ID NO: 63045 - DNA, 36 bp, Artificial Sequence
  primer
gtaaaacgacggccagtgagggctgaccctcagatg

SEQ ID NO: 63046 - DNA, 21 bp, Artificial Sequence
  primer
agctcctggtgacagaagagg

SEQ ID NO: 63047 - DNA, 38 bp, Artificial Sequence
  primer
gtaaaacgacggccagtatggaatgcgaaatcttagcc

SEQ ID NO: 63048 - DNA, 37 bp, Artificial Sequence
  primer
gtaaaacgacggccagtgaaggtgagggccaagaaag

SEQ ID NO: 63049 - DNA, 38 bp, Artificial Sequence
  primer
gtaaaacgacggccagtttcccttcttggtctctgctc

SEQ ID NO: 63050 - DNA, 38 bp, Artificial Sequence
  primer
gtaaaacgacggccagtaagagacctacagtcaggccc

SEQ ID NO: 63051 - DNA, 38 bp, Artificial Sequence
  primer
gtaaaacgacggccagtctttctctctccgtcctcacc

SEQ ID NO: 63052 - DNA, 21 bp, Artificial Sequence
  primer
tcctcttgtcttggaggttgc

SEQ ID NO: 63053 - DNA, 38 bp, Artificial Sequence
  primer
gtaaaacgacggccagtctaacccaactgccacatcac

SEQ ID NO: 63054 - DNA, 21 bp, Artificial Sequence
  primer
tctgaagcaatcaagtgccag

SEQ ID NO: 63055 - DNA, 38 bp, Artificial Sequence
  primer
gtaaaacgacggccagtccaagtgtctgactcgcaaag

SEQ ID NO: 63056 - DNA, 21 bp, Artificial Sequence
  primer
aaagctaaggcagcacaggtc

SEQ ID NO: 63057 - DNA, 38 bp, Artificial Sequence
  primer
gtaaaacgacggccagtggtggtaaggctgggaattta

SEQ ID NO: 63058 - DNA, 21 bp, Artificial Sequence
  primer
cctcagcctcccaagtaactg

SEQ ID NO: 63059 - DNA, 18 bp, Artificial Sequence
  primer
cctgggttcacgccattc

SEQ ID NO: 63060 - DNA, 38 bp, Artificial Sequence
  primer
gtaaaacgacggccagtgtcggaaggaggtggagagtc

SEQ ID NO: 63061 - DNA, 21 bp, Artificial Sequence
  primer
tcaccttcctgtccaatttcc

SEQ ID NO: 63062 - DNA, 38 bp, Artificial Sequence
  primer
gtaaaacgacggccagttgtgacctactgtgccagacc

SEQ ID NO: 63063 - DNA, 38 bp, Artificial Sequence
  primer
gtaaaacgacggccagttccttgttaggaggcaactgg

SEQ ID NO: 63064 - DNA, 37 bp, Artificial Sequence
  primer
gtaaaacgacggccagtacacagtgccctttgacctg

SEQ ID NO: 63065 - DNA, 38 bp, Artificial Sequence
  primer
gtaaaacgacggccagttggtcctggacaacaactctg

SEQ ID NO: 63066 - DNA, 37 bp, Artificial Sequence
  primer
gtaaaacgacggccagtaaagaacagcaagcgcagag

SEQ ID NO: 63067 - DNA, 38 bp, Artificial Sequence
  primer
gtaaaacgacggccagttcgaagcactttcacttcgtc

SEQ ID NO: 63068 - DNA, 38 bp, Artificial Sequence
  primer
gtaaaacgacggccagtagggctgttggtaggatcaag

SEQ ID NO: 63069 - DNA, 21 bp, Artificial Sequence
  primer
agcgaagagacaagcacttcc

SEQ ID NO: 63070 - DNA, 38 bp, Artificial Sequence
  primer
gtaaaacgacggccagttgtgtaccagatccagaaccg

SEQ ID NO: 63071 - DNA, 21 bp, Artificial Sequence
  primer
cagaggccctatgcctagttg

SEQ ID NO: 63072 - DNA, 20 bp, Artificial Sequence
  primer
aaagcttagggagcaggcag

SEQ ID NO: 63073 - DNA, 37 bp, Artificial Sequence
  primer
gtaaaacgacggccagttgcctgcctttgtttctgac

SEQ ID NO: 63074 - DNA, 37 bp, Artificial Sequence
  primer
gtaaaacgacggccagtagtgctgggcacacagtagc

SEQ ID NO: 63075 - DNA, 38 bp, Artificial Sequence
  primer
gtaaaacgacggccagtgttggtaagtccatgggttgg

SEQ ID NO: 63076 - DNA, 38 bp, Artificial Sequence
  primer
gtaaaacgacggccagtgggtaacaacaggtctttggg

SEQ ID NO: 63077 - DNA, 38 bp, Artificial Sequence
  primer
gtaaaacgacggccagtaagggtaagggttcccacatc

SEQ ID NO: 63078 - DNA, 38 bp, Artificial Sequence
  primer
gtaaaacgacggccagtgtggagcctacctggtctgag

SEQ ID NO: 63079 - DNA, 21 bp, Artificial Sequence
  primer
ctcagtttctccacctgtccc

SEQ ID NO: 63080 - DNA, 37 bp, Artificial Sequence
  primer
gtaaaacgacggccagtctctgcaggtctgtgggttc

SEQ ID NO: 63081 - DNA, 20 bp, Artificial Sequence
  primer
aggaagaacccgagaccatc

SEQ ID NO: 63082 - DNA, 21 bp, Artificial Sequence
  primer
gtctcctggtccaagatgagg

SEQ ID NO: 63083 - DNA, 21 bp, Artificial Sequence
  primer
ctgtcacagaagcacactggg

SEQ ID NO: 63084 - DNA, 37 bp, Artificial Sequence
  primer
gtaaaacgacggccagtgcagtgcacctgggttagag

SEQ ID NO: 63085 - DNA, 21 bp, Artificial Sequence
  primer
tacagagaagaggaggtgggc

SEQ ID NO: 63086 - DNA, 37 bp, Artificial Sequence
  primer
gtaaaacgacggccagtctgtccttcctgtcctgtcg

SEQ ID NO: 63087 - DNA, 38 bp, Artificial Sequence
  primer
gtaaaacgacggccagtctctgaccttgttccaaaggc

SEQ ID NO: 63088 - DNA, 20 bp, Artificial Sequence
  primer
gaaactgggaaccaagaggc

SEQ ID NO: 63089 - DNA, 38 bp, Artificial Sequence
  primer
gtaaaacgacggccagtgcctcgtttacaagtggatgc

SEQ ID NO: 63090 - DNA, 36 bp, Artificial Sequence
  primer
gtaaaacgacggccagttttacaagtggatgcgggc

SEQ ID NO: 63091 - DNA, 21 bp, Artificial Sequence
  primer
tttgaccacctgtttgacctc

SEQ ID NO: 63092 - DNA, 39 bp, Artificial Sequence
  primer
gtaaaacgacggccagtgaatcctctgtctaaccctggc

SEQ ID NO: 63093 - DNA, 38 bp, Artificial Sequence
  primer
gtaaaacgacggccagtagaatcgcagatagccctgag

SEQ ID NO: 63094 - DNA, 21 bp, Artificial Sequence
  primer
tccaatcacagactccaggtg

SEQ ID NO: 63095 - DNA, 21 bp, Artificial Sequence
  primer
tgtaatctcagggctttggtg

SEQ ID NO: 63096 - DNA, 38 bp, Artificial Sequence
  primer
gtaaaacgacggccagtgaggacagtgaggacgaggac

SEQ ID NO: 63097 - DNA, 38 bp, Artificial Sequence
  primer
gtaaaacgacggccagtctgtgaggtccatgtggtgag

SEQ ID NO: 63098 - DNA, 20 bp, Artificial Sequence
  primer
tcatacgcttcgtacccagg

SEQ ID NO: 63099 - DNA, 36 bp, Artificial Sequence
  primer
gtaaaacgacggccagtactcagcatcggtgtgtgg

SEQ ID NO: 63100 - DNA, 21 bp, Artificial Sequence
  primer
agcgaaagaagagggtgagtg

SEQ ID NO: 63101 - DNA, 38 bp, Artificial Sequence
  primer
gtaaaacgacggccagtatcacagggtagacagcaggg

SEQ ID NO: 63102 - DNA, 38 bp, Artificial Sequence
  primer
gtaaaacgacggccagtttgaggaagaagaagggcttg

SEQ ID NO: 63103 - DNA, 21 bp, Artificial Sequence
  primer
gtatcacgggttgagggagtc

SEQ ID NO: 63104 - DNA, 21 bp, Artificial Sequence
  primer
gtatcacgggttgagggagtc

SEQ ID NO: 63105 - DNA, 38 bp, Artificial Sequence
  primer
gtaaaacgacggccagttgacatgacttaggctcaggg

SEQ ID NO: 63106 - DNA, 38 bp, Artificial Sequence
  primer
gtaaaacgacggccagttgctccctaaagaagacctgc

SEQ ID NO: 63107 - DNA, 18 bp, Artificial Sequence
  primer
gcggctgcttcactatgc

SEQ ID NO: 63108 - DNA, 37 bp, Artificial Sequence
  primer
gtaaaacgacggccagtgatggcaggtgtctttggtg

SEQ ID NO: 63109 - DNA, 35 bp, Artificial Sequence
  primer
gtaaaacgacggccagtggatctgagtgggctccg

SEQ ID NO: 63110 - DNA, 41 bp, Artificial Sequence
  primer
gtaaaacgacggccagttttatattgtctttgggaaatggg

SEQ ID NO: 63111 - DNA, 21 bp, Artificial Sequence
  primer
gctagaccagcttatgtgccc

SEQ ID NO: 63112 - DNA, 40 bp, Artificial Sequence
  primer
gtaaaacgacggccagtgggtatcccaaatccagacttac

SEQ ID NO: 63113 - DNA, 22 bp, Artificial Sequence
  primer
ttacagttgtgatccaccatgc

SEQ ID NO: 63114 - DNA, 21 bp, Artificial Sequence
  primer
ggttcctttcagcagtgcata

SEQ ID NO: 63115 - DNA, 38 bp, Artificial Sequence
  primer
gtaaaacgacggccagtagacaaatacccttgccctcc

SEQ ID NO: 63116 - DNA, 23 bp, Artificial Sequence
  primer
ttaaaggatttctgcacacatgg

SEQ ID NO: 63117 - DNA, 41 bp, Artificial Sequence
  primer
gtaaaacgacggccagtttaccaggagattgaatagttccc

SEQ ID NO: 63118 - DNA, 23 bp, Artificial Sequence
  primer
tctcattctgactttgtgaaggg

SEQ ID NO: 63119 - DNA, 39 bp, Artificial Sequence
  primer
gtaaaacgacggccagttccattatgtcctgtgcatctg

SEQ ID NO: 63120 - DNA, 37 bp, Artificial Sequence
  primer
gtaaaacgacggccagttttctccatgttgaggctgg

SEQ ID NO: 63121 - DNA, 21 bp, Artificial Sequence
  primer
ctaaacccggcctgatcctac

SEQ ID NO: 63122 - DNA, 21 bp, Artificial Sequence
  primer
gtctttaccctctgcccaatg

SEQ ID NO: 63123 - DNA, 38 bp, Artificial Sequence
  primer
gtaaaacgacggccagttcgtgtctgagtccttcctgg

SEQ ID NO: 63124 - DNA, 20 bp, Artificial Sequence
  primer
aaagggccagacttggactc

SEQ ID NO: 63125 - DNA, 38 bp, Artificial Sequence
  primer
gtaaaacgacggccagtgtcactgtcccagtgtcaagc

SEQ ID NO: 63126 - DNA, 21 bp, Artificial Sequence
  primer
aatcagggcttgcatgttacc

SEQ ID NO: 63127 - DNA, 38 bp, Artificial Sequence
  primer
gtaaaacgacggccagtctggccgataattcagctttc

SEQ ID NO: 63128 - DNA, 41 bp, Artificial Sequence
  primer
gtaaaacgacggccagtaataagagttagcattcgctacgc

SEQ ID NO: 63129 - DNA, 37 bp, Artificial Sequence
  primer
gtaaaacgacggccagtgtgaacaaagatcacgccac

SEQ ID NO: 63130 - DNA, 20 bp, Artificial Sequence
  primer
ggagcaggctgcagaaagac

SEQ ID NO: 63131 - DNA, 38 bp, Artificial Sequence
  primer
gtaaaacgacggccagtagttgcggtcaccatatttgc

SEQ ID NO: 63132 - DNA, 39 bp, Artificial Sequence
  primer
gtaaaacgacggccagtaagcagagagaacctcccagta

SEQ ID NO: 63133 - DNA, 21 bp, Artificial Sequence
  primer
aatgcccaccagaaaggtaac

SEQ ID NO: 63134 - DNA, 37 bp, Artificial Sequence
  primer
gtaaaacgacggccagttcgaaagcttcgcctatgtg

SEQ ID NO: 63135 - DNA, 42 bp, Artificial Sequence
  primer
gtaaaacgacggccagtttgttcagctttgaaaggattagac

SEQ ID NO: 63136 - DNA, 21 bp, Artificial Sequence
  primer
cacacctagtccatgggtgac

SEQ ID NO: 63137 - DNA, 38 bp, Artificial Sequence
  primer
gtaaaacgacggccagtgcctcattaatgtgatgcctg

SEQ ID NO: 63138 - DNA, 38 bp, Artificial Sequence
  primer
gtaaaacgacggccagtcgttacctgctgttcttggtg

SEQ ID NO: 63139 - DNA, 39 bp, Artificial Sequence
  primer
gtaaaacgacggccagtccctgacaaggtactccagttg

SEQ ID NO: 63140 - DNA, 38 bp, Artificial Sequence
  primer
gtaaaacgacggccagtttacagcaccaatatgcctgg

SEQ ID NO: 63141 - DNA, 22 bp, Artificial Sequence
  primer
tgatatgatcaaaggcatgctg

SEQ ID NO: 63142 - DNA, 37 bp, Artificial Sequence
  primer
gtaaaacgacggccagtgacgctggccctttaatagc

SEQ ID NO: 63143 - DNA, 21 bp, Artificial Sequence
  primer
cagagtgctgggattacaggt

SEQ ID NO: 63144 - DNA, 38 bp, Artificial Sequence
  primer
gtaaaacgacggccagtcagatcggctttctttggttc

SEQ ID NO: 63145 - DNA, 38 bp, Artificial Sequence
  primer
gtaaaacgacggccagttgatgattggatgaggcaaag

SEQ ID NO: 63146 - DNA, 38 bp, Artificial Sequence
  primer
gtaaaacgacggccagtgctgttgctaaagccatcaag

SEQ ID NO: 63147 - DNA, 38 bp, Artificial Sequence
  primer
gtaaaacgacggccagttccgtaatgtacctccttggc

SEQ ID NO: 63148 - DNA, 39 bp, Artificial Sequence
  primer
gtaaaacgacggccagtcctgcttcgtactgtcagtttc

SEQ ID NO: 63149 - DNA, 39 bp, Artificial Sequence
  primer
gtaaaacgacggccagtttgtggttggactctattctgg

SEQ ID NO: 63150 - DNA, 38 bp, Artificial Sequence
  primer
gtaaaacgacggccagtttgcaaaggaaacatggagtg

SEQ ID NO: 63151 - DNA, 39 bp, Artificial Sequence
  primer
gtaaaacgacggccagttttggcttgactttaagcttcg

SEQ ID NO: 63152 - DNA, 38 bp, Artificial Sequence
  primer
gtaaaacgacggccagtgagataacccgctatcttggg

SEQ ID NO: 63153 - DNA, 44 bp, Artificial Sequence
  primer
gtaaaacgacggccagtattcaatttctgttaattatggcctac

SEQ ID NO: 63154 - DNA, 20 bp, Artificial Sequence
  primer
ccctcctgtcactttcctgc

SEQ ID NO: 63155 - DNA, 21 bp, Artificial Sequence
  primer
tttgctgtgggcatgtttaag

SEQ ID NO: 63156 - DNA, 21 bp, Artificial Sequence
  primer
tttgccaagtaatttgaagcg

SEQ ID NO: 63157 - DNA, 20 bp, Artificial Sequence
  primer
ggctggcaaggtttgcttac

SEQ ID NO: 63158 - DNA, 38 bp, Artificial Sequence
  primer
gtaaaacgacggccagttagcaagccagtttgatctgc

SEQ ID NO: 63159 - DNA, 18 bp, Artificial Sequence
  primer
catgaacctgggaggcag

SEQ ID NO: 63160 - DNA, 38 bp, Artificial Sequence
  primer
gtaaaacgacggccagtttagctgaaccgctgagacag

SEQ ID NO: 63161 - DNA, 20 bp, Artificial Sequence
  primer
tgcccatgaacttcttgcag

SEQ ID NO: 63162 - DNA, 24 bp, Artificial Sequence
  primer
agtctatcctttggagtttggttc

SEQ ID NO: 63163 - DNA, 38 bp, Artificial Sequence
  primer
gtaaaacgacggccagttccattgcctctaatttcctg

SEQ ID NO: 63164 - DNA, 41 bp, Artificial Sequence
  primer
gtaaaacgacggccagtaattccctcacatctttcagtagc

SEQ ID NO: 63165 - DNA, 21 bp, Artificial Sequence
  primer
gagaccaaaggtaatggcagc

SEQ ID NO: 63166 - DNA, 38 bp, Artificial Sequence
  primer
gtaaaacgacggccagttttaggttccgactggctgtt

SEQ ID NO: 63167 - DNA, 22 bp, Artificial Sequence
  primer
tccgtgtacctttgacctactg

SEQ ID NO: 63168 - DNA, 40 bp, Artificial Sequence
  primer
gtaaaacgacggccagtcagaatctccgaatttgaaggag

SEQ ID NO: 63169 - DNA, 38 bp, Artificial Sequence
  primer
gtaaaacgacggccagttgtgggagaagggttggtaag

SEQ ID NO: 63170 - DNA, 45 bp, Artificial Sequence
  primer
gtaaaacgacggccagttctgtaggatactgcttaactcttgaaa

SEQ ID NO: 63171 - DNA, 20 bp, Artificial Sequence
  primer
gcgttggcaatagaatctgg

SEQ ID NO: 63172 - DNA, 38 bp, Artificial Sequence
  primer
gtaaaacgacggccagttgacccagtcatttgtgatcc

SEQ ID NO: 63173 - DNA, 38 bp, Artificial Sequence
  primer
gtaaaacgacggccagtgaatcctgacaaccagcagtg

SEQ ID NO: 63174 - DNA, 38 bp, Artificial Sequence
  primer
gtaaaacgacggccagttaccagctttgctctgctctg

SEQ ID NO: 63175 - DNA, 38 bp, Artificial Sequence
  primer
gtaaaacgacggccagttctctggaggtacttaggccg

SEQ ID NO: 63176 - DNA, 21 bp, Artificial Sequence
  primer
ctctctgaatttgtcatgcgg

SEQ ID NO: 63177 - DNA, 38 bp, Artificial Sequence
  primer
gtaaaacgacggccagtgcctgaattcaaccagtaccc

SEQ ID NO: 63178 - DNA, 22 bp, Artificial Sequence
  primer
catttaatagagaagccacgcc

SEQ ID NO: 63179 - DNA, 38 bp, Artificial Sequence
  primer
gtaaaacgacggccagtattaaggcttgagcatgtggg

SEQ ID NO: 63180 - DNA, 21 bp, Artificial Sequence
  primer
caagaatgaagctggctgttc

SEQ ID NO: 63181 - DNA, 38 bp, Artificial Sequence
  primer
gtaaaacgacggccagtcctgaacctctccacaactcc

SEQ ID NO: 63182 - DNA, 38 bp, Artificial Sequence
  primer
gtaaaacgacggccagtaccgctgtctgtatgctgtcc

SEQ ID NO: 63183 - DNA, 24 bp, Artificial Sequence
  primer
tgagcaacatagtgagaccttgtc

SEQ ID NO: 63184 - DNA, 44 bp, Artificial Sequence
  primer
gtaaaacgacggccagtttcagataagattgatgaggcttagag

SEQ ID NO: 63185 - DNA, 39 bp, Artificial Sequence
  primer
gtaaaacgacggccagttgtcagaagaagctgggaattg

SEQ ID NO: 63186 - DNA, 39 bp, Artificial Sequence
  primer
gtaaaacgacggccagtccttgggtggtagatctgtagg

SEQ ID NO: 63187 - DNA, 35 bp, Artificial Sequence
  primer
gtaaaacgacggccagtgacctcgagatccgcctg

SEQ ID NO: 63188 - DNA, 21 bp, Artificial Sequence
  primer
tcgacaatcctagccactttg

SEQ ID NO: 63189 - DNA, 39 bp, Artificial Sequence
  primer
gtaaaacgacggccagtagctggtcacaaagctaactcc

SEQ ID NO: 63190 - DNA, 21 bp, Artificial Sequence
  primer
cagtgcaggtgtgtcctgaag

SEQ ID NO: 63191 - DNA, 38 bp, Artificial Sequence
  primer
gtaaaacgacggccagttccaaagagggcaaatgactc

SEQ ID NO: 63192 - DNA, 40 bp, Artificial Sequence
  primer
gtaaaacgacggccagtaaattcagatctaggcatgaccc

SEQ ID NO: 63193 - DNA, 41 bp, Artificial Sequence
  primer
gtaaaacgacggccagtaaagtgcttctttggcacattatt

SEQ ID NO: 63194 - DNA, 39 bp, Artificial Sequence
  primer
gtaaaacgacggccagtccatgttgaagataggagtccc

SEQ ID NO: 63195 - DNA, 20 bp, Artificial Sequence
  primer
caatggtgcaatcttggctc

SEQ ID NO: 63196 - DNA, 38 bp, Artificial Sequence
  primer
gtaaaacgacggccagtaatcttcaccactgtcctgcc

SEQ ID NO: 63197 - DNA, 21 bp, Artificial Sequence
  primer
aggctggaaacacacactcag

SEQ ID NO: 63198 - DNA, 21 bp, Artificial Sequence
  primer
ttctgggcttcttcattcagc

SEQ ID NO: 63199 - DNA, 21 bp, Artificial Sequence
  primer
gatgttgtgtgttactcgggc

SEQ ID NO: 63200 - DNA, 38 bp, Artificial Sequence
  primer
gtaaaacgacggccagtgtaccagggagacggtgagac

SEQ ID NO: 63201 - DNA, 21 bp, Artificial Sequence
  primer
gtgcttgggatcaacactgag

SEQ ID NO: 63202 - DNA, 38 bp, Artificial Sequence
  primer
gtaaaacgacggccagtctctgaagttgggtgagctgg

SEQ ID NO: 63203 - DNA, 37 bp, Artificial Sequence
  primer
gtaaaacgacggccagtctcctccttgcttgctctcc

SEQ ID NO: 63204 - DNA, 36 bp, Artificial Sequence
  primer
gtaaaacgacggccagtaatgaaaccagactggccg

SEQ ID NO: 63205 - DNA, 21 bp, Artificial Sequence
  primer
ggtgagggagacgggacttac

SEQ ID NO: 63206 - DNA, 38 bp, Artificial Sequence
  primer
gtaaaacgacggccagtaataaagcagggtgttctggg

SEQ ID NO: 63207 - DNA, 21 bp, Artificial Sequence
  primer
agctcctttgctattctgggc

SEQ ID NO: 63208 - DNA, 21 bp, Artificial Sequence
  primer
tacttgcatgctagcaaaccc

SEQ ID NO: 63209 - DNA, 20 bp, Artificial Sequence
  primer
aaattgccaacctcaaggaa

SEQ ID NO: 63210 - DNA, 40 bp, Artificial Sequence
  primer
gtaaaacgacggccagttggtctttgcttatgatggtttc

SEQ ID NO: 63211 - DNA, 38 bp, Artificial Sequence
  primer
gtaaaacgacggccagtgccctgttatgtccacagttc

SEQ ID NO: 63212 - DNA, 38 bp, Artificial Sequence
  primer
gtaaaacgacggccagtccatggctttgccttaagttc

SEQ ID NO: 63213 - DNA, 21 bp, Artificial Sequence
  primer
aagcatgtccactgacaaacg

SEQ ID NO: 63214 - DNA, 39 bp, Artificial Sequence
  primer
gtaaaacgacggccagtgggtaccatgcctgactaattt

SEQ ID NO: 63215 - DNA, 21 bp, Artificial Sequence
  primer
gggttagcaatggttcagacc

SEQ ID NO: 63216 - DNA, 21 bp, Artificial Sequence
  primer
tcattgtcttcgcttcacagg

SEQ ID NO: 63217 - DNA, 44 bp, Artificial Sequence
  primer
gtaaaacgacggccagtgatgttccttgtaatatgaacttagcc

SEQ ID NO: 63218 - DNA, 21 bp, Artificial Sequence
  primer
actgatggctgcgagttattg

SEQ ID NO: 63219 - DNA, 23 bp, Artificial Sequence
  primer
tcaataaatttgccataatgctc

SEQ ID NO: 63220 - DNA, 38 bp, Artificial Sequence
  primer
gtaaaacgacggccagtcatgaagggtagctacatggc

SEQ ID NO: 63221 - DNA, 26 bp, Artificial Sequence
  primer
gggtcagttaggttaaagtgggtaag

SEQ ID NO: 63222 - DNA, 23 bp, Artificial Sequence
  primer
acccagatttcgaactattcctc

SEQ ID NO: 63223 - DNA, 25 bp, Artificial Sequence
  primer
aggctgttgtgtatcaaactttctc

SEQ ID NO: 63224 - DNA, 38 bp, Artificial Sequence
  primer
gtaaaacgacggccagttgtgttcatttgctgacaagc

SEQ ID NO: 63225 - DNA, 38 bp, Artificial Sequence
  primer
gtaaaacgacggccagttggaacttggcagcactacac

SEQ ID NO: 63226 - DNA, 23 bp, Artificial Sequence
  primer
ccatccctcccttaaagtaacaa

SEQ ID NO: 63227 - DNA, 38 bp, Artificial Sequence
  primer
gtaaaacgacggccagttgattacagctggagggattt

SEQ ID NO: 63228 - DNA, 38 bp, Artificial Sequence
  primer
gtaaaacgacggccagtttggtagcaagcctaatgcaa

SEQ ID NO: 63229 - DNA, 22 bp, Artificial Sequence
  primer
gggagtgtaatgcggtagaaag

SEQ ID NO: 63230 - DNA, 26 bp, Artificial Sequence
  primer
gaacctccttaagagatcacctttac

SEQ ID NO: 63231 - DNA, 21 bp, Artificial Sequence
  primer
aagcctaccacaagccttgac

SEQ ID NO: 63232 - DNA, 21 bp, Artificial Sequence
  primer
ttaaggttgtactgatgccgc

SEQ ID NO: 63233 - DNA, 41 bp, Artificial Sequence
  primer
gtaaaacgacggccagttgatagatcccattgaagaggaag

SEQ ID NO: 63234 - DNA, 21 bp, Artificial Sequence
  primer
ttcagcttccaactcctgagc

SEQ ID NO: 63235 - DNA, 39 bp, Artificial Sequence
  primer
gtaaaacgacggccagttgtgtggcttatcttacctgcc

SEQ ID NO: 63236 - DNA, 38 bp, Artificial Sequence
  primer
gtaaaacgacggccagttgatcagcagagttggagttg

SEQ ID NO: 63237 - DNA, 22 bp, Artificial Sequence
  primer
gcaggcaatatcagaaagcaag

SEQ ID NO: 63238 - DNA, 21 bp, Artificial Sequence
  primer
gctcagagagaggctttgacc

SEQ ID NO: 63239 - DNA, 36 bp, Artificial Sequence
  primer
gtaaaacgacggccagtggaccagagttgggtctcc

SEQ ID NO: 63240 - DNA, 39 bp, Artificial Sequence
  primer
gtaaaacgacggccagttttagtcccactccctcatttg

SEQ ID NO: 63241 - DNA, 38 bp, Artificial Sequence
  primer
gtaaaacgacggccagtccttattccagggatgctgac

SEQ ID NO: 63242 - DNA, 21 bp, Artificial Sequence
  primer
cttgctttgttgttgctcctg

SEQ ID NO: 63243 - DNA, 21 bp, Artificial Sequence
  primer
ggaagactgctggaatggatg

SEQ ID NO: 63244 - DNA, 40 bp, Artificial Sequence
  primer
gtaaaacgacggccagtttgcttcagcaacaaatattgag

SEQ ID NO: 63245 - DNA, 20 bp, Artificial Sequence
  primer
ctgggcgagactccatctta

SEQ ID NO: 63246 - DNA, 38 bp, Artificial Sequence
  primer
gtaaaacgacggccagtctggtaatattccctgagccc

SEQ ID NO: 63247 - DNA, 38 bp, Artificial Sequence
  primer
gtaaaacgacggccagtttaggtcagagcaggactggg

SEQ ID NO: 63248 - DNA, 22 bp, Artificial Sequence
  primer
gcagtcagccgtatttaagtgg

SEQ ID NO: 63249 - DNA, 21 bp, Artificial Sequence
  primer
ctgatgacgaatgtgtctggg

SEQ ID NO: 63250 - DNA, 46 bp, Artificial Sequence
  primer
gtaaaacgacggccagttgattctcatagatattaagacaaacgtg

SEQ ID NO: 63251 - DNA, 43 bp, Artificial Sequence
  primer
gtaaaacgacggccagttcctgagtagttcaatagtcatcgtg

SEQ ID NO: 63252 - DNA, 20 bp, Artificial Sequence
  primer
gtcaattaaatggccagccc

SEQ ID NO: 63253 - DNA, 21 bp, Artificial Sequence
  primer
aagttgagcagaagacgtggg

SEQ ID NO: 63254 - DNA, 41 bp, Artificial Sequence
  primer
gtaaaacgacggccagtgaaataggatgacccatttgaaac

SEQ ID NO: 63255 - DNA, 25 bp, Artificial Sequence
  primer
gtaaacctgtccttagattccagtg

SEQ ID NO: 63256 - DNA, 26 bp, Artificial Sequence
  primer
ggaacgttacattaaattggtaatgc

SEQ ID NO: 63257 - DNA, 38 bp, Artificial Sequence
  primer
gtaaaacgacggccagtgttaggtactgtgctgctggg

SEQ ID NO: 63258 - DNA, 21 bp, Artificial Sequence
  primer
acaaagctgatgatttggagc

SEQ ID NO: 63259 - DNA, 21 bp, Artificial Sequence
  primer
attcaggcccttctttccttg

SEQ ID NO: 63260 - DNA, 42 bp, Artificial Sequence
  primer
gtaaaacgacggccagtttggaaagtagtgttgtgttggttt

SEQ ID NO: 63261 - DNA, 26 bp, Artificial Sequence
  primer
tccctaccatttagcttatattggat

SEQ ID NO: 63262 - DNA, 20 bp, Artificial Sequence
  primer
tgccagttggaaatagtggc

SEQ ID NO: 63263 - DNA, 25 bp, Artificial Sequence
  primer
tcagatagcatattcaggaagagga

SEQ ID NO: 63264 - DNA, 23 bp, Artificial Sequence
  primer
tcttctggaccatatgtttcctt

SEQ ID NO: 63265 - DNA, 25 bp, Artificial Sequence
  primer
aggtaacaaattggagtgagttgac

SEQ ID NO: 63266 - DNA, 38 bp, Artificial Sequence
  primer
gtaaaacgacggccagtggaagcttcatcaaacacgac

SEQ ID NO: 63267 - DNA, 23 bp, Artificial Sequence
  primer
ccagaacatgctaggtgatcttc

SEQ ID NO: 63268 - DNA, 20 bp, Artificial Sequence
  primer
agtgatcctcctgtcccacc

SEQ ID NO: 63269 - DNA, 38 bp, Artificial Sequence
  primer
gtaaaacgacggccagttgatcaccaaggtgtctgtcc

SEQ ID NO: 63270 - DNA, 38 bp, Artificial Sequence
  primer
gtaaaacgacggccagtgtgaaccatttccagaccttg

SEQ ID NO: 63271 - DNA, 21 bp, Artificial Sequence
  primer
ccctatttcctggcacatttc

SEQ ID NO: 63272 - DNA, 21 bp, Artificial Sequence
  primer
gagaaatggttgctgtgttgg

SEQ ID NO: 63273 - DNA, 38 bp, Artificial Sequence
  primer
gtaaaacgacggccagtagctttgtagctcaggccaac

SEQ ID NO: 63274 - DNA, 38 bp, Artificial Sequence
  primer
gtaaaacgacggccagtgttggcaaccagacctcagac

SEQ ID NO: 63275 - DNA, 38 bp, Artificial Sequence
  primer
gtaaaacgacggccagtagcctgatttagcaaaggtgc

SEQ ID NO: 63276 - DNA, 20 bp, Artificial Sequence
  primer
agggcttcgagaggacagag

SEQ ID NO: 63277 - DNA, 21 bp, Artificial Sequence
  primer
gcacgtaggtatctggaaggg

SEQ ID NO: 63278 - DNA, 38 bp, Artificial Sequence
  primer
gtaaaacgacggccagtcagtgccttatcagaactgcc

SEQ ID NO: 63279 - DNA, 38 bp, Artificial Sequence
  primer
gtaaaacgacggccagtgctctattgcaaagcactggg

SEQ ID NO: 63280 - DNA, 21 bp, Artificial Sequence
  primer
attgctgtttgcctgcagtag

SEQ ID NO: 63281 - DNA, 21 bp, Artificial Sequence
  primer
ctttggaagccctgcttattg

SEQ ID NO: 63282 - DNA, 21 bp, Artificial Sequence
  primer
gtcagtggaccaggctatgtg

SEQ ID NO: 63283 - DNA, 21 bp, Artificial Sequence
  primer
gataaactccgcaggcagaag

SEQ ID NO: 63284 - DNA, 21 bp, Artificial Sequence
  primer
tgcaactgactgtggtagcag

SEQ ID NO: 63285 - DNA, 29 bp, Artificial Sequence
  primer
atccaatatatttctaggtagcttattgc

SEQ ID NO: 63286 - DNA, 21 bp, Artificial Sequence
  primer
cctcctcctcctctatgctgg

SEQ ID NO: 63287 - DNA, 37 bp, Artificial Sequence
  primer
gtaaaacgacggccagtcaccttcccagcatacccag

SEQ ID NO: 63288 - DNA, 37 bp, Artificial Sequence
  primer
gtaaaacgacggccagttacgaaacccgatccctgac

SEQ ID NO: 63289 - DNA, 22 bp, Artificial Sequence
  primer
tcacccaactcataggttcctc

SEQ ID NO: 63290 - DNA, 21 bp, Artificial Sequence
  primer
tcatagcctcttgtgcaatgg

SEQ ID NO: 63291 - DNA, 22 bp, Artificial Sequence
  primer
actccagtgtgaaggaacttgg

SEQ ID NO: 63292 - DNA, 38 bp, Artificial Sequence
  primer
gtaaaacgacggccagtgatgaacatgcaccgataagc

SEQ ID NO: 63293 - DNA, 21 bp, Artificial Sequence
  primer
ttaggccagtcttcctccttg

SEQ ID NO: 63294 - DNA, 22 bp, Artificial Sequence
  primer
aaagatactggcttccatgcag

SEQ ID NO: 63295 - DNA, 21 bp, Artificial Sequence
  primer
tagcaagggaggaacagaagc

SEQ ID NO: 63296 - DNA, 38 bp, Artificial Sequence
  primer
gtaaaacgacggccagttaaacacaaggttaggtgccc

SEQ ID NO: 63297 - DNA, 39 bp, Artificial Sequence
  primer
gtaaaacgacggccagtcgaggtaaactgtgaactgtgc

SEQ ID NO: 63298 - DNA, 37 bp, Artificial Sequence
  primer
gtaaaacgacggccagtgcgcctggcctaatctatac

SEQ ID NO: 63299 - DNA, 21 bp, Artificial Sequence
  primer
ggcatacttgcagagggtttg

SEQ ID NO: 63300 - DNA, 38 bp, Artificial Sequence
  primer
gtaaaacgacggccagtcaaaggacacctgcaaatcag

SEQ ID NO: 63301 - DNA, 38 bp, Artificial Sequence
  primer
gtaaaacgacggccagtctggtgagaagtgtaggctgg

SEQ ID NO: 63302 - DNA, 38 bp, Artificial Sequence
  primer
gtaaaacgacggccagtagtccattggctggaagagac

SEQ ID NO: 63303 - DNA, 38 bp, Artificial Sequence
  primer
gtaaaacgacggccagtttgcaaagccttacaaagtgg

SEQ ID NO: 63304 - DNA, 21 bp, Artificial Sequence
  primer
tgctttgaggtcattgattcc

SEQ ID NO: 63305 - DNA, 42 bp, Artificial Sequence
  primer
gtaaaacgacggccagtcttatgaaagaaatcagcctcagtc

SEQ ID NO: 63306 - DNA, 20 bp, Artificial Sequence
  primer
aagcgagagtccctctccag

SEQ ID NO: 63307 - DNA, 38 bp, Artificial Sequence
  primer
gtaaaacgacggccagtcagatcagggaggaaacgaac

SEQ ID NO: 63308 - DNA, 38 bp, Artificial Sequence
  primer
gtaaaacgacggccagtaagtgcgtgtcctgtaccaag

SEQ ID NO: 63309 - DNA, 37 bp, Artificial Sequence
  primer
gtaaaacgacggccagtgtgaagccaaagccagagac

SEQ ID NO: 63310 - DNA, 38 bp, Artificial Sequence
  primer
gtaaaacgacggccagtgaatagagacacccagccagc

SEQ ID NO: 63311 - DNA, 20 bp, Artificial Sequence
  primer
cttcatgccaagtcctccac

SEQ ID NO: 63312 - DNA, 21 bp, Artificial Sequence
  primer
aagtgcctgcaatgtgacaag

SEQ ID NO: 63313 - DNA, 21 bp, Artificial Sequence
  primer
cttccactgtaacgcatgtgg

SEQ ID NO: 63314 - DNA, 21 bp, Artificial Sequence
  primer
cgagagtgcaaggagaccttc

SEQ ID NO: 63315 - DNA, 21 bp, Artificial Sequence
  primer
actggatgaaataacaagcgg

SEQ ID NO: 63316 - DNA, 38 bp, Artificial Sequence
  primer
gtaaaacgacggccagtcttggaatcgccagcatactc

SEQ ID NO: 63317 - DNA, 21 bp, Artificial Sequence
  primer
tttgcttgttgtagctctggc

SEQ ID NO: 63318 - DNA, 21 bp, Artificial Sequence
  primer
ccgtggaagaatttgcagaag

SEQ ID NO: 63319 - DNA, 23 bp, Artificial Sequence
  primer
catccatgtatacgtgtctgctt

SEQ ID NO: 63320 - DNA, 22 bp, Artificial Sequence
  primer
cctgccacttagcagcaactat

SEQ ID NO: 63321 - DNA, 23 bp, Artificial Sequence
  primer
cagtggagatacactacgccttg

SEQ ID NO: 63322 - DNA, 20 bp, Artificial Sequence
  primer
aaagggacgcacagtgaaag

SEQ ID NO: 63323 - DNA, 38 bp, Artificial Sequence
  primer
gtaaaacgacggccagtttccattccctgtgagatcag

SEQ ID NO: 63324 - DNA, 21 bp, Artificial Sequence
  primer
gtggtgggtgcctgtagtctc

SEQ ID NO: 63325 - DNA, 21 bp, Artificial Sequence
  primer
tttccactcatagccatgcac

SEQ ID NO: 63326 - DNA, 21 bp, Artificial Sequence
  primer
cctttcaggtgaagtcaggaa

SEQ ID NO: 63327 - DNA, 23 bp, Artificial Sequence
  primer
atcacccagtcaagaaataatgg

SEQ ID NO: 63328 - DNA, 44 bp, Artificial Sequence
  primer
gtaaaacgacggccagttctttatgttgcttcctgtttactttc

SEQ ID NO: 63329 - DNA, 22 bp, Artificial Sequence
  primer
tttgcaggcatgaactaatcac

SEQ ID NO: 63330 - DNA, 38 bp, Artificial Sequence
  primer
gtaaaacgacggccagttccaaaggaacaatcacagcc

SEQ ID NO: 63331 - DNA, 38 bp, Artificial Sequence
  primer
gtaaaacgacggccagtacatcagcttggaaacccaac

SEQ ID NO: 63332 - DNA, 39 bp, Artificial Sequence
  primer
gtaaaacgacggccagttgacttcctttcatcttcctgg

SEQ ID NO: 63333 - DNA, 22 bp, Artificial Sequence
  primer
aaattccaatatttgggtgctg

SEQ ID NO: 63334 - DNA, 27 bp, Artificial Sequence
  primer
caaatgaatggaaagtaagtcagtttg

SEQ ID NO: 63335 - DNA, 44 bp, Artificial Sequence
  primer
gtaaaacgacggccagtggacaagtaatctattccagcaggtag

SEQ ID NO: 63336 - DNA, 25 bp, Artificial Sequence
  primer
ttggtccttgacaatgaataagttt

SEQ ID NO: 63337 - DNA, 24 bp, Artificial Sequence
  primer
aagtgcttgttactgacatcctcc

SEQ ID NO: 63338 - DNA, 21 bp, Artificial Sequence
  primer
tttctttgtcaggcattacgg

SEQ ID NO: 63339 - DNA, 21 bp, Artificial Sequence
  primer
ctttgtcaggcattacggacc

SEQ ID NO: 63340 - DNA, 38 bp, Artificial Sequence
  primer
gtaaaacgacggccagtagacagcaataatgcccatcc

SEQ ID NO: 63341 - DNA, 25 bp, Artificial Sequence
  primer
gcatagtctgatcctatttgtgtgg

SEQ ID NO: 63342 - DNA, 38 bp, Artificial Sequence
  primer
gtaaaacgacggccagttgcaaagggtttggagtaaag

SEQ ID NO: 63343 - DNA, 21 bp, Artificial Sequence
  primer
aaggaacatttggcttgaagg

SEQ ID NO: 63344 - DNA, 39 bp, Artificial Sequence
  primer
gtaaaacgacggccagtcaagaagcactgctctacaggg

SEQ ID NO: 63345 - DNA, 21 bp, Artificial Sequence
  primer
gaggagggtgacatcaagtgg

SEQ ID NO: 63346 - DNA, 23 bp, Artificial Sequence
  primer
ggagcagtttatgatcccatttc

SEQ ID NO: 63347 - DNA, 21 bp, Artificial Sequence
  primer
gaaggctccttccaccgtatc

SEQ ID NO: 63348 - DNA, 37 bp, Artificial Sequence
  primer
gtaaaacgacggccagtccagtttgaagcggaagttg

SEQ ID NO: 63349 - DNA, 21 bp, Artificial Sequence
  primer
agacagcttcaaagacacggg

SEQ ID NO: 63350 - DNA, 38 bp, Artificial Sequence
  primer
gtaaaacgacggccagtaacagccctgagaagtcgttc

SEQ ID NO: 63351 - DNA, 38 bp, Artificial Sequence
  primer
gtaaaacgacggccagtttctgcaaatgccattgaaac

SEQ ID NO: 63352 - DNA, 41 bp, Artificial Sequence
  primer
gtaaaacgacggccagttcgaagcaatttcctctttacaac

SEQ ID NO: 63353 - DNA, 21 bp, Artificial Sequence
  primer
tctgtgcatctccacccatag

SEQ ID NO: 63354 - DNA, 20 bp, Artificial Sequence
  primer
gcctaggctgactttcaagc

SEQ ID NO: 63355 - DNA, 37 bp, Artificial Sequence
  primer
gtaaaacgacggccagtgggctccatactggcaattc

SEQ ID NO: 63356 - DNA, 38 bp, Artificial Sequence
  primer
gtaaaacgacggccagttttccatcatttgaaagtggc

SEQ ID NO: 63357 - DNA, 37 bp, Artificial Sequence
  primer
gtaaaacgacggccagtttctcctgggttcttcctcc

SEQ ID NO: 63358 - DNA, 38 bp, Artificial Sequence
  primer
gtaaaacgacggccagtgttgctgattgttgaagctgg

SEQ ID NO: 63359 - DNA, 38 bp, Artificial Sequence
  primer
gtaaaacgacggccagttaataaacagcagcgcaggag

SEQ ID NO: 63360 - DNA, 21 bp, Artificial Sequence
  primer
gtgcctagcgacaggaaagac

SEQ ID NO: 63361 - DNA, 20 bp, Artificial Sequence
  primer
aataggagccagtccttcgc

SEQ ID NO: 63362 - DNA, 38 bp, Artificial Sequence
  primer
gtaaaacgacggccagtctagcaggaaccttctccagc

SEQ ID NO: 63363 - DNA, 38 bp, Artificial Sequence
  primer
gtaaaacgacggccagtgagtgcttgtggactgtggtg

SEQ ID NO: 63364 - DNA, 38 bp, Artificial Sequence
  primer
gtaaaacgacggccagtagggcttcctgtatgatctgg

SEQ ID NO: 63365 - DNA, 40 bp, Artificial Sequence
  primer
gtaaaacgacggccagttggatatcatagggagaagaggg

SEQ ID NO: 63366 - DNA, 37 bp, Artificial Sequence
  primer
gtaaaacgacggccagtgtacacggaggtgagggatg

SEQ ID NO: 63367 - DNA, 21 bp, Artificial Sequence
  primer
cagagcatgtgtctgctggag

SEQ ID NO: 63368 - DNA, 21 bp, Artificial Sequence
  primer
atatggctcaccgacttctcc

SEQ ID NO: 63369 - DNA, 38 bp, Artificial Sequence
  primer
gtaaaacgacggccagttggccttaagtgatcctcctg

SEQ ID NO: 63370 - DNA, 38 bp, Artificial Sequence
  primer
gtaaaacgacggccagtatcaagctcagcctggaagtc

SEQ ID NO: 63371 - DNA, 21 bp, Artificial Sequence
  primer
cgcttctccacctatagccag

SEQ ID NO: 63372 - DNA, 38 bp, Artificial Sequence
  primer
gtaaaacgacggccagtggactctgagccacatcagtg

SEQ ID NO: 63373 - DNA, 21 bp, Artificial Sequence
  primer
tgccattaccactacccacag

SEQ ID NO: 63374 - DNA, 21 bp, Artificial Sequence
  primer
gactcccttccctgtagtccc

SEQ ID NO: 63375 - DNA, 38 bp, Artificial Sequence
  primer
gtaaaacgacggccagtgtgacccgcctagaaagtctg

SEQ ID NO: 63376 - DNA, 21 bp, Artificial Sequence
  primer
tgtcggtgcatcatcttcttc

SEQ ID NO: 63377 - DNA, 38 bp, Artificial Sequence
  primer
gtaaaacgacggccagtgcccttgctgaatggagtatc

SEQ ID NO: 63378 - DNA, 21 bp, Artificial Sequence
  primer
ctgccttgaagctcctacctc

SEQ ID NO: 63379 - DNA, 22 bp, Artificial Sequence
  primer
ttagagcagaaggacccagatg

SEQ ID NO: 63380 - DNA, 21 bp, Artificial Sequence
  primer
gtggccctgatcacatagtgg

SEQ ID NO: 63381 - DNA, 37 bp, Artificial Sequence
  primer
gtaaaacgacggccagtaacaacaaggtcatggctgc

SEQ ID NO: 63382 - DNA, 38 bp, Artificial Sequence
  primer
gtaaaacgacggccagtaggatgaggacgtgcagactc

SEQ ID NO: 63383 - DNA, 38 bp, Artificial Sequence
  primer
gtaaaacgacggccagtcttggctgatgggagtaggag

SEQ ID NO: 63384 - DNA, 38 bp, Artificial Sequence
  primer
gtaaaacgacggccagtgtgcttgctgagtaccaggtg

SEQ ID NO: 63385 - DNA, 38 bp, Artificial Sequence
  primer
gtaaaacgacggccagtctgccgcacagtaaagaagac

SEQ ID NO: 63386 - DNA, 21 bp, Artificial Sequence
  primer
cacaggttcctggtggaatac

SEQ ID NO: 63387 - DNA, 38 bp, Artificial Sequence
  primer
gtaaaacgacggccagtgacagtccttgtctctgcacg

SEQ ID NO: 63388 - DNA, 38 bp, Artificial Sequence
  primer
gtaaaacgacggccagtgctggagaggttctttgaagc

SEQ ID NO: 63389 - DNA, 38 bp, Artificial Sequence
  primer
gtaaaacgacggccagttgtttctgactcttcgttggc

SEQ ID NO: 63390 - DNA, 21 bp, Artificial Sequence
  primer
cataagcatgtgtgtggtggg

SEQ ID NO: 63391 - DNA, 38 bp, Artificial Sequence
  primer
gtaaaacgacggccagtcacgcaccttctccataacac

SEQ ID NO: 63392 - DNA, 38 bp, Artificial Sequence
  primer
gtaaaacgacggccagtctgtcctgacaccaagactgc

SEQ ID NO: 63393 - DNA, 42 bp, Artificial Sequence
  primer
gtaaaacgacggccagtactttagtatcagagcaggatcgag

SEQ ID NO: 63394 - DNA, 38 bp, Artificial Sequence
  primer
gtaaaacgacggccagtccagcctcttccaagtctgtc

SEQ ID NO: 63395 - DNA, 38 bp, Artificial Sequence
  primer
gtaaaacgacggccagtgtgtctttccacaccaagtcg

SEQ ID NO: 63396 - DNA, 21 bp, Artificial Sequence
  primer
tctccagccacatacgatcac

SEQ ID NO: 63397 - DNA, 21 bp, Artificial Sequence
  primer
cgagttcgaaagtccaattcc

SEQ ID NO: 63398 - DNA, 38 bp, Artificial Sequence
  primer
gtaaaacgacggccagttgtacgacctctccaacaagg

SEQ ID NO: 63399 - DNA, 38 bp, Artificial Sequence
  primer
gtaaaacgacggccagttcaatgttgtgaacggagacc

SEQ ID NO: 63400 - DNA, 21 bp, Artificial Sequence
  primer
tcaatctctcggtgaaggacc

SEQ ID NO: 63401 - DNA, 19 bp, Artificial Sequence
  primer
cctcctcctggtcggagac

SEQ ID NO: 63402 - DNA, 21 bp, Artificial Sequence
  primer
gggaagctgagaagtctggtg

SEQ ID NO: 63403 - DNA, 38 bp, Artificial Sequence
  primer
gtaaaacgacggccagtcttcctcgcacatgtgacttc

SEQ ID NO: 63404 - DNA, 38 bp, Artificial Sequence
  primer
gtaaaacgacggccagtgtaactgagactgggccttcc

SEQ ID NO: 63405 - DNA, 38 bp, Artificial Sequence
  primer
gtaaaacgacggccagtccatgtaagcttgtcccaacc

SEQ ID NO: 63406 - DNA, 20 bp, Artificial Sequence
  primer
actccagccaggtgacaaag

SEQ ID NO: 63407 - DNA, 21 bp, Artificial Sequence
  primer
caaatgatcctcccacctttg

SEQ ID NO: 63408 - DNA, 38 bp, Artificial Sequence
  primer
gtaaaacgacggccagtctggtagaagagttctcgggc

SEQ ID NO: 63409 - DNA, 38 bp, Artificial Sequence
  primer
gtaaaacgacggccagtactgtcctgctcaagggattc

SEQ ID NO: 63410 - DNA, 37 bp, Artificial Sequence
  primer
gtaaaacgacggccagtgtaggtggagggtagccagg

SEQ ID NO: 63411 - DNA, 37 bp, Artificial Sequence
  primer
gtaaaacgacggccagtagcatgagacagaggctggg

SEQ ID NO: 63412 - DNA, 21 bp, Artificial Sequence
  primer
gtgtgactggctgacataccc

SEQ ID NO: 63413 - DNA, 21 bp, Artificial Sequence
  primer
gtcacagtgagctgaggttgc

SEQ ID NO: 63414 - DNA, 38 bp, Artificial Sequence
  primer
gtaaaacgacggccagttggctcagaagttgagctttc

SEQ ID NO: 63415 - DNA, 39 bp, Artificial Sequence
  primer
gtaaaacgacggccagtttcttgaaagatgtccctctgc

SEQ ID NO: 63416 - DNA, 21 bp, Artificial Sequence
  primer
taatggacgggtgactgagac

SEQ ID NO: 63417 - DNA, 38 bp, Artificial Sequence
  primer
gtaaaacgacggccagtggcagtgactcagtgaattgg

SEQ ID NO: 63418 - DNA, 38 bp, Artificial Sequence
  primer
gtaaaacgacggccagtgtcactgaaggttctcccagc

SEQ ID NO: 63419 - DNA, 38 bp, Artificial Sequence
  primer
gtaaaacgacggccagtcaacaggagcaaactggactg

SEQ ID NO: 63420 - DNA, 38 bp, Artificial Sequence
  primer
gtaaaacgacggccagttttctccagctggtctgagtg

SEQ ID NO: 63421 - DNA, 38 bp, Artificial Sequence
  primer
gtaaaacgacggccagtacccacattgcagtaaggagc

SEQ ID NO: 63422 - DNA, 20 bp, Artificial Sequence
  primer
ctccctctggtgtcaggttg

SEQ ID NO: 63423 - DNA, 38 bp, Artificial Sequence
  primer
gtaaaacgacggccagtagaggtactcgacccaactgc

SEQ ID NO: 63424 - DNA, 38 bp, Artificial Sequence
  primer
gtaaaacgacggccagttatgggtaatggctgagggag

SEQ ID NO: 63425 - DNA, 38 bp, Artificial Sequence
  primer
gtaaaacgacggccagtagcagggtgatgggatagaag

SEQ ID NO: 63426 - DNA, 20 bp, Artificial Sequence
  primer
agctggaggagctgaggaac

SEQ ID NO: 63427 - DNA, 21 bp, Artificial Sequence
  primer
agtagtgcacaaagcctgcac

SEQ ID NO: 63428 - DNA, 37 bp, Artificial Sequence
  primer
gtaaaacgacggccagtgcttcagacacgagacccac

SEQ ID NO: 63429 - DNA, 37 bp, Artificial Sequence
  primer
gtaaaacgacggccagttctggaagccctatccaagg

SEQ ID NO: 63430 - DNA, 21 bp, Artificial Sequence
  primer
gtcagtgtcctcttggttccc

SEQ ID NO: 63431 - DNA, 38 bp, Artificial Sequence
  primer
gtaaaacgacggccagtcagttcctccagaacatgcag

SEQ ID NO: 63432 - DNA, 38 bp, Artificial Sequence
  primer
gtaaaacgacggccagttatcaggaggagtgtggaggg

SEQ ID NO: 63433 - DNA, 38 bp, Artificial Sequence
  primer
gtaaaacgacggccagtacctttctcctaaaggcaggg

SEQ ID NO: 63434 - DNA, 35 bp, Artificial Sequence
  primer
gtaaaacgacggccagtagcctgtcccaggattgc

SEQ ID NO: 63435 - DNA, 38 bp, Artificial Sequence
  primer
gtaaaacgacggccagtttgcagttgggttcttattgg

SEQ ID NO: 63436 - DNA, 40 bp, Artificial Sequence
  primer
gtaaaacgacggccagtgaattatctttaatggcttgccc

SEQ ID NO: 63437 - DNA, 21 bp, Artificial Sequence
  primer
acttccacaagatggcagacc

SEQ ID NO: 63438 - DNA, 21 bp, Artificial Sequence
  primer
ggctgtatcagtatgggtggg

SEQ ID NO: 63439 - DNA, 38 bp, Artificial Sequence
  primer
gtaaaacgacggccagtcagggtctgcagcacatagag

SEQ ID NO: 63440 - DNA, 22 bp, Artificial Sequence
  primer
tgatcaatgttctttgctgcac

SEQ ID NO: 63441 - DNA, 21 bp, Artificial Sequence
  primer
ttgtgacccttcaaatcttgg

SEQ ID NO: 63442 - DNA, 38 bp, Artificial Sequence
  primer
gtaaaacgacggccagtttcaatccactttcctgaccc

SEQ ID NO: 63443 - DNA, 21 bp, Artificial Sequence
  primer
ttctgtgcttgacagccactc

SEQ ID NO: 63444 - DNA, 39 bp, Artificial Sequence
  primer
gtaaaacgacggccagtagggaattcagacctccttctg

SEQ ID NO: 63445 - DNA, 21 bp, Artificial Sequence
  primer
ctagcttcgctccagagattg

SEQ ID NO: 63446 - DNA, 21 bp, Artificial Sequence
  primer
tgaaggtgacgtgtaccaacc

SEQ ID NO: 63447 - DNA, 38 bp, Artificial Sequence
  primer
gtaaaacgacggccagtagccaagctcttggttctgag

SEQ ID NO: 63448 - DNA, 39 bp, Artificial Sequence
  primer
gtaaaacgacggccagtgtagtatgatggaggcagggac

SEQ ID NO: 63449 - DNA, 22 bp, Artificial Sequence
  primer
ccatgcctcctagacttgctac

SEQ ID NO: 63450 - DNA, 36 bp, Artificial Sequence
  primer
gtaaaacgacggccagtaggagccggtctgagtcac

SEQ ID NO: 63451 - DNA, 21 bp, Artificial Sequence
  primer
ttctagcagcctttggtcctg

SEQ ID NO: 63452 - DNA, 37 bp, Artificial Sequence
  primer
gtaaaacgacggccagtctgctctgcaaggtggtttg

SEQ ID NO: 63453 - DNA, 21 bp, Artificial Sequence
  primer
taaacacagcgtcccagaagc

SEQ ID NO: 63454 - DNA, 38 bp, Artificial Sequence
  primer
gtaaaacgacggccagtctcccagagaggctgagtagc

SEQ ID NO: 63455 - DNA, 38 bp, Artificial Sequence
  primer
gtaaaacgacggccagtcagagccacacttcagcacag

SEQ ID NO: 63456 - DNA, 21 bp, Artificial Sequence
  primer
actcagactatccctgcccac

SEQ ID NO: 63457 - DNA, 37 bp, Artificial Sequence
  primer
gtaaaacgacggccagtcctggttcaggtcagggatg

SEQ ID NO: 63458 - DNA, 38 bp, Artificial Sequence
  primer
gtaaaacgacggccagtcagtgccaagaatcccagaac

SEQ ID NO: 63459 - DNA, 38 bp, Artificial Sequence
  primer
gtaaaacgacggccagtctaacagattccttccgtggc

SEQ ID NO: 63460 - DNA, 38 bp, Artificial Sequence
  primer
gtaaaacgacggccagtggctactgctactaccgcctg

SEQ ID NO: 63461 - DNA, 21 bp, Artificial Sequence
  primer
aagtatagcgagggcgatctg

SEQ ID NO: 63462 - DNA, 38 bp, Artificial Sequence
  primer
gtaaaacgacggccagtcctcagcactgaagcatatcg

SEQ ID NO: 63463 - DNA, 38 bp, Artificial Sequence
  primer
gtaaaacgacggccagtttagatgccctgatcacttgc

SEQ ID NO: 63464 - DNA, 38 bp, Artificial Sequence
  primer
gtaaaacgacggccagtcaccaagcaagtacaggaagc

SEQ ID NO: 63465 - DNA, 38 bp, Artificial Sequence
  primer
gtaaaacgacggccagttgtggaagttgaatgtggctc

SEQ ID NO: 63466 - DNA, 21 bp, Artificial Sequence
  primer
atggcacaaacatacctgctg

SEQ ID NO: 63467 - DNA, 18 bp, Artificial Sequence
  primer
aggctgggagcacctacg

SEQ ID NO: 63468 - DNA, 38 bp, Artificial Sequence
  primer
gtaaaacgacggccagtatgggtgctaggctaaagctg

SEQ ID NO: 63469 - DNA, 19 bp, Artificial Sequence
  primer
aaatgaatccgtggatcgg

SEQ ID NO: 63470 - DNA, 38 bp, Artificial Sequence
  primer
gtaaaacgacggccagtagctcatcaggcataaggcac

SEQ ID NO: 63471 - DNA, 38 bp, Artificial Sequence
  primer
gtaaaacgacggccagtctaggcaatgtctgcgtcaac

SEQ ID NO: 63472 - DNA, 38 bp, Artificial Sequence
  primer
gtaaaacgacggccagtggaacctcagtcaccctcaac

SEQ ID NO: 63473 - DNA, 21 bp, Artificial Sequence
  primer
tgtcacatcccttcctacacc

SEQ ID NO: 63474 - DNA, 38 bp, Artificial Sequence
  primer
gtaaaacgacggccagtattggaaatgccctttcactg

SEQ ID NO: 63475 - DNA, 40 bp, Artificial Sequence
  primer
gtaaaacgacggccagttggaataattcagaatgtgtggc

SEQ ID NO: 63476 - DNA, 40 bp, Artificial Sequence
  primer
gtaaaacgacggccagtggaagcttaccatgagaaactgg

SEQ ID NO: 63477 - DNA, 21 bp, Artificial Sequence
  primer
gataggtgtgagccactgcac

SEQ ID NO: 63478 - DNA, 21 bp, Artificial Sequence
  primer
tacagacatggcgtttcaagg

SEQ ID NO: 63479 - DNA, 21 bp, Artificial Sequence
  primer
ttgtaccagcgccatcagtag

SEQ ID NO: 63480 - DNA, 21 bp, Artificial Sequence
  primer
ttcaaggatcgtaattggctg

SEQ ID NO: 63481 - DNA, 21 bp, Artificial Sequence
  primer
atcgtaattggctgttgaggg

SEQ ID NO: 63482 - DNA, 21 bp, Artificial Sequence
  primer
tgtgcccagagatccagtaag

SEQ ID NO: 63483 - DNA, 38 bp, Artificial Sequence
  primer
gtaaaacgacggccagtgcaagatcgctagagtccagg

SEQ ID NO: 63484 - DNA, 23 bp, Artificial Sequence
  primer
gggcagcttgaaataagctaaca

SEQ ID NO: 63485 - DNA, 21 bp, Artificial Sequence
  primer
tgcaaggtgttgtaaaccgac

SEQ ID NO: 63486 - DNA, 36 bp, Artificial Sequence
  primer
gtaaaacgacggccagtgctgcagatgcgaggaaag

SEQ ID NO: 63487 - DNA, 38 bp, Artificial Sequence
  primer
gtaaaacgacggccagttgcggaccctaggtcataaag

SEQ ID NO: 63488 - DNA, 27 bp, Artificial Sequence
  primer
aaatagtcgtattcctgctctgttatg

SEQ ID NO: 63489 - DNA, 23 bp, Artificial Sequence
  primer
cctgggcttggatttctatttac

SEQ ID NO: 63490 - DNA, 40 bp, Artificial Sequence
  primer
gtaaaacgacggccagtgcttatgaccaaattaccaaagg

SEQ ID NO: 63491 - DNA, 44 bp, Artificial Sequence
  primer
gtaaaacgacggccagtttatgtaaagcaaatagaagtcagctt

SEQ ID NO: 63492 - DNA, 26 bp, Artificial Sequence
  primer
aggattcctgtattaactttgggtag

SEQ ID NO: 63493 - DNA, 42 bp, Artificial Sequence
  primer
gtaaaacgacggccagtggatgactatctcatagcaacttgg

SEQ ID NO: 63494 - DNA, 36 bp, Artificial Sequence
  primer
gtaaaacgacggccagtagccattcaagcatctggg

SEQ ID NO: 63495 - DNA, 38 bp, Artificial Sequence
  primer
gtaaaacgacggccagtgctgaggcttatgagattggg

SEQ ID NO: 63496 - DNA, 25 bp, Artificial Sequence
  primer
gagtggttacatagtgcttgctaca

SEQ ID NO: 63497 - DNA, 23 bp, Artificial Sequence
  primer
acgtaatttagggtggtgaattg

SEQ ID NO: 63498 - DNA, 26 bp, Artificial Sequence
  primer
actgccttctagaataagacacattg

SEQ ID NO: 63499 - DNA, 38 bp, Artificial Sequence
  primer
gtaaaacgacggccagttgctgagagagaacttgtggc

SEQ ID NO: 63500 - DNA, 27 bp, Artificial Sequence
  primer
tgctttaggttaaataggcttaagttg

SEQ ID NO: 63501 - DNA, 38 bp, Artificial Sequence
  primer
gtaaaacgacggccagtctgaccagaagagaggaacgg

SEQ ID NO: 63502 - DNA, 44 bp, Artificial Sequence
  primer
gtaaaacgacggccagtcaaatttacagctaaggtaacatctca

SEQ ID NO: 63503 - DNA, 38 bp, Artificial Sequence
  primer
gtaaaacgacggccagtcctcatgacctgtcttctccc

SEQ ID NO: 63504 - DNA, 38 bp, Artificial Sequence
  primer
gtaaaacgacggccagtagatgtgtgcaccatttcctc

SEQ ID NO: 63505 - DNA, 38 bp, Artificial Sequence
  primer
gtaaaacgacggccagtaaacctgcattcctgttgatg

SEQ ID NO: 63506 - DNA, 38 bp, Artificial Sequence
  primer
gtaaaacgacggccagttccattgaacaacctgtggag

SEQ ID NO: 63507 - DNA, 37 bp, Artificial Sequence
  primer
gtaaaacgacggccagtaaatctgggcaaagcatctg

SEQ ID NO: 63508 - DNA, 20 bp, Artificial Sequence
  primer
agaaagggcattcagggaag

SEQ ID NO: 63509 - DNA, 23 bp, Artificial Sequence
  primer
aagccatgaatgcaataaatgtg

SEQ ID NO: 63510 - DNA, 38 bp, Artificial Sequence
  primer
gtaaaacgacggccagtaattcttgactgtgggaaggc

SEQ ID NO: 63511 - DNA, 38 bp, Artificial Sequence
  primer
gtaaaacgacggccagtaatgcgaaggccttaagtcag

SEQ ID NO: 63512 - DNA, 21 bp, Artificial Sequence
  primer
cggctttcaacccttattctg

SEQ ID NO: 63513 - DNA, 22 bp, Artificial Sequence
  primer
aaccctaccagtgtgaggaatg

SEQ ID NO: 63514 - DNA, 40 bp, Artificial Sequence
  primer
gtaaaacgacggccagtgaaatccagggtgttcagatttc

SEQ ID NO: 63515 - DNA, 22 bp, Artificial Sequence
  primer
ccacaggtttcatgagaaggtc

SEQ ID NO: 63516 - DNA, 37 bp, Artificial Sequence
  primer
gtaaaacgacggccagtaggaagtgcgtcatcagtcg

SEQ ID NO: 63517 - DNA, 21 bp, Artificial Sequence
  primer
ggtgagctacagtcacatcgc

SEQ ID NO: 63518 - DNA, 38 bp, Artificial Sequence
  primer
gtaaaacgacggccagttgactgcttggtacccatttg

SEQ ID NO: 63519 - DNA, 40 bp, Artificial Sequence
  primer
gtaaaacgacggccagtttggttacaattaatcctgcctg

SEQ ID NO: 63520 - DNA, 37 bp, Artificial Sequence
  primer
gtaaaacgacggccagtatctttgcatcaggtttgcg

SEQ ID NO: 63521 - DNA, 37 bp, Artificial Sequence
  primer
gtaaaacgacggccagttttccttggtttgccagttt

SEQ ID NO: 63522 - DNA, 20 bp, Artificial Sequence
  primer
ccttggcacatgaatggttt

SEQ ID NO: 63523 - DNA, 21 bp, Artificial Sequence
  primer
actgagccaagcacttaaccc

SEQ ID NO: 63524 - DNA, 21 bp, Artificial Sequence
  primer
ttacaggcgtgcaccacatac

SEQ ID NO: 63525 - DNA, 21 bp, Artificial Sequence
  primer
caagaaatcctcccacctcag

SEQ ID NO: 63526 - DNA, 39 bp, Artificial Sequence
  primer
gtaaaacgacggccagtttggacaggtcacttcttctcc

SEQ ID NO: 63527 - DNA, 38 bp, Artificial Sequence
  primer
gtaaaacgacggccagtcaggcatttcagaatggaaag

SEQ ID NO: 63528 - DNA, 41 bp, Artificial Sequence
  primer
gtaaaacgacggccagtcaagcctaaacatttaccactttg

SEQ ID NO: 63529 - DNA, 23 bp, Artificial Sequence
  primer
gggaaccctctttgtcttagttc

SEQ ID NO: 63530 - DNA, 38 bp, Artificial Sequence
  primer
gtaaaacgacggccagttttggcataactgtcgtggtg

SEQ ID NO: 63531 - DNA, 21 bp, Artificial Sequence
  primer
acagagcgagactccatctca

SEQ ID NO: 63532 - DNA, 38 bp, Artificial Sequence
  primer
gtaaaacgacggccagttgcctcatgccgcttattaac

SEQ ID NO: 63533 - DNA, 38 bp, Artificial Sequence
  primer
gtaaaacgacggccagtccagtgctgcttcagagaaac

SEQ ID NO: 63534 - DNA, 40 bp, Artificial Sequence
  primer
gtaaaacgacggccagttttgaatgcacctaattctttcc

SEQ ID NO: 63535 - DNA, 21 bp, Artificial Sequence
  primer
ctggcagcagttctgagattg

SEQ ID NO: 63536 - DNA, 38 bp, Artificial Sequence
  primer
gtaaaacgacggccagtatcccgatcctaaccttccac

SEQ ID NO: 63537 - DNA, 21 bp, Artificial Sequence
  primer
ttagggcaaagagagtctggc

SEQ ID NO: 63538 - DNA, 38 bp, Artificial Sequence
  primer
gtaaaacgacggccagtctgaaggcattctgacctcac

SEQ ID NO: 63539 - DNA, 38 bp, Artificial Sequence
  primer
gtaaaacgacggccagtactctgtcgtcaccacgattg

SEQ ID NO: 63540 - DNA, 37 bp, Artificial Sequence
  primer
gtaaaacgacggccagtacagagtggcctcgagtcag

SEQ ID NO: 63541 - DNA, 20 bp, Artificial Sequence
  primer
agagctccaacctcctccag

SEQ ID NO: 63542 - DNA, 18 bp, Artificial Sequence
  primer
gagcggagccaacgctat

SEQ ID NO: 63543 - DNA, 21 bp, Artificial Sequence
  primer
tgtgggaatgtggtaacttgc

SEQ ID NO: 63544 - DNA, 19 bp, Artificial Sequence
  primer
ctcttctgtctcgcctgcc

SEQ ID NO: 63545 - DNA, 38 bp, Artificial Sequence
  primer
gtaaaacgacggccagtttagagcagcaggcagaagtg

SEQ ID NO: 63546 - DNA, 21 bp, Artificial Sequence
  primer
gggcataaacgctctcatttc

SEQ ID NO: 63547 - DNA, 38 bp, Artificial Sequence
  primer
gtaaaacgacggccagtctccgagagactcatgcaaag

SEQ ID NO: 63548 - DNA, 37 bp, Artificial Sequence
  primer
gtaaaacgacggccagtcttgccatctgcacacagtc

SEQ ID NO: 63549 - DNA, 38 bp, Artificial Sequence
  primer
gtaaaacgacggccagtctgtcctccaggaactgaagc

SEQ ID NO: 63550 - DNA, 23 bp, Artificial Sequence
  primer
gtgaccatttgtgtctagcattg

SEQ ID NO: 63551 - DNA, 37 bp, Artificial Sequence
  primer
gtaaaacgacggccagtcttctttgccagcaatgtcc

SEQ ID NO: 63552 - DNA, 38 bp, Artificial Sequence
  primer
gtaaaacgacggccagttttgtccatccattctcaggg

SEQ ID NO: 63553 - DNA, 38 bp, Artificial Sequence
  primer
gtaaaacgacggccagtcagtgagcacagccaggtaag

SEQ ID NO: 63554 - DNA, 21 bp, Artificial Sequence
  primer
ccagttctcacccaggtcttc

SEQ ID NO: 63555 - DNA, 38 bp, Artificial Sequence
  primer
gtaaaacgacggccagtttcaggtgttggctacgtttg

SEQ ID NO: 63556 - DNA, 38 bp, Artificial Sequence
  primer
gtaaaacgacggccagtgtcactccacacaccttcagc

SEQ ID NO: 63557 - DNA, 37 bp, Artificial Sequence
  primer
gtaaaacgacggccagtgcttcccatcactgcaattc

SEQ ID NO: 63558 - DNA, 38 bp, Artificial Sequence
  primer
gtaaaacgacggccagtaggcttcttaaactccgaggc

SEQ ID NO: 63559 - DNA, 21 bp, Artificial Sequence
  primer
tcctgtagcaccacacctctg

SEQ ID NO: 63560 - DNA, 21 bp, Artificial Sequence
  primer
ctttgaaagacacactggccc

SEQ ID NO: 63561 - DNA, 38 bp, Artificial Sequence
  primer
gtaaaacgacggccagtcattggaggaggacaatcagg

SEQ ID NO: 63562 - DNA, 38 bp, Artificial Sequence
  primer
gtaaaacgacggccagtgtagggttggttacaggcagg

SEQ ID NO: 63563 - DNA, 21 bp, Artificial Sequence
  primer
agcctacctggagaagtgtgg

SEQ ID NO: 63564 - DNA, 37 bp, Artificial Sequence
  primer
gtaaaacgacggccagtgcttcttctaggtggttgcg

SEQ ID NO: 63565 - DNA, 36 bp, Artificial Sequence
  primer
gtaaaacgacggccagtcagcagagtcacctggcac

SEQ ID NO: 63566 - DNA, 21 bp, Artificial Sequence
  primer
tacctggcacacttcctttgg

SEQ ID NO: 63567 - DNA, 36 bp, Artificial Sequence
  primer
gtaaaacgacggccagtagtgtggcaagatgcctcc

SEQ ID NO: 63568 - DNA, 39 bp, Artificial Sequence
  primer
gtaaaacgacggccagttcagaaagacttcagctccacc

SEQ ID NO: 63569 - DNA, 21 bp, Artificial Sequence
  primer
gtccctagtccctatcccgag

SEQ ID NO: 63570 - DNA, 36 bp, Artificial Sequence
  primer
gtaaaacgacggccagtgtctcctctgggcaggatg

SEQ ID NO: 63571 - DNA, 38 bp, Artificial Sequence
  primer
gtaaaacgacggccagttctagggcagcagtccataac

SEQ ID NO: 63572 - DNA, 20 bp, Artificial Sequence
  primer
tggaggaatggtctgtggtc

SEQ ID NO: 63573 - DNA, 24 bp, Artificial Sequence
  primer
aaggcagtagagagacttgtctgg

SEQ ID NO: 63574 - DNA, 21 bp, Artificial Sequence
  primer
ctgtaacggaagcagattggg

SEQ ID NO: 63575 - DNA, 39 bp, Artificial Sequence
  primer
gtaaaacgacggccagtggttacgcagatttgaaagcac

SEQ ID NO: 63576 - DNA, 38 bp, Artificial Sequence
  primer
gtaaaacgacggccagtacttgtgccatcttgtcgatg

SEQ ID NO: 63577 - DNA, 21 bp, Artificial Sequence
  primer
attccaacgtgagttgacagg

SEQ ID NO: 63578 - DNA, 22 bp, Artificial Sequence
  primer
cataccaatccagaagagcctg

SEQ ID NO: 63579 - DNA, 18 bp, Artificial Sequence
  primer
tttgtgttgctagccggg

SEQ ID NO: 63580 - DNA, 38 bp, Artificial Sequence
  primer
gtaaaacgacggccagtcaggcctctgagtctcactcc

SEQ ID NO: 63581 - DNA, 21 bp, Artificial Sequence
  primer
gtccagcttcaagccctactc

SEQ ID NO: 63582 - DNA, 21 bp, Artificial Sequence
  primer
tggacaagaaagaccaggagc

SEQ ID NO: 63583 - DNA, 37 bp, Artificial Sequence
  primer
gtaaaacgacggccagtgctacccgtctcagttcgtg

SEQ ID NO: 63584 - DNA, 21 bp, Artificial Sequence
  primer
ccctattgcttgggaggttac

SEQ ID NO: 63585 - DNA, 21 bp, Artificial Sequence
  primer
tacacctacggcttcatgctg

SEQ ID NO: 63586 - DNA, 35 bp, Artificial Sequence
  primer
gtaaaacgacggccagtctgcagggagagggtggt

SEQ ID NO: 63587 - DNA, 20 bp, Artificial Sequence
  primer
cttgtcgggtcttcagggag

SEQ ID NO: 63588 - DNA, 38 bp, Artificial Sequence
  primer
gtaaaacgacggccagtcaaggaccacgagtacagcag

SEQ ID NO: 63589 - DNA, 38 bp, Artificial Sequence
  primer
gtaaaacgacggccagtcgagagagtccatgaaggtcc

SEQ ID NO: 63590 - DNA, 21 bp, Artificial Sequence
  primer
gcagtgggagagaagtcgaac

SEQ ID NO: 63591 - DNA, 38 bp, Artificial Sequence
  primer
gtaaaacgacggccagtgagactgcgcctaccacctac

SEQ ID NO: 63592 - DNA, 18 bp, Artificial Sequence
  primer
aagccttgagccacgtcc

SEQ ID NO: 63593 - DNA, 19 bp, Artificial Sequence
  primer
gatctgctaccagggctgc

SEQ ID NO: 63594 - DNA, 38 bp, Artificial Sequence
  primer
gtaaaacgacggccagtaggcaaagtcttgctttccac

SEQ ID NO: 63595 - DNA, 21 bp, Artificial Sequence
  primer
ggaccaaggtgagaaggaagg

SEQ ID NO: 63596 - DNA, 38 bp, Artificial Sequence
  primer
gtaaaacgacggccagtttctgaaatctgcctcttccc

SEQ ID NO: 63597 - DNA, 38 bp, Artificial Sequence
  primer
gtaaaacgacggccagtacttacctgtgagtggctggg

SEQ ID NO: 63598 - DNA, 38 bp, Artificial Sequence
  primer
gtaaaacgacggccagtggccaggcatacacaactatg

SEQ ID NO: 63599 - DNA, 38 bp, Artificial Sequence
  primer
gtaaaacgacggccagtagcttctgtacccttccctcc

SEQ ID NO: 63600 - DNA, 38 bp, Artificial Sequence
  primer
gtaaaacgacggccagtagtaaaggtggaagtggcagg

SEQ ID NO: 63601 - DNA, 38 bp, Artificial Sequence
  primer
gtaaaacgacggccagtactgctttgtgtgtcccaaac

SEQ ID NO: 63602 - DNA, 20 bp, Artificial Sequence
  primer
gaagagtgggatctccctgg

SEQ ID NO: 63603 - DNA, 37 bp, Artificial Sequence
  primer
gtaaaacgacggccagtatggctccaaggaggatgag

SEQ ID NO: 63604 - DNA, 38 bp, Artificial Sequence
  primer
gtaaaacgacggccagtagaggagccaagtgcaagttc

SEQ ID NO: 63605 - DNA, 38 bp, Artificial Sequence
  primer
gtaaaacgacggccagttcataaccctgagctccactg

SEQ ID NO: 63606 - DNA, 38 bp, Artificial Sequence
  primer
gtaaaacgacggccagtctctcagcagccaggctctac

SEQ ID NO: 63607 - DNA, 36 bp, Artificial Sequence
  primer
gtaaaacgacggccagttacgaagcgagcttgggag

SEQ ID NO: 63608 - DNA, 38 bp, Artificial Sequence
  primer
gtaaaacgacggccagtaggtgggatctcctggatagg

SEQ ID NO: 63609 - DNA, 38 bp, Artificial Sequence
  primer
gtaaaacgacggccagtctgcttctgcctaccagtgag

SEQ ID NO: 63610 - DNA, 38 bp, Artificial Sequence
  primer
gtaaaacgacggccagtagcttagcttccttccctgtg

SEQ ID NO: 63611 - DNA, 21 bp, Artificial Sequence
  primer
tctttgaaacaatggtcacgg

SEQ ID NO: 63612 - DNA, 37 bp, Artificial Sequence
  primer
gtaaaacgacggccagtcacccatttgaccttcctcc

SEQ ID NO: 63613 - DNA, 38 bp, Artificial Sequence
  primer
gtaaaacgacggccagtgagacagtacgctcccagagg

SEQ ID NO: 63614 - DNA, 38 bp, Artificial Sequence
  primer
gtaaaacgacggccagtcagctgtatctttctgcctgg

SEQ ID NO: 63615 - DNA, 39 bp, Artificial Sequence
  primer
gtaaaacgacggccagtgagaaggaggtgtaatgggagc

SEQ ID NO: 63616 - DNA, 38 bp, Artificial Sequence
  primer
gtaaaacgacggccagtggaacttggctcagaggtttg

SEQ ID NO: 63617 - DNA, 38 bp, Artificial Sequence
  primer
gtaaaacgacggccagtatctggcagtggttcttgacc

SEQ ID NO: 63618 - DNA, 38 bp, Artificial Sequence
  primer
gtaaaacgacggccagttgtacccatggtactgcaagc

SEQ ID NO: 63619 - DNA, 38 bp, Artificial Sequence
  primer
gtaaaacgacggccagttcactgggcatttctaccctc

SEQ ID NO: 63620 - DNA, 21 bp, Artificial Sequence
  primer
tgaaagtgggagtgagcaaac

SEQ ID NO: 63621 - DNA, 19 bp, Artificial Sequence
  primer
gtaaccggtgcgcttatcg

SEQ ID NO: 63622 - DNA, 38 bp, Artificial Sequence
  primer
gtaaaacgacggccagtttcctttggttgaagtgatgg

SEQ ID NO: 63623 - DNA, 38 bp, Artificial Sequence
  primer
gtaaaacgacggccagtttacccagctagtggcagagg

SEQ ID NO: 63624 - DNA, 21 bp, Artificial Sequence
  primer
agagagagcacgtatgcctgg

SEQ ID NO: 63625 - DNA, 38 bp, Artificial Sequence
  primer
gtaaaacgacggccagtgaggacaggaaggacacttcg

SEQ ID NO: 63626 - DNA, 22 bp, Artificial Sequence
  primer
tgttcttcccaactctctgctc

SEQ ID NO: 63627 - DNA, 38 bp, Artificial Sequence
  primer
gtaaaacgacggccagtaaagctgtgcattgttccatc

SEQ ID NO: 63628 - DNA, 42 bp, Artificial Sequence
  primer
gtaaaacgacggccagtttggaactaggtgtcttaggaacag

SEQ ID NO: 63629 - DNA, 38 bp, Artificial Sequence
  primer
gtaaaacgacggccagtagctgctgtgtgagtggaatc

SEQ ID NO: 63630 - DNA, 21 bp, Artificial Sequence
  primer
ggctgtcagcacacagttctc

SEQ ID NO: 63631 - DNA, 38 bp, Artificial Sequence
  primer
gtaaaacgacggccagtaaagccagggaattaccacac

SEQ ID NO: 63632 - DNA, 22 bp, Artificial Sequence
  primer
tgacattgcatgtaaaccaagc

SEQ ID NO: 63633 - DNA, 21 bp, Artificial Sequence
  primer
taccacagaacaggcagatgg

SEQ ID NO: 63634 - DNA, 40 bp, Artificial Sequence
  primer
gtaaaacgacggccagtgctgcagtatcagtgaagcagag

SEQ ID NO: 63635 - DNA, 30 bp, Artificial Sequence
  primer
aaactctgactctaaatccttcttctttag

SEQ ID NO: 63636 - DNA, 20 bp, Artificial Sequence
  primer
ggtcctgggtggatatttgc

SEQ ID NO: 63637 - DNA, 21 bp, Artificial Sequence
  primer
accatacccaccactcaggac

SEQ ID NO: 63638 - DNA, 21 bp, Artificial Sequence
  primer
atggagttcagtatctccgcc

SEQ ID NO: 63639 - DNA, 38 bp, Artificial Sequence
  primer
gtaaaacgacggccagtaggtcagggaacctctgagac

SEQ ID NO: 63640 - DNA, 38 bp, Artificial Sequence
  primer
gtaaaacgacggccagtaggctttcaccagttctcagg

SEQ ID NO: 63641 - DNA, 18 bp, Artificial Sequence
  primer
gacaggccacagagccag

SEQ ID NO: 63642 - DNA, 38 bp, Artificial Sequence
  primer
gtaaaacgacggccagtctgaggatcgactacccgaag

SEQ ID NO: 63643 - DNA, 21 bp, Artificial Sequence
  primer
gtggaggaccacaacactcag

SEQ ID NO: 63644 - DNA, 21 bp, Artificial Sequence
  primer
ggcctctccaagatcactacc

SEQ ID NO: 63645 - DNA, 38 bp, Artificial Sequence
  primer
gtaaaacgacggccagtgaccacacctttgctgatgtc

SEQ ID NO: 63646 - DNA, 21 bp, Artificial Sequence
  primer
ttccgaatctaccaggacacc

SEQ ID NO: 63647 - DNA, 38 bp, Artificial Sequence
  primer
gtaaaacgacggccagtctgcacatctgtacctggctc

SEQ ID NO: 63648 - DNA, 22 bp, Artificial Sequence
  primer
cctccaaagtgaagttagtgcg

SEQ ID NO: 63649 - DNA, 22 bp, Artificial Sequence
  primer
ccttatccacatgctaccaagc

SEQ ID NO: 63650 - DNA, 37 bp, Artificial Sequence
  primer
gtaaaacgacggccagtagtggtgccagctgatgaac

SEQ ID NO: 63651 - DNA, 42 bp, Artificial Sequence
  primer
gtaaaacgacggccagttgtcttcagttagaagatgtgatgg

SEQ ID NO: 63652 - DNA, 21 bp, Artificial Sequence
  primer
accgggaagctgtaaggtatg

SEQ ID NO: 63653 - DNA, 40 bp, Artificial Sequence
  primer
gtaaaacgacggccagttgtctttggctgttcaaatacag

SEQ ID NO: 63654 - DNA, 21 bp, Artificial Sequence
  primer
atttcctcgtgccttagttgc

SEQ ID NO: 63655 - DNA, 21 bp, Artificial Sequence
  primer
gtgctgtgcacataaaccctg

SEQ ID NO: 63656 - DNA, 37 bp, Artificial Sequence
  primer
gtaaaacgacggccagtcttccgagtgtttctggagg

SEQ ID NO: 63657 - DNA, 39 bp, Artificial Sequence
  primer
gtaaaacgacggccagttgtccaagagggtaggaatacg

SEQ ID NO: 63658 - DNA, 19 bp, Artificial Sequence
  primer
ggcttatcaggcagcctcc

SEQ ID NO: 63659 - DNA, 21 bp, Artificial Sequence
  primer
cccagagatttagatggcagc

SEQ ID NO: 63660 - DNA, 38 bp, Artificial Sequence
  primer
gtaaaacgacggccagttttcaccttcagcaccacttc

SEQ ID NO: 63661 - DNA, 21 bp, Artificial Sequence
  primer
gttcagcgctctttctacagg

SEQ ID NO: 63662 - DNA, 21 bp, Artificial Sequence
  primer
ctagaatgtcatcactgcccg

SEQ ID NO: 63663 - DNA, 38 bp, Artificial Sequence
  primer
gtaaaacgacggccagtgggaaggaagaagtgcaaatg

SEQ ID NO: 63664 - DNA, 38 bp, Artificial Sequence
  primer
gtaaaacgacggccagtctcagcccacagatctcacag

SEQ ID NO: 63665 - DNA, 38 bp, Artificial Sequence
  primer
gtaaaacgacggccagtttgcctgaataatcaagtggg

SEQ ID NO: 63666 - DNA, 38 bp, Artificial Sequence
  primer
gtaaaacgacggccagtttagctctgattggtcgaggg

SEQ ID NO: 63667 - DNA, 38 bp, Artificial Sequence
  primer
gtaaaacgacggccagtgccacacaatgagcagctatc

SEQ ID NO: 63668 - DNA, 38 bp, Artificial Sequence
  primer
gtaaaacgacggccagtctgtccagcagaaggtaagcc

SEQ ID NO: 63669 - DNA, 19 bp, Artificial Sequence
  primer
gagaatggcgtgaacccac

SEQ ID NO: 63670 - DNA, 36 bp, Artificial Sequence
  primer
gtaaaacgacggccagtgaagtgcccatggaggaag

SEQ ID NO: 63671 - DNA, 23 bp, Artificial Sequence
  primer
gatgacaatttagagtcaggccc

SEQ ID NO: 63672 - DNA, 38 bp, Artificial Sequence
  primer
gtaaaacgacggccagtaatgacctagctgcgtgtgtc

SEQ ID NO: 63673 - DNA, 37 bp, Artificial Sequence
  primer
gtaaaacgacggccagtaccaaagaacatggcaccag

SEQ ID NO: 63674 - DNA, 20 bp, Artificial Sequence
  primer
attgcctctgagcgtgaaag

SEQ ID NO: 63675 - DNA, 38 bp, Artificial Sequence
  primer
gtaaaacgacggccagtgatggatgggtaggtgggtag

SEQ ID NO: 63676 - DNA, 21 bp, Artificial Sequence
  primer
tgaaattggaaggatccaagg

SEQ ID NO: 63677 - DNA, 21 bp, Artificial Sequence
  primer
gctggtaccgagagttgaagg

SEQ ID NO: 63678 - DNA, 39 bp, Artificial Sequence
  primer
gtaaaacgacggccagtattacctgtaatgcagccattg

SEQ ID NO: 63679 - DNA, 36 bp, Artificial Sequence
  primer
gtaaaacgacggccagtgtgtgagccaccacgtctg

SEQ ID NO: 63680 - DNA, 38 bp, Artificial Sequence
  primer
gtaaaacgacggccagtcacagaggcattccaagtgac

SEQ ID NO: 63681 - DNA, 43 bp, Artificial Sequence
  primer
gtaaaacgacggccagttttgtaatacagatattcaccatgcc

SEQ ID NO: 63682 - DNA, 39 bp, Artificial Sequence
  primer
gtaaaacgacggccagtttgcagaatgaagattgtgagc

SEQ ID NO: 63683 - DNA, 38 bp, Artificial Sequence
  primer
gtaaaacgacggccagtacacacaaggagtgggtaggg

SEQ ID NO: 63684 - DNA, 38 bp, Artificial Sequence
  primer
gtaaaacgacggccagttccctgctgatagcgttcttc

SEQ ID NO: 63685 - DNA, 18 bp, Artificial Sequence
  primer
accagcatgcagtggctc

SEQ ID NO: 63686 - DNA, 21 bp, Artificial Sequence
  primer
atccacgtggccttctaactc

SEQ ID NO: 63687 - DNA, 38 bp, Artificial Sequence
  primer
gtaaaacgacggccagtacctgtagcacagggcctaac

SEQ ID NO: 63688 - DNA, 38 bp, Artificial Sequence
  primer
gtaaaacgacggccagtttggtcgaataagggaaatgg

SEQ ID NO: 63689 - DNA, 38 bp, Artificial Sequence
  primer
gtaaaacgacggccagttagcaatgtcctgtctcctgg

SEQ ID NO: 63690 - DNA, 36 bp, Artificial Sequence
  primer
gtaaaacgacggccagttcacacctgctttcctccc

SEQ ID NO: 63691 - DNA, 38 bp, Artificial Sequence
  primer
gtaaaacgacggccagtgctgtccatcaagatcttccc

SEQ ID NO: 63692 - DNA, 18 bp, Artificial Sequence
  primer
ccagtgcccagcactctg

SEQ ID NO: 63693 - DNA, 21 bp, Artificial Sequence
  primer
agcctcctgtaccagctcaac

SEQ ID NO: 63694 - DNA, 21 bp, Artificial Sequence
  primer
tcaccgtaggccagtactttg

SEQ ID NO: 63695 - DNA, 38 bp, Artificial Sequence
  primer
gtaaaacgacggccagtacctttgcggctagtcttgtc

SEQ ID NO: 63696 - DNA, 42 bp, Artificial Sequence
  primer
gtaaaacgacggccagttcagaaagatggtgatagaacttcc

SEQ ID NO: 63697 - DNA, 39 bp, Artificial Sequence
  primer
gtaaaacgacggccagtagcatgtcttaatttgccactg

SEQ ID NO: 63698 - DNA, 21 bp, Artificial Sequence
  primer
gggaagggtcttcacacacag

SEQ ID NO: 63699 - DNA, 21 bp, Artificial Sequence
  primer
ccattcgtttcctccagtgtc

SEQ ID NO: 63700 - DNA, 39 bp, Artificial Sequence
  primer
gtaaaacgacggccagtcctcagtcttgccgaattagtg

SEQ ID NO: 63701 - DNA, 25 bp, Artificial Sequence
  primer
ccttgacatttaatgaaacatttgc

SEQ ID NO: 63702 - DNA, 18 bp, Artificial Sequence
  primer
ccctcacctgctcctctg

SEQ ID NO: 63703 - DNA, 21 bp, Artificial Sequence
  primer
agtgataggacgagcgtttcc

SEQ ID NO: 63704 - DNA, 21 bp, Artificial Sequence
  primer
tggtgagaaaccctactgctg

SEQ ID NO: 63705 - DNA, 20 bp, Artificial Sequence
  primer
ctcggaagacaccctgtacc

SEQ ID NO: 63706 - DNA, 36 bp, Artificial Sequence
  primer
gtaaaacgacggccagtgactgcgggaccttctttg

SEQ ID NO: 63707 - DNA, 38 bp, Artificial Sequence
  primer
gtaaaacgacggccagtaagtagtggtggtacgggtcc

SEQ ID NO: 63708 - DNA, 22 bp, Artificial Sequence
  primer
ccagtgatgctgtacttccaac

SEQ ID NO: 63709 - DNA, 38 bp, Artificial Sequence
  primer
gtaaaacgacggccagtcctcaagctgaactggaaagg

SEQ ID NO: 63710 - DNA, 21 bp, Artificial Sequence
  primer
tctaggagtgaaggaaaggcg

SEQ ID NO: 63711 - DNA, 37 bp, Artificial Sequence
  primer
gtaaaacgacggccagtcttctgggtcacagaggctg

SEQ ID NO: 63712 - DNA, 21 bp, Artificial Sequence
  primer
agtgcagcctgatggattctc

SEQ ID NO: 63713 - DNA, 21 bp, Artificial Sequence
  primer
aaataggcacccactctcacc

SEQ ID NO: 63714 - DNA, 37 bp, Artificial Sequence
  primer
gtaaaacgacggccagtgcagcaagatgaggatgagg

SEQ ID NO: 63715 - DNA, 22 bp, Artificial Sequence
  primer
caatctcctgaccttgtgatcc

SEQ ID NO: 63716 - DNA, 38 bp, Artificial Sequence
  primer
gtaaaacgacggccagttttgtcagacctgggaaagtg

SEQ ID NO: 63717 - DNA, 21 bp, Artificial Sequence
  primer
tctgtcccagaggttcagatg

SEQ ID NO: 63718 - DNA, 38 bp, Artificial Sequence
  primer
gtaaaacgacggccagttctctccatctttgtttccgc

SEQ ID NO: 63719 - DNA, 38 bp, Artificial Sequence
  primer
gtaaaacgacggccagttttggacagtgagggtgagtg

SEQ ID NO: 63720 - DNA, 38 bp, Artificial Sequence
  primer
gtaaaacgacggccagtcccataacaccttaactgccc

SEQ ID NO: 63721 - DNA, 21 bp, Artificial Sequence
  primer
cggtaactttagagccgcttg

SEQ ID NO: 63722 - DNA, 38 bp, Artificial Sequence
  primer
gtaaaacgacggccagtaaccagccacttctctgttga

SEQ ID NO: 63723 - DNA, 21 bp, Artificial Sequence
  primer
ggaaagtggtcttagcctggg

SEQ ID NO: 63724 - DNA, 21 bp, Artificial Sequence
  primer
agtgctgcaattatgggtgtg

SEQ ID NO: 63725 - DNA, 27 bp, Artificial Sequence
  primer
tgtgtcctttggtaataatacattctg

SEQ ID NO: 63726 - DNA, 40 bp, Artificial Sequence
  primer
gtaaaacgacggccagttttcgccattctactaggtgttt

SEQ ID NO: 63727 - DNA, 38 bp, Artificial Sequence
  primer
gtaaaacgacggccagttcttctgattcctggattgcc

SEQ ID NO: 63728 - DNA, 38 bp, Artificial Sequence
  primer
gtaaaacgacggccagtggatgggagaaagaatgatga

SEQ ID NO: 63729 - DNA, 21 bp, Artificial Sequence
  primer
caacaagagcgaaactccatc

SEQ ID NO: 63730 - DNA, 38 bp, Artificial Sequence
  primer
gtaaaacgacggccagttgaaggtagtgaggaaccagc

SEQ ID NO: 63731 - DNA, 26 bp, Artificial Sequence
  primer
tgcttcccttattatattcccttagc

SEQ ID NO: 63732 - DNA, 44 bp, Artificial Sequence
  primer
gtaaaacgacggccagtacagatgtttctaaagggttctacatc

SEQ ID NO: 63733 - DNA, 38 bp, Artificial Sequence
  primer
gtaaaacgacggccagttgcacctaccttgattccaga

SEQ ID NO: 63734 - DNA, 20 bp, Artificial Sequence
  primer
ccacttcctagcacaaagcg

SEQ ID NO: 63735 - DNA, 26 bp, Artificial Sequence
  primer
ccatgtataacataattcattgcaga

SEQ ID NO: 63736 - DNA, 21 bp, Artificial Sequence
  primer
cagggtctgtttgcacagttg

SEQ ID NO: 63737 - DNA, 21 bp, Artificial Sequence
  primer
gctgctgatacaggaagggac

SEQ ID NO: 63738 - DNA, 38 bp, Artificial Sequence
  primer
gtaaaacgacggccagtagactacaagtcccagcgtgc

SEQ ID NO: 63739 - DNA, 39 bp, Artificial Sequence
  primer
gtaaaacgacggccagttgggaaattgcttctgaatatg

SEQ ID NO: 63740 - DNA, 24 bp, Artificial Sequence
  primer
gggacacagctaaaccatatcact

SEQ ID NO: 63741 - DNA, 38 bp, Artificial Sequence
  primer
gtaaaacgacggccagtggaatggctggtgactctttc

SEQ ID NO: 63742 - DNA, 21 bp, Artificial Sequence
  primer
aaattggcagaggcttacctg

SEQ ID NO: 63743 - DNA, 38 bp, Artificial Sequence
  primer
gtaaaacgacggccagtctgggctttctgaacatttcc

SEQ ID NO: 63744 - DNA, 21 bp, Artificial Sequence
  primer
gaatgaaagccttcgcagttg

SEQ ID NO: 63745 - DNA, 37 bp, Artificial Sequence
  primer
gtaaaacgacggccagtgacctcctctcacagggagc

SEQ ID NO: 63746 - DNA, 38 bp, Artificial Sequence
  primer
gtaaaacgacggccagtgcagtggtgcttaagaggctg

SEQ ID NO: 63747 - DNA, 21 bp, Artificial Sequence
  primer
tatcttccatttgccagaccc

SEQ ID NO: 63748 - DNA, 19 bp, Artificial Sequence
  primer
gtcagactggcacctgagc

SEQ ID NO: 63749 - DNA, 38 bp, Artificial Sequence
  primer
gtaaaacgacggccagtgtctgtggctgtggcagatac

SEQ ID NO: 63750 - DNA, 21 bp, Artificial Sequence
  primer
tggcgaggctttgtagtaagg

SEQ ID NO: 63751 - DNA, 24 bp, Artificial Sequence
  primer
ggcggttgttagttctacaatgtc

SEQ ID NO: 63752 - DNA, 21 bp, Artificial Sequence
  primer
ttgcatgaatttgaaaggcac

SEQ ID NO: 63753 - DNA, 38 bp, Artificial Sequence
  primer
gtaaaacgacggccagtacctctgttacttagggcggg

SEQ ID NO: 63754 - DNA, 38 bp, Artificial Sequence
  primer
gtaaaacgacggccagtagaaccacctccctgtaatgc

SEQ ID NO: 63755 - DNA, 38 bp, Artificial Sequence
  primer
gtaaaacgacggccagtcactggattcattgaccttgg

SEQ ID NO: 63756 - DNA, 27 bp, Artificial Sequence
  primer
ccagctcatttaggaatataggaacag

SEQ ID NO: 63757 - DNA, 44 bp, Artificial Sequence
  primer
gtaaaacgacggccagtaaattacctttctgtgtgataacttgg

SEQ ID NO: 63758 - DNA, 45 bp, Artificial Sequence
  primer
gtaaaacgacggccagtacttaactgtgtgttacccactactctc

SEQ ID NO: 63759 - DNA, 21 bp, Artificial Sequence
  primer
cctcagtctttctcctgtgcc

SEQ ID NO: 63760 - DNA, 36 bp, Artificial Sequence
  primer
gtaaaacgacggccagtctgggttgctgcagaagtg

SEQ ID NO: 63761 - DNA, 24 bp, Artificial Sequence
  primer
ctgtatggttatgtgtaggttgcg

SEQ ID NO: 63762 - DNA, 21 bp, Artificial Sequence
  primer
atcttcattgccatgccctta

SEQ ID NO: 63763 - DNA, 39 bp, Artificial Sequence
  primer
gtaaaacgacggccagttgaaattgaagacagaccatcc

SEQ ID NO: 63764 - DNA, 39 bp, Artificial Sequence
  primer
gtaaaacgacggccagttggcttagtgaaaggcctacag

SEQ ID NO: 63765 - DNA, 38 bp, Artificial Sequence
  primer
gtaaaacgacggccagtgcccagtgttgaggtttcaag

SEQ ID NO: 63766 - DNA, 38 bp, Artificial Sequence
  primer
gtaaaacgacggccagtttccacctttctccattcctc

SEQ ID NO: 63767 - DNA, 41 bp, Artificial Sequence
  primer
gtaaaacgacggccagtaaccaaagcttgaactaactccac

SEQ ID NO: 63768 - DNA, 21 bp, Artificial Sequence
  primer
acctccacaattgcagctttc

SEQ ID NO: 63769 - DNA, 38 bp, Artificial Sequence
  primer
gtaaaacgacggccagttgggacatcttcattcatccc

SEQ ID NO: 63770 - DNA, 38 bp, Artificial Sequence
  primer
gtaaaacgacggccagtttgaaatgaaattgcctcagc

SEQ ID NO: 63771 - DNA, 38 bp, Artificial Sequence
  primer
gtaaaacgacggccagtatggactttgggacaagatgg

SEQ ID NO: 63772 - DNA, 38 bp, Artificial Sequence
  primer
gtaaaacgacggccagtagcgtgaaggataagattggg

SEQ ID NO: 63773 - DNA, 38 bp, Artificial Sequence
  primer
gtaaaacgacggccagtggccttcagtcatttgtgatg

SEQ ID NO: 63774 - DNA, 38 bp, Artificial Sequence
  primer
gtaaaacgacggccagtaagccaatggcaggtattagg

SEQ ID NO: 63775 - DNA, 37 bp, Artificial Sequence
  primer
gtaaaacgacggccagtatctgcctaccttggcatcc

SEQ ID NO: 63776 - DNA, 21 bp, Artificial Sequence
  primer
gctgagttcccgatctctctc

SEQ ID NO: 63777 - DNA, 35 bp, Artificial Sequence
  primer
gtaaaacgacggccagtagtctagagctccgggcg

SEQ ID NO: 63778 - DNA, 21 bp, Artificial Sequence
  primer
tcctggaagccctgtaaagac

SEQ ID NO: 63779 - DNA, 21 bp, Artificial Sequence
  primer
caatggcacttacggcttagg

SEQ ID NO: 63780 - DNA, 38 bp, Artificial Sequence
  primer
gtaaaacgacggccagttataggcatgcaccaccacac

SEQ ID NO: 63781 - DNA, 38 bp, Artificial Sequence
  primer
gtaaaacgacggccagtcacctggatctcttgctggtc

SEQ ID NO: 63782 - DNA, 38 bp, Artificial Sequence
  primer
gtaaaacgacggccagttcaaagagaatgagggcacag

SEQ ID NO: 63783 - DNA, 38 bp, Artificial Sequence
  primer
gtaaaacgacggccagttcaacagccagagtgggtatc

SEQ ID NO: 63784 - DNA, 38 bp, Artificial Sequence
  primer
gtaaaacgacggccagttcttggtcatcactgtgtccc

SEQ ID NO: 63785 - DNA, 21 bp, Artificial Sequence
  primer
gacgcacagatggactaccag

SEQ ID NO: 63786 - DNA, 38 bp, Artificial Sequence
  primer
gtaaaacgacggccagttcgtgatctctttgtggttgg

SEQ ID NO: 63787 - DNA, 37 bp, Artificial Sequence
  primer
gtaaaacgacggccagtagtcaggatgctggacttgc

SEQ ID NO: 63788 - DNA, 39 bp, Artificial Sequence
  primer
gtaaaacgacggccagtgaggttccttgaattctttccc

SEQ ID NO: 63789 - DNA, 38 bp, Artificial Sequence
  primer
gtaaaacgacggccagtaagttgcatttatggcccaac

SEQ ID NO: 63790 - DNA, 38 bp, Artificial Sequence
  primer
gtaaaacgacggccagttgtcacctgccactggtttag

SEQ ID NO: 63791 - DNA, 19 bp, Artificial Sequence
  primer
gacttcctacctgccaccg

SEQ ID NO: 63792 - DNA, 39 bp, Artificial Sequence
  primer
gtaaaacgacggccagtggaaatgggaatatatccaggg

SEQ ID NO: 63793 - DNA, 37 bp, Artificial Sequence
  primer
gtaaaacgacggccagtcatcctgggtgtgagtggac

SEQ ID NO: 63794 - DNA, 21 bp, Artificial Sequence
  primer
tgacctggaggttctgtagcc

SEQ ID NO: 63795 - DNA, 37 bp, Artificial Sequence
  primer
gtaaaacgacggccagttcactgtgtggagccagttg

SEQ ID NO: 63796 - DNA, 41 bp, Artificial Sequence
  primer
gtaaaacgacggccagttttcaaggtctaagttgctcactg

SEQ ID NO: 63797 - DNA, 38 bp, Artificial Sequence
  primer
gtaaaacgacggccagtagcctatttagcaggtgtggg

SEQ ID NO: 63798 - DNA, 24 bp, Artificial Sequence
  primer
ccattaacatgactgggaataagc

SEQ ID NO: 63799 - DNA, 39 bp, Artificial Sequence
  primer
gtaaaacgacggccagtaatgaccagttgaacaacacaa

SEQ ID NO: 63800 - DNA, 21 bp, Artificial Sequence
  primer
ggtagcagggacaaaggattg

SEQ ID NO: 63801 - DNA, 23 bp, Artificial Sequence
  primer
ggagcataatactgacagttggg

SEQ ID NO: 63802 - DNA, 42 bp, Artificial Sequence
  primer
gtaaaacgacggccagttgtttatgattccttgcatgtagac

SEQ ID NO: 63803 - DNA, 39 bp, Artificial Sequence
  primer
gtaaaacgacggccagttctgtagtctggctgtggtctg

SEQ ID NO: 63804 - DNA, 38 bp, Artificial Sequence
  primer
gtaaaacgacggccagtttatcgtgcaatgcttcatcc

SEQ ID NO: 63805 - DNA, 23 bp, Artificial Sequence
  primer
tctctaagccaagcaggactacc

SEQ ID NO: 63806 - DNA, 38 bp, Artificial Sequence
  primer
gtaaaacgacggccagtaaaggaaaggcagcaatgaag

SEQ ID NO: 63807 - DNA, 38 bp, Artificial Sequence
  primer
gtaaaacgacggccagtatcccttccttctatttgccc

SEQ ID NO: 63808 - DNA, 37 bp, Artificial Sequence
  primer
gtaaaacgacggccagtctggtgatctgcccactttg

SEQ ID NO: 63809 - DNA, 23 bp, Artificial Sequence
  primer
aaggaaggaagtggacagaaatg

SEQ ID NO: 63810 - DNA, 37 bp, Artificial Sequence
  primer
gtaaaacgacggccagtccttcctgctgtacctgtgg

SEQ ID NO: 63811 - DNA, 37 bp, Artificial Sequence
  primer
gtaaaacgacggccagttgttcaacagtggtcaacgc

SEQ ID NO: 63812 - DNA, 37 bp, Artificial Sequence
  primer
gtaaaacgacggccagtgcctatctgcaagcctgttg

SEQ ID NO: 63813 - DNA, 37 bp, Artificial Sequence
  primer
gtaaaacgacggccagttgaattcctgggctcaagtg

SEQ ID NO: 63814 - DNA, 38 bp, Artificial Sequence
  primer
gtaaaacgacggccagtgtggtagcaagaggagatggg

SEQ ID NO: 63815 - DNA, 39 bp, Artificial Sequence
  primer
gtaaaacgacggccagtcctgtggtacaggtaatgtggg

SEQ ID NO: 63816 - DNA, 38 bp, Artificial Sequence
  primer
gtaaaacgacggccagttttctttctccattatggccg

SEQ ID NO: 63817 - DNA, 38 bp, Artificial Sequence
  primer
gtaaaacgacggccagtacacgacatgaaagcaaggtg

SEQ ID NO: 63818 - DNA, 38 bp, Artificial Sequence
  primer
gtaaaacgacggccagttacaaatatggtgagcgaccc

SEQ ID NO: 63819 - DNA, 38 bp, Artificial Sequence
  primer
gtaaaacgacggccagtccaattcagaggtctgatccc

SEQ ID NO: 63820 - DNA, 39 bp, Artificial Sequence
  primer
gtaaaacgacggccagttcttcactgtcttccttgaggg

SEQ ID NO: 63821 - DNA, 20 bp, Artificial Sequence
  primer
agagaggcctagccacttgc

SEQ ID NO: 63822 - DNA, 38 bp, Artificial Sequence
  primer
gtaaaacgacggccagtacgcatctgtatccatcctcc

SEQ ID NO: 63823 - DNA, 21 bp, Artificial Sequence
  primer
actctccaaactcccatgagc

SEQ ID NO: 63824 - DNA, 38 bp, Artificial Sequence
  primer
gtaaaacgacggccagtaagtctgtccacgatgcttcc

SEQ ID NO: 63825 - DNA, 21 bp, Artificial Sequence
  primer
ttacacgccatcatcgacttc

SEQ ID NO: 63826 - DNA, 21 bp, Artificial Sequence
  primer
tgtggcaagaccttcaatcag

SEQ ID NO: 63827 - DNA, 21 bp, Artificial Sequence
  primer
aatgtgacaaagctttccgtg

SEQ ID NO: 63828 - DNA, 38 bp, Artificial Sequence
  primer
gtaaaacgacggccagtctgcacatctcgtcctctttg

SEQ ID NO: 63829 - DNA, 38 bp, Artificial Sequence
  primer
gtaaaacgacggccagtcaaatctgggcctttcaattc

SEQ ID NO: 63830 - DNA, 22 bp, Artificial Sequence
  primer
ttgataccaaggaatttgagcc

SEQ ID NO: 63831 - DNA, 39 bp, Artificial Sequence
  primer
gtaaaacgacggccagttcaacagagcagcatgcataac

SEQ ID NO: 63832 - DNA, 25 bp, Artificial Sequence
  primer
tgtctgtaactgtatcaccatgagg

SEQ ID NO: 63833 - DNA, 38 bp, Artificial Sequence
  primer
gtaaaacgacggccagtgataccaaccctgaaattcgc

SEQ ID NO: 63834 - DNA, 25 bp, Artificial Sequence
  primer
gggaaattgtaccctgtttaaatct

SEQ ID NO: 63835 - DNA, 40 bp, Artificial Sequence
  primer
gtaaaacgacggccagtaggcagaaatcgttattgcatag

SEQ ID NO: 63836 - DNA, 22 bp, Artificial Sequence
  primer
ttgacaacaacgcacttaatgg

SEQ ID NO: 63837 - DNA, 27 bp, Artificial Sequence
  primer
tctttaaggcagactacgtcataattg

SEQ ID NO: 63838 - DNA, 38 bp, Artificial Sequence
  primer
gtaaaacgacggccagtaatgacaagtggtgcaacagg

SEQ ID NO: 63839 - DNA, 29 bp, Artificial Sequence
  primer
aagagtctcacttactttaaaccctagaa

SEQ ID NO: 63840 - DNA, 21 bp, Artificial Sequence
  primer
ctcctgctcctgtcttcacac

SEQ ID NO: 63841 - DNA, 37 bp, Artificial Sequence
  primer
gtaaaacgacggccagttgtttcagtctcatgcaggg

SEQ ID NO: 63842 - DNA, 38 bp, Artificial Sequence
  primer
gtaaaacgacggccagtcaggattcacaggtccaagaa

SEQ ID NO: 63843 - DNA, 38 bp, Artificial Sequence
  primer
gtaaaacgacggccagtccaaataaggtaggtggcctg

SEQ ID NO: 63844 - DNA, 38 bp, Artificial Sequence
  primer
gtaaaacgacggccagtatgctgggattgatccctttc

SEQ ID NO: 63845 - DNA, 38 bp, Artificial Sequence
  primer
gtaaaacgacggccagttagtgggacaggcattgtgac

SEQ ID NO: 63846 - DNA, 21 bp, Artificial Sequence
  primer
gcctctctacataaagccggg

SEQ ID NO: 63847 - DNA, 20 bp, Artificial Sequence
  primer
accatcgtgatggaggtcag

SEQ ID NO: 63848 - DNA, 36 bp, Artificial Sequence
  primer
gtaaaacgacggccagtctgcccatttgttccttgg

SEQ ID NO: 63849 - DNA, 41 bp, Artificial Sequence
  primer
gtaaaacgacggccagtggtctgaaagaaggtagacaaggg

SEQ ID NO: 63850 - DNA, 38 bp, Artificial Sequence
  primer
gtaaaacgacggccagtctctcctccacacagacgaag

SEQ ID NO: 63851 - DNA, 37 bp, Artificial Sequence
  primer
gtaaaacgacggccagtgagtctttcctccggtttgg

SEQ ID NO: 63852 - DNA, 38 bp, Artificial Sequence
  primer
gtaaaacgacggccagtttcctctttcactgtcctccc

SEQ ID NO: 63853 - DNA, 38 bp, Artificial Sequence
  primer
gtaaaacgacggccagtgatctcaggtgagcctcttgg

SEQ ID NO: 63854 - DNA, 38 bp, Artificial Sequence
  primer
gtaaaacgacggccagtggaggagaatgtgactgggtc

SEQ ID NO: 63855 - DNA, 19 bp, Artificial Sequence
  primer
gcatggtggcacatgtctg

SEQ ID NO: 63856 - DNA, 21 bp, Artificial Sequence
  primer
agcaagaaacaagaagggctg

SEQ ID NO: 63857 - DNA, 38 bp, Artificial Sequence
  primer
gtaaaacgacggccagttctctaggacttggctctgcc

SEQ ID NO: 63858 - DNA, 39 bp, Artificial Sequence
  primer
gtaaaacgacggccagtcagacgtattcccttacatgcc

SEQ ID NO: 63859 - DNA, 38 bp, Artificial Sequence
  primer
gtaaaacgacggccagttgaatgtggcaagaccttcag

SEQ ID NO: 63860 - DNA, 21 bp, Artificial Sequence
  primer
acgttcagtcgaaattcagcc

SEQ ID NO: 63861 - DNA, 21 bp, Artificial Sequence
  primer
ctaggagctgtgaggtaggcg

SEQ ID NO: 63862 - DNA, 44 bp, Artificial Sequence
  primer
gtaaaacgacggccagtcaaatatgtgtgctaattatgcatttc

SEQ ID NO: 63863 - DNA, 37 bp, Artificial Sequence
  primer
gtaaaacgacggccagtaggaaggtccagtgagcacc

SEQ ID NO: 63864 - DNA, 43 bp, Artificial Sequence
  primer
gtaaaacgacggccagtgagccagaaactaaggaatcaaatac

SEQ ID NO: 63865 - DNA, 23 bp, Artificial Sequence
  primer
aagactcccaacctgatgaaatc

SEQ ID NO: 63866 - DNA, 40 bp, Artificial Sequence
  primer
gtaaaacgacggccagtgcaagaatgatgccttgtaaatg

SEQ ID NO: 63867 - DNA, 21 bp, Artificial Sequence
  primer
aaaggctgcccttgttacatc

SEQ ID NO: 63868 - DNA, 38 bp, Artificial Sequence
  primer
gtaaaacgacggccagtgtaattcaaccctcccagtgc

SEQ ID NO: 63869 - DNA, 38 bp, Artificial Sequence
  primer
gtaaaacgacggccagtttcgaatgtcatgaatgtggg

SEQ ID NO: 63870 - DNA, 22 bp, Artificial Sequence
  primer
gctttcggtcagaaatcacaac

SEQ ID NO: 63871 - DNA, 22 bp, Artificial Sequence
  primer
cctatcaatgtgaggagtgtgg

SEQ ID NO: 63872 - DNA, 42 bp, Artificial Sequence
  primer
gtaaaacgacggccagtaaatgagctcttgatacatctttgg

SEQ ID NO: 63873 - DNA, 37 bp, Artificial Sequence
  primer
gtaaaacgacggccagtcccgacccaggaactacaac

SEQ ID NO: 63874 - DNA, 21 bp, Artificial Sequence
  primer
tggtggaatatttggcacaag

SEQ ID NO: 63875 - DNA, 38 bp, Artificial Sequence
  primer
gtaaaacgacggccagttcatgggtttggtttcatctg

SEQ ID NO: 63876 - DNA, 20 bp, Artificial Sequence
  primer
agccgcaccactaacatctg

SEQ ID NO: 63877 - DNA, 20 bp, Artificial Sequence
  primer
cgctttgaactgacagaggc

SEQ ID NO: 63878 - DNA, 38 bp, Artificial Sequence
  primer
gtaaaacgacggccagtctctgagcttgagtggctgtg

SEQ ID NO: 63879 - DNA, 21 bp, Artificial Sequence
  primer
gttaagcggcaactcagactc

SEQ ID NO: 63880 - DNA, 21 bp, Artificial Sequence
  primer
gcagaggaagggacttctcac

SEQ ID NO: 63881 - DNA, 20 bp, Artificial Sequence
  primer
tgtgacaggagaatcgctca

SEQ ID NO: 63882 - DNA, 39 bp, Artificial Sequence
  primer
gtaaaacgacggccagtcctgaggatttgacagatagcc

SEQ ID NO: 63883 - DNA, 39 bp, Artificial Sequence
  primer
gtaaaacgacggccagtaacatttgatgttccctgatgg

SEQ ID NO: 63884 - DNA, 38 bp, Artificial Sequence
  primer
gtaaaacgacggccagtgttggaccttcctgaacttgc

SEQ ID NO: 63885 - DNA, 38 bp, Artificial Sequence
  primer
gtaaaacgacggccagttgtgtgcttagtcatcgggtc

SEQ ID NO: 63886 - DNA, 37 bp, Artificial Sequence
  primer
gtaaaacgacggccagtgttaacgaccggaaggaagc

SEQ ID NO: 63887 - DNA, 36 bp, Artificial Sequence
  primer
gtaaaacgacggccagttacaggcacctgccaccat

SEQ ID NO: 63888 - DNA, 38 bp, Artificial Sequence
  primer
gtaaaacgacggccagttgtctccttgagtctgcctcc

SEQ ID NO: 63889 - DNA, 21 bp, Artificial Sequence
  primer
cagtgcaacctggactactgc

SEQ ID NO: 63890 - DNA, 37 bp, Artificial Sequence
  primer
gtaaaacgacggccagtaagagaccgagaacgttggg

SEQ ID NO: 63891 - DNA, 21 bp, Artificial Sequence
  primer
gaggaagacaacgacgaggag

SEQ ID NO: 63892 - DNA, 20 bp, Artificial Sequence
  primer
cgaccttacccactttgtcg

SEQ ID NO: 63893 - DNA, 21 bp, Artificial Sequence
  primer
ttcaactagagggcagccttg

SEQ ID NO: 63894 - DNA, 21 bp, Artificial Sequence
  primer
ataccatcacctcccatttgc

SEQ ID NO: 63895 - DNA, 38 bp, Artificial Sequence
  primer
gtaaaacgacggccagtgtgaaccttctctctctgggc

SEQ ID NO: 63896 - DNA, 21 bp, Artificial Sequence
  primer
caacacataactgcagtgggc

SEQ ID NO: 63897 - DNA, 38 bp, Artificial Sequence
  primer
gtaaaacgacggccagttccagattgtgtttccattgc

SEQ ID NO: 63898 - DNA, 38 bp, Artificial Sequence
  primer
gtaaaacgacggccagtaacatccagggaaccacaaag

SEQ ID NO: 63899 - DNA, 38 bp, Artificial Sequence
  primer
gtaaaacgacggccagtacatgtatgcagcccttctcc

SEQ ID NO: 63900 - DNA, 38 bp, Artificial Sequence
  primer
gtaaaacgacggccagtctgaagggtcgagacaaggag

SEQ ID NO: 63901 - DNA, 39 bp, Artificial Sequence
  primer
gtaaaacgacggccagttttcaacaaagagcagattccc

SEQ ID NO: 63902 - DNA, 38 bp, Artificial Sequence
  primer
gtaaaacgacggccagtcccagagttcacatctccctc

SEQ ID NO: 63903 - DNA, 21 bp, Artificial Sequence
  primer
aatgtccaaatgggactggag

SEQ ID NO: 63904 - DNA, 21 bp, Artificial Sequence
  primer
aagcatgctgctctaaggtgg

SEQ ID NO: 63905 - DNA, 38 bp, Artificial Sequence
  primer
gtaaaacgacggccagtcagatgcacaggccaattaag

SEQ ID NO: 63906 - DNA, 38 bp, Artificial Sequence
  primer
gtaaaacgacggccagtcacgccaagtcgttatttgac

SEQ ID NO: 63907 - DNA, 40 bp, Artificial Sequence
  primer
gtaaaacgacggccagtgaactgtcagcaatgttgatttg

SEQ ID NO: 63908 - DNA, 18 bp, Artificial Sequence
  primer
tcaggttggaggcacagg

SEQ ID NO: 63909 - DNA, 40 bp, Artificial Sequence
  primer
gtaaaacgacggccagtaaagccttagtgtagacactgcc

SEQ ID NO: 63910 - DNA, 39 bp, Artificial Sequence
  primer
gtaaaacgacggccagttccttcagtgcctttaatgatg

SEQ ID NO: 63911 - DNA, 26 bp, Artificial Sequence
  primer
aaatttactaacagccattgaattgt

SEQ ID NO: 63912 - DNA, 21 bp, Artificial Sequence
  primer
ggaggtaaacttgtgtcacgg

SEQ ID NO: 63913 - DNA, 38 bp, Artificial Sequence
  primer
gtaaaacgacggccagtttcctgaacagcaaaggtagc

SEQ ID NO: 63914 - DNA, 39 bp, Artificial Sequence
  primer
gtaaaacgacggccagtccactgcctttcagttcagaag

SEQ ID NO: 63915 - DNA, 38 bp, Artificial Sequence
  primer
gtaaaacgacggccagtatgcgtttgtgggttaatgtg

SEQ ID NO: 63916 - DNA, 19 bp, Artificial Sequence
  primer
catgcatccattcacccac

SEQ ID NO: 63917 - DNA, 38 bp, Artificial Sequence
  primer
gtaaaacgacggccagtgctgtttggagtctaccaccc

SEQ ID NO: 63918 - DNA, 24 bp, Artificial Sequence
  primer
gcacaggacataggtaatgaatgg

SEQ ID NO: 63919 - DNA, 27 bp, Artificial Sequence
  primer
ttcaatacacccataatattgtctcac

SEQ ID NO: 63920 - DNA, 38 bp, Artificial Sequence
  primer
gtaaaacgacggccagttgccaagtgagatagtgaggc

SEQ ID NO: 63921 - DNA, 23 bp, Artificial Sequence
  primer
tcaggttgtagccacaaatatca

SEQ ID NO: 63922 - DNA, 41 bp, Artificial Sequence
  primer
gtaaaacgacggccagtcctacagatcctttgaggttcaga

SEQ ID NO: 63923 - DNA, 38 bp, Artificial Sequence
  primer
gtaaaacgacggccagttttctgcactgaaagcaggac

SEQ ID NO: 63924 - DNA, 22 bp, Artificial Sequence
  primer
tcagcaggtacattcaggactc

SEQ ID NO: 63925 - DNA, 21 bp, Artificial Sequence
  primer
atggtcacttaaaggcgatgg

SEQ ID NO: 63926 - DNA, 39 bp, Artificial Sequence
  primer
gtaaaacgacggccagttctggcttctgagtctattccc

SEQ ID NO: 63927 - DNA, 22 bp, Artificial Sequence
  primer
ggctttcccaaagactacttgc

SEQ ID NO: 63928 - DNA, 39 bp, Artificial Sequence
  primer
gtaaaacgacggccagttgtgattcagggaactgtgttg

SEQ ID NO: 63929 - DNA, 40 bp, Artificial Sequence
  primer
gtaaaacgacggccagttgctcaagaaacttgtaaggctg

SEQ ID NO: 63930 - DNA, 21 bp, Artificial Sequence
  primer
ctttgatggttctttgcctcg

SEQ ID NO: 63931 - DNA, 38 bp, Artificial Sequence
  primer
gtaaaacgacggccagtaggcagatgtcgggatgatag

SEQ ID NO: 63932 - DNA, 21 bp, Artificial Sequence
  primer
actgacttgggaagtcttggg

SEQ ID NO: 63933 - DNA, 39 bp, Artificial Sequence
  primer
gtaaaacgacggccagtgttgctgccataatgttctttg

SEQ ID NO: 63934 - DNA, 38 bp, Artificial Sequence
  primer
gtaaaacgacggccagtctctagctttcccattgtggc

SEQ ID NO: 63935 - DNA, 38 bp, Artificial Sequence
  primer
gtaaaacgacggccagtacaatttccatgctccaaacc

SEQ ID NO: 63936 - DNA, 22 bp, Artificial Sequence
  primer
tggcaatacgtttcatttctga

SEQ ID NO: 63937 - DNA, 39 bp, Artificial Sequence
  primer
gtaaaacgacggccagtaaagttgggcccagtaatagtt

SEQ ID NO: 63938 - DNA, 26 bp, Artificial Sequence
  primer
tggtaattcttcaattgctatgtttg

SEQ ID NO: 63939 - DNA, 41 bp, Artificial Sequence
  primer
gtaaaacgacggccagtttacctttcttcttccaacgattc

SEQ ID NO: 63940 - DNA, 38 bp, Artificial Sequence
  primer
gtaaaacgacggccagttacatgaagctgaatggctcc

SEQ ID NO: 63941 - DNA, 38 bp, Artificial Sequence
  primer
gtaaaacgacggccagtaccacaatgtgtggctaaggc

SEQ ID NO: 63942 - DNA, 40 bp, Artificial Sequence
  primer
gtaaaacgacggccagtttgaattcataatcaccattgcc

SEQ ID NO: 63943 - DNA, 21 bp, Artificial Sequence
  primer
tgggatttccttacttctgcc

SEQ ID NO: 63944 - DNA, 43 bp, Artificial Sequence
  primer
gtaaaacgacggccagtggtctttaagttgtgagtaaagccct

SEQ ID NO: 63945 - DNA, 38 bp, Artificial Sequence
  primer
gtaaaacgacggccagtgtgatatgcgtatccctgaaa

SEQ ID NO: 63946 - DNA, 22 bp, Artificial Sequence
  primer
accctgaatgcatatttcttgc

SEQ ID NO: 63947 - DNA, 39 bp, Artificial Sequence
  primer
gtaaaacgacggccagtcatcacggtaaagaatttggtg

SEQ ID NO: 63948 - DNA, 21 bp, Artificial Sequence
  primer
tctctgggaggaacttaacgc

SEQ ID NO: 63949 - DNA, 38 bp, Artificial Sequence
  primer
gtaaaacgacggccagtaaacagtaacaagcacctcgg

SEQ ID NO: 63950 - DNA, 21 bp, Artificial Sequence
  primer
agactacagttcccagcaggc

SEQ ID NO: 63951 - DNA, 24 bp, Artificial Sequence
  primer
tctaccattagttgtgaagttgcc

SEQ ID NO: 63952 - DNA, 21 bp, Artificial Sequence
  primer
atccttggtcagaatcgttcc

SEQ ID NO: 63953 - DNA, 39 bp, Artificial Sequence
  primer
gtaaaacgacggccagttcactagtcagaagggtccagg

SEQ ID NO: 63954 - DNA, 41 bp, Artificial Sequence
  primer
gtaaaacgacggccagtcatagtatgccaatatctgctccc

SEQ ID NO: 63955 - DNA, 41 bp, Artificial Sequence
  primer
gtaaaacgacggccagtttgggtctagatttccttacaagc

SEQ ID NO: 63956 - DNA, 38 bp, Artificial Sequence
  primer
gtaaaacgacggccagttggtttagactggccattgag

SEQ ID NO: 63957 - DNA, 21 bp, Artificial Sequence
  primer
caaaggaaacgtcagttgctg

SEQ ID NO: 63958 - DNA, 21 bp, Artificial Sequence
  primer
ggcctggaactagttgcctct

SEQ ID NO: 63959 - DNA, 23 bp, Artificial Sequence
  primer
tgctgctaatgactcttattccc

SEQ ID NO: 63960 - DNA, 26 bp, Artificial Sequence
  primer
tcttggtaaacttgattatagttgct

SEQ ID NO: 63961 - DNA, 42 bp, Artificial Sequence
  primer
gtaaaacgacggccagttctggttatgtgaaggattatttgc

SEQ ID NO: 63962 - DNA, 38 bp, Artificial Sequence
  primer
gtaaaacgacggccagtctttgagcaccagaaggaagg

SEQ ID NO: 63963 - DNA, 38 bp, Artificial Sequence
  primer
gtaaaacgacggccagttcctagcaaggatgaacggac

SEQ ID NO: 63964 - DNA, 22 bp, Artificial Sequence
  primer
agcaagagagaaggatgctacc

SEQ ID NO: 63965 - DNA, 21 bp, Artificial Sequence
  primer
ttgtgaaatgccttccctttc

SEQ ID NO: 63966 - DNA, 23 bp, Artificial Sequence
  primer
gacacattgatggaagaatctgg

SEQ ID NO: 63967 - DNA, 21 bp, Artificial Sequence
  primer
taagacattgcgaatcgatgg

SEQ ID NO: 63968 - DNA, 21 bp, Artificial Sequence
  primer
ctagctggaatcctgcaactg

SEQ ID NO: 63969 - DNA, 43 bp, Artificial Sequence
  primer
gtaaaacgacggccagttgatctgtctgttaaagaagagcttg

SEQ ID NO: 63970 - DNA, 38 bp, Artificial Sequence
  primer
gtaaaacgacggccagtgaataaaccacagcctcagcc

SEQ ID NO: 63971 - DNA, 38 bp, Artificial Sequence
  primer
gtaaaacgacggccagtcaaccaaagctgatattgggc

SEQ ID NO: 63972 - DNA, 38 bp, Artificial Sequence
  primer
gtaaaacgacggccagtaatccttggcccattatttcc

SEQ ID NO: 63973 - DNA, 21 bp, Artificial Sequence
  primer
cagagcagggtttgtgcatag

SEQ ID NO: 63974 - DNA, 21 bp, Artificial Sequence
  primer
gaaggattgtttcagatggcg

SEQ ID NO: 63975 - DNA, 21 bp, Artificial Sequence
  primer
tggaggacatggaggaaagac

SEQ ID NO: 63976 - DNA, 38 bp, Artificial Sequence
  primer
gtaaaacgacggccagtagtgagcgaaattcaagctcc

SEQ ID NO: 63977 - DNA, 38 bp, Artificial Sequence
  primer
gtaaaacgacggccagtagctttcattggcatcttgtg

SEQ ID NO: 63978 - DNA, 39 bp, Artificial Sequence
  primer
gtaaaacgacggccagtgcaactaagaatggagacctgg

SEQ ID NO: 63979 - DNA, 21 bp, Artificial Sequence
  primer
cgagaactgcacaaccaactc

SEQ ID NO: 63980 - DNA, 21 bp, Artificial Sequence
  primer
tcctagcaaggatgaacggac

SEQ ID NO: 63981 - DNA, 22 bp, Artificial Sequence
  primer
agcaagagagaaggatgctacc

SEQ ID NO: 63982 - DNA, 21 bp, Artificial Sequence
  primer
ttgtgaaatgccttccctttc

SEQ ID NO: 63983 - DNA, 23 bp, Artificial Sequence
  primer
gacacattgatggaagaatctgg

SEQ ID NO: 63984 - DNA, 38 bp, Artificial Sequence
  primer
gtaaaacgacggccagttaagacattgcgaatcgatgg

SEQ ID NO: 63985 - DNA, 38 bp, Artificial Sequence
  primer
gtaaaacgacggccagtctagctggaatcctgcaactg

SEQ ID NO: 63986 - DNA, 43 bp, Artificial Sequence; identical to SEQ ID NO: 63969
  primer

SEQ ID NO: 63987 - DNA, 38 bp, Artificial Sequence; identical to SEQ ID NO: 63970
  primer

SEQ ID NO: 63988 - DNA, 39 bp, Artificial Sequence
  primer
gtaaaacgacggccagtcttagcaaatcaaccaaagctg

SEQ ID NO: 63989 - DNA, 21 bp, Artificial Sequence
  primer
aggccaagttggaagaggaac

SEQ ID NO: 63990 - DNA, 38 bp, Artificial Sequence
  primer
gtaaaacgacggccagtgaaggattgtttcagatggcg

SEQ ID NO: 63991 - DNA, 21 bp, Artificial Sequence
  primer
tggaggacatggaggaaagac

SEQ ID NO: 63992 - DNA, 38 bp, Artificial Sequence
  primer
gtaaaacgacggccagttacatcgctgttcctttcctg

SEQ ID NO: 63993 - DNA, 25 bp, Artificial Sequence
  primer
tggtttaaagagaaggctatgattc

SEQ ID NO: 63994 - DNA, 24 bp, Artificial Sequence
  primer
tctcagtccagaagtttctccttc

SEQ ID NO: 63995 - DNA, 18 bp, Artificial Sequence
  primer
gcctgggtgactgagcaa

SEQ ID NO: 63996 - DNA, 40 bp, Artificial Sequence
  primer
gtaaaacgacggccagttgccttcaatgtaactcacttgg

SEQ ID NO: 63997 - DNA, 42 bp, Artificial Sequence
  primer
gtaaaacgacggccagtttctcattatttgcatttaccttca

SEQ ID NO: 63998 - DNA, 25 bp, Artificial Sequence
  primer
gattaggtttcaggatacctgcttt

SEQ ID NO: 63999 - DNA, 39 bp, Artificial Sequence
  primer
gtaaaacgacggccagtctggcctgccatttattatttc

SEQ ID NO: 64000 - DNA, 38 bp, Artificial Sequence
  primer
gtaaaacgacggccagttgggaaattccttacatgctg

SEQ ID NO: 64001 - DNA, 35 bp, Artificial Sequence
  primer
gtaaaacgacggccagtgagccaccatacccagcc

SEQ ID NO: 64002 - DNA, 25 bp, Artificial Sequence
  primer
aaccttagatttccttggttgaaag

SEQ ID NO: 64003 - DNA, 27 bp, Artificial Sequence
  primer
agtaattctcagtccatttcttaccag

SEQ ID NO: 64004 - DNA, 38 bp, Artificial Sequence
  primer
gtaaaacgacggccagttctgtggcaggaagtaaaccc

SEQ ID NO: 64005 - DNA, 39 bp, Artificial Sequence
  primer
gtaaaacgacggccagttgacttgatggtgtcctgagtg

SEQ ID NO: 64006 - DNA, 21 bp, Artificial Sequence
  primer
gctcctagcttcattcaaggg

SEQ ID NO: 64007 - DNA, 21 bp, Artificial Sequence
  primer
tgtggccaacagtagatgctc

SEQ ID NO: 64008 - DNA, 39 bp, Artificial Sequence
  primer
gtaaaacgacggccagtttgtgtgtgtatcctgtgctcc

SEQ ID NO: 64009 - DNA, 38 bp, Artificial Sequence
  primer
gtaaaacgacggccagtcacaatggcatttcccttaaa

SEQ ID NO: 64010 - DNA, 25 bp, Artificial Sequence
  primer
caaatatgtgaagcttgttatgtgc

SEQ ID NO: 64011 - DNA, 40 bp, Artificial Sequence
  primer
gtaaaacgacggccagtctgtgtggtttgactgtaaatgc

SEQ ID NO: 64012 - DNA, 38 bp, Artificial Sequence
  primer
gtaaaacgacggccagtgttgacccaggaggctagatg

SEQ ID NO: 64013 - DNA, 38 bp, Artificial Sequence
  primer
gtaaaacgacggccagtccatttcacagatcttgaccg

SEQ ID NO: 64014 - DNA, 39 bp, Artificial Sequence
  primer
gtaaaacgacggccagttcctgcaagatgaagttctgtg

SEQ ID NO: 64015 - DNA, 38 bp, Artificial Sequence
  primer
gtaaaacgacggccagtatggtatttccagggaaccag

SEQ ID NO: 64016 - DNA, 38 bp, Artificial Sequence
  primer
gtaaaacgacggccagtatgtgtaccaaagattcgccc

SEQ ID NO: 64017 - DNA, 21 bp, Artificial Sequence
  primer
agcgtaaccaaggagacaacc

SEQ ID NO: 64018 - DNA, 21 bp, Artificial Sequence
  primer
ttgatcgttgccactcagttc

SEQ ID NO: 64019 - DNA, 21 bp, Artificial Sequence
  primer
tttggagtctgctggatgatg

SEQ ID NO: 64020 - DNA, 43 bp, Artificial Sequence
  primer
gtaaaacgacggccagtggtgagtgtaagttatggtttaaggg

SEQ ID NO: 64021 - DNA, 38 bp, Artificial Sequence
  primer
gtaaaacgacggccagtctggtttgtctcaagctgtgc

SEQ ID NO: 64022 - DNA, 22 bp, Artificial Sequence
  primer
ctggaatgggtatatgggattc

SEQ ID NO: 64023 - DNA, 19 bp, Artificial Sequence
  primer
acttggtccctgaaatggg

SEQ ID NO: 64024 - DNA, 38 bp, Artificial Sequence
  primer
gtaaaacgacggccagtcaggtaaccctggagtgaagc

SEQ ID NO: 64025 - DNA, 38 bp, Artificial Sequence
  primer
gtaaaacgacggccagttcgaaggcgttgtttgtaatg

SEQ ID NO: 64026 - DNA, 40 bp, Artificial Sequence
  primer
gtaaaacgacggccagtcagaaatggttaatggagacagc

SEQ ID NO: 64027 - DNA, 38 bp, Artificial Sequence
  primer
gtaaaacgacggccagttttccaccctccctgaataac

SEQ ID NO: 64028 - DNA, 36 bp, Artificial Sequence
  primer
gtaaaacgacggccagtggtgggtgggagagacctg

SEQ ID NO: 64029 - DNA, 38 bp, Artificial Sequence
  primer
gtaaaacgacggccagtaaaggctgaagatcaaggctg

SEQ ID NO: 64030 - DNA, 38 bp, Artificial Sequence
  primer
gtaaaacgacggccagtctgtctacacaaggctgtggg

SEQ ID NO: 64031 - DNA, 38 bp, Artificial Sequence
  primer
gtaaaacgacggccagtgtttccttctctgggtgaggg

SEQ ID NO: 64032 - DNA, 38 bp, Artificial Sequence
  primer
gtaaaacgacggccagtaatctctgccctaaatggtgc

SEQ ID NO: 64033 - DNA, 21 bp, Artificial Sequence
  primer
cttggtgccaggaggtcttag

SEQ ID NO: 64034 - DNA, 21 bp, Artificial Sequence
  primer
gaacaggtcagtgagacgctg

SEQ ID NO: 64035 - DNA, 38 bp, Artificial Sequence
  primer
gtaaaacgacggccagtacacaactgggactttgagcc

SEQ ID NO: 64036 - DNA, 38 bp, Artificial Sequence
  primer
gtaaaacgacggccagtttctggaccacggtaagtgag

SEQ ID NO: 64037 - DNA, 38 bp, Artificial Sequence
  primer
gtaaaacgacggccagtgtttctctgtgagcacctggg

SEQ ID NO: 64038 - DNA, 19 bp, Artificial Sequence
  primer
agtgtgtccctggcctcag

SEQ ID NO: 64039 - DNA, 21 bp, Artificial Sequence
  primer
acacggccatacagtcacttg

SEQ ID NO: 64040 - DNA, 21 bp, Artificial Sequence
  primer
tgtaagaggaagaacgtcccg

SEQ ID NO: 64041 - DNA, 37 bp, Artificial Sequence
  primer
gtaaaacgacggccagttaggtaggtgggaaggctgc

SEQ ID NO: 64042 - DNA, 38 bp, Artificial Sequence
  primer
gtaaaacgacggccagtatcaggtcaccatctcaaggc

SEQ ID NO: 64043 - DNA, 38 bp, Artificial Sequence
  primer
gtaaaacgacggccagtgtatgtgcatggaggtgaagg

SEQ ID NO: 64044 - DNA, 38 bp, Artificial Sequence
  primer
gtaaaacgacggccagtctgctgacagccaggtacaac

SEQ ID NO: 64045 - DNA, 21 bp, Artificial Sequence
  primer
gggacctgacctctgtcactc

SEQ ID NO: 64046 - DNA, 37 bp, Artificial Sequence
  primer
gtaaaacgacggccagtgacagcccttaggtcacagg

SEQ ID NO: 64047 - DNA, 21 bp, Artificial Sequence
  primer
aaagggaaattgtgcatttgg

SEQ ID NO: 64048 - DNA, 39 bp, Artificial Sequence
  primer
gtaaaacgacggccagtcagcataaaggcaatcaagagg

SEQ ID NO: 64049 - DNA, 24 bp, Artificial Sequence
  primer
tgagtaaattggatctgagctttg

SEQ ID NO: 64050 - DNA, 21 bp, Artificial Sequence
  primer
ctgttggctttctgggctaag

SEQ ID NO: 64051 - DNA, 21 bp, Artificial Sequence
  primer
ttcagttgccttgctttaccc

SEQ ID NO: 64052 - DNA, 38 bp, Artificial Sequence
  primer
gtaaaacgacggccagtgggtgtctcactctgttgctc

SEQ ID NO: 64053 - DNA, 39 bp, Artificial Sequence
  primer
gtaaaacgacggccagtcctcagggataatcaacacctc

SEQ ID NO: 64054 - DNA, 22 bp, Artificial Sequence
  primer
aacctctgcctcgtgttatttg

SEQ ID NO: 64055 - DNA, 35 bp, Artificial Sequence
  primer
gtaaaacgacggccagtgcaacctccatctcctgg

SEQ ID NO: 64056 - DNA, 22 bp, Artificial Sequence
  primer
tggtgtatggaaagtctgcctc

SEQ ID NO: 64057 - DNA, 41 bp, Artificial Sequence
  primer
gtaaaacgacggccagtaaatccaaattgtttagaggaagg

SEQ ID NO: 64058 - DNA, 21 bp, Artificial Sequence
  primer
tgagctgaggctgtaccactg

SEQ ID NO: 64059 - DNA, 39 bp, Artificial Sequence
  primer
gtaaaacgacggccagtatgaagaatttgtcatgccttg

SEQ ID NO: 64060 - DNA, 38 bp, Artificial Sequence
  primer
gtaaaacgacggccagtcttccttcccaatactggagc

SEQ ID NO: 64061 - DNA, 38 bp, Artificial Sequence
  primer
gtaaaacgacggccagtcattggaacgaattggatgtg

SEQ ID NO: 64062 - DNA, 20 bp, Artificial Sequence
  primer
ccatgattgcatcactgcac

SEQ ID NO: 64063 - DNA, 42 bp, Artificial Sequence
  primer
gtaaaacgacggccagttcatttagattctgaaggctactgg

SEQ ID NO: 64064 - DNA, 39 bp, Artificial Sequence
  primer
gtaaaacgacggccagtgatgggagggaatcaagttagg

SEQ ID NO: 64065 - DNA, 20 bp, Artificial Sequence
  primer
ggtgacagcgtgagaccttg

SEQ ID NO: 64066 - DNA, 20 bp, Artificial Sequence
  primer
tgcgttcatggatgtttgtg

SEQ ID NO: 64067 - DNA, 36 bp, Artificial Sequence
  primer
gtaaaacgacggccagtgtgttggtcaggctcatcc

SEQ ID NO: 64068 - DNA, 21 bp, Artificial Sequence
  primer
acatggctgatggtgctagag

SEQ ID NO: 64069 - DNA, 38 bp, Artificial Sequence
  primer
gtaaaacgacggccagtggacaagcttccctctgtctg

SEQ ID NO: 64070 - DNA, 38 bp, Artificial Sequence
  primer
gtaaaacgacggccagtgtgagacggagaccctcaaag

SEQ ID NO: 64071 - DNA, 38 bp, Artificial Sequence
  primer
gtaaaacgacggccagtgtccattgaaccagtcccttg

SEQ ID NO: 64072 - DNA, 38 bp, Artificial Sequence
  primer
gtaaaacgacggccagttgccaagaaggattgtcagag

SEQ ID NO: 64073 - DNA, 38 bp, Artificial Sequence
  primer
gtaaaacgacggccagtggaagaggagaggagtcagcc

SEQ ID NO: 64074 - DNA, 21 bp, Artificial Sequence
  primer
aggactttgatgacctcaccc

SEQ ID NO: 64075 - DNA, 21 bp, Artificial Sequence
  primer
gtttcctaccacctgggactc

SEQ ID NO: 64076 - DNA, 40 bp, Artificial Sequence
  primer
gtaaaacgacggccagtggtggagaaattaaggtgtggac

SEQ ID NO: 64077 - DNA, 38 bp, Artificial Sequence
  primer
gtaaaacgacggccagtaaattgcgtatgtcaggttgc

SEQ ID NO: 64078 - DNA, 20 bp, Artificial Sequence
  primer
tctgccaagtttggaaggtg

SEQ ID NO: 64079 - DNA, 21 bp, Artificial Sequence
  primer
tgtcgtgctacttggtccttg

SEQ ID NO: 64080 - DNA, 39 bp, Artificial Sequence
  primer
gtaaaacgacggccagtgagggtgatctgtgagaggatg

SEQ ID NO: 64081 - DNA, 38 bp, Artificial Sequence
  primer
gtaaaacgacggccagtggacgacgtaagccaagaaac

SEQ ID NO: 64082 - DNA, 21 bp, Artificial Sequence
  primer
tccacagaatgtgacctggag

SEQ ID NO: 64083 - DNA, 37 bp, Artificial Sequence
  primer
gtaaaacgacggccagtgtgcaggacaacacctggtc

SEQ ID NO: 64084 - DNA, 38 bp, Artificial Sequence
  primer
gtaaaacgacggccagtgaggcaagaagatttgggttg

SEQ ID NO: 64085 - DNA, 42 bp, Artificial Sequence
  primer
gtaaaacgacggccagtaacttactaggacagagcttctggg

SEQ ID NO: 64086 - DNA, 18 bp, Artificial Sequence
  primer
gccaggcccttctttctg

SEQ ID NO: 64087 - DNA, 21 bp, Artificial Sequence
  primer
aatgtaagatggtgggaaccg

SEQ ID NO: 64088 - DNA, 21 bp, Artificial Sequence
  primer
cactggaggtgcagtatgagc

SEQ ID NO: 64089 - DNA, 21 bp, Artificial Sequence
  primer
ggctagcccagtatgacaacc

SEQ ID NO: 64090 - DNA, 18 bp, Artificial Sequence
  primer
aatgcggctctctgaccc

SEQ ID NO: 64091 - DNA, 38 bp, Artificial Sequence
  primer
gtaaaacgacggccagtgtcagacgttagcctggcatc

SEQ ID NO: 64092 - DNA, 21 bp, Artificial Sequence
  primer
gttctgctccttcagcctttc

SEQ ID NO: 64093 - DNA, 38 bp, Artificial Sequence
  primer
gtaaaacgacggccagtgggagagctataggaggtggg

SEQ ID NO: 64094 - DNA, 38 bp, Artificial Sequence
  primer
gtaaaacgacggccagtacttgaacttgggaatctggc

SEQ ID NO: 64095 - DNA, 21 bp, Artificial Sequence
  primer
tttgacgtcatcgatctggac

SEQ ID NO: 64096 - DNA, 38 bp, Artificial Sequence
  primer
gtaaaacgacggccagtagtaccacatagggctcctgg

SEQ ID NO: 64097 - DNA, 21 bp, Artificial Sequence
  primer
ggtggtggattgagagaggag

SEQ ID NO: 64098 - DNA, 20 bp, Artificial Sequence
  primer
gagcagggaggaaggagaag

SEQ ID NO: 64099 - DNA, 38 bp, Artificial Sequence
  primer
gtaaaacgacggccagtacgacaccaggtagggctagg

SEQ ID NO: 64100 - DNA, 38 bp, Artificial Sequence
  primer
gtaaaacgacggccagtgcgtcatcactgaggtgagag

SEQ ID NO: 64101 - DNA, 38 bp, Artificial Sequence
  primer
gtaaaacgacggccagtgaactctgtagccatgagccc

SEQ ID NO: 64102 - DNA, 38 bp, Artificial Sequence
  primer
gtaaaacgacggccagtccctcataatccctgctgttc

SEQ ID NO: 64103 - DNA, 37 bp, Artificial Sequence
  primer
gtaaaacgacggccagtacacctcgtgctgtgttgtg

SEQ ID NO: 64104 - DNA, 38 bp, Artificial Sequence
  primer
gtaaaacgacggccagtagggtgagtggtggtaaggtg

SEQ ID NO: 64105 - DNA, 37 bp, Artificial Sequence
  primer
gtaaaacgacggccagtagtgtttgggagtgggcttc

SEQ ID NO: 64106 - DNA, 36 bp, Artificial Sequence
  primer
gtaaaacgacggccagtggagtccagagaccctccc

SEQ ID NO: 64107 - DNA, 38 bp, Artificial Sequence
  primer
gtaaaacgacggccagtgaccagccaaagttcttcacc

SEQ ID NO: 64108 - DNA, 19 bp, Artificial Sequence
  primer
ccttctgctgctagtcgcc

SEQ ID NO: 64109 - DNA, 37 bp, Artificial Sequence
  primer
gtaaaacgacggccagtctcgtgctgcaataccatgc

SEQ ID NO: 64110 - DNA, 37 bp, Artificial Sequence
  primer
gtaaaacgacggccagtcactcttggtgctggacgac

SEQ ID NO: 64111 - DNA, 18 bp, Artificial Sequence
  primer
ctggacaagcgggatgtg

SEQ ID NO: 64112 - DNA, 19 bp, Artificial Sequence
  primer
ggcccaggagagggactac

SEQ ID NO: 64113 - DNA, 38 bp, Artificial Sequence
  primer
gtaaaacgacggccagtagggaccactgataggtgagg

SEQ ID NO: 64114 - DNA, 20 bp, Artificial Sequence
  primer
cccttcttcctactgccacc

SEQ ID NO: 64115 - DNA, 38 bp, Artificial Sequence
  primer
gtaaaacgacggccagtctttgcctccactcaccattc

SEQ ID NO: 64116 - DNA, 22 bp, Artificial Sequence
  primer
ccagcagagaaatgtgctaacc

SEQ ID NO: 64117 - DNA, 21 bp, Artificial Sequence
  primer
ctgtcctccctcttccagttg

SEQ ID NO: 64118 - DNA, 39 bp, Artificial Sequence
  primer
gtaaaacgacggccagtgagggactgaaaggtaacaggg

SEQ ID NO: 64119 - DNA, 38 bp, Artificial Sequence
  primer
gtaaaacgacggccagtctattaagggctggcagatgg

SEQ ID NO: 64120 - DNA, 38 bp, Artificial Sequence
  primer
gtaaaacgacggccagtaggtcctcagtggctattccc

SEQ ID NO: 64121 - DNA, 38 bp, Artificial Sequence
  primer
gtaaaacgacggccagtggatcacctcttagcactccc

SEQ ID NO: 64122 - DNA, 38 bp, Artificial Sequence
  primer
gtaaaacgacggccagtctctgtgggtggtaggtggag

SEQ ID NO: 64123 - DNA, 38 bp, Artificial Sequence
  primer
gtaaaacgacggccagtgagccctgtctggattctagg

SEQ ID NO: 64124 - DNA, 38 bp, Artificial Sequence
  primer
gtaaaacgacggccagtgtgaaggcttgacgctctttc

SEQ ID NO: 64125 - DNA, 38 bp, Artificial Sequence
  primer
gtaaaacgacggccagtgccctgtagtgtctgtctccc

SEQ ID NO: 64126 - DNA, 38 bp, Artificial Sequence
  primer
gtaaaacgacggccagtagcgcttgtgattctcctttc

SEQ ID NO: 64127 - DNA, 21 bp, Artificial Sequence
  primer
gtgtggcctgagtctttaggg

SEQ ID NO: 64128 - DNA, 38 bp, Artificial Sequence
  primer
gtaaaacgacggccagtatgagggttgtgggtctaagc

SEQ ID NO: 64129 - DNA, 37 bp, Artificial Sequence
  primer
gtaaaacgacggccagtgcgagactaggcgtgaagag

SEQ ID NO: 64130 - DNA, 18 bp, Artificial Sequence
  primer
tcaaagatgagtcgggcg

SEQ ID NO: 64131 - DNA, 19 bp, Artificial Sequence
  primer
ccacctcctccagtggtcc

SEQ ID NO: 64132 - DNA, 21 bp, Artificial Sequence
  primer
gggcaagaggagaaatagctg

SEQ ID NO: 64133 - DNA, 21 bp, Artificial Sequence
  primer
gggccatgtagttcttgcttc

SEQ ID NO: 64134 - DNA, 38 bp, Artificial Sequence
  primer
gtaaaacgacggccagtctcaacacagccatcaactgc

SEQ ID NO: 64135 - DNA, 21 bp, Artificial Sequence
  primer
ctatgggtaccgcaatccttc

SEQ ID NO: 64136 - DNA, 37 bp, Artificial Sequence
  primer
gtaaaacgacggccagtgactgtatcggcctcagagc

SEQ ID NO: 64137 - DNA, 21 bp, Artificial Sequence
  primer
tacagtgagttgggtgttggg

SEQ ID NO: 64138 - DNA, 21 bp, Artificial Sequence
  primer
aagccagagcagttcagttcc

SEQ ID NO: 64139 - DNA, 38 bp, Artificial Sequence
  primer
gtaaaacgacggccagttaattgcttctgggcatttcc

SEQ ID NO: 64140 - DNA, 38 bp, Artificial Sequence
  primer
gtaaaacgacggccagttaatgtgctgctggacaatcc

SEQ ID NO: 64141 - DNA, 38 bp, Artificial Sequence
  primer
gtaaaacgacggccagtactcaccgttcaccagcctac

SEQ ID NO: 64142 - DNA, 38 bp, Artificial Sequence
  primer
gtaaaacgacggccagtatcactgtgtcctacgccatc

SEQ ID NO: 64143 - DNA, 21 bp, Artificial Sequence
  primer
tgacagtagacagtgcccacc

SEQ ID NO: 64144 - DNA, 39 bp, Artificial Sequence
  primer
gtaaaacgacggccagtggcaagaggtagaactccaaag

SEQ ID NO: 64145 - DNA, 38 bp, Artificial Sequence
  primer
gtaaaacgacggccagttgggcagtatctgttctgagc

SEQ ID NO: 64146 - DNA, 38 bp, Artificial Sequence
  primer
gtaaaacgacggccagtttgaggtgtgaatgggtaggg

SEQ ID NO: 64147 - DNA, 38 bp, Artificial Sequence
  primer
gtaaaacgacggccagtcctgtgtggtccttatgcttc

SEQ ID NO: 64148 - DNA, 37 bp, Artificial Sequence
  primer
gtaaaacgacggccagtcagtggctcctctgaagcac

SEQ ID NO: 64149 - DNA, 38 bp, Artificial Sequence
  primer
gtaaaacgacggccagtgtatttcctagttgggctggc

SEQ ID NO: 64150 - DNA, 38 bp, Artificial Sequence
  primer
gtaaaacgacggccagtagctgtgccacaataacttgg

SEQ ID NO: 64151 - DNA, 38 bp, Artificial Sequence
  primer
gtaaaacgacggccagtatacttgcaaggctgcgaaac

SEQ ID NO: 64152 - DNA, 20 bp, Artificial Sequence
  primer
cagctgtggatgcctttgac

SEQ ID NO: 64153 - DNA, 38 bp, Artificial Sequence
  primer
gtaaaacgacggccagttacgccttcgtcatgtactgc

SEQ ID NO: 64154 - DNA, 20 bp, Artificial Sequence
  primer
gacgaggacgtgatggagac

SEQ ID NO: 64155 - DNA, 38 bp, Artificial Sequence
  primer
gtaaaacgacggccagtcttagagcaagtgctggaccc

SEQ ID NO: 64156 - DNA, 38 bp, Artificial Sequence
  primer
gtaaaacgacggccagttcttctgggagaggcttgttg

SEQ ID NO: 64157 - DNA, 38 bp, Artificial Sequence
  primer
gtaaaacgacggccagtgaaggcatcagactttgggag

SEQ ID NO: 64158 - DNA, 38 bp, Artificial Sequence
  primer
gtaaaacgacggccagtgacaggacccagtttctctgg

SEQ ID NO: 64159 - DNA, 37 bp, Artificial Sequence
  primer
gtaaaacgacggccagtggatctcacagctggagtgg

SEQ ID NO: 64160 - DNA, 38 bp, Artificial Sequence
  primer
gtaaaacgacggccagtggcaggaggtgatgtttcaag

SEQ ID NO: 64161 - DNA, 21 bp, Artificial Sequence
  primer
tccatgtcattgtcctcaacc

SEQ ID NO: 64162 - DNA, 38 bp, Artificial Sequence
  primer
gtaaaacgacggccagtatagttcgtgctctgtgaggc

SEQ ID NO: 64163 - DNA, 38 bp, Artificial Sequence
  primer
gtaaaacgacggccagtgttggatgaaagtaggcaggg

SEQ ID NO: 64164 - DNA, 38 bp, Artificial Sequence
  primer
gtaaaacgacggccagtattcctttgattgtgtgcctg

SEQ ID NO: 64165 - DNA, 38 bp, Artificial Sequence
  primer
gtaaaacgacggccagtctccagtctgcacctaccctc

SEQ ID NO: 64166 - DNA, 38 bp, Artificial Sequence
  primer
gtaaaacgacggccagtgggctatacccagcactgaac

SEQ ID NO: 64167 - DNA, 38 bp, Artificial Sequence
  primer
gtaaaacgacggccagtcaagggctgtgaaatgtgaag

SEQ ID NO: 64168 - DNA, 38 bp, Artificial Sequence
  primer
gtaaaacgacggccagtggtactgcataggcaagtggg

SEQ ID NO: 64169 - DNA, 38 bp, Artificial Sequence
  primer
gtaaaacgacggccagtataaggtctgggcctgttacg

SEQ ID NO: 64170 - DNA, 21 bp, Artificial Sequence
  primer
ggaggtactccaggaaggagg

SEQ ID NO: 64171 - DNA, 21 bp, Artificial Sequence
  primer
gctggaatgaccagggtttag

SEQ ID NO: 64172 - DNA, 21 bp, Artificial Sequence
  primer
aggcctcagctaatacctccc

SEQ ID NO: 64173 - DNA, 21 bp, Artificial Sequence
  primer
caaagaggatggagaagacgg

SEQ ID NO: 64174 - DNA, 38 bp, Artificial Sequence
  primer
gtaaaacgacggccagtcctgtgtgtttactccagccc

SEQ ID NO: 64175 - DNA, 37 bp, Artificial Sequence
  primer
gtaaaacgacggccagtaacttcaaggtggcaacagc

SEQ ID NO: 64176 - DNA, 22 bp, Artificial Sequence
  primer
caaattgaggtggtttctgagg

SEQ ID NO: 64177 - DNA, 38 bp, Artificial Sequence
  primer
gtaaaacgacggccagtatatctgggacctggatgtgc

SEQ ID NO: 64178 - DNA, 21 bp, Artificial Sequence
  primer
gaagaacggcacagtggtatg

SEQ ID NO: 64179 - DNA, 21 bp, Artificial Sequence
  primer
cctcttgagagtcttgcctgg

SEQ ID NO: 64180 - DNA, 22 bp, Artificial Sequence
  primer
ttacaaggacctgtatggcctc

SEQ ID NO: 64181 - DNA, 24 bp, Artificial Sequence
  primer
ttgtagcttgatcattgtctccag

SEQ ID NO: 64182 - DNA, 36 bp, Artificial Sequence
  primer
gtaaaacgacggccagtgggattggcaggtagcatc

SEQ ID NO: 64183 - DNA, 39 bp, Artificial Sequence
  primer
gtaaaacgacggccagtcctttcttgaaattgacttccc

SEQ ID NO: 64184 - DNA, 24 bp, Artificial Sequence
  primer
tgaagtggatacctgagtgatacc

SEQ ID NO: 64185 - DNA, 38 bp, Artificial Sequence
  primer
gtaaaacgacggccagttccttggatgattgtcagtgg

SEQ ID NO: 64186 - DNA, 21 bp, Artificial Sequence
  primer
acttccgcttacatcaggctc

SEQ ID NO: 64187 - DNA, 38 bp, Artificial Sequence
  primer
gtaaaacgacggccagtggacccggacagtactcagtc

SEQ ID NO: 64188 - DNA, 38 bp, Artificial Sequence
  primer
gtaaaacgacggccagtttctggagtatgaccggcttc

SEQ ID NO: 64189 - DNA, 21 bp, Artificial Sequence
  primer
agaacaactccaacctgtccc

SEQ ID NO: 64190 - DNA, 21 bp, Artificial Sequence
  primer
agataacaggcgttagctggc

SEQ ID NO: 64191 - DNA, 21 bp, Artificial Sequence
  primer
ccatgggagagctggattaac

SEQ ID NO: 64192 - DNA, 21 bp, Artificial Sequence
  primer
tcctctttcctgagctgttgg

SEQ ID NO: 64193 - DNA, 38 bp, Artificial Sequence
  primer
gtaaaacgacggccagttggattcagtgggtcccttag

SEQ ID NO: 64194 - DNA, 21 bp, Artificial Sequence
  primer
aagacttgccagatgggactc

SEQ ID NO: 64195 - DNA, 38 bp, Artificial Sequence
  primer
gtaaaacgacggccagtgtccctaaagtttcttggccc

SEQ ID NO: 64196 - DNA, 40 bp, Artificial Sequence
  primer
gtaaaacgacggccagtgataacaccaggatgagcaagtg

SEQ ID NO: 64197 - DNA, 21 bp, Artificial Sequence
  primer
gcctaaccacctcctttcctc

SEQ ID NO: 64198 - DNA, 21 bp, Artificial Sequence
  primer
gtccacaaagccaggagtttc

SEQ ID NO: 64199 - DNA, 21 bp, Artificial Sequence
  primer
gagcacagggcttctcttagc

SEQ ID NO: 64200 - DNA, 21 bp, Artificial Sequence
  primer
ccaattcgctctctcttctgc

SEQ ID NO: 64201 - DNA, 22 bp, Artificial Sequence
  primer
cttctgctttgtatctgccagg

SEQ ID NO: 64202 - DNA, 21 bp, Artificial Sequence
  primer
gcaacagaacaagaccctgtc

SEQ ID NO: 64203 - DNA, 40 bp, Artificial Sequence
  primer
gtaaaacgacggccagtttgcttggatttctgtttgactc

SEQ ID NO: 64204 - DNA, 38 bp, Artificial Sequence
  primer
gtaaaacgacggccagtccataggtcttagccagggag

SEQ ID NO: 64205 - DNA, 21 bp, Artificial Sequence
  primer
agcctagatggtgtcctcgtt

SEQ ID NO: 64206 - DNA, 21 bp, Artificial Sequence
  primer
ttctgtgtgtgggtctcttcc

SEQ ID NO: 64207 - DNA, 21 bp, Artificial Sequence
  primer
acaacaaggtccagttcaccc

SEQ ID NO: 64208 - DNA, 38 bp, Artificial Sequence
  primer
gtaaaacgacggccagtgctctcagatccgttcgagta

SEQ ID NO: 64209 - DNA, 38 bp, Artificial Sequence
  primer
gtaaaacgacggccagttgtaatctgtccctgctctcg

SEQ ID NO: 64210 - DNA, 21 bp, Artificial Sequence
  primer
ttggtgatggtgtgaaggaag

SEQ ID NO: 64211 - DNA, 36 bp, Artificial Sequence
  primer
gtaaaacgacggccagtaagcagtgcaaggcacatc

SEQ ID NO: 64212 - DNA, 21 bp, Artificial Sequence
  primer
gtgaggtgtgtgcaggagttg

SEQ ID NO: 64213 - DNA, 38 bp, Artificial Sequence
  primer
gtaaaacgacggccagtccctctggaggaagtgagaag

SEQ ID NO: 64214 - DNA, 21 bp, Artificial Sequence
  primer
ttacctgcctctgtcctgtcc

SEQ ID NO: 64215 - DNA, 38 bp, Artificial Sequence
  primer
gtaaaacgacggccagtagaatcctaagggcagcagtc

SEQ ID NO: 64216 - DNA, 21 bp, Artificial Sequence
  primer
aacgaaggcagtgtttcttgg

SEQ ID NO: 64217 - DNA, 21 bp, Artificial Sequence
  primer
catatggacccagtgttgtgg

SEQ ID NO: 64218 - DNA, 20 bp, Artificial Sequence
  primer
ctcctcccttgtgagcagag

SEQ ID NO: 64219 - DNA, 38 bp, Artificial Sequence
  primer
gtaaaacgacggccagtggttctagatgctcctgcctg

SEQ ID NO: 64220 - DNA, 21 bp, Artificial Sequence
  primer
ctgaggaagatttggtgggag

SEQ ID NO: 64221 - DNA, 26 bp, Artificial Sequence
  primer
ggcatactgtaatctctctttatccc

SEQ ID NO: 64222 - DNA, 38 bp, Artificial Sequence
  primer
gtaaaacgacggccagttgcccacatagagggataaag

SEQ ID NO: 64223 - DNA, 38 bp, Artificial Sequence
  primer
gtaaaacgacggccagtggatatggagggctgactgta

SEQ ID NO: 64224 - DNA, 38 bp, Artificial Sequence
  primer
gtaaaacgacggccagttcttgcacgttcatgttgatg

SEQ ID NO: 64225 - DNA, 27 bp, Artificial Sequence
  primer
gtgtgcacagtgtatgtagattagtca

SEQ ID NO: 64226 - DNA, 39 bp, Artificial Sequence
  primer
gtaaaacgacggccagtttggtgcaactagtacccaaag

SEQ ID NO: 64227 - DNA, 23 bp, Artificial Sequence
  primer
tgccattctagaagtcaggttgt

SEQ ID NO: 64228 - DNA, 41 bp, Artificial Sequence
  primer
gtaaaacgacggccagtttgtttcaaggtaaagagagtggg

SEQ ID NO: 64229 - DNA, 41 bp, Artificial Sequence
  primer
gtaaaacgacggccagtctcatgaaattggtattctgttgg

SEQ ID NO: 64230 - DNA, 38 bp, Artificial Sequence
  primer
gtaaaacgacggccagtccttggactggctcagagttc

SEQ ID NO: 64231 - DNA, 25 bp, Artificial Sequence
  primer
cagaagaggttctgaaagagttcat

SEQ ID NO: 64232 - DNA, 39 bp, Artificial Sequence
  primer
gtaaaacgacggccagtccttcccttgtcctctcagttg

SEQ ID NO: 64233 - DNA, 38 bp, Artificial Sequence
  primer
gtaaaacgacggccagtaaggcctccaagaattcagtc

SEQ ID NO: 64234 - DNA, 44 bp, Artificial Sequence
  primer
gtaaaacgacggccagtttcttctagcagagagagactctaagg

SEQ ID NO: 64235 - DNA, 41 bp, Artificial Sequence
  primer
gtaaaacgacggccagttttagcagaattgtatcacagcca

SEQ ID NO: 64236 - DNA, 40 bp, Artificial Sequence
  primer
gtaaaacgacggccagtgcatctgattgactaggtggttg

SEQ ID NO: 64237 - DNA, 40 bp, Artificial Sequence
  primer
gtaaaacgacggccagtcagttcccagatatacctgaccc

SEQ ID NO: 64238 - DNA, 45 bp, Artificial Sequence
  primer
gtaaaacgacggccagtaatatttggtatgcttccttctaagatt

SEQ ID NO: 64239 - DNA, 21 bp, Artificial Sequence
  primer
agccagtgggtgaaatgaaag

SEQ ID NO: 64240 - DNA, 37 bp, Artificial Sequence
  primer
gtaaaacgacggccagtctggcccatactcacctttc

SEQ ID NO: 64241 - DNA, 21 bp, Artificial Sequence
  primer
caagccattgctgttgtaacc

SEQ ID NO: 64242 - DNA, 22 bp, Artificial Sequence
  primer
ggctttcaggattgtggttagg

SEQ ID NO: 64243 - DNA, 19 bp, Artificial Sequence
  primer
ggccagaagtccctcagtg

SEQ ID NO: 64244 - DNA, 38 bp, Artificial Sequence
  primer
gtaaaacgacggccagttttgcatgttaagttgctggc

SEQ ID NO: 64245 - DNA, 21 bp, Artificial Sequence
  primer
aggtactgcaacagccacttg

SEQ ID NO: 64246 - DNA, 21 bp, Artificial Sequence
  primer
acccatttgctttcaatgagg

SEQ ID NO: 64247 - DNA, 41 bp, Artificial Sequence
  primer
gtaaaacgacggccagtttgcaataggtatgttgggttatg

SEQ ID NO: 64248 - DNA, 25 bp, Artificial Sequence
  primer
catttcctaattctcgtttaccctg

SEQ ID NO: 64249 - DNA, 24 bp, Artificial Sequence
  primer
cgtctttctttaaatcacatttgc

SEQ ID NO: 64250 - DNA, 39 bp, Artificial Sequence
  primer
gtaaaacgacggccagttgaaatgtaagggaacaagcaa

SEQ ID NO: 64251 - DNA, 20 bp, Artificial Sequence
  primer
tttgggcatccagtatgttt

SEQ ID NO: 64252 - DNA, 38 bp, Artificial Sequence
  primer
gtaaaacgacggccagtttgaatgaacttggcttggtg

SEQ ID NO: 64253 - DNA, 21 bp, Artificial Sequence
  primer
acgttacagaccctgtcctgc

SEQ ID NO: 64254 - DNA, 38 bp, Artificial Sequence
  primer
gtaaaacgacggccagtcaactaccgaagaggctgagg

SEQ ID NO: 64255 - DNA, 21 bp, Artificial Sequence
  primer
atgagaacctgctccgttctg

SEQ ID NO: 64256 - DNA, 21 bp, Artificial Sequence
  primer
atctccctgtcaaccttggag

SEQ ID NO: 64257 - DNA, 38 bp, Artificial Sequence
  primer
gtaaaacgacggccagtgatctgagaacctgcatttgg

SEQ ID NO: 64258 - DNA, 21 bp, Artificial Sequence
  primer
ttacagcaccaagagacctgc

SEQ ID NO: 64259 - DNA, 21 bp, Artificial Sequence
  primer
agatgtgctgtgggcataatc

SEQ ID NO: 64260 - DNA, 38 bp, Artificial Sequence
  primer
gtaaaacgacggccagtgacatttgcgtgttcaaggtg

SEQ ID NO: 64261 - DNA, 38 bp, Artificial Sequence
  primer
gtaaaacgacggccagtctcagatggaggactcaaggg

SEQ ID NO: 64262 - DNA, 37 bp, Artificial Sequence
  primer
gtaaaacgacggccagtagctccgaggagacgaactc

SEQ ID NO: 64263 - DNA, 21 bp, Artificial Sequence
  primer
tagcaaggagaggcctaaggg

SEQ ID NO: 64264 - DNA, 21 bp, Artificial Sequence
  primer
gctcacaggctactcagggtc

SEQ ID NO: 64265 - DNA, 38 bp, Artificial Sequence
  primer
gtaaaacgacggccagtgaaccaggtcgaagactccac

SEQ ID NO: 64266 - DNA, 38 bp, Artificial Sequence
  primer
gtaaaacgacggccagtctgacagcagtggatctggag

SEQ ID NO: 64267 - DNA, 21 bp, Artificial Sequence
  primer
agtccaggcctcctattcctc

SEQ ID NO: 64268 - DNA, 18 bp, Artificial Sequence
  primer
actgtgcacccagcttgc

SEQ ID NO: 64269 - DNA, 21 bp, Artificial Sequence
  primer
acagtctctgcttctccctcc

SEQ ID NO: 64270 - DNA, 37 bp, Artificial Sequence
  primer
gtaaaacgacggccagtgatcgagaagtgggtgaacg

SEQ ID NO: 64271 - DNA, 21 bp, Artificial Sequence
  primer
taacaagtgagccaaacgtcc

SEQ ID NO: 64272 - DNA, 37 bp, Artificial Sequence
  primer
gtaaaacgacggccagttgaggagtacatccgcaagc

SEQ ID NO: 64273 - DNA, 21 bp, Artificial Sequence
  primer
tccagatgcagaacctggtag

SEQ ID NO: 64274 - DNA, 37 bp, Artificial Sequence
  primer
gtaaaacgacggccagtagggatgtcctcagtcccac

SEQ ID NO: 64275 - DNA, 37 bp, Artificial Sequence
  primer
gtaaaacgacggccagtcatacagggcccgaagagtc

SEQ ID NO: 64276 - DNA, 38 bp, Artificial Sequence
  primer
gtaaaacgacggccagtggtcctagaacctttgggatg

SEQ ID NO: 64277 - DNA, 20 bp, Artificial Sequence
  primer
ctgagcagggaagtcagtgg

SEQ ID NO: 64278 - DNA, 21 bp, Artificial Sequence
  primer
tgccagttctacggacagaag

SEQ ID NO: 64279 - DNA, 38 bp, Artificial Sequence
  primer
gtaaaacgacggccagtctgcgtgtacagcaaggctac

SEQ ID NO: 64280 - DNA, 38 bp, Artificial Sequence
  primer
gtaaaacgacggccagtacgaccttgttgacttctccg

SEQ ID NO: 64281 - DNA, 18 bp, Artificial Sequence
  primer
ccgtgtcgtctgggtcag

SEQ ID NO: 64282 - DNA, 19 bp, Artificial Sequence
  primer
atcacgtcagcgggagaag

SEQ ID NO: 64283 - DNA, 38 bp, Artificial Sequence
  primer
gtaaaacgacggccagtagacctgactgtgaaggagcc

SEQ ID NO: 64284 - DNA, 37 bp, Artificial Sequence
  primer
gtaaaacgacggccagtccacagccagagccaagtag

SEQ ID NO: 64285 - DNA, 21 bp, Artificial Sequence
  primer
tggttcaggagaagttggcag

SEQ ID NO: 64286 - DNA, 19 bp, Artificial Sequence
  primer
acgagtagggacggacacc

SEQ ID NO: 64287 - DNA, 38 bp, Artificial Sequence
  primer
gtaaaacgacggccagttgggaaatatagccaggatgg

SEQ ID NO: 64288 - DNA, 39 bp, Artificial Sequence
  primer
gtaaaacgacggccagttcacatcagtaaacatgagcgg

SEQ ID NO: 64289 - DNA, 39 bp, Artificial Sequence
  primer
gtaaaacgacggccagtaactggctagctgctggtttag

SEQ ID NO: 64290 - DNA, 22 bp, Artificial Sequence
  primer
gcttgtctgtctctttgttggc

SEQ ID NO: 64291 - DNA, 21 bp, Artificial Sequence
  primer
ctgttcagggtgtgacggtag

SEQ ID NO: 64292 - DNA, 19 bp, Artificial Sequence
  primer
ttgcctggagcccaattac

SEQ ID NO: 64293 - DNA, 27 bp, Artificial Sequence
  primer
gcaatagagtcgaaccaccttatttac

SEQ ID NO: 64294 - DNA, 22 bp, Artificial Sequence
  primer
aaattatggccgagaagttaaa

SEQ ID NO: 64295 - DNA, 44 bp, Artificial Sequence
  primer
gtaaaacgacggccagtccctctgatttctatttatggtttaag

SEQ ID NO: 64296 - DNA, 20 bp, Artificial Sequence
  primer
tcaagaaaggcatctcaggc

SEQ ID NO: 64297 - DNA, 42 bp, Artificial Sequence
  primer
gtaaaacgacggccagttccattaggaatgaaattgttcaaa

SEQ ID NO: 64298 - DNA, 44 bp, Artificial Sequence
  primer
gtaaaacgacggccagttgttactcatacttacatgctacccag

SEQ ID NO: 64299 - DNA, 26 bp, Artificial Sequence
  primer
aaatgaaagctagtcaaccttagcag

SEQ ID NO: 64300 - DNA, 21 bp, Artificial Sequence
  primer
gcttctgtcattcagtttcgc

SEQ ID NO: 64301 - DNA, 21 bp, Artificial Sequence
  primer
gtgctgacgacatctggactg

SEQ ID NO: 64302 - DNA, 29 bp, Artificial Sequence
  primer
aaagcatgtcacttagtatctagttctgg

SEQ ID NO: 64303 - DNA, 39 bp, Artificial Sequence
  primer
gtaaaacgacggccagttccagtgtcattggttagcaag

SEQ ID NO: 64304 - DNA, 24 bp, Artificial Sequence
  primer
tcttgaaatgaatgatgatctgtg

SEQ ID NO: 64305 - DNA, 21 bp, Artificial Sequence
  primer
tggcacaggttcataagtcct

SEQ ID NO: 64306 - DNA, 46 bp, Artificial Sequence
  primer
gtaaaacgacggccagttcaatcacttgaaattaagagtacctaca

SEQ ID NO: 64307 - DNA, 39 bp, Artificial Sequence
  primer
gtaaaacgacggccagttgcattacttggcctttctttg

SEQ ID NO: 64308 - DNA, 23 bp, Artificial Sequence
  primer
ggaaatcctttgagaacaattcg

SEQ ID NO: 64309 - DNA, 24 bp, Artificial Sequence
  primer
tccagattgagatttgagtcattg

SEQ ID NO: 64310 - DNA, 21 bp, Artificial Sequence
  primer
ggcttggtagattatgtggca

SEQ ID NO: 64311 - DNA, 41 bp, Artificial Sequence
  primer
gtaaaacgacggccagttccaaactcattaatgttcctgtg

SEQ ID NO: 64312 - DNA, 21 bp, Artificial Sequence
  primer
accgaataactgcggtaggtg

SEQ ID NO: 64313 - DNA, 27 bp, Artificial Sequence
  primer
tcaaatacaggacttaatgccaattac

SEQ ID NO: 64314 - DNA, 19 bp, Artificial Sequence
  primer
tgcacctctgcacttcagg

SEQ ID NO: 64315 - DNA, 38 bp, Artificial Sequence
  primer
gtaaaacgacggccagtagtttcatggaaacaggctgg

SEQ ID NO: 64316 - DNA, 38 bp, Artificial Sequence
  primer
gtaaaacgacggccagtcttaggctctgtgcacctcac

SEQ ID NO: 64317 - DNA, 21 bp, Artificial Sequence
  primer
cccttgcttgctatgtgaatg

SEQ ID NO: 64318 - DNA, 36 bp, Artificial Sequence
  primer
gtaaaacgacggccagtagggtccatccacatcagc

SEQ ID NO: 64319 - DNA, 38 bp, Artificial Sequence
  primer
gtaaaacgacggccagtttcccttcaggtacttggctc

SEQ ID NO: 64320 - DNA, 39 bp, Artificial Sequence
  primer
gtaaaacgacggccagttgtccactagctcaaacttccc

SEQ ID NO: 64321 - DNA, 38 bp, Artificial Sequence
  primer
gtaaaacgacggccagtctgcagtgggctcagtatctc

SEQ ID NO: 64322 - DNA, 21 bp, Artificial Sequence
  primer
tctcctggtcgtcaatacagc

SEQ ID NO: 64323 - DNA, 38 bp, Artificial Sequence
  primer
gtaaaacgacggccagtcttgtaagggcgagagtcagg

SEQ ID NO: 64324 - DNA, 38 bp, Artificial Sequence
  primer
gtaaaacgacggccagtagtgcagtagtgacacccagg

SEQ ID NO: 64325 - DNA, 38 bp, Artificial Sequence
  primer
gtaaaacgacggccagtcttgctctcagggtgtgtagg

SEQ ID NO: 64326 - DNA, 21 bp, Artificial Sequence
  primer
ctccgagaaacacccaagaat

SEQ ID NO: 64327 - DNA, 39 bp, Artificial Sequence
  primer
gtaaaacgacggccagttcagactcctatttcccacctg

SEQ ID NO: 64328 - DNA, 21 bp, Artificial Sequence
  primer
tagctcagcagttgatcctgg

SEQ ID NO: 64329 - DNA, 21 bp, Artificial Sequence
  primer
tctaggcctgtgtcattgctg

SEQ ID NO: 64330 - DNA, 22 bp, Artificial Sequence
  primer
gcttcccaagaatgggaataag

SEQ ID NO: 64331 - DNA, 38 bp, Artificial Sequence
  primer
gtaaaacgacggccagtagagaccacaggcactgtcac

SEQ ID NO: 64332 - DNA, 21 bp, Artificial Sequence
  primer
agccagcagagttccattcac

SEQ ID NO: 64333 - DNA, 21 bp, Artificial Sequence
  primer
gctcttggaacaagaatgcaa

SEQ ID NO: 64334 - DNA, 40 bp, Artificial Sequence
  primer
gtaaaacgacggccagtaagcagcaaatgcttgaaataag

SEQ ID NO: 64335 - DNA, 43 bp, Artificial Sequence
  primer
gtaaaacgacggccagttcattcagtaagtttggttcaatcag

SEQ ID NO: 64336 - DNA, 39 bp, Artificial Sequence
  primer
gtaaaacgacggccagtttggatgtgaaccacaactgag

SEQ ID NO: 64337 - DNA, 22 bp, Artificial Sequence
  primer
ccaggtagaccggcttaaagag

SEQ ID NO: 64338 - DNA, 38 bp, Artificial Sequence
  primer
gtaaaacgacggccagtgcaactctttgtttgcagagg

SEQ ID NO: 64339 - DNA, 47 bp, Artificial Sequence
  primer
gtaaaacgacggccagtaattacattacagacttcagttatcattca

SEQ ID NO: 64340 - DNA, 38 bp, Artificial Sequence
  primer
gtaaaacgacggccagtaaattcaggaagtgatggtgc

SEQ ID NO: 64341 - DNA, 44 bp, Artificial Sequence
  primer
gtaaaacgacggccagttttaactaagaattcaaatatgcgatg

SEQ ID NO: 64342 - DNA, 41 bp, Artificial Sequence
  primer
gtaaaacgacggccagtaactagttctggcttcttgtgttg

SEQ ID NO: 64343 - DNA, 38 bp, Artificial Sequence
  primer
gtaaaacgacggccagtataccatgccttattggaggc

SEQ ID NO: 64344 - DNA, 22 bp, Artificial Sequence
  primer
ttgaagctcatttcagcaactg

SEQ ID NO: 64345 - DNA, 21 bp, Artificial Sequence
  primer
acagcagttaacctgggcttc

SEQ ID NO: 64346 - DNA, 20 bp, Artificial Sequence
  primer
tggcacttgccaatagtgtg

SEQ ID NO: 64347 - DNA, 38 bp, Artificial Sequence
  primer
gtaaaacgacggccagtcacgaataattgtattgcgcc

SEQ ID NO: 64348 - DNA, 38 bp, Artificial Sequence
  primer
gtaaaacgacggccagtgggctaattcccaaagtcgtc

SEQ ID NO: 64349 - DNA, 38 bp, Artificial Sequence
  primer
gtaaaacgacggccagtagttcacagctaatctccgcc

SEQ ID NO: 64350 - DNA, 21 bp, Artificial Sequence
  primer
cgagaggactggattgaggag

SEQ ID NO: 64351 - DNA, 38 bp, Artificial Sequence
  primer
gtaaaacgacggccagtgatagtgacagccaccaccac

SEQ ID NO: 64352 - DNA, 38 bp, Artificial Sequence
  primer
gtaaaacgacggccagtcagccatctcagagctcattc

SEQ ID NO: 64353 - DNA, 21 bp, Artificial Sequence
  primer
tggaaccttgaagaagggaag

SEQ ID NO: 64354 - DNA, 38 bp, Artificial Sequence
  primer
gtaaaacgacggccagtgcgatcctcattaggtgtgtg

SEQ ID NO: 64355 - DNA, 37 bp, Artificial Sequence
  primer
gtaaaacgacggccagtcatcatcacagaagcctccc

SEQ ID NO: 64356 - DNA, 20 bp, Artificial Sequence
  primer
aagccagcctgactctgttg

SEQ ID NO: 64357 - DNA, 21 bp, Artificial Sequence
  primer
aggatgggtttctttcccatt

SEQ ID NO: 64358 - DNA, 21 bp, Artificial Sequence
  primer
tcagtcccagatgttatgggc

SEQ ID NO: 64359 - DNA, 21 bp, Artificial Sequence
  primer
gcctcatggagcttatgtgtg

SEQ ID NO: 64360 - DNA, 22 bp, Artificial Sequence
  primer
ggtgctaaattaggcttggagg

SEQ ID NO: 64361 - DNA, 21 bp, Artificial Sequence
  primer
gaccttcctgaggttcagtgg

SEQ ID NO: 64362 - DNA, 38 bp, Artificial Sequence
  primer
gtaaaacgacggccagtgacttggccaaattcacattg

SEQ ID NO: 64363 - DNA, 38 bp, Artificial Sequence
  primer
gtaaaacgacggccagtatctctggtgccttcttggag

SEQ ID NO: 64364 - DNA, 21 bp, Artificial Sequence
  primer
tttccatcttccagtccacag

SEQ ID NO: 64365 - DNA, 38 bp, Artificial Sequence
  primer
gtaaaacgacggccagtcatttctgcagctcctttcag

SEQ ID NO: 64366 - DNA, 38 bp, Artificial Sequence
  primer
gtaaaacgacggccagttgggaggagcatgtgatacag

SEQ ID NO: 64367 - DNA, 39 bp, Artificial Sequence
  primer
gtaaaacgacggccagtccaaggatgtgtagagtcaggc

SEQ ID NO: 64368 - DNA, 35 bp, Artificial Sequence
  primer
gtaaaacgacggccagtgggaggtgcagatttggg

SEQ ID NO: 64369 - DNA, 18 bp, Artificial Sequence
  primer
ctgccattcacagcccag

SEQ ID NO: 64370 - DNA, 35 bp, Artificial Sequence
  primer
gtaaaacgacggccagtgtgagtgccaggctgtcc

SEQ ID NO: 64371 - DNA, 35 bp, Artificial Sequence
  primer
gtaaaacgacggccagtgcttactgtgcagcgcgt

SEQ ID NO: 64372 - DNA, 38 bp, Artificial Sequence
  primer
gtaaaacgacggccagtactttgatcgatccgaaccag

SEQ ID NO: 64373 - DNA, 38 bp, Artificial Sequence
  primer
gtaaaacgacggccagtgaagccgctagagcctaagag

SEQ ID NO: 64374 - DNA, 38 bp, Artificial Sequence
  primer
gtaaaacgacggccagttcacctacctcccagtgttcc

SEQ ID NO: 64375 - DNA, 38 bp, Artificial Sequence
  primer
gtaaaacgacggccagtgagccaaggttgtggaaagag

SEQ ID NO: 64376 - DNA, 20 bp, Artificial Sequence
  primer
agccctgaaggtctccacac

SEQ ID NO: 64377 - DNA, 21 bp, Artificial Sequence
  primer
agtgcttgttccctggagttc

SEQ ID NO: 64378 - DNA, 21 bp, Artificial Sequence
  primer
ttcctacttgggaagcaaacg

SEQ ID NO: 64379 - DNA, 37 bp, Artificial Sequence
  primer
gtaaaacgacggccagtcacttctgaagaagcagggc

SEQ ID NO: 64380 - DNA, 21 bp, Artificial Sequence
  primer
cagacccatgctgcagttaag

SEQ ID NO: 64381 - DNA, 21 bp, Artificial Sequence
  primer
ctctgagattcagggaggagc

SEQ ID NO: 64382 - DNA, 38 bp, Artificial Sequence
  primer
gtaaaacgacggccagtatgacctaggccagagggaac

SEQ ID NO: 64383 - DNA, 21 bp, Artificial Sequence
  primer
gtgggagtgtctggaggaatg

SEQ ID NO: 64384 - DNA, 40 bp, Artificial Sequence
  primer
gtaaaacgacggccagtgcattcacctgattgtctgtttc

SEQ ID NO: 64385 - DNA, 19 bp, Artificial Sequence
  primer
agctggcaggtgtgttgtg

SEQ ID NO: 64386 - DNA, 21 bp, Artificial Sequence
  primer
aatggccacagctaccttctg

SEQ ID NO: 64387 - DNA, 35 bp, Artificial Sequence
  primer
gtaaaacgacggccagtcaggcgctgcttcctaag

SEQ ID NO: 64388 - DNA, 19 bp, Artificial Sequence
  primer
ccacctgtcccagcctatg

SEQ ID NO: 64389 - DNA, 37 bp, Artificial Sequence
  primer
gtaaaacgacggccagtctgggttggaggtgagtcag

SEQ ID NO: 64390 - DNA, 21 bp, Artificial Sequence
  primer
ttcaatgtcgacctccaagtg

SEQ ID NO: 64391 - DNA, 37 bp, Artificial Sequence
  primer
gtaaaacgacggccagtacacaagtgcaagggagacc

SEQ ID NO: 64392 - DNA, 38 bp, Artificial Sequence
  primer
gtaaaacgacggccagtacagagtttggcctgggatac

SEQ ID NO: 64393 - DNA, 38 bp, Artificial Sequence
  primer
gtaaaacgacggccagttcatagccagtctgcaaggtc

SEQ ID NO: 64394 - DNA, 37 bp, Artificial Sequence
  primer
gtaaaacgacggccagtaggagccaggacctgagatg

SEQ ID NO: 64395 - DNA, 20 bp, Artificial Sequence
  primer
tcacagagctgctcaggacc

SEQ ID NO: 64396 - DNA, 38 bp, Artificial Sequence
  primer
gtaaaacgacggccagtctgcccagtccagaaagaaag

SEQ ID NO: 64397 - DNA, 37 bp, Artificial Sequence
  primer
gtaaaacgacggccagtggatgtgtccgctccttctc

SEQ ID NO: 64398 - DNA, 20 bp, Artificial Sequence
  primer
gagcaggtcatctacgcagg

SEQ ID NO: 64399 - DNA, 18 bp, Artificial Sequence
  primer
ctggccacacagcctcag

SEQ ID NO: 64400 - DNA, 22 bp, Artificial Sequence
  primer
tctatacaatgaggcgacaccc

SEQ ID NO: 64401 - DNA, 21 bp, Artificial Sequence
  primer
cccaaagataagctcagtggg

SEQ ID NO: 64402 - DNA, 37 bp, Artificial Sequence
  primer
gtaaaacgacggccagtagacccagagcttcgaggag

SEQ ID NO: 64403 - DNA, 37 bp, Artificial Sequence
  primer
gtaaaacgacggccagtaacggacaatgggtggattc

SEQ ID NO: 64404 - DNA, 37 bp, Artificial Sequence; identical to SEQ ID NO: 64403
  primer

SEQ ID NO: 64405 - DNA, 37 bp, Artificial Sequence
  primer
gtaaaacgacggccagtcaggacagcttgagtagccc

SEQ ID NO: 64406 - DNA, 42 bp, Artificial Sequence
  primer
gtaaaacgacggccagtatggagtcaattgttgtgttatttg

SEQ ID NO: 64407 - DNA, 25 bp, Artificial Sequence
  primer
tttcctcactgatttgagatgctac

SEQ ID NO: 64408 - DNA, 45 bp, Artificial Sequence
  primer
gtaaaacgacggccagtaataagctaaactcctgaatctcaattt

SEQ ID NO: 64409 - DNA, 38 bp, Artificial Sequence
  primer
gtaaaacgacggccagtggcttgtgtgtttgattagcg

SEQ ID NO: 64410 - DNA, 43 bp, Artificial Sequence
  primer
gtaaaacgacggccagtccctttgtatgaagcaagagacttag

SEQ ID NO: 64411 - DNA, 38 bp, Artificial Sequence
  primer
gtaaaacgacggccagtcccaggaggaagtgttgtttg

SEQ ID NO: 64412 - DNA, 21 bp, Artificial Sequence
  primer
ggcttcagttcttgaggcaac

SEQ ID NO: 64413 - DNA, 21 bp, Artificial Sequence
  primer
aagggcaattgaactcagcag

SEQ ID NO: 64414 - DNA, 38 bp, Artificial Sequence
  primer
gtaaaacgacggccagtaatagcgggcagtttatgtcg

SEQ ID NO: 64415 - DNA, 23 bp, Artificial Sequence
  primer
ggaaggctagggtaaatgaaagc

SEQ ID NO: 64416 - DNA, 21 bp, Artificial Sequence
  primer
gtagaggagctacattggccg

SEQ ID NO: 64417 - DNA, 38 bp, Artificial Sequence
  primer
gtaaaacgacggccagtgcagcatgtatgtgtccagtc

SEQ ID NO: 64418 - DNA, 21 bp, Artificial Sequence
  primer
ggtactcttccctttcctggg

SEQ ID NO: 64419 - DNA, 39 bp, Artificial Sequence
  primer
gtaaaacgacggccagtcaccagttccaggaatacatcc

SEQ ID NO: 64420 - DNA, 38 bp, Artificial Sequence
  primer
gtaaaacgacggccagtcttccgtctcattacacaggg

SEQ ID NO: 64421 - DNA, 22 bp, Artificial Sequence
  primer
ggacgtttgatggaagtgaatg

SEQ ID NO: 64422 - DNA, 39 bp, Artificial Sequence
  primer
gtaaaacgacggccagttctaagtaacttcagcgcctgc

SEQ ID NO: 64423 - DNA, 43 bp, Artificial Sequence
  primer
gtaaaacgacggccagtggtacaggctagtagtcaattcatcc

SEQ ID NO: 64424 - DNA, 37 bp, Artificial Sequence
  primer
gtaaaacgacggccagtctagcacctggcagaaacag

SEQ ID NO: 64425 - DNA, 23 bp, Artificial Sequence
  primer
ggaagaagacctttagggagaaa

SEQ ID NO: 64426 - DNA, 38 bp, Artificial Sequence
  primer
gtaaaacgacggccagtggcagctgtttgtgaagtcat

SEQ ID NO: 64427 - DNA, 41 bp, Artificial Sequence
  primer
gtaaaacgacggccagtggtaagcactagggatttaccaac

SEQ ID NO: 64428 - DNA, 43 bp, Artificial Sequence
  primer
gtaaaacgacggccagtcattaggaagatctttgctatgtaga

SEQ ID NO: 64429 - DNA, 21 bp, Artificial Sequence
  primer
tgacggagtaagaccctgtcc

SEQ ID NO: 64430 - DNA, 37 bp, Artificial Sequence
  primer
gtaaaacgacggccagtctgagtacaagcccagtgcc

SEQ ID NO: 64431 - DNA, 21 bp, Artificial Sequence
  primer
cgtttggaaccagttaaagcc

SEQ ID NO: 64432 - DNA, 22 bp, Artificial Sequence
  primer
ggatcacgaggtcaatagatcg

SEQ ID NO: 64433 - DNA, 41 bp, Artificial Sequence
  primer
gtaaaacgacggccagtttctccaaatagtgaatgatgagg

SEQ ID NO: 64434 - DNA, 39 bp, Artificial Sequence
  primer
gtaaaacgacggccagttttctagcccttgccacagtag

SEQ ID NO: 64435 - DNA, 22 bp, Artificial Sequence
  primer
aaactatctcccaaagtggttg

SEQ ID NO: 64436 - DNA, 35 bp, Artificial Sequence
  primer
gtaaaacgacggccagtcttccggctcagctcctc

SEQ ID NO: 64437 - DNA, 38 bp, Artificial Sequence
  primer
gtaaaacgacggccagtggccagcagtgtaatttcctc

SEQ ID NO: 64438 - DNA, 40 bp, Artificial Sequence
  primer
gtaaaacgacggccagtgactcccaggagtaggagtcttg

SEQ ID NO: 64439 - DNA, 21 bp, Artificial Sequence
  primer
tatccatctgtggttcttggc

SEQ ID NO: 64440 - DNA, 38 bp, Artificial Sequence
  primer
gtaaaacgacggccagttttctgaagggttggttcagc

SEQ ID NO: 64441 - DNA, 38 bp, Artificial Sequence
  primer
gtaaaacgacggccagtcctctgagatgttgggagagg

SEQ ID NO: 64442 - DNA, 38 bp, Artificial Sequence
  primer
gtaaaacgacggccagtcctttcgaggaaacctgagtg

SEQ ID NO: 64443 - DNA, 21 bp, Artificial Sequence
  primer
tgtacttaaggccagggcaac

SEQ ID NO: 64444 - DNA, 37 bp, Artificial Sequence
  primer
gtaaaacgacggccagtgttgctatcctccaccggac

SEQ ID NO: 64445 - DNA, 38 bp, Artificial Sequence
  primer
gtaaaacgacggccagtgtggaatttgctccagctacc

SEQ ID NO: 64446 - DNA, 37 bp, Artificial Sequence
  primer
gtaaaacgacggccagttgattgggtcctcaagcatc

SEQ ID NO: 64447 - DNA, 38 bp, Artificial Sequence
  primer
gtaaaacgacggccagtataacagagatgacgcccacc

SEQ ID NO: 64448 - DNA, 35 bp, Artificial Sequence
  primer
gtaaaacgacggccagtggcagcccttcacaacag

SEQ ID NO: 64449 - DNA, 21 bp, Artificial Sequence
  primer
tagcataggtgaatcaggccc

SEQ ID NO: 64450 - DNA, 21 bp, Artificial Sequence
  primer
ttggaagcattaggaaggtgc

SEQ ID NO: 64451 - DNA, 21 bp, Artificial Sequence
  primer
catcctgagtgacatgggttg

SEQ ID NO: 64452 - DNA, 21 bp, Artificial Sequence
  primer
atatggttaggtgagcggctt

SEQ ID NO: 64453 - DNA, 21 bp, Artificial Sequence
  primer
ctgttcctgtctcctcaaccc

SEQ ID NO: 64454 - DNA, 21 bp, Artificial Sequence
  primer
acatgaaatggctgcaggtag

SEQ ID NO: 64455 - DNA, 21 bp, Artificial Sequence
  primer
ttgagcctaggagtttgaggc

SEQ ID NO: 64456 - DNA, 20 bp, Artificial Sequence
  primer
gagaatgacgtgaacctggg

SEQ ID NO: 64457 - DNA, 38 bp, Artificial Sequence
  primer
gtaaaacgacggccagtggtgtgaaccactgtgtctgg

SEQ ID NO: 64458 - DNA, 23 bp, Artificial Sequence
  primer
cattcacatgctaaatggtaggg

SEQ ID NO: 64459 - DNA, 37 bp, Artificial Sequence
  primer
gtaaaacgacggccagtttcaggtctgtcaccttgcc

SEQ ID NO: 64460 - DNA, 21 bp, Artificial Sequence
  primer
aagaggtttgtactcatgcgg

SEQ ID NO: 64461 - DNA, 37 bp, Artificial Sequence
  primer
gtaaaacgacggccagtcggttctggcagagttcttg

SEQ ID NO: 64462 - DNA, 20 bp, Artificial Sequence
  primer
gggtcagtttacgctttggg

SEQ ID NO: 64463 - DNA, 38 bp, Artificial Sequence
  primer
gtaaaacgacggccagtcattaacgaggaggatgggtc

SEQ ID NO: 64464 - DNA, 21 bp, Artificial Sequence
  primer
tccagcacgaggtttatagcc

SEQ ID NO: 64465 - DNA, 21 bp, Artificial Sequence
  primer
tgcacctatcaacaatgtccc

SEQ ID NO: 64466 - DNA, 21 bp, Artificial Sequence
  primer
gtagggttgagggaatatggg

SEQ ID NO: 64467 - DNA, 35 bp, Artificial Sequence
  primer
gtaaaacgacggccagtggtgggaagccgtgtctc

SEQ ID NO: 64468 - DNA, 20 bp, Artificial Sequence
  primer
ggttgcaatggtgagctgag

SEQ ID NO: 64469 - DNA, 38 bp, Artificial Sequence
  primer
gtaaaacgacggccagtgaggtagggccacttaaaccc

SEQ ID NO: 64470 - DNA, 38 bp, Artificial Sequence
  primer
gtaaaacgacggccagtgattggccttacatttctgcc

SEQ ID NO: 64471 - DNA, 36 bp, Artificial Sequence
  primer
gtaaaacgacggccagtgctgaaattcggcttggag

SEQ ID NO: 64472 - DNA, 43 bp, Artificial Sequence
  primer
gtaaaacgacggccagttgggtgaacaagagtgatagatactg

SEQ ID NO: 64473 - DNA, 28 bp, Artificial Sequence
  primer
cagtggtaaatttaagaggaaatcctaa

SEQ ID NO: 64474 - DNA, 37 bp, Artificial Sequence
  primer
gtaaaacgacggccagtcctgaaatcccacttgcctg

SEQ ID NO: 64475 - DNA, 41 bp, Artificial Sequence
  primer
gtaaaacgacggccagtggctcaactttgaaaggtctttgt

SEQ ID NO: 64476 - DNA, 20 bp, Artificial Sequence
  primer
tttggcagaaatgttgaggg

SEQ ID NO: 64477 - DNA, 38 bp, Artificial Sequence
  primer
gtaaaacgacggccagttactacccaaggtggcacaag

SEQ ID NO: 64478 - DNA, 38 bp, Artificial Sequence
  primer
gtaaaacgacggccagttgttcactaaccacctgaggg

SEQ ID NO: 64479 - DNA, 36 bp, Artificial Sequence
  primer
gtaaaacgacggccagtgctcacctaggccgtagcc

SEQ ID NO: 64480 - DNA, 21 bp, Artificial Sequence
  primer
gtccacacagcagacttggtc

SEQ ID NO: 64481 - DNA, 21 bp, Artificial Sequence
  primer
acatctgtcagtgaggttggg

SEQ ID NO: 64482 - DNA, 38 bp, Artificial Sequence
  primer
gtaaaacgacggccagtgactcttcggtactcgggatg

SEQ ID NO: 64483 - DNA, 20 bp, Artificial Sequence
  primer
tgtgtgtgagcaacagggac

SEQ ID NO: 64484 - DNA, 38 bp, Artificial Sequence
  primer
gtaaaacgacggccagtgagctggagatcaaggcctac

SEQ ID NO: 64485 - DNA, 38 bp, Artificial Sequence
  primer
gtaaaacgacggccagtttaccagctggctctttccag

SEQ ID NO: 64486 - DNA, 37 bp, Artificial Sequence
  primer
gtaaaacgacggccagtctaaggtccctatgaggccg

SEQ ID NO: 64487 - DNA, 38 bp, Artificial Sequence
  primer
gtaaaacgacggccagtcagggcttaatgggacaagtg

SEQ ID NO: 64488 - DNA, 22 bp, Artificial Sequence
  primer
tttgagttcaagcacatcaagg

SEQ ID NO: 64489 - DNA, 38 bp, Artificial Sequence
  primer
gtaaaacgacggccagtaaacctgagccctttggagtc

SEQ ID NO: 64490 - DNA, 36 bp, Artificial Sequence
  primer
gtaaaacgacggccagtggaagctcgagatggaggg

SEQ ID NO: 64491 - DNA, 21 bp, Artificial Sequence
  primer
gaggccaagaagatggagttc

SEQ ID NO: 64492 - DNA, 36 bp, Artificial Sequence
  primer
gtaaaacgacggccagtggtcaactgctacatgccg

SEQ ID NO: 64493 - DNA, 38 bp, Artificial Sequence
  primer
gtaaaacgacggccagtaccctgatcatgaaggacagc

SEQ ID NO: 64494 - DNA, 20 bp, Artificial Sequence
  primer
agcaagccctcaaagagctg

SEQ ID NO: 64495 - DNA, 38 bp, Artificial Sequence
  primer
gtaaaacgacggccagtctgctggtctcctggacctac

SEQ ID NO: 64496 - DNA, 21 bp, Artificial Sequence
  primer
ctggactagcaggatccgaac

SEQ ID NO: 64497 - DNA, 21 bp, Artificial Sequence
  primer
taaaggaatttgctggtcagg

SEQ ID NO: 64498 - DNA, 20 bp, Artificial Sequence
  primer
tttgtgtgtgccaacctacg

SEQ ID NO: 64499 - DNA, 21 bp, Artificial Sequence
  primer
cccacttccctattggtgttc

SEQ ID NO: 64500 - DNA, 21 bp, Artificial Sequence
  primer
ctgcagtctgcttgttcagtg

SEQ ID NO: 64501 - DNA, 36 bp, Artificial Sequence
  primer
gtaaaacgacggccagtgtgggcaacttgcactgac

SEQ ID NO: 64502 - DNA, 38 bp, Artificial Sequence
  primer
gtaaaacgacggccagtctttggttgtctccttggacc

SEQ ID NO: 64503 - DNA, 21 bp, Artificial Sequence
  primer
gtggcacatacaatggaaccc

SEQ ID NO: 64504 - DNA, 38 bp, Artificial Sequence
  primer
gtaaaacgacggccagttgagctctggacggtgttatg

SEQ ID NO: 64505 - DNA, 21 bp, Artificial Sequence
  primer
cagcctgggataattcgtttg

SEQ ID NO: 64506 - DNA, 21 bp, Artificial Sequence
  primer
gacaggtgggagcaataagtg

SEQ ID NO: 64507 - DNA, 19 bp, Artificial Sequence
  primer
caacaagggcgaacctctg

SEQ ID NO: 64508 - DNA, 38 bp, Artificial Sequence
  primer
gtaaaacgacggccagtgcccagaaaggtcaatcaaag

SEQ ID NO: 64509 - DNA, 20 bp, Artificial Sequence
  primer
ggagcacaaagccttcaatg

SEQ ID NO: 64510 - DNA, 21 bp, Artificial Sequence
  primer
ttgtcgtcatccaggtattgg

SEQ ID NO: 64511 - DNA, 21 bp, Artificial Sequence
  primer
ctgaacaggctgctccaattc

SEQ ID NO: 64512 - DNA, 36 bp, Artificial Sequence
  primer
gtaaaacgacggccagtacctggctgacctccactg

SEQ ID NO: 64513 - DNA, 38 bp, Artificial Sequence
  primer
gtaaaacgacggccagtagaaggagtgtctccctgtgg

SEQ ID NO: 64514 - DNA, 38 bp, Artificial Sequence
  primer
gtaaaacgacggccagtcacctcccactgttcttaccc

SEQ ID NO: 64515 - DNA, 21 bp, Artificial Sequence
  primer
taccctttctgggtcttggtc

SEQ ID NO: 64516 - DNA, 38 bp, Artificial Sequence
  primer
gtaaaacgacggccagtggctgtgcgtactgagttctg

SEQ ID NO: 64517 - DNA, 38 bp, Artificial Sequence
  primer
gtaaaacgacggccagtaagcttcatagggagcaggtg

SEQ ID NO: 64518 - DNA, 38 bp, Artificial Sequence
  primer
gtaaaacgacggccagttagtggaagggattacgctgc

SEQ ID NO: 64519 - DNA, 39 bp, Artificial Sequence
  primer
gtaaaacgacggccagtgagctatctggctctgttcagg

SEQ ID NO: 64520 - DNA, 21 bp, Artificial Sequence
  primer
accatcagcactaaccacagg

SEQ ID NO: 64521 - DNA, 23 bp, Artificial Sequence
  primer
caatgcatgtctttccatattgc

SEQ ID NO: 64522 - DNA, 39 bp, Artificial Sequence
  primer
gtaaaacgacggccagttcctgccttcatctcttacctc

SEQ ID NO: 64523 - DNA, 38 bp, Artificial Sequence
  primer
gtaaaacgacggccagtccatgaggtggttgcagatta

SEQ ID NO: 64524 - DNA, 38 bp, Artificial Sequence
  primer
gtaaaacgacggccagtacatggaagatgctggttgag

SEQ ID NO: 64525 - DNA, 38 bp, Artificial Sequence
  primer
gtaaaacgacggccagtagtcactggacaccatcttgg

SEQ ID NO: 64526 - DNA, 38 bp, Artificial Sequence
  primer
gtaaaacgacggccagttctagtgcctgtggtgtttgc

SEQ ID NO: 64527 - DNA, 39 bp, Artificial Sequence
  primer
gtaaaacgacggccagtgagttatcaggcagggtgagag

SEQ ID NO: 64528 - DNA, 21 bp, Artificial Sequence
  primer
accctacgatgtgcaggtagc

SEQ ID NO: 64529 - DNA, 38 bp, Artificial Sequence
  primer
gtaaaacgacggccagtgttgagtggtctccagcttcc

SEQ ID NO: 64530 - DNA, 38 bp, Artificial Sequence
  primer
gtaaaacgacggccagtactggccttagcagttgttcc

SEQ ID NO: 64531 - DNA, 39 bp, Artificial Sequence
  primer
gtaaaacgacggccagtggcacttattcaagcctcactt

SEQ ID NO: 64532 - DNA, 20 bp, Artificial Sequence
  primer
ttccaaggacaggcagacag

SEQ ID NO: 64533 - DNA, 41 bp, Artificial Sequence
  primer
gtaaaacgacggccagttcctttgcctttaatatcttcagc

SEQ ID NO: 64534 - DNA, 44 bp, Artificial Sequence
  primer
gtaaaacgacggccagttttaaatgtagtatttgtcagcgtcac

SEQ ID NO: 64535 - DNA, 21 bp, Artificial Sequence
  primer
taccacagaggaaagatgggc

SEQ ID NO: 64536 - DNA, 24 bp, Artificial Sequence
  primer
tccaccaacttacacattcagaag

SEQ ID NO: 64537 - DNA, 44 bp, Artificial Sequence
  primer
gtaaaacgacggccagttattaaagaagaggcgtacagaatctc

SEQ ID NO: 64538 - DNA, 42 bp, Artificial Sequence
  primer
gtaaaacgacggccagttctgaggagaataatccacttgatg

SEQ ID NO: 64539 - DNA, 38 bp, Artificial Sequence
  primer
gtaaaacgacggccagtttctcttggcaaacatggaac

SEQ ID NO: 64540 - DNA, 37 bp, Artificial Sequence
  primer
gtaaaacgacggccagtttcatactggacagaggccc

SEQ ID NO: 64541 - DNA, 21 bp, Artificial Sequence
  primer
aatgcttcccaacaatgtcag

SEQ ID NO: 64542 - DNA, 38 bp, Artificial Sequence
  primer
gtaaaacgacggccagtctcgctttcatatttccgtcc

SEQ ID NO: 64543 - DNA, 21 bp, Artificial Sequence
  primer
tcaggcatgttcagagagcag

SEQ ID NO: 64544 - DNA, 35 bp, Artificial Sequence
  primer
gtaaaacgacggccagtgaatgtggcaggaccgag

SEQ ID NO: 64545 - DNA, 21 bp, Artificial Sequence
  primer
cgagtcctcactctgcctttc

SEQ ID NO: 64546 - DNA, 21 bp, Artificial Sequence
  primer
tctggatctcagctggatttg

SEQ ID NO: 64547 - DNA, 39 bp, Artificial Sequence
  primer
gtaaaacgacggccagtcccacctggtcagagtaaacag

SEQ ID NO: 64548 - DNA, 38 bp, Artificial Sequence
  primer
gtaaaacgacggccagttcttcaaatgtctgacggcac

SEQ ID NO: 64549 - DNA, 21 bp, Artificial Sequence
  primer
tttcggaactgtgccaatatc

SEQ ID NO: 64550 - DNA, 21 bp, Artificial Sequence
  primer
tcaagtggctactggtgttgc

SEQ ID NO: 64551 - DNA, 21 bp, Artificial Sequence
  primer
gcagtatccacagcctgtacc

SEQ ID NO: 64552 - DNA, 21 bp, Artificial Sequence
  primer
ttggtgatgaaccagtccaag

SEQ ID NO: 64553 - DNA, 38 bp, Artificial Sequence
  primer
gtaaaacgacggccagtaactttgactcctctcgcctg

SEQ ID NO: 64554 - DNA, 38 bp, Artificial Sequence
  primer
gtaaaacgacggccagtgattgttaggtcccaagacgg

SEQ ID NO: 64555 - DNA, 38 bp, Artificial Sequence
  primer
gtaaaacgacggccagtgaccacttaacagccctctgg

SEQ ID NO: 64556 - DNA, 38 bp, Artificial Sequence
  primer
gtaaaacgacggccagttctctccttcctgaacactgc

SEQ ID NO: 64557 - DNA, 38 bp, Artificial Sequence
  primer
gtaaaacgacggccagttcaccttgtgctgctttcttc

SEQ ID NO: 64558 - DNA, 38 bp, Artificial Sequence
  primer
gtaaaacgacggccagttcaaaggctaatgaagccacc

SEQ ID NO: 64559 - DNA, 21 bp, Artificial Sequence
  primer
tccacagacttctctcgcaac

SEQ ID NO: 64560 - DNA, 20 bp, Artificial Sequence
  primer
atgtccaggattggaggttg

SEQ ID NO: 64561 - DNA, 38 bp, Artificial Sequence
  primer
gtaaaacgacggccagtgctgacagcagacccacttag

SEQ ID NO: 64562 - DNA, 38 bp, Artificial Sequence
  primer
gtaaaacgacggccagtccgtatttgacaatgtgcctg

SEQ ID NO: 64563 - DNA, 21 bp, Artificial Sequence
  primer
atcgacgacctggactacctc

SEQ ID NO: 64564 - DNA, 37 bp, Artificial Sequence
  primer
gtaaaacgacggccagtgggttcagtgagtgtgggag

SEQ ID NO: 64565 - DNA, 21 bp, Artificial Sequence
  primer
cttcctactggaaagggctcc

SEQ ID NO: 64566 - DNA, 21 bp, Artificial Sequence
  primer
ttgcttctctctgtccctgtg

SEQ ID NO: 64567 - DNA, 38 bp, Artificial Sequence
  primer
gtaaaacgacggccagttacggctgtatccaaagatgg

SEQ ID NO: 64568 - DNA, 38 bp, Artificial Sequence
  primer
gtaaaacgacggccagtctaagctcaagcaatcctccc

SEQ ID NO: 64569 - DNA, 21 bp, Artificial Sequence
  primer
ccattggttgacaacgatcac

SEQ ID NO: 64570 - DNA, 21 bp, Artificial Sequence
  primer
tcagagctgggctaagggtag

SEQ ID NO: 64571 - DNA, 38 bp, Artificial Sequence
  primer
gtaaaacgacggccagtgtcagatagccctggagttgg

SEQ ID NO: 64572 - DNA, 21 bp, Artificial Sequence
  primer
agaccttccctcccagatacc

SEQ ID NO: 64573 - DNA, 38 bp, Artificial Sequence
  primer
gtaaaacgacggccagtttctctttgccttcctgttcc

SEQ ID NO: 64574 - DNA, 36 bp, Artificial Sequence
  primer
gtaaaacgacggccagtctgacattccgacccttcc

SEQ ID NO: 64575 - DNA, 36 bp, Artificial Sequence
  primer
gtaaaacgacggccagtaactgttgggctgggtgag

SEQ ID NO: 64576 - DNA, 21 bp, Artificial Sequence
  primer
tgaagtgaatgtggatgtccc

SEQ ID NO: 64577 - DNA, 38 bp, Artificial Sequence
  primer
gtaaaacgacggccagtggcagatgaggcgtaggtaac

SEQ ID NO: 64578 - DNA, 38 bp, Artificial Sequence
  primer
gtaaaacgacggccagtcttccagaggaacaccctgtc

SEQ ID NO: 64579 - DNA, 38 bp, Artificial Sequence
  primer
gtaaaacgacggccagtacaccatccagcctgaatcac

SEQ ID NO: 64580 - DNA, 38 bp, Artificial Sequence
  primer
gtaaaacgacggccagtatgagagtgagggtccacctg

SEQ ID NO: 64581 - DNA, 20 bp, Artificial Sequence
  primer
agtgttcgtcatccaccacc

SEQ ID NO: 64582 - DNA, 38 bp, Artificial Sequence
  primer
gtaaaacgacggccagtacctggaggtcgtctgttagc

SEQ ID NO: 64583 - DNA, 21 bp, Artificial Sequence
  primer
ggaaccaattcattcctgcac

SEQ ID NO: 64584 - DNA, 38 bp, Artificial Sequence
  primer
gtaaaacgacggccagtcagagtcttgcccatctctcc

SEQ ID NO: 64585 - DNA, 22 bp, Artificial Sequence
  primer
tctgcacacccaacaatgtaag

SEQ ID NO: 64586 - DNA, 23 bp, Artificial Sequence
  primer
ggagatcagggataggagatcag

SEQ ID NO: 64587 - DNA, 40 bp, Artificial Sequence
  primer
gtaaaacgacggccagttgaaatactttgattgctgtcca

SEQ ID NO: 64588 - DNA, 21 bp, Artificial Sequence
  primer
atgtgggcaagaggtataggg

SEQ ID NO: 64589 - DNA, 28 bp, Artificial Sequence
  primer
gtttctgtataataactggcagagtagc

SEQ ID NO: 64590 - DNA, 21 bp, Artificial Sequence
  primer
gaccagtacactggcaacctg

SEQ ID NO: 64591 - DNA, 43 bp, Artificial Sequence
  primer
gtaaaacgacggccagttggagaatttacagtctctctcagtg

SEQ ID NO: 64592 - DNA, 43 bp, Artificial Sequence
  primer
gtaaaacgacggccagttcaatgacactgagtagagctttatg

SEQ ID NO: 64593 - DNA, 38 bp, Artificial Sequence
  primer
gtaaaacgacggccagtgtttattgattgcccaacctg

SEQ ID NO: 64594 - DNA, 38 bp, Artificial Sequence
  primer
gtaaaacgacggccagtatgaattctgcatggcatttg

SEQ ID NO: 64595 - DNA, 24 bp, Artificial Sequence
  primer
cagctttcaaatcaaggaagaaga

SEQ ID NO: 64596 - DNA, 41 bp, Artificial Sequence
  primer
gtaaaacgacggccagtaacaatagatgaaagaggccagtg

SEQ ID NO: 64597 - DNA, 23 bp, Artificial Sequence
  primer
tgagtttatctgggaggtaaccc

SEQ ID NO: 64598 - DNA, 22 bp, Artificial Sequence
  primer
tgctagccataacaatgaatga

SEQ ID NO: 64599 - DNA, 42 bp, Artificial Sequence
  primer
gtaaaacgacggccagtaaatttgaatattcgttagccattt

SEQ ID NO: 64600 - DNA, 38 bp, Artificial Sequence
  primer
gtaaaacgacggccagtcacgtaggacggagggtagtg

SEQ ID NO: 64601 - DNA, 37 bp, Artificial Sequence
  primer
gtaaaacgacggccagttctcgcgttatccacagctc

SEQ ID NO: 64602 - DNA, 36 bp, Artificial Sequence
  primer
gtaaaacgacggccagtcctggagacaatggatggg

SEQ ID NO: 64603 - DNA, 22 bp, Artificial Sequence
  primer
tgaatgtttcttccctgtctgg

SEQ ID NO: 64604 - DNA, 21 bp, Artificial Sequence
  primer
gacttctaccggaggatgcag

SEQ ID NO: 64605 - DNA, 36 bp, Artificial Sequence
  primer
gtaaaacgacggccagtccaagagtcctggtgagcc

SEQ ID NO: 64606 - DNA, 38 bp, Artificial Sequence
  primer
gtaaaacgacggccagtgagaactcctgactgggaagg

SEQ ID NO: 64607 - DNA, 38 bp, Artificial Sequence
  primer
gtaaaacgacggccagtatagtttcccagcgtgtgagg

SEQ ID NO: 64608 - DNA, 21 bp, Artificial Sequence
  primer
tagacgcttatatcccgctgc

SEQ ID NO: 64609 - DNA, 42 bp, Artificial Sequence
  primer
gtaaaacgacggccagtcagttatttatagacatggccttcc

SEQ ID NO: 64610 - DNA, 38 bp, Artificial Sequence
  primer
gtaaaacgacggccagtggaatagtgtttgggtttggg

SEQ ID NO: 64611 - DNA, 39 bp, Artificial Sequence
  primer
gtaaaacgacggccagtgggaccgaaagatttacacacc

SEQ ID NO: 64612 - DNA, 35 bp, Artificial Sequence
  primer
gtaaaacgacggccagtcccggcaagagttccttt

SEQ ID NO: 64613 - DNA, 21 bp, Artificial Sequence
  primer
ttgctttggtgttgctgagtc

SEQ ID NO: 64614 - DNA, 21 bp, Artificial Sequence
  primer
cctgggtgacagaatgaaacc

SEQ ID NO: 64615 - DNA, 19 bp, Artificial Sequence
  primer
ctcagccaagcatccttcc

SEQ ID NO: 64616 - DNA, 45 bp, Artificial Sequence
  primer
gtaaaacgacggccagtaaatcctaatacaggagtactgtccaaa

SEQ ID NO: 64617 - DNA, 28 bp, Artificial Sequence
  primer
ttagatagataccatactcttcattggc

SEQ ID NO: 64618 - DNA, 38 bp, Artificial Sequence
  primer
gtaaaacgacggccagtccatccttagagccagtccag

SEQ ID NO: 64619 - DNA, 21 bp, Artificial Sequence
  primer
agaggttgcagtgagctgaga

SEQ ID NO: 64620 - DNA, 21 bp, Artificial Sequence
  primer
actggatccacgcagagaaag

SEQ ID NO: 64621 - DNA, 21 bp, Artificial Sequence
  primer
ctaagtaccatcccgggacac

SEQ ID NO: 64622 - DNA, 39 bp, Artificial Sequence
  primer
gtaaaacgacggccagttcctattcagtgagggctgaag

SEQ ID NO: 64623 - DNA, 20 bp, Artificial Sequence
  primer
tctgtggctcaccaggaaag

SEQ ID NO: 64624 - DNA, 20 bp, Artificial Sequence
  primer
ctgtcttcagcctgcctttg

SEQ ID NO: 64625 - DNA, 38 bp, Artificial Sequence
  primer
gtaaaacgacggccagtgggctgggagtaaagacagtg

SEQ ID NO: 64626 - DNA, 36 bp, Artificial Sequence
  primer
gtaaaacgacggccagtaaacccaccagtgagcgag

SEQ ID NO: 64627 - DNA, 38 bp, Artificial Sequence
  primer
gtaaaacgacggccagtgatgaggaaggtggaggtcag

SEQ ID NO: 64628 - DNA, 38 bp, Artificial Sequence
  primer
gtaaaacgacggccagtgcctcccaaagtgtaaacctg

SEQ ID NO: 64629 - DNA, 38 bp, Artificial Sequence
  primer
gtaaaacgacggccagtgggtgtctctgtgacatgtgg

SEQ ID NO: 64630 - DNA, 38 bp, Artificial Sequence
  primer
gtaaaacgacggccagtcaatgcctcttacactccctg

SEQ ID NO: 64631 - DNA, 38 bp, Artificial Sequence
  primer
gtaaaacgacggccagtattcccagtgctggcagttag

SEQ ID NO: 64632 - DNA, 21 bp, Artificial Sequence
  primer
ggcaggaagtggtgctaattg

SEQ ID NO: 64633 - DNA, 24 bp, Artificial Sequence
  primer
aaagatgatggtttctgcattagc

SEQ ID NO: 64634 - DNA, 38 bp, Artificial Sequence
  primer
gtaaaacgacggccagttgctgtgctttctacactggg

SEQ ID NO: 64635 - DNA, 38 bp, Artificial Sequence
  primer
gtaaaacgacggccagtaatgcagtgggctctttcttc

SEQ ID NO: 64636 - DNA, 37 bp, Artificial Sequence
  primer
gtaaaacgacggccagtatcaaggcctccaagggaag

SEQ ID NO: 64637 - DNA, 37 bp, Artificial Sequence
  primer
gtaaaacgacggccagtacagaagcggcacagagaag

SEQ ID NO: 64638 - DNA, 37 bp, Artificial Sequence
  primer
gtaaaacgacggccagtcctgacaggacacagttccc

SEQ ID NO: 64639 - DNA, 21 bp, Artificial Sequence
  primer
tgtgacaccatgactgtgtgg

SEQ ID NO: 64640 - DNA, 38 bp, Artificial Sequence
  primer
gtaaaacgacggccagttctgcaggttacctacctggg

SEQ ID NO: 64641 - DNA, 20 bp, Artificial Sequence
  primer
gaaggaccgagagaggcaac

SEQ ID NO: 64642 - DNA, 18 bp, Artificial Sequence
  primer
cacccgtcaccaccaaag

SEQ ID NO: 64643 - DNA, 36 bp, Artificial Sequence
  primer
gtaaaacgacggccagtgggctggaatgattgtgtg

SEQ ID NO: 64644 - DNA, 38 bp, Artificial Sequence
  primer
gtaaaacgacggccagtgttctgctttggctggaagtc

SEQ ID NO: 64645 - DNA, 21 bp, Artificial Sequence
  primer
aatctactgcctgcctgcttc

SEQ ID NO: 64646 - DNA, 39 bp, Artificial Sequence
  primer
gtaaaacgacggccagtttgttgtgatagctttcttgcg

SEQ ID NO: 64647 - DNA, 21 bp, Artificial Sequence
  primer
acttgcctcatgcacaagttc

SEQ ID NO: 64648 - DNA, 38 bp, Artificial Sequence
  primer
gtaaaacgacggccagttatggtagcccaatcccagag

SEQ ID NO: 64649 - DNA, 42 bp, Artificial Sequence
  primer
gtaaaacgacggccagttggacaaccttctctaaataggtcc

SEQ ID NO: 64650 - DNA, 21 bp, Artificial Sequence
  primer
aactctgtgaggtttgggagc

SEQ ID NO: 64651 - DNA, 38 bp, Artificial Sequence
  primer
gtaaaacgacggccagtctcctctctcggtggtctgtc

SEQ ID NO: 64652 - DNA, 37 bp, Artificial Sequence
  primer
gtaaaacgacggccagtgcaacggaccttgttaacgg

SEQ ID NO: 64653 - DNA, 18 bp, Artificial Sequence
  primer
ggaggcgagacgaggttg

SEQ ID NO: 64654 - DNA, 39 bp, Artificial Sequence
  primer
gtaaaacgacggccagttctgggaaaccttaaatatggc

SEQ ID NO: 64655 - DNA, 39 bp, Artificial Sequence
  primer
gtaaaacgacggccagttgtttcatcaccatcattaccc

SEQ ID NO: 64656 - DNA, 21 bp, Artificial Sequence
  primer
aaatggtgggtgtttgattcc

SEQ ID NO: 64657 - DNA, 21 bp, Artificial Sequence
  primer
atttgcgcatatcaccctgag

SEQ ID NO: 64658 - DNA, 38 bp, Artificial Sequence
  primer
gtaaaacgacggccagtaacaaaggcagtagggctgag

SEQ ID NO: 64659 - DNA, 20 bp, Artificial Sequence
  primer
ccgtgtgctctattccaagc

SEQ ID NO: 64660 - DNA, 38 bp, Artificial Sequence
  primer
gtaaaacgacggccagtcctgagccaagagggaaactc

SEQ ID NO: 64661 - DNA, 38 bp, Artificial Sequence
  primer
gtaaaacgacggccagtcaagctcacacttccaggttg

SEQ ID NO: 64662 - DNA, 38 bp, Artificial Sequence
  primer
gtaaaacgacggccagttttccagtcagaacgtgaagc

SEQ ID NO: 64663 - DNA, 24 bp, Artificial Sequence
  primer
tttaaccacgatcatctttcagac

SEQ ID NO: 64664 - DNA, 38 bp, Artificial Sequence
  primer
gtaaaacgacggccagtcctgccaggagtttatgtcac

SEQ ID NO: 64665 - DNA, 39 bp, Artificial Sequence
  primer
gtaaaacgacggccagttgcatgagttattgccacattc

SEQ ID NO: 64666 - DNA, 23 bp, Artificial Sequence
  primer
tcagcaaatggttaaatacaccc

SEQ ID NO: 64667 - DNA, 21 bp, Artificial Sequence
  primer
gtagctttacggcgattcgag

SEQ ID NO: 64668 - DNA, 38 bp, Artificial Sequence
  primer
gtaaaacgacggccagtccagaggaaataccgatggac

SEQ ID NO: 64669 - DNA, 41 bp, Artificial Sequence
  primer
gtaaaacgacggccagttttgggaaggtttcatagagaaga

SEQ ID NO: 64670 - DNA, 38 bp, Artificial Sequence
  primer
gtaaaacgacggccagtcgttgtatgcgatattcctgc

SEQ ID NO: 64671 - DNA, 38 bp, Artificial Sequence
  primer
gtaaaacgacggccagtgcatagcaaattgaggcttcc

SEQ ID NO: 64672 - DNA, 22 bp, Artificial Sequence
  primer
gggatagctgtatgatgttggg

SEQ ID NO: 64673 - DNA, 22 bp, Artificial Sequence
  primer
ttggaatttagaactgcttccc

SEQ ID NO: 64674 - DNA, 27 bp, Artificial Sequence
  primer
tttaagaccttaagtgtgtccaagaac

SEQ ID NO: 64675 - DNA, 45 bp, Artificial Sequence
  primer
gtaaaacgacggccagtttaggtacaaatgcttagtctccataag

SEQ ID NO: 64676 - DNA, 27 bp, Artificial Sequence
  primer
ggaagtaactactgaattgtcatcacc

SEQ ID NO: 64677 - DNA, 21 bp, Artificial Sequence
  primer
tccacagagtcaggaaggatg

SEQ ID NO: 64678 - DNA, 38 bp, Artificial Sequence
  primer
gtaaaacgacggccagtttcttccgcttcagccaatag

SEQ ID NO: 64679 - DNA, 39 bp, Artificial Sequence
  primer
gtaaaacgacggccagtcgtgataattggagaatttggg

SEQ ID NO: 64680 - DNA, 21 bp, Artificial Sequence
  primer
ttctggtagtgcaaccctctc

SEQ ID NO: 64681 - DNA, 39 bp, Artificial Sequence
  primer
gtaaaacgacggccagtgtgaccttgtgacataaccagc

SEQ ID NO: 64682 - DNA, 21 bp, Artificial Sequence
  primer
agtttgagaccagcttgggtg

SEQ ID NO: 64683 - DNA, 21 bp, Artificial Sequence
  primer
taattgggattctgcgtgttg

SEQ ID NO: 64684 - DNA, 39 bp, Artificial Sequence
  primer
gtaaaacgacggccagtaacatgaattggagcagtgaag

SEQ ID NO: 64685 - DNA, 38 bp, Artificial Sequence
  primer
gtaaaacgacggccagtgtgtgtagccctgaagaccac

SEQ ID NO: 64686 - DNA, 38 bp, Artificial Sequence
  primer
gtaaaacgacggccagtacgctgtcacttgttgctttg

SEQ ID NO: 64687 - DNA, 21 bp, Artificial Sequence
  primer
aattctgccacttaacctgcg

SEQ ID NO: 64688 - DNA, 40 bp, Artificial Sequence
  primer
gtaaaacgacggccagttcccactgcactagagtatgagc

SEQ ID NO: 64689 - DNA, 38 bp, Artificial Sequence
  primer
gtaaaacgacggccagttgaggcgtagatgattgaagc

SEQ ID NO: 64690 - DNA, 24 bp, Artificial Sequence
  primer
tgctttaaacataagcaagaaagc

SEQ ID NO: 64691 - DNA, 21 bp, Artificial Sequence
  primer
ttgaaagttgctttgggaatc

SEQ ID NO: 64692 - DNA, 37 bp, Artificial Sequence
  primer
gtaaaacgacggccagttccacccagatctatgcgag

SEQ ID NO: 64693 - DNA, 22 bp, Artificial Sequence
  primer
ccagttagaggccttgtgatcc

SEQ ID NO: 64694 - DNA, 39 bp, Artificial Sequence
  primer
gtaaaacgacggccagtcagaacttgggatttgtctccc

SEQ ID NO: 64695 - DNA, 39 bp, Artificial Sequence
  primer
gtaaaacgacggccagtcacacactggcagctcttaaac

SEQ ID NO: 64696 - DNA, 39 bp, Artificial Sequence
  primer
gtaaaacgacggccagtaccttgaagtggtatgaggacc

SEQ ID NO: 64697 - DNA, 21 bp, Artificial Sequence
  primer
ttctggaatcctgggataagc

SEQ ID NO: 64698 - DNA, 21 bp, Artificial Sequence
  primer
gctgaatttgaaagttgtggc

SEQ ID NO: 64699 - DNA, 21 bp, Artificial Sequence
  primer
cagatgtgtgtctttgggagc

SEQ ID NO: 64700 - DNA, 39 bp, Artificial Sequence
  primer
gtaaaacgacggccagtccatttggccctttagactttc

SEQ ID NO: 64701 - DNA, 38 bp, Artificial Sequence
  primer
gtaaaacgacggccagtaggtgagtgtcagagacaccg

SEQ ID NO: 64702 - DNA, 38 bp, Artificial Sequence
  primer
gtaaaacgacggccagtgggaatttagtcagcctggtg

SEQ ID NO: 64703 - DNA, 20 bp, Artificial Sequence
  primer
gcagtccctgtatgctcacg

SEQ ID NO: 64704 - DNA, 21 bp, Artificial Sequence
  primer
aagactgtttccaagccaagc

SEQ ID NO: 64705 - DNA, 38 bp, Artificial Sequence
  primer
gtaaaacgacggccagtgcctttcctagttcatgctgg

SEQ ID NO: 64706 - DNA, 21 bp, Artificial Sequence
  primer
caatggagtagcagatcggtg

SEQ ID NO: 64707 - DNA, 35 bp, Artificial Sequence
  primer
gtaaaacgacggccagtctgtcccgcagaaagacg

SEQ ID NO: 64708 - DNA, 38 bp, Artificial Sequence
  primer
gtaaaacgacggccagtcttgtgtggctgcagagtcag

SEQ ID NO: 64709 - DNA, 20 bp, Artificial Sequence
  primer
gacgactcactcttcgtggc

SEQ ID NO: 64710 - DNA, 20 bp, Artificial Sequence
  primer
tcctacacaaagcactgccc

SEQ ID NO: 64711 - DNA, 37 bp, Artificial Sequence
  primer
gtaaaacgacggccagtctggcaaacactcgctcttc

SEQ ID NO: 64712 - DNA, 38 bp, Artificial Sequence
  primer
gtaaaacgacggccagttcggagagactctggatctgc

SEQ ID NO: 64713 - DNA, 38 bp, Artificial Sequence
  primer
gtaaaacgacggccagttgctacttggtgagtaacggc

SEQ ID NO: 64714 - DNA, 38 bp, Artificial Sequence
  primer
gtaaaacgacggccagtaggtttgtcgtctcccttgag

SEQ ID NO: 64715 - DNA, 38 bp, Artificial Sequence
  primer
gtaaaacgacggccagtaagagccctttccaagatgtc

SEQ ID NO: 64716 - DNA, 39 bp, Artificial Sequence
  primer
gtaaaacgacggccagtcacatcctctgtgatagcctcc

SEQ ID NO: 64717 - DNA, 20 bp, Artificial Sequence
  primer
gttgggtgtaaatgggcctc

SEQ ID NO: 64718 - DNA, 22 bp, Artificial Sequence
  primer
cccacttcagcctctagggtag

SEQ ID NO: 64719 - DNA, 39 bp, Artificial Sequence
  primer
gtaaaacgacggccagttttagcggctaggactttgttg

SEQ ID NO: 64720 - DNA, 38 bp, Artificial Sequence
  primer
gtaaaacgacggccagtgcctttgctcctctcattgtc

SEQ ID NO: 64721 - DNA, 38 bp, Artificial Sequence
  primer
gtaaaacgacggccagtgcagccagcttaattcaaagg

SEQ ID NO: 64722 - DNA, 21 bp, Artificial Sequence
  primer
ctacccactgctcctgtcctc

SEQ ID NO: 64723 - DNA, 22 bp, Artificial Sequence
  primer
aatagcctggagactttagggc

SEQ ID NO: 64724 - DNA, 21 bp, Artificial Sequence
  primer
actcagcctgtccttaaacgg

SEQ ID NO: 64725 - DNA, 38 bp, Artificial Sequence
  primer
gtaaaacgacggccagtctattcttcgagggtgggagg

SEQ ID NO: 64726 - DNA, 21 bp, Artificial Sequence
  primer
acacattgtcagcagcctacc

SEQ ID NO: 64727 - DNA, 38 bp, Artificial Sequence
  primer
gtaaaacgacggccagtgatgagaactccgggctaagg

SEQ ID NO: 64728 - DNA, 38 bp, Artificial Sequence
  primer
gtaaaacgacggccagtggaggtctctgggagttaggg

SEQ ID NO: 64729 - DNA, 38 bp, Artificial Sequence
  primer
gtaaaacgacggccagtggaggtgtgtgtgtcagaagc

SEQ ID NO: 64730 - DNA, 38 bp, Artificial Sequence
  primer
gtaaaacgacggccagtttcagcatccctgattccttc

SEQ ID NO: 64731 - DNA, 38 bp, Artificial Sequence
  primer
gtaaaacgacggccagtcaatccctgtctcctgattcc

SEQ ID NO: 64732 - DNA, 39 bp, Artificial Sequence
  primer
gtaaaacgacggccagttgaaactgcatgagaaggtgag

SEQ ID NO: 64733 - DNA, 37 bp, Artificial Sequence
  primer
gtaaaacgacggccagtctcctgcctattccctttgc

SEQ ID NO: 64734 - DNA, 20 bp, Artificial Sequence
  primer
gccaggtgtaggaaaggctc

SEQ ID NO: 64735 - DNA, 38 bp, Artificial Sequence
  primer
gtaaaacgacggccagttgtctctgtttccaccattcg

SEQ ID NO: 64736 - DNA, 38 bp, Artificial Sequence
  primer
gtaaaacgacggccagtgctctctccatttccaaggac

SEQ ID NO: 64737 - DNA, 38 bp, Artificial Sequence
  primer
gtaaaacgacggccagtatgtttcacgactgagcaagc

SEQ ID NO: 64738 - DNA, 21 bp, Artificial Sequence
  primer
ggacttctttcacacacaccc

SEQ ID NO: 64739 - DNA, 38 bp, Artificial Sequence
  primer
gtaaaacgacggccagttgatgctgctctgttctttgc

SEQ ID NO: 64740 - DNA, 38 bp, Artificial Sequence
  primer
gtaaaacgacggccagtgtggagagactggcagtaggg

SEQ ID NO: 64741 - DNA, 23 bp, Artificial Sequence
  primer
ttggttcaacctaagaaaggaaa

SEQ ID NO: 64742 - DNA, 22 bp, Artificial Sequence
  primer
agccaggtgaaagaaagtgttc

SEQ ID NO: 64743 - DNA, 37 bp, Artificial Sequence
  primer
gtaaaacgacggccagtggactgacaagaagggcagg

SEQ ID NO: 64744 - DNA, 22 bp, Artificial Sequence
  primer
agggaggaccagttgtgatatg

SEQ ID NO: 64745 - DNA, 21 bp, Artificial Sequence
  primer
ttgctaggaagcgatttcagg

SEQ ID NO: 64746 - DNA, 36 bp, Artificial Sequence
  primer
gtaaaacgacggccagtctgctcctcccacctcatc

SEQ ID NO: 64747 - DNA, 38 bp, Artificial Sequence
  primer
gtaaaacgacggccagtgggtaactgagaggagccttg

SEQ ID NO: 64748 - DNA, 37 bp, Artificial Sequence
  primer
gtaaaacgacggccagtctggttcgaggtcagaatgg

SEQ ID NO: 64749 - DNA, 39 bp, Artificial Sequence
  primer
gtaaaacgacggccagttcgttgtgaaaggtagagaccc

SEQ ID NO: 64750 - DNA, 38 bp, Artificial Sequence
  primer
gtaaaacgacggccagtaggcgtaaggagacaggtgag

SEQ ID NO: 64751 - DNA, 38 bp, Artificial Sequence
  primer
gtaaaacgacggccagtgtacacaccagggagagccag

SEQ ID NO: 64752 - DNA, 36 bp, Artificial Sequence
  primer
gtaaaacgacggccagtctggttcatgccttcctcc

SEQ ID NO: 64753 - DNA, 21 bp, Artificial Sequence
  primer
taagagaagcaggcaagaggg

SEQ ID NO: 64754 - DNA, 38 bp, Artificial Sequence
  primer
gtaaaacgacggccagttcttcctggaccctaggtttg

SEQ ID NO: 64755 - DNA, 38 bp, Artificial Sequence
  primer
gtaaaacgacggccagtgtgttcgctggtttacagacg

SEQ ID NO: 64756 - DNA, 21 bp, Artificial Sequence
  primer
cctagacctgctcagattccg

SEQ ID NO: 64757 - DNA, 19 bp, Artificial Sequence
  primer
ctgcagcgggacttctctc

SEQ ID NO: 64758 - DNA, 38 bp, Artificial Sequence
  primer
gtaaaacgacggccagtctgctcacagacacccatctc

SEQ ID NO: 64759 - DNA, 21 bp, Artificial Sequence
  primer
agagcctggagaaaggatgag

SEQ ID NO: 64760 - DNA, 37 bp, Artificial Sequence
  primer
gtaaaacgacggccagtcacctcaatgacccagatcc

SEQ ID NO: 64761 - DNA, 42 bp, Artificial Sequence
  primer
gtaaaacgacggccagttgaattcaaatgaatgacagtagga

SEQ ID NO: 64762 - DNA, 39 bp, Artificial Sequence
  primer
gtaaaacgacggccagtggatttgatactgtttgccacc

SEQ ID NO: 64763 - DNA, 23 bp, Artificial Sequence
  primer
tcagggagtacatacctcagaaa

SEQ ID NO: 64764 - DNA, 25 bp, Artificial Sequence
  primer
aaacatgttgaataacagaagcaaa

SEQ ID NO: 64765 - DNA, 38 bp, Artificial Sequence
  primer
gtaaaacgacggccagtaggcaacataatgagaccctg

SEQ ID NO: 64766 - DNA, 39 bp, Artificial Sequence
  primer
gtaaaacgacggccagtgggaccgataaagtaggaaagg

SEQ ID NO: 64767 - DNA, 22 bp, Artificial Sequence
  primer
tgaacaacgctggtaaagtttc

SEQ ID NO: 64768 - DNA, 27 bp, Artificial Sequence
  primer
tttcctgactctgagtttagaagaaac

SEQ ID NO: 64769 - DNA, 25 bp, Artificial Sequence
  primer
aaagtgtaaccgtgtaataggcact

SEQ ID NO: 64770 - DNA, 42 bp, Artificial Sequence
  primer
gtaaaacgacggccagtaagcctactcacaagctactcacag

SEQ ID NO: 64771 - DNA, 21 bp, Artificial Sequence
  primer
gctggtaccctcaatcattcc

SEQ ID NO: 64772 - DNA, 21 bp, Artificial Sequence
  primer
acttgagacatgccactggac

SEQ ID NO: 64773 - DNA, 39 bp, Artificial Sequence
  primer
gtaaaacgacggccagtaaccaaagcataagccagacac

SEQ ID NO: 64774 - DNA, 43 bp, Artificial Sequence
  primer
gtaaaacgacggccagttgcctcctagttattcattacatttg

SEQ ID NO: 64775 - DNA, 38 bp, Artificial Sequence
  primer
gtaaaacgacggccagtgccaggagcagaatgatattg

SEQ ID NO: 64776 - DNA, 18 bp, Artificial Sequence
  primer
ctgggcaacagagcaagg

SEQ ID NO: 64777 - DNA, 39 bp, Artificial Sequence
  primer
gtaaaacgacggccagtcagctgcgatatttctgatttg

SEQ ID NO: 64778 - DNA, 23 bp, Artificial Sequence
  primer
aagcaagatggtagtatggagca

SEQ ID NO: 64779 - DNA, 39 bp, Artificial Sequence
  primer
gtaaaacgacggccagtaaactgctttggaaaggtgtca

SEQ ID NO: 64780 - DNA, 21 bp, Artificial Sequence
  primer
gcctggcctttatctctgttt

SEQ ID NO: 64781 - DNA, 36 bp, Artificial Sequence
  primer
gtaaaacgacggccagtaacagcctcttgcccattg

SEQ ID NO: 64782 - DNA, 21 bp, Artificial Sequence
  primer
gctcaacgtagcatgaccttc

SEQ ID NO: 64783 - DNA, 22 bp, Artificial Sequence
  primer
tcctctctgcctccttatcttc

SEQ ID NO: 64784 - DNA, 38 bp, Artificial Sequence
  primer
gtaaaacgacggccagtatttgagcctgggtgacaaag

SEQ ID NO: 64785 - DNA, 39 bp, Artificial Sequence
  primer
gtaaaacgacggccagtgaggtggctagacattctcacg

SEQ ID NO: 64786 - DNA, 18 bp, Artificial Sequence
  primer
ccagaaggtggaggttgc

SEQ ID NO: 64787 - DNA, 22 bp, Artificial Sequence
  primer
ttcactagcagtgcagacaagc

SEQ ID NO: 64788 - DNA, 25 bp, Artificial Sequence
  primer
tcgtactggagatgagtaaggtagc

SEQ ID NO: 64789 - DNA, 20 bp, Artificial Sequence
  primer
aagccacatctgtccacacc

SEQ ID NO: 64790 - DNA, 38 bp, Artificial Sequence
  primer
gtaaaacgacggccagtaacgaccatggagcagaagag

SEQ ID NO: 64791 - DNA, 38 bp, Artificial Sequence
  primer
gtaaaacgacggccagtgccaggatctcaaggaagttg

SEQ ID NO: 64792 - DNA, 21 bp, Artificial Sequence
  primer
cccacacctgtccctagactg

SEQ ID NO: 64793 - DNA, 35 bp, Artificial Sequence
  primer
gtaaaacgacggccagtcagtcagtctccggcagc

SEQ ID NO: 64794 - DNA, 21 bp, Artificial Sequence
  primer
aaacctctgattgtgggatgc

SEQ ID NO: 64795 - DNA, 36 bp, Artificial Sequence
  primer
gtaaaacgacggccagtgctgggacgtcatgctttc

SEQ ID NO: 64796 - DNA, 21 bp, Artificial Sequence
  primer
gcccagccaagacactatttg

SEQ ID NO: 64797 - DNA, 36 bp, Artificial Sequence
  primer
gtaaaacgacggccagtagtgctgcttggcacattg

SEQ ID NO: 64798 - DNA, 37 bp, Artificial Sequence
  primer
gtaaaacgacggccagtgcaggacaagaattggaggg

SEQ ID NO: 64799 - DNA, 21 bp, Artificial Sequence
  primer
attcaaacacatgcagatggg

SEQ ID NO: 64800 - DNA, 38 bp, Artificial Sequence
  primer
gtaaaacgacggccagtggtttctttccagttggttgg

SEQ ID NO: 64801 - DNA, 21 bp, Artificial Sequence
  primer
tcaacacatggagaaacaggg

SEQ ID NO: 64802 - DNA, 39 bp, Artificial Sequence
  primer
gtaaaacgacggccagttgcatttgtaatgaaaccaagc

SEQ ID NO: 64803 - DNA, 43 bp, Artificial Sequence
  primer
gtaaaacgacggccagtcacaagtgacactgtcttcttacctg

SEQ ID NO: 64804 - DNA, 37 bp, Artificial Sequence
  primer
gtaaaacgacggccagtagctatgatggtgccactgc

SEQ ID NO: 64805 - DNA, 38 bp, Artificial Sequence
  primer
gtaaaacgacggccagtctaccgcagtttcaggtgatg

SEQ ID NO: 64806 - DNA, 22 bp, Artificial Sequence
  primer
tgctccaggacctatcagattc

SEQ ID NO: 64807 - DNA, 22 bp, Artificial Sequence
  primer
aaccaacacttggtacagagcc

SEQ ID NO: 64808 - DNA, 24 bp, Artificial Sequence
  primer
gggtagctgtttgctaatgatctc

SEQ ID NO: 64809 - DNA, 23 bp, Artificial Sequence
  primer
ttggttcctgtaacactctccac

SEQ ID NO: 64810 - DNA, 38 bp, Artificial Sequence
  primer
gtaaaacgacggccagttagtcccggaagatgaagagg

SEQ ID NO: 64811 - DNA, 22 bp, Artificial Sequence
  primer
gcaattgtctggtatagggtgc

SEQ ID NO: 64812 - DNA, 38 bp, Artificial Sequence
  primer
gtaaaacgacggccagtcattcgagtggtgtctggaaa

SEQ ID NO: 64813 - DNA, 41 bp, Artificial Sequence
  primer
gtaaaacgacggccagtagccctatagcaatacatacctgg

SEQ ID NO: 64814 - DNA, 21 bp, Artificial Sequence
  primer
cccttctagcccaatccagag

SEQ ID NO: 64815 - DNA, 38 bp, Artificial Sequence
  primer
gtaaaacgacggccagtgtttcttggcacctgagaagg

SEQ ID NO: 64816 - DNA, 21 bp, Artificial Sequence
  primer
cctgctagcctaatccaccac

SEQ ID NO: 64817 - DNA, 21 bp, Artificial Sequence
  primer
gagaaggaggtgagagccaag

SEQ ID NO: 64818 - DNA, 38 bp, Artificial Sequence
  primer
gtaaaacgacggccagttttcatgaggaacgattccag

SEQ ID NO: 64819 - DNA, 20 bp, Artificial Sequence
  primer
ctcttagaccatggcgaccc

SEQ ID NO: 64820 - DNA, 36 bp, Artificial Sequence
  primer
gtaaaacgacggccagtctggagctgagtcccaagg

SEQ ID NO: 64821 - DNA, 37 bp, Artificial Sequence
  primer
gtaaaacgacggccagtagagctgttgttcgtggtgc

SEQ ID NO: 64822 - DNA, 20 bp, Artificial Sequence
  primer
cctgctgcaagaagtttccc

SEQ ID NO: 64823 - DNA, 37 bp, Artificial Sequence
  primer
gtaaaacgacggccagtgcctataggtcagtgggtgg

SEQ ID NO: 64824 - DNA, 38 bp, Artificial Sequence
  primer
gtaaaacgacggccagttcatggctgaactacacctgc

SEQ ID NO: 64825 - DNA, 38 bp, Artificial Sequence
  primer
gtaaaacgacggccagttttgtagactgggtggcagac

SEQ ID NO: 64826 - DNA, 21 bp, Artificial Sequence
  primer
gatgagagaggaaatgtggga

SEQ ID NO: 64827 - DNA, 39 bp, Artificial Sequence
  primer
gtaaaacgacggccagtaaattctgaagcatgcgaagtc

SEQ ID NO: 64828 - DNA, 40 bp, Artificial Sequence
  primer
gtaaaacgacggccagtttgaaagcagtcgttaatcaagc

SEQ ID NO: 64829 - DNA, 21 bp, Artificial Sequence
  primer
gggaagtatggtagcacccag

SEQ ID NO: 64830 - DNA, 21 bp, Artificial Sequence
  primer
gcttgtcacactttgcgtttc

SEQ ID NO: 64831 - DNA, 44 bp, Artificial Sequence
  primer
gtaaaacgacggccagtaaagaaagcaaatgaatcaagtattta

SEQ ID NO: 64832 - DNA, 22 bp, Artificial Sequence
  primer
gatttactggcagtttggcttc

SEQ ID NO: 64833 - DNA, 38 bp, Artificial Sequence
  primer
gtaaaacgacggccagtgaaatgacgcctgtaatgctg

SEQ ID NO: 64834 - DNA, 37 bp, Artificial Sequence
  primer
gtaaaacgacggccagtctggagccctaacttctgcc

SEQ ID NO: 64835 - DNA, 38 bp, Artificial Sequence
  primer
gtaaaacgacggccagttgcaagactttgcttctctgc

SEQ ID NO: 64836 - DNA, 43 bp, Artificial Sequence
  primer
gtaaaacgacggccagtaaattgtagggaaactccattgtaac

SEQ ID NO: 64837 - DNA, 23 bp, Artificial Sequence
  primer
ttccttaaatggagaggaccttg

SEQ ID NO: 64838 - DNA, 36 bp, Artificial Sequence
  primer
gtaaaacgacggccagtgactagcccttgtcgctgc

SEQ ID NO: 64839 - DNA, 38 bp, Artificial Sequence
  primer
gtaaaacgacggccagtggagagggcagattctggtag

SEQ ID NO: 64840 - DNA, 38 bp, Artificial Sequence
  primer
gtaaaacgacggccagtttcatggtcatccctggtagg

SEQ ID NO: 64841 - DNA, 38 bp, Artificial Sequence
  primer
gtaaaacgacggccagtcccttccctgtatcagcattc

SEQ ID NO: 64842 - DNA, 38 bp, Artificial Sequence
  primer
gtaaaacgacggccagtccgatccactctcactcttcc

SEQ ID NO: 64843 - DNA, 35 bp, Artificial Sequence
  primer
gtaaaacgacggccagtaatcgaccggagacagcc

SEQ ID NO: 64844 - DNA, 22 bp, Artificial Sequence
  primer
gaagaggagggaggtcctagag

SEQ ID NO: 64845 - DNA, 21 bp, Artificial Sequence
  primer
acttccttaggtgggtgtgaa

SEQ ID NO: 64846 - DNA, 38 bp, Artificial Sequence
  primer
gtaaaacgacggccagtctctttcccaacctgtgcttt

SEQ ID NO: 64847 - DNA, 38 bp, Artificial Sequence
  primer
gtaaaacgacggccagtagttcctttctgcggaatttg

SEQ ID NO: 64848 - DNA, 21 bp, Artificial Sequence
  primer
gggcgtagatgaagatgatcc

SEQ ID NO: 64849 - DNA, 21 bp, Artificial Sequence
  primer
ctccaaactggaggtttcctg

SEQ ID NO: 64850 - DNA, 20 bp, Artificial Sequence
  primer
ggcctaggcaatagagggag

SEQ ID NO: 64851 - DNA, 38 bp, Artificial Sequence
  primer
gtaaaacgacggccagttgcctcctgtagtctcaccac

SEQ ID NO: 64852 - DNA, 44 bp, Artificial Sequence
  primer
gtaaaacgacggccagtaatcattaaagtttgcaggtaataagc

SEQ ID NO: 64853 - DNA, 22 bp, Artificial Sequence
  primer
cccaggactaatcatgaaggac

SEQ ID NO: 64854 - DNA, 40 bp, Artificial Sequence
  primer
gtaaaacgacggccagttcccttgaacctaactccaaatc

SEQ ID NO: 64855 - DNA, 42 bp, Artificial Sequence
  primer
gtaaaacgacggccagtgagcagaaagctatggaattctaac

SEQ ID NO: 64856 - DNA, 26 bp, Artificial Sequence
  primer
tttaattcccagcactaccttatttg

SEQ ID NO: 64857 - DNA, 23 bp, Artificial Sequence
  primer
ttgtatcagacagaagggactcg

SEQ ID NO: 64858 - DNA, 18 bp, Artificial Sequence
  primer
ggcaacacagcgagatcc

SEQ ID NO: 64859 - DNA, 20 bp, Artificial Sequence
  primer
actgtgggcatgatttggtc

SEQ ID NO: 64860 - DNA, 19 bp, Artificial Sequence
  primer
tgctaatcatcgcctgagc

SEQ ID NO: 64861 - DNA, 24 bp, Artificial Sequence
  primer
tcagcaactctttaggttgtcatt

SEQ ID NO: 64862 - DNA, 26 bp, Artificial Sequence
  primer
ctcttctcaagctaatcttgtttcac

SEQ ID NO: 64863 - DNA, 23 bp, Artificial Sequence
  primer
ggagcagactacctctgaagtcc

SEQ ID NO: 64864 - DNA, 22 bp, Artificial Sequence
  primer
cggctgaagcatcatttcttac

SEQ ID NO: 64865 - DNA, 38 bp, Artificial Sequence
  primer
gtaaaacgacggccagtccaggaacctaaacgggtatg

SEQ ID NO: 64866 - DNA, 39 bp, Artificial Sequence
  primer
gtaaaacgacggccagtcctgcagagtgtgtgttctttg

SEQ ID NO: 64867 - DNA, 42 bp, Artificial Sequence
  primer
gtaaaacgacggccagtgtatttgttggagaatacactgtgc

SEQ ID NO: 64868 - DNA, 41 bp, Artificial Sequence
  primer
gtaaaacgacggccagttgacttagttcagggtgagaaagc

SEQ ID NO: 64869 - DNA, 38 bp, Artificial Sequence
  primer
gtaaaacgacggccagtagaacagtcccttggttgctc

SEQ ID NO: 64870 - DNA, 21 bp, Artificial Sequence
  primer
cttaggtgatcccactggctc

SEQ ID NO: 64871 - DNA, 37 bp, Artificial Sequence
  primer
gtaaaacgacggccagtgaggttcccagatttggagg

SEQ ID NO: 64872 - DNA, 39 bp, Artificial Sequence
  primer
gtaaaacgacggccagtccagcctaggtgacagtgagac

SEQ ID NO: 64873 - DNA, 21 bp, Artificial Sequence
  primer
tgacagactgagaccctgtcc

SEQ ID NO: 64874 - DNA, 38 bp, Artificial Sequence
  primer
gtaaaacgacggccagtttggataagctggaggagctg

SEQ ID NO: 64875 - DNA, 21 bp, Artificial Sequence
  primer
agggagcttcaagcagagagg

SEQ ID NO: 64876 - DNA, 39 bp, Artificial Sequence
  primer
gtaaaacgacggccagttgagggtgaggagtctgtaagc

SEQ ID NO: 64877 - DNA, 21 bp, Artificial Sequence
  primer
taagcattacctcctggtgcc

SEQ ID NO: 64878 - DNA, 38 bp, Artificial Sequence
  primer
gtaaaacgacggccagttaagttcagggacttcggagg

SEQ ID NO: 64879 - DNA, 38 bp, Artificial Sequence
  primer
gtaaaacgacggccagtaattagcccttctcctcctgg

SEQ ID NO: 64880 - DNA, 41 bp, Artificial Sequence
  primer
gtaaaacgacggccagtcaaggtgactcagctagtcctgtc

SEQ ID NO: 64881 - DNA, 38 bp, Artificial Sequence
  primer
gtaaaacgacggccagtatgcatttctggcccaataac

SEQ ID NO: 64882 - DNA, 38 bp, Artificial Sequence
  primer
gtaaaacgacggccagttgaataccgttgtgagggttc

SEQ ID NO: 64883 - DNA, 38 bp, Artificial Sequence
  primer
gtaaaacgacggccagtaatgccaaacacacacctgac

SEQ ID NO: 64884 - DNA, 21 bp, Artificial Sequence
  primer
agtgagccaagactgctcctc

SEQ ID NO: 64885 - DNA, 18 bp, Artificial Sequence
  primer
gttcggcaagtgggtcag

SEQ ID NO: 64886 - DNA, 21 bp, Artificial Sequence
  primer
aagaagaatgaccagcccaag

SEQ ID NO: 64887 - DNA, 38 bp, Artificial Sequence
  primer
gtaaaacgacggccagtcatgcatcaaatgcagatcac

SEQ ID NO: 64888 - DNA, 41 bp, Artificial Sequence
  primer
gtaaaacgacggccagtatgaaactgaaattcatgatggac

SEQ ID NO: 64889 - DNA, 22 bp, Artificial Sequence
  primer
gccaaataccatttcttccttg

SEQ ID NO: 64890 - DNA, 38 bp, Artificial Sequence
  primer
gtaaaacgacggccagttcactggttgtttcacacacg

SEQ ID NO: 64891 - DNA, 22 bp, Artificial Sequence
  primer
ggtctgttctggtcctaaaggc

SEQ ID NO: 64892 - DNA, 38 bp, Artificial Sequence
  primer
gtaaaacgacggccagtgctgctggaatacaacattgg

SEQ ID NO: 64893 - DNA, 38 bp, Artificial Sequence
  primer
gtaaaacgacggccagtcaagaagaacttcctggaggg

SEQ ID NO: 64894 - DNA, 27 bp, Artificial Sequence
  primer
ttccaaacttaagctagaagttcacag

SEQ ID NO: 64895 - DNA, 23 bp, Artificial Sequence
  primer
ctcagatttgagccacttctctc

SEQ ID NO: 64896 - DNA, 38 bp, Artificial Sequence
  primer
gtaaaacgacggccagttgcatttgcttagtcccagtg

SEQ ID NO: 64897 - DNA, 38 bp, Artificial Sequence
  primer
gtaaaacgacggccagtcgagtaggaatgactctgggc

SEQ ID NO: 64898 - DNA, 22 bp, Artificial Sequence
  primer
aagatcagtaggagccaggaag

SEQ ID NO: 64899 - DNA, 40 bp, Artificial Sequence
  primer
gtaaaacgacggccagtgggtatcacttggatctcgttag

SEQ ID NO: 64900 - DNA, 21 bp, Artificial Sequence
  primer
accatggaaagaggactttgg

SEQ ID NO: 64901 - DNA, 40 bp, Artificial Sequence
  primer
gtaaaacgacggccagtttgaaagggatcaaagtgtatgg

SEQ ID NO: 64902 - DNA, 41 bp, Artificial Sequence
  primer
gtaaaacgacggccagtcattctagcatgggacataccttc

SEQ ID NO: 64903 - DNA, 40 bp, Artificial Sequence
  primer
gtaaaacgacggccagttttagtttgctggaaaccatgtc

SEQ ID NO: 64904 - DNA, 21 bp, Artificial Sequence
  primer
catgaaattctccatgccttg

SEQ ID NO: 64905 - DNA, 21 bp, Artificial Sequence
  primer
aagcgtctgtttgatggtgtg

SEQ ID NO: 64906 - DNA, 23 bp, Artificial Sequence
  primer
aaagcacccagtaacctagaacc

SEQ ID NO: 64907 - DNA, 38 bp, Artificial Sequence
  primer
gtaaaacgacggccagtaagccaaagaccatacttccc

SEQ ID NO: 64908 - DNA, 21 bp, Artificial Sequence
  primer
tgacagcctggacctagacac

SEQ ID NO: 64909 - DNA, 38 bp, Artificial Sequence
  primer
gtaaaacgacggccagttttccgaattgaagcatgttg

SEQ ID NO: 64910 - DNA, 20 bp, Artificial Sequence
  primer
gaatggcaaatgtgtgcctc

SEQ ID NO: 64911 - DNA, 38 bp, Artificial Sequence
  primer
gtaaaacgacggccagtcccagcatgtctctctgtgac

SEQ ID NO: 64912 - DNA, 38 bp, Artificial Sequence
  primer
gtaaaacgacggccagttgaaaccaaagagccaactcc

SEQ ID NO: 64913 - DNA, 21 bp, Artificial Sequence
  primer
ctgagccaagtgggagttacc

SEQ ID NO: 64914 - DNA, 21 bp, Artificial Sequence
  primer
ccttcagtcagagctcatccc

SEQ ID NO: 64915 - DNA, 21 bp, Artificial Sequence
  primer
aactcacaccggagagaaacc

SEQ ID NO: 64916 - DNA, 21 bp, Artificial Sequence
  primer
caaatgcgggaaatcctttag

SEQ ID NO: 64917 - DNA, 21 bp, Artificial Sequence
  primer
tgaatgtggaaaggcattcag

SEQ ID NO: 64918 - DNA, 38 bp, Artificial Sequence
  primer
gtaaaacgacggccagtctttctcctttagggtgctgg

SEQ ID NO: 64919 - DNA, 39 bp, Artificial Sequence
  primer
gtaaaacgacggccagtttgcatgtccaatagactctgg

SEQ ID NO: 64920 - DNA, 36 bp, Artificial Sequence
  primer
gtaaaacgacggccagtccaacagccctctccactg

SEQ ID NO: 64921 - DNA, 38 bp, Artificial Sequence
  primer
gtaaaacgacggccagttccactggtaggtgctatccc

SEQ ID NO: 64922 - DNA, 35 bp, Artificial Sequence
  primer
gtaaaacgacggccagtcatctcccgcagcctttg

SEQ ID NO: 64923 - DNA, 21 bp, Artificial Sequence
  primer
acagccctttagagatcggtg

SEQ ID NO: 64924 - DNA, 38 bp, Artificial Sequence
  primer
gtaaaacgacggccagtgcctgagggtttgtctttcac

SEQ ID NO: 64925 - DNA, 38 bp, Artificial Sequence
  primer
gtaaaacgacggccagttgtgagtagtgctggtggagg

SEQ ID NO: 64926 - DNA, 38 bp, Artificial Sequence
  primer
gtaaaacgacggccagtctgtttccaaagcaccctagc

SEQ ID NO: 64927 - DNA, 38 bp, Artificial Sequence
  primer
gtaaaacgacggccagttcctggtggctaattcaaagc

SEQ ID NO: 64928 - DNA, 21 bp, Artificial Sequence
  primer
catcatctctggcctggtaag

SEQ ID NO: 64929 - DNA, 38 bp, Artificial Sequence
  primer
gtaaaacgacggccagtagctgtcctacagatgcaccc

SEQ ID NO: 64930 - DNA, 38 bp, Artificial Sequence
  primer
gtaaaacgacggccagtcctggtgatcttcatcccttc

SEQ ID NO: 64931 - DNA, 21 bp, Artificial Sequence
  primer
ccatgatgagtttctggcctc

SEQ ID NO: 64932 - DNA, 38 bp, Artificial Sequence
  primer
gtaaaacgacggccagtagctatgctggagagtttggg

SEQ ID NO: 64933 - DNA, 38 bp, Artificial Sequence
  primer
gtaaaacgacggccagtcgctcagtaaatgtttgcagc

SEQ ID NO: 64934 - DNA, 38 bp, Artificial Sequence
  primer
gtaaaacgacggccagtgacatgtgatccctaggctgc

SEQ ID NO: 64935 - DNA, 37 bp, Artificial Sequence
  primer
gtaaaacgacggccagtgagtgacagggcatagctcg

SEQ ID NO: 64936 - DNA, 37 bp, Artificial Sequence
  primer
gtaaaacgacggccagtcattgtcatccttgggcttg

SEQ ID NO: 64937 - DNA, 38 bp, Artificial Sequence
  primer
gtaaaacgacggccagtcttcctccacagaatggcttc

SEQ ID NO: 64938 - DNA, 39 bp, Artificial Sequence
  primer
gtaaaacgacggccagtcacggaatctgactcaatgacc

SEQ ID NO: 64939 - DNA, 22 bp, Artificial Sequence
  primer
ggcaacagagtgagaccctttc

SEQ ID NO: 64940 - DNA, 20 bp, Artificial Sequence
  primer
cacttgaacttgggaggcag

SEQ ID NO: 64941 - DNA, 38 bp, Artificial Sequence
  primer
gtaaaacgacggccagttgcagtgttcctagcatgttg

SEQ ID NO: 64942 - DNA, 20 bp, Artificial Sequence
  primer
atccagcaggacagcacttc

SEQ ID NO: 64943 - DNA, 21 bp, Artificial Sequence
  primer
gcgatcaccttcagaaagagg

SEQ ID NO: 64944 - DNA, 20 bp, Artificial Sequence
  primer
gtgatggcaccgctgtactc

SEQ ID NO: 64945 - DNA, 38 bp, Artificial Sequence
  primer
gtaaaacgacggccagtcaacctgtcacacacatcctg

SEQ ID NO: 64946 - DNA, 18 bp, Artificial Sequence
  primer
ctctggcctgcttagggc

SEQ ID NO: 64947 - DNA, 21 bp, Artificial Sequence
  primer
acccacctcctacctggtttc

SEQ ID NO: 64948 - DNA, 38 bp, Artificial Sequence
  primer
gtaaaacgacggccagtcctgaattcatgctcacccac

SEQ ID NO: 64949 - DNA, 37 bp, Artificial Sequence
  primer
gtaaaacgacggccagtgctcctacaacacctgctgc

SEQ ID NO: 64950 - DNA, 20 bp, Artificial Sequence
  primer
ctagggcaccttcagctcag

SEQ ID NO: 64951 - DNA, 38 bp, Artificial Sequence
  primer
gtaaaacgacggccagtgtctgtgtgcagtgctgatcc

SEQ ID NO: 64952 - DNA, 36 bp, Artificial Sequence
  primer
gtaaaacgacggccagtgggcttcctgttgttggtg

SEQ ID NO: 64953 - DNA, 21 bp, Artificial Sequence
  primer
tttaattggccggagtttagg

SEQ ID NO: 64954 - DNA, 38 bp, Artificial Sequence
  primer
gtaaaacgacggccagtatggaccagtgctactccctg

SEQ ID NO: 64955 - DNA, 37 bp, Artificial Sequence
  primer
gtaaaacgacggccagtctagcccgccttcaggtaag

SEQ ID NO: 64956 - DNA, 39 bp, Artificial Sequence
  primer
gtaaaacgacggccagtcacctgtaaattcatctgcctg

SEQ ID NO: 64957 - DNA, 20 bp, Artificial Sequence
  primer
cctttaaccctggagatggc

SEQ ID NO: 64958 - DNA, 44 bp, Artificial Sequence
  primer
gtaaaacgacggccagtacattcctaagaagacctaatttcacc

SEQ ID NO: 64959 - DNA, 21 bp, Artificial Sequence
  primer
gtaagtttggaggcacaaggc

SEQ ID NO: 64960 - DNA, 21 bp, Artificial Sequence
  primer
tcccagtgacactcttgatgg

SEQ ID NO: 64961 - DNA, 20 bp, Artificial Sequence
  primer
gaggaaagtagccgtggagg

SEQ ID NO: 64962 - DNA, 38 bp, Artificial Sequence
  primer
gtaaaacgacggccagtcttcgcccaagtttctgagtc

SEQ ID NO: 64963 - DNA, 21 bp, Artificial Sequence
  primer
ttggatgatgatgctttcacg

SEQ ID NO: 64964 - DNA, 39 bp, Artificial Sequence
  primer
gtaaaacgacggccagtgaactgagtcctaaacgcatgg

SEQ ID NO: 64965 - DNA, 21 bp, Artificial Sequence
  primer
ctttaaatacggttgcgcctg

SEQ ID NO: 64966 - DNA, 38 bp, Artificial Sequence
  primer
gtaaaacgacggccagtttgatgagtgggtaatgcagg

SEQ ID NO: 64967 - DNA, 20 bp, Artificial Sequence
  primer
ccagcctgggtgataaagtg

SEQ ID NO: 64968 - DNA, 39 bp, Artificial Sequence
  primer
gtaaaacgacggccagtccttgcattaggtaaatgctca

SEQ ID NO: 64969 - DNA, 18 bp, Artificial Sequence
  primer
cctgggaggcagagttgc

SEQ ID NO: 64970 - DNA, 38 bp, Artificial Sequence
  primer
gtaaaacgacggccagtcagttcaacaatgcggagaag

SEQ ID NO: 64971 - DNA, 38 bp, Artificial Sequence
  primer
gtaaaacgacggccagttccctggtcacctcctaagac

SEQ ID NO: 64972 - DNA, 39 bp, Artificial Sequence
  primer
gtaaaacgacggccagtcggtcattgctttaattgtttg

SEQ ID NO: 64973 - DNA, 22 bp, Artificial Sequence
  primer
gccaacagacctctaaggctac

SEQ ID NO: 64974 - DNA, 27 bp, Artificial Sequence
  primer
tttccttctaggtatattgaaacttgc

SEQ ID NO: 64975 - DNA, 25 bp, Artificial Sequence
  primer
gacactgaagggtgtttaaataggg

SEQ ID NO: 64976 - DNA, 40 bp, Artificial Sequence
  primer
gtaaaacgacggccagtggctttcgataaatggtaactgc

SEQ ID NO: 64977 - DNA, 38 bp, Artificial Sequence
  primer
gtaaaacgacggccagtggtggtgagtggtggttcttc

SEQ ID NO: 64978 - DNA, 21 bp, Artificial Sequence
  primer
tgttggcctcaccagtatctc

SEQ ID NO: 64979 - DNA, 38 bp, Artificial Sequence
  primer
gtaaaacgacggccagttagggactagctcccagggtc

SEQ ID NO: 64980 - DNA, 20 bp, Artificial Sequence
  primer
tgaattgaactggcagagcc

SEQ ID NO: 64981 - DNA, 38 bp, Artificial Sequence
  primer
gtaaaacgacggccagttgtgccaatagctgctttacc

SEQ ID NO: 64982 - DNA, 20 bp, Artificial Sequence
  primer
gccaggtggttggtgtattg

SEQ ID NO: 64983 - DNA, 38 bp, Artificial Sequence
  primer
gtaaaacgacggccagtaggcagatattggagaggcag

SEQ ID NO: 64984 - DNA, 20 bp, Artificial Sequence
  primer
gtctgaaacagggccattcc

SEQ ID NO: 64985 - DNA, 40 bp, Artificial Sequence
  primer
gtaaaacgacggccagttgatgaaccagaagtgttcttcc

SEQ ID NO: 64986 - DNA, 22 bp, Artificial Sequence
  primer
gcaagctcgaatatgaaacagc

SEQ ID NO: 64987 - DNA, 39 bp, Artificial Sequence
  primer
gtaaaacgacggccagtgatgtgccagattgaagacctc

SEQ ID NO: 64988 - DNA, 21 bp, Artificial Sequence
  primer
catttcagcccataacctgtg

SEQ ID NO: 64989 - DNA, 38 bp, Artificial Sequence
  primer
gtaaaacgacggccagtagcactcaaaggtggtgtttg

SEQ ID NO: 64990 - DNA, 38 bp, Artificial Sequence
  primer
gtaaaacgacggccagttgggccttagatgaaatcagg

SEQ ID NO: 64991 - DNA, 38 bp, Artificial Sequence
  primer
gtaaaacgacggccagtacccttccacacgtaatgacc

SEQ ID NO: 64992 - DNA, 38 bp, Artificial Sequence
  primer
gtaaaacgacggccagtagggtgtgaggtcagttcctg

SEQ ID NO: 64993 - DNA, 20 bp, Artificial Sequence
  primer
ttacagatcctgggctggtg

SEQ ID NO: 64994 - DNA, 20 bp, Artificial Sequence
  primer
aaatccagcggctattcctg

SEQ ID NO: 64995 - DNA, 21 bp, Artificial Sequence
  primer
caaactgagaattcaggcagc

SEQ ID NO: 64996 - DNA, 21 bp, Artificial Sequence
  primer
aagtgattgcctcctttgacc

SEQ ID NO: 64997 - DNA, 39 bp, Artificial Sequence
  primer
gtaaaacgacggccagtgagcaaattataggtctggccc

SEQ ID NO: 64998 - DNA, 38 bp, Artificial Sequence
  primer
gtaaaacgacggccagtagcagcagatcctagggaaag

SEQ ID NO: 64999 - DNA, 37 bp, Artificial Sequence
  primer
gtaaaacgacggccagtaagccagcaggtcagtgaag

SEQ ID NO: 65000 - DNA, 38 bp, Artificial Sequence
  primer
gtaaaacgacggccagtgaaaccctgatcctttggaag

SEQ ID NO: 65001 - DNA, 21 bp, Artificial Sequence
  primer
gtgtccctgccagatataccc

SEQ ID NO: 65002 - DNA, 20 bp, Artificial Sequence
  primer
taaatgctggatccgtttgc

SEQ ID NO: 65003 - DNA, 35 bp, Artificial Sequence
  primer
gtaaaacgacggccagtcacttcccattggccgag

SEQ ID NO: 65004 - DNA, 38 bp, Artificial Sequence
  primer
gtaaaacgacggccagttgaaactggtccatttgcttc

SEQ ID NO: 65005 - DNA, 38 bp, Artificial Sequence
  primer
gtaaaacgacggccagtataccgatccaccttcacacc

SEQ ID NO: 65006 - DNA, 21 bp, Artificial Sequence
  primer
caactctcccacttcagcctc

SEQ ID NO: 65007 - DNA, 22 bp, Artificial Sequence
  primer
tctgattcacgggatatatggg

SEQ ID NO: 65008 - DNA, 20 bp, Artificial Sequence
  primer
gtctgtttgctctgcatccc

SEQ ID NO: 65009 - DNA, 37 bp, Artificial Sequence
  primer
gtaaaacgacggccagtgaaaggctgagactgcaggg

SEQ ID NO: 65010 - DNA, 37 bp, Artificial Sequence
  primer
gtaaaacgacggccagtaggtgcatctaggagggagg

SEQ ID NO: 65011 - DNA, 38 bp, Artificial Sequence
  primer
gtaaaacgacggccagtacatttctgagcatgaggacg

SEQ ID NO: 65012 - DNA, 21 bp, Artificial Sequence
  primer
tgcttattgcaccttgacgac

SEQ ID NO: 65013 - DNA, 22 bp, Artificial Sequence
  primer
gaccagaaataaggactgcctg

SEQ ID NO: 65014 - DNA, 26 bp, Artificial Sequence
  primer
gccattatatttgttaatatgcaacc

SEQ ID NO: 65015 - DNA, 20 bp, Artificial Sequence
  primer
ccctggcaacatagcaagac

SEQ ID NO: 65016 - DNA, 43 bp, Artificial Sequence
  primer
gtaaaacgacggccagttcctatttgttacccaagaactgtta

SEQ ID NO: 65017 - DNA, 21 bp, Artificial Sequence
  primer
catctcattcattgccgtttc

SEQ ID NO: 65018 - DNA, 21 bp, Artificial Sequence
  primer
agaccaagttcccaacctgtg

SEQ ID NO: 65019 - DNA, 22 bp, Artificial Sequence
  primer
ccaactgaggtgtctgttctgg

SEQ ID NO: 65020 - DNA, 19 bp, Artificial Sequence
  primer
ccactcccagccagaacag

SEQ ID NO: 65021 - DNA, 22 bp, Artificial Sequence
  primer
cccaaaggtaaccacttaacca

SEQ ID NO: 65022 - DNA, 21 bp, Artificial Sequence
  primer
tgagaacagtgcaggagttgg

SEQ ID NO: 65023 - DNA, 18 bp, Artificial Sequence
  primer
ctgggcaacaagagcgaa

SEQ ID NO: 65024 - DNA, 20 bp, Artificial Sequence
  primer
tccaaagagaggtgccattg

SEQ ID NO: 65025 - DNA, 24 bp, Artificial Sequence
  primer
tggtttacatgtagtaggcatgtg

SEQ ID NO: 65026 - DNA, 21 bp, Artificial Sequence
  primer
gacccacttggcttccagtag

SEQ ID NO: 65027 - DNA, 40 bp, Artificial Sequence
  primer
gtaaaacgacggccagttggctgtcttctgtccatgtatc

SEQ ID NO: 65028 - DNA, 27 bp, Artificial Sequence
  primer
ttgttataagtgaaggtggtaaattgg

SEQ ID NO: 65029 - DNA, 22 bp, Artificial Sequence
  primer
tgctttgtaaggctgtaggtcc

SEQ ID NO: 65030 - DNA, 35 bp, Artificial Sequence
  primer
gtaaaacgacggccagtctgggtcgttcaagggtc

SEQ ID NO: 65031 - DNA, 40 bp, Artificial Sequence
  primer
gtaaaacgacggccagtttaattaactgaaagcaggtggg

SEQ ID NO: 65032 - DNA, 21 bp, Artificial Sequence
  primer
ggacagttgcctgattgtcac

SEQ ID NO: 65033 - DNA, 22 bp, Artificial Sequence
  primer
tgcagtatgtggcgtttgatac

SEQ ID NO: 65034 - DNA, 23 bp, Artificial Sequence
  primer
actgttggtgaatatccttgcag

SEQ ID NO: 65035 - DNA, 21 bp, Artificial Sequence
  primer
tccctcctcaccaaatgattc

SEQ ID NO: 65036 - DNA, 44 bp, Artificial Sequence
  primer
gtaaaacgacggccagttgttcttactatagctcacctgtttcc

SEQ ID NO: 65037 - DNA, 41 bp, Artificial Sequence
  primer
gtaaaacgacggccagtaagcaagcagtaactgaactctcc

SEQ ID NO: 65038 - DNA, 38 bp, Artificial Sequence
  primer
gtaaaacgacggccagtcgacctacctgggataagtgc

SEQ ID NO: 65039 - DNA, 42 bp, Artificial Sequence
  primer
gtaaaacgacggccagtaaatttgcaagagcataatctgttt

SEQ ID NO: 65040 - DNA, 23 bp, Artificial Sequence
  primer
ttggcctcccaaagtagttattc

SEQ ID NO: 65041 - DNA, 22 bp, Artificial Sequence
  primer
aaatctcttcatttgggcattt

SEQ ID NO: 65042 - DNA, 39 bp, Artificial Sequence
  primer
gtaaaacgacggccagtgaaagaaccattgttggattgc

SEQ ID NO: 65043 - DNA, 35 bp, Artificial Sequence
  primer
gtaaaacgacggccagtgatacacggtgtcccgcc

SEQ ID NO: 65044 - DNA, 38 bp, Artificial Sequence
  primer
gtaaaacgacggccagttcctcctagtttggcaagtgg

SEQ ID NO: 65045 - DNA, 21 bp, Artificial Sequence
  primer
tcctcctaccctcacttcctg

SEQ ID NO: 65046 - DNA, 37 bp, Artificial Sequence
  primer
gtaaaacgacggccagtcctccaggaaggtatgctcc

SEQ ID NO: 65047 - DNA, 38 bp, Artificial Sequence
  primer
gtaaaacgacggccagtgagttgggcccaggagtaaac

SEQ ID NO: 65048 - DNA, 20 bp, Artificial Sequence
  primer
caaatgatccacccaccttg

SEQ ID NO: 65049 - DNA, 20 bp, Artificial Sequence
  primer
cgaagcccgaggtgataaag

SEQ ID NO: 65050 - DNA, 37 bp, Artificial Sequence
  primer
gtaaaacgacggccagttcttcaaagggctcaacgtg

SEQ ID NO: 65051 - DNA, 21 bp, Artificial Sequence
  primer
ctagcgctgcagagacacaag

SEQ ID NO: 65052 - DNA, 38 bp, Artificial Sequence
  primer
gtaaaacgacggccagtccctggttcttgatccatttc

SEQ ID NO: 65053 - DNA, 39 bp, Artificial Sequence
  primer
gtaaaacgacggccagtgatgtactgttactccagggcg

SEQ ID NO: 65054 - DNA, 21 bp, Artificial Sequence
  primer
gtgaagccactgcttggtagg

SEQ ID NO: 65055 - DNA, 38 bp, Artificial Sequence
  primer
gtaaaacgacggccagtgtagccaggctgttgtaagcc

SEQ ID NO: 65056 - DNA, 21 bp, Artificial Sequence
  primer
gaaacaagggaggagggaaac

SEQ ID NO: 65057 - DNA, 38 bp, Artificial Sequence
  primer
gtaaaacgacggccagtccatacacggctggtatgaag

SEQ ID NO: 65058 - DNA, 37 bp, Artificial Sequence
  primer
gtaaaacgacggccagtccaacttgttcctcttgccc

SEQ ID NO: 65059 - DNA, 20 bp, Artificial Sequence
  primer
aatgggcatgatcaggtttg

SEQ ID NO: 65060 - DNA, 22 bp, Artificial Sequence
  primer
ccacacctgtcgtccttatctc

SEQ ID NO: 65061 - DNA, 38 bp, Artificial Sequence
  primer
gtaaaacgacggccagtccctgtggaaagaaagtgtcc

SEQ ID NO: 65062 - DNA, 21 bp, Artificial Sequence
  primer
aggaatcagggctaacacacc

SEQ ID NO: 65063 - DNA, 21 bp, Artificial Sequence
  primer
atctcagcagtgaagggatgg

SEQ ID NO: 65064 - DNA, 21 bp, Artificial Sequence
  primer
ttctgaggcactgtagccaag

SEQ ID NO: 65065 - DNA, 38 bp, Artificial Sequence
  primer
gtaaaacgacggccagtcagctaggagccaatcctttg

SEQ ID NO: 65066 - DNA, 38 bp, Artificial Sequence
  primer
gtaaaacgacggccagtttgtcttggaatttctccgtg

SEQ ID NO: 65067 - DNA, 39 bp, Artificial Sequence
  primer
gtaaaacgacggccagtgggcaaacctagagttaagtgg

SEQ ID NO: 65068 - DNA, 21 bp, Artificial Sequence
  primer
tagatgaaacagccaagtggg

SEQ ID NO: 65069 - DNA, 21 bp, Artificial Sequence
  primer
atcgtaccatttgcactccag

SEQ ID NO: 65070 - DNA, 39 bp, Artificial Sequence
  primer
gtaaaacgacggccagtcaggaagtccagttctctctgc

SEQ ID NO: 65071 - DNA, 21 bp, Artificial Sequence
  primer
ctccagcctaggtgatgagag

SEQ ID NO: 65072 - DNA, 21 bp, Artificial Sequence
  primer
tgtcaagaggtttgtcctccc

SEQ ID NO: 65073 - DNA, 38 bp, Artificial Sequence
  primer
gtaaaacgacggccagtatgtgcacagtcagggagatg

SEQ ID NO: 65074 - DNA, 21 bp, Artificial Sequence
  primer
gtgtgcttgtgcactgttctg

SEQ ID NO: 65075 - DNA, 38 bp, Artificial Sequence
  primer
gtaaaacgacggccagtagttccaagactgggatcgtg

SEQ ID NO: 65076 - DNA, 37 bp, Artificial Sequence
  primer
gtaaaacgacggccagtgtctagcctccagctggtcc

SEQ ID NO: 65077 - DNA, 38 bp, Artificial Sequence
  primer
gtaaaacgacggccagtgtaatgggactcgctttccag

SEQ ID NO: 65078 - DNA, 38 bp, Artificial Sequence
  primer
gtaaaacgacggccagtattagcacagggcatctggag

SEQ ID NO: 65079 - DNA, 20 bp, Artificial Sequence
  primer
tctggctgacccagtcaaac

SEQ ID NO: 65080 - DNA, 21 bp, Artificial Sequence
  primer
tcctttaaactgggccttcac

SEQ ID NO: 65081 - DNA, 21 bp, Artificial Sequence
  primer
tgtgctggtagtcagtggatg

SEQ ID NO: 65082 - DNA, 21 bp, Artificial Sequence
  primer
aggtggctcagggactgatag

SEQ ID NO: 65083 - DNA, 38 bp, Artificial Sequence
  primer
gtaaaacgacggccagtggcttgggaaataagtgggag

SEQ ID NO: 65084 - DNA, 38 bp, Artificial Sequence
  primer
gtaaaacgacggccagtaggctgcctctgtcttaaggg

SEQ ID NO: 65085 - DNA, 38 bp, Artificial Sequence
  primer
gtaaaacgacggccagtaactgtatgccttccaccctc

SEQ ID NO: 65086 - DNA, 38 bp, Artificial Sequence
  primer
gtaaaacgacggccagtagcctgctagggacataaacg

SEQ ID NO: 65087 - DNA, 37 bp, Artificial Sequence
  primer
gtaaaacgacggccagttccagcagtgcttcagtgag

SEQ ID NO: 65088 - DNA, 38 bp, Artificial Sequence
  primer
gtaaaacgacggccagttgttaaactggcaaccaccag

SEQ ID NO: 65089 - DNA, 38 bp, Artificial Sequence
  primer
gtaaaacgacggccagtttctgtgttggctgtggattc

SEQ ID NO: 65090 - DNA, 22 bp, Artificial Sequence
  primer
ccttccctcctttctttctctg

SEQ ID NO: 65091 - DNA, 41 bp, Artificial Sequence
  primer
gtaaaacgacggccagtagttctgtgtgtcagcatataggg

SEQ ID NO: 65092 - DNA, 38 bp, Artificial Sequence
  primer
gtaaaacgacggccagttacgcggtagctctacacacc

SEQ ID NO: 65093 - DNA, 39 bp, Artificial Sequence
  primer
gtaaaacgacggccagtgaaagtgctgtacgcttcagtg

SEQ ID NO: 65094 - DNA, 24 bp, Artificial Sequence
  primer
tggcttgcataacatatactacgg

SEQ ID NO: 65095 - DNA, 38 bp, Artificial Sequence
  primer
gtaaaacgacggccagtacattgcatttgcctgatagc

SEQ ID NO: 65096 - DNA, 21 bp, Artificial Sequence
  primer
accgatgggaatcaagttgtc

SEQ ID NO: 65097 - DNA, 38 bp, Artificial Sequence
  primer
gtaaaacgacggccagtttgactgctcaggatgtctcc

SEQ ID NO: 65098 - DNA, 38 bp, Artificial Sequence
  primer
gtaaaacgacggccagtactcttcacaggtgctcctcc

SEQ ID NO: 65099 - DNA, 22 bp, Artificial Sequence
  primer
ttcttcacatttggtccttgtg

SEQ ID NO: 65100 - DNA, 20 bp, Artificial Sequence
  primer
taaagcccacgtagtggcag

SEQ ID NO: 65101 - DNA, 21 bp, Artificial Sequence
  primer
tagtcagaatggaaggcctgg

SEQ ID NO: 65102 - DNA, 22 bp, Artificial Sequence
  primer
ggagagccagttcctagtgatg

SEQ ID NO: 65103 - DNA, 24 bp, Artificial Sequence
  primer
ccctaagtaatacccagtcttccc

SEQ ID NO: 65104 - DNA, 19 bp, Artificial Sequence
  primer
ggctcacttcggaatttgc

SEQ ID NO: 65105 - DNA, 43 bp, Artificial Sequence
  primer
gtaaaacgacggccagtgacatagaatgcactaggaaacattg

SEQ ID NO: 65106 - DNA, 40 bp, Artificial Sequence
  primer
gtaaaacgacggccagtcctttaatctactaccaagcggg

SEQ ID NO: 65107 - DNA, 38 bp, Artificial Sequence
  primer
gtaaaacgacggccagtaatgttgaattgccagtctgc

SEQ ID NO: 65108 - DNA, 40 bp, Artificial Sequence
  primer
gtaaaacgacggccagttcataaatctgatgttcagtgcc

SEQ ID NO: 65109 - DNA, 24 bp, Artificial Sequence
  primer
tgttgactattgaaggacccaaag

SEQ ID NO: 65110 - DNA, 21 bp, Artificial Sequence
  primer
cgctgtcatgctacactggtc

SEQ ID NO: 65111 - DNA, 39 bp, Artificial Sequence
  primer
gtaaaacgacggccagtttatgcctgggtatttggtttg

SEQ ID NO: 65112 - DNA, 40 bp, Artificial Sequence
  primer
gtaaaacgacggccagtttcctctgacataatgagtgtgg

SEQ ID NO: 65113 - DNA, 41 bp, Artificial Sequence
  primer
gtaaaacgacggccagtcattgtatgacaaactagggtggg

SEQ ID NO: 65114 - DNA, 25 bp, Artificial Sequence
  primer
catagagatgaaattaccacgtttg

SEQ ID NO: 65115 - DNA, 39 bp, Artificial Sequence
  primer
gtaaaacgacggccagtgatctgtccagcagatttaggg

SEQ ID NO: 65116 - DNA, 22 bp, Artificial Sequence
  primer
cggcaaatgttcacagtaaatc

SEQ ID NO: 65117 - DNA, 40 bp, Artificial Sequence
  primer
gtaaaacgacggccagtaaaccatttccttactttccagg

SEQ ID NO: 65118 - DNA, 19 bp, Artificial Sequence
  primer
ttctccctgattgcttggg

SEQ ID NO: 65119 - DNA, 26 bp, Artificial Sequence
  primer
ccatatgaatattacaagacaatggg

SEQ ID NO: 65120 - DNA, 38 bp, Artificial Sequence
  primer
gtaaaacgacggccagtgcaaacttgattggagttggg

SEQ ID NO: 65121 - DNA, 38 bp, Artificial Sequence
  primer
gtaaaacgacggccagttgcattcatgatgtccttcaa

SEQ ID NO: 65122 - DNA, 26 bp, Artificial Sequence
  primer
ttgagatcatttacttgtgtttcaga

SEQ ID NO: 65123 - DNA, 21 bp, Artificial Sequence
  primer
cttgcagagatttgaaggtgg

SEQ ID NO: 65124 - DNA, 40 bp, Artificial Sequence
  primer
gtaaaacgacggccagttgcatatttctcatgtaccctgc

SEQ ID NO: 65125 - DNA, 21 bp, Artificial Sequence
  primer
ttcaaggaaacccacacactg

SEQ ID NO: 65126 - DNA, 40 bp, Artificial Sequence
  primer
gtaaaacgacggccagtgaacaatccttcaaattggtcac

SEQ ID NO: 65127 - DNA, 38 bp, Artificial Sequence
  primer
gtaaaacgacggccagtatttgggttggttccaagttt

SEQ ID NO: 65128 - DNA, 44 bp, Artificial Sequence
  primer
gtaaaacgacggccagttcatgtcttagaagtaattccattgtc

SEQ ID NO: 65129 - DNA, 38 bp, Artificial Sequence
  primer
gtaaaacgacggccagtaaatgggaggtaattgggttg

SEQ ID NO: 65130 - DNA, 21 bp, Artificial Sequence
  primer
aacaggaaagagaaatccgct

SEQ ID NO: 65131 - DNA, 40 bp, Artificial Sequence
  primer
gtaaaacgacggccagttgttcatcaaagtaactgtgccc

SEQ ID NO: 65132 - DNA, 21 bp, Artificial Sequence
  primer
tcaacgtcaggcaataaatgg

SEQ ID NO: 65133 - DNA, 21 bp, Artificial Sequence
  primer
cagcagggatcattgaagttg

SEQ ID NO: 65134 - DNA, 24 bp, Artificial Sequence
  primer
tgatatatgaatcagtttgggctg

SEQ ID NO: 65135 - DNA, 42 bp, Artificial Sequence
  primer
gtaaaacgacggccagtggaaagataaggaatatttgctccc

SEQ ID NO: 65136 - DNA, 21 bp, Artificial Sequence
  primer
tgaaatggtgtgccatagctg

SEQ ID NO: 65137 - DNA, 37 bp, Artificial Sequence
  primer
gtaaaacgacggccagtaagggctgtccttcaaacag

SEQ ID NO: 65138 - DNA, 38 bp, Artificial Sequence
  primer
gtaaaacgacggccagtgtgaaatgtgaggcagtgcag

SEQ ID NO: 65139 - DNA, 23 bp, Artificial Sequence
  primer
caacatggttgttcattatccag

SEQ ID NO: 65140 - DNA, 41 bp, Artificial Sequence
  primer
gtaaaacgacggccagtgaaatgcatgtgaagttccttatc

SEQ ID NO: 65141 - DNA, 38 bp, Artificial Sequence
  primer
gtaaaacgacggccagttggcagagatgcatgttcaag

SEQ ID NO: 65142 - DNA, 38 bp, Artificial Sequence
  primer
gtaaaacgacggccagtgcagcaggtactcgagatgag

SEQ ID NO: 65143 - DNA, 24 bp, Artificial Sequence
  primer
tggagacctttagatgaggaacag

SEQ ID NO: 65144 - DNA, 22 bp, Artificial Sequence
  primer
tgcagttggctaacttgtttgt

SEQ ID NO: 65145 - DNA, 19 bp, Artificial Sequence
  primer
agtgccaccaagaggcaac

SEQ ID NO: 65146 - DNA, 39 bp, Artificial Sequence
  primer
gtaaaacgacggccagtggatgtaccctgatacagtggg

SEQ ID NO: 65147 - DNA, 41 bp, Artificial Sequence
  primer
gtaaaacgacggccagttttgcttcaggagatcattatttg

SEQ ID NO: 65148 - DNA, 22 bp, Artificial Sequence
  primer
ttacccttccagttaaccgtgt

SEQ ID NO: 65149 - DNA, 39 bp, Artificial Sequence
  primer
gtaaaacgacggccagtccctcgatgctatctgctaatg

SEQ ID NO: 65150 - DNA, 22 bp, Artificial Sequence
  primer
ccaaacgagatgatgctaattg

SEQ ID NO: 65151 - DNA, 40 bp, Artificial Sequence
  primer
gtaaaacgacggccagtgctcaggtgtctaaactttgctg

SEQ ID NO: 65152 - DNA, 42 bp, Artificial Sequence
  primer
gtaaaacgacggccagtgaaagactgtcaaacattgaactcc

SEQ ID NO: 65153 - DNA, 38 bp, Artificial Sequence
  primer
gtaaaacgacggccagtgcggctattcaaacttgacac

SEQ ID NO: 65154 - DNA, 37 bp, Artificial Sequence
  primer
gtaaaacgacggccagtcaacatccgaggactttggc

SEQ ID NO: 65155 - DNA, 43 bp, Artificial Sequence
  primer
gtaaaacgacggccagttcaataaattcaggtgtcttcctttc

SEQ ID NO: 65156 - DNA, 38 bp, Artificial Sequence
  primer
gtaaaacgacggccagttggataggtggttgttgatgc

SEQ ID NO: 65157 - DNA, 40 bp, Artificial Sequence
  primer
gtaaaacgacggccagttgccaataacaaataacaatggg

SEQ ID NO: 65158 - DNA, 21 bp, Artificial Sequence
  primer
ctcaagtgatcctcttgcctg

SEQ ID NO: 65159 - DNA, 41 bp, Artificial Sequence
  primer
gtaaaacgacggccagtggaatatgaaatgtgtgtgactgg

SEQ ID NO: 65160 - DNA, 40 bp, Artificial Sequence
  primer
gtaaaacgacggccagttgacttacttcattgcttgttgc

SEQ ID NO: 65161 - DNA, 21 bp, Artificial Sequence
  primer
cttgccaaagcgtatttgttt

SEQ ID NO: 65162 - DNA, 24 bp, Artificial Sequence
  primer
ccacaaacatgtacaaacacatgg

SEQ ID NO: 65163 - DNA, 36 bp, Artificial Sequence
  primer
gtaaaacgacggccagttggccagtgcttgtgagac

SEQ ID NO: 65164 - DNA, 38 bp, Artificial Sequence
  primer
gtaaaacgacggccagtattggcctgcaaggtaatctg

SEQ ID NO: 65165 - DNA, 21 bp, Artificial Sequence
  primer
tgtatttggcaagaccactcc

SEQ ID NO: 65166 - DNA, 38 bp, Artificial Sequence
  primer
gtaaaacgacggccagttcagaaaggttgtaggcaggg

SEQ ID NO: 65167 - DNA, 43 bp, Artificial Sequence
  primer
gtaaaacgacggccagtccaacttaaacatcaatacacctttg

SEQ ID NO: 65168 - DNA, 39 bp, Artificial Sequence
  primer
gtaaaacgacggccagttgaatttagatcctttgccacg

SEQ ID NO: 65169 - DNA, 38 bp, Artificial Sequence
  primer
gtaaaacgacggccagtgagtcaaatgtgctgggaaag

SEQ ID NO: 65170 - DNA, 20 bp, Artificial Sequence
  primer
cagtcgatgcaggctgagac

SEQ ID NO: 65171 - DNA, 18 bp, Artificial Sequence
  primer
ctccctgttacggcgttc

SEQ ID NO: 65172 - DNA, 37 bp, Artificial Sequence
  primer
gtaaaacgacggccagttgcatgcactttgatgatcg

SEQ ID NO: 65173 - DNA, 38 bp, Artificial Sequence
  primer
gtaaaacgacggccagttattagccagttctggccctg

SEQ ID NO: 65174 - DNA, 38 bp, Artificial Sequence
  primer
gtaaaacgacggccagtaacattaaacacgcaggaccc

SEQ ID NO: 65175 - DNA, 38 bp, Artificial Sequence
  primer
gtaaaacgacggccagtggaaactcgcatttaccatcc

SEQ ID NO: 65176 - DNA, 21 bp, Artificial Sequence
  primer
ggacttgaggaatggctgaac

SEQ ID NO: 65177 - DNA, 38 bp, Artificial Sequence
  primer
gtaaaacgacggccagtgtacgaaggctggttcctttc

SEQ ID NO: 65178 - DNA, 37 bp, Artificial Sequence
  primer
gtaaaacgacggccagtagagagaagcagcacctgcc

SEQ ID NO: 65179 - DNA, 21 bp, Artificial Sequence
  primer
ctggttggttgtgttgattgg

SEQ ID NO: 65180 - DNA, 21 bp, Artificial Sequence
  primer
gcctctctctggagggtgtag

SEQ ID NO: 65181 - DNA, 38 bp, Artificial Sequence
  primer
gtaaaacgacggccagttttgggtctcctttaactggg

SEQ ID NO: 65182 - DNA, 36 bp, Artificial Sequence
  primer
gtaaaacgacggccagtcagggcatgctctctgacc

SEQ ID NO: 65183 - DNA, 35 bp, Artificial Sequence
  primer
gtaaaacgacggccagtagtgggaggtccaggtgc

SEQ ID NO: 65184 - DNA, 38 bp, Artificial Sequence
  primer
gtaaaacgacggccagtctggtcatcttctctccagcc

SEQ ID NO: 65185 - DNA, 19 bp, Artificial Sequence
  primer
gcagaccagaggttgggag

SEQ ID NO: 65186 - DNA, 21 bp, Artificial Sequence
  primer
gtctataccatccctgctggc

SEQ ID NO: 65187 - DNA, 38 bp, Artificial Sequence
  primer
gtaaaacgacggccagtgaagctgtgttgctatgcctg

SEQ ID NO: 65188 - DNA, 38 bp, Artificial Sequence
  primer
gtaaaacgacggccagtctggaacagaggtctggactg

SEQ ID NO: 65189 - DNA, 21 bp, Artificial Sequence
  primer
cagcaccgatgtcaacatttc

SEQ ID NO: 65190 - DNA, 20 bp, Artificial Sequence
  primer
ctcagggctgtcaagagctg

SEQ ID NO: 65191 - DNA, 18 bp, Artificial Sequence
  primer
ggcctcgctagaggaccc

SEQ ID NO: 65192 - DNA, 38 bp, Artificial Sequence
  primer
gtaaaacgacggccagtaggctcacaatgaccttctcc

SEQ ID NO: 65193 - DNA, 20 bp, Artificial Sequence
  primer
ttactcgtgcagcgaatgtg

SEQ ID NO: 65194 - DNA, 18 bp, Artificial Sequence
  primer
gctgctcttccaccaggc

SEQ ID NO: 65195 - DNA, 20 bp, Artificial Sequence
  primer
gcaagagctctacgctgacg

SEQ ID NO: 65196 - DNA, 37 bp, Artificial Sequence
  primer
gtaaaacgacggccagtgactgtggacgctgcttcag

SEQ ID NO: 65197 - DNA, 21 bp, Artificial Sequence
  primer
tgtccaatctcaacgtgcatc

SEQ ID NO: 65198 - DNA, 38 bp, Artificial Sequence
  primer
gtaaaacgacggccagttcacttctgtcctcatcccag

SEQ ID NO: 65199 - DNA, 38 bp, Artificial Sequence
  primer
gtaaaacgacggccagttgcttacttgtgcctaaaggg

SEQ ID NO: 65200 - DNA, 38 bp, Artificial Sequence
  primer
gtaaaacgacggccagttaaatggctaggctcgaaagg

SEQ ID NO: 65201 - DNA, 21 bp, Artificial Sequence
  primer
ctcctcggccatttctagttg

SEQ ID NO: 65202 - DNA, 38 bp, Artificial Sequence
  primer
gtaaaacgacggccagttctgtcaatggttgacttggg

SEQ ID NO: 65203 - DNA, 21 bp, Artificial Sequence
  primer
cctaagaaatgtggtgcagga

SEQ ID NO: 65204 - DNA, 38 bp, Artificial Sequence
  primer
gtaaaacgacggccagttgtcctgaagtgggagatttg

SEQ ID NO: 65205 - DNA, 38 bp, Artificial Sequence
  primer
gtaaaacgacggccagtccctttacggaacagtgagga

SEQ ID NO: 65206 - DNA, 21 bp, Artificial Sequence
  primer
gatctgaagaggtggtctggg

SEQ ID NO: 65207 - DNA, 21 bp, Artificial Sequence
  primer
agctagttctttcaccctggc

SEQ ID NO: 65208 - DNA, 21 bp, Artificial Sequence
  primer
gctgggatgtacaaggactcg

SEQ ID NO: 65209 - DNA, 21 bp, Artificial Sequence
  primer
gaccaagctcctcaagcaaag

SEQ ID NO: 65210 - DNA, 38 bp, Artificial Sequence
  primer
gtaaaacgacggccagtcctgtctcaagagcctcacac

SEQ ID NO: 65211 - DNA, 36 bp, Artificial Sequence
  primer
gtaaaacgacggccagtgtcaaatttgcctgagggc

SEQ ID NO: 65212 - DNA, 21 bp, Artificial Sequence
  primer
tagagccctgtctcaaggtcc

SEQ ID NO: 65213 - DNA, 38 bp, Artificial Sequence
  primer
gtaaaacgacggccagtaatcgtgggcaagaggtactg

SEQ ID NO: 65214 - DNA, 37 bp, Artificial Sequence
  primer
gtaaaacgacggccagtattccaaccctcccatcaag

SEQ ID NO: 65215 - DNA, 21 bp, Artificial Sequence
  primer
atcccacggctctgtattgtg

SEQ ID NO: 65216 - DNA, 38 bp, Artificial Sequence
  primer
gtaaaacgacggccagttgcagatacttgctggtcagg

SEQ ID NO: 65217 - DNA, 38 bp, Artificial Sequence
  primer
gtaaaacgacggccagtaggcactgatgggtaaacagg

SEQ ID NO: 65218 - DNA, 39 bp, Artificial Sequence
  primer
gtaaaacgacggccagtggtttggtggatgtctctgttc

SEQ ID NO: 65219 - DNA, 21 bp, Artificial Sequence
  primer
gattctgtgctgacccagttc

SEQ ID NO: 65220 - DNA, 21 bp, Artificial Sequence
  primer
aaccttcctattcccacaccc

SEQ ID NO: 65221 - DNA, 21 bp, Artificial Sequence
  primer
gagactcggtggttgctaagg

SEQ ID NO: 65222 - DNA, 21 bp, Artificial Sequence
  primer
aagaaaggtgcccttgtgttg

SEQ ID NO: 65223 - DNA, 21 bp, Artificial Sequence
  primer
cccatggcctatgtcctacag

SEQ ID NO: 65224 - DNA, 38 bp, Artificial Sequence
  primer
gtaaaacgacggccagtgtcatgctgtaccgctacgtg

SEQ ID NO: 65225 - DNA, 36 bp, Artificial Sequence
  primer
gtaaaacgacggccagtactccgagacgcgagtttg

SEQ ID NO: 65226 - DNA, 21 bp, Artificial Sequence
  primer
atcaggaatcgtttgcttgtg

SEQ ID NO: 65227 - DNA, 23 bp, Artificial Sequence
  primer
ggctgaaagcttgtatgaatgag

SEQ ID NO: 65228 - DNA, 38 bp, Artificial Sequence
  primer
gtaaaacgacggccagtttaatgggcttgctttgaatg

SEQ ID NO: 65229 - DNA, 21 bp, Artificial Sequence
  primer
gaacctgctctctgtaagggc

SEQ ID NO: 65230 - DNA, 21 bp, Artificial Sequence
  primer
ggtccctgagctctttgtctg

SEQ ID NO: 65231 - DNA, 20 bp, Artificial Sequence
  primer
atgtggaacctgtggctgag

SEQ ID NO: 65232 - DNA, 38 bp, Artificial Sequence
  primer
gtaaaacgacggccagtggaggaaccctcctttcactc

SEQ ID NO: 65233 - DNA, 21 bp, Artificial Sequence
  primer
tctgcaggaatatgcacactg

SEQ ID NO: 65234 - DNA, 38 bp, Artificial Sequence
  primer
gtaaaacgacggccagtctctctgtggcccaaggttag

SEQ ID NO: 65235 - DNA, 38 bp, Artificial Sequence
  primer
gtaaaacgacggccagtccagagaaagaacaggccatc

SEQ ID NO: 65236 - DNA, 21 bp, Artificial Sequence
  primer
agtgggtgagttcaaagtggg

SEQ ID NO: 65237 - DNA, 19 bp, Artificial Sequence
  primer
cctctcagccctgacttgg

SEQ ID NO: 65238 - DNA, 21 bp, Artificial Sequence
  primer
tcccatcctttaggaggtcag

SEQ ID NO: 65239 - DNA, 38 bp, Artificial Sequence
  primer
gtaaaacgacggccagtttctgggtcttagcctggaac

SEQ ID NO: 65240 - DNA, 38 bp, Artificial Sequence
  primer
gtaaaacgacggccagtctctgctctcaggctctctcc

SEQ ID NO: 65241 - DNA, 35 bp, Artificial Sequence
  primer
gtaaaacgacggccagtgccagtctggttccaggg

SEQ ID NO: 65242 - DNA, 21 bp, Artificial Sequence
  primer
aagattggtggacaggagcag

SEQ ID NO: 65243 - DNA, 21 bp, Artificial Sequence
  primer
ataagcagagatcgggctcac

SEQ ID NO: 65244 - DNA, 22 bp, Artificial Sequence
  primer
aacttcatcctaggcagctgtg

SEQ ID NO: 65245 - DNA, 21 bp, Artificial Sequence
  primer
gggagaccctctgccctatac

SEQ ID NO: 65246 - DNA, 38 bp, Artificial Sequence
  primer
gtaaaacgacggccagtcagggatgacagtgtggagag

SEQ ID NO: 65247 - DNA, 38 bp, Artificial Sequence
  primer
gtaaaacgacggccagttgggagctaccatgtctgttg

SEQ ID NO: 65248 - DNA, 38 bp, Artificial Sequence
  primer
gtaaaacgacggccagtctccatgagtgactgcagagc

SEQ ID NO: 65249 - DNA, 37 bp, Artificial Sequence
  primer
gtaaaacgacggccagtactccaccaaggtgaggagg

SEQ ID NO: 65250 - DNA, 38 bp, Artificial Sequence
  primer
gtaaaacgacggccagtgttctccctagaacttccgcc

SEQ ID NO: 65251 - DNA, 38 bp, Artificial Sequence
  primer
gtaaaacgacggccagtggacttctaagggtccttgcc

SEQ ID NO: 65252 - DNA, 18 bp, Artificial Sequence
  primer
cccggaagggttcaggag

SEQ ID NO: 65253 - DNA, 38 bp, Artificial Sequence
  primer
gtaaaacgacggccagtctaattgaagctcctccaggg

SEQ ID NO: 65254 - DNA, 38 bp, Artificial Sequence
  primer
gtaaaacgacggccagtgtttggagtcaggaccaggac

SEQ ID NO: 65255 - DNA, 38 bp, Artificial Sequence
  primer
gtaaaacgacggccagtgtggagcatggaggctatgtc

SEQ ID NO: 65256 - DNA, 38 bp, Artificial Sequence
  primer
gtaaaacgacggccagtgatgtgggtgacatcgttagg

SEQ ID NO: 65257 - DNA, 21 bp, Artificial Sequence
  primer
taaggtgctttcctgtccctg

SEQ ID NO: 65258 - DNA, 21 bp, Artificial Sequence
  primer
gccattgcttatgcttctgtc

SEQ ID NO: 65259 - DNA, 21 bp, Artificial Sequence
  primer
tcacatccttcttgctcaacc

SEQ ID NO: 65260 - DNA, 38 bp, Artificial Sequence
  primer
gtaaaacgacggccagtctgagtgactggtggttctgg

SEQ ID NO: 65261 - DNA, 38 bp, Artificial Sequence
  primer
gtaaaacgacggccagtttagagcctcaaaggaagccc

SEQ ID NO: 65262 - DNA, 38 bp, Artificial Sequence
  primer
gtaaaacgacggccagtaccagtgagcccttactcctg

SEQ ID NO: 65263 - DNA, 21 bp, Artificial Sequence
  primer
tccttcatacccagttgggag

SEQ ID NO: 65264 - DNA, 39 bp, Artificial Sequence
  primer
gtaaaacgacggccagtgagaacattatgacgctcaggg

SEQ ID NO: 65265 - DNA, 21 bp, Artificial Sequence
  primer
agaggctggtagaggcctagc

SEQ ID NO: 65266 - DNA, 21 bp, Artificial Sequence
  primer
ctctagctgctgttggtggtg

SEQ ID NO: 65267 - DNA, 38 bp, Artificial Sequence
  primer
gtaaaacgacggccagtgctgaaagatacagccacagg

SEQ ID NO: 65268 - DNA, 38 bp, Artificial Sequence
  primer
gtaaaacgacggccagtggtgtagaattcatgccctcc

SEQ ID NO: 65269 - DNA, 39 bp, Artificial Sequence
  primer
gtaaaacgacggccagtgccattcttgaaggtgagtttg

SEQ ID NO: 65270 - DNA, 38 bp, Artificial Sequence
  primer
gtaaaacgacggccagtagaacctgtgaggccagagac

SEQ ID NO: 65271 - DNA, 38 bp, Artificial Sequence
  primer
gtaaaacgacggccagtctgggagccattgagaagttg

SEQ ID NO: 65272 - DNA, 21 bp, Artificial Sequence
  primer
agtgatgggaatgtagccctg

SEQ ID NO: 65273 - DNA, 38 bp, Artificial Sequence
  primer
gtaaaacgacggccagtgtaggactcgctggctaatcg

SEQ ID NO: 65274 - DNA, 21 bp, Artificial Sequence
  primer
agaactaagagccggaaaggg

SEQ ID NO: 65275 - DNA, 38 bp, Artificial Sequence
  primer
gtaaaacgacggccagtaaggccaagagtcacaagctg

SEQ ID NO: 65276 - DNA, 21 bp, Artificial Sequence
  primer
aaagacaagctacccgaaacg

SEQ ID NO: 65277 - DNA, 20 bp, Artificial Sequence
  primer
tctcatgtgccagtgtggac

SEQ ID NO: 65278 - DNA, 21 bp, Artificial Sequence
  primer
gttgattgtgggtggatgttg

SEQ ID NO: 65279 - DNA, 21 bp, Artificial Sequence
  primer
ttgctgatgcatagccatttc

SEQ ID NO: 65280 - DNA, 21 bp, Artificial Sequence
  primer
gatgtctccctttggttgtcc

SEQ ID NO: 65281 - DNA, 23 bp, Artificial Sequence
  primer
caccacattgtaccctatgaatg

SEQ ID NO: 65282 - DNA, 22 bp, Artificial Sequence
  primer
tgacccaaagtcaccttgaaac

SEQ ID NO: 65283 - DNA, 38 bp, Artificial Sequence
  primer
gtaaaacgacggccagttgatatggcaggttgtgtggt

SEQ ID NO: 65284 - DNA, 39 bp, Artificial Sequence
  primer
gtaaaacgacggccagtccaggtcagtgttgtttgtttg

SEQ ID NO: 65285 - DNA, 38 bp, Artificial Sequence
  primer
gtaaaacgacggccagtcaggttcaggagggtaaatgg

SEQ ID NO: 65286 - DNA, 37 bp, Artificial Sequence
  primer
gtaaaacgacggccagtctgggattacaggccacatc

SEQ ID NO: 65287 - DNA, 38 bp, Artificial Sequence
  primer
gtaaaacgacggccagttgctctgatggaaatgtgtgg

SEQ ID NO: 65288 - DNA, 38 bp, Artificial Sequence
  primer
gtaaaacgacggccagtaatggcttgcctactgtctgc

SEQ ID NO: 65289 - DNA, 21 bp, Artificial Sequence
  primer
ttccaggtgagggcagataac

SEQ ID NO: 65290 - DNA, 36 bp, Artificial Sequence
  primer
gtaaaacgacggccagtggacctgctgacagggatg

SEQ ID NO: 65291 - DNA, 38 bp, Artificial Sequence
  primer
gtaaaacgacggccagttcactcctagaggaagggagc

SEQ ID NO: 65292 - DNA, 21 bp, Artificial Sequence
  primer
ctatcatttcccggtcctgag

SEQ ID NO: 65293 - DNA, 23 bp, Artificial Sequence
  primer
aatgagatacatttcagccttgc

SEQ ID NO: 65294 - DNA, 21 bp, Artificial Sequence
  primer
ctgctgccaatttctgatttc

SEQ ID NO: 65295 - DNA, 27 bp, Artificial Sequence
  primer
acacatatatccaagtttctcttaggg

SEQ ID NO: 65296 - DNA, 21 bp, Artificial Sequence
  primer
gaggcgtgagaattctgttcc

SEQ ID NO: 65297 - DNA, 36 bp, Artificial Sequence
  primer
gtaaaacgacggccagtgatagggcgaagggagagg

SEQ ID NO: 65298 - DNA, 21 bp, Artificial Sequence
  primer
taaagttgggaggtttgggag

SEQ ID NO: 65299 - DNA, 38 bp, Artificial Sequence
  primer
gtaaaacgacggccagtgagtgtggcctccagctttac

SEQ ID NO: 65300 - DNA, 37 bp, Artificial Sequence
  primer
gtaaaacgacggccagtggttagtcctggaggagccc

SEQ ID NO: 65301 - DNA, 38 bp, Artificial Sequence
  primer
gtaaaacgacggccagttggccattcgaagaaagaaag

SEQ ID NO: 65302 - DNA, 38 bp, Artificial Sequence
  primer
gtaaaacgacggccagttcacagtctgggatgttggag

SEQ ID NO: 65303 - DNA, 21 bp, Artificial Sequence
  primer
gctttcaaggttgtttcgagg

SEQ ID NO: 65304 - DNA, 42 bp, Artificial Sequence
  primer
gtaaaacgacggccagttgattaccctttgccatttaatttc

SEQ ID NO: 65305 - DNA, 23 bp, Artificial Sequence
  primer
aaagtgagcttaacatttgccag

SEQ ID NO: 65306 - DNA, 26 bp, Artificial Sequence
  primer
gcaagtttcaaatttaactggttgat

SEQ ID NO: 65307 - DNA, 39 bp, Artificial Sequence
  primer
gtaaaacgacggccagtggtgactccttatttgctgtgg

SEQ ID NO: 65308 - DNA, 38 bp, Artificial Sequence
  primer
gtaaaacgacggccagtagaaaggtggcagggtatgtg

SEQ ID NO: 65309 - DNA, 38 bp, Artificial Sequence
  primer
gtaaaacgacggccagtaacatagtgcatgctggcttc

SEQ ID NO: 65310 - DNA, 42 bp, Artificial Sequence
  primer
gtaaaacgacggccagtttggtggttctcgtgaactattact

SEQ ID NO: 65311 - DNA, 22 bp, Artificial Sequence
  primer
cctggcatgaaacatgattacc

SEQ ID NO: 65312 - DNA, 38 bp, Artificial Sequence
  primer
gtaaaacgacggccagtacacatttggttgtgactgcc

SEQ ID NO: 65313 - DNA, 28 bp, Artificial Sequence
  primer
tcattcagatgtagtgaatgagagttta

SEQ ID NO: 65314 - DNA, 38 bp, Artificial Sequence
  primer
gtaaaacgacggccagtacagtcccgataattgcatcc

SEQ ID NO: 65315 - DNA, 38 bp, Artificial Sequence
  primer
gtaaaacgacggccagtgcccttccaccctagttcttc

SEQ ID NO: 65316 - DNA, 38 bp, Artificial Sequence
  primer
gtaaaacgacggccagtctgttgggtgtctaccttccc

SEQ ID NO: 65317 - DNA, 38 bp, Artificial Sequence
  primer
gtaaaacgacggccagttttcctggatttgtaggtccc

SEQ ID NO: 65318 - DNA, 43 bp, Artificial Sequence
  primer
gtaaaacgacggccagtggtttaagaactaaagccttatgcac

SEQ ID NO: 65319 - DNA, 20 bp, Artificial Sequence
  primer
agacagactgtggctgtggc

SEQ ID NO: 65320 - DNA, 21 bp, Artificial Sequence
  primer
cattgatgtatcttccagcgg

SEQ ID NO: 65321 - DNA, 27 bp, Artificial Sequence
  primer
cacatgaccataagtaacatacacaca

SEQ ID NO: 65322 - DNA, 38 bp, Artificial Sequence
  primer
gtaaaacgacggccagtctctcttgcaacttctgccac

SEQ ID NO: 65323 - DNA, 22 bp, Artificial Sequence
  primer
gcaaacgtcttgaaattgttgg

SEQ ID NO: 65324 - DNA, 43 bp, Artificial Sequence
  primer
gtaaaacgacggccagttgtaataagggacatcctagttagcc

SEQ ID NO: 65325 - DNA, 21 bp, Artificial Sequence
  primer
aatttgccctgaagtcctttg

SEQ ID NO: 65326 - DNA, 39 bp, Artificial Sequence
  primer
gtaaaacgacggccagttgcaagggaataatttaatggg

SEQ ID NO: 65327 - DNA, 38 bp, Artificial Sequence
  primer
gtaaaacgacggccagtaatggcacaatccctgtatgc

SEQ ID NO: 65328 - DNA, 38 bp, Artificial Sequence
  primer
gtaaaacgacggccagtggaggctactgcagatcaagg

SEQ ID NO: 65329 - DNA, 38 bp, Artificial Sequence
  primer
gtaaaacgacggccagtatggcagatagtggcaagagg

SEQ ID NO: 65330 - DNA, 22 bp, Artificial Sequence
  primer
tttgtaattaaatgcctgtgcc

SEQ ID NO: 65331 - DNA, 19 bp, Artificial Sequence
  primer
gaagcagactgggctgagg

SEQ ID NO: 65332 - DNA, 22 bp, Artificial Sequence
  primer
gactttggtagtgggagagtgg

SEQ ID NO: 65333 - DNA, 38 bp, Artificial Sequence
  primer
gtaaaacgacggccagtaagtcgctgagctgacagttg

SEQ ID NO: 65334 - DNA, 36 bp, Artificial Sequence
  primer
gtaaaacgacggccagtaggaggagggctgtggagt

SEQ ID NO: 65335 - DNA, 36 bp, Artificial Sequence
  primer
gtaaaacgacggccagtgacagcagctcccgagaag

SEQ ID NO: 65336 - DNA, 38 bp, Artificial Sequence
  primer
gtaaaacgacggccagtaagaggtgtgggtaggagcag

SEQ ID NO: 65337 - DNA, 36 bp, Artificial Sequence
  primer
gtaaaacgacggccagtcgcctctaggatgcctgtc

SEQ ID NO: 65338 - DNA, 38 bp, Artificial Sequence
  primer
gtaaaacgacggccagtggcttgtgttccatctcactc

SEQ ID NO: 65339 - DNA, 38 bp, Artificial Sequence
  primer
gtaaaacgacggccagtttcctgtactgtggtcaaggg

SEQ ID NO: 65340 - DNA, 21 bp, Artificial Sequence
  primer
atgggattgctgaaatatggg

SEQ ID NO: 65341 - DNA, 38 bp, Artificial Sequence
  primer
gtaaaacgacggccagtgacctcagtacctgcaccctc

SEQ ID NO: 65342 - DNA, 38 bp, Artificial Sequence
  primer
gtaaaacgacggccagtagatggctgaactggcagaag

SEQ ID NO: 65343 - DNA, 38 bp, Artificial Sequence
  primer
gtaaaacgacggccagtactctgattaccgccatgctc

SEQ ID NO: 65344 - DNA, 21 bp, Artificial Sequence
  primer
aggaggcaatggaccaataag

SEQ ID NO: 65345 - DNA, 21 bp, Artificial Sequence
  primer
aggcaggttggtctgagagag

SEQ ID NO: 65346 - DNA, 38 bp, Artificial Sequence
  primer
gtaaaacgacggccagtccagaacccaggaatcttgac

SEQ ID NO: 65347 - DNA, 38 bp, Artificial Sequence
  primer
gtaaaacgacggccagtgggaagttaggatacctgggc

SEQ ID NO: 65348 - DNA, 38 bp, Artificial Sequence
  primer
gtaaaacgacggccagtcaggctcagagagggtgagac

SEQ ID NO: 65349 - DNA, 36 bp, Artificial Sequence
  primer
gtaaaacgacggccagtgacggagggatgtgacctg

SEQ ID NO: 65350 - DNA, 21 bp, Artificial Sequence
  primer
tctgcctctattcttccaggc

SEQ ID NO: 65351 - DNA, 21 bp, Artificial Sequence
  primer
acacagacatcctcgggtagg

SEQ ID NO: 65352 - DNA, 38 bp, Artificial Sequence
  primer
gtaaaacgacggccagtcatgacattcccttccctttc

SEQ ID NO: 65353 - DNA, 38 bp, Artificial Sequence
  primer
gtaaaacgacggccagtgaacttgggatcaggatgtgg

SEQ ID NO: 65354 - DNA, 21 bp, Artificial Sequence
  primer
acaaacttgagggtcgaggtc

SEQ ID NO: 65355 - DNA, 21 bp, Artificial Sequence
  primer
gcgtctatgcaaatagcggtc

SEQ ID NO: 65356 - DNA, 18 bp, Artificial Sequence
  primer
cctgcatactcacccgcc

SEQ ID NO: 65357 - DNA, 35 bp, Artificial Sequence
  primer
gtaaaacgacggccagtgcccagcatggacaaaga

SEQ ID NO: 65358 - DNA, 37 bp, Artificial Sequence
  primer
gtaaaacgacggccagtactgggtccagatttccagg

SEQ ID NO: 65359 - DNA, 20 bp, Artificial Sequence
  primer
gaggctcggagaatgaaagg

SEQ ID NO: 65360 - DNA, 21 bp, Artificial Sequence
  primer
caggagcacgtgttagtctgg

SEQ ID NO: 65361 - DNA, 21 bp, Artificial Sequence
  primer
gaggataggctatttcgcgtc

SEQ ID NO: 65362 - DNA, 21 bp, Artificial Sequence
  primer
tctacagcctggacagtcagc

SEQ ID NO: 65363 - DNA, 21 bp, Artificial Sequence
  primer
ctctttgggctcaggaatgtc

SEQ ID NO: 65364 - DNA, 38 bp, Artificial Sequence
  primer
gtaaaacgacggccagttatttagtccgcaacacctcg

SEQ ID NO: 65365 - DNA, 38 bp, Artificial Sequence
  primer
gtaaaacgacggccagtgatagggaggctttgggaatc

SEQ ID NO: 65366 - DNA, 38 bp, Artificial Sequence
  primer
gtaaaacgacggccagtcatctcagctctgcgccttac

SEQ ID NO: 65367 - DNA, 21 bp, Artificial Sequence
  primer
aaggtgcaagtcgctgaagag

SEQ ID NO: 65368 - DNA, 21 bp, Artificial Sequence
  primer
gatgcacgtaggcatgaagtt

SEQ ID NO: 65369 - DNA, 38 bp, Artificial Sequence
  primer
gtaaaacgacggccagtaccttcactacctgctgcctc

SEQ ID NO: 65370 - DNA, 23 bp, Artificial Sequence
  primer
aagcactttgtggtacattgagg

SEQ ID NO: 65371 - DNA, 38 bp, Artificial Sequence
  primer
gtaaaacgacggccagtatcttagctcagccctctccc

SEQ ID NO: 65372 - DNA, 21 bp, Artificial Sequence
  primer
tcacaatcctgagaggtggag

SEQ ID NO: 65373 - DNA, 37 bp, Artificial Sequence
  primer
gtaaaacgacggccagtctccgggactgggtttactg

SEQ ID NO: 65374 - DNA, 37 bp, Artificial Sequence
  primer
gtaaaacgacggccagtccacgaccctctggtctatg

SEQ ID NO: 65375 - DNA, 21 bp, Artificial Sequence
  primer
actggtgaggaggtaagtgcc

SEQ ID NO: 65376 - DNA, 38 bp, Artificial Sequence
  primer
gtaaaacgacggccagtacacgtacttgacaagcagcc

SEQ ID NO: 65377 - DNA, 38 bp, Artificial Sequence
  primer
gtaaaacgacggccagtatcctctgcccagttcctatg

SEQ ID NO: 65378 - DNA, 38 bp, Artificial Sequence
  primer
gtaaaacgacggccagttgactgtaaagctggaatcgc

SEQ ID NO: 65379 - DNA, 37 bp, Artificial Sequence
  primer
gtaaaacgacggccagtaagcctggccttctcacatc

SEQ ID NO: 65380 - DNA, 38 bp, Artificial Sequence
  primer
gtaaaacgacggccagtttctcctccctcctgtaaggg

SEQ ID NO: 65381 - DNA, 39 bp, Artificial Sequence
  primer
gtaaaacgacggccagtaaagcaaaccaaagggaagaag

SEQ ID NO: 65382 - DNA, 37 bp, Artificial Sequence
  primer
gtaaaacgacggccagttctactgagcctgcctgtgc

SEQ ID NO: 65383 - DNA, 41 bp, Artificial Sequence
  primer
gtaaaacgacggccagtggagccattagatatattgccaaa

SEQ ID NO: 65384 - DNA, 23 bp, Artificial Sequence
  primer
tccagaaaccacagtagaatctc

SEQ ID NO: 65385 - DNA, 23 bp, Artificial Sequence
  primer
cttaggtgattgacttgggttcc

SEQ ID NO: 65386 - DNA, 38 bp, Artificial Sequence
  primer
gtaaaacgacggccagttccggtaaaggctacctaagc

SEQ ID NO: 65387 - DNA, 21 bp, Artificial Sequence
  primer
gaaaccaaatggaaacccttc

SEQ ID NO: 65388 - DNA, 38 bp, Artificial Sequence
  primer
gtaaaacgacggccagttattcgtgcctgtgaatagcc

SEQ ID NO: 65389 - DNA, 43 bp, Artificial Sequence
  primer
gtaaaacgacggccagtttgtatgctttcaattaacaaactgg

SEQ ID NO: 65390 - DNA, 25 bp, Artificial Sequence
  primer
tgacattcaaggatatgtgtttgtg

SEQ ID NO: 65391 - DNA, 21 bp, Artificial Sequence
  primer
agcctcagggtaacactttcg

SEQ ID NO: 65392 - DNA, 40 bp, Artificial Sequence
  primer
gtaaaacgacggccagttttgatcacatttggatcttgtg

SEQ ID NO: 65393 - DNA, 23 bp, Artificial Sequence
  primer
ttagagcgagttcttcagacacc

SEQ ID NO: 65394 - DNA, 22 bp, Artificial Sequence
  primer
tgcttgttggagtctacctcac

SEQ ID NO: 65395 - DNA, 22 bp, Artificial Sequence
  primer
tgtacatccttgtttcctcagc

SEQ ID NO: 65396 - DNA, 38 bp, Artificial Sequence
  primer
gtaaaacgacggccagtgacgcaggacaccagctaatc

SEQ ID NO: 65397 - DNA, 38 bp, Artificial Sequence
  primer
gtaaaacgacggccagtaaagactcgggttgcattcag

SEQ ID NO: 65398 - DNA, 38 bp, Artificial Sequence
  primer
gtaaaacgacggccagtagccacaactaatacccaggc

SEQ ID NO: 65399 - DNA, 38 bp, Artificial Sequence
  primer
gtaaaacgacggccagtccctcagttgtttccctgaag

SEQ ID NO: 65400 - DNA, 39 bp, Artificial Sequence
  primer
gtaaaacgacggccagttggcagatttctttcctttctg

SEQ ID NO: 65401 - DNA, 21 bp, Artificial Sequence
  primer
ttgcatagaacaacgtttggg

SEQ ID NO: 65402 - DNA, 23 bp, Artificial Sequence
  primer
gcttgactatgctgtcctgaaac

SEQ ID NO: 65403 - DNA, 21 bp, Artificial Sequence
  primer
aaagcagattgatgcttgtgc

SEQ ID NO: 65404 - DNA, 24 bp, Artificial Sequence
  primer
aatgtcctaccctattggactctg

SEQ ID NO: 65405 - DNA, 21 bp, Artificial Sequence
  primer
agccttgatttcccacaactg

SEQ ID NO: 65406 - DNA, 38 bp, Artificial Sequence
  primer
gtaaaacgacggccagttacgctcctgaagcttgaaac

SEQ ID NO: 65407 - DNA, 41 bp, Artificial Sequence
  primer
gtaaaacgacggccagttttatgtgcacaatgctactttcc

SEQ ID NO: 65408 - DNA, 38 bp, Artificial Sequence
  primer
gtaaaacgacggccagttccctgactaacggctttctg

SEQ ID NO: 65409 - DNA, 38 bp, Artificial Sequence
  primer
gtaaaacgacggccagtataccggaggaggagttagcc

SEQ ID NO: 65410 - DNA, 21 bp, Artificial Sequence
  primer
atggtggatagagagggcttg

SEQ ID NO: 65411 - DNA, 38 bp, Artificial Sequence
  primer
gtaaaacgacggccagtaggtgtcacaagagccatttg

SEQ ID NO: 65412 - DNA, 37 bp, Artificial Sequence
  primer
gtaaaacgacggccagtaagttgatcaatcccgaggc

SEQ ID NO: 65413 - DNA, 39 bp, Artificial Sequence
  primer
gtaaaacgacggccagttgggagttgctgtactatttgc

SEQ ID NO: 65414 - DNA, 39 bp, Artificial Sequence
  primer
gtaaaacgacggccagtttcagcaactgtgttgtatggg

SEQ ID NO: 65415 - DNA, 21 bp, Artificial Sequence
  primer
aaagaaacaggatttgggcac

SEQ ID NO: 65416 - DNA, 40 bp, Artificial Sequence
  primer
gtaaaacgacggccagttgccttctagatgggaaattaca

SEQ ID NO: 65417 - DNA, 37 bp, Artificial Sequence
  primer
gtaaaacgacggccagtcttctggcactcctctggtg

SEQ ID NO: 65418 - DNA, 37 bp, Artificial Sequence
  primer
gtaaaacgacggccagtgaaagaagcacccgagttcc

SEQ ID NO: 65419 - DNA, 38 bp, Artificial Sequence
  primer
gtaaaacgacggccagttgcagggtatgtgtgtccttg

SEQ ID NO: 65420 - DNA, 21 bp, Artificial Sequence
  primer
agggctgcctatccctgtaac

SEQ ID NO: 65421 - DNA, 38 bp, Artificial Sequence
  primer
gtaaaacgacggccagtgctaacacgtgaccagcgtag

SEQ ID NO: 65422 - DNA, 21 bp, Artificial Sequence
  primer
gagctgggtccaaataccaag

SEQ ID NO: 65423 - DNA, 38 bp, Artificial Sequence
  primer
gtaaaacgacggccagtagggcctcttagcgtttgaag

SEQ ID NO: 65424 - DNA, 43 bp, Artificial Sequence
  primer
gtaaaacgacggccagtcagaaatattcccagagtctaagcac

SEQ ID NO: 65425 - DNA, 21 bp, Artificial Sequence
  primer
cccaaagaggtagtgtttccc

SEQ ID NO: 65426 - DNA, 20 bp, Artificial Sequence
  primer
cctgggcaacagagtcagtc

SEQ ID NO: 65427 - DNA, 19 bp, Artificial Sequence
  primer
gaatccctgcgctgatttc

SEQ ID NO: 65428 - DNA, 22 bp, Artificial Sequence
  primer
cctgaaatctgaggattccacc

SEQ ID NO: 65429 - DNA, 38 bp, Artificial Sequence
  primer
gtaaaacgacggccagtggtggtatttgtgttgtctgg

SEQ ID NO: 65430 - DNA, 43 bp, Artificial Sequence
  primer
gtaaaacgacggccagtagttactactgagaataatttggccc

SEQ ID NO: 65431 - DNA, 43 bp, Artificial Sequence
  primer
gtaaaacgacggccagtaaaggatggatagaattgtattgtcg

SEQ ID NO: 65432 - DNA, 38 bp, Artificial Sequence
  primer
gtaaaacgacggccagttggcaaatatcagtagcccag

SEQ ID NO: 65433 - DNA, 21 bp, Artificial Sequence
  primer
gtattccatttgctgcaagcc

SEQ ID NO: 65434 - DNA, 21 bp, Artificial Sequence
  primer
ggaagtgtgccattccattta

SEQ ID NO: 65435 - DNA, 36 bp, Artificial Sequence
  primer
gtaaaacgacggccagtgggctagatgccacagagc

SEQ ID NO: 65436 - DNA, 38 bp, Artificial Sequence
  primer
gtaaaacgacggccagtctggctagagatcccacattg

SEQ ID NO: 65437 - DNA, 38 bp, Artificial Sequence
  primer
gtaaaacgacggccagttctgcaaattctcctcacagg

SEQ ID NO: 65438 - DNA, 38 bp, Artificial Sequence
  primer
gtaaaacgacggccagtcagagacaccagttggagagg

SEQ ID NO: 65439 - DNA, 39 bp, Artificial Sequence
  primer
gtaaaacgacggccagttgcttatacctggcaatgtgac

SEQ ID NO: 65440 - DNA, 21 bp, Artificial Sequence
  primer
tttcaggaatccttgctctgc

SEQ ID NO: 65441 - DNA, 21 bp, Artificial Sequence
  primer
taagcagcatggcagcaatag

SEQ ID NO: 65442 - DNA, 23 bp, Artificial Sequence
  primer
gcctatgctttgacatttattgc

SEQ ID NO: 65443 - DNA, 39 bp, Artificial Sequence
  primer
gtaaaacgacggccagttgaaagacactcttgggattca

SEQ ID NO: 65444 - DNA, 21 bp, Artificial Sequence
  primer
tgggccacagagattgtattc

SEQ ID NO: 65445 - DNA, 40 bp, Artificial Sequence
  primer
gtaaaacgacggccagtaactcctgagctcaagctacatc

SEQ ID NO: 65446 - DNA, 38 bp, Artificial Sequence
  primer
gtaaaacgacggccagttgattctcagtttggacccag

SEQ ID NO: 65447 - DNA, 38 bp, Artificial Sequence
  primer
gtaaaacgacggccagtctcattggaagaatgcgaagt

SEQ ID NO: 65448 - DNA, 41 bp, Artificial Sequence
  primer
gtaaaacgacggccagtaaataaatcaagagcttgtctggg

SEQ ID NO: 65449 - DNA, 25 bp, Artificial Sequence
  primer
aaatgtgtatttcacttgaactggg

SEQ ID NO: 65450 - DNA, 43 bp, Artificial Sequence
  primer
gtaaaacgacggccagtagagctctcataacatcatttgtagg

SEQ ID NO: 65451 - DNA, 41 bp, Artificial Sequence
  primer
gtaaaacgacggccagtttgagaatgtgttcacataaggtt

SEQ ID NO: 65452 - DNA, 26 bp, Artificial Sequence
  primer
ggaatttgtgaaatagtgtttattga

SEQ ID NO: 65453 - DNA, 21 bp, Artificial Sequence
  primer
gagggaagaatttgtgccaag

SEQ ID NO: 65454 - DNA, 25 bp, Artificial Sequence
  primer
ttggtgtcatctatattcttaggca

SEQ ID NO: 65455 - DNA, 38 bp, Artificial Sequence
  primer
gtaaaacgacggccagtacttctctgtgtgcagggacc

SEQ ID NO: 65456 - DNA, 38 bp, Artificial Sequence
  primer
gtaaaacgacggccagttctgggtaaacattcagcacc

SEQ ID NO: 65457 - DNA, 38 bp, Artificial Sequence
  primer
gtaaaacgacggccagtgaggcttggtatattgggcac

SEQ ID NO: 65458 - DNA, 38 bp, Artificial Sequence
  primer
gtaaaacgacggccagtcaacaattgtggcctatttgg

SEQ ID NO: 65459 - DNA, 21 bp, Artificial Sequence
  primer
tttcatggagtttgttcctgg

SEQ ID NO: 65460 - DNA, 21 bp, Artificial Sequence
  primer
aaggagggagtgtgtgagagg

SEQ ID NO: 65461 - DNA, 25 bp, Artificial Sequence
  primer
cacagcagtggaaagaatattaacc

SEQ ID NO: 65462 - DNA, 21 bp, Artificial Sequence
  primer
gttggtttccaagtcaaagcc

SEQ ID NO: 65463 - DNA, 39 bp, Artificial Sequence
  primer
gtaaaacgacggccagtccagggtaacagaattcagagc

SEQ ID NO: 65464 - DNA, 38 bp, Artificial Sequence
  primer
gtaaaacgacggccagtgctcttgatcgtgaacattcg

SEQ ID NO: 65465 - DNA, 38 bp, Artificial Sequence
  primer
gtaaaacgacggccagttgatcatatggcttcagaccc

SEQ ID NO: 65466 - DNA, 38 bp, Artificial Sequence
  primer
gtaaaacgacggccagtgtgtccttcgaatgctgactc

SEQ ID NO: 65467 - DNA, 21 bp, Artificial Sequence
  primer
gggccgatgtattctacaagc

SEQ ID NO: 65468 - DNA, 38 bp, Artificial Sequence
  primer
gtaaaacgacggccagtagtattgccaacagacctggg

SEQ ID NO: 65469 - DNA, 36 bp, Artificial Sequence
  primer
gtaaaacgacggccagtcagccacactcacctctgc

SEQ ID NO: 65470 - DNA, 38 bp, Artificial Sequence
  primer
gtaaaacgacggccagtagatggagtcttacatggccc

SEQ ID NO: 65471 - DNA, 38 bp, Artificial Sequence
  primer
gtaaaacgacggccagttcaaagagggctagcatcagg

SEQ ID NO: 65472 - DNA, 20 bp, Artificial Sequence
  primer
tccttcttccagtcgtcgtc

SEQ ID NO: 65473 - DNA, 22 bp, Artificial Sequence
  primer
gcaacctcttggaattatgagg

SEQ ID NO: 65474 - DNA, 41 bp, Artificial Sequence
  primer
gtaaaacgacggccagttctggatgaattatctttccactg

SEQ ID NO: 65475 - DNA, 38 bp, Artificial Sequence
  primer
gtaaaacgacggccagtacagagcgagactccatttca

SEQ ID NO: 65476 - DNA, 21 bp, Artificial Sequence
  primer
atctcacaacctggcctgttc

SEQ ID NO: 65477 - DNA, 38 bp, Artificial Sequence
  primer
gtaaaacgacggccagttttggtgcaagccacattaag

SEQ ID NO: 65478 - DNA, 38 bp, Artificial Sequence
  primer
gtaaaacgacggccagtctcaggtggaccaagtagctg

SEQ ID NO: 65479 - DNA, 39 bp, Artificial Sequence
  primer
gtaaaacgacggccagtcatctttcatgtgcttggtacg

SEQ ID NO: 65480 - DNA, 39 bp, Artificial Sequence
  primer
gtaaaacgacggccagtgatatgctgtttggagcctttg

SEQ ID NO: 65481 - DNA, 21 bp, Artificial Sequence
  primer
gcctgcaaatgagaagcatta

SEQ ID NO: 65482 - DNA, 21 bp, Artificial Sequence
  primer
ctctgctcacatacccactgc

SEQ ID NO: 65483 - DNA, 44 bp, Artificial Sequence
  primer
gtaaaacgacggccagtgctgaccttatcacttatactccaagg

SEQ ID NO: 65484 - DNA, 22 bp, Artificial Sequence
  primer
gaaacacacatgatatttgcgg

SEQ ID NO: 65485 - DNA, 35 bp, Artificial Sequence
  primer
gtaaaacgacggccagtccgattccagcaaaggac

SEQ ID NO: 65486 - DNA, 24 bp, Artificial Sequence
  primer
aaataatgcccacacaataatgaa

SEQ ID NO: 65487 - DNA, 40 bp, Artificial Sequence
  primer
gtaaaacgacggccagtgattgagtaaggagtgaggagca

SEQ ID NO: 65488 - DNA, 22 bp, Artificial Sequence
  primer
ttacctttgcttgtttcccttt

SEQ ID NO: 65489 - DNA, 21 bp, Artificial Sequence
  primer
cagccataccctgagttaccc

SEQ ID NO: 65490 - DNA, 21 bp, Artificial Sequence
  primer
catgtctactccaggcccaag

SEQ ID NO: 65491 - DNA, 38 bp, Artificial Sequence
  primer
gtaaaacgacggccagtacggtttgctccagtctcttc

SEQ ID NO: 65492 - DNA, 38 bp, Artificial Sequence
  primer
gtaaaacgacggccagtgacaagctccgtacctgttcc

SEQ ID NO: 65493 - DNA, 37 bp, Artificial Sequence
  primer
gtaaaacgacggccagtccctgggaggagaagagttg

SEQ ID NO: 65494 - DNA, 20 bp, Artificial Sequence
  primer
gtgcacaggcaagaaaggag

SEQ ID NO: 65495 - DNA, 21 bp, Artificial Sequence
  primer
tgaaccaactgtactccagcc

SEQ ID NO: 65496 - DNA, 38 bp, Artificial Sequence
  primer
gtaaaacgacggccagtcttaagtctttgggctgggtg

SEQ ID NO: 65497 - DNA, 38 bp, Artificial Sequence
  primer
gtaaaacgacggccagtgaggtggcagtctttctggag

SEQ ID NO: 65498 - DNA, 38 bp, Artificial Sequence
  primer
gtaaaacgacggccagtgagagagcgctattcaccgtc

SEQ ID NO: 65499 - DNA, 21 bp, Artificial Sequence
  primer
gatgaaggtggacttcttccg

SEQ ID NO: 65500 - DNA, 38 bp, Artificial Sequence
  primer
gtaaaacgacggccagttgctcactaccaccaccaaag

SEQ ID NO: 65501 - DNA, 21 bp, Artificial Sequence
  primer
gcaggttagggagccctgtag

SEQ ID NO: 65502 - DNA, 21 bp, Artificial Sequence
  primer
tctcctcccttggtatgatcc

SEQ ID NO: 65503 - DNA, 38 bp, Artificial Sequence
  primer
gtaaaacgacggccagttccctatggtatggaacccag

SEQ ID NO: 65504 - DNA, 38 bp, Artificial Sequence
  primer
gtaaaacgacggccagtcttcatcccagtccagctctc

SEQ ID NO: 65505 - DNA, 20 bp, Artificial Sequence
  primer
acagactggctcccacagac

SEQ ID NO: 65506 - DNA, 21 bp, Artificial Sequence
  primer
tggtctgaaccatacccactg

SEQ ID NO: 65507 - DNA, 41 bp, Artificial Sequence
  primer
gtaaaacgacggccagtggaagtgagtatgaggtgaactgc

SEQ ID NO: 65508 - DNA, 39 bp, Artificial Sequence
  primer
gtaaaacgacggccagtgctgaaatgtactgaatccacc

SEQ ID NO: 65509 - DNA, 20 bp, Artificial Sequence
  primer
gagacggagtgagaccctgt

SEQ ID NO: 65510 - DNA, 37 bp, Artificial Sequence
  primer
gtaaaacgacggccagtagctacactgccacattgcc

SEQ ID NO: 65511 - DNA, 20 bp, Artificial Sequence
  primer
tgacttcgtgatctccctgc

SEQ ID NO: 65512 - DNA, 21 bp, Artificial Sequence
  primer
atgcttcaggtatttgtgccc

SEQ ID NO: 65513 - DNA, 38 bp, Artificial Sequence
  primer
gtaaaacgacggccagtatcgctccttccctcttcaac

SEQ ID NO: 65514 - DNA, 21 bp, Artificial Sequence
  primer
ttgtccgaggagttgtctcac

SEQ ID NO: 65515 - DNA, 20 bp, Artificial Sequence
  primer
acacacagcttggagcaacc

SEQ ID NO: 65516 - DNA, 23 bp, Artificial Sequence
  primer
tctcattggataggctgtagacc

SEQ ID NO: 65517 - DNA, 40 bp, Artificial Sequence
  primer
gtaaaacgacggccagtcatgttcttcatgcttcataccc

SEQ ID NO: 65518 - DNA, 24 bp, Artificial Sequence
  primer
aatggtcctgaggagaatgtattg

SEQ ID NO: 65519 - DNA, 36 bp, Artificial Sequence
  primer
gtaaaacgacggccagtctggcctcaagcaatcctc

SEQ ID NO: 65520 - DNA, 20 bp, Artificial Sequence
  primer
agtgtggcagagggtgtgtc

SEQ ID NO: 65521 - DNA, 22 bp, Artificial Sequence
  primer
tcatccattctttcctcctttg

SEQ ID NO: 65522 - DNA, 21 bp, Artificial Sequence
  primer
gtagcctcttgtccgtgaagg

SEQ ID NO: 65523 - DNA, 40 bp, Artificial Sequence
  primer
gtaaaacgacggccagttgcaatttctagaatccaagctg

SEQ ID NO: 65524 - DNA, 38 bp, Artificial Sequence
  primer
gtaaaacgacggccagtcagctgttgaagctaagcgtg

SEQ ID NO: 65525 - DNA, 27 bp, Artificial Sequence
  primer
acctactgactaataaaccaatggaag

SEQ ID NO: 65526 - DNA, 38 bp, Artificial Sequence
  primer
gtaaaacgacggccagtttcagatgccacagttgtcag
